United States Patent Application Publication US 2024/0327476 A1 - sequence listing, part 48

SEQ ID NO: 89905 - DNA, 1314 bp, synthetic construct
  misc_feature 1..1314: note = Description of Artificial Sequence: Synthetic coding sequence
  source 1..1314: mol_type = other DNA
atgggcagaaagaagatccagatcaccagaatcatggacgagagaaacagacagaccctgagaaagaagggcctgaacggctgcgagagccccgacgccgacgactacttcgagcacagccccctgagcgaggacagattcagcaagctgaacgaggacagcgacttcatcttcaagagaggcccccccggcctgcccccccagaacttcagcatgagcgtgaccgtgcccgtgaccagccccaacgccctgagctacaccaaccccggcagcagcctggtgagccccagcctggccgccagcagcaccctgaccgacagcagcatgctgagccccccccagaccaccctgcacagaaacgtgagccccggcgccccccagagaccccccagcaccggcaacgccggcggcatgctgagcaccaccgacctgaccgtgcccaacggcgccggcagcagccccgtgggcaacggcttcgtgaacagcagagccagccccaacctgatcggcgccaccggcgccaacagcctgggcaaggtgatgcccaccaagagcccccccccccccggcggcggcaacctgggcatgaacagcagaaagcccgacctgagagtggtgatcccccccagcagcaagggcatgatgccccccctgagcgaggaggaggagctggagctgaacacccagagaatcagcagcagccaggccacccagcccctggccacccccgtggtgagcgtgaccacccccagcctgcccccccagggcctggtgtacagcgccatgcccaccgcctacaacaccgactacagcctgaccagcgccgacctgagcgccctgcagggcttcaacagccccggcatgctgagcctgggccaggtgagcgcctggcagcagcaccacctgggccaggccgccctgagcagcctggtggccggcggccagctgagccagggcagcaacctgagcatcaacaccaaccagaacatcagcatcaagagcgagcccatcagcccccccagagacagaatgacccccagcggcttccagcagcagcagcagcagcagcagcagcagcagccccccccccccccccagccccagccccagcccccccagccccagcccagacaggagatgggcagaagccccgtggacagcctgagcagcagcagcagcagctacgacggcagcgacagagaggaccccagaggcgacttccacagccccatcgtgctgggcagaccccccaacaccgaggacagagagagccccagcgtgaagagaatgagaatggacgcctgggtgacctag

SEQ ID NO: 89906 - DNA, 234 bp, synthetic construct
  misc_feature 1..234: note = Description of Artificial Sequence: Synthetic coding sequence
  source 1..234: mol_type = other DNA
atgggcagaaagaagatccagatcaccagaatcatggacgagagaaacagacaggtgaccttcaccaagagaaagttcggcctgatgaagaaggcctacgagctgagcgtgctgtgcgactgcgagatcgccctgatcatcttcaacagcagcaacaagctgttccagtacgccagcaccgacatggacaaggtgctgctgaagtacaccgagtacaacgagccccacgagtag

SEQ ID NO: 89907 - DNA, 258 bp, synthetic construct
  misc_feature 1..258: note = Description of Artificial Sequence: Synthetic coding sequence
  source 1..258: mol_type = other DNA
atgggcagaaagaagatccagatcaccagaatcatggacgagagaaacagacaggtgaccttcaccaagagaaagttcggcctgatgaagaaggcctacgagctgagcgtgctgtgcgactgcgagatcgccctgatcatcttcaacagcagcaacaagctgttccagtacgccagcaccgacatggacaaggtgctgctgaagtacaccgagtacaacgagccccacgagagcagaaccaacagcgacatcgtgtag

SEQ ID NO: 89908 - DNA, 1107 bp, synthetic construct
  misc_feature 1..1107: note = Description of Artificial Sequence: Synthetic coding sequence
  source 1..1107: mol_type = other DNA
atgggcagaaagaagatccagatcagcagaatcctggaccagagaaacagacaggtgaccttcaccaagagaaagttcggcctgatgaagaaggcctacgagctgagcgtgctgtgcgactgcgagatcgccctgatcatcttcaacagcgccaacagactgttccagtacgccagcaccgacatggacagagtgctgctgaagtacaccgagtacagcgagccccacgagagcagaaccaacaccgacatcctggagaccctgaagagaagaggcatcggcctggacggccccgagctggagcccgacgagggccccgaggagcccggcgagaagttcagaagactggccggcgagggcggcgaccccgccctgcccagacccagactgtaccccgccgcccccgccatgcccagccccgacgtggtgtacggcgccctgcccccccccggctgcgaccccagcggcctgggcgaggccctgcccgcccagagcagacccagccccttcagacccgccgcccccaaggccggcccccccggcctggtgcaccccctgttcagccccagccacctgaccagcaagacccccccccccctgtacctgcccaccgagggcagaagaagcgacctgcccggcggcctggccggccccagaggcggcctgaacaccagcagaagcctgtacagcggcctgcagaacccctgcagcaccgccacccccggcccccccctgggcagcttccccttcctgcccggcggcccccccgagtacggcctgggcgaccccccccccccccccggcctgctgcagccccccaccctggccccctggcagcccagcagaggcgacggcccccccgccgtgagcagccagcccagcggcggcagaagcctgggcgaggagggcccccccaccagaggcgccagcccccccaccccccccgtgagcatcaagagcgagagactgagccccgcccccggcggccccggcgacttccccaagaccttcccctaccccctgctgctggccagaagcctggccgagcccctgagacccggccccgccctgagaagactgcccctggccgacggctggcccagatag

SEQ ID NO: 89909 - DNA, 894 bp, synthetic construct
  misc_feature 1..894: note = Description of Artificial Sequence: Synthetic coding sequence
  source 1..894: mol_type = other DNA
atgggcagaaagaagatccagatcagcagaatcctggaccagagaaacagacaggtgaccttcaccaagagaaagttcggcctgatgaagaaggcctacgagctgagcgtgctgtgcgactgcgagatcgccctgatcatcttcaacagcgccaacagactgttccagtacgccagcaccgacatggacagagtgctgctgaagtacaccgagtacagcgagccccacgagagcagaaccaacaccgacatcctggaggtgccccagaccctgaagagaagaggcatcggcctggacggccccgagctggagcccgacgagggccccgaggagcccggcgagaagttcagaagactggccggcgagggcggcgaccccgccctgcccagacccagactgtaccccgccgcccccgccatgcccagccccgacgtggtgtacggcgccctgcccccccccggctgcgaccccagcggcctgggcgaggccctgcccgcccagagcagacccagccccttcagacccgccgcccccaaggccggcccccccggcctggtgcaccccctgttcagccccagccacctgaccagcaagacccccccccccctgtacctgcccaccgagggcagaagaagcgacctgcccggcggcctggccggccccagaggcggcctgaacaccagcagaagcctgtacagcggcctgcagaacccctgcagcaccgccacccccggcccccccctgggcagcttccccttcctgcccggcggcccccccgagtacggcctgggcgaccccccccccccccccggcctgctgcagccccccaccctggccccctggcagcccagcagaggcgacggcccccccgccgtgagcagccagcccagatag

SEQ ID NO: 89910 - DNA, 1107 bp, synthetic construct; identical to SEQ ID NO: 89908
  misc_feature 1..1107: note = Description of Artificial Sequence: Synthetic coding sequence
  source 1..1107: mol_type = other DNA

SEQ ID NO: 89911 - DNA, 1098 bp, synthetic construct
  misc_feature 1..1098: note = Description of Artificial Sequence: Synthetic coding sequence
  source 1..1098: mol_type = other DNA
atgggcagaaagaagatccagatcagcagaatcctggaccagagaaacagacaggtgaccttcaccaagagaaagttcggcctgatgaagaaggcctacgagctgagcgtgctgtgcgactgcgagatcgccctgatcatcttcaacagcgccaacagactgttccagtacgccagcaccgacatggacagagtgctgctgaagtacaccgagtacagcgagccccacgagagcagaaccaacaccgacatcctggagaccctgaagagaagaggcatcggcctggacggccccgagctggagcccgacgagggccccgaggagcccggcgagaagttcagaagactggccggcgagggcggcgaccccgccctgcccagacccagactgtaccccgccgcccccgccatgcccagccccgacgtggtgtacggcgccctgcccccccccggctgcgaccccagcggcctgggcgaggccctgcccgcccagagcagacccagccccttcagacccgccgcccccaaggccggcccccccggcctggtgcaccccctgttcagccccagccacctgaccagcaagacccccccccccctgtacctgcccaccgagggcagaagaagcgacctgcccggcggcctggccggccccagaggcggcctgaacaccagcagaagcctgtacagcggcctgcagaacccctgcagcaccgccacccccggcccccccctgggcagcttccccttcctgcccggcggcccccccgtgggcgccgaggcctgggccagaagagtgccccagcccgccgccccccccagaagacccccccagagcgccagcagcctgagcgccagcctgagaccccccggcgcccccgccaccttcctgagacccagccccatcccctgcagcagccccggcccctggcagagcctgtgcggcctgggccccccctgcgccggctgcccctggcccaccgccggccccggcagaagaagccccggcggcaccagccccgagagaagccccggcaccgccagagccagaggcgaccccaccagcctgcaggccagcagcgagaagacccagcagtag

SEQ ID NO: 89912 - DNA, 1392 bp, synthetic construct
  misc_feature 1..1392: note = Description of Artificial Sequence: Synthetic coding sequence
  source 1..1392: mol_type = other DNA
atgggcagaaagaagatccagatcaccagaatcatggacgagagaaacagacaggtgaccttcaccaagagaaagttcggcctgatgaagaaggcctacgagctgagcgtgctgtgcgactgcgagatcgccctgatcatcttcaacagcaccaacaagctgttccagtacgccagcaccgacatggacaaggtgctgctgaagtacaccgagtacaacgagccccacgagagcagaaccaacagcgacatcgtggaggccctgaacaagaaggagaacaagggctgcgagagccccgaccccgacagcagctacgccctgacccccagaaccgaggagaagtacaagaagatcaacgaggagttcgacaacatgatcaagagccacaagatccccgccgtgcccccccccaacttcgagatgcccgtgagcatccccgtgagcagccacaacagcctggtgtacagcaaccccgtgagcagcctgggcaaccccaacctgctgcccctggcccaccccagcctgcagagaaacagcatgagccccggcgtgacccacagaccccccagcgccggcaacaccggcggcctgatgggcggcgacctgaccagcggcgccggcaccagcgccggcaacggctacggcaaccccagaaacagccccggcctgctggtgagccccggcaacctgaacaagaacatgcaggccaagagccccccccccatgaacctgggcatgaacaacagaaagcccgacctgagagtgctgatcccccccggcagcaagaacaccatgcccagcgtgaaccagagaatcaacaacagccagagcgcccagagcctggccacccccgtggtgagcgtggccacccccaccctgcccggccagggcatgggcggctaccccagcgccatcagcaccacctacggcaccgagtacagcctgagcagcgccgacctgagcagcctgagcggcttcaacaccgccagcgccctgcacctgggcagcgtgaccggctggcagcagcagcacctgcacaacatgccccccagcgccctgagccagctgggcgcctgcaccagcacccacctgagccagagcagcaacctgagcctgcccagcacccagagcctgaacatcaagagcgagcccgtgagcccccccagagacagaaccaccacccccagcagatacccccagcacaccagacacgaggccggcagaagccccgtggacagcctgagcagctgcagcagcagctacgacggcagcgacagagaggaccacagaaacgagttccacagccccatcggcctgaccagacccagccccgacgagagagagagccccagcgtgaagagaatgagactgagcgagggctgggccacctag

SEQ ID NO: 89913 - DNA, 1422 bp, synthetic construct
  misc_feature 1..1422: note = Description of Artificial Sequence: Synthetic coding sequence
  source 1..1422: mol_type = other DNA
atgggcagaaagaagatccagatcaccagaatcatggacgagagaaacagacaggtgaccttcaccaagagaaagttcggcctgatgaagaaggcctacgagctgagcgtgctgtgcgactgcgagatcgccctgatcatcttcaacagcaccaacaagctgttccagtacgccagcaccgacatggacaaggtgctgctgaagtacaccgagtacaacgagccccacgagagcagaaccaacagcgacatcgtggagaccctgagaaagaagggcctgaacggctgcgacagccccgaccccgacgccgacgacagcgtgggccacagccccgagagcgaggacaagtacagaaagatcaacgaggacatcgacctgatgatcagcagacagagactgtgcgccgtgcccccccccaacttcgagatgcccgtgagcatccccgtgagcagccacaacagcctggtgtacagcaaccccgtgagcagcctgggcaaccccaacctgctgcccctggcccaccccagcctgcagagaaacagcatgagccccggcgtgacccacagaccccccagcgccggcaacaccggcggcctgatgggcggcgacctgaccagcggcgccggcaccagcgccggcaacggctacggcaaccccagaaacagccccggcctgctggtgagccccggcaacctgaacaagaacatgcaggccaagagccccccccccatgaacctgggcatgaacaacagaaagcccgacctgagagtgctgatcccccccggcagcaagaacaccatgcccagcgtgagcgaggacgtggacctgctgctgaaccagagaatcaacaacagccagagcgcccagagcctggccacccccgtggtgagcgtggccacccccaccctgcccggccagggcatgggcggctaccccagcgccatcagcaccacctacggcaccgagtacagcctgagcagcgccgacctgagcagcctgagcggcttcaacaccgccagcgccctgcacctgggcagcgtgaccggctggcagcagcagcacctgcacaacatgccccccagcgccctgagccagctgggcgcctgcaccagcacccacctgagccagagcagcaacctgagcctgcccagcacccagagcctgaacatcaagagcgagcccgtgagcccccccagagacagaaccaccacccccagcagatacccccagcacaccagacacgaggccggcagaagccccgtggacagcctgagcagctgcagcagcagctacgacggcagcgacagagaggaccacagaaacgagttccacagccccatcggcctgaccagacccagccccgacgagagagagagccccagcgtgaagagaatgagactgagcgagggctgggccacctag

SEQ ID NO: 89914 - DNA, 297 bp, synthetic construct
  misc_feature 1..297: note = Description of Artificial Sequence: Synthetic coding sequence
  source 1..297: mol_type = other DNA
atgggcagaaagaagatccagatcaccagaatcatggacgagagaaacagacaggtgaccttcaccaagagaaagttcggcctgatgaagaaggcctacgagctgagcgtgctgtgcgactgcgagatcgccctgatcatcttcaacagcaccaacaagctgttccagtacgccagcaccgacatggacaaggtgctgctgaagtacaccgagtacaacgagccccacgagagcagaaccaacagcgacatcgtggagaccctgagaaagaagggcctgaacggctgcgacagctag

SEQ ID NO: 89915 - DNA, 390 bp, synthetic construct
  misc_feature 1..390: note = Description of Artificial Sequence: Synthetic coding sequence
  source 1..390: mol_type = other DNA
atgggcagaaagaagatccagatcaccagaatcatggacgagagaaacagacaggtgaccttcaccaagagaaagttcggcctgatgaagaaggcctacgagctgagcgtgctgtgcgactgcgagatcgccctgatcatcttcaacagcaccaacaagctgttccagtacgccagcaccgacatggacaaggtgctgctgaagtacaccgagtacaacgagccccacgagagcagaaccaacagcgacatcgtggagaccctgagaaagaagggcctgaacggctgcgacagccccgaccccgacgccgacgacagcgtgggccacagccccgagagcgaggacaagtacagaaagatcaacgaggacatcgacctgatgatcagctag

SEQ ID NO: 89916 - DNA, 264 bp, synthetic construct
  misc_feature 1..264: note = Description of Artificial Sequence: Synthetic coding sequence
  source 1..264: mol_type = other DNA
atgggcagaaagaagatccagatcaccagaatcatggacgagagaaacagacaggtgaccttcaccaagagaaagttcggcctgatgaagaaggcctacgagctgagcgtgctgtgcgactgcgagatcgccctgatcatcttcaacagcaccaacaagctgttccagtacgccagcaccgacatggacaaggtgctgctgaagtacaccgagtacaacgagccccacgagagcagaaccaacagcgacatcgtggagacctag

SEQ ID NO: 89917 - DNA, 1422 bp, synthetic construct
  misc_feature 1..1422: note = Description of Artificial Sequence: Synthetic coding sequence
  source 1..1422: mol_type = other DNA
atgggcagaaagaagatccagatcaccagaatcatggacgagagaaacagacaggtgaccttcaccaagagaaagttcggcctgatgaagaaggcctacgagctgagcgtgctgtgcgactgcgagatcgccctgatcatcttcaacagcaccaacaagctgttccagtacgccagcaccgacatggacaaggtgctgctgaagtacaccgagtacaacgagccccacgagagcagaaccaacagcgacatcgtggagaccctgagaaagaagggcctgaacggctgcgacagccccgaccccgacgccgacgacagcgtgggccacagccccgagagcgaggacaagtacagaaagatcaacgaggacatcgacctgatgatcagcagacagagactgtgcgccgtgcccccccccaacttcgagatgcccgtgagcatccccgtgagcagccacaacagcctggtgtacagcaaccccgtgagcagcctgggcaaccccaacctgctgcccctggcccaccccagcctgcagagaaacagcatgagccccggcgtgacccacagaccccccagcgccggcaacaccggcggcctgatgggcggcgacctgaccagcggcgccggcaccagcgccggcaacggctacggcaaccccagaaacagccccggcctgctggtgagccccggcaacctgaacaagaacatgcaggccaagagccccccccccatgaacctgggcatgaacaacagaaagcccgacctgagagtgctgatcccccccggcagcaagaacaccatgcccagcgtggtgatccagaactacatcctgaagaaccagagaatcaacaacagccagagcgcccagagcctggccacccccgtggtgagcgtggccacccccaccctgcccggccagggcatgggcggctaccccagcgccatcagcaccacctacggcaccgagtacagcctgagcagcgccgacctgagcagcctgagcggcttcaacaccgccagcgccctgcacctgggcagcgtgaccggctggcagcagcagcacctgcacaacatgccccccagcgccctgagccagctgggcgcctgcaccagcacccacctgagccagagcagcaacctgagcctgcccagcacccagagcctgaacatcaagagcgagcccgtgagcccccccagagacagaaccaccacccccagcagatacccccagcacaccagacacgaggccggcagaagccccgtggacagcctgagcagctgcagcagcagctacgacggcagcgacagagaggaccacagaaacgagttccacagccccatcggcctgaccagacccagccccgacgagagagagagccccagcgtgaagagaatgagactgagcgagggctgggccacctag

SEQ ID NO: 89918 - DNA, 684 bp, synthetic construct
  misc_feature 1..684: note = Description of Artificial Sequence: Synthetic coding sequence
  source 1..684: mol_type = other DNA
atgggcagaaagaagatccagatcaccagaatcatggacgagagaaacagacaggtgaccttcaccaagagaaagttcggcctgatgaagaaggcctacgagctgagcgtgctgtgcgactgcgagatcgccctgatcatcttcaacagcaccaacaagctgttccagtacgccagcaccgacatggacaaggtgctgctgaagtacaccgagtacaacgagccccacgagagcagaaccaacagcgacatcgtggaggccctgaacaagaaggagaacaagggctgcgagagccccgaccccgacagcagctacgccctgacccccagaaccgaggagaagtacaagaagatcaacgaggagttcgacaacatgatcaagagccacaagatccccgccgtgcccccccccaacttcgagatgcccgtgagcatccccgtgagcagccacaacagcctggtgtacagcaaccccgtgagcagcctgggcaaccccaacctgctgcccctggcccaccccagcctgcagagaaacagcatgagccccggcgtgacccacagaccccccagcgccggcaacaccggcggcctgatgggcggcgacctgaccagcggcgccggcaccagcgccggcaacggctacggcaaccccagaaacagccccggcctgctggtgagcccctag

SEQ ID NO: 89919 - DNA, 363 bp, synthetic construct
  misc_feature 1..363: note = Description of Artificial Sequence: Synthetic coding sequence
  source 1..363: mol_type = other DNA
atgggcagaaagaagatccagatcaccagaatcatggacgagagaaacagacaggtgaccttcaccaagagaaagttcggcctgatgaagaaggcctacgagctgagcgtgctgtgcgactgcgagatcgccctgatcatcttcaacagcaccaacaagctgttccagtacgccagcaccgacatggacaaggtgctgctgaagtacaccgagtacaacgagccccacgagagcagaaccaacagcgacatcgtggaggccctgaacaagaaggagaacaagggctgcgagagccccgaccccgacagcagctacgccctgacccccagaaccgaggagaagtacaagaagatcaacgagtag

SEQ ID NO: 89920 - DNA, 381 bp, synthetic construct
  misc_feature 1..381: note = Description of Artificial Sequence: Synthetic coding sequence
  source 1..381: mol_type = other DNA
atgggcagaaagaagatccagatcaccagaatcatggacgagagaaacagacaggtgaccttcaccaagagaaagttcggcctgatgaagaaggcctacgagctgagcgtgctgtgcgactgcgagatcgccctgatcatcttcaacagcaccaacaagctgttccagtacgccagcaccgacatggacaaggtgctgctgaagtacaccgagtacaacgagccccacgagagcagaaccaacagcgacatcgtggagaccctgagaaagaagggcctgaacggctgcgacagccccgaccccgacgccgacgacagcgtgggccacagccccgagagcgaggacaagtacagaaagatcaacgaggacatcgacctgtag

SEQ ID NO: 89921 - DNA, 87 bp, synthetic construct
  misc_feature 1..87: note = Description of Artificial Sequence: Synthetic coding sequence
  source 1..87: mol_type = other DNA
atgggcagaaagaagatccagatcaccagaatcatggacgagagaaacagacaggtgaccttcaccaagagaaagttcggcctgtag

SEQ ID NO: 89922 - DNA, 1398 bp, synthetic construct
  misc_feature 1..1398: note = Description of Artificial Sequence: Synthetic coding sequence
  source 1..1398: mol_type = other DNA
atgggcagaaagaagatccagatcaccagaatcatggacgagagaaacagacaggtgaccttcaccaagagaaagttcggcctgatgaagaaggcctacgagctgagcgtgctgtgcgactgcgagatcgccctgatcatcttcaacagcaccaacaagctgttccagtacgccagcaccgacatggacaaggtgctgctgaagtacaccgagtacaacgagccccacgagagcagaaccaacagcgacatcgtggagaccctgagaaagaagggcctgaacggctgcgacagccccgaccccgacgccgacgacagcgtgggccacagccccgagagcgaggacaagtacagaaagatcaacgaggacatcgacctgatgatcagcagacagagactgtgcgccgtgcccccccccaacttcgagatgcccgtgagcatccccgtgagcagccacaacagcctggtgtacagcaaccccgtgagcagcctgggcaaccccaacctgctgcccctggcccaccccagcctgcagagaaacagcatgagccccggcgtgacccacagaccccccagcgccggcaacaccggcggcctgatgggcggcgacctgaccagcggcgccggcaccagcgccggcaacggctacggcaaccccagaaacagccccggcctgctggtgagccccggcaacctgaacaagaacatgcaggccaagagccccccccccatgaacctgggcatgaacaacagaaagcccgacctgagagtgctgatcccccccggcagcaagaacaccatgcccagcgtgaaccagagaatcaacaacagccagagcgcccagagcctggccacccccgtggtgagcgtggccacccccaccctgcccggccagggcatgggcggctaccccagcgccatcagcaccacctacggcaccgagtacagcctgagcagcgccgacctgagcagcctgagcggcttcaacaccgccagcgccctgcacctgggcagcgtgaccggctggcagcagcagcacctgcacaacatgccccccagcgccctgagccagctgggcgcctgcaccagcacccacctgagccagagcagcaacctgagcctgcccagcacccagagcctgaacatcaagagcgagcccgtgagcccccccagagacagaaccaccacccccagcagatacccccagcacaccagacacgaggccggcagaagccccgtggacagcctgagcagctgcagcagcagctacgacggcagcgacagagaggaccacagaaacgagttccacagccccatcggcctgaccagacccagccccgacgagagagagagccccagcgtgaagagaatgagactgagcgagggctgggccacctag

SEQ ID NO: 89923 - DNA, 729 bp, synthetic construct
  misc_feature 1..729: note = Description of Artificial Sequence: Synthetic coding sequence
  source 1..729: mol_type = other DNA
atgggcagaaagaagatccagatcaccagaatcatggacgagagaaacagacaggtgaccttcaccaagagaaagttcggcctgatgaagaaggcctacgagctgagcgtgctgtgcgactgcgagatcgccctgatcatcttcaacagcaccaacaagctgttccagtacgccagcaccgacatggacaaggtgctgctgaagtacaccgagtacaacgagccccacgagagcagaaccaacagcgacatcgtggaggccctgaacaagaaggagaacaagggctgcgagagccccgaccccgacagcagctacgccctgacccccagaaccgaggagaagtacaagaagatcaacgaggagttcgacaacatgatcaagagccacaagatccccgccgtgcccccccccaacttcgagatgcccgtgagcatccccgtgagcagccacaacagcctggtgtacagcaaccccgtgagcagcctgggcaaccccaacctgctgcccctggcccaccccagcctgcagagaaacagcatgagccccggcgtgacccacagaccccccagcgccggcaacaccggcggcctgatgggcggcgacctgaccagcggcgccggcaccagcgccggcaacggctacggcaaccccagaaacagccccggcctgctggtgagccccggcaacctgaacaagaacatgcaggccaagagccccccccccatgtag

SEQ ID NO: 89924 - DNA, 1326 bp, synthetic construct
  misc_feature 1..1326: note = Description of Artificial Sequence: Synthetic coding sequence
  source 1..1326: mol_type = other DNA
atgggcagaaagaagatccagatcaccagaatcatggacgagagaaacagacaggtgaccttcaccaagagaaagttcggcctgatgaagaaggcctacgagctgagcgtgctgtgcgactgcgagatcgccctgatcatcttcaacagcaccaacaagctgttccagtacgccagcaccgacatggacaaggtgctgctgaagtacaccgagtacaacgagccccacgagagcagaaccaacagcgacatcgtggagaccctgagaaagaagggcctgaacggctgcgacagccccgaccccgacgccgacgacagcgtgggccacagccccgagagcgaggacaagtacagaaagatcaacgaggacatcgacctgatgatcagcagacagagactgtgcgccgtgcccccccccaacttcgagatgcccgtgagcatccccgtgagcagccacaacagcctggtgtacagcaaccccgtgagcagcctgggcaaccccaacctgctgcccctggcccaccccagcctgcagagaaacagcatgagccccggcgtgacccacagaccccccagcgccggcaacaccggcggcctgatgggcggcgacctgaccagcggcgccggcaccagcgccggcaacggctacggcaaccccagaaacagccccggcctgctggtgagccccggcaacctgaacaagaacatgcaggccaagagccccccccccatgaacctgggcatgaacaacagaaagcccgacctgagagtgctgatcccccccggcagcaagaacaccatgcccagcgtgagcgaggacgtggacctgctgctgaaccagagaatcaacaacagccagagcgcccagagcctggccacccccgtggtgagcgtggccacccccaccctgcccggccagggcatgggcggctaccccagcgccatcagcaccacctacggcaccgagtacagcctgagcagcgccgacctgagcagcctgagcggcttcaacaccgccagcgccctgcacctgggcagcgtgaccggctggcagcagcagcacctgcacaacatgccccccagcgccctgagccagctgggcgacagaaccaccacccccagcagatacccccagcacaccagacacgaggccggcagaagccccgtggacagcctgagcagctgcagcagcagctacgacggcagcgacagagaggaccacagaaacgagttccacagccccatcggcctgaccagacccagccccgacgagagagagagccccagcgtgaagagaatgagactgagcgagggctgggccacctag

SEQ ID NO: 89925 - DNA, 1422 bp, synthetic construct; identical to SEQ ID NO: 89913
  misc_feature 1..1422: note = Description of Artificial Sequence: Synthetic coding sequence
  source 1..1422: mol_type = other DNA

SEQ ID NO: 89926 - DNA, 1254 bp, synthetic construct
  misc_feature 1..1254: note = Description of Artificial Sequence: Synthetic coding sequence
  source 1..1254: mol_type = other DNA
atgggcagaaagaagatccagatcaccagaatcatggacgagagaaacagacaggtgaccttcaccaagagaaagttcggcctgatgaagaaggcctacgagctgagcgtgctgtgcgactgcgagatcgccctgatcatcttcaacagcaccaacaagctgttccagtacgccagcaccgacatggacaaggtgctgctgaagtacaccgagtacaacgagccccacgagagcagaaccaacagcgacatcgtggaggccgtgcccccccccaacttcgagatgcccgtgagcatccccgtgagcagccacaacagcctggtgtacagcaaccccgtgagcagcctgggcaaccccaacctgctgcccctggcccaccccagcctgcagagaaacagcatgagccccggcgtgacccacagaccccccagcgccggcaacaccggcggcctgatgggcggcgacctgaccagcggcgccggcaccagcgccggcaacggctacggcaaccccagaaacagccccggcctgctggtgagccccggcaacctgaacaagaacatgcaggccaagagccccccccccatgaacctgggcatgaacaacagaaagcccgacctgagagtgctgatcccccccggcagcaagaacaccatgcccagcgtgaaccagagaatcaacaacagccagagcgcccagagcctggccacccccgtggtgagcgtggccacccccaccctgcccggccagggcatgggcggctaccccagcgccatcagcaccacctacggcaccgagtacagcctgagcagcgccgacctgagcagcctgagcggcttcaacaccgccagcgccctgcacctgggcagcgtgaccggctggcagcagcagcacctgcacaacatgccccccagcgccctgagccagctgggcgcctgcaccagcacccacctgagccagagcagcaacctgagcctgcccagcacccagagcctgaacatcaagagcgagcccgtgagcccccccagagacagaaccaccacccccagcagatacccccagcacaccagacacgaggccggcagaagccccgtggacagcctgagcagctgcagcagcagctacgacggcagcgacagagaggaccacagaaacgagttccacagccccatcggcctgaccagacccagccccgacgagagagagagccccagcgtgaagagaatgagactgagcgagggctgggccacctag

SEQ ID NO: 89927 - DNA, 1452 bp, synthetic construct
  misc_feature 1..1452: note = Description of Artificial Sequence: Synthetic coding sequence
  source 1..1452: mol_type = other DNA
atgggcagaaagaagatccagatcaccagaatcatggacgagagaaacagacaggtgaccttcaccaagagaaagttcggcctgatgaagaaggcctacgagctgagcgtgctgtgcgactgcgagatcgccctgatcatcttcaacagcaccaacaagctgttccagtacgccagcaccgacatggacaaggtgctgctgaagtacaccgagtacaacgagccccacgagagcagaaccaacagcgacatcgtggagaccctgagaaagaagggcctgaacggctgcgacagccccgaccccgacgccgacgacagcgccctgaacaagaaggagaacaagggctgcgagagccccgaccccgacagcagctacgccctgacccccagaaccgaggagaagtacaagaagatcaacgaggagttcgacaacatgatcaagagccacaagatccccgccgtgcccccccccaacttcgagatgcccgtgagcatccccgtgagcagccacaacagcctggtgtacagcaaccccgtgagcagcctgggcaaccccaacctgctgcccctggcccaccccagcctgcagagaaacagcatgagccccggcgtgacccacagaccccccagcgccggcaacaccggcggcctgatgggcggcgacctgaccagcggcgccggcaccagcgccggcaacggctacggcaaccccagaaacagccccggcctgctggtgagccccggcaacctgaacaagaacatgcaggccaagagccccccccccatgaacctgggcatgaacaacagaaagcccgacctgagagtgctgatcccccccggcagcaagaacaccatgcccagcgtgaaccagagaatcaacaacagccagagcgcccagagcctggccacccccgtggtgagcgtggccacccccaccctgcccggccagggcatgggcggctaccccagcgccatcagcaccacctacggcaccgagtacagcctgagcagcgccgacctgagcagcctgagcggcttcaacaccgccagcgccctgcacctgggcagcgtgaccggctggcagcagcagcacctgcacaacatgccccccagcgccctgagccagctgggcgcctgcaccagcacccacctgagccagagcagcaacctgagcctgcccagcacccagagcctgaacatcaagagcgagcccgtgagcccccccagagacagaaccaccacccccagcagatacccccagcacaccagacacgaggccggcagaagccccgtggacagcctgagcagctgcagcagcagctacgacggcagcgacagagaggaccacagaaacgagttccacagccccatcggcctgaccagacccagccccgacgagagagagagccccagcgtgaagagaatgagactgagcgagggctgggccacctag

SEQ ID NO: 89928 - DNA, 1563 bp, synthetic construct
  misc_feature 1..1563: note = Description of Artificial Sequence: Synthetic coding sequence
  source 1..1563: mol_type = other DNA
atgggcagaaagaagatccagatccagagaatcaccgacgagagaaacagacaggtgaccttcaccaagagaaagttcggcctgatgaagaaggcctacgagctgagcgtgctgtgcgactgcgagatcgccctgatcatcttcaaccacagcaacaagctgttccagtacgccagcaccgacatggacaaggtgctgctgaagtacaccgagtacaacgagccccacgagagcagaaccaacgccgacatcatcgaggccctgcacaagaagcacagagagtgcgagagccccgaggtggacgaggtgttcgccctgaccccccagaccgaggagaagtacaagaagatcgacgaggagttcgacaagatgatgcagagctacagactggccagcaccgtgcccgcccccaacttcgccatgcccgtgaccgtgcccgtgagcaaccagagcagcctgcagttcagcaaccccagcggcagcctggtgacccccagcctggtgaccagcagcctgaccgaccccagactgctgagcccccagcagcccgccctgcagagaaacagcgtgagccccggcctgccccagagacccgccagcgccggcgccatgctgggcggcgacctgaacagcgccaacggcgcctgccccagccccgtgggcaacggctacgtgagcgccagagccagccccggcctgctgcccgtggccaacggcaacagcctgaacaaggtgatccccgccaagagcccccccccccccacccacagcacccagctgggcgcccccagcagaaagcccgacctgagagtgatcaccagccaggccggcaagggcctgatgcaccacctgaccgaggaccacctggacctgaacaacgcccagagactgggcgtgagccagagcacccacagcctgaccacccccgtggtgagcgtggccacccccagcctgctgagccagggcctgcccttcagcagcatgcccaccgcctacaacaccgactaccagctgaccagcgccgagctgagcagcctgcccgccttcagcagccccggcggcctgagcctgggcaacgtgaccgcctggcagcagccccagcagccccagcagccccagcagccccagcccccccagcagcagcccccccagccccagcagccccagccccagcagccccagcagccccagcagcccccccagcagcagagccacctggtgcccgtgagcctgagcaacctgatccccggcagccccctgccccacgtgggcgccgccctgaccgtgaccacccacccccacatcagcatcaagagcgagcccgtgagccccagcagagagagaagccccgccccccccccccccgccgtgttccccgccgccagacccgagcccggcgacggcctgagcagccccgccggcggcagctacgagaccggcgacagagacgacggcagaggcgacttcggccccaccctgggcctgctgagacccgcccccgagcccgaggccgagggcagcgccgtgaagagaatgagactggacacctggaccctgaagtag

SEQ ID NO: 89929 - DNA, 1566 bp, synthetic construct
  misc_feature 1..1566: note = Description of Artificial Sequence: Synthetic coding sequence
  source 1..1566: mol_type = other DNA
atgggcagaaagaagatccagatccagagaatcaccgacgagagaaacagacaggtgaccttcaccaagagaaagttcggcctgatgaagaaggcctacgagctgagcgtgctgtgcgactgcgagatcgccctgatcatcttcaaccacagcaacaagctgttccagtacgccagcaccgacatggacaaggtgctgctgaagtacaccgagtacaacgagccccacgagagcagaaccaacgccgacatcatcgagaccctgagaaagaagggcttcaacggctgcgacagccccgagcccgacggcgaggacagcctggagcagagccccctgctggaggacaagtacagaagagccagcgaggagctggacggcctgttcagaagatacggcagcaccgtgcccgcccccaacttcgccatgcccgtgaccgtgcccgtgagcaaccagagcagcctgcagttcagcaaccccagcggcagcctggtgacccccagcctggtgaccagcagcctgaccgaccccagactgctgagcccccagcagcccgccctgcagagaaacagcgtgagccccggcctgccccagagacccgccagcgccggcgccatgctgggcggcgacctgaacagcgccaacggcgcctgccccagccccgtgggcaacggctacgtgagcgccagagccagccccggcctgctgcccgtggccaacggcaacagcctgaacaaggtgatccccgccaagagcccccccccccccacccacagcacccagctgggcgcccccagcagaaagcccgacctgagagtgatcaccagccaggccggcaagggcctgatgcaccacctgaccgaggaccacctggacctgaacaacgcccagagactgggcgtgagccagagcacccacagcctgaccacccccgtggtgagcgtggccacccccagcctgctgagccagggcctgcccttcagcagcatgcccaccgcctacaacaccgactaccagctgaccagcgccgagctgagcagcctgcccgccttcagcagccccggcggcctgagcctgggcaacgtgaccgcctggcagcagccccagcagccccagcagccccagcagccccagcccccccagcagcagcccccccagccccagcagccccagccccagcagccccagcagccccagcagcccccccagcagcagagccacctggtgcccgtgagcctgagcaacctgatccccggcagccccctgccccacgtgggcgccgccctgaccgtgaccacccacccccacatcagcatcaagagcgagcccgtgagccccagcagagagagaagccccgccccccccccccccgccgtgttccccgccgccagacccgagcccggcgacggcctgagcagccccgccggcggcagctacgagaccggcgacagagacgacggcagaggcgacttcggccccaccctgggcctgctgagacccgcccccgagcccgaggccgagggcagcgccgtgaagagaatgagactggacacctggaccctgaagtag

SEQ ID NO: 89930 - DNA, 1428 bp, synthetic construct
  misc_feature 1..1428: note = Description of Artificial Sequence: Synthetic coding sequence
  source 1..1428: mol_type = other DNA
atgggcagaaagaagatccagatccagagaatcaccgacgagagaaacagacaggtgaccttcaccaagagaaagttcggcctgatgaagaaggcctacgagctgagcgtgctgtgcgactgcgagatcgccctgatcatcttcaaccacagcaacaagctgttccagtacgccagcaccgacatggacaaggtgctgctgaagtacaccgagtacaacgagccccacgagagcagaaccaacgccgacatcatcgagagcaccgtgcccgcccccaacttcgccatgcccgtgaccgtgcccgtgagcaaccagagcagcctgcagttcagcaaccccagcggcagcctggtgacccccagcctggtgaccagcagcctgaccgaccccagactgctgagcccccagcagcccgccctgcagagaaacagcgtgagccccggcctgccccagagacccgccagcgccggcgccatgctgggcggcgacctgaacagcgccaacggcgcctgccccagccccgtgggcaacggctacgtgagcgccagagccagccccggcctgctgcccgtggccaacggcaacagcctgaacaaggtgatccccgccaagagcccccccccccccacccacagcacccagctgggcgcccccagcagaaagcccgacctgagagtgatcaccagccaggccggcaagggcctgatgcaccacctgaccgaggaccacctggacctgaacaacgcccagagactgggcgtgagccagagcacccacagcctgaccacccccgtggtgagcgtggccacccccagcctgctgagccagggcctgcccttcagcagcatgcccaccgcctacaacaccgactaccagctgaccagcgccgagctgagcagcctgcccgccttcagcagccccggcggcctgagcctgggcaacgtgaccgcctggcagcagccccagcagccccagcagccccagcagccccagcccccccagcagcagcccccccagccccagcagccccagccccagcagccccagcagccccagcagcccccccagcagcagagccacctggtgcccgtgagcctgagcaacctgatccccggcagccccctgccccacgtgggcgccgccctgaccgtgaccacccacccccacatcagcatcaagagcgagcccgtgagccccagcagagagagaagccccgccccccccccccccgccgtgttccccgccgccagacccgagcccggcgacggcctgagcagccccgccggcggcagctacgagaccggcgacagagacgacggcagaggcgacttcggccccaccctgggcctgctgagacccgcccccgagcccgaggccgagggcagcgccgtgaagagaatgagactggacacctggaccctgaagtag

SEQ ID NO: 89931 - DNA, 1545 bp, synthetic construct
  misc_feature 1..1545: note = Description of Artificial Sequence: Synthetic coding sequence
  source 1..1545: mol_type = other DNA
atgggcagaaagaagatccagatccagagaatcaccgacgagagaaacagacaggtgaccttcaccaagagaaagttcggcctgatgaagaaggcctacgagctgagcgtgctgtgcgactgcgagatcgccctgatcatcttcaaccacagcaacaagctgttccagtacgccagcaccgacatggacaaggtgctgctgaagtacaccgagtacaacgagccccacgagagcagaaccaacgccgacatcatcgagaccctgagaaagaagggcttcaacggctgcgacagccccgagcccgacggcgaggacagcctggagcagagccccctgctggaggacaagtacagaagagccagcgaggagctggacggcctgttcagaagatacggcagcaccgtgcccgcccccaacttcgccatgcccgtgaccgtgcccgtgagcaaccagagcagcctgcagttcagcaaccccagcggcagcctggtgacccccagcctggtgaccagcagcctgaccgaccccagactgctgagcccccagcagcccgccctgcagagaaacagcgtgagccccggcctgccccagagacccgccagcgccggcgccatgctgggcggcgacctgaacagcgccaacggcgcctgccccagccccgtgggcaacggctacgtgagcgccagagccagccccggcctgctgcccgtggccaacggcaacagcctgaacaaggtgatccccgccaagagcccccccccccccacccacagcacccagctgggcgcccccagcagaaagcccgacctgagagtgatcaccagccaggccggcaagggcctgatgcaccacctgaacaacgcccagagactgggcgtgagccagagcacccacagcctgaccacccccgtggtgagcgtggccacccccagcctgctgagccagggcctgcccttcagcagcatgcccaccgcctacaacaccgactaccagctgaccagcgccgagctgagcagcctgcccgccttcagcagccccggcggcctgagcctgggcaacgtgaccgcctggcagcagccccagcagccccagcagccccagcagccccagcccccccagcagcagcccccccagccccagcagccccagccccagcagccccagcagccccagcagcccccccagcagcagagccacctggtgcccgtgagcctgagcaacctgatccccggcagccccctgccccacgtgggcgccgccctgaccgtgaccacccacccccacatcagcatcaagagcgagcccgtgagccccagcagagagagaagccccgccccccccccccccgccgtgttccccgccgccagacccgagcccggcgacggcctgagcagccccgccggcggcagctacgagaccggcgacagagacgacggcagaggcgacttcggccccaccctgggcctgctgagacccgcccccgagcccgaggccgagggcagcgccgtgaagagaatgagactggacacctggaccctgaagtag

SEQ ID NO: 89932 - DNA, 1545 bp, synthetic construct; identical to SEQ ID NO: 89931
  misc_feature 1..1545: note = Description of Artificial Sequence: Synthetic coding sequence
  source 1..1545: mol_type = other DNA

SEQ ID NO: 89933 - DNA, 1533 bp, synthetic construct
  misc_feature 1..1533: note = Description of Artificial Sequence: Synthetic coding sequence
  source 1..1533: mol_type = other DNA
atgggcagaaagaagatccagatccagagaatcaccgacgagagaaacagacaggtgaccttcaccaagagaaagttcggcctgatgaagaaggcctacgagctgagcgtgctgtgcgactgcgagatcgccctgatcatcttcaaccacagcaacaagctgttccagtacgccagcaccgacatggacaaggtgctgctgaagtacaccgagtacaacgagccccacgagagcagaaccaacgccgacatcatcgaggccctgcacaagaagcacagagagtgcgagagccccgaggtggacgaggtgttcgccctgaccccccagaccgaggagaagtacaagaagatcgacgaggagttcgacaagatgatgcagagctacagactggccagcaccgtgcccgcccccaacttcgccatgcccgtgaccgtgcccgtgagcaaccagagcagcctgcagttcagcaaccccagcggcagcctggtgacccccagcctggtgaccagcagcctgaccgaccccagactgctgagcccccagcagcccgccctgcagagaaacagcgtgagccccggcctgccccagagacccgccagcgccggcgccatgctgggcggcgacctgaacagcgccaacggcgcctgccccagccccgtgggcaacggctacgtgagcgccagagccagccccggcctgctgcccgtggccaacggcaacagcctgaacaaggtgatccccgccaagagcccccccccccccacccacagcacccagctgggcgcccccagcagaaagcccgacctgagagtgatcaccagccaggccggcaagggcctgatgcaccacctgaacaacgcccagagactgggcgtgagccagagcacccacagcctgaccacccccgtggtgagcgtggccacccccagcctgctgagccagggcctgcccttcagcagcatgcccaccgcctacaacaccgactaccagctgaccagcgccgagctgagcagcctgcccgccttcagcagccccggcggcctgagcctgggcaacgtgaccgcctggcagcagccccagcagccccagcagccccagcagccccagcccccccagcagcagcccccccagccccagcagccccagccccagcagccccagcagccccagcagcccccccagcagcagagccacctggtgcccgtgagcctgagcaacctgatccccggcagccccctgccccacgtgggcgccgccctgaccgtgaccacccacccccacatcagcatcaagagcgagcccgtgagccccagcagagagagaagccccgccccccccccccccgccgtgttccccgccgccagacccgagcccggcgacggcctgagcagccccgccggcggcagctacgagaccggcgacagagacgacggcagaggcgacttcggccccaccctgggcctgctgagacccgcccccgagcccgaggccgagggcagcgccgtgaagagaatgagactggacacctggtag

SEQ ID NO: 89934 - DNA, 420 bp, synthetic construct
  misc_feature 1..420: note = Description of Artificial Sequence: Synthetic coding sequence
  source 1..420: mol_type = other DNA
atgggcagaaagaagatccagatccagagaatcaccgacgagagaaacagacaggtgaccttcaccaagagaaagttcggcctgatgaagaaggcctacgagctgagcgtgctgtgcgactgcgagatcgccctgatcatcttcaaccacagcaacaagctgttccagtacgccagcaccgacatggacaaggtgctgctgaagtacaccgagtacaacgagccccacgagagcagaaccaacgccgacatcatcgagaccctgagaaagaagggcttcaacggctgcgacagccccgagcccgacggcgaggacagcctggagcagagccccctgctggaggacaagtacagaagagccagcgaggagctggacggcctgttcagaagatacggcggcccctgctggggcgtgacctag

SEQ ID NO: 89935 - DNA, 1410 bp, synthetic construct
  misc_feature 1..1410: note = Description of Artificial Sequence: Synthetic coding sequence
  source 1..1410: mol_type = other DNA
atggccgaggagagagagcccgagctgtacctgaagtggaagcactgcgagacccccggcgtgaagaccctgtgcaacctgaagcactgcgagacccccggcgtgaagaccctgtgcaacctgaagaagctgctgaacagactgcagaaggaccacagagaggacgtgtacctgtacatcagcggccacctgaaccccaacaagctgtaccagccccccgagaccatcctgcagcactggcccaacgcccacagacccaagggcgagagagccagcgaggtgggcgagccccccgccggcaaggtggccagaatgaaggaggccctggcccacttcaccatccacaccgccctggtgcccagcgaggcccaggacacccccctgttcagatacctgaacccccaggccagcctgagccacaccagcgaggaggacttcctgcccgtggaggccgtgagagagggcaaggaggagaagaagggcggcccccccggcagaggcccccccggctggagaagaagagaggagctgagactgcccgacctgaaggtgctgtgctaccaggaggccggcagcagaggcaccagagacagacaccactacgtgagcagctacctggccggcgccaccagcgccgacagatacagaatgttcctgagattccagaaggaggtgctggccaagcaggacctgctgaagaacgacttcaccggcagcaaggccgccgccggccacgagagaaagctgcagcaggagctgcagaagatctgcacctgcagcccccagcagttcaacagactgcacgtgttcggcaaggtgttcgaggacatctgcaacagcagcctgatcttcggcgacctgctgaagaaggtgaaggacgagtacgagctgtacatggccaccctgctggagagccagcccgccgcccagtacgaggccctgctggcccagctgaaggccctgggccagagacccgtgaagaccgccgacatggacctggccagagaggagctgagaatgctggtgaccgccaccaaggccgccctggagcagaacgacagactgagaagcgagctggagatggaggtggccctgctgcagagcgccaaggagagaagcgagagcagcgagaagcacatcatcgacgagaacagactgaccctgaccgagaaggtggagaagaagagatgcgagatcctgagcaagtgggacgagatccaggccctggagaaggagatcaagaccaccctggtgcacaccggcatcagcgacatcaccgagaacagaatcaagagcatcgagcacgaggccatccagctggagaccgagaacatgatcctgaagaagaagatcaagggccccctggagatctaccagggcatctgcaagatcagaggcaacagaagatag

SEQ ID NO: 89936 - DNA, 741 bp, synthetic construct
  misc_feature 1..741: note = Description of Artificial Sequence: Synthetic coding sequence
  source 1..741: mol_type = other DNA
atgtaccaggtgagcggccagagacccagcggctgcgacgccccctacggcgcccccagcgccgcccccggccccgcccagaccctgagcctgctgcccggcctggaggtggtgaccggcagcacccaccccgccgaggccgcccccgaggagggcagcctggaggaggccgccacccccatgccccagggcaacggccccggcatcccccagggcctggacagcaccgacctggacgtgcccaccgaggccgtgacctgccagccccagggcaaccccctgggctgcacccccctgctgcccaacgacagcggccaccccagcgagctgggcggcaccagaagagccggcaacggcgccctgggcggccccaaggcccacagaaagctgcagacccaccccagcctggccagccagggcagcaagaagagcaagagcagcagcaagagcaccaccagccagatccccctgcaggcccaggaggactgctgcgtgcactgcatcctgagctgcctgttctgcgagttcctgaccctgtgcaacatcgtgctggactgcgccacctgcggcagctgcagcagcgaggacagctgcctgtgctgctgctgctgcggcagcggcgagtgcgccgactgcgacctgccctgcgacctggactgcggcatcctggacgcctgctgcgagagcgccgactgcctggagatctgcatggagtgctgcggcctgtgcttcagcagctag

SEQ ID NO: 89937 - DNA, 696 bp, synthetic construct
  misc_feature 1..696: note = Description of Artificial Sequence: Synthetic coding sequence
  source 1..696: mol_type = other DNA
atgtaccaggtgagcggccagagacccagcggctgcgacgccccctacggcgcccccagcgccgcccccggccccgcccagaccctgagcctgctgcccggcctggaggtggtgaccggcagcacccaccccgccgaggccgcccccgaggagggcagcctggaggaggccgccacccccatgccccagggcaacggccccggcatcccccagggcctggacagcaccgacctggacgtgcccaccgaggccgtgacctgccagccccagggcaaccccctgggctgcacccccctgctgcccaacgacagcggccaccccagcgagctgggcggcaccagaagagccggcaacggcgccctgggcggccccaaggcccacagaaagctgcagacccaccccagcctggccagccagggcagcaagaagagcaagagcagcagcaagagcaccaccagccagatccccctgcaggcccaggaggactgctgcgtgcactgcatcctgagctgcctgttctgcgagttcctgaccctgtgcaacatcgtgctggactgcgccacctgcggcagctgcagcagcgaggacagctgcctgtgctgctgctgctgcggcagcggcgagtgcgccgactgcgacctgccctgcgacctggactgcggcatcctggacgcctgctgcgagagcgccgactag

SEQ ID NO: 89938 - DNA, 642 bp, synthetic construct
  misc_feature 1..642: note = Description of Artificial Sequence: Synthetic coding sequence
  source 1..642: mol_type = other DNA
atgtaccaggtgagcggccagagacccagcggctgcgacgccccctacggcgcccccagcgccgcccccggccccgcccagaccctgagcctgctgcccggcctggaggtggtgaccggcagcacccaccccgccgaggccgcccccgaggagggcagcctggaggaggccgccacccccatgccccagggcaacggccccggcatcccccagggcctggacagcaccgacctggacgtgcccaccgaggccgtgacctgccagccccagggcaaccccctgggctgcacccccctgctgcccaacgacagcggccaccccagcgagctgggcggcaccagaagagccggcaacggcgccctgggcggccccaaggcccacagaaagctgcagacccaccccagcctggccagccagggcagcaagaagagcaagagcagcagcaagagcaccaccagccagatccccctgcaggcccaggaggactgctgcgtgcactgcatcctgagctgcctgttctgcgagttcctgaccctgtgcaacatcgtgctggactgcgccacctgcggcagctgcagcagcgaggacagctgcctgtgctgctgctgctgcggcagcggcgagtgcgccgactgcgactag

SEQ ID NO: 89939 - DNA, 297 bp, synthetic construct
  misc_feature 1..297: note = Description of Artificial Sequence: Synthetic coding sequence
  source 1..297: mol_type = other DNA
atgtaccaggtgagcggccagagacccagcggctgcgacgccccctacggcgcccccagcgccgcccccggccccgcccagaccctgagcctgctgcccggcctggaggtggtgaccggcagcacccaccccgccgaggccgcccccgaggagggcagcctggaggaggccgccacccccatgccccagggcaacggccccggcatcccccagggcctggacagcaccgacctggacgtgcccaccgaggccgtgacctgccagccccagggcaaccccctgggctgcaccccctag

SEQ ID NO: 89940 - DNA, 387 bp, synthetic construct
  misc_feature 1..387: note = Description of Artificial Sequence: Synthetic coding sequence
  source 1..387: mol_type = other DNA
atgtaccaggtgagcggccagagacccagcggctgcgacgccccctacggcgcccccagcgccgcccccggccccgcccagaccctgagcctgctgcccggcctggaggtggtgaccggcagcacccaccccgccgaggccgcccccgaggagggcagcctggaggaggccgccacccccatgccccagggcaacggccccggcatcccccagggcctggacagcaccgacctggacgtgcccaccgaggccgtgacctgccagccccagggcaaccccctgggctgcacccccctgctgcccaacgacagcggccaccccagcgagctgggcggcaccagaagagccggcaacggcgccctgggcggccccaaggcccacagatag

SEQ ID NO: 89941 - DNA, 741 bp, synthetic construct; identical to SEQ ID NO: 89936
  misc_feature 1..741: note = Description of Artificial Sequence: Synthetic coding sequence
  source 1..741: mol_type = other DNA

SEQ ID NO: 89942 - DNA, 729 bp, synthetic construct
  misc_feature 1..729: note = Description of Artificial Sequence: Synthetic coding sequence
  source 1..729: mol_type = other DNA
atgatgatggacctgttcgagaccggcagctacttcttctacctggacggcgagaacgtgaccctgcagcccctggaggtggccgagggcagccccctgtaccccggcagcgacggcaccctgagcccctgccaggaccagatgccccccgaggccggcagcgacagcagcggcgaggagcacgtgctggccccccccggcctgcagcccccccactgccccggccagtgcctgatctgggcctgcaagacctgcaagagaaagagcgcccccaccgacagaagaaaggccgccaccctgagagagagaagaagactgaagaagatcaacgaggccttcgaggccctgaagagaagaaccgtggccaaccccaaccagagactgcccaaggtggagatcctgagaagcgccatcagctacatcgagagactgcaggacctgctgcacagactggaccagcaggagaagatgcaggagctgggcgtggaccccttcagctacagacccaagcaggagaacctggagggcgccgacttcctgagaacctgcagcagccagtggcccagcgtgagcgaccacagcagaggcctggtgatcaccgccaaggagggcggcgccagcatcgacagcagcgccagcagcagcctgagatgcctgagcagcatcgtggacagcatcagcagcgaggagagaaagctgccctgcgtggaggaggtggtggagaagtag

SEQ ID NO: 89943 - DNA, 1527 bp, synthetic construct
  misc_feature 1..1527: note = Description of Artificial Sequence: Synthetic coding sequence
  source 1..1527: mol_type = other DNA
atgacccagaccctgaagtacgccagcagagtgttccacagagtgagatgggcccccgagctgggcgccagcctgggctacagagagtaccacagcgccagaagaagcctggccgacatccccggccccagcacccccagcttcctggccgagctgttctgcaagggcggcctgagcagactgcacgagctgcaggtgcagggcgccgcccacttcggccccgtgtggctggccagcttcggcaccgtgagaaccgtgtacgtggccgcccccgccctggtggaggagctgctgagacaggagggccccagacccgagagatgcagcttcagcccctggaccgagcacagaagatgcagacagagagcctgcggcctgctgaccgccgagggcgaggagtggcagagactgagaagcctgctggcccccctgctgctgagaccccaggccgccgccagatacgccggcaccctgaacaacgtggtgtgcgacctggtgagaagactgagaagacagagaggcagaggcaccggcccccccgccctggtgagagacgtggccggcgagttctacaagttcggcctggagggcatcgccgccgtgctgctgggcagcagactgggctgcctggaggcccaggtgccccccgacaccgagaccttcatcagagccgtgggcagcgtgttcgtgagcaccctgctgaccatggccatgccccactggctgagacacctggtgcccggcccctggggcagactgtgcagagactgggaccagatgttcgccttcgcccagagacacgtggagagaagagaggccgaggccgccatgagaaacggcggccagcccgagaaggacctggagagcggcgcccacctgacccacttcctgttcagagaggagctgcccgcccagagcatcctgggcaacgtgaccgagctgctgctggccggcgtggacaccgtgagcaacaccctgagctgggccctgtacgagctgagcagacaccccgaggtgcagaccgccctgcacagcgagatcaccgccgccctgagccccggcagcagcgcctaccccagcgccaccgtgctgagccagctgcccctgctgaaggccgtggtgaaggaggtgctgagactgtaccccgtggtgcccggcaacagcagagtgcccgacaaggacatccacgtgggcgactacatcatccccaagaacaccctggtgaccctgtgccactacgccaccagcagagaccccgcccagttccccgagcccaacagcttcagacccgccagatggctgggcgagggccccaccccccaccccttcgccagcctgcccttcggcttcggcaagagaagctgcatgggcagaagactggccgagctggagctgcagatggccctggcccagatcctgacccacttcgaggtgcagcccgagcccggcgccgcccccgtgagacccaagaccagaaccgtgctggtgcccgagagaagcatcaacctgcagttcctggacagatag

SEQ ID NO: 89944 - DNA, 675 bp, synthetic construct
  misc_feature 1..675: note = Description of Artificial Sequence: Synthetic coding sequence
  source 1..675: mol_type = other DNA
atggagctgtacgagaccagcccctacttctaccaggagcccagattctacgacggcgagaactacctgcccgtgcacctgcagggcttcgagccccccggctacgagagaaccgagctgaccctgagccccgaggcccccggccccctggaggacaagggcctgggcacccccgagcactgccccggccagtgcctgccctgggcctgcaaggtgtgcaagagaaagagcgtgagcgtggacagaagaagagccgccaccctgagagagaagagaagactgaagaaggtgaacgaggccttcgaggccctgaagagaagcaccctgctgaaccccaaccagagactgcccaaggtggagatcctgagaagcgccatccagtacatcgagagactgcaggccctgctgagcagcctgaaccaggaggagagagacctgagatacagaggcggcggcggcccccagcccggcgtgcccagcgagtgcagcagccacagcgccagctgcagccccgagtggggcagcgccctggagttcagcgccaaccccggcgaccacctgctgaccgccgaccccaccgacgcccacaacctgcacagcctgaccagcatcgtggacagcatcaccgtggaggacgtgagcgtggccttccccgacgagaccatgcccaactag

SEQ ID NO: 89945 - DNA, 465 bp, synthetic construct
  misc_feature 1..465: note = Description of Artificial Sequence: Synthetic coding sequence
  source 1..465: mol_type = other DNA
atgggcctgagcgacggcgagtggcagctggtgctgaacgtgtggggcaaggtggaggccgacatccccggccacggccaggaggtgctgatcagactgttcaagggccaccccgagaccctggagaagttcgacaagttcaagcacctgaagagcgaggacgagatgaaggccagcgaggacctgaagaagcacggcgccaccgtgctgaccgccctgggcggcatcctgaagaagaagggccaccacgaggccgagatcaagcccctggcccagagccacgccaccaagcacaagatccccgtgaagtacctggagttcatcagcgagtgcatcatccaggtgctgcagagcaagcaccccggcgacttcggcgccgacgcccagggcgccatgaacaaggccctggagctgttcagaaaggacatggccagcaactacaaggagctgggcttccagggctag

SEQ ID NO: 89946 - DNA, 465 bp, synthetic construct; identical to SEQ ID NO: 89945
  misc_feature 1..465: note = Description of Artificial Sequence: Synthetic coding sequence
  source 1..465: mol_type = other DNA

SEQ ID NO: 89947 - DNA, 465 bp, synthetic construct; identical to SEQ ID NO: 89945
  misc_feature 1..465: note = Description of Artificial Sequence: Synthetic coding sequence
  source 1..465: mol_type = other DNA

SEQ ID NO: 89948 - DNA, 465 bp, synthetic construct; identical to SEQ ID NO: 89945
  misc_feature 1..465: note = Description of Artificial Sequence: Synthetic coding sequence
  source 1..465: mol_type = other DNA

SEQ ID NO: 89949 - DNA, 234 bp, synthetic construct
  misc_feature 1..234: note = Description of Artificial Sequence: Synthetic coding sequence
  source 1..234: mol_type = other DNA
atgggcctgagcgacggcgagtggcagctggtgctgaacgtgtggggcaaggtggaggccgacatccccggccacggccaggaggtgctgatcagactgttcaagggccaccccgagaccctggagaagttcgacaagttcaagcacctgaagagcgaggacgagatgaaggccagcgaggacctgaagaagcacggcgccaccgtgctgaccgccctgggcggcatcctgtag

SEQ ID NO: 89950 - DNA, 432 bp, synthetic construct
  misc_feature 1..432: note = Description of Artificial Sequence: Synthetic coding sequence
  source 1..432: mol_type = other DNA
atgggcctgagcgacggcgagtggcagctggtgctgaacgtgtggggcaaggtggaggccgacatccccggccacggccaggaggtgctgatcagactgttcaagggccaccccgagaccctggagaagttcgacaagttcaagcacctgaagagcgaggacgagatgaaggccagcgaggacctgaagaagcacggcgccaccgtgctgaccgccctgggcggcatcctgaagaagaagggccaccacgaggccgagatcaagcccctggcccagagccacgccaccaagcacaagatccccgtgaagtacctggagttcatcagcgagtgcatcatccaggtgctgcagagcaagcaccccggcgacttcggcgccgacgcccagggcgccatgaacaaggccctggagctgttcagaaaggacatgtag

SEQ ID NO: 89951 - DNA, 321 bp, synthetic construct
  misc_feature 1..321: note = Description of Artificial Sequence: Synthetic coding sequence
  source 1..321: mol_type = other DNA
atgggcctgagcgacggcgagtggcagctggtgctgaacgtgtggggcaaggtggaggccgacatccccggccacggccaggaggtgctgatcagactgttcaagggccaccccgagaccctggagaagttcgacaagttcaagcacctgaagagcgaggacgagatgaaggccagcgaggacctgaagaagcacggcgccaccgtgctgaccgccctgggcggcatcctgaagaagaagggccaccacgaggccgagatcaagcccctggcccagagccacgccaccaagcacaagatccccgtgaagtacctggagtag

SEQ ID NO: 89952 - DNA, 321 bp, synthetic construct; identical to SEQ ID NO: 89951
  misc_feature 1..321: note = Description of Artificial Sequence: Synthetic coding sequence
  source 1..321: mol_type = other DNA

SEQ ID NO: 89953 - DNA, 411 bp, synthetic construct
  misc_feature 1..411: note = Description of Artificial Sequence: Synthetic coding sequence
  source 1..411: mol_type = other DNA
atggccgtgggcgccgagagactgggcgaggtgctgatcagactgttcaagggccaccccgagaccctggagaagttcgacaagttcaagcacctgaagagcgaggacgagatgaaggccagcgaggacctgaagaagcacggcgccaccgtgctgaccgccctgggcggcatcctgaagaagaagggccaccacgaggccgagatcaagcccctggcccagagccacgccaccaagcacaagatccccgtgaagtacctggagttcatcagcgagtgcatcatccaggtgctgcagagcaagcaccccggcgacttcggcgccgacgcccagggcgccatgaacaaggccctggagctgttcagaaaggacatggccagcaactacaaggagctgggcttccagggctag

SEQ ID NO: 89954 - DNA, 4398 bp, synthetic construct
  misc_feature 1..4398: note = Description of Artificial Sequence: Synthetic coding sequence
  source 1..4398: mol_type = other DNA
atgagcctggtgaccgtgcccttctaccagaagagacacagacacttcgaccagagctacagaaacatccagaccagatacctgctggacgagtacgccagcaagaagagagccagcacccaggccagcagccagaagagcctgagccagagaagcagcagccagagagccagcagccagaccagcctgggcggcaccatctgcagagtgtgcgccaagagagtgagcacccaggaggacgaggagcaggagaacagaagcagataccagagcctggtggccgcctacggcgaggccaagagacagagattcctgagcgagctggcccacctggaggaggacgtgcacctggccagaagccaggccagagacaagctggacaagtacgccatccagcagatgatggaggacaagctggcctgggagagacacaccttcgaggagagaatcagcagagcccccgagatcctggtgagactgagaagccacaccgtgtgggagagaatgagcgtgaagctgtgcttcaccgtgcagggcttccccacccccgtggtgcagtggtacaaggacggcagcctgatctgccaggccgccgagcccggcaagtacagaatcgagagcaactacggcgtgcacaccctggagatcaacagagccgacttcgacgacaccgccacctacagcgccgtggccaccaacgcccacggccaggtgagcaccaacgccgccgtggtggtgagaagattcagaggcgacgaggagcccttcagaagcgtgggcctgcccatcggcctgcccctgagcagcatgatcccctacacccacttcgacgtgcagttcctggagaagttcggcgtgaccttcagaagagagggcgagaccgtgaccctgaagtgcaccatgctggtgacccccgacctgaagagagtgcagcccagagccgagtggtacagagacgacgtgctgctgaaggagagcaagtggaccaagatgttcttcggcgagggccaggccagcctgagcttcagccacctgcacaaggacgacgagggcctgtacaccctgagaatcgtgagcagaggcggcgtgagcgaccacagcgccttcctgttcgtgagagacgccgaccccctggtgaccggcgcccccggcgcccccatggacctgcagtgccacgacgccaacagagactacgtgatcgtgacctggaagccccccaacaccaccaccgagagccccgtgatgggctacttcgtggacagatgcgaggtgggcaccaacaactgggtgcagtgcaacgacgcccccgtgaagatctgcaagtaccccgtgaccggcctgttcgagggcagaagctacatcttcagagtgagagccgtgaacagcgccggcatcagcagacccagcagagtgagcgacgccgtggccgccctggaccccctggacctgagaagactgcaggccgtgcacctggagggcgagaaggagatcgccatctaccaggacgacctggagggcgacgcccaggtgcccggcccccccaccggcgtgcacgccagcgagatcagcagaaactacgtggtgctgagctgggagccccccacccccagaggcaaggaccccctgatgtacttcatcgagaagagcgtggtgggcagcggcagctggcagagagtgaacgcccagaccgccgtgagaagccccagatacgccgtgttcgacctgatggagggcaagagctacgtgttcagagtgctgagcgccaacagacacggcctgagcgagcccagcgagatcaccagccccatccaggcccaggacgtgaccgtggtgcccagcgcccccggcagagtgctggccagcagaaacaccaagaccagcgtggtggtgcagtgggacagacccaagcacgaggaggacctgctgggctactacgtggactgctgcgtggccggcaccaacctgtgggagccctgcaaccacaagcccatcggctacaacagattcgtggtgcacggcctgaccaccggcgagcagtacatcttcagagtgaaggccgtgaacgccgtgggcatgagcgagaacagccaggagagcgacgtgatcaaggtgcaggccgccctgaccgtgcccagccacccctacggcatcaccctgctgaactgcgacggccacagcatgaccctgggctggaaggtgcccaagttcagcggcggcagccccatcctgggctactacctggacaagagagaggtgcaccacaagaactggcacgaggtgaacagcagccccagcaagcccaccatcctgaccgtggacggcctgaccgagggcagcctgtacgagttcaagatcgccgccgtgaacctggccggcatcggcgagcccagcgaccccagcgagcacttcaagtgcgaggcctggaccatgcccgagcccggccccgcctacgacctgaccttctgcgaggtgagagacaccagcctggtgatgctgtggaaggcccccgtgtacagcggcagcagccccgtgagcggctacttcgtggacttcagagaggaggacgccggcgagtggatcaccgtgaaccagaccaccaccgccaacagatacctgaaggtgagcgacctgcagcagggcaagacctacgtgttcagagtgagagccgtgaacgccaacggcgtgggcaagcccagcgacaccagcgagcccgtgctggtggaggccagacccggcaccaaggagatcagcgccggcgtggacgagcagggcaacatctacctgggcttcgactgccaggagatgaccgacgccagccagttcacctggtgcaagagctacgaggagatcagcgacgacgagagattcaagatcgagaccgtgggcgaccacagcaagctgtacctgaagaaccccgacaaggaggacctgggcacctacagcgtgagcgtgagcgacaccgacggcgtgagcagcagcttcgtgctggaccccgaggagctggagagactgatggccctgagcaacgagatcaagaaccccaccatccccctgaagagcgagctggcctacgagatcttcgacaagggcagagtgagattctggctgcaggccgagcacctgagccccgacgccagctacagattcatcatcaacgacagagaggtgagcgacagcgagatccacagaatcaagtgcgacaaggccaccggcatcatcgagatggtgatggacagattcagcatcgagaacgagggcacctacaccgtgcagatccacgacggcaaggccaagagccagagcagcctggtgctgatcggcgacgccttcaagaccgtgctggaggaggccgagttccagagaaaggagttcctgagaaagcagggcccccacttcgccgagtacctgcactgggacgtgaccgaggagtgcgaggtgagactggtgtgcaaggtggccaacaccaagaaggagaccgtgttcaagtggctgaaggacgacgtgctgtacgagaccgagaccctgcccaacctggagagaggcatctgcgagctgctgatccccaagctgagcaagaaggaccacggcgagtacaaggccaccctgaaggacgacagaggccaggacgtgagcatcctggagatcgccggcaaggtgtacgacgacatgatcctggccatgagcagagtgtgcggcaagagcgccagccccctgaaggtgctgtgcacccccgagggcatcagactgcagtgcttcatgaagtacttcaccgacgagatgaaggtgaactggtgccacaaggacgccaagatcagcagcagcgagcacatgagaatcggcggcagcgaggagatggcctggctgcagatctgcgagcccaccgagaaggacaagggcaagtacaccttcgagatcttcgacggcaaggacaaccaccagagaagcctggacctgagcggccaggccttcgacgaggccttcgccgagttccagcagttcaaggccgccgccttcgccgagaagaacagaggcagactgatcggcggcctgcccgacgtggtgaccatcatggagggcaagaccctgaacctgacctgcaccgtgttcggcaaccccgaccccgaggtgatctggttcaagaacgaccaggacatccagctgagcgagcacttcagcgtgaaggtggagcaggccaagtacgtgagcatgaccatcaagggcgtgaccagcgaggacagcggcaagtacagcatcaacatcaagaacaagtacggcggcgagaagatcgacgtgaccgtgagcgtgtacaagcacggcgagaagatccccgacatggcccccccccagcaggccaagcccaagctgatccccgccagcgccagcgccgccggccagtag

SEQ ID NO: 89955 - DNA, 3420 bp, synthetic construct
  misc_feature 1..3420: note = Description of Artificial Sequence: Synthetic coding sequence
  source 1..3420: mol_type = other DNA
atgcccgagcccaccaagaaggaggacgaggaggaggtgagcccccccagcgccctgccccccgactggaccctggtggagaccccccccggcgaggagcaggccaagcagaacgccaacagccagctgagcatcctgttcatcgagaagccccagggcggcaccgtgaaggtgggcgaggacatcaccttcatcgccaaggtgaaggccgaggacctgctgagaaagcccaccatcaagtggttcaagggcaagtggatggacctggccagcaaggccggcaagcacctgcagctgaaggagaccttcgagagacacagcagagtgtacaccttcgagatgcagatcatcaaggccaaggacaacttcgccggcaactacagatgcgaggtgacctacaaggacaagttcgacagctgcagcttcgacctggaggtgcacgagagcaccggcaccacccccaacatcgacatcagaagcgccttcaagagaagcggcgagggccaggaggacgccggcgagctggacttcagcggcctgctgaagagaagagaggtgaagcagcaggaggaggagccccaggtggacgtgtgggagctgctgaagaacgccaagcccagcgagtacgagaagatcgccttccagtacggcatcaccgacctgagaggcatgctgaagagactgaagagaatgagaagagaggagaagaagagcgccgccttcgccaagatcctggaccccgcctaccaggtggacaagggcggcagagtgagattcgtggtggagctggccgaccccaagctggaggtgaagtggtacaagaacggccaggagatcagacccagcaccaagtacatcttcgagcacaagggctgccagagaatcctgttcatcaacaactgccagatgaccgacgacagcgagtactacgtgaccgccggcgacgagaagtgcagcaccgagctgttcgtgagagagccccccatcatggtgaccaagcagctggaggacaccaccgcctactgcggcgagagagtggagctggagtgcgaggtgagcgaggacgacgccaacgtgaagtggttcaagaacggcgaggagatcatccccggccccaagagcagatacagaatcagagtggagggcaagaagcacatcctgatcatcgagggcgccaccaaggccgacgccgccgagtacagcgtgatgaccaccggcggccagagcagcgccaagctgagcgtggacctgaagcccctgaagatcctgacccccctgaccgaccagaccgtgaacctgggcaaggagatctgcctgaagtgcgagatcagcgagaacatccccggcaagtggaccaagaacggcctgcccgtgcaggagagcgacagactgaaggtggtgcacaagggcagaatccacaagctggtgatcgccaacgccctgaccgaggacgagggcgactacgtgttcgcccccgacgcctacaacgtgaccctgcccgccaaggtgcacgtgatcgacccccccaagatcatcctggacggcctggacgccgacaacaccgtgaccgtgatcgccggcaacaagctgagactggagatccccatcagcggcgagcccccccccaaggccatgtggagcagaggcgacaaggccatcatggagggcagcggcagaatcagaaccgagagctaccccgacagcagcaccctggtgatcgacatcgccgagagagacgacagcggcgtgtaccacatcaacctgaagaacgaggccggcgaggcccacgccagcatcaaggtgaaggtggtggacttccccgacccccccgtggcccccaccgtgaccgaggtgggcgacgactggtgcatcatgaactgggagccccccgcctacgacggcggcagccccatcctgggctacttcatcgagagaaagaagaagcagagcagcagatggatgagactgaacttcgacctgtgcaaggagaccaccttcgagcccaagaagatgatcgagggcgtggcctacgaggtgagaatcttcgccgtgaacgccatcggcatcagcaagcccagcatgcccagcagacccttcgtgcccctggccgtgaccagcccccccaccctgctgaccgtggacagcgtgaccgacaccaccgtgaccatgagatggagaccccccgaccacatcggcgccgccggcctggacggctacgtgctggagtactgcttcgagggcaccgaggactggatcgtggccaacaaggacctgatcgacaagaccaagttcaccatcaccggcctgcccaccgacgccaagatcttcgtgagagtgaaggccgtgaacgccgccggcgccagcgagcccaagtactacagccagcccatcctggtgaaggagatcatcgagccccccaagatcagaatccccagacacctgaagcagacctacatcagaagagtgggcgaggccgtgaacctggtgatccccttccagggcaagcccagacccgagctgacctggaagaaggacggcgccgagatcgacaagaaccagatcaacatcagaaacagcgagaccgacaccatcatcttcatcagaaaggccgagagaagccacagcggcaagtacgacctgcaggtgaaggtggacaagttcgtggagaccgccagcatcgacatccagatcatcgacagacccggccccccccagatcgtgaagatcgaggacgtgtggggcgagaacgtggccctgacctggaccccccccaaggacgacggcaacgccgccatcaccggctacaccatccagaaggccgacaagaagagcatggagtggttcaccgtgatcgagcactaccacagaaccagcgccaccatcaccgagctggtgatcggcaacgagtactacttcagagtgttcagcgagaacatgtgcggcctgagcgaggacgccaccatgaccaaggagagcgccgtgatcgccagagacggcaagatctacaagaaccccgtgtacgaggacttcgacttcagcgaggcccccatgttcacccagcccctggtgaacacctacgccatcgccggctacaacgccaccctgaactgcagcgtgagaggcaaccccaagcccaagatcacctggatgaagaacaaggtggccatcgtggacgaccccagatacagaatgttcagcaaccagggcgtgtgcaccctggagatcagaaagcccagcccctacgacggcggcacctactgctgcaaggccgtgaacgacctgggcaccgtggagatcgagtgcaagctggaggtgaagggcggcctgagcttctgcagactgctgctgcagggcgtgccccccaacatcatcgacagctacctgagagacctgcacagcagcaaccccgaggagtactag

SEQ ID NO: 89956 - DNA, 3522 bp, synthetic construct
  misc_feature 1..3522: note = Description of Artificial Sequence: Synthetic coding sequence
  source 1..3522: mol_type = other DNA
atgcccgagcccaccaagaaggaggagaacgaggtgcccgcccccgcccccccccccgaggagcccagcaaggagaaggaggccggcaccacccccgccaaggactggaccctggtggagaccccccccggcgaggagcaggccaagcagaacgccaacagccagctgagcatcctgttcatcgagaagccccagggcggcaccgtgaaggtgggcgaggacatcaccttcatcgccaaggtgaaggccgaggacctgctgagaaagcccaccatcaagtggttcaagggcaagtggatggacctggccagcaaggccggcaagcacctgcagctgaaggagaccttcgagagacacagcagagtgtacaccttcgagatgcagatcatcaaggccaaggacaacttcgccggcaactacagatgcgaggtgacctacaaggacaagttcgacagctgcagcttcgacctggaggtgcacgagagcaccggcaccacccccaacatcgacatcagaagcgccttcaagagaagcggcgagggccaggaggacgccggcgagctggacttcagcggcctgctgaagagaagagaggtgaagcagcaggaggaggagccccaggtggacgtgtgggagctgctgaagaacgccaagcccagcgagtacgagaagatcgccttccagtacggcatcaccgacctgagaggcatgctgaagagactgaagagaatgagaagagaggagaagaagagcgccgccttcgccaagatcctggaccccgcctaccaggtggacaagggcggcagagtgagattcgtggtggagctggccgaccccaagctggaggtgaagtggtacaagaacggccaggagatcagacccagcaccaagtacatcttcgagcacaagggctgccagagaatcctgttcatcaacaactgccagatgaccgacgacagcgagtactacgtgaccgccggcgacgagaagtgcagcaccgagctgttcgtgagagagccccccatcatggtgaccaagcagctggaggacaccaccgcctactgcggcgagagagtggagctggagtgcgaggtgagcgaggacgacgccaacgtgaagtggttcaagaacggcgaggagatcatccccggccccaagagcagatacagaatcagagtggagggcaagaagcacatcctgatcatcgagggcgccaccaaggccgacgccgccgagtacagcgtgatgaccaccggcggccagagcagcgccaagctgagcgtggacctgaagcccctgaagatcctgacccccctgaccgaccagaccgtgaacctgggcaaggagatctgcctgaagtgcgagatcagcgagaacatccccggcaagtggaccaagaacggcctgcccgtgcaggagagcgacagactgaaggtggtgcacaagggcagaatccacaagctggtgatcgccaacgccctgaccgaggacgagggcgactacgtgttcgcccccgacgcctacaacgtgaccctgcccgccaaggtgcacgtgatcgacccccccaagatcatcctggacggcctggacgccgacaacaccgtgaccgtgatcgccggcaacaagctgagactggagatccccatcagcggcgagcccccccccaaggccatgtggagcagaggcgacaaggccatcatggagggcagcggcagaatcagaaccgagagctaccccgacagcagcaccctggtgatcgacatcgccgagagagacgacagcggcgtgtaccacatcaacctgaagaacgaggccggcgaggcccacgccagcatcaaggtgaaggtggtggacttccccgacccccccgtggcccccaccgtgaccgaggtgggcgacgactggtgcatcatgaactgggagccccccgcctacgacggcggcagccccatcctgggctacttcatcgagagaaagaagaagcagagcagcagatggatgagactgaacttcgacctgtgcaaggagaccaccttcgagcccaagaagatgatcgagggcgtggcctacgaggtgagaatcttcgccgtgaacgccatcggcatcagcaagcccagcatgcccagcagacccttcgtgcccctggccgtgaccagcccccccaccctgctgaccgtggacagcgtgaccgacaccaccgtgaccatgagatggagaccccccgaccacatcggcgccgccggcctggacggctacgtgctggagtactgcttcgagggcagcaccagcgccaagcagagcgacgagaacggcgaggccgcctacgacctgcccgccgaggactggatcgtggccaacaaggacctgatcgacaagaccaagttcaccatcaccggcctgcccaccgacgccaagatcttcgtgagagtgaaggccgtgaacgccgccggcgccagcgagcccaagtactacagccagcccatcctggtgaaggagatcatcgagccccccaagatcagaatccccagacacctgaagcagacctacatcagaagagtgggcgaggccgtgaacctggtgatccccttccagggcaagcccagacccgagctgacctggaagaaggacggcgccgagatcgacaagaaccagatcaacatcagaaacagcgagaccgacaccatcatcttcatcagaaaggccgagagaagccacagcggcaagtacgacctgcaggtgaaggtggacaagttcgtggagaccgccagcatcgacatccagatcatcgacagacccggccccccccagatcgtgaagatcgaggacgtgtggggcgagaacgtggccctgacctggaccccccccaaggacgacggcaacgccgccatcaccggctacaccatccagaaggccgacaagaagagcatggagtggttcaccgtgatcgagcactaccacagaaccagcgccaccatcaccgagctggtgatcggcaacgagtactacttcagagtgttcagcgagaacatgtgcggcctgagcgaggacgccaccatgaccaaggagagcgccgtgatcgccagagacggcaagatctacaagaaccccgtgtacgaggacttcgacttcagcgaggcccccatgttcacccagcccctggtgaacacctacgccatcgccggctacaacgccaccctgaactgcagcgtgagaggcaaccccaagcccaagatcacctggatgaagaacaaggtggccatcgtggacgaccccagatacagaatgttcagcaaccagggcgtgtgcaccctggagatcagaaagcccagcccctacgacggcggcacctactgctgcaaggccgtgaacgacctgggcaccgtggagatcgagtgcaagctggaggtgaaggtgatctaccagggcgtgaacacccccggccagcccgtgttcctggagggccagcagcaggtgggcagccccagcgccgacagcagctgcaaggcctacctgcagacctag

SEQ ID NO: 89957 - DNA, 3384 bp, synthetic construct
  misc_feature 1..3384: note = Description of Artificial Sequence: Synthetic coding sequence
  source 1..3384: mol_type = other DNA
atgcccgagcccaccaagaaggaggagaacgaggtgcccgcccccgcccccccccccgaggagcccagcaaggagaaggaggccggcaccacccccgccaaggactggaccctggtggagaccccccccggcgaggagcaggccaagcagaacgccaacagccagctgagcatcctgttcatcgagaagccccagggcggcaccgtgaaggtgggcgaggacatcaccttcatcgccaaggtgaaggccgaggacctgctgagaaagcccaccatcaagtggttcaagggcaagtggatggacctggccagcaaggccggcaagcacctgcagctgaaggagaccttcgagagacacagcagagtgtacaccttcgagatgcagatcatcaaggccaaggacaacttcgccggcaactacagatgcgaggtgacctacaaggacaagttcgacagctgcagcttcgacctggaggtgcacgagagcaccggcaccacccccaacatcgacatcagaagcgccttcaagagaagagaggtgaagcagcaggaggaggagccccaggtggacgtgtgggagctgctgaagaacgccaagcccagcgagtacgagaagatcgccttccagtacggcatcaccgacctgagaggcatgctgaagagactgaagagaatgagaagagaggagaagaagagcgccgccttcgccaagatcctggaccccgcctaccaggtggacaagggcggcagagtgagattcgtggtggagctggccgaccccaagctggaggtgaagtggtacaagaacggccaggagatcagacccagcaccaagtacatcttcgagcacaagggctgccagagaatcctgttcatcaacaactgccagatgaccgacgacagcgagtactacgtgaccgccggcgacgagaagtgcagcaccgagctgttcgtgagagagccccccatcatggtgaccaagcagctggaggacaccaccgcctactgcggcgagagagtggagctggagtgcgaggtgagcgaggacgacgccaacgtgaagtggttcaagaacggcgaggagatcatccccggccccaagagcagatacagaatcagagtggagggcaagaagcacatcctgatcatcgagggcgccaccaaggccgacgccgccgagtacagcgtgatgaccaccggcggccagagcagcgccaagctgagcgtggacctgaagcccctgaagatcctgacccccctgaccgaccagaccgtgaacctgggcaaggagatctgcctgaagtgcgagatcagcgagaacatccccggcaagtggaccaagaacggcctgcccgtgcaggagagcgacagactgaaggtggtgcacaagggcagaatccacaagctggtgatcgccaacgccctgaccgaggacgagggcgactacgtgttcgcccccgacgcctacaacgtgaccctgcccgccaaggtgcacgtgatcgacccccccaagatcatcctggacggcctggacgccgacaacaccgtgaccgtgatcgccggcaacaagctgagactggagatccccatcagcggcgagcccccccccaaggccatgtggagcagaggcgacaaggccatcatggagggcagcggcagaatcagaaccgagagctaccccgacagcagcaccctggtgatcgacatcgccgagagagacgacagcggcgtgtaccacatcaacctgaagaacgaggccggcgaggcccacgccagcatcaaggtgaaggtggtggacttccccgacccccccgtggcccccaccgtgaccgaggtgggcgacgactggtgcatcatgaactgggagccccccgcctacgacggcggcagccccatcctgggctacttcatcgagagaaagaagaagcagagcagcagatggatgagactgaacttcgacctgtgcaaggagaccaccttcgagcccaagaagatgatcgagggcgtggcctacgaggtgagaatcttcgccgtgaacgccatcggcatcagcaagcccagcatgcccagcagacccttcgtgcccctggccgtgaccagcccccccaccctgctgaccgtggacagcgtgaccgacaccaccgtgaccatgagatggagaccccccgaccacatcggcgccgccggcctggacggctacgtgctggagtactgcttcgagggcaccgaggactggatcgtggccaacaaggacctgatcgacaagaccaagttcaccatcaccggcctgcccaccgacgccaagatcttcgtgagagtgaaggccgtgaacgccgccggcgccagcgagcccaagtactacagccagcccatcctggtgaaggagatcatcgagccccccaagatcagaatccccagacacctgaagcagacctacatcagaagagtgggcgaggccgtgaacctggtgatccccttccagggcaagcccagacccgagctgacctggaagaaggacggcgccgagatcgacaagaaccagatcaacatcagaaacagcgagaccgacaccatcatcttcatcagaaaggccgagagaagccacagcggcaagtacgacctgcaggtgaaggtggacaagttcgtggagaccgccagcatcgacatccagatcatcgacagacccggccccccccagatcgtgaagatcgaggacgtgtggggcgagaacgtggccctgacctggaccccccccaaggacgacggcaacgccgccatcaccggctacaccatccagaaggccgacaagaagagcatggagtggttcaccgtgatcgagcactaccacagaaccagcgccaccatcaccgagctggtgatcggcaacgagtactacttcagagtgttcagcgagaacatgtgcggcctgagcgaggacgccaccatgaccaaggagagcgccgtgatcgccagagacggcaagatctacaagaaccccgtgtacgaggacttcgacttcagcgaggcccccatgttcacccagcccctggtgaacacctacgccatcgccggctacaacgccaccctgaactgcagcgtgagaggcaaccccaagcccaagatcacctggatgaagaacaaggtggccatcgtggacgaccccagatacagaatgttcagcaaccagggcgtgtgcaccctggagatcagaaagcccagcccctacgacggcggcacctactgctgcaaggccgtgaacgacctgggcaccgtggagatcgagtgcaagctggaggtgaaggtgatctaccagggcgtgaacacccccggccagcccgtgttcctggagggccagcagcagagcctgcacaacaaggacttctag

SEQ ID NO: 89958 - DNA, 3363 bp, synthetic construct
  misc_feature 1..3363: note = Description of Artificial Sequence: Synthetic coding sequence
  source 1..3363: mol_type = other DNA
atgcccgagcccaccaagaaggaggactggaccctggtggagaccccccccggcgaggagcaggccaagcagaacgccaacagccagctgagcatcctgttcatcgagaagccccagggcggcaccgtgaaggtgggcgaggacatcaccttcatcgccaaggtgaaggccgaggacctgctgagaaagcccaccatcaagtggttcaagggcaagtggatggacctggccagcaaggccggcaagcacctgcagctgaaggagaccttcgagagacacagcagagtgtacaccttcgagatgcagatcatcaaggccaaggacaacttcgccggcaactacagatgcgaggtgacctacaaggacaagttcgacagctgcagcttcgacctggaggtgcacgagagcaccggcaccacccccaacatcgacatcagaagcgccttcaagagaagcggcgagggccaggaggacgccggcgagctggacttcagcggcctgctgaagagaagagaggtgaagcagcaggaggaggagccccaggtggacgtgtgggagctgctgaagaacgccaagcccagcgagtacgagaagatcgccttccagtacggcatcaccgacctgagaggcatgctgaagagactgaagagaatgagaagagaggagaagaagagcgccgccttcgccaagatcctggaccccgcctaccaggtggacaagggcggcagagtgagattcgtggtggagctggccgaccccaagctggaggtgaagtggtacaagaacggccaggagatcagacccagcaccaagtacatcttcgagcacaagggctgccagagaatcctgttcatcaacaactgccagatgaccgacgacagcgagtactacgtgaccgccggcgacgagaagtgcagcaccgagctgttcgtgagagagccccccatcatggtgaccaagcagctggaggacaccaccgcctactgcggcgagagagtggagctggagtgcgaggtgagcgaggacgacgccaacgtgaagtggttcaagaacggcgaggagatcatccccggccccaagagcagatacagaatcagagtggagggcaagaagcacatcctgatcatcgagggcgccaccaaggccgacgccgccgagtacagcgtgatgaccaccggcggccagagcagcgccaagctgagcgtggacctgaagcccctgaagatcctgacccccctgaccgaccagaccgtgaacctgggcaaggagatctgcctgaagtgcgagatcagcgagaacatccccggcaagtggaccaagaacggcctgcccgtgcaggagagcgacagactgaaggtggtgcacaagggcagaatccacaagctggtgatcgccaacgccctgaccgaggacgagggcgactacgtgttcgcccccgacgcctacaacgtgaccctgcccgccaaggtgcacgtgatcgacccccccaagatcatcctggacggcctggacgccgacaacaccgtgaccgtgatcgccggcaacaagctgagactggagatccccatcagcggcgagcccccccccaaggccatgtggagcagaggcgacaaggccatcatggagggcagcggcagaatcagaaccgagagctaccccgacagcagcaccctggtgatcgacatcgccgagagagacgacagcggcgtgtaccacatcaacctgaagaacgaggccggcgaggcccacgccagcatcaaggtgaaggtggtggacttccccgacccccccgtggcccccaccgtgaccgaggtgggcgacgactggtgcatcatgaactgggagccccccgcctacgacggcggcagccccatcctgggctacttcatcgagagaaagaagaagcagagcagcagatggatgagactgaacttcgacctgtgcaaggagaccaccttcgagcccaagaagatgatcgagggcgtggcctacgaggtgagaatcttcgccgtgaacgccatcggcatcagcaagcccagcatgcccagcagacccttcgtgcccctggccgtgaccagcccccccaccctgctgaccgtggacagcgtgaccgacaccaccgtgaccatgagatggagaccccccgaccacatcggcgccgccggcctggacggctacgtgctggagtactgcttcgagggcaccgaggactggatcgtggccaacaaggacctgatcgacaagaccaagttcaccatcaccggcctgcccaccgacgccaagatcttcgtgagagtgaaggccgtgaacgccgccggcgccagcgagcccaagtactacagccagcccatcctggtgaaggagatcatcgagccccccaagatcagaatccccagacacctgaagcagacctacatcagaagagtgggcgaggccgtgaacctggtgatccccttccagggcaagcccagacccgagctgacctggaagaaggacggcgccgagatcgacaagaaccagatcaacatcagaaacagcgagaccgacaccatcatcttcatcagaaaggccgagagaagccacagcggcaagtacgacctgcaggtgaaggtggacaagttcgtggagaccgccagcatcgacatccagatcatcgacagacccggccccccccagatcgtgaagatcgaggacgtgtggggcgagaacgtggccctgacctggaccccccccaaggacgacggcaacgccgccatcaccggctacaccatccagaaggccgacaagaagagcatggagtggttcaccgtgatcgagcactaccacagaaccagcgccaccatcaccgagctggtgatcggcaacgagtactacttcagagtgttcagcgagaacatgtgcggcctgagcgaggacgccaccatgaccaaggagagcgccgtgatcgccagagacggcaagatctacaagaaccccgtgtacgaggacttcgacttcagcgaggcccccatgttcacccagcccctggtgaacacctacgccatcgccggctacaacgccaccctgaactgcagcgtgagaggcaaccccaagcccaagatcacctggatgaagaacaaggtggccatcgtggacgaccccagatacagaatgttcagcaaccagggcgtgtgcaccctggagatcagaaagcccagcccctacgacggcggcacctactgctgcaaggccgtgaacgacctgggcaccgtggagatcgagtgcaagctggaggtgaaggtgatctaccagggcgtgaacacccccggccagcccgtgttcctggagggccagcagcagagcctgcacaacaaggacttctag

SEQ ID NO: 89959 - DNA, 3399 bp, synthetic construct
  misc_feature 1..3399: note = Description of Artificial Sequence: Synthetic coding sequence
  source 1..3399: mol_type = other DNA
atgcccgagcccaccaagaaggaggagaacgaggtgcccgcccccgcccccccccccgaggactggaccctggtggagaccccccccggcgaggagcaggccaagcagaacgccaacagccagctgagcatcctgttcatcgagaagccccagggcggcaccgtgaaggtgggcgaggacatcaccttcatcgccaaggtgaaggccgaggacctgctgagaaagcccaccatcaagtggttcaagggcaagtggatggacctggccagcaaggccggcaagcacctgcagctgaaggagaccttcgagagacacagcagagtgtacaccttcgagatgcagatcatcaaggccaaggacaacttcgccggcaactacagatgcgaggtgacctacaaggacaagttcgacagctgcagcttcgacctggaggtgcacgagagcaccggcaccacccccaacatcgacatcagaagcgccttcaagagaagcggcgagggccaggaggacgccggcgagctggacttcagcggcctgctgaagagaagagaggtgaagcagcaggaggaggagccccaggtggacgtgtgggagctgctgaagaacgccaagcccagcgagtacgagaagatcgccttccagtacggcatcaccgacctgagaggcatgctgaagagactgaagagaatgagaagagaggagaagaagagcgccgccttcgccaagatcctggaccccgcctaccaggtggacaagggcggcagagtgagattcgtggtggagctggccgaccccaagctggaggtgaagtggtacaagaacggccaggagatcagacccagcaccaagtacatcttcgagcacaagggctgccagagaatcctgttcatcaacaactgccagatgaccgacgacagcgagtactacgtgaccgccggcgacgagaagtgcagcaccgagctgttcgtgagagagccccccatcatggtgaccaagcagctggaggacaccaccgcctactgcggcgagagagtggagctggagtgcgaggtgagcgaggacgacgccaacgtgaagtggttcaagaacggcgaggagatcatccccggccccaagagcagatacagaatcagagtggagggcaagaagcacatcctgatcatcgagggcgccaccaaggccgacgccgccgagtacagcgtgatgaccaccggcggccagagcagcgccaagctgagcgtggacctgaagcccctgaagatcctgacccccctgaccgaccagaccgtgaacctgggcaaggagatctgcctgaagtgcgagatcagcgagaacatccccggcaagtggaccaagaacggcctgcccgtgcaggagagcgacagactgaaggtggtgcacaagggcagaatccacaagctggtgatcgccaacgccctgaccgaggacgagggcgactacgtgttcgcccccgacgcctacaacgtgaccctgcccgccaaggtgcacgtgatcgacccccccaagatcatcctggacggcctggacgccgacaacaccgtgaccgtgatcgccggcaacaagctgagactggagatccccatcagcggcgagcccccccccaaggccatgtggagcagaggcgacaaggccatcatggagggcagcggcagaatcagaaccgagagctaccccgacagcagcaccctggtgatcgacatcgccgagagagacgacagcggcgtgtaccacatcaacctgaagaacgaggccggcgaggcccacgccagcatcaaggtgaaggtggtggacttccccgacccccccgtggcccccaccgtgaccgaggtgggcgacgactggtgcatcatgaactgggagccccccgcctacgacggcggcagccccatcctgggctacttcatcgagagaaagaagaagcagagcagcagatggatgagactgaacttcgacctgtgcaaggagaccaccttcgagcccaagaagatgatcgagggcgtggcctacgaggtgagaatcttcgccgtgaacgccatcggcatcagcaagcccagcatgcccagcagacccttcgtgcccctggccgtgaccagcccccccaccctgctgaccgtggacagcgtgaccgacaccaccgtgaccatgagatggagaccccccgaccacatcggcgccgccggcctggacggctacgtgctggagtactgcttcgagggcaccgaggactggatcgtggccaacaaggacctgatcgacaagaccaagttcaccatcaccggcctgcccaccgacgccaagatcttcgtgagagtgaaggccgtgaacgccgccggcgccagcgagcccaagtactacagccagcccatcctggtgaaggagatcatcgagccccccaagatcagaatccccagacacctgaagcagacctacatcagaagagtgggcgaggccgtgaacctggtgatccccttccagggcaagcccagacccgagctgacctggaagaaggacggcgccgagatcgacaagaaccagatcaacatcagaaacagcgagaccgacaccatcatcttcatcagaaaggccgagagaagccacagcggcaagtacgacctgcaggtgaaggtggacaagttcgtggagaccgccagcatcgacatccagatcatcgacagacccggccccccccagatcgtgaagatcgaggacgtgtggggcgagaacgtggccctgacctggaccccccccaaggacgacggcaacgccgccatcaccggctacaccatccagaaggccgacaagaagagcatggagtggttcaccgtgatcgagcactaccacagaaccagcgccaccatcaccgagctggtgatcggcaacgagtactacttcagagtgttcagcgagaacatgtgcggcctgagcgaggacgccaccatgaccaaggagagcgccgtgatcgccagagacggcaagatctacaagaaccccgtgtacgaggacttcgacttcagcgaggcccccatgttcacccagcccctggtgaacacctacgccatcgccggctacaacgccaccctgaactgcagcgtgagaggcaaccccaagcccaagatcacctggatgaagaacaaggtggccatcgtggacgaccccagatacagaatgttcagcaaccagggcgtgtgcaccctggagatcagaaagcccagcccctacgacggcggcacctactgctgcaaggccgtgaacgacctgggcaccgtggagatcgagtgcaagctggaggtgaaggtgatctaccagggcgtgaacacccccggccagcccgtgttcctggagggccagcagcagagcctgcacaacaaggacttctag

SEQ ID NO: 89960 - DNA, 3822 bp, synthetic construct
  misc_feature 1..3822: note = Description of Artificial Sequence: Synthetic coding sequence
  source 1..3822: mol_type = other DNA
atgcccgagcccggcaagaagcccgtgagcgccttcagcaagaagcccagaagcgtggaggtggccgccggcagccccgccgtgttcgaggccgagaccgagagagccggcgtgaaggtgagatggcagagaggcggcagcgacatcagcgccagcaacaagtacggcctggccaccgagggcaccagacacaccctgaccgtgagagaggtgggccccgccgaccagggcagctacgccgtgatcgccggcagcagcaaggtgaagttcgacctgaaggtgatcgaggccgagaaggccgagcccatgctggcccccgcccccgcccccgccgaggccaccggcgcccccggcgaggcccccgcccccgccgccgagctgggcgagagcgcccccagccccaagggcagcagcagcgccgccctgaacggccccacccccggcgcccccgacgaccccatcggcctgttcgtgatgagaccccaggacggcgaggtgaccgtgggcggcagcatcaccttcagcgccagagtggccggcgccagcctgctgaagccccccgtggtgaagtggttcaagggcaagtgggtggacctgagcagcaaggtgggccagcacctgcagctgcacgacagctacgacagagccagcaaggtgtacctgttcgagctgcacatcaccgacgcccagcccgccttcaccggcagctacagatgcgaggtgagcaccaaggacaagttcgactgcagcaacttcaacctgaccgtgcacgaggccatgggcaccggcgacctggacctgctgagcgccttcagaagaaccagcctggccggcggcggcagaagaatcagcgacagccacgaggacaccggcatcctggacttcagcagcctgctgaagaagagcagcagcttcagaacccccagagacagcaagctggaggcccccgccgaggaggacgtgtgggagatcctgagacaggccccccccagcgagtacgagagaatcgccttccagtacggcgtgaccgacctgagaggcatgctgaagagactgaagggcatgagaagagacgagaagaagagcaccgccttccagaagaagctggagcccgcctaccaggtgagcaagggccacaagatcagactgaccgtggagctggccgaccacgacgccgaggtgaagtggctgaagaacggccaggagatccagatgagcggcagatacatcttcgagagcatcggcgccaagagaaccctgaccatcagccagtgcagcctggccgacgacgccgcctaccagtgcgtggtgggcggcgagaagtgcagcaccgagctgttcgtgaaggagccccccgtgctgatcaccagacccctggaggaccagctggtgatggtgggccagagagtggagttcgagtgcgaggtgagcgaggagggcgcccaggtgaagtggctgaaggacggcgtggagctgaccagagaggagaccttcaagtacagattcaagaaggacggccagagacaccacctgatcatcaacgaggccatgctggaggacgccggccactacgccctgtgcaccagcggcggccaggccctggccgagctgatcgtgcaggagaagaagctggaggtgtaccagagcatcgccgacctgatggtgggcgccaaggaccaggccgtgttcaagtgcgaggtgagcgacgagaacgtgagaggcgtgtggctgaagaacggcaaggagctggtgcccgacagcagaatcaaggtgagccacatcggcagagtgcacaagctgaccatcgacgacgtgacccccgccgacgaggccgactacagcttcgtgcccgagggcttcgcctgcaacctgagcgccaagctgcacttcatggaggtgaagatcgacttcgtgcccagacaggagccccccaagatccacctggactgccccggcagaatccccgacaccatcgtggtggtggccggcaacaagctgagactggacgtgcccatcagcggcgaccccgcccccaccgtgatctggcagaaggccatcacccagggcaacaaggcccccgccagacccgcccccgacgcccccgaggacaccggcgacagcgacgagtgggtgttcgacaagaagctgctgtgcgagaccgagggcagagtgagagtggagaccaccaaggacagaagcatcttcaccgtggagggcgccgagaaggaggacgagggcgtgtacaccgtgaccgtgaagaaccccgtgggcgaggaccaggtgaacctgaccgtgaaggtgatcgacgtgcccgacgcccccgccgcccccaagatcagcaacgtgggcgaggacagctgcaccgtgcagtgggagccccccgcctacgacggcggccagcccatcctgggctacatcctggagagaaagaagaagaagagctacagatggatgagactgaacttcgacctgatccaggagctgagccacgaggccagaagaatgatcgagggcgtggtgtacgagatgagagtgtacgccgtgaacgccatcggcatgagcagacccagccccgccagccagcccttcatgcccatcggcccccccagcgagcccacccacctggccgtggaggacgtgagcgacaccaccgtgagcctgaagtggagaccccccgagagagtgggcgccggcggcctggacggctacagcgtggagtactgccccgagggctgcagcgagtgggtggccgccctgcagggcctgaccgagcacaccagcatcctggtgaaggacctgcccaccggcgccagactgctgttcagagtgagagcccacaacatggccggccccggcgcccccgtgaccaccaccgagcccgtgaccgtgcaggagatcctgcagagacccagactgcagctgcccagacacctgagacagaccatccagaagaaggtgggcgagcccgtgaacctgctgatccccttccagggcaagcccagaccccaggtgacctggaccaaggagggccagcccctggccggcgaggaggtgagcatcagaaacagccccaccgacaccatcctgttcatcagagccgccagaagagtgcacagcggcacctaccaggtgaccgtgagaatcgagaacatggaggacaaggccaccctggtgctgcaggtggtggacaagcccagccccccccaggacctgagagtgaccgacgcctggggcctgaacgtggccctggagtggaagcccccccaggacgtgggcaacaccgagctgtggggctacaccgtgcagaaggccgacaagaagaccatggagtggttcaccgtgctggagcactacagaagaacccactgcgtggtgcccgagctgatcatcggcaacggctactacttcagagtgttcagccagaacatggtgggcttcagcgacagagccgccaccaccaaggagcccgtgttcatccccagacccggcatcacctacgagccccccaactacaaggccctggacttcagcgaggcccccagcttcacccagcccctggtgaacagaagcgtgatcgccggctacaccgccatgctgtgctgcgccgtgagaggcagccccaagcccaagatcagctggttcaagaacggcctggacctgggcgaggacgccagattcagaatgttcagcaagcagggcgtgctgaccctggagatcagaaagccctgccccttcgacggcggcatctacgtgtgcagagccaccaacctgcagggcgaggccagatgcgagtgcagactggaggtgagagtgccccagtag

SEQ ID NO: 89961 - DNA, 3825 bp, synthetic construct
  misc_feature 1..3825: note = Description of Artificial Sequence: Synthetic coding sequence
  source 1..3825: mol_type = other DNA
atgcccgagcccggcaagaagcccgtgagcgccttcagcaagaagcccagaagcgtggaggtggccgccggcagccccgccgtgttcgaggccgagaccgagagagccggcgtgaaggtgagatggcagagaggcggcagcgacatcagcgccagcaacaagtacggcctggccaccgagggcaccagacacaccctgaccgtgagagaggtgggccccgccgaccagggcagctacgccgtgatcgccggcagcagcaaggtgaagttcgacctgaaggtgatcgaggccgagaaggccgagcccatgctggcccccgcccccgcccccgccgaggccaccggcgcccccggcgaggcccccgcccccgccgccgagctgggcgagagcgcccccagccccaagggcagcagcagcgccgccctgaacggccccacccccggcgcccccgacgaccccatcggcctgttcgtgatgagaccccaggacggcgaggtgaccgtgggcggcagcatcaccttcagcgccagagtggccggcgccagcctgctgaagccccccgtggtgaagtggttcaagggcaagtgggtggacctgagcagcaaggtgggccagcacctgcagctgcacgacagctacgacagagccagcaaggtgtacctgttcgagctgcacatcaccgacgcccagcccgccttcaccggcagctacagatgcgaggtgagcaccaaggacaagttcgactgcagcaacttcaacctgaccgtgcacgaggccatgggcaccggcgacctggacctgctgagcgccttcagaagaaccagcctggccggcggcggcagaagaatcagcgacagccacgaggacaccggcatcctggacttcagcagcctgctgaagaagagcagcagcttcagaacccccagagacagcaagctggaggcccccgccgaggaggacgtgtgggagatcctgagacaggccccccccagcgagtacgagagaatcgccttccagtacggcgtgaccgacctgagaggcatgctgaagagactgaagggcatgagaagagacgagaagaagagcaccgccttccagaagaagctggagcccgcctaccaggtgagcaagggccacaagatcagactgaccgtggagctggccgaccacgacgccgaggtgaagtggctgaagaacggccaggagatccagatgagcggcagcaagtacatcttcgagagcatcggcgccaagagaaccctgaccatcagccagtgcagcctggccgacgacgccgcctaccagtgcgtggtgggcggcgagaagtgcagcaccgagctgttcgtgaaggagccccccgtgctgatcaccagacccctggaggaccagctggtgatggtgggccagagagtggagttcgagtgcgaggtgagcgaggagggcgcccaggtgaagtggctgaaggacggcgtggagctgaccagagaggagaccttcaagtacagattcaagaaggacggccagagacaccacctgatcatcaacgaggccatgctggaggacgccggccactacgccctgtgcaccagcggcggccaggccctggccgagctgatcgtgcaggagaagaagctggaggtgtaccagagcatcgccgacctgatggtgggcgccaaggaccaggccgtgttcaagtgcgaggtgagcgacgagaacgtgagaggcgtgtggctgaagaacggcaaggagctggtgcccgacagcagaatcaaggtgagccacatcggcagagtgcacaagctgaccatcgacgacgtgacccccgccgacgaggccgactacagcttcgtgcccgagggcttcgcctgcaacctgagcgccaagctgcacttcatggaggtgaagatcgacttcgtgcccagacaggagccccccaagatccacctggactgccccggcagaatccccgacaccatcgtggtggtggccggcaacaagctgagactggacgtgcccatcagcggcgaccccgcccccaccgtgatctggcagaaggccatcacccagggcaacaaggcccccgccagacccgcccccgacgcccccgaggacaccggcgacagcgacgagtgggtgttcgacaagaagctgctgtgcgagaccgagggcagagtgagagtggagaccaccaaggacagaagcatcttcaccgtggagggcgccgagaaggaggacgagggcgtgtacaccgtgaccgtgaagaaccccgtgggcgaggaccaggtgaacctgaccgtgaaggtgatcgacgtgcccgacgcccccgccgcccccaagatcagcaacgtgggcgaggacagctgcaccgtgcagtgggagccccccgcctacgacggcggccagcccatcctgggctacatcctggagagaaagaagaagaagagctacagatggatgagactgaacttcgacctgatccaggagctgagccacgaggccagaagaatgatcgagggcgtggtgtacgagatgagagtgtacgccgtgaacgccatcggcatgagcagacccagccccgccagccagcccttcatgcccatcggcccccccagcgagcccacccacctggccgtggaggacgtgagcgacaccaccgtgagcctgaagtggagaccccccgagagagtgggcgccggcggcctggacggctacagcgtggagtactgccccgagggctgcagcgagtgggtggccgccctgcagggcctgaccgagcacaccagcatcctggtgaaggacctgcccaccggcgccagactgctgttcagagtgagagcccacaacatggccggccccggcgcccccgtgaccaccaccgagcccgtgaccgtgcaggagatcctgcagagacccagactgcagctgcccagacacctgagacagaccatccagaagaaggtgggcgagcccgtgaacctgctgatccccttccagggcaagcccagaccccaggtgacctggaccaaggagggccagcccctggccggcgaggaggtgagcatcagaaacagccccaccgacaccatcctgttcatcagagccgccagaagagtgcacagcggcacctaccaggtgaccgtgagaatcgagaacatggaggacaaggccaccctggtgctgcaggtggtggacaagcccagccccccccaggacctgagagtgaccgacgcctggggcctgaacgtggccctggagtggaagcccccccaggacgtgggcaacaccgagctgtggggctacaccgtgcagaaggccgacaagaagaccatggagtggttcaccgtgctggagcactacagaagaacccactgcgtggtgcccgagctgatcatcggcaacggctactacttcagagtgttcagccagaacatggtgggcttcagcgacagagccgccaccaccaaggagcccgtgttcatccccagacccggcatcacctacgagccccccaactacaaggccctggacttcagcgaggcccccagcttcacccagcccctggtgaacagaagcgtgatcgccggctacaccgccatgctgtgctgcgccgtgagaggcagccccaagcccaagatcagctggttcaagaacggcctggacctgggcgaggacgccagattcagaatgttcagcaagcagggcgtgctgaccctggagatcagaaagccctgccccttcgacggcggcatctacgtgtgcagagccaccaacctgcagggcgaggccagatgcgagtgcagactggaggtgagagtgccccagtag

SEQ ID NO: 89962 - DNA, 3825 bp, synthetic construct
  misc_feature 1..3825: note = Description of Artificial Sequence: Synthetic coding sequence
  source 1..3825: mol_type = other DNA
atgcccgagcccggcaagaagcccgtgagcgccttcagcaagaagcccagaagcgtggaggtggccgccggcagccccgccgtgttcgaggccgagaccgagagagccggcgtgaaggtgagatggcagagaggcggcagcgacatcagcgccagcaacaagtacggcctggccaccgagggcaccagacacaccctgaccgtgagagaggtgggccccgccgaccagggcagctacgccgtgatcgccggcagcagcaaggtgaagttcgacctgaaggtgatcgaggccgagaaggccgagcccatgctggcccccgcccccgcccccgccgaggccaccggcgcccccggcgaggcccccgcccccgccgccgagctgggcgagagcgcccccagccccaagggcagcagcagcgccgccctgaacggccccacccccggcgcccccgacgaccccatcggcctgttcgtgatgagaccccaggacggcgaggtgaccgtgggcggcagcatcaccttcagcgccagagtggccggcgccagcctgctgaagccccccgtggtgaagtggttcaagggcaagtgggtggacctgagcagcaaggtgggccagcacctgcagctgcacgacagctacgacagagccagcaaggtgtacctgttcgagctgcacatcaccgacgcccagcccgccttcaccggcagctacagatgcgaggtgagcaccaaggacaagttcgactgcagcaacttcaacctgaccgtgcacgaggccatgggcaccggcgacctggacctgctgagcgccttcagaagaaccagcctggccggcggcggcagaagaatcagcgacagccacgaggacaccggcatcctggacttcagcagcctgctgaagaagagagacagcttcagaacccccagagacagcaagctggaggcccccgccgaggaggacgtgtgggagatcctgagacaggccccccccagcgagtacgagagaatcgccttccagtacggcgtgaccgacctgagaggcatgctgaagagactgaagggcatgagaagagacgagaagaagagcaccgccttccagaagaagctggagcccgcctaccaggtgagcaagggccacaagatcagactgaccgtggagctggccgaccacgacgccgaggtgaagtggctgaagaacggccaggagatccagatgagcggcagcaagtacatcttcgagagcatcggcgccaagagaaccctgaccatcagccagtgcagcctggccgacgacgccgcctaccagtgcgtggtgggcggcgagaagtgcagcaccgagctgttcgtgaaggagccccccgtgctgatcaccagacccctggaggaccagctggtgatggtgggccagagagtggagttcgagtgcgaggtgagcgaggagggcgcccaggtgaagtggctgaaggacggcgtggagctgaccagagaggagaccttcaagtacagattcaagaaggacggccagagacaccacctgatcatcaacgaggccatgctggaggacgccggccactacgccctgtgcaccagcggcggccaggccctggccgagctgatcgtgcaggagaagaagctggaggtgtaccagagcatcgccgacctgatggtgggcgccaaggaccaggccgtgttcaagtgcgaggtgagcgacgagaacgtgagaggcgtgtggctgaagaacggcaaggagctggtgcccgacagcagaatcaaggtgagccacatcggcagagtgcacaagctgaccatcgacgacgtgacccccgccgacgaggccgactacagcttcgtgcccgagggcttcgcctgcaacctgagcgccaagctgcacttcatggaggtgaagatcgacttcgtgcccagacaggagccccccaagatccacctggactgccccggcagaatccccgacaccatcgtggtggtggccggcaacaagctgagactggacgtgcccatcagcggcgaccccgcccccaccgtgatctggcagaaggccatcacccagggcaacaaggcccccgccagacccgcccccgacgcccccgaggacaccggcgacagcgacgagtgggtgttcgacaagaagctgctgtgcgagaccgagggcagagtgagagtggagaccaccaaggacagaagcatcttcaccgtggagggcgccgagaaggaggacgagggcgtgtacaccgtgaccgtgaagaaccccgtgggcgaggaccaggtgaacctgaccgtgaaggtgatcgacgtgcccgacgcccccgccgcccccaagatcagcaacgtgggcgaggacagctgcaccgtgcagtgggagccccccgcctacgacggcggccagcccatcctgggctacatcctggagagaaagaagaagaagagctacagatggatgagactgaacttcgacctgatccaggagctgagccacgaggccagaagaatgatcgagggcgtggtgtacgagatgagagtgtacgccgtgaacgccatcggcatgagcagacccagccccgccagccagcccttcatgcccatcggcccccccagcgagcccacccacctggccgtggaggacgtgagcgacaccaccgtgagcctgaagtggagaccccccgagagagtgggcgccggcggcctggacggctacagcgtggagtactgccccgagggctgcagcgagtgggtggccgccctgcagggcctgaccgagcacaccagcatcctggtgaaggacctgcccaccggcgccagactgctgttcagagtgagagcccacaacatggccggccccggcgcccccgtgaccaccaccgagcccgtgaccgtgcaggagatcctgcagagacccagactgcagctgcccagacacctgagacagaccatccagaagaaggtgggcgagcccgtgaacctgctgatccccttccagggcaagcccagaccccaggtgacctggaccaaggagggccagcccctggccggcgaggaggtgagcatcagaaacagccccaccgacaccatcctgttcatcagagccgccagaagagtgcacagcggcacctaccaggtgaccgtgagaatcgagaacatggaggacaaggccaccctggtgctgcaggtggtggacaagcccagccccccccaggacctgagagtgaccgacgcctggggcctgaacgtggccctggagtggaagcccccccaggacgtgggcaacaccgagctgtggggctacaccgtgcagaaggccgacaagaagaccatggagtggttcaccgtgctggagcactacagaagaacccactgcgtggtgcccgagctgatcatcggcaacggctactacttcagagtgttcagccagaacatggtgggcttcagcgacagagccgccaccaccaaggagcccgtgttcatccccagacccggcatcacctacgagccccccaactacaaggccctggacttcagcgaggcccccagcttcacccagcccctggtgaacagaagcgtgatcgccggctacaccgccatgctgtgctgcgccgtgagaggcagccccaagcccaagatcagctggttcaagaacggcctggacctgggcgaggacgccagattcagaatgttcagcaagcagggcgtgctgaccctggagatcagaaagccctgccccttcgacggcggcatctacgtgtgcagagccaccaacctgcagggcgaggccagatgcgagtgcagactggaggtgagagtgccccagtag

SEQ ID NO: 89963 - DNA, 3426 bp, synthetic construct
  misc_feature 1..3426: note = Description of Artificial Sequence: Synthetic coding sequence
  source 1..3426: mol_type = other DNA
atgcccgaggccaagcccgccgccaagaaggcccccaagggcaaggacgcccccaagggcgcccccaaggaggccccccccaaggaggcccccgccgaggcccccaaggaggccccccccgaggaccagagccccaccgccgaggagcccaccggcgtgttcctgaagaagcccgacagcgtgagcgtggagaccggcaaggacgccgtggtggtggccaaggtgaacggcaaggagctgcccgacaagcccaccatcaagtggttcaagggcaagtggctggagctgggcagcaagagcggcgccagattcagcttcaaggagagccacaacagcgccagcaacgtgtacaccgtggagctgcacatcggcaaggtggtgctgggcgacagaggctactacagactggaggtgaaggccaaggacacctgcgacagctgcggcttcaacatcgacgtggaggcccccagacaggacgccagcggccagagcctggagagcttcaagagaaccagcgagaagaagagcgacaccgccggcgagctggacttcagcggcctgctgaagaagagagaggtggtggaggaggagaagaagaagaagaagaaggacgacgacgacctgggcatcccccccgagatctgggagctgctgaagggcgccaagaagagcgagtacgagaagatcgccttccagtacggcatcaccgacctgagaggcatgctgaagagactgaagaaggccaaggtggaggtgaagaagagcgccgccttcaccaagaagctggaccccgcctaccaggtggacagaggcaacaagatcaagctgatggtggagatcagcgaccccgacctgaccctgaagtggttcaagaacggccaggagatcaagcccagcagcaagtacgtgttcgagaacgtgggcaagaagagaatcctgaccatcaacaagtgcaccctggccgacgacgccgcctacgaggtggccgtgaaggacgagaagtgcttcaccgagctgttcgtgaaggagccccccgtgctgatcgtgacccccctggaggaccagcaggtgttcgtgggcgacagagtggagatggccgtggaggtgagcgaggagggcgcccaggtgatgtggatgaaggacggcgtggagctgaccagagaggacagcttcaaggccagatacagattcaagaaggacggcaagagacacatcctgatcttcagcgacgtggtgcaggaggacagaggcagataccaggtgatcaccaacggcggccagtgcgaggccgagctgatcgtggaggagaagcagctggaggtgctgcaggacatcgccgacctgaccgtgaaggccagcgagcaggccgtgttcaagtgcgaggtgagcgacgagaaggtgaccggcaagtggtacaagaacggcgtggaggtgagacccagcaagagaatcaccatcagccacgtgggcagattccacaagctggtgatcgacgacgtgagacccgaggacgagggcgactacaccttcgtgcccgacggctacgccctgagcctgagcgccaagctgaacttcctggagatcaaggtggagtacgtgcccaagcaggagccccccaagatccacctggactgcagcggcaagaccagcgagaacgccatcgtggtggtggccggcaacaagctgagactggacgtgagcatcaccggcgagcccccccccgtggccacctggctgaagggcgacgaggtgttcaccaccaccgagggcagaaccagaatcgagaagagagtggactgcagcagcttcgtgatcgagagcgcccagagagaggacgagggcagatacaccatcaaggtgaccaaccccgtgggcgaggacgtggccagcatcttcctgcaggtggtggacgtgcccgacccccccgaggccgtgagaatcaccagcgtgggcgaggactgggccatcctggtgtgggagccccccatgtacgacggcggcaagcccgtgaccggctacctggtggagagaaagaagaagggcagccagagatggatgaagctgaacttcgaggtgttcaccgagaccacctacgagagcaccaagatgatcgagggcatcctgtacgagatgagagtgttcgccgtgaacgccatcggcgtgagccagcccagcatgaacaccaagcccttcatgcccatcgcccccaccagcgagcccctgcacctgatcgtggaggacgtgaccgacaccaccaccaccctgaagtggagaccccccaacagaatcggcgccggcggcatcgacggctacctggtggagtactgcctggagggcagcgaggagtgggtgcccgccaacaccgagcccgtggagagatgcggcttcaccgtgaagaacctgcccaccggcgccagaatcctgttcagagtggtgggcgtgaacatcgccggcagaagcgagcccgccaccctggcccagcccgtgaccatcagagagatcgccgagccccccaagatcagactgcccagacacctgagacagacctacatcagaaaggtgggcgagcagctgaacctggtggtgcccttccagggcaagcccagaccccaggtggtgtggaccaagggcggcgcccccctggacaccagcagagtgcacgtgagaaccagcgacttcgacaccgtgttcttcgtgagacaggccgccagaagcgacagcggcgagtacgagctgagcgtgcagatcgagaacatgaaggacaccgccaccatcagaatcagagtggtggagaaggccggcccccccatcaacgtgatggtgaaggaggtgtggggcaccaacgccctggtggagtggcaggcccccaaggacgacggcaacagcgagatcatgggctacttcgtgcagaaggccgacaagaagaccatggagtggttcaacgtgtacgagagaaacagacacaccagctgcaccgtgagcgacctgatcgtgggcaacgagtactacttcagagtgtacaccgagaacatctgcggcctgagcgacagccccggcgtgagcaagaacaccgccagaatcctgaagaccggcatcaccttcaagcccttcgagtacaaggagcacgacttcagaatggcccccaagttcctgacccccctgatcgacagagtggtggtggccggctacagcgccgccctgaactgcgccgtgagaggccaccccaagcccaaggtggtgtggatgaagaacaagatggagatcagagaggaccccaagttcctgatcaccaactaccagggcgtgctgaccctgaacatcagaagacccagccccttcgacgccggcacctacacctgcagagccgtgaacgagctgggcgaggccctggccgagtgcaagctggaggtgagagtgccccagtag

SEQ ID NO: 89964 - DNA, 3426 bp, synthetic construct
  misc_feature 1..3426: note = Description of Artificial Sequence: Synthetic coding sequence
  source 1..3426: mol_type = other DNA
atgcccgagcccaccaagaaggaggagaacgaggtgcccgcccccgcccccccccccgaggagcccagcaaggagaaggaggccggcaccacccccgccaaggactggaccctggtggagaccccccccggcgaggagcaggccaagcagaacgccaacagccagctgagcatcctgttcatcgagaagccccagggcggcaccgtgaaggtgggcgaggacatcaccttcatcgccaaggtgaaggccgaggacctgctgagaaagcccaccatcaagtggttcaagggcaagtggatggacctggccagcaaggccggcaagcacctgcagctgaaggagaccttcgagagacacagcagagtgtacaccttcgagatgcagatcatcaaggccaaggacaacttcgccggcaactacagatgcgaggtgacctacaaggacaagttcgacagctgcagcttcgacctggaggtgcacgagagcaccggcaccacccccaacatcgacatcagaagcgccttcaagagaagcggcgagggccaggaggacgccggcgagctggacttcagcggcctgctgaagagaagagaggtgaagcagcaggaggaggagccccaggtggacgtgtgggagctgctgaagaacgccaagcccagcgagtacgagaagatcgccttccagtacggcatcaccgacctgagaggcatgctgaagagactgaagagaatgagaagagaggagaagaagagcgccgccttcgccaagatcctggaccccgcctaccaggtggacaagggcggcagagtgagattcgtggtggagctggccgaccccaagctggaggtgaagtggtacaagaacggccaggagatcagacccagcaccaagtacatcttcgagcacaagggctgccagagaatcctgttcatcaacaactgccagatgaccgacgacagcgagtactacgtgaccgccggcgacgagaagtgcagcaccgagctgttcgtgagagagccccccatcatggtgaccaagcagctggaggacaccaccgcctactgcggcgagagagtggagctggagtgcgaggtgagcgaggacgacgccaacgtgaagtggttcaagaacggcgaggagatcatccccggccccaagagcagatacagaatcagagtggagggcaagaagcacatcctgatcatcgagggcgccaccaaggccgacgccgccgagtacagcgtgatgaccaccggcggccagagcagcgccaagctgagcgtggacctgaagcccctgaagatcctgacccccctgaccgaccagaccgtgaacctgggcaaggagatctgcctgaagtgcgagatcagcgagaacatccccggcaagtggaccaagaacggcctgcccgtgcaggagagcgacagactgaaggtggtgcacaagggcagaatccacaagctggtgatcgccaacgccctgaccgaggacgagggcgactacgtgttcgcccccgacgcctacaacgtgaccctgcccgccaaggtgcacgtgatcgacccccccaagatcatcctggacggcctggacgccgacaacaccgtgaccgtgatcgccggcaacaagctgagactggagatccccatcagcggcgagcccccccccaaggccatgtggagcagaggcgacaaggccatcatggagggcagcggcagaatcagaaccgagagctaccccgacagcagcaccctggtgatcgacatcgccgagagagacgacagcggcgtgtaccacatcaacctgaagaacgaggccggcgaggcccacgccagcatcaaggtgaaggtggtggacttccccgacccccccgtggcccccaccgtgaccgaggtgggcgacgactggtgcatcatgaactgggagccccccgcctacgacggcggcagccccatcctgggctacttcatcgagagaaagaagaagcagagcagcagatggatgagactgaacttcgacctgtgcaaggagaccaccttcgagcccaagaagatgatcgagggcgtggcctacgaggtgagaatcttcgccgtgaacgccatcggcatcagcaagcccagcatgcccagcagacccttcgtgcccctggccgtgaccagcccccccaccctgctgaccgtggacagcgtgaccgacaccaccgtgaccatgagatggagaccccccgaccacatcggcgccgccggcctggacggctacgtgctggagtactgcttcgagggcagcaccagcgccaagcagagcgacgagaacggcgaggccgcctacgacctgcccgccgaggactggatcgtggccaacaaggacctgatcgacaagaccaagttcaccatcaccggcctgcccaccgacgccaagatcttcgtgagagtgaaggccgtgaacgccgccggcgccagcgagcccaagtactacagccagcccatcctggtgaaggagatcatcgagccccccaagatcagaatccccagacacctgaagcagacctacatcagaagagtgggcgaggccgtgaacctggtgatccccttccagggcaagcccagacccgagctgacctggaagaaggacggcgccgagatcgacaagaaccagatcaacatcagaaacagcgagaccgacaccatcatcttcatcagaaaggccgagagaagccacagcggcaagtacgacctgcaggtgaaggtggacaagttcgtggagaccgccagcatcgacatccagatcatcgacagacccggccccccccagatcgtgaagatcgaggacgtgtggggcgagaacgtggccctgacctggaccccccccaaggacgacggcaacgccgccatcaccggctacaccatccagaaggccgacaagaagagcatggagtggttcaccgtgatcgagcactaccacagaaccagcgccaccatcaccgagctggtgatcggcaacgagtactacttcagagtgttcagcgagaacatgtgcggcctgagcgaggacgccaccatgaccaaggagagcgccgtgatcgccagagacggcaagatctacaagaaccccgtgtacgaggacttcgacttcagcgaggcccccatgttcacccagcccctggtgaacacctacgccatcgccggctacaacgccaccctgaactgcagcgtgagaggcaaccccaagcccaagatcacctggatgaagaacaaggtggccatcgtggacgaccccagatacagaatgttcagcaaccagggcgtgtgcaccctggagatcagaaagcccagcccctacgacggcggcacctactgctgcaaggccgtgaacgacctgggcaccgtggagatcgagtgcaagctggaggtgaaggtgatcgcccagtag

SEQ ID NO: 89965 - DNA, 3516 bp, synthetic construct
  misc_feature 1..3516: note = Description of Artificial Sequence: Synthetic coding sequence
  source 1..3516: mol_type = other DNA
atgcccgagcccaccaagaaggaggagaacgaggtgcccgcccccgcccccccccccgaggagcccagcaaggagaaggaggccggcaccacccccgccaaggacgaggaggaggtgagcccccccagcgccctgccccccggcctgggcagcagagccctggagagaaaggacagcgactggaccctggtggagaccccccccggcgaggagcaggccaagcagaacgccaacagccagctgagcatcctgttcatcgagaagccccagggcggcaccgtgaaggtgggcgaggacatcaccttcatcgccaaggtgaaggccgaggacctgctgagaaagcccaccatcaagtggttcaagggcaagtggatggacctggccagcaaggccggcaagcacctgcagctgaaggagaccttcgagagacacagcagagtgtacaccttcgagatgcagatcatcaaggccaaggacaacttcgccggcaactacagatgcgaggtgacctacaaggacaagttcgacagctgcagcttcgacctggaggtgcacgagagcaccggcaccacccccaacatcgacatcagaagcgccttcaagagaagcggcgagggccaggaggacgccggcgagctggacttcagcggcctgctgaagagaagagaggtgaagcagcaggaggaggagccccaggtggacgtgtgggagctgctgaagaacgccaagcccagcgagtacgagaagatcgccttccagtacggcatcaccgacctgagaggcatgctgaagagactgaagagaatgagaagagaggagaagaagagcgccgccttcgccaagatcctggaccccgcctaccaggtggacaagggcggcagagtgagattcgtggtggagctggccgaccccaagctggaggtgaagtggtacaagaacggccaggagatcagacccagcaccaagtacatcttcgagcacaagggctgccagagaatcctgttcatcaacaactgccagatgaccgacgacagcgagtactacgtgaccgccggcgacgagaagtgcagcaccgagctgttcgtgagagagccccccatcatggtgaccaagcagctggaggacaccaccgcctactgcggcgagagagtggagctggagtgcgaggtgagcgaggacgacgccaacgtgaagtggttcaagaacggcgaggagatcatccccggccccaagagcagatacagaatcagagtggagggcaagaagcacatcctgatcatcgagggcgccaccaaggccgacgccgccgagtacagcgtgatgaccaccggcggccagagcagcgccaagctgagcgtggacctgaagcccctgaagatcctgacccccctgaccgaccagaccgtgaacctgggcaaggagatctgcctgaagtgcgagatcagcgagaacatccccggcaagtggaccaagaacggcctgcccgtgcaggagagcgacagactgaaggtggtgcacaagggcagaatccacaagctggtgatcgccaacgccctgaccgaggacgagggcgactacgtgttcgcccccgacgcctacaacgtgaccctgcccgccaaggtgcacgtgatcgacccccccaagatcatcctggacggcctggacgccgacaacaccgtgaccgtgatcgccggcaacaagctgagactggagatccccatcagcggcgagcccccccccaaggccatgtggagcagaggcgacaaggccatcatggagggcagcggcagaatcagaaccgagagctaccccgacagcagcaccctggtgatcgacatcgccgagagagacgacagcggcgtgtaccacatcaacctgaagaacgaggccggcgaggcccacgccagcatcaaggtgaaggtggtggacttccccgacccccccgtggcccccaccgtgaccgaggtgggcgacgactggtgcatcatgaactgggagccccccgcctacgacggcggcagccccatcctgggctacttcatcgagagaaagaagaagcagagcagcagatggatgagactgaacttcgacctgtgcaaggagaccaccttcgagcccaagaagatgatcgagggcgtggcctacgaggtgagaatcttcgccgtgaacgccatcggcatcagcaagcccagcatgcccagcagacccttcgtgcccctggccgtgaccagcccccccaccctgctgaccgtggacagcgtgaccgacaccaccgtgaccatgagatggagaccccccgaccacatcggcgccgccggcctggacggctacgtgctggagtactgcttcgagggcaccgaggactggatcgtggccaacaaggacctgatcgacaagaccaagttcaccatcaccggcctgcccaccgacgccaagatcttcgtgagagtgaaggccgtgaacgccgccggcgccagcgagcccaagtactacagccagcccatcctggtgaaggagatcatcgagccccccaagatcagaatccccagacacctgaagcagacctacatcagaagagtgggcgaggccgtgaacctggtgatccccttccagggcaagcccagacccgagctgacctggaagaaggacggcgccgagatcgacaagaaccagatcaacatcagaaacagcgagaccgacaccatcatcttcatcagaaaggccgagagaagccacagcggcaagtacgacctgcaggtgaaggtggacaagttcgtggagaccgccagcatcgacatccagatcatcgacagacccggccccccccagatcgtgaagatcgaggacgtgtggggcgagaacgtggccctgacctggaccccccccaaggacgacggcaacgccgccatcaccggctacaccatccagaaggccgacaagaagagcatggagtggttcaccgtgatcgagcactaccacagaaccagcgccaccatcaccgagctggtgatcggcaacgagtactacttcagagtgttcagcgagaacatgtgcggcctgagcgaggacgccaccatgaccaaggagagcgccgtgatcgccagagacggcaagatctacaagaaccccgtgtacgaggacttcgacttcagcgaggcccccatgttcacccagcccctggtgaacacctacgccatcgccggctacaacgccaccctgaactgcagcgtgagaggcaaccccaagcccaagatcacctggatgaagaacaaggtggccatcgtggacgaccccagatacagaatgttcagcaaccagggcgtgtgcaccctggagatcagaaagcccagcccctacgacggcggcacctactgctgcaaggccgtgaacgacctgggcaccgtggagatcgagtgcaagctggaggtgaaggtgatctaccagggcgtgaacacccccggccagcccgtgttcctggagggccagcagcagagcctgcacaacaaggacttctag

SEQ ID NO: 89966 - DNA, 3447 bp, synthetic construct
  misc_feature 1..3447: note = Description of Artificial Sequence: Synthetic coding sequence
  source 1..3447: mol_type = other DNA
atgcccgagcccaccaagaaggaggagaacgaggtgcccgcccccgcccccccccccgaggagcccagcaaggagaaggaggccggcaccacccccgccaaggacgaggaggaggtgagcccccccagcgccctgccccccggcctgggcagcagagccctggagagaaaggacagcgactggaccctggtggagaccccccccggcgaggagcaggccaagcagaacgccaacagccagctgagcatcctgttcatcgagaagccccagggcggcaccgtgaaggtgggcgaggacatcaccttcatcgccaaggtgaaggccgaggacctgctgagaaagcccaccatcaagtggttcaagggcaagtggatggacctggccagcaaggccggcaagcacctgcagctgaaggagaccttcgagagacacagcagagtgtacaccttcgagatgcagatcatcaaggccaaggacaacttcgccggcaactacagatgcgaggtgacctacaaggacaagttcgacagctgcagcttcgacctggaggtgcacgagagcaccggcaccacccccaacatcgacatcagaagcgccttcaagagaagcggcgagggccaggaggacgccggcgagctggacttcagcggcctgctgaagagaagagaggtgaagcagcaggaggaggagccccaggtggacgtgtgggagctgctgaagaacgccaagcccagcgagtacgagaagatcgccttccagtacggcatcaccgacctgagaggcatgctgaagagactgaagagaatgagaagagaggagaagaagagcgccgccttcgccaagatcctggaccccgcctaccaggtggacaagggcggcagagtgagattcgtggtggagctggccgaccccaagctggaggtgaagtggtacaagaacggccaggagatcagacccagcaccaagtacatcttcgagcacaagggctgccagagaatcctgttcatcaacaactgccagatgaccgacgacagcgagtactacgtgaccgccggcgacgagaagtgcagcaccgagctgttcgtgagagagccccccatcatggtgaccaagcagctggaggacaccaccgcctactgcggcgagagagtggagctggagtgcgaggtgagcgaggacgacgccaacgtgaagtggttcaagaacggcgaggagatcatccccggccccaagagcagatacagaatcagagtggagggcaagaagcacatcctgatcatcgagggcgccaccaaggccgacgccgccgagtacagcgtgatgaccaccggcggccagagcagcgccaagctgagcgtggacctgaagcccctgaagatcctgacccccctgaccgaccagaccgtgaacctgggcaaggagatctgcctgaagtgcgagatcagcgagaacatccccggcaagtggaccaagaacggcctgcccgtgcaggagagcgacagactgaaggtggtgcacaagggcagaatccacaagctggtgatcgccaacgccctgaccgaggacgagggcgactacgtgttcgcccccgacgcctacaacgtgaccctgcccgccaaggtgcacgtgatcgacccccccaagatcatcctggacggcctggacgccgacaacaccgtgaccgtgatcgccggcaacaagctgagactggagatccccatcagcggcgagcccccccccaaggccatgtggagcagaggcgacaaggccatcatggagggcagcggcagaatcagaaccgagagctaccccgacagcagcaccctggtgatcgacatcgccgagagagacgacagcggcgtgtaccacatcaacctgaagaacgaggccggcgaggcccacgccagcatcaaggtgaaggtggtggacttccccgacccccccgtggcccccaccgtgaccgaggtgggcgacgactggtgcatcatgaactgggagccccccgcctacgacggcggcagccccatcctgggctacttcatcgagagaaagaagaagcagagcagcagatggatgagactgaacttcgacctgtgcaaggagaccaccttcgagcccaagaagatgatcgagggcgtggcctacgaggtgagaatcttcgccgtgaacgccatcggcatcagcaagcccagcatgcccagcagacccttcgtgcccctggccgtgaccagcccccccaccctgctgaccgtggacagcgtgaccgacaccaccgtgaccatgagatggagaccccccgaccacatcggcgccgccggcctggacggctacgtgctggagtactgcttcgagggcaccgaggactggatcgtggccaacaaggacctgatcgacaagaccaagttcaccatcaccggcctgcccaccgacgccaagatcttcgtgagagtgaaggccgtgaacgccgccggcgccagcgagcccaagtactacagccagcccatcctggtgaaggagatcatcgagccccccaagatcagaatccccagacacctgaagcagacctacatcagaagagtgggcgaggccgtgaacctggtgatccccttccagggcaagcccagacccgagctgacctggaagaaggacggcgccgagatcgacaagaaccagatcaacatcagaaacagcgagaccgacaccatcatcttcatcagaaaggccgagagaagccacagcggcaagtacgacctgcaggtgaaggtggacaagttcgtggagaccgccagcatcgacatccagatcatcgacagacccggccccccccagatcgtgaagatcgaggacgtgtggggcgagaacgtggccctgacctggaccccccccaaggacgacggcaacgccgccatcaccggctacaccatccagaaggccgacaagaagagcatggagtggttcaccgtgatcgagcactaccacagaaccagcgccaccatcaccgagctggtgatcggcaacgagtactacttcagagtgttcagcgagaacatgtgcggcctgagcgaggacgccaccatgaccaaggagagcgccgtgatcgccagagacggcaagatctacaagaaccccgtgtacgaggacttcgacttcagcgaggcccccatgttcacccagcccctggtgaacacctacgccatcgccggctacaacgccaccctgaactgcagcgtgagaggcaaccccaagcccaagatcacctggatgaagaacaaggtggccatcgtggacgaccccagatacagaatgttcagcaaccagggcgtgtgcaccctggagatcagaaagcccagcccctacgacggcggcacctactgctgcaaggccgtgaacgacctgggcaccgtggagatcgagtgcaagctggaggtgaaggtgatcgcccagtag

SEQ ID NO: 89967 - DNA, 3495 bp, synthetic construct
  misc_feature 1..3495: note = Description of Artificial Sequence: Synthetic coding sequence
  source 1..3495: mol_type = other DNA
atgcccgagcccaccaagaaggaggagaacgaggtgcccgcccccgcccccccccccgaggagcccagcaaggagaaggaggccggcaccacccccgccaaggactggaccctggtggagaccccccccggcgaggagcaggccaagcagaacgccaacagccagctgagcatcctgttcatcgagaagccccagggcggcaccgtgaaggtgggcgaggacatcaccttcatcgccaaggtgaaggccgaggacctgctgagaaagcccaccatcaagtggttcaagggcaagtggatggacctggccagcaaggccggcaagcacctgcagctgaaggagaccttcgagagacacagcagagtgtacaccttcgagatgcagatcatcaaggccaaggacaacttcgccggcaactacagatgcgaggtgacctacaaggacaagttcgacagctgcagcttcgacctggaggtgcacgagagcaccggcaccacccccaacatcgacatcagaagcgccttcaagagaagcggcgagggccaggaggacgccggcgagctggacttcagcggcctgctgaagagaagagaggtgaagcagcaggaggaggagccccaggtggacgtgtgggagctgctgaagaacgccaagcccagcgagtacgagaagatcgccttccagtacggcatcaccgacctgagaggcatgctgaagagactgaagagaatgagaagagaggagaagaagagcgccgccttcgccaagatcctggaccccgcctaccaggtggacaagggcggcagagtgagattcgtggtggagctggccgaccccaagctggaggtgaagtggtacaagaacggccaggagatcagacccagcaccaagtacatcttcgagcacaagggctgccagagaatcctgttcatcaacaactgccagatgaccgacgacagcgagtactacgtgaccgccggcgacgagaagtgcagcaccgagctgttcgtgagagagccccccatcatggtgaccaagcagctggaggacaccaccgcctactgcggcgagagagtggagctggagtgcgaggtgagcgaggacgacgccaacgtgaagtggttcaagaacggcgaggagatcatccccggccccaagagcagatacagaatcagagtggagggcaagaagcacatcctgatcatcgagggcgccaccaaggccgacgccgccgagtacagcgtgatgaccaccggcggccagagcagcgccaagctgagcgtggacctgaagcccctgaagatcctgacccccctgaccgaccagaccgtgaacctgggcaaggagatctgcctgaagtgcgagatcagcgagaacatccccggcaagtggaccaagaacggcctgcccgtgcaggagagcgacagactgaaggtggtgcacaagggcagaatccacaagctggtgatcgccaacgccctgaccgaggacgagggcgactacgtgttcgcccccgacgcctacaacgtgaccctgcccgccaaggtgcacgtgatcgacccccccaagatcatcctggacggcctggacgccgacaacaccgtgaccgtgatcgccggcaacaagctgagactggagatccccatcagcggcgagcccccccccaaggccatgtggagcagaggcgacaaggccatcatggagggcagcggcagaatcagaaccgagagctaccccgacagcagcaccctggtgatcgacatcgccgagagagacgacagcggcgtgtaccacatcaacctgaagaacgaggccggcgaggcccacgccagcatcaaggtgaaggtggtggacttccccgacccccccgtggcccccaccgtgaccgaggtgggcgacgactggtgcatcatgaactgggagccccccgcctacgacggcggcagccccatcctgggctacttcatcgagagaaagaagaagcagagcagcagatggatgagactgaacttcgacctgtgcaaggagaccaccttcgagcccaagaagatgatcgagggcgtggcctacgaggtgagaatcttcgccgtgaacgccatcggcatcagcaagcccagcatgcccagcagacccttcgtgcccctggccgtgaccagcccccccaccctgctgaccgtggacagcgtgaccgacaccaccgtgaccatgagatggagaccccccgaccacatcggcgccgccggcctggacggctacgtgctggagtactgcttcgagggcagcaccagcgccaagcagagcgacgagaacggcgaggccgcctacgacctgcccgccgaggactggatcgtggccaacaaggacctgatcgacaagaccaagttcaccatcaccggcctgcccaccgacgccaagatcttcgtgagagtgaaggccgtgaacgccgccggcgccagcgagcccaagtactacagccagcccatcctggtgaaggagatcatcgagccccccaagatcagaatccccagacacctgaagcagacctacatcagaagagtgggcgaggccgtgaacctggtgatccccttccagggcaagcccagacccgagctgacctggaagaaggacggcgccgagatcgacaagaaccagatcaacatcagaaacagcgagaccgacaccatcatcttcatcagaaaggccgagagaagccacagcggcaagtacgacctgcaggtgaaggtggacaagttcgtggagaccgccagcatcgacatccagatcatcgacagacccggccccccccagatcgtgaagatcgaggacgtgtggggcgagaacgtggccctgacctggaccccccccaaggacgacggcaacgccgccatcaccggctacaccatccagaaggccgacaagaagagcatggagtggttcaccgtgatcgagcactaccacagaaccagcgccaccatcaccgagctggtgatcggcaacgagtactacttcagagtgttcagcgagaacatgtgcggcctgagcgaggacgccaccatgaccaaggagagcgccgtgatcgccagagacggcaagatctacaagaaccccgtgtacgaggacttcgacttcagcgaggcccccatgttcacccagcccctggtgaacacctacgccatcgccggctacaacgccaccctgaactgcagcgtgagaggcaaccccaagcccaagatcacctggatgaagaacaaggtggccatcgtggacgaccccagatacagaatgttcagcaaccagggcgtgtgcaccctggagatcagaaagcccagcccctacgacggcggcacctactgctgcaaggccgtgaacgacctgggcaccgtggagatcgagtgcaagctggaggtgaaggtgatctaccagggcgtgaacacccccggccagcccgtgttcctggagggccagcagcagagcctgcacaacaaggacttctag

SEQ ID NO: 89968 - DNA, 2349 bp, synthetic construct
  misc_feature 1..2349: note = Description of Artificial Sequence: Synthetic coding sequence
  source 1..2349: mol_type = other DNA
atgcccgagcccaccaagaaggaggagaacgaggtgcccgcccccgcccccccccccgaggagcccagcaaggagaaggaggccggcaccacccccgccaaggacgaggaggaggtgagcccccccagcgccctgccccccggcctgggcagcagagccctggagagaaaggacagcgactggaccctggtggagaccccccccggcgaggagcaggccaagcagaacgccaacagccagctgagcatcctgttcatcgagaagccccagggcggcaccgtgaaggtgggcgaggacatcaccttcatcgccaaggtgaaggccgaggacctgctgagaaagcccaccatcaagtggttcaagggcaagtggatggacctggccagcaaggccggcaagcacctgcagctgaaggagaccttcgagagacacagcagagtgtacaccttcgagatgcagatcatcaaggccaaggacaacttcgccggcaactacagatgcgaggtgacctacaaggacaagttcgacagctgcagcttcgacctggaggtgcacgagagcaccggcaccacccccaacatcgacatcagaagcgccttcaagagaagcggcgagggccaggaggacgccggcgagctggacttcagcggcctgctgaagagaagagaggtgaagcagcaggaggaggagccccaggtggacgtgtgggagctgctgaagaacgccaagcccagcgagtacgagaagatcgccttccagtacggcatcaccgacctgagaggcatgctgaagagactgaagagaatgagaagagaggagaagaagagcgccgccttcgccaagatcctggaccccgcctaccaggtggacaagggcggcagagtgagattcgtggtggagctggccgaccccaagctggaggtgaagtggtacaagaacggccaggagatcagacccagcaccaagtacatcttcgagcacaagggctgccagagaatcctgttcatcaacaactgccagatgaccgacgacagcgagtactacgtgaccgccggcgacgagaagtgcagcaccgagctgttcgtgagagagccccccatcatggtgaccaagcagctggaggacaccaccgcctactgcggcgagagagtggagctggagtgcgaggtgagcgaggacgacgccaacgtgaagtggttcaagaacggcgaggagatcatccccggccccaagagcagatacagaatcagagtggagggcaagaagcacatcctgatcatcgagggcgccaccaaggccgacgccgccgagtacagcgtgatgaccaccggcggccagagcagcgccaagctgagcgtggacctgaagcccctgaagatcctgacccccctgaccgaccagaccgtgaacctgggcaaggagatctgcctgaagtgcgagatcagcgagaacatccccggcaagtggaccaagaacggcctgcccgtgcaggagagcgacagactgaaggtggtgcacaagggcagaatccacaagctggtgatcgccaacgccctgaccgaggacgagggcgactacgtgttcgcccccgacgcctacaacgtgaccctgcccgccaaggtgcacgtgatcgacccccccaagatcatcctggacggcctggacgccgacaacaccgtgaccgtgatcgccggcaacaagctgagactggagatccccatcagcggcgagcccccccccaaggccatgtggagcagaggcgacaaggccatcatggagggcagcggcagaatcagaaccgagagctaccccgacagcagcaccctggtgatcgacatcgccgagagagacgacagcggcgtgtaccacatcaacctgaagaacgaggccggcgaggcccacgccagcatcaaggtgaaggtggtggacttccccgacccccccgtggcccccaccgtgaccgaggtgggcgacgactggtgcatcatgaactgggagccccccgcctacgacggcggcagccccatcctgggctacttcatcgagagaaagaagaagcagagcagcagatggatgagactgaacttcgacctgtgcaaggagaccaccttcgagcccaagaagatgatcgagggcgtggcctacgaggtgagaatcttcgccgtgaacgccatcggcatcagcaagcccagcatgcccagcagacccttcgtgcccctggccgtgaccagcccccccaccctgctgaccgtggacagcgtgaccgacaccaccgtgaccatgagatggagacccagaccccactggtgcagcagattcagatggctgtgcgccagagtgctgctgtag

SEQ ID NO: 89969 - DNA, 3426 bp, synthetic construct; identical to SEQ ID NO: 89964
  misc_feature 1..3426: note = Description of Artificial Sequence: Synthetic coding sequence
  source 1..3426: mol_type = other DNA

SEQ ID NO: 89970 - DNA, 3372 bp, synthetic construct
  misc_feature 1..3372: note = Description of Artificial Sequence: Synthetic coding sequence
  source 1..3372: mol_type = other DNA
atgcccgagcccaccaagaaggaggagaacgaggtgcccgcccccgcccccccccccgaggagcccagcaaggagaaggaggccggcaccacccccgccaaggactggaccctggtggagaccccccccggcgaggagcaggccaagcagaacgccaacagccagctgagcatcctgttcatcgagaagccccagggcggcaccgtgaaggtgggcgaggacatcaccttcatcgccaaggtgaaggccgaggacctgctgagaaagcccaccatcaagtggttcaagggcaagtggatggacctggccagcaaggccggcaagcacctgcagctgaaggagaccttcgagagacacagcagagtgtacaccttcgagatgcagatcatcaaggccaaggacaacttcgccggcaactacagatgcgaggtgacctacaaggacaagttcgacagctgcagcttcgacctggaggtgcacgagagcaccggcaccacccccaacatcgacatcagaagcgccttcaagagaagcggcgagggccaggaggacgccggcgagctggacttcagcggcctgctgaagagaagagaggtgaagcagcaggaggaggagccccaggtggacgtgtgggagctgctgaagaacgccaagcccagcgagtacgagaagatcgccttccagtacggcatcaccgacctgagaggcatgctgaagagactgaagagaatgagaagagaggagaagaagagcgccgccttcgccaagatcctggaccccgcctaccaggtggacaagggcggcagagtgagattcgtggtggagctggccgaccccaagctggaggtgaagtggtacaagaacggccaggagatcagacccagcaccaagtacatcttcgagcacaagggctgccagagaatcctgttcatcaacaactgccagatgaccgacgacagcgagtactacgtgaccgccggcgacgagaagtgcagcaccgagctgttcgtgagagagccccccatcatggtgaccaagcagctggaggacaccaccgcctactgcggcgagagagtggagctggagtgcgaggtgagcgaggacgacgccaacgtgaagtggttcaagaacggcgaggagatcatccccggccccaagagcagatacagaatcagagtggagggcaagaagcacatcctgatcatcgagggcgccaccaaggccgacgccgccgagtacagcgtgatgaccaccggcggccagagcagcgccaagctgagcgtggacctgaagcccctgaagatcctgacccccctgaccgaccagaccgtgaacctgggcaaggagatctgcctgaagtgcgagatcagcgagaacatccccggcaagtggaccaagaacggcctgcccgtgcaggagagcgacagactgaaggtggtgcacaagggcagaatccacaagctggtgatcgccaacgccctgaccgaggacgagggcgactacgtgttcgcccccgacgcctacaacgtgaccctgcccgccaaggtgcacgtgatcgacccccccaagatcatcctggacggcctggacgccgacaacaccgtgaccgtgatcgccggcaacaagctgagactggagatccccatcagcggcgagcccccccccaaggccatgtggagcagaggcgacaaggccatcatggagggcagcggcagaatcagaaccgagagctaccccgacagcagcaccctggtgatcgacatcgccgagagagacgacagcggcgtgtaccacatcaacctgaagaacgaggccggcgaggcccacgccagcatcaaggtgaaggtggtggacttccccgacccccccgtggcccccaccgtgaccgaggtgggcgacgactggtgcatcatgaactgggagccccccgcctacgacggcggcagccccatcctgggctacttcatcgagagaaagaagaagcagagcagcagatggatgagactgaacttcgacctgtgcaaggagaccaccttcgagcccaagaagatgatcgagggcgtggcctacgaggtgagaatcttcgccgtgaacgccatcggcatcagcaagcccagcatgcccagcagacccttcgtgcccctggccgtgaccagcccccccaccctgctgaccgtggacagcgtgaccgacaccaccgtgaccatgagatggagaccccccgaccacatcggcgccgccggcctggacggctacgtgctggagtactgcttcgagggcaccgaggactggatcgtggccaacaaggacctgatcgacaagaccaagttcaccatcaccggcctgcccaccgacgccaagatcttcgtgagagtgaaggccgtgaacgccgccggcgccagcgagcccaagtactacagccagcccatcctggtgaaggagatcatcgagccccccaagatcagaatccccagacacctgaagcagacctacatcagaagagtgggcgaggccgtgaacctggtgatccccttccagggcaagcccagacccgagctgacctggaagaaggacggcgccgagatcgacaagaaccagatcaacatcagaaacagcgagaccgacaccatcatcttcatcagaaaggccgagagaagccacagcggcaagtacgacctgcaggtgaaggtggacaagttcgtggagaccgccagcatcgacatccagatcatcgacagacccggccccccccagatcgtgaagatcgaggacgtgtggggcgagaacgtggccctgacctggaccccccccaaggacgacggcaacgccgccatcaccggctacaccatccagaaggccgacaagaagagcatggagtggttcaccgtgatcgagcactaccacagaaccagcgccaccatcaccgagctggtgatcggcaacgagtactacttcagagtgttcagcgagaacatgtgcggcctgagcgaggacgccaccatgaccaaggagagcgccgtgatcgccagagacggcaagatctacaagaaccccgtgtacgaggacttcgacttcagcgaggcccccatgttcacccagcccctggtgaacacctacgccatcgccggctacaacgccaccctgaactgcagcgtgagaggcaaccccaagcccaagatcacctggatgaagaacaaggtggccatcgtggacgaccccagatacagaatgttcagcaaccagggcgtgtgcaccctggagatcagaaagcccagcccctacgacggcggcacctactgctgcaaggccgtgaacgacctgggcaccgtggagatcgagtgcaagctggaggtgaaggtgatcgcccagtag

SEQ ID NO: 89971 - DNA, 1434 bp, synthetic construct
  misc_feature 1..1434: note = Description of Artificial Sequence: Synthetic coding sequence
  source 1..1434: mol_type = other DNA
atgatggagaagaacaccagcgagggccccgcctgcagccccgaggagaccgccagcgagagcgccaaggtgcccaccgccgagccccccggcgaggtggccgtgagcgagagcaccagagaggagcaggtgcccaagccccaggcccccgccccccaggcccccaccgccagcaccgccaccaagcccgccccccccagcgaggacgtgcccagcgcccccctgctgctgaccctggacgacgtgagcagcagcagcgtgaccgtgagctgggagccccccgagagactgggcagactgggcctgcagggctacgtgctggagctgtgcagagagggcgccagcgagtgggtgcccgtgagcgccagacccatgatggtgacccagcagaccgtgagaaacctggccctgggcgacaagttcctgctgagagtgagcgccgtgagcagcgccggcgccggcccccccgccatgctggaccagcccatccacatcagagagaacatcgaggcccccaagatcagagtgcccagacacctgagacagacctacatcagacaggtgggcgagaccgtgaacctgcagatccccttccagggcaagcccaagccccaggccacctggacccacaacggccacgccctggacagccagagagtgagcatgagaaccggcgaccaggacagcatcctgttcatcagaagcgcccagagaagcgacagcggcagatacgagctgaccgtgagagtggaggacctggaggccaaggccgtgatcgacatcctggtgatcgagaagcccggcccccccagcagcatcagactgctggacgtgtggggctgcaacgccgccctgcagtggacccccccccaggacaccggcaacaccgagctgctgggctacatggtgcagaaggccgacaagaagaccggccagtggttcaccgtgctggagagataccaccccaccacctgcaccatcagcgacctgatcatcggcaacagctacagcttcagagtgttcagcgagaacctgtgcggcctgagcaccagcgccaccgtgaccaaggagctggcccacatccagaaggccgacatcgccgccaagcccaagggcttcatcgagagagacttcagcgaggcccccagcttcacccagcccctggccgaccacaccagcacccccggctacagcacccagctgttctgcagcgtgagagccagccccaagcccaagatcatctggatgaagaacaagatggagatccagggcaaccccaagtacagagccctgagcgagcagggcgtgtgcaccctggagatcagaaagcccagccccttcgacagcggcgtgtacacctgcaaggccatcaacgtgctgggcgaggccagcgtggactgcagactggaggtgaaggccagcgccgcccactag

SEQ ID NO: 89972 - DNA, 5817 bp, synthetic construct
  misc_feature 1..5817: note = Description of Artificial Sequence: Synthetic coding sequence
  source 1..5817: mol_type = other DNA
atgagcagcgacgccgagatggccatcttcggcgaggccgccccctacctgagaaagcccgagaaggagagaatcgaggcccagaacagacccttcgacagcaagaaggcctgcttcgtggccgacaacaaggagatgtacgtgaagggcatgatccagaccagagagaacgacaaggtgatcgtgaagaccctggacgacagaatgctgaccctgaacaacgaccaggtgttccccatgaacccccccaagttcgacaagatcgaggacatggccatgatgacccacctgcacgagcccgccgtgctgtacaacctgaaggagagatacgccgcctggatgatctacacctacagcggcctgttctgcgtgaccgtgaacccctacaagtggctgcccgtgtacaagcccgaggtggtggccgcctacagaggcaagaagagacaggaggcccccccccacatcttcagcatcagcgacaacgcctaccagttcatgctgaccgacagagacaaccagagcatcctgatcaccggcgagagcggcgccggcaagaccgtgaacaccaagagagtgatccagtacttcgccaccatcgccgtgaccggcgacaagaagaaggagacccagcccggcaagatgcagggcaccctggaggaccagatcatccaggccaaccccctgctggaggccttcggcaacgccaagaccgtgagaaacgacaacagcagcagattcggcaagttcatcagaatccacttcggcgccaccggcaagctggccagcgccgacatcgagacctacctgctggagaagagcagagtgaccttccagctgagcagcgagagaagctaccacatcttctaccagatcatgagcaacaagaagcccgagctgatcgacctgctgctgatcagcaccaaccccttcgacttccccttcgtgagccagggcgaggtgaccgtggccagcatcgacgacagcgaggagctgctggccaccgacaacgccatcgacatcctgggcttcagcagcgaggagaaggtgggcatctacaagctgaccggcgccgtgatgcactacggcaacatgaagttcaagcagaagcagagagaggagcaggccgagcccgacggcaccgaggtggccgacaaggccggctacctgatgggcctgaacagcgccgagatgctgaagggcctgtgctgccccagagtgaaggtgggcaacgagtacgtgaccaagggccagaacgtgcagcaggtgaccaacagcgtgggcgccctggccaaggccgtgtacgagaagatgttcctgtggatggtgaccagaatcaaccagcagctggacaccaagcagcccagacagtacttcatcggcgtgctggacatcgccggcttcgagatcttcgacttcaacagcctggagcagctgtgcatcaacttcaccaacgagaagctgcagcagttcttcaaccaccacatgttcgtgctggagcaggaggagtacaagaaggagggcatcgagtgggagttcatcgacttcggcatggacctggccgcctgcatcgagctgatcgagaagcccatgggcatcttcagcatcctggaggaggagtgcatgttccccaaggccaccgacaccagcttcaagaacaagctgtacgaccagcacctgggcaagagcaacaacttccagaagcccaagcccgccaagggcaaggccgaggcccacttcagcctggtgcactacgccggcaccgtggactacaacatcgccggctggctggacaagaacaaggaccccctgaacgagaccgtggtgggcctgtaccagaagagcagcctgaagctgctgagcttcctgttcagcaactacgccggcgccgagaccggcgacagcggcggcagcaagaagggcggcaagaagaagggcagcagcttccagaccgtgagcgccgtgttcagagagaacctgaacaagctgatgaccaacctgagaagcacccacccccacttcgtgagatgcctgatccccaacgagaccaagacccccggcgtgatggaccactacctggtgatgcaccagctgagatgcaacggcgtgctggagggcatcagaatctgcagaaagggcttccccagcagaatcctgtacgccgacttcaagcagagatacagaatcctgaacgccagcgccatccccgagggccagttcatcgacagcaagaacgccagcgagaagctgctgaacagcatcgacgtggacagagagcagttcagattcggcaacaccaaggtgttcttcaaggccggcctgctgggcctgctggaggagatgagagacgagaagctggtgaccctgatgaccagcacccaggccgtgtgcagaggctacctgatgagagtggagttcaagaagatgatggagagaagagacagcatcttctgcatccagtacaacatcagaagcttcatgaacgtgaagcactggccctggatgaacctgttcttcaagatcaagcccctgctgaagagcgccgaggccgagaaggagatggccaccatgaaggaggacttcgagagaaccaaggaggagctggccagaagcgaggccagaagaaaggagctggaggagaagatggtgagcctgctgcaggagaagaacgacctgcagctgcaggtgcagagcgagaccgagaacctgatggacgccgaggagagatgcgagggcctgatcaagagcaagatcctgctggaggccaaggtgaaggagctgaccgagagactggaggaggaggaggagatgaacagcgagctggtggccaagaagagaaacctggaggacaagtgcagcagcctgaagagagacatcgacgacctggagctgaccctgaccaaggtggagaaggagaagcacgccaccgagaacaaggtgaagaacctgagcgaggagatgaccgccctggaggagaacatcagcaagctgaccaaggagaagaagagcctgcaggaggcccaccagcagaccctggacgacctgcaggtggaggaggacaaggtgaacggcctgatcaagatcaacgccaagctggagcagcagaccgacgacctggagggcagcctggagcaggagaagaagctgagagccgacctggagagagccaagagaaagctggagggcgacctgaagatgagccaggagagcatcatggacctggagaacgacaagcagcagatcgaggagaagctgaagaagaaggagttcgagctgagccagctgcaggccaagatcgacgacgagcaggtgcacagcctgcagttccagaagaagatcaaggagctgcaggccagaatcgaggagctggaggaggagatcgaggccgagcacaccctgagagccaagatcgagaagcagagaagcgacctggccagagagctggaggagatcagcgagagactggaggaggccagcggcgccaccagcgcccagatcgagatgaacaagaagagagaggccgagttccagaagatgagaagagacctggaggaggccaccctgcagcacgaggccaccgccgccaccctgagaaagaagcaggccgacagcgtggccgagctgggcgagcagatcgacaacctgcagagagtgaagcagaagctggagaaggagaagagcgagctgaagatggagatcgacgacatggccagcaacatcgaggccctgagcaagagcaagagcaacatcgagagaacctgcagaaccgtggaggaccagttcagcgagatcaaggccaaggacgagcagcagacccagctgatccacgacctgaacatgcagaaggccagactgcagacccagaacggcgagctgagccacagagtggaggagaaggagagcctgatcagccagctgaccaagagcaagcaggccctgacccagcagctggaggagctgaagagacagatggaggaggagaccaaggccaagaacgccatggcccacgccctgcagagcagcagacacgactgcgacctgctgagagagcagtacgaggaggagcaggaggccaaggccgagctgcagagagccctgagcaaggccaacagcgaggtggcccagtggagaaccaagtacgagaccgacgccatccagagaaccgaggagctggaggaggccaagaagaagctggcccagagactgcaggaggccgaggagaacaccgagaccgccaacagcaagtgcgccagcctggagaagaccaagcagagactgcagggcgaggtggaggacctgatgagagacctggagagaagccacaccgcctgcgccaccctggacaagaagcagagaaacttcgacaaggtgctggccgagtggaagcagaagctggacgagagccaggccgagctggaggccgcccagaaggagagcagaagcctgagcaccgagctgttcaagatgagaaacgcctacgaggaggtggtggaccagctggagaccctgagaagagagaacaagaacctgcaggaggagatcagcgacctgaccgagcagatcgccgagaccggcaagaacctgcaggaggccgagaagaccaagaagctggtggagcaggagaagagcgacctgcaggtggccctggaggaggtggagggcagcctggagcacgaggagagcaagatcctgagagtgcagctggagctgagccaggtgaagagcgagctggacagaaaggtgatcgagaaggacgaggagatcgagcagctgaagagaaacagccagagagccgccgaggccctgcagagcgtgctggacgccgagatcagaagcagaaacgacgccctgagactgaagaagaagatggagggcgacctgaacgagatggagatccagctgggccacagcaacagacagatggccgagacccagaagcacctgagaaccgtgcagggccagctgaaggacagccagctgcacctggacgacgccctgagaagcaacgaggacctgaaggagcagctggccatcgtggagagaagaaacggcctgctgctggaggagctggaggagatgaaggtggccctggagcagaccgagagaaccagaagactgagcgagcaggagctgctggacgccagcgacagagtgcagctgctgcacagccagaacaccagcctgatcaacaccaagaagaagctggaggccgacatcgcccagtgccaggccgaggtggagaacagcatccaggagagcagaaacgccgaggagaaggccaagaaggccatcaccgacgccgccatgatggccgaggagctgaagaaggagcaggacaccagcgcccacctggagagaatgaagaagaacctggagcagaccgtgaaggacctgcagcacagactggacgaggccgagcagctggccctgaagggcggcaagaagcagatccagaagctggagaacagagtgagagagctggagaacgagctggacgtggagcagaagagaggcgccgaggccctgaagggcgcccacaagtacgagagaaaggtgaaggagatgacctaccaggccgaggaggaccacaagaacatcctgagactgcaggacctggtggacaagctgcaggccaaggtgaagagctacaagagacaggccgaggaggccgaggagcaggccaacacccagctgagcagatgcagaagagtgcagcacgagctggaggaggccgccgagagagccgacatcgccgagagccaggtgaacaagctgagagccaagagcagagacgtgggcagccagaagatggaggagtag

SEQ ID NO: 89973 - DNA, 6111 bp, synthetic construct
  misc_feature 1..6111: note = Description of Artificial Sequence: Synthetic coding sequence
  source 1..6111: mol_type = other DNA
atggccgccgtgaccatgagcgtgcccggcagaaaggccccccccagacccggccccgtgcccgaggccgcccagcccttcctgttcacccccagaggccccagcgccggcggcggccccggcagcggcaccagcccccaggtggagtggaccgccagaagactggtgtgggtgcccagcgagctgcacggcttcgaggccgccgccctgagagacgagggcgaggaggaggccgaggtggagctggccgagagcggcagaagactgagactgcccagagaccagatccagagaatgaacccccccaagttcagcaaggccgaggacatggccgagctgacctgcctgaacgaggccagcgtgctgcacaacctgagagagagatactacagcggcctgatctacacctacagcggcctgttctgcgtggtgatcaacccctacaagcagctgcccatctacaccgaggccatcgtggagatgtacagaggcaagaagagacacgaggtgcccccccacgtgtacgccgtgaccgagggcgcctacagaagcatgctgcaggacagagaggaccagagcatcctgtgcaccggcgagagcggcgccggcaagaccgagaacaccaagaaggtgatccagtacctggcccacgtggccagcagccccaagggcagaaaggagcccggcgtgcccgccagcgtgagcaccgtgagctacggcgagctggagagacagctgctgcaggccaaccccatcctggaggccttcggcaacgccaagaccgtgaagaacgacaacagcagcagattcggcaagttcatcagaatcaacttcgacgtggccggctacatcgtgggcgccaacatcgagacctacctgctggagaagagcagagccatcagacaggccaaggacgagtgcagcttccacatcttctaccagctgctgggcggcgccggcgagcagctgaaggccgacctgctgctggagccctgcagccactacagattcctgaccaacggccccagcagcagccccggccaggagagagagctgttccaggagaccctggagagcctgagagtgctgggcttcagccacgaggagatcatcagcatgctgagaatggtgagcgccgtgctgcagttcggcaacatcgccctgaagagagagagaaacaccgaccaggccaccatgcccgacaacaccgccgcccagaagctgtgcagactgctgggcctgggcgtgaccgacttcagcagagccctgctgacccccagaatcaaggtgggcagagactacgtgcagaaggcccagaccaaggagcaggccgacttcgccctggaggccctggccaaggccacctacgagagactgttcagatggctggtgctgagactgaacagagccctggacagaagccccagacagggcgccagcttcctgggcatcctggacatcgccggcttcgagatcttccagctgaacagcttcgagcagctgtgcatcaactacaccaacgagaagctgcagcagctgttcaaccacaccatgttcgtgctggagcaggaggagtaccagagagagggcatcccctggaccttcctggacttcggcctggacctgcagccctgcatcgacctgatcgagagacccgccaacccccccggcctgctggccctgctggacgaggagtgctggttccccaaggccaccgacaagagcttcgtggagaaggtggcccaggagcagggcggccaccccaagttccagagacccagacacctgagagaccaggccgacttcagcgtgctgcactacgccggcaaggtggactacaaggccaacgagtggctgatgaagaacatggaccccctgaacgacaacgtggccgccctgctgcaccagagcaccgacagactgaccgccgagatctggaaggacgagcacggcggcttccagcagttcagcttcctgggcagcttcccccccagcccccccggcagcgccgagagatgcagcagcgccatcagcccccccggcgtggagggcatcgtgggcctggagcaggtgagcagcctgggcgacggcccccccggcggcagacccagaagaggcatgttcagaaccgtgggccagctgtacaaggagagcctgagcagactgatggccaccctgagcaacaccaaccccagcttcgtgagatgcatcgtgcccaaccacgagaagagagccggcaagctggagcccagactggtgctggaccagctgagatgcaacggcgtgctggagggcatcagaatctgcagacagggcttccccaacagaatcctgttccaggagttcagacagagatacgagatcctgacccccaacgccatccccaagggcttcatggacggcaagcaggcctgcgagaagatgatccaggccctggagctggaccccaacctgtacagagtgggccagagcaagatcttcttcagagccggcgtgctggcccagctggaggaggagagagacctgaaggtgaccgacatcatcgtgagcttccaggccgccgccagaggctacctggccagaagagccttccagaagagacagcagcagcagagcgccctgagagtgatgcagagaaactgcgccgcctacctgaagctgagacactggcagtggtggagactgttcaccaaggtgaagcccctgctgcaggtgaccagacaggacgaggtgctgcaggccagagcccaggagctgcagaaggtgcaggagctgcagcagcagagcgccagagaggtgggcgagctgcagggcagagtggcccagctggaggaggagagagccagactggccgagcagctgagagccgaggccgagctgtgcgccgaggccgaggagaccagaggcagactggccgccagaaagcaggagctggagctggtggtgagcgagctggaggccagagtgggcgaggaggaggagtgcagcagacagatgcagaccgagaagaagagactgcagcagcacatccaggagctggaggcccacctggaggccgaggagggcgccagacagaagctgcagctggagaaggtgaccaccgaggccaagatgaagaagttcgaggaggacctgctgctgctggaggaccagaacagcaagctgagcaaggagagaaagctgctggaggacagactggccgagttcagcagccaggccgccgaggaggaggagaaggtgaagagcctgaacaagctgagactgaagtacgaggccaccatcgccgacatggaggacagactgagaaaggaggagaagggcagacaggagctggagaagctgaagagaagactggacggcgagagcagcgagctgcaggagcagatggtggagcagcagcagagagccgaggagctgagagcccagctgggcagaaaggaggaggagctgcaggccgccctggccagagccgaggacgagggcggcgccagagcccagctgctgaagagcctgagagaggcccaggccgccctggccgaggcccaggaggacctggagagcgagagagtggccagaaccaaggccgagaagcagagaagagacctgggcgaggagctggaggccctgagaggcgagctggaggacaccctggacagcaccaacgcccagcaggagctgagaagcaagagagagcaggaggtgaccgagctgaagaagaccctggaggaggagaccagaatccacgaggccgccgtgcaggagctgagacagagacacggccaggccctgggcgagctggccgagcagctggagcaggccagaagaggcaagggcgcctgggagaagaccagactggccctggaggccgaggtgagcgagctgagagccgagctgagcagcctgcagaccgccagacaggagggcgagcagagaagaagaagactggagctgcagctgcaggaggtgcagggcagagccggcgacggcgagagagccagagccgaggccgccgagaagctgcagagagcccaggccgagctggagaacgtgagcggcgccctgaacgaggccgagagcaagaccatcagactgagcaaggagctgagcagcaccgaggcccagctgcacgacgcccaggagctgctgcaggaggagaccagagccaagctggccctgggcagcagagtgagagccatggaggccgaggccgccggcctgagagagcagctggaggaggaggccgccgccagagagagagccggcagagagctgcagaccgcccaggcccagctgagcgagtggagaagaagacaggaggaggaggccggcgccctggaggccggcgaggaggccagaagaagagccgccagagaggccgaggccctgacccagagactggccgagaagaccgagaccgtggacagactggagagaggcagaagaagactgcagcaggagctggacgacgccaccatggacctggagcagcagagacagctggtgagcaccctggagaagaagcagagaaagttcgaccagctgctggccgaggagaaggccgccgtgctgagagccgtggaggagagagagagagccgaggccgagggcagagagagagaggccagagccctgagcctgaccagagccctggaggaggagcaggaggccagagaggagctggagagacagaacagagccctgagagccgagctggaggccctgctgagcagcaaggacgacgtgggcaagagcgtgcacgagctggagagagcctgcagagtggccgagcaggccgccaacgacctgagagcccaggtgaccgagctggaggacgagctgaccgccgccgaggacgccaagctgagactggaggtgaccgtgcaggccctgaagacccagcacgagagagacctgcagggcagagacgaggccggcgaggagagaagaagacagctggccaagcagctgagagacgccgaggtggagagagacgaggagagaaagcagagaaccctggccgtggccgccagaaagaagctggagggcgagctggaggagctgaaggcccagatggccagcgccggccagggcaaggaggaggccgtgaagcagctgagaaagatgcaggcccagatgaaggagctgtggagagaggtggaggagaccagaaccagcagagaggagatcttcagccagaacagagagagcgagaagagactgaagggcctggaggccgaggtgctgagactgcaggaggagctggccgccagcgacagagccagaagacaggcccagcaggacagagacgagatggccgacgaggtggccaacggcaacctgagcaaggccgccatcctggaggagaagagacagctggagggcagactgggccagctggaggaggagctggaggaggagcagagcaacagcgagctgctgaacgacagatacagaaagctgctgctgcaggtggagagcctgaccaccgagctgagcgccgagagaagcttcagcgccaaggccgagagcggcagacagcagctggagagacagatccaggagctgagaggcagactgggcgaggaggacgccggcgccagagccagacacaagatgaccatcgccgccctggagagcaagctggcccaggccgaggagcagctggagcaggagaccagagagagaatcctgagcggcaagctggtgagaagagccgagaagagactgaaggaggtggtgctgcaggtggaggaggagagaagagtggccgaccagctgagagaccagctggagaagggcaacctgagagtgaagcagctgaagagacagctggaggaggccgaggaggaggccagcagagcccaggccggcagaagaagactgcagagagagctggaggacgtgaccgagagcgccgagagcatgaacagagaggtgaccaccctgagaaacagactgagaagaggccccctgaccttcaccaccagaaccgtgagacaggtgttcagactggaggagggcgtggccagcgacgaggaggccgaggaggcccagcccggcagcggccccagccccgagcccgagggcagcccccccgcccacccccagtag

SEQ ID NO: 89974 - DNA, 5823 bp, synthetic construct
  misc_feature 1..5823: note = Description of Artificial Sequence: Synthetic coding sequence
  source 1..5823: mol_type = other DNA
atgagcagcgacaccgagatggaggtgttcggcatcgccgcccccttcctgagaaagagcgagaaggagagaatcgaggcccagaaccagcccttcgacgccaagacctactgcttcgtggtggacagcaaggaggagtacgccaagggcaagatcaagagcagccaggacggcaaggtgaccgtggagaccgaggacaacagaaccctggtggtgaagcccgaggacgtgtacgccatgaacccccccaagttcgacagaatcgaggacatggccatgctgacccacctgaacgagcccgccgtgctgtacaacctgaaggacagatacaccagctggatgatctacacctacagcggcctgttctgcgtgaccgtgaacccctacaagtggctgcccgtgtacaaccccgaggtggtggagggctacagaggcaagaagagacaggaggcccccccccacatcttcagcatcagcgacaacgcctaccagttcatgctgaccgacagagagaaccagagcatcctgatcaccggcgagagcggcgccggcaagaccgtgaacaccaagagagtgatccagtacttcgccaccatcgccgccaccggcgacctggccaagaagaaggacagcaagatgaagggcaccctggaggaccagatcatcagcgccaaccccctgctggaggccttcggcaacgccaagaccgtgagaaacgacaacagcagcagattcggcaagttcatcagaatccacttcggcaccaccggcaagctggccagcgccgacatcgagacctacctgctggagaagagcagagtgaccttccagctgaaggccgagagaagctaccacatcttctaccagatcctgagcaacaagaagcccgagctgatcgagctgctgctgatcaccaccaacccctacgactaccccttcatcagccagggcgagatcctggtggccagcatcgacgacgccgaggagctgctggccaccgacagcgccatcgacatcctgggcttcacccccgaggagaagagcggcctgtacaagctgaccggcgccgtgatgcactacggcaacatgaagttcaagcagaagcagagagaggagcaggccgagcccgacggcaccgaggtggccgacaagaccgcctacctgatgggcctgaacagcagcgacctgctgaaggccctgtgcttccccagagtgaaggtgggcaacgagtacgtgaccaagggccagaccgtggaccaggtgcaccacgccgtgaacgccctgagcaagagcgtgtacgagaagctgttcctgtggatggtgaccagaatcaaccagcagctggacaccaagctgcccagacagcacttcatcggcgtgctggacatcgccggcttcgagatcttcgagtacaacagcctggagcagctgtgcatcaacttcaccaacgagaagctgcagcagttcttcaaccaccacatgttcgtgctggagcaggaggagtacaagaaggagggcatcgagtggaccttcatcgacttcggcatggacctggccgcctgcatcgagctgatcgagaagcccatgggcatcttcagcatcctggaggaggagtgcatgttccccaaggccaccgacaccagcttcaagaacaagctgtacgaccagcacctgggcaagagcaacaacttccagaagcccaaggtggtgaagggcagagccgaggcccacttcagcctgatccactacgccggcaccgtggactacagcgtgagcggctggctggagaagaacaaggaccccctgaacgagaccgtggtgggcctgtaccagaagagcagcaacagactgctggcccacctgtacgccaccttcgccaccgccgacgccgacagcggcaagaagaaggtggccaagaagaagggcagcagcttccagaccgtgagcgccctgttcagagagaacctgaacaagctgatgagcaacctgagaaccacccacccccacttcgtgagatgcatcatccccaacgagaccaagacccccggcgccatggagcacagcctggtgctgcaccagctgagatgcaacggcgtgctggagggcatcagaatctgcagaaagggcttccccaacagaatcctgtacggcgacttcaagcagagatacagagtgctgaacgccagcgccatccccgagggccagttcatcgacagcaagaaggcctgcgagaagctgctggccagcatcgacatcgaccacacccagtacaagttcggccacaccaaggtgttcttcaaggccggcctgctgggcaccctggaggagatgagagacgacagactggccaagctgatcaccagaacccaggccgtgtgcagaggcttcctgatgagagtggagttccagaagatggtgcagagaagagagagcatcttctgcatccagtacaacatcagaagcttcatgaacgtgaagcactggccctggatgaagctgttcttcaagatcaagcccctgctgaagagcgccgagaccgagaaggagatggccaccatgaaggaggagttccagaagaccaaggacgagctggccaagagcgaggccaagagaaaggagctggaggagaagctggtgaccctggtgcaggagaagaacgacctgcagctgcaggtgcaggccgagagcgagaacctgctggacgccgaggagagatgcgaccagctgatcaaggccaagttccagctggaggccaagatcaaggaggtgaccgagagagccgaggacgaggaggagatcaacgccgagctgaccgccaagaagagaaagctggaggacgagtgcagcgagctgaagaaggacatcgacgacctggagctgaccctggccaaggtggagaaggagaagcacgccaccgagaacaaggtgaagaacctgaccgaggagctgagcggcctggacgagaccatcgccaagctgaccagagagaagaaggccctgcaggaggcccaccagcaggccctggacgacctgcaggccgaggaggacaaggtgaacagcctgaacaagaccaagagcaagctggagcagcaggtggaggacctggagagcagcctggagcaggagaagaagctgagagtggacctggagagaaacaagagaaagctggagggcgacctgaagctggcccaggagagcatcctggacctggagaacgacaagcagcagctggacgagagactgaagaagaaggacttcgagtactgccagctgcagagcaaggtggaggacgagcagaccctgggcctgcagttccagaagaagatcaaggagctgcaggccagaatcgaggagctggaggaggagatcgaggccgagagagccaccagagccaagaccgagaagcagagaagcgactacgccagagagctggaggagctgagcgagagactggaggaggccggcggcgtgaccagcacccagatcgagctgaacaagaagagagaggccgagttcctgaagctgagaagagacctggaggaggccaccctgcagcacgaggccatggtggccgccctgagaaagaagcacgccgacagcgtggccgagctgggcgagcagatcgacaacctgcagagagtgaagcagaagctggagaaggagaagagcgagttcaagctggagatcgacgacctgagcagcagcatggagagcgtgagcaagagcaaggccaacctggagaagatctgcagaaccctggaggaccagctgagcgaggccagaggcaagaacgaggagatccagagaagcctgagcgagctgaccacccagaagagcagactgcagaccgaggccggcgagctgagcagacagctggaggagaaggagagcatcgtgagccagctgagcagaagcaagcaggccttcacccagcagaccgaggagctgaagagacagctggaggaggagaacaaggccaagaacgccctggcccacgccctgcagagcagcagacacgactgcgacctgctgagagagcagtacgaggaggagcaggagggcaaggccgagctgcagagagccctgagcaaggccaacagcgaggtggcccagtggagaaccaagtacgagaccgacgccatccagagaaccgaggagctggaggaggccaagaagaagctggcccagagactgcaggacagcgaggagcaggtggaggccgtgaacgccaagtgcgccagcctggagaagaccaagcagagactgcagggcgaggtggaggacctgatggtggacgtggagagagccaacagcctggccgccgccctggacaagaagcagagaaacttcgacaaggtgctggccgagtggaagaccaagtgcgaggagagccaggccgagctggaggccagcctgaaggagagcagaagcctgagcaccgagctgttcaagctgaagaacgcctacgaggaggccctggaccagctggagaccgtgaagagagagaacaagaacctggagcaggagatcgccgacctgaccgagcagatcgccgagaacggcaagaccatccacgagctggagaagagcagaaagcagatcgagctggagaaggccgacatccagctggccctggaggaggccgaggccgccctggagcacgaggaggccaagatcctgagaatccagctggagctgacccaggtgaagagcgagatcgacagaaagatcgccgagaaggacgaggagatcgagcagctgaagagaaactaccagagaaccgtggagaccatgcagagcgccctggacgccgaggtgagaagcagaaacgaggccatcagactgaagaagaagatggagggcgacctgaacgagatcgagatccagctgagccacgccaacagacaggccgccgagaccctgaagcacctgagaagcgtgcagggccagctgaaggacacccagctgcacctggacgacgccctgagaggccaggaggacctgaaggagcagctggccatcgtggagagaagagccaacctgctgcaggccgaggtggaggagctgagagccaccctggagcagaccgagagagccagaaagctggccgagcaggagctgctggacagcaacgagagagtgcagctgctgcacacccagaacaccagcctgatccacaccaagaagaagctggagaccgacctgatgcagctgcagagcgaggtggaggacgccagcagagacgccagaaacgccgaggagaaggccaagaaggccatcaccgacgccgccatgatggccgaggagctgaagaaggagcaggacaccagcgcccacctggagagaatgaagaagaacctggagcagaccgtgaaggacctgcagcacagactggacgaggccgagcagctggccctgaagggcggcaagaagcagatccagaagctggagaccagaatcagagagctggagttcgagctggagggcgagcagaagaagaacaccgagagcgtgaagggcctgagaaagtacgagagaagagtgaaggagctgacctaccagagcgaggaggacagaaagaacgtgctgagactgcaggacctggtggacaagctgcaggtgaaggtgaagagctacaagagacaggccgaggaggccgacgagcaggccaacgcccacctgaccaagttcagaaaggcccagcacgagctggaggaggccgaggagagagccgacatcgccgagagccaggtgaacaagctgagagccaagaccagagacttcaccagcagcagaatggtggtgcacgagagcgaggagtag

SEQ ID NO: 89975 - DNA, 3132 bp, synthetic construct
  misc_feature 1..3132: note = Description of Artificial Sequence: Synthetic coding sequence
  source 1..3132: mol_type = other DNA
atgcccctgctggagggcagcgtgggcgtggaggacctggtgctgctggagcccctggtggaggagagcctgctgaagaacctgcagctgagatacgagaacaaggagatctacacctacatcggcaacgtggtgatcagcgtgaacccctaccagcagctgcccatctacggccccgagttcatcgccaagtaccaggactacaccttctacgagctgaagccccacatctacgccctggccaacgtggcctaccagagcctgagagacagagacagagaccagtgcatcctgatcaccggcgagagcggcagcggcaagaccgaggccagcaagctggtgatgagctacgtggccgccgtgtgcggcaagggcgagcaggtgaacagcgtgaaggagcagctgctgcagagcaaccccgtgctggaggccttcggcaacgccaagaccatcagaaacaacaacagcagcagattcggcaagtacatggacatcgagttcgacttcaagggcagccccctgggcggcgtgatcaccaactacctgctggagaagagcagactggtgaagcagctgaagggcgagagaaacttccacatcttctaccagctgctggccggcgccgacgagcagctgctgaaggccctgaagctggagagagacaccaccggctacgcctacctgaaccacgaggtgagcagagtggacggcatggacgacgccagcagcttcagagccgtgcagagcgccatggccgtgatcggcttcagcgaggaggagatcagacaggtgctggaggtgaccagcatggtgctgaagctgggcaacgtgctggtggccgacgagttccaggccagcggcatccccgccagcggcatcagagacggcagaggcgtgagagagatcggcgagatggtgggcctgaacagcgaggaggtggagagagccctgtgcagcagaaccatggagaccgccaaggagaaggtggtgaccgccctgaacgtgatgcaggcccagtacgccagagacgccctggccaagaacatctacagcagactgttcgactggatcgtgaacagaatcaacgagagcatcaaggtgggcatcggcgagaagaagaaggtgatgggcgtgctggacatctacggcttcgagatcctggaggacaacagcttcgagcagttcgtgatcaactactgcaacgagaagctgcagcaggtgttcatcgagatgaccctgaaggaggagcaggaggagtacaagagagagggcatcccctggaccaaggtggactacttcgacaacggcatcatctgcaagctgatcgagcacaaccagagaggcatcctggccatgctggacgaggagtgcctgagacccggcgtggtgagcgacagcaccttcctggccaagctgaaccagctgttcagcaagcacggccactacgagagcaaggtgacccagaacgcccagagacagtacgaccacaccatgggcctgagctgcttcagaatctgccactacgccggcaaggtgacctacaacgtgaccagcttcatcgacaagaacaacgacctgctgttcagagacctgctgcaggccatgtggaaggcccagcaccccctgctgagaagcctgttccccgagggcaaccccaagcaggccagcctgaagagaccccccaccgccggcgcccagttcaagagcagcgtggccatcctgatgaagaacctgtacagcaagagccccaactacatcagatgcatcaagcccaacgagcaccagcagagaggccagttcagcagcgacctggtggccacccaggccagatacctgggcctgctggagaacgtgagagtgagaagagccggctacgcccacagacagggctacggccccttcctggagagatacagactgctgagcagaagcacctggccccactggaacggcggcgacagagagggcgtggagaaggtgctgggcgagctgagcatgagcagcggcgagctggccttcggcaagaccaagatcttcatcagaagccccaagaccctgttctacctggaggagcagagaagactgagactgcagcagctggccaccctgatccagaagatctacagaggctggagatgcagaacccactaccagctgatgagaaagagccagatcctgatcagcagctggttcagaggcaacatgcagaagaagtgctacggcaagatcaaggccagcgtgctgctgatccaggccttcgtgagaggctggaaggccagaaagaactacagaaagtacttcagaagcgaggccgccctgaccctggccgacttcatctacaagagcatggtgcagaagttcctgctgggcctgaagaacaacctgcccagcaccaacgtgctggacaagacctggcccgccgccccctacaagtgcctgagcaccgccaaccaggagctgcagcagctgttctaccagtggaagtgcaagagattcagagaccagctgagccccaagcaggtggagatcctgagagagaagctgtgcgccagcgagctgttcaagggcaagaaggccagctacccccagagcgtgcccatccccttctgcggcgactacatcggcctgcagggcaaccccaagctgcagaagctgaagggcggcgaggagggccccgtgctgatggccgaggccgtgaagaaggtgaacagaggcaacggcaagaccagcagcagaatcctgctgctgaccaagggccacgtgatcctgaccgacaccaagaagagccaggccaagatcgtgatcggcctggacaacgtggccggcgtgagcgtgaccagcctgaaggacggcctgttcagcctgcacctgagcgagatgagcagcgtgggcagcaagggcgacttcctgctggtgagcgagcacgtgatcgagctgctgaccaagatgtacagagccgtgctggacgccacccagagacagctgaccgtgaccgtgaccgagaagttcagcgtgagattcaaggagaacagcgtggccgtgaaggtggtgcagggccccgccggcggcgacaacagcaagctgagatacaagaagaagggcagccactgcctggaggtgaccgtgcagtag

SEQ ID NO: 89976 - DNA, 291 bp, synthetic construct
  misc_feature 1..291: note = Description of Artificial Sequence: Synthetic coding sequence
  source 1..291: mol_type = other DNA
atgcccctgctggagggcagcgtgggcgtggaggacctggtgctgctggagcccctggtggaggagagcctgctgaagaacctgcagctgagatacgagaacaaggagatctacacctacatcggcaacgtggtgatcagcgtgaacccctaccagcagctgcccatctacggccccgagttcatcgccaagtaccaggactacaccttctacgagctgaagccccacatctacgccctggccaacgtggcctaccagagcctgagagacagagacagagaccagtgctag

SEQ ID NO: 89977 - DNA, 3132 bp, synthetic construct; identical to SEQ ID NO: 89975
  misc_feature 1..3132: note = Description of Artificial Sequence: Synthetic coding sequence
  source 1..3132: mol_type = other DNA

SEQ ID NO: 89978 - DNA, 2646 bp, synthetic construct
  misc_feature 1..2646: note = Description of Artificial Sequence: Synthetic coding sequence
  source 1..2646: mol_type = other DNA
atggacatcgagttcgacttcaagggcagccccctgggcggcgtgatcaccaactacctgctggagaagagcagactggtgaagcagctgaagggcgagagaaacttccacatcttctaccagctgctggccggcgccgacgagcagctgctgaaggccctgaagctggagagagacaccaccggctacgcctacctgaaccacgaggtgagcagagtggacggcatggacgacgccagcagcttcagagccgtgcagagcgccatggccgtgatcggcttcagcgaggaggagatcagacaggtgctggaggtgaccagcatggtgctgaagctgggcaacgtgctggtggccgacgagttccaggccagcggcatccccgccagcggcatcagagacggcagaggcgtgagagagatcggcgagatggtgggcctgaacagcgaggaggtggagagagccctgtgcagcagaaccatggagaccgccaaggagaaggtggtgaccgccctgaacgtgatgcaggcccagtacgccagagacgccctggccaagaacatctacagcagactgttcgactggatcgtgaacagaatcaacgagagcatcaaggtgggcatcggcgagaagaagaaggtgatgggcgtgctggacatctacggcttcgagatcctggaggacaacagcttcgagcagttcgtgatcaactactgcaacgagaagctgcagcaggtgttcatcgagatgaccctgaaggaggagcaggaggagtacaagagagagggcatcccctggaccaaggtggactacttcgacaacggcatcatctgcaagctgatcgagcacaaccagagaggcatcctggccatgctggacgaggagtgcctgagacccggcgtggtgagcgacagcaccttcctggccaagctgaaccagctgttcagcaagcacggccactacgagagcaaggtgacccagaacgcccagagacagtacgaccacaccatgggcctgagctgcttcagaatctgccactacgccggcaaggtgacctacaacgtgaccagcttcatcgacaagaacaacgacctgctgttcagagacctgctgcaggccatgtggaaggcccagcaccccctgctgagaagcctgttccccgagggcaaccccaagcaggccagcctgaagagaccccccaccgccggcgcccagttcaagagcagcgtggccatcctgatgaagaacctgtacagcaagagccccaactacatcagatgcatcaagcccaacgagcaccagcagagaggccagttcagcagcgacctggtggccacccaggccagatacctgggcctgctggagaacgtgagagtgagaagagccggctacgcccacagacagggctacggccccttcctggagagatacagactgctgagcagaagcacctggccccactggaacggcggcgacagagagggcgtggagaaggtgctgggcgagctgagcatgagcagcggcgagctggccttcggcaagaccaagatcttcatcagaagccccaagaccctgttctacctggaggagcagagaagactgagactgcagcagctggccaccctgatccagaagatctacagaggctggagatgcagaacccactaccagctgatgagaaagagccagatcctgatcagcagctggttcagaggcaacatgcagaagaagtgctacggcaagatcaaggccagcgtgctgctgatccaggccttcgtgagaggctggaaggccagaaagaactacagaaagtacttcagaagcgaggccgccctgaccctggccgacttcatctacaagagcatggtgcagaagttcctgctgggcctgaagaacaacctgcccagcaccaacgtgctggacaagacctggcccgccgccccctacaagtgcctgagcaccgccaaccaggagctgcagcagctgttctaccagtggaagtgcaagagattcagagaccagctgagccccaagcaggtggagatcctgagagagaagctgtgcgccagcgagctgttcaagggcaagaaggccagctacccccagagcgtgcccatccccttctgcggcgactacatcggcctgcagggcaaccccaagctgcagaagctgaagggcggcgaggagggccccgtgctgatggccgaggccgtgaagaaggtgaacagaggcaacggcaagaccagcagcagaatcctgctgctgaccaagggccacgtgatcctgaccgacaccaagaagagccaggccaagatcgtgatcggcctggacaacgtggccggcgtgagcgtgaccagcctgaaggacggcctgttcagcctgcacctgagcgagatgagcagcgtgggcagcaagggcgacttcctgctggtgagcgagcacgtgatcgagctgctgaccaagatgtacagagccgtgctggacgccacccagagacagctgaccgtgaccgtgaccgagaagttcagcgtgagattcaaggagaacagcgtggccgtgaaggtggtgcagggccccgccggcggcgacaacagcaagctgagatacaagaagaagggcagccactgcctggaggtgaccgtgcagtag

SEQ ID NO: 89979 - DNA, 3411 bp, synthetic construct
  misc_feature 1..3411: note = Description of Artificial Sequence: Synthetic coding sequence
  source 1..3411: mol_type = other DNA
atggccaagatggaggtgaagaccagcctgctggacaacatgatcggcgtgggcgacatggtgctgctggagcccctgaacgaggagaccttcatcaacaacctgaagaagagattcgaccacagcgagatctacacctacatcggcagcgtggtgatcagcgtgaacccctacagaagcctgcccatctacagccccgagaaggtggaggagtacagaaacagaaacttctacgagctgagcccccacatcttcgccctgagcgacgaggcctacagaagcctgagagaccaggacaaggaccagtgcatcctgatcaccggcgagagcggcgccggcaagaccgaggccagcaagctggtgatgagctacgtggccgccgtgtgcggcaagggcgccgaggtgaaccaggtgaaggagcagctgctgcagagcaaccccgtgctggaggccttcggcaacgccaagaccgtgagaaacgacaacagcagcagattcggcaagtacatggacatcgagttcgacttcaagggcgaccccctgggcggcgtgatcagcaactacctgctggagaagagcagagtggtgaagcagcccagaggcgagagaaacttccacgtgttctaccagctgctgagcggcgccagcgaggagctgctgaacaagctgaagctggagagagacttcagcagatacaactacctgagcctggacagcgccaaggtgaacggcgtggacgacgccgccaacttcagaaccgtgagaaacgccatgcagatcgtgggcttcatggaccacgaggccgagagcgtgctggccgtggtggccgccgtgctgaagctgggcaacatcgagttcaagcccgagagcagagtgaacggcctggacgagagcaagatcaaggacaagaacgagctgaaggagatctgcgagctgaccggcatcgaccagagcgtgctggagagagccttcagcttcagaaccgtggaggccaagcaggagaaggtgagcaccaccctgaacgtggcccaggcctactacgccagagacgccctggccaagaacctgtacagcagactgttcagctggctggtgaacagaatcaacgagagcatcaaggcccagaccaaggtgagaaagaaggtgatgggcgtgctggacatctacggcttcgagatcttcgaggacaacagcttcgagcagttcatcatcaactactgcaacgagaagctgcagcagatcttcatcgagctgaccctgaaggaggagcaggaggagtacatcagagaggacatcgagtggacccacatcgactacttcaacaacgccatcatctgcgacctgatcgagaacaacaccaacggcatcctggccatgctggacgaggagtgcctgagacccggcaccgtgaccgacgagaccttcctggagaagctgaaccaggtgtgcgccacccaccagcacttcgagagcagaatgagcaagtgcagcagattcctgaacgacaccagcctgccccacagctgcttcagaatccagcactacgccggcaaggtgctgtaccaggtggagggcttcgtggacaagaacaacgacctgctgtacagagacctgagccaggccatgtggaaggccagccacgccctgatcaagagcctgttccccgagggcaaccccgccaagatcaacctgaagagaccccccaccgccggcagccagttcaaggccagcgtggccaccctgatgaagaacctgcagaccaagaaccccaactacatcagatgcatcaagcccaacgacaagaaggccgcccacatcttcaacgaggccctggtgtgccaccagatcagatacctgggcctgctggagaacgtgagagtgagaagagccggctacgccttcagacaggcctacgagccctgcctggagagatacaagatgctgtgcaagcagacctggccccactggaagggccccgccagaagcggcgtggaggtgctgttcaacgagctggagatccccgtggaggagtacagcttcggcagaagcaagatcttcatcagaaaccccagaaccctgttcaagctggaggacctgagaaagcagagactggaggacctggccaccctgatccagaagatctacagaggctggaagtgcagaacccacttcctgctgatgaagaagagccagatcgtgatcgccgcctggtacagaagatacgcccagcagaagagataccagcagaccaagagcagcgccctggtgatccagagctacatcagaggctggaaggccagaaagatcctgagagagctgaagcaccagaagagatgcaaggaggccgtgaccaccatcgccgcctactggcacggcacccaggccagaagagagctgagaagactgaaggaggaggccagaaacaagcacgccatcgccgtgatctgggcctactggctgggcagcaaggccagaagagagctgaagagactgaaggaggaggccagaagaaagcacgccgtggccgtgatctgggcctactggctgggcctgaaggtgagaagagagtacagaaagttcttcagagccaacgccggcaagaagatctacgagttcaccctgcagagaatcgtgcagaagtacttcctggagatgaagaacaagatgcccagcctgagccccatcgacaagaactggcccagcagaccctacctgttcctggacagcacccacaaggagctgaagagaatcttccacctgtggagatgcaagaagtacagagaccagttcaccgaccagcagaagctgatctacgaggagaagctggaggccagcgagctgttcaaggacaagaaggccctgtaccccagcagcgtgggccagcccttccagggcgcctacctggagatcaacaagaaccccaagtacaagaagctgaaggacgccatcgaggagaagatcatcatcgccgaggtggtgaacaagatcaacagagccaacggcaagagcaccagcagaatcttcctgctgaccaacaacaacctgctgctggccgaccagaagagcggccagatcaagagcgaggtgcccctggtggacgtgaccaaggtgagcatgagcagccagaacgacggcttcttcgccgtgcacctgaaggagggcagcgaggccgccagcaagggcgacttcctgttcagcagcgaccacctgatcgagatggccaccaagctgtacagaaccaccctgagccagaccaagcagaagctgaacatcgagatcagcgacgagttcctggtgcagttcagacaggacaaggtgtgcgtgaagttcatccagggcaaccagaagaacggcagcgtgcccacctgcaagagaaagaacaacagactgctggaggtggccgtgccctag

SEQ ID NO: 89980 - DNA, 3237 bp, synthetic construct
  misc_feature 1..3237: note = Description of Artificial Sequence: Synthetic coding sequence
  source 1..3237: mol_type = other DNA
atggccaagatggaggtgaagaccagcctgctggacaacatgatcggcgtgggcgacatggtgctgctggagcccctgaacgaggagaccttcatcaacaacctgaagaagagattcgaccacagcgagatctacacctacatcggcagcgtggtgatcagcgtgaacccctacagaagcctgcccatctacagccccgagaaggtggaggagtacagaaacagaaacttctacgagctgagcccccacatcttcgccctgagcgacgaggcctacagaagcctgagagaccaggacaaggaccagtgcatcctgatcaccggcgagagcggcgccggcaagaccgaggccagcaagctggtgatgagctacgtggccgccgtgtgcggcaagggcgccgaggtgaaccaggtgaaggagcagctgctgcagagcaaccccgtgctggaggccttcggcaacgccaagaccgtgagaaacgacaacagcagcagattcggcaagtacatggacatcgagttcgacttcaagggcgaccccctgggcggcgtgatcagcaactacctgctggagaagagcagagtggtgaagcagcccagaggcgagagaaacttccacgtgttctaccagctgctgagcggcgccagcgaggagctgctgaacaagctgaagctggagagagacttcagcagatacaactacctgagcctggacagcgccaaggtgaacggcgtggacgacgccgccaacttcagaaccgtgagaaacgccatgcagatcgtgggcttcatggaccacgaggccgagagcgtgctggccgtggtggccgccgtgctgaagctgggcaacatcgagttcaagcccgagagcagagtgaacggcctggacgagagcaagatcaaggacaagaacgagctgaaggagatctgcgagctgaccggcatcgaccagagcgtgctggagagagccttcagcttcagaaccgtggaggccaagcaggagaaggtgagcaccaccctgaacgtggcccaggcctactacgccagagacgccctggccaagaacctgtacagcagactgttcagctggctggtgaacagaatcaacgagagcatcaaggcccagaccaaggtgagaaagaaggtgatgggcgtgctggacatctacggcttcgagatcttcgaggacaacagcttcgagcagttcatcatcaactactgcaacgagaagctgcagcagatcttcatcgagctgaccctgaaggaggagcaggaggagtacatcagagaggacatcgagtggacccacatcgactacttcaacaacgccatcatctgcgacctgatcgagaacaacaccaacggcatcctggccatgctggacgaggagtgcctgagacccggcaccgtgaccgacgagaccttcctggagaagctgaaccaggtgtgcgccacccaccagcacttcgagagcagaatgagcaagtgcagcagattcctgaacgacaccagcctgccccacagctgcttcagaatccagcactacgccggcaaggtgctgtaccaggtggagggcttcgtggacaagaacaacgacctgctgtacagagacctgagccaggccatgtggaaggccagccacgccctgatcaagagcctgttccccgagggcaaccccgccaagatcaacctgaagagaccccccaccgccggcagccagttcaaggccagcgtggccaccctgatgaagaacctgcagaccaagaaccccaactacatcagatgcatcaagcccaacgacaagaaggccgcccacatcttcaacgaggccctggtgtgccaccagatcagatacctgggcctgctggagaacgtgagagtgagaagagccggctacgccttcagacaggcctacgagccctgcctggagagatacaagatgctgtgcaagcagacctggccccactggaagggccccgccagaagcggcgtggaggtgctgttcaacgagctggagatccccgtggaggagtacagcttcggcagaagcaagatcttcatcagaaaccccagaaccctgttcaagctggaggacctgagaaagcagagactggaggacctggccaccctgatccagaagatctacagaggctggaagtgcagaacccacttcctgctgatgaagaagagccagatcgtgatcgccgcctggtacagaagatacgcccagcagaagagataccagcagaccaagagcagcgccctggtgatccagagctacatcagaggctggaaggccagaaagatcctgagagagctgaagcaccagaagagatgcaaggaggccgtgaccaccatcgccgcctactggcacggcacccaggtgagaagagagtacagaaagttcttcagagccaacgccggcaagaagatctacgagttcaccctgcagagaatcgtgcagaagtacttcctggagatgaagaacaagatgcccagcctgagccccatcgacaagaactggcccagcagaccctacctgttcctggacagcacccacaaggagctgaagagaatcttccacctgtggagatgcaagaagtacagagaccagttcaccgaccagcagaagctgatctacgaggagaagctggaggccagcgagctgttcaaggacaagaaggccctgtaccccagcagcgtgggccagcccttccagggcgcctacctggagatcaacaagaaccccaagtacaagaagctgaaggacgccatcgaggagaagatcatcatcgccgaggtggtgaacaagatcaacagagccaacggcaagagcaccagcagaatcttcctgctgaccaacaacaacctgctgctggccgaccagaagagcggccagatcaagagcgaggtgcccctggtggacgtgaccaaggtgagcatgagcagccagaacgacggcttcttcgccgtgcacctgaaggagggcagcgaggccgccagcaagggcgacttcctgttcagcagcgaccacctgatcgagatggccaccaagctgtacagaaccaccctgagccagaccaagcagaagctgaacatcgagatcagcgacgagttcctggtgcagttcagacaggacaaggtgtgcgtgaagttcatccagggcaaccagaagaacggcagcgtgcccacctgcaagagaaagaacaacagactgctggaggtggccgtgccctag

SEQ ID NO: 89981 - DNA, 3324 bp, synthetic construct
  misc_feature 1..3324: note = Description of Artificial Sequence: Synthetic coding sequence
  source 1..3324: mol_type = other DNA
atggccaagatggaggtgaagaccagcctgctggacaacatgatcggcgtgggcgacatggtgctgctggagcccctgaacgaggagaccttcatcaacaacctgaagaagagattcgaccacagcgagatctacacctacatcggcagcgtggtgatcagcgtgaacccctacagaagcctgcccatctacagccccgagaaggtggaggagtacagaaacagaaacttctacgagctgagcccccacatcttcgccctgagcgacgaggcctacagaagcctgagagaccaggacaaggaccagtgcatcctgatcaccggcgagagcggcgccggcaagaccgaggccagcaagctggtgatgagctacgtggccgccgtgtgcggcaagggcgccgaggtgaaccaggtgaaggagcagctgctgcagagcaaccccgtgctggaggccttcggcaacgccaagaccgtgagaaacgacaacagcagcagattcggcaagtacatggacatcgagttcgacttcaagggcgaccccctgggcggcgtgatcagcaactacctgctggagaagagcagagtggtgaagcagcccagaggcgagagaaacttccacgtgttctaccagctgctgagcggcgccagcgaggagctgctgaacaagctgaagctggagagagacttcagcagatacaactacctgagcctggacagcgccaaggtgaacggcgtggacgacgccgccaacttcagaaccgtgagaaacgccatgcagatcgtgggcttcatggaccacgaggccgagagcgtgctggccgtggtggccgccgtgctgaagctgggcaacatcgagttcaagcccgagagcagagtgaacggcctggacgagagcaagatcaaggacaagaacgagctgaaggagatctgcgagctgaccggcatcgaccagagcgtgctggagagagccttcagcttcagaaccgtggaggccaagcaggagaaggtgagcaccaccctgaacgtggcccaggcctactacgccagagacgccctggccaagaacctgtacagcagactgttcagctggctggtgaacagaatcaacgagagcatcaaggcccagaccaaggtgagaaagaaggtgatgggcgtgctggacatctacggcttcgagatcttcgaggacaacagcttcgagcagttcatcatcaactactgcaacgagaagctgcagcagatcttcatcgagctgaccctgaaggaggagcaggaggagtacatcagagaggacatcgagtggacccacatcgactacttcaacaacgccatcatctgcgacctgatcgagaacaacaccaacggcatcctggccatgctggacgaggagtgcctgagacccggcaccgtgaccgacgagaccttcctggagaagctgaaccaggtgtgcgccacccaccagcacttcgagagcagaatgagcaagtgcagcagattcctgaacgacaccagcctgccccacagctgcttcagaatccagcactacgccggcaaggtgctgtaccaggtggagggcttcgtggacaagaacaacgacctgctgtacagagacctgagccaggccatgtggaaggccagccacgccctgatcaagagcctgttccccgagggcaaccccgccaagatcaacctgaagagaccccccaccgccggcagccagttcaaggccagcgtggccaccctgatgaagaacctgcagaccaagaaccccaactacatcagatgcatcaagcccaacgacaagaaggccgcccacatcttcaacgaggccctggtgtgccaccagatcagatacctgggcctgctggagaacgtgagagtgagaagagccggctacgccttcagacaggcctacgagccctgcctggagagatacaagatgctgtgcaagcagacctggccccactggaagggccccgccagaagcggcgtggaggtgctgttcaacgagctggagatccccgtggaggagtacagcttcggcagaagcaagatcttcatcagaaaccccagaaccctgttcaagctggaggacctgagaaagcagagactggaggacctggccaccctgatccagaagatctacagaggctggaagtgcagaacccacttcctgctgatgaagaagagccagatcgtgatcgccgcctggtacagaagatacgcccagcagaagagataccagcagaccaagagcagcgccctggtgatccagagctacatcagaggctggaaggccagaaagatcctgagagagctgaagcaccagaagagatgcaaggaggccgtgaccaccatcgccgcctactggcacggcacccaggccagaagagagctgaagagactgaaggaggaggccagaagaaagcacgccgtggccgtgatctgggcctactggctgggcctgaaggtgagaagagagtacagaaagttcttcagagccaacgccggcaagaagatctacgagttcaccctgcagagaatcgtgcagaagtacttcctggagatgaagaacaagatgcccagcctgagccccatcgacaagaactggcccagcagaccctacctgttcctggacagcacccacaaggagctgaagagaatcttccacctgtggagatgcaagaagtacagagaccagttcaccgaccagcagaagctgatctacgaggagaagctggaggccagcgagctgttcaaggacaagaaggccctgtaccccagcagcgtgggccagcccttccagggcgcctacctggagatcaacaagaaccccaagtacaagaagctgaaggacgccatcgaggagaagatcatcatcgccgaggtggtgaacaagatcaacagagccaacggcaagagcaccagcagaatcttcctgctgaccaacaacaacctgctgctggccgaccagaagagcggccagatcaagagcgaggtgcccctggtggacgtgaccaaggtgagcatgagcagccagaacgacggcttcttcgccgtgcacctgaaggagggcagcgaggccgccagcaagggcgacttcctgttcagcagcgaccacctgatcgagatggccaccaagctgtacagaaccaccctgagccagaccaagcagaagctgaacatcgagatcagcgacgagttcctggtgcagttcagacaggacaaggtgtgcgtgaagttcatccagggcaaccagaagaacggcagcgtgcccacctgcaagagaaagaacaacagactgctggaggtggccgtgccctag

SEQ ID NO: 89982 - DNA, 3411 bp, synthetic construct; identical to SEQ ID NO: 89979
  misc_feature 1..3411: note = Description of Artificial Sequence: Synthetic coding sequence
  source 1..3411: mol_type = other DNA

SEQ ID NO: 89983 - DNA, 492 bp, synthetic construct
  misc_feature 1..492: note = Description of Artificial Sequence: Synthetic coding sequence
  source 1..492: mol_type = other DNA
atggccaagatggaggtgaagaccagcctgctggacaacatgatcggcgtgggcgacatggtgctgctggagcccctgaacgaggagaccttcatcaacaacctgaagaagagattcgaccacagcgagatctacacctacatcggcagcgtggtgatcagcgtgaacccctacagaagcctgcccatctacagccccgagaaggtggaggagtacagaaacagaaacttctacgagctgagcccccacatcttcgccctgagcgacgaggcctacagaagcctgagagaccaggacaaggaccagtgcatcctgatcaccggcgagagcggcgccggcaagaccgaggccagcaagctggtgatgagctacgtggccgccgtgtgcggcaagggcgccgaggtgaaccaggtgaaggagcagctgctgcagagcaaccccgtgctggaggccttcggcaacgccaagaccgtgagaaacgacaacagctag

SEQ ID NO: 89984 - DNA, 252 bp, synthetic construct
  misc_feature 1..252: note = Description of Artificial Sequence: Synthetic coding sequence
  source 1..252: mol_type = other DNA
atggccaagatggaggtgaagaccagcctgctggacaacatgatcggcgtgggcgacatggtgctgctggagcccctgaacgaggagaccttcatcaacaacctgaagaagagattcgaccacagcgagatctacacctacatcggcagcgtggtgatcagcgtgaacccctacagaagcctgcccatctacagccccgagaaggtggaggagtacagaaacagaaacttctacgagctgagcccccactag

SEQ ID NO: 89985 - DNA, 450 bp, synthetic construct
  misc_feature 1..450: note = Description of Artificial Sequence: Synthetic coding sequence
  source 1..450: mol_type = other DNA
atggccaagatggaggtgaagaccagcctgctggacaacatgatcggcgtgggcgacatggtgctgctggagcccctgaacgaggagaccttcatcaacaacctgaagaagagattcgaccacagcgagatctacacctacatcggcagcgtggtgatcagcgtgaacccctacagaagcctgcccatctacagccccgagaaggtggaggagtacagaaacagaaacttctacgagctgagcccccacatcttcgccctgagcgacgaggcctacagaagcctgagagaccaggacaaggaccagtgcatcctgatcaccggcgagagcggcgccggcaagaccgaggccagcaagctggtgatgagctacgtggccgccgtgtgcggcaagggcgccgaggtgaaccaggtgaaggagcagctgctgcagagcaaccccgtgctgtag

SEQ ID NO: 89986 - DNA, 1146 bp, synthetic construct
  misc_feature 1..1146: note = Description of Artificial Sequence: Synthetic coding sequence
  source 1..1146: mol_type = other DNA
atgaagaagagccagatcgtgatcgccgcctggtacagaagatacgcccagcagaagagataccagcagaccaagagcagcgccctggtgatccagagctacatcagaggctggaaggccagaaagatcctgagagagctgaagcaccagaagagatgcaaggaggccgtgaccaccatcgccgcctactggcacggcacccaggccagaagagagctgaagagactgaaggaggaggccagaagaaagcacgccgtggccgtgatctgggcctactggctgggcctgaaggtgagaagagagtacagaaagttcttcagagccaacgccggcaagaagatctacgagttcaccctgcagagaatcgtgcagaagtacttcctggagatgaagaacaagatgcccagcctgagccccatcgacaagaactggcccagcagaccctacctgttcctggacagcacccacaaggagctgaagagaatcttccacctgtggagatgcaagaagtacagagaccagttcaccgaccagcagaagctgatctacgaggagaagctggaggccagcgagctgttcaaggacaagaaggccctgtaccccagcagcgtgggccagcccttccagggcgcctacctggagatcaacaagaaccccaagtacaagaagctgaaggacgccatcgaggagaagatcatcatcgccgaggtggtgaacaagatcaacagagccaacggcaagagcaccagcagaatcttcctgctgaccaacaacaacctgctgctggccgaccagaagagcggccagatcaagagcgaggtgcccctggtggacgtgaccaaggtgagcatgagcagccagaacgacggcttcttcgccgtgcacctgaaggagggcagcgaggccgccagcaagggcgacttcctgttcagcagcgaccacctgatcgagatggccaccaagctgtacagaaccaccctgagccagaccaagcagaagctgaacatcgagatcagcgacgagttcctggtgcagttcagacaggacaaggtgtgcgtgaagttcatccagggcaaccagaagaacggcagcgtgcccacctgcaagagaaagaacaacagactgctggaggtggccgtgccctag

SEQ ID NO: 89987 - DNA, 924 bp, synthetic construct
  misc_feature 1..924: note = Description of Artificial Sequence: Synthetic coding sequence
  source 1..924: mol_type = other DNA
atggccaagatggaggtgaagaccagcctgctggacaacatgatcggcgtgggcgacatggtgctgctggagcccctgaacgaggagaccttcatcaacaacctgaagaagagattcgaccacagcgagatctacacctacatcggcagcgtggtgatcagcgtgaacccctacagaagcctgcccatctacagccccgagaaggtggaggagtacagaaacagaaacttctacgagctgagcccccacatcttcgccctgagcgacgaggcctacagaagcctgagagaccaggacaaggaccagtgcatcctgatcaccggcgagagcggcgccggcaagaccgaggccagcaagctggtgatgagctacgtggccgccgtgtgcggcaagggcgccgaggtgaaccaggtgaaggagcagctgctgcagagcaaccccgtgctggaggccttcggcaacgccaagaccgtgagaaacgacaacagcagcagattcggcaagtacatggacatcgagttcgacttcaagggcgaccccctgggcggcgtgatcagcaactacctgctggagaagagcagagtggtgaagcagcccagaggcgagagaaacttccacgtgttctaccagctgctgagcggcgccagcgaggagctgctgaacaagctgaagctggagagagacttcagcagatacaactacctgagcctggacagcgccaaggtgaacggcgtggacgacgccgccaacttcagaaccgtgagaaacgccatgcagatcgtgggcttcatggaccacgaggccgagagcgtgctggccgtggtggccgccgtgctgaagctgggcaacatcgagttcaagcccgagagcagagtgaacggcctggacgagagcaagatcaaggacaagaacgagagcaagtag

SEQ ID NO: 89988 - DNA, 912 bp, synthetic construct
  misc_feature 1..912: note = Description of Artificial Sequence: Synthetic coding sequence
  source 1..912: mol_type = other DNA
atggccaagatggaggtgaagaccagcctgctggacaacatgatcggcgtgggcgacatggtgctgctggagcccctgaacgaggagaccttcatcaacaacctgaagaagagattcgaccacagcgagatctacacctacatcggcagcgtggtgatcagcgtgaacccctacagaagcctgcccatctacagccccgagaaggtggaggagtacagaaacagaaacttctacgagctgagcccccacatcttcgccctgagcgacgaggcctacagaagcctgagagaccaggacaaggaccagtgcatcctgatcaccggcgagagcggcgccggcaagaccgaggccagcaagctggtgatgagctacgtggccgccgtgtgcggcaagggcgccgaggtgaaccaggtgaaggagcagctgctgcagagcaaccccgtgctggaggccttcggcaacgccaagaccgtgagaaacgacaacagcagcagattcggcaagtacatggacatcgagttcgacttcaagggcgaccccctgggcggcgtgatcagcaactacctgctggagaagagcagagtggtgaagcagcccagaggcgagagaaacttccacgtgttctaccagctgctgagcggcgccagcgaggagctgctgaacaagctgaagctggagagagacttcagcagatacaactacctgagcctggacagcgccaaggtgaacggcgtggacgacgccgccaacttcagaaccgtgagaaacgccatgcagatcgtgggcttcatggaccacgaggccgagagcgtgctggccgtggtggccgccgtgctgaagctgggcaacatcgagttcaagcccgagagcagagtgaacggcctggacgagagcaagatcaaggacaagtag

SEQ ID NO: 89989 - DNA, 3192 bp, synthetic construct
  misc_feature 1..3192: note = Description of Artificial Sequence: Synthetic coding sequence
  source 1..3192: mol_type = other DNA
atggccctgcaggtggagctggtgcccaccggcgagatcatcagagtggtgcacccccacagaccctgcaagctggccctgggcagcgacggcgtgagagtgaccatggagagcgccctgaccgccagagacagagtgggcgtgcaggacttcgtgctgctggagaacttcaccagcgaggccgccttcatcgagaacctgagaagaagattcagagagaacctgatctacacctacatcggccccgtgctggtgagcgtgaacccctacagagacctgcagatctacagcagacagcacatggagagatacagaggcgtgagcttctacgaggtgcccccccacctgttcgccgtggccgacaccgtgtacagagccctgagaaccgagagaagagaccaggccgtgatgatcagcggcgagagcggcgccggcaagaccgaggccaccaagagactgctgcagttctacgccgagacctgccccgcccccgagagaggcggcgccgtgagagacagactgctgcagagcaaccccgtgctggaggccttcggcaacgccaagaccctgagaaacgacaacagcagcagattcggcaagtacatggacgtgcagttcgacttcaagggcgcccccgtgggcggccacatcctgagctacctgctggagaagagcagagtggtgcaccagaaccacggcgagagaaacttccacatcttctaccagctgctggagggcggcgaggaggagaccctgagaagactgggcctggagagaaacccccagagctacctgtacctggtgaagggccagtgcgccaaggtgagcagcatcaacgacaagagcgactggaaggtggtgagaaaggccctgaccgtgatcgacttcaccgaggacgaggtggaggacctgctgagcatcgtggccagcgtgctgcacctgggcaacatccacttcgccgccaacgaggagagcaacgcccaggtgaccaccgagaaccagctgaagtacctgaccagactgctgagcgtggagggcagcaccctgagagaggccctgacccacagaaagatcatcgccaagggcgaggagctgctgagccccctgaacctggagcaggccgcctacgccagagacgccctggccaaggccgtgtacagcagaaccttcacctggctggtgggcaagatcaacagaagcctggccagcaaggacgtggagagccccagctggagaagcaccaccgtgctgggcctgctggacatctacggcttcgaggtgttccagcacaacagcttcgagcagttctgcatcaactactgcaacgagaagctgcagcagctgttcatcgagctgaccctgaagagcgagcaggaggagtacgaggccgagggcatcgcctgggagcccgtgcagtacttcaacaacaagatcatctgcgacctggtggaggagaagttcaagggcatcatcagcatcctggacgaggagtgcctgagacccggcgaggccaccgacctgaccttcctggagaagctggaggacaccgtgaagcaccacccccacttcctgacccacaagctggccgaccagagaaccagaaagagcctgggcagaggcgagttcagactgctgcactacgccggcgaggtgacctacagcgtgaccggcttcctggacaagaacaacgacctgctgttcagaaacctgaaggagaccatgtgcagcagcaagaaccccatcatgagccagtgcttcgacagaagcgagctgagcgacaagaagagacccgagaccgtggccacccagttcaagatgagcctgctgcagctggtggagatcctgcagagcaaggagcccgcctacgtgagatgcatcaagcccaacgacgccaagcagcccggcagattcgacgaggtgctgatcagacaccaggtgaagtacctgggcctgctggagaacctgagagtgagaagagccggcttcgcctacagaagaaagtacgaggccttcctgcagagatacaagagcctgtgccccgagacctggcccacctgggccggcagaccccaggacggcgtggccgtgctggtgagacacctgggctacaagcccgaggagtacaagatgggcagaaccaagatcttcatcagattccccaagaccctgttcgccaccgaggacgccctggaggtgagaagacagagcctggccaccaagatccaggccgcctggagaggcttccactggagacagaagttcctgagagtgaagagaagcgccatctgcatccagagctggtggagaggcaccctgggcagaagaaaggccgccaagagaaagtgggccgcccagaccatcagaagactgatcagaggcttcgtgctgagacacgcccccagatgccccgagaacgccttcttcctggaccacgtgagaaccagcttcctgctgaacctgagaagacagctgccccagaacgtgctggacaccagctggcccacccccccccccgccctgagagaggccagcgagctgctgagagagctgtgcatcaagaacatggtgtggaagtactgcagaagcatcagccccgagtggaagcagcagctgcagcagaaggccgtggccagcgagatcttcaagggcaagaaggacaactacccccagagcgtgcccagactgttcatcagcaccagactgggcaccgacgagatcagccccagagtgctgcaggccctgggcagcgagcccatccagtacgccgtgcccgtggtgaagtacgacagaaagggctacaagcccagaagcagacagctgctgctgacccccaacgccgtggtgatcgtggaggacgccaaggtgaagcagagaatcgactacgccaacctgaccggcatcagcgtgagcagcctgagcgacagcctgttcgtgctgcacgtgcagagagccgacaacaagcagaagggcgacgtggtgctgcagagcgaccacgtgatcgagaccctgaccaagaccgccctgagcgccaacagagtgaacagcatcaacatcaaccagggcagcatcaccttcgccggcggccccggcagagacggcaccatcgacttcacccccggcagcgagctgctgatcaccaaggccaagaacggccacctggccgtggtggcccccagactgaacagcagatag

SEQ ID NO: 89990 - DNA, 3087 bp, synthetic construct
  misc_feature 1..3087: note = Description of Artificial Sequence: Synthetic coding sequence
  source 1..3087: mol_type = other DNA
atggagagcgccctgaccgccagagacagagtgggcgtgcaggacttcgtgctgctggagaacttcaccagcgaggccgccttcatcgagaacctgagaagaagattcagagagaacctgatctacacctacatcggccccgtgctggtgagcgtgaacccctacagagacctgcagatctacagcagacagcacatggagagatacagaggcgtgagcttctacgaggtgcccccccacctgttcgccgtggccgacaccgtgtacagagccctgagaaccgagagaagagaccaggccgtgatgatcagcggcgagagcggcgccggcaagaccgaggccaccaagagactgctgcagttctacgccgagacctgccccgcccccgagagaggcggcgccgtgagagacagactgctgcagagcaaccccgtgctggaggccttcggcaacgccaagaccctgagaaacgacaacagcagcagattcggcaagtacatggacgtgcagttcgacttcaagggcgcccccgtgggcggccacatcctgagctacctgctggagaagagcagagtggtgcaccagaaccacggcgagagaaacttccacatcttctaccagctgctggagggcggcgaggaggagaccctgagaagactgggcctggagagaaacccccagagctacctgtacctggtgaagggccagtgcgccaaggtgagcagcatcaacgacaagagcgactggaaggtggtgagaaaggccctgaccgtgatcgacttcaccgaggacgaggtggaggacctgctgagcatcgtggccagcgtgctgcacctgggcaacatccacttcgccgccaacgaggagagcaacgcccaggtgaccaccgagaaccagctgaagtacctgaccagactgctgagcgtggagggcagcaccctgagagaggccctgacccacagaaagatcatcgccaagggcgaggagctgctgagccccctgaacctggagcaggccgcctacgccagagacgccctggccaaggccgtgtacagcagaaccttcacctggctggtgggcaagatcaacagaagcctggccagcaaggacgtggagagccccagctggagaagcaccaccgtgctgggcctgctggacatctacggcttcgaggtgttccagcacaacagcttcgagcagttctgcatcaactactgcaacgagaagctgcagcagctgttcatcgagctgaccctgaagagcgagcaggaggagtacgaggccgagggcatcgcctgggagcccgtgcagtacttcaacaacaagatcatctgcgacctggtggaggagaagttcaagggcatcatcagcatcctggacgaggagtgcctgagacccggcgaggccaccgacctgaccttcctggagaagctggaggacaccgtgaagcaccacccccacttcctgacccacaagctggccgaccagagaaccagaaagagcctgggcagaggcgagttcagactgctgcactacgccggcgaggtgacctacagcgtgaccggcttcctggacaagaacaacgacctgctgttcagaaacctgaaggagaccatgtgcagcagcaagaaccccatcatgagccagtgcttcgacagaagcgagctgagcgacaagaagagacccgagaccgtggccacccagttcaagatgagcctgctgcagctggtggagatcctgcagagcaaggagcccgcctacgtgagatgcatcaagcccaacgacgccaagcagcccggcagattcgacgaggtgctgatcagacaccaggtgaagtacctgggcctgctggagaacctgagagtgagaagagccggcttcgcctacagaagaaagtacgaggccttcctgcagagatacaagagcctgtgccccgagacctggcccacctgggccggcagaccccaggacggcgtggccgtgctggtgagacacctgggctacaagcccgaggagtacaagatgggcagaaccaagatcttcatcagattccccaagaccctgttcgccaccgaggacgccctggaggtgagaagacagagcctggccaccaagatccaggccgcctggagaggcttccactggagacagaagttcctgagagtgaagagaagcgccatctgcatccagagctggtggagaggcaccctgggcagaagaaaggccgccaagagaaagtgggccgcccagaccatcagaagactgatcagaggcttcgtgctgagacacgcccccagatgccccgagaacgccttcttcctggaccacgtgagaaccagcttcctgctgaacctgagaagacagctgccccagaacgtgctggacaccagctggcccacccccccccccgccctgagagaggccagcgagctgctgagagagctgtgcatcaagaacatggtgtggaagtactgcagaagcatcagccccgagtggaagcagcagctgcagcagaaggccgtggccagcgagatcttcaagggcaagaaggacaactacccccagagcgtgcccagactgttcatcagcaccagactgggcaccgacgagatcagccccagagtgctgcaggccctgggcagcgagcccatccagtacgccgtgcccgtggtgaagtacgacagaaagggctacaagcccagaagcagacagctgctgctgacccccaacgccgtggtgatcgtggaggacgccaaggtgaagcagagaatcgactacgccaacctgaccggcatcagcgtgagcagcctgagcgacagcctgttcgtgctgcacgtgcagagagccgacaacaagcagaagggcgacgtggtgctgcagagcgaccacgtgatcgagaccctgaccaagaccgccctgagcgccaacagagtgaacagcatcaacatcaaccagggcagcatcaccttcgccggcggccccggcagagacggcaccatcgacttcacccccggcagcgagctgctgatcaccaaggccaagaacggccacctggccgtggtggcccccagactgaacagcagatag

SEQ ID NO: 89991 - DNA, 3135 bp, synthetic construct
  misc_feature 1..3135: note = Description of Artificial Sequence: Synthetic coding sequence
  source 1..3135: mol_type = other DNA
atgagatacagagccagcgccctgggcagcgacggcgtgagagtgaccatggagagcgccctgaccgccagagacagagtgggcgtgcaggacttcgtgctgctggagaacttcaccagcgaggccgccttcatcgagaacctgagaagaagattcagagagaacctgatctacacctacatcggccccgtgctggtgagcgtgaacccctacagagacctgcagatctacagcagacagcacatggagagatacagaggcgtgagcttctacgaggtgcccccccacctgttcgccgtggccgacaccgtgtacagagccctgagaaccgagagaagagaccaggccgtgatgatcagcggcgagagcggcgccggcaagaccgaggccaccaagagactgctgcagttctacgccgagacctgccccgcccccgagagaggcggcgccgtgagagacagactgctgcagagcaaccccgtgctggaggccttcggcaacgccaagaccctgagaaacgacaacagcagcagattcggcaagtacatggacgtgcagttcgacttcaagggcgcccccgtgggcggccacatcctgagctacctgctggagaagagcagagtggtgcaccagaaccacggcgagagaaacttccacatcttctaccagctgctggagggcggcgaggaggagaccctgagaagactgggcctggagagaaacccccagagctacctgtacctggtgaagggccagtgcgccaaggtgagcagcatcaacgacaagagcgactggaaggtggtgagaaaggccctgaccgtgatcgacttcaccgaggacgaggtggaggacctgctgagcatcgtggccagcgtgctgcacctgggcaacatccacttcgccgccaacgaggagagcaacgcccaggtgaccaccgagaaccagctgaagtacctgaccagactgctgagcgtggagggcagcaccctgagagaggccctgacccacagaaagatcatcgccaagggcgaggagctgctgagccccctgaacctggagcaggccgcctacgccagagacgccctggccaaggccgtgtacagcagaaccttcacctggctggtgggcaagatcaacagaagcctggccagcaaggacgtggagagccccagctggagaagcaccaccgtgctgggcctgctggacatctacggcttcgaggtgttccagcacaacagcttcgagcagttctgcatcaactactgcaacgagaagctgcagcagctgttcatcgagctgaccctgaagagcgagcaggaggagtacgaggccgagggcatcgcctgggagcccgtgcagtacttcaacaacaagatcatctgcgacctggtggaggagaagttcaagggcatcatcagcatcctggacgaggagtgcctgagacccggcgaggccaccgacctgaccttcctggagaagctggaggacaccgtgaagcaccacccccacttcctgacccacaagctggccgaccagagaaccagaaagagcctgggcagaggcgagttcagactgctgcactacgccggcgaggtgacctacagcgtgaccggcttcctggacaagaacaacgacctgctgttcagaaacctgaaggagaccatgtgcagcagcaagaaccccatcatgagccagtgcttcgacagaagcgagctgagcgacaagaagagacccgagaccgtggccacccagttcaagatgagcctgctgcagctggtggagatcctgcagagcaaggagcccgcctacgtgagatgcatcaagcccaacgacgccaagcagcccggcagattcgacgaggtgctgatcagacaccaggtgaagtacctgggcctgctggagaacctgagagtgagaagagccggcttcgcctacagaagaaagtacgaggccttcctgcagagatacaagagcctgtgccccgagacctggcccacctgggccggcagaccccaggacggcgtggccgtgctggtgagacacctgggctacaagcccgaggagtacaagatgggcagaaccaagatcttcatcagattccccaagaccctgttcgccaccgaggacgccctggaggtgagaagacagagcctggccaccaagatccaggccgcctggagaggcttccactggagacagaagttcctgagagtgaagagaagcgccatctgcatccagagctggtggagaggcaccctgggcagaagaaaggccgccaagagaaagtgggccgcccagaccatcagaagactgatcagaggcttcgtgctgagacacgcccccagatgccccgagaacgccttcttcctggaccacgtgagaaccagcttcctgctgaacctgagaagacagctgccccagaacgtgctggacaccagctggcccacccccccccccgccctgagagaggccagcgagctgctgagagagctgtgcatcaagaacatggtgtggaagtactgcagaagcatcagccccgagtggaagcagcagctgcagcagaaggccgtggccagcgagatcttcaagggcaagaaggacaactacccccagagcgtgcccagactgttcatcagcaccagactgggcaccgacgagatcagccccagagtgctgcaggccctgggcagcgagcccatccagtacgccgtgcccgtggtgaagtacgacagaaagggctacaagcccagaagcagacagctgctgctgacccccaacgccgtggtgatcgtggaggacgccaaggtgaagcagagaatcgactacgccaacctgaccggcatcagcgtgagcagcctgagcgacagcctgttcgtgctgcacgtgcagagagccgacaacaagcagaagggcgacgtggtgctgcagagcgaccacgtgatcgagaccctgaccaagaccgccctgagcgccaacagagtgaacagcatcaacatcaaccagggcagcatcaccttcgccggcggccccggcagagacggcaccatcgacttcacccccggcagcgagctgctgatcaccaaggccaagaacggccacctggccgtggtggcccccagactgaacagcagatag

SEQ ID NO: 89992 - DNA, 2418 bp, synthetic construct
  misc_feature 1..2418: note = Description of Artificial Sequence: Synthetic coding sequence
  source 1..2418: mol_type = other DNA
atggagagcgccctgaccgccagagacagagtgggcgtgcaggacttcgtgctgctggagaacttcaccagcgaggccgccttcatcgagaacctgagaagaagattcagagagaacctgatctacacctacatcggccccgtgctggtgagcgtgaacccctacagagacctgcagatctacagcagacagcacatggagagatacagaggcgtgagcttctacgaggtgcccccccacctgttcgccgtggccgacaccgtgtacagagccctgagaaccgagagaagagaccaggccgtgatgatcagcggcgagagcggcgccggcaagaccgaggccaccaagagactgctgcagttctacgccgagacctgccccgcccccgagagaggcggcgccgtgagagacagactgctgcagagcaaccccgtgctggaggccttcggcaacgccaagaccctgagaaacgacaacagcagcagattcggcaagtacatggacgtgcagttcgacttcaagggcgcccccgtgggcggccacatcctgagctacctgctggagaagagcagagtggtgcaccagaaccacggcgagagaaacttccacatcttctaccagctgctggagggcggcgaggaggagaccctgagaagactgggcctggagagaaacccccagagctacctgtacctggtgaagggccagtgcgccaaggtgagcagcatcaacgacaagagcgactggaaggtggtgagaaaggccctgaccgtgatcgacttcaccgaggacgaggtggaggacctgctgagcatcgtggccagcgtgctgcacctgggcaacatccacttcgccgccaacgaggagagcaacgcccaggtgaccaccgagaaccagctgaagtacctgaccagactgctgagcgtggagggcagcaccctgagagaggccctgacccacagaaagatcatcgccaagggcgaggagctgctgagccccctgaacctggagcaggccgcctacgccagagacgccctggccaaggccgtgtacagcagaaccttcacctggctggtgggcaagatcaacagaagcctggccagcaaggacgtggagagccccagctggagaagcaccaccgtgctgggcctgctggacatctacggcttcgaggtgttccagcacaacagcttcgagcagttctgcatcaactactgcaacgagaagctgcagcagctgttcatcgagctgaccctgaagagcgagcaggaggagtacgaggccgagggcatcgcctgggagcccgtgcagtacttcaacaacaagatcatctgcgacctggtggaggagaagttcaagggcatcatcagcatcctggacgaggagtgcctgagacccggcgaggccaccgacctgaccttcctggagaagctggaggacaccgtgaagcaccacccccacttcctgacccacaagctggccgaccagagaaccagaaagagcctgggcagaggcgagttcagactgctgcactacgccggcgaggtgacctacagcgtgaccggcttcctggacaagaacaacgacctgctgttcagaaacctgaaggagaccatgtgcagcagcaagaaccccatcatgagccagtgcttcgacagaagcgagctgagcgacaagaagagacccgagaccgtggccacccagttcaagatgagcctgctgcagctggtggagatcctgcagagcaaggagcccgcctacgtgagatgcatcaagcccaacgacgccaagcagcccggcagattcgacgaggtgctgatcagacaccaggtgaagtacctgggcctgctggagaacctgagagtgagaagagccggcttcgcctacagaagaaagtacgaggccttcctgcagagatacaagagcctgtgccccgagacctggcccacctgggccggcagaccccaggacggcgtggccgtgctggtgagacacctgggctacaagcccgaggagtacaagatgggcagaaccaagatcttcatcagattccccaagaccctgttcgccaccgaggacgccctggaggtgagaagacagagcctggccaccaagatccaggccgcctggagaggcttccactggagacagaagttcctgagagtgaagagaagcgccatctgcatccagagctggtggagaggcaccctgggcagaagaaaggccgccaaggaggtgggcggcaccgaccaccccgccgcccaccccagactgagacccgcccccagaccccccctgcccagagagagactgctgcccggcccctgcgcccacctgttcttcgccaagcccgaggccgccgccgcccccgagtgccccggccacctggtggcccacgcccccacctgccccgcctag

SEQ ID NO: 89993 - DNA, 3135 bp, synthetic construct
  misc_feature 1..3135: note = Description of Artificial Sequence: Synthetic coding sequence
  source 1..3135: mol_type = other DNA
atgagaggcagagccagcgccctgggcagcgacggcgtgagagtgaccatggagagcgccctgaccgccagagacagagtgggcgtgcaggacttcgtgctgctggagaacttcaccagcgaggccgccttcatcgagaacctgagaagaagattcagagagaacctgatctacacctacatcggccccgtgctggtgagcgtgaacccctacagagacctgcagatctacagcagacagcacatggagagatacagaggcgtgagcttctacgaggtgcccccccacctgttcgccgtggccgacaccgtgtacagagccctgagaaccgagagaagagaccaggccgtgatgatcagcggcgagagcggcgccggcaagaccgaggccaccaagagactgctgcagttctacgccgagacctgccccgcccccgagagaggcggcgccgtgagagacagactgctgcagagcaaccccgtgctggaggccttcggcaacgccaagaccctgagaaacgacaacagcagcagattcggcaagtacatggacgtgcagttcgacttcaagggcgcccccgtgggcggccacatcctgagctacctgctggagaagagcagagtggtgcaccagaaccacggcgagagaaacttccacatcttctaccagctgctggagggcggcgaggaggagaccctgagaagactgggcctggagagaaacccccagagctacctgtacctggtgaagggccagtgcgccaaggtgagcagcatcaacgacaagagcgactggaaggtggtgagaaaggccctgaccgtgatcgacttcaccgaggacgaggtggaggacctgctgagcatcgtggccagcgtgctgcacctgggcaacatccacttcgccgccaacgaggagagcaacgcccaggtgaccaccgagaaccagctgaagtacctgaccagactgctgagcgtggagggcagcaccctgagagaggccctgacccacagaaagatcatcgccaagggcgaggagctgctgagccccctgaacctggagcaggccgcctacgccagagacgccctggccaaggccgtgtacagcagaaccttcacctggctggtgggcaagatcaacagaagcctggccagcaaggacgtggagagccccagctggagaagcaccaccgtgctgggcctgctggacatctacggcttcgaggtgttccagcacaacagcttcgagcagttctgcatcaactactgcaacgagaagctgcagcagctgttcatcgagctgaccctgaagagcgagcaggaggagtacgaggccgagggcatcgcctgggagcccgtgcagtacttcaacaacaagatcatctgcgacctggtggaggagaagttcaagggcatcatcagcatcctggacgaggagtgcctgagacccggcgaggccaccgacctgaccttcctggagaagctggaggacaccgtgaagcaccacccccacttcctgacccacaagctggccgaccagagaaccagaaagagcctgggcagaggcgagttcagactgctgcactacgccggcgaggtgacctacagcgtgaccggcttcctggacaagaacaacgacctgctgttcagaaacctgaaggagaccatgtgcagcagcaagaaccccatcatgagccagtgcttcgacagaagcgagctgagcgacaagaagagacccgagaccgtggccacccagttcaagatgagcctgctgcagctggtggagatcctgcagagcaaggagcccgcctacgtgagatgcatcaagcccaacgacgccaagcagcccggcagattcgacgaggtgctgatcagacaccaggtgaagtacctgggcctgctggagaacctgagagtgagaagagccggcttcgcctacagaagaaagtacgaggccttcctgcagagatacaagagcctgtgccccgagacctggcccacctgggccggcagaccccaggacggcgtggccgtgctggtgagacacctgggctacaagcccgaggagtacaagatgggcagaaccaagatcttcatcagattccccaagaccctgttcgccaccgaggacgccctggaggtgagaagacagagcctggccaccaagatccaggccgcctggagaggcttccactggagacagaagttcctgagagtgaagagaagcgccatctgcatccagagctggtggagaggcaccctgggcagaagaaaggccgccaagagaaagtgggccgcccagaccatcagaagactgatcagaggcttcgtgctgagacacgcccccagatgccccgagaacgccttcttcctggaccacgtgagaaccagcttcctgctgaacctgagaagacagctgccccagaacgtgctggacaccagctggcccacccccccccccgccctgagagaggccagcgagctgctgagagagctgtgcatcaagaacatggtgtggaagtactgcagaagcatcagccccgagtggaagcagcagctgcagcagaaggccgtggccagcgagatcttcaagggcaagaaggacaactacccccagagcgtgcccagactgttcatcagcaccagactgggcaccgacgagatcagccccagagtgctgcaggccctgggcagcgagcccatccagtacgccgtgcccgtggtgaagtacgacagaaagggctacaagcccagaagcagacagctgctgctgacccccaacgccgtggtgatcgtggaggacgccaaggtgaagcagagaatcgactacgccaacctgaccggcatcagcgtgagcagcctgagcgacagcctgttcgtgctgcacgtgcagagagccgacaacaagcagaagggcgacgtggtgctgcagagcgaccacgtgatcgagaccctgaccaagaccgccctgagcgccaacagagtgaacagcatcaacatcaaccagggcagcatcaccttcgccggcggccccggcagagacggcaccatcgacttcacccccggcagcgagctgctgatcaccaaggccaagaacggccacctggccgtggtggcccccagactgaacagcagatag

SEQ ID NO: 89994 - DNA, 3120 bp, synthetic construct
  misc_feature 1..3120: note = Description of Artificial Sequence: Synthetic coding sequence
  source 1..3120: mol_type = other DNA
atggccctgggcagcgacggcgtgagagtgaccatggagagcgccctgaccgccagagacagagtgggcgtgcaggacttcgtgctgctggagaacttcaccagcgaggccgccttcatcgagaacctgagaagaagattcagagagaacctgatctacacctacatcggccccgtgctggtgagcgtgaacccctacagagacctgcagatctacagcagacagcacatggagagatacagaggcgtgagcttctacgaggtgcccccccacctgttcgccgtggccgacaccgtgtacagagccctgagaaccgagagaagagaccaggccgtgatgatcagcggcgagagcggcgccggcaagaccgaggccaccaagagactgctgcagttctacgccgagacctgccccgcccccgagagaggcggcgccgtgagagacagactgctgcagagcaaccccgtgctggaggccttcggcaacgccaagaccctgagaaacgacaacagcagcagattcggcaagtacatggacgtgcagttcgacttcaagggcgcccccgtgggcggccacatcctgagctacctgctggagaagagcagagtggtgcaccagaaccacggcgagagaaacttccacatcttctaccagctgctggagggcggcgaggaggagaccctgagaagactgggcctggagagaaacccccagagctacctgtacctggtgaagggccagtgcgccaaggtgagcagcatcaacgacaagagcgactggaaggtggtgagaaaggccctgaccgtgatcgacttcaccgaggacgaggtggaggacctgctgagcatcgtggccagcgtgctgcacctgggcaacatccacttcgccgccaacgaggagagcaacgcccaggtgaccaccgagaaccagctgaagtacctgaccagactgctgagcgtggagggcagcaccctgagagaggccctgacccacagaaagatcatcgccaagggcgaggagctgctgagccccctgaacctggagcaggccgcctacgccagagacgccctggccaaggccgtgtacagcagaaccttcacctggctggtgggcaagatcaacagaagcctggccagcaaggacgtggagagccccagctggagaagcaccaccgtgctgggcctgctggacatctacggcttcgaggtgttccagcacaacagcttcgagcagttctgcatcaactactgcaacgagaagctgcagcagctgttcatcgagctgaccctgaagagcgagcaggaggagtacgaggccgagggcatcgcctgggagcccgtgcagtacttcaacaacaagatcatctgcgacctggtggaggagaagttcaagggcatcatcagcatcctggacgaggagtgcctgagacccggcgaggccaccgacctgaccttcctggagaagctggaggacaccgtgaagcaccacccccacttcctgacccacaagctggccgaccagagaaccagaaagagcctgggcagaggcgagttcagactgctgcactacgccggcgaggtgacctacagcgtgaccggcttcctggacaagaacaacgacctgctgttcagaaacctgaaggagaccatgtgcagcagcaagaaccccatcatgagccagtgcttcgacagaagcgagctgagcgacaagaagagacccgagaccgtggccacccagttcaagatgagcctgctgcagctggtggagatcctgcagagcaaggagcccgcctacgtgagatgcatcaagcccaacgacgccaagcagcccggcagattcgacgaggtgctgatcagacaccaggtgaagtacctgggcctgctggagaacctgagagtgagaagagccggcttcgcctacagaagaaagtacgaggccttcctgcagagatacaagagcctgtgccccgagacctggcccacctgggccggcagaccccaggacggcgtggccgtgctggtgagacacctgggctacaagcccgaggagtacaagatgggcagaaccaagatcttcatcagattccccaagaccctgttcgccaccgaggacgccctggaggtgagaagacagagcctggccaccaagatccaggccgcctggagaggcttccactggagacagaagttcctgagagtgaagagaagcgccatctgcatccagagctggtggagaggcaccctgggcagaagaaaggccgccaagagaaagtgggccgcccagaccatcagaagactgatcagaggcttcgtgctgagacacgcccccagatgccccgagaacgccttcttcctggaccacgtgagaaccagcttcctgctgaacctgagaagacagctgccccagaacgtgctggacaccagctggcccacccccccccccgccctgagagaggccagcgagctgctgagagagctgtgcatcaagaacatggtgtggaagtactgcagaagcatcagccccgagtggaagcagcagctgcagcagaaggccgtggccagcgagatcttcaagggcaagaaggacaactacccccagagcgtgcccagactgttcatcagcaccagactgggcaccgacgagatcagccccagagtgctgcaggccctgggcagcgagcccatccagtacgccgtgcccgtggtgaagtacgacagaaagggctacaagcccagaagcagacagctgctgctgacccccaacgccgtggtgatcgtggaggacgccaaggtgaagcagagaatcgactacgccaacctgaccggcatcagcgtgagcagcctgagcgacagcctgttcgtgctgcacgtgcagagagccgacaacaagcagaagggcgacgtggtgctgcagagcgaccacgtgatcgagaccctgaccaagaccgccctgagcgccaacagagtgaacagcatcaacatcaaccagggcagcatcaccttcgccggcggccccggcagagacggcaccatcgacttcacccccggcagcgagctgctgatcaccaaggccaagaacggccacctggccgtggtggcccccagactgaacagcagatag

SEQ ID NO: 89995 - DNA, 3021 bp, synthetic construct
  misc_feature 1..3021: note = Description of Artificial Sequence: Synthetic coding sequence
  source 1..3021: mol_type = other DNA
atggccgagcaggagagcctggagttcggcaaggccgacttcgtgctgatggacaccgtgagcatgcccgagttcatggccaacctgagactgagattcgagaagggcagaatctacaccttcatcggcgaggtggtggtgagcgtgaacccctacaagctgctgaacatctacggcagagacaccatcgagcagtacaagggcagagagctgtacgagagacccccccacctgttcgccatcgccgacgccgcctacaaggccatgaagagaagaagcaaggacacctgcatcgtgatcagcggcgagagcggcgccggcaagaccgaggccagcaagtacatcatgcagtacatcgccgccatcaccaaccccagccagagagccgaggtggagagagtgaagaacatgctgctgaagagcaactgcgtgctggaggccttcggcaacgccaagaccaacagaaacgacaacagcagcagattcggcaagtacatggacatcaacttcgacttcaagggcgaccccatcggcggccacatcaacaactacctgctggagaagagcagagtgatcgtgcagcagcccggcgagagaagcttccacagcttctaccagctgctgcagggcggcagcgagcagatgctgagaagcctgcacctgcagaagagcctgagcagctacaactacatccacgtgggcgcccagctgaagagcagcatcaacgacgccgccgagttcagagtggtggccgacgccatgaaggtgatcggcttcaagcccgaggagatccagaccgtgtacaagatcctggccgccatcctgcacctgggcaacctgaagttcgtggtggacggcgacacccccctgatcgagaacggcaaggtggtgagcatcatcgccgagctgctgagcaccaagaccgacatggtggagaaggccctgctgtacagaaccgtggccaccggcagagacatcatcgacaagcagcacaccgagcaggaggccagctacggcagagacgccttcgccaaggccatctacgagagactgttctgctggatcgtgaccagaatcaacgacatcatcgaggtgaagaactacgacaccaccatccacggcaagaacaccgtgatcggcgtgctggacatctacggcttcgagatcttcgacaacaacagcttcgagcagttctgcatcaactactgcaacgagaagctgcagcagctgttcatccagctggtgctgaagcaggagcaggaggagtaccagagagagggcatcccctggaagcacatcgactacttcaacaaccagatcatcgtggacctggtggagcagcagcacaagggcatcatcgccatcctggacgacgcctgcatgaacgtgggcaaggtgaccgacgagatgttcctggaggccctgaacagcaagctgggcaagcacgcccacttcagcagcagaaagctgtgcgccagcgacaagatcctggagttcgacagagacttcagaatcagacactacgccggcgacgtggtgtacagcgtgatcggcttcatcgacaagaacaaggacaccctgttccaggacttcaagagactgatgtacaacagcagcaaccccgtgctgaagaacatgtggcccgagggcaagctgagcatcaccgaggtgaccaagagacccctgaccgccgccaccctgttcaagaacagcatgatcgccctggtggacaacctggccagcaaggagccctactacgtgagatgcatcaagcccaacgacaagaagagcccccagatcttcgacgacgagagatgcagacaccaggtggagtacctgggcctgctggagaacgtgagagtgagaagagccggcttcgccttcagacagacctacgagaagttcctgcacagatacaagatgatcagcgagttcacctggcccaaccacgacctgcccagcgacaaggaggccgtgaagaagctgatcgagagatgcggcttccaggacgacgtggcctacggcaagaccaagatcttcatcagaacccccagaaccctgttcaccctggaggagctgagagcccagatgctgatcagaatcgtgctgttcctgcagaaggtgtggagaggcaccctggccagaatgagatacaagagaaccaaggccgccctgaccatcatcagatactacagaagatacaaggtgaagagctacatccacgaggtggccagaagattccacggcgtgaagaccatgagagactacggcaagcacgtgaagtggcccagcccccccaaggtgctgagaagattcgaggaggccctgcagaccatcttcaacagatggagagccagccagctgatcaagagcatccccgccagcgacctgccccaggtgagagccaaggtggccgccgtggagatgctgaagggccagagagccgacctgggcctgcagagagcctgggagggcaactacctggccagcaagcccgacaccccccagaccagcggcaccttcgtgcccgtggccaacgagctgaagagaaaggacaagtacatgaacgtgctgttcagctgccacgtgagaaaggtgaacagattcagcaaggtggaggacagagccatcttcgtgaccgacagacacctgtacaagatggaccccaccaagcagtacaaggtgatgaagaccatccccctgtacaacctgaccggcctgagcgtgagcaacggcaaggaccagctggtggtgttccacaccaaggacaacaaggacctgatcgtgtgcctgttcagcaagcagcccacccacgagagcagaatcggcgagctggtgggcgtgctggtgaaccacttcaagagcgagaagagacacctgcaggtgaacgtgaccaaccccgtgcagtgcagcctgcacggcaagaagtgcaccgtgagcgtggagaccagactgaaccagccccagcccgacttcaccaagaacagaagcggcttcatcctgagcgtgcccggcaactag

SEQ ID NO: 89996 - DNA, 597 bp, synthetic construct
  misc_feature 1..597: note = Description of Artificial Sequence: Synthetic coding sequence
  source 1..597: mol_type = other DNA
atgctgaagggccagagagccgacctgggcctgcagagagcctgggagggcaactacctggccagcaagcccgacaccccccagaccagcggcaccttcgtgcccgtggccaacgagctgaagagaaaggacaagtacatgaacgtgctgttcagctgccacgtgagaaaggtgaacagattcagcaaggtggaggacagagccatcttcgtgaccgacagacacctgtacaagatggaccccaccaagcagtacaaggtgatgaagaccatccccctgtacaacctgaccggcctgagcgtgagcaacggcaaggaccagctggtggtgttccacaccaaggacaacaaggacctgatcgtgtgcctgttcagcaagcagcccacccacgagagcagaatcggcgagctggtgggcgtgctggtgaaccacttcaagagcgagaagagacacctgcaggtgaacgtgaccaaccccgtgcagtgcagcctgcacggcaagaagtgcaccgtgagcgtggagaccagactgaaccagccccagcccgacttcaccaagaacagaagcggcttcatcctgagcgtgcccggcaactag

SEQ ID NO: 89997 - DNA, 3327 bp, synthetic construct
  misc_feature 1..3327: note = Description of Artificial Sequence: Synthetic coding sequence
  source 1..3327: mol_type = other DNA
atgggcagcaagggcgtgtaccagtaccactggcagagccacaacgtgaagcacagcggcgtggacgacatggtgctgctgagcaagatcaccgagaacagcatcgtggagaacctgaagaagagatacatggacgactacatcttcacctacatcggcagcgtgctgatcagcgtgaaccccttcaagcagatgccctacttcggcgagaaggagatcgagatgtaccagggcgccgcccagtacgagaaccccccccacatctacgccctggccgacaacatgtacagaaacatgatcatcgacagagagaaccagtgcgtgatcatcagcggcgagagcggcgccggcaagaccgtggccgccaagtacatcatgagctacatcagcagagtgagcggcggcggcaccaaggtgcagcacgtgaaggacatcatcctgcagagcaaccccctgctggaggccttcggcaacgccaagaccgtgagaaacaacaacagcagcagattcggcaagtacttcgagatccagttcagccccggcggcgagcccgacggcggcaagatcagcaacttcctgctggagaagagcagagtggtgatgagaaaccccggcgagagaagcttccacatcttctaccagctgatcgagggcgccagcgccgagcagaagcacagcctgggcatcaccagcatggactactactactacctgagcctgagcggcagctacaaggtggacgacatcgacgacagaagagagttccaggagaccctgcacgccatgaacgtgatcggcatcttcgccgaggagcagaccctggtgctgcagatcgtggccggcatcctgcacctgggcaacatcagcttcaaggaggtgggcaactacgccgccgtggagagcgaggagttcctggccttccccgcctacctgctgggcatcaaccaggacagactgaaggagaagctgaccagcagacagatggacagcaagtggggcggcaagagcgagagcatccacgtgaccctgaacgtggagcaggcctgctacaccagagacgccctggccaaggccctgcacgccagagtgttcgacttcctggtggacagcatcaacaaggccatggagaaggaccacgaggagtacaacatcggcgtgctggacatctacggcttcgagatcttccagaagaacggcttcgagcagttctgcatcaacttcgtgaacgagaagctgcagcagatcttcatcgagctgaccctgaaggccgagcaggaggagtacgtgcaggagggcatcagatggacccccatcgagtacttcaacaacaagatcgtgtgcgacctgatcgagaacaaggtgaacccccccggcatcatgagcatcctggacgacgtgtgcgccaccatgcacgccgtgggcgagggcgccgaccagaccctgctgcagaagctgcagatgcagatcggcagccacgagcacttcaacagctggaaccagggcttcatcatccaccactacgccggcaaggtgagctacgacatggacggcttctgcgagagaaacagagacgtgctgttcatggacctgatcgagctgatgcagagcagcgagctgcccttcatcaagagcctgttccccgagaacctgcaggccgacaagaagggcagacccaccaccgccggcagcaagatcaagaagcaggccaacgacctggtgagcaccctgatgaagtgcaccccccactacatcagatgcatcaagcccaacgagaccaagaagcccagagactgggaggagagcagagtgaagcaccaggtggagtacctgggcctgaaggagaacatcagagtgagaagagccggctacgcctacagaagaatcttccagaagttcctgcagagatacgccatcctgaccaaggccacctggcccagctggcagggcgaggagaagcagggcgtgctgcacctgctgcagagcgtgaacatggacagcgaccagttccagctgggcagaagcaaggtgttcatcaaggcccccgagagcctgttcctgctggaggagatgagagagagaaagtacgacggctacgccagagtgatccagaagagctggagaaagttcgtggccagaaagaagtacgtgcagatgagagaggaggccagcgacctgctgctgaacaagaaggagagaagaagaaacagcatcaacagaaacttcatcggcgactacatcggcatggaggagcaccccgagctgcagcagttcgtgggcaagagagagaagatcgacttcgccgacaccgtgaccaagtacgacagaagattcaagggcgtgaagagagacctgctgctgacccccaagtgcctgtacctgatcggcagagagaaggtgaagcagggccccgacaagggcctggtgaaggaggtgctgaagagaaagatcgagatcgagagaatcctgagcgtgagcctgagcaccatgcaggacgacatcttcatcctgcacgagcaggagtacgacagcctgctggagagcgtgttcaagaccgagttcctgagcctgctggccaagagatacgaggagaagacccagaagcagctgcccctgaagttcagcaacaccctggagctgaagctgaagaaggagaactggggcccctggagcgccggcggcagcagacaggtgcagttccaccagggcttcggcgacctggccgtgctgaagcccagcaacaaggtgctgcaggtgagcatcggccccggcctgcccaagaacagcagacccaccagaagaaacaccacccagaacaccggctacagcagcggcacccagaacgccaactaccccgtgagagccgccccccccccccccggctaccaccagaacggcgtgatcagaaaccagtacgtgccctacccccacgcccccggcagccagagaagcaaccagaagagcctgtacaccagcatggccagaccccccctgcccagacagcagagcaccagcagcgacagagtgagccagacccccgagagcctggacttcctgaaggtgcccgaccagggcgccgccggcgtgagaagacagaccaccagcagacccccccccgccggcggcagacccaagccccagcccaagcccaagccccaggtgccccagtgcaaggccctgtacgcctacgacgcccaggacaccgacgagctgagcttcaacgccaacgacatcatcgacatcatcaaggaggaccccagcggctggtggaccggcagactgagaggcaagcagggcctgttccccaacaactacgtgaccaagatctag

SEQ ID NO: 89998 - DNA, 3312 bp, synthetic construct
  misc_feature 1..3312: note = Description of Artificial Sequence: Synthetic coding sequence
  source 1..3312: mol_type = other DNA
ggcaccaaggccggcagccccgtgaacggccagaagcagggccacgcccaggccacccccaagatccccctgaacctgcacctgcaccacgaccccttcagaagcctgcaggagcccagacaccagccccccaccatgggcagcaaggagagattccactggcagagccacaacgtgaagcagagcggcgtggacgacatggtgctgctgccccagatcaccgaggacgccatcgccgccaacctgagaaagagattcatggacgactacatcttcacctacatcggcagcgtgctgatcagcgtgaaccccttcaagcagatgccctacttcaccgacagagagatcgacctgtaccagggcgccgcccagtacgagaaccccccccacatctacgccctgaccgacaacatgtacagaaacatgctgatcgactgcgagaaccagtgcgtgatcatcagcggcgagagcggcgccggcaagaccgtggccgccaagtacatcatgggctacatcagcaaggtgagcggcggcggcgagaaggtgcagcacgtgaaggacatcatcctgcagagcaaccccctgctggaggccttcggcaacgccaagaccgtgagaaacaacaacagcagcagattcggcaagtacttcgagatccagttcagcagaggcggcgagcccgacggcggcaagatcagcaacttcctgctggagaagagcagagtggtgatgcagaacgagaacgagagaaacttccacatctactaccagctgctggagggcgccagccaggagcagagacagaacctgggcctgatgacccccgactactactactacctgaaccagagcgacacctaccaggtggacggcaccgacgacagaagcgacttcggcgagaccctgagcgccatgcaggtgatcggcatcccccccagcatccagcagctggtgctgcagctggtggccggcatcctgcacctgggcaacatcagcttctgcgaggacggcaactacgccagagtggagagcgtggacctgctggccttccccgcctacctgctgggcatcgacagcggcagactgcaggagaagctgaccagcagaaagatggacagcagatggggcggcagaagcgagagcatcaacgtgaccctgaacgtggagcaggccgcctacaccagagacgccctggccaagggcctgtacgccagactgttcgacttcctggtggaggccatcaacagagccatgcagaagccccaggaggagtacagcatcggcgtgctggacatctacggcttcgagatcttccagaagaacggcttcgagcagttctgcatcaacttcgtgaacgagaagctgcagcagatcttcatcgagctgaccctgaaggccgagcaggaggagtacgtgcaggagggcatcagatggacccccatccagtacttcaacaacaaggtggtgtgcgacctgatcgagaacaagctgagcccccccggcatcatgagcgtgctggacgacgtgtgcgccaccatgcacgccaccggcggcggcgccgaccagaccctgctgcagaagctgcaggccgccgtgggcacccacgagcacttcaacagctggagcgccggcttcgtgatccaccactacgccggcaaggtgagctacgacgtgagcggcttctgcgagagaaacagagacgtgctgttcagcgacctgatcgagctgatgcagaccagcgagcaggccttcctgagaatgctgttccccgagaagctggacggcgacaagaagggcagacccagcaccgccggcagcaagatcaagaagcaggccaacgacctggtggccaccctgatgagatgcaccccccactacatcagatgcatcaagcccaacgagaccaagagacccagagactgggaggagaacagagtgaagcaccaggtggagtacctgggcctgaaggagaacatcagagtgagaagagccggcttcgcctacagaagacagttcgccaagttcctgcagagatacgccatcctgacccccgagacctggcccagatggagaggcgacgagagacagggcgtgcagcacctgctgagagccgtgaacatggagcccgaccagtaccagatgggcagcaccaaggtgttcgtgaagaaccccgagagcctgttcctgctggaggaggtgagagagagaaagttcgacggcttcgccagaaccatccagaaggcctggagaagacacgtggccgtgagaaagtacgaggagatgagagaggaggccagcaacatcctgctgaacaagaaggagagaagaagaaacagcatcaacagaaacttcgtgggcgactacctgggcctggaggagagacccgagctgagacagttcctgggcaagagagagagagtggacttcgccgacagcgtgaccaagtacgacagaagattcaagcccatcaagagagacctgatcctgacccccaagtgcgtgtacgtgatcggcagagagaaggtgaagaagggccccgagaagggccaggtgtgcgaggtgctgaagaagaaggtggacatccaggccctgagaggcgtgagcctgagcaccagacaggacgacttcttcatcctgcaggaggacgccgccgacagcttcctggagagcgtgttcaagaccgagttcgtgagcctgctgtgcaagagattcgaggaggccaccagaagacccctgcccctgaccttcagcgacaccctgcagttcagagtgaagaaggagggctggggcggcggcggcaccagaagcgtgaccttcagcagaggcttcggcgacctggccgtgctgaaggtgggcggcagaaccctgaccgtgagcgtgggcgacggcctgcccaagagcagcaagcccaccagaaagggcatggccaagggcaagcccagaagaagcagccaggcccccaccagagccgcccccgccccccccagaggcatggacagaaacggcgtgccccccagcgccagaggcggccccctgcccggcgaccacgtgtggagaggccacccccaggccagccccggcctgagaccccacccctgggagcccgccgacgaccccggccacgtgagaccccagagcaccacccagaacagcagcacctgcctgaccagagcctggcccgcctgcagaggcagcgccgcctggggcaacggccagtgcctggtgtgggccgaccccagccccagcctgggccacatggtgcccggcgccggcccctacaccagcacctgggccaagatgtggaccagctag

SEQ ID NO: 89999 - DNA, 3297 bp, synthetic construct
  misc_feature 1..3297: note = Description of Artificial Sequence: Synthetic coding sequence
  source 1..3297: mol_type = other DNA
atgggcagcaaggagagattccactggcagagccacaacgtgaagcagagcggcgtggacgacatggtgctgctgccccagatcaccgaggacgccatcgccgccaacctgagaaagagattcatggacgactacatcttcacctacatcggcagcgtgctgatcagcgtgaaccccttcaagcagatgccctacttcaccgacagagagatcgacctgtaccagggcgccgcccagtacgagaaccccccccacatctacgccctgaccgacaacatgtacagaaacatgctgatcgactgcgagaaccagtgcgtgatcatcagcggcgagagcggcgccggcaagaccgtggccgccaagtacatcatgggctacatcagcaaggtgagcggcggcggcgagaaggtgcagcacgtgaaggacatcatcctgcagagcaaccccctgctggaggccttcggcaacgccaagaccgtgagaaacaacaacagcagcagattcggcaagtacttcgagatccagttcagcagaggcggcgagcccgacggcggcaagatcagcaacttcctgctggagaagagcagagtggtgatgcagaacgagaacgagagaaacttccacatctactaccagctgctggagggcgccagccaggagcagagacagaacctgggcctgatgacccccgactactactactacctgaaccagagcgacacctaccaggtggacggcaccgacgacagaagcgacttcggcgagaccctgagcgccatgcaggtgatcggcatcccccccagcatccagcagctggtgctgcagctggtggccggcatcctgcacctgggcaacatcagcttctgcgaggacggcaactacgccagagtggagagcgtggacctgctggccttccccgcctacctgctgggcatcgacagcggcagactgcaggagaagctgaccagcagaaagatggacagcagatggggcggcagaagcgagagcatcaacgtgaccctgaacgtggagcaggccgcctacaccagagacgccctggccaagggcctgtacgccagactgttcgacttcctggtggaggccatcaacagagccatgcagaagccccaggaggagtacagcatcggcgtgctggacatctacggcttcgagatcttccagaagaacggcttcgagcagttctgcatcaacttcgtgaacgagaagctgcagcagatcttcatcgagctgaccctgaaggccgagcaggaggagtacgtgcaggagggcatcagatggacccccatccagtacttcaacaacaaggtggtgtgcgacctgatcgagaacaagctgagcccccccggcatcatgagcgtgctggacgacgtgtgcgccaccatgcacgccaccggcggcggcgccgaccagaccctgctgcagaagctgcaggccgccgtgggcacccacgagcacttcaacagctggagcgccggcttcgtgatccaccactacgccggcaaggtgagctacgacgtgagcggcttctgcgagagaaacagagacgtgctgttcagcgacctgatcgagctgatgcagaccagcgagcaggccttcctgagaatgctgttccccgagaagctggacggcgacaagaagggcagacccagcaccgccggcagcaagatcaagaagcaggccaacgacctggtggccaccctgatgagatgcaccccccactacatcagatgcatcaagcccaacgagaccaagagacccagagactgggaggagaacagagtgaagcaccaggtggagtacctgggcctgaaggagaacatcagagtgagaagagccggcttcgcctacagaagacagttcgccaagttcctgcagagatacgccatcctgacccccgagacctggcccagatggagaggcgacgagagacagggcgtgcagcacctgctgagagccgtgaacatggagcccgaccagtaccagatgggcagcaccaaggtgttcgtgaagaaccccgagagcctgttcctgctggaggaggtgagagagagaaagttcgacggcttcgccagaaccatccagaaggcctggagaagacacgtggccgtgagaaagtacgaggagatgagagaggaggccagcaacatcctgctgaacaagaaggagagaagaagaaacagcatcaacagaaacttcgtgggcgactacctgggcctggaggagagacccgagctgagacagttcctgggcaagagagagagagtggacttcgccgacagcgtgaccaagtacgacagaagattcaagcccatcaagagagacctgatcctgacccccaagtgcgtgtacgtgatcggcagagagaaggtgaagaagggccccgagaagggccaggtgtgcgaggtgctgaagaagaaggtggacatccaggccctgagaggcgtgagcctgagcaccagacaggacgacttcttcatcctgcaggaggacgccgccgacagcttcctggagagcgtgttcaagaccgagttcgtgagcctgctgtgcaagagattcgaggaggccaccagaagacccctgcccctgaccttcagcgacaccctgcagttcagagtgaagaaggagggctggggcggcggcggcaccagaagcgtgaccttcagcagaggcttcggcgacctggccgtgctgaaggtgggcggcagaaccctgaccgtgagcgtgggcgacggcctgcccaagagcagcaagcccaccagaaagggcatggccaagggcaagcccagaagaagcagccaggcccccaccagagccgcccccgccccccccagaggcatggacagaaacggcgtgccccccagcgccagaggcggccccctgcccctggagatcatgagcggcggcggcacccacagaccccccagaggcccccccagcaccagcctgggcgccagcagaagacccagagccagaccccccagcgagcacaacaccgagttcctgaacgtgcccgaccagggcatggccggcatgcagagaaagagaagcgtgggccagagacccgtgcccggcgtgggcagacccaagccccagcccagaacccacggccccagatgcagagccctgtaccagtacgtgggccaggacgtggacgagctgagcttcaacgtgaacgaggtgatcgagatcctgatggaggaccccagcggctggtggaagggcagactgcacggccaggagggcctgttccccggcaactacgtggagaagatctag

SEQ ID NO: 90000 - DNA, 3057 bp, synthetic construct
  misc_feature 1..3057: note = Description of Artificial Sequence: Synthetic coding sequence
  source 1..3057: mol_type = other DNA
atggaggacgaggagggccccgagtacggcaagcccgacttcgtgctgctggaccaggtgaccatggaggacttcatgagaaacctgcagctgagattcgagaagggcagaatctacacctacatcggcgaggtgctggtgagcgtgaacccctaccaggagctgcccctgtacggccccgaggccatcgccagataccagggcagagagctgtacgagagacccccccacctgtacgccgtggccaacgccgcctacaaggccatgaagcacagaagcagagacacctgcatcgtgatcagcggcgagagcggcgccggcaagaccgaggccagcaagcacatcatgcagtacatcgccgccgtgaccaaccccagccagagagccgaggtggagagagtgaaggacgtgctgctgaagagcacctgcgtgctggaggccttcggcaacgccagaaccaacagaaaccacaacagcagcagattcggcaagtacatggacatcaacttcgacttcaagggcgaccccatcggcggccacatccacagctacctgctggagaagagcagagtgctgaagcagcacgtgggcgagagaaacttccacgccttctaccagctgctgagaggcagcgaggacaagcagctgcacgagctgcacctggagagaaaccccgccgtgtacaacttcacccaccagggcgccggcctgaacatgaccgtgcacagcgccctggacagcgacgagcagagccaccaggccgtgaccgaggccatgagagtgatcggcttcagccccgaggaggtggagagcgtgcacagaatcctggccgccatcctgcacctgggcaacatcgagttcgtggagaccgaggagggcggcctgcagaaggagggcctggccgtggccgaggaggccctggtggaccacgtggccgagctgaccgccacccccagagacctggtgctgagaagcctgctggccagaaccgtggccagcggcggcagagagctgatcgagaagggccacaccgccgccgaggccagctacgccagagacgcctgcgccaaggccgtgtaccagagactgttcgagtgggtggtgaacagaatcaacagcgtgatggagcccagaggcagagaccccagaagagacggcaaggacaccgtgatcggcgtgctggacatctacggcttcgaggtgttccccgtgaacagcttcgagcagttctgcatcaactactgcaacgagaagctgcagcagctgttcatccagctgatcctgaagcaggagcaggaggagtacgagagagagggcatcacctggcagagcgtggagtacttcaacaacgccaccatcgtggacctggtggagagaccccacagaggcatcctggccgtgctggacgaggcctgcagcagcgccggcaccatcaccgacagaatcttcctgcagaccctggacatgcaccacagacaccacctgcactacaccagcagacagctgtgccccaccgacaagaccatggagttcggcagagacttcagaatcaagcactacgccggcgacgtgacctacagcgtggagggcttcatcgacaagaacagagacttcctgttccaggacttcaagagactgctgtacaacagcaccgaccccaccctgagagccatgtggcccgacggccagcaggacatcaccgaggtgaccaagagacccctgaccgccggcaccctgttcaagaacagcatggtggccctggtggagaacctggccagcaaggagcccttctacgtgagatgcatcaagcccaacgaggacaaggtggccggcaagctggacgagaaccactgcagacaccaggtggcctacctgggcctgctggagaacgtgagagtgagaagagccggcttcgccagcagacagccctacagcagattcctgctgagatacaagatgacctgcgagtacacctggcccaaccacctgctgggcagcgacaaggccgccgtgagcgccctgctggagcagcacggcctgcagggcgacgtggccttcggccacagcaagctgttcatcagaagccccagaaccctggtgaccctggagcagagcagagccagactgatccccatcatcgtgctgctgctgcagaaggcctggagaggcaccctggccagatggagatgcagaagactgagagccatctacaccatcatgagatggttcagaagacacaaggtgagagcccacctggccgagctgcagagaagattccaggccgccagacagccccccctgtacggcagagacctggtgtggcccctgccccccgccgtgctgcagcccttccaggacacctgccacgccctgttctgcagatggagagccagacagctggtgaagaacatcccccccagcgacatgccccagatcaaggccaaggtggccgccatgggcgccctgcagggcctgagacaggactggggctgcagaagagcctgggccagagactacctgagcagcgccaccgacaaccccaccgccagcagcctgttcgcccagagactgaagaccctgcaggacaaggacggcttcggcgccgtgctgttcagcagccacgtgagaaaggtgaacagattccacaagatcagaaacagagccctgctgctgaccgaccagcacctgtacaagctggaccccgacagacagtacagagtgatgagagccgtgcccctggaggccgtgaccggcctgagcgtgaccagcggcggcgaccagctggtggtgctgcacgccagaggccaggacgacctggtggtgtgcctgcacagaagcagaccccccctggacaacagagtgggcgagctggtgggcgtgctggccgcccactgccagggcgagggcagaaccctggaggtgagagtgagcgactgcatccccctgagccacagaggcgtgagaagactgatcagcgtggagcccagacccgagcagcccgagcccgacttcagatgcgccagaggcagcttcaccctgctgtggcccagcagatag

SEQ ID NO: 90001 - DNA, 4851 bp, synthetic construct
  misc_feature 1..4851: note = Description of Artificial Sequence: Synthetic coding sequence
  source 1..4851: mol_type = other DNA
atgttccccctgatcggcaagaccatcatcttcgacaacttccccgaccccagcgacacctgggagatcaccgagaccatcggcaagggcacctacggcaaggtgttcaaggtgctgaacaagaagaacggccagaaggccgccgtgaagatcctggaccccatccacgacatcgacgaggagatcgaggccgagtacaacatcctgaaggccctgagcgaccaccccaacgtggtgagattctacggcatctacttcaagaaggacaaggtgaacggcgacaagctgtggctggtgctggagctgtgcagcggcggcagcgtgaccgacctggtgaagggcttcctgaagagaggcgagagaatgagcgagcccctgatcgcctacatcctgcacgaggccctgatgggcctgcagcacctgcacaacaacaagaccatccacagagacgtgaagggcaacaacatcctgctgaccaccgagggcggcgtgaagctggtggacttcggcgtgagcgcccagctgaccagcaccagacacagaagaaacaccagcgtgggcacccccttctggatggcccccgaggtgatcgcctgcgagcagcagctggacaccacctacgacgccagatgcgacacctggagcctgggcatcaccgccatcgagctgggcgacggcgacccccccctggccgacctgcaccccatgagagccctgttcaagatccccagaaaccccccccccaagctgagacagcccgagctgtggagcgccgagttcaacgacttcatcagcaagtgcctgaccaaggactacgagaagagacccaccgtgagcgagctgctgcagcacaagttcatcacccagatcgagggcaaggacgtgatgctgcagaagcagctgaccgagttcatcggcatccaccagtgcatgggcggcaccgagaaggccagaagagagagaatccacaccaagaagggcaacttcaacagacccctgatcagcaacctgaaggacgtggacgacctggccaccctggagatcctggacgagaacaccgtgagcgagcagctggagaagtgctacagcagagaccagatctacgtgtacgtgggcgacatcctgatcgccctgaaccccttccagagcctgggcctgtacagcaccaagcacagcaagctgtacatcggcagcaagagaaccgccagccccccccacatcttcgccatggccgacctgggctaccagagcatgatcacctacaacagcgaccagtgcatcgtgatcagcggcgagagcggcgccggcaagaccgagaacgcccacctgctggtgcagcagctgaccgtgctgggcaaggccaacaacagaaccctgcaggagaagatcctgcaggtgaacaacctggtggaggccttcggcaacgcctgcaccatcatcaacgacaacagcagcagattcggcaagtacctggagatgaagttcaccagcagcggcgccgtggtgggcgcccagatcagcgagtacctgctggagaagagcagagtgatccaccaggccatcggcgagaagaacttccacatcttctactacatctacgccggcctggccgagaagaagaagctggcccactacaagctgcccgagaacaagccccccagatacctgcagaacgaccacctgagaaccgtgcaggacatcatgaacaacagcttctacaagagccagtacgagctgatcgagcagtgcttcaaggtgatcggcttcaccatggagcagctgggcagcatctacagcatcctggccgccatcctgaacgtgggcaacatcgagttcagcagcgtggccaccgagcaccagatcgacaagagccacatcagcaaccacaccgccctggagaactgcgccagcctgctgtgcatcagagccgacgagctgcaggaggccctgaccagccactgcgtggtgaccagaggcgagaccatcatcagacccaacaccgtggagaaggccaccgacgtgagagacgccatggccaagaccctgtacggcagactgttcagctggatcgtgaactgcatcaacagcctgctgaagcacgacagcagccccagcggcaacggcgacgagctgagcatcggcatcctggacatcttcggcttcgagaacttcaagaagaacagcttcgagcagctgtgcatcaacatcgccaacgagcagatccagtactactacaaccagcacgtgttcgcctgggagcagaacgagtacctgaacgaggacgtggacgccagagtgatcgagtacgaggacaactggcccctgctggacatgttcctgcagaagcccatgggcctgctgagcctgctggacgaggagagcagattccccaaggccaccgaccagaccctggtggagaagttcgagggcaacctgaagagccagtacttctggagacccaagagaatggagctgagcttcggcatccaccactacgccggcaaggtgctgtacaacgccagcggcttcctggccaagaacagagacaccctgcccaccgacatcgtgctgctgctgagaagcagcgacaacagcgtgatcagacagctggtgaaccaccccctgaccaagaccggcaacctgccccacagcaagaccaagaacgtgatcaactaccagatgagaaccagcgagaagctgatcaacctggccaagggcgacaccggcgaggccaccagacacgccagagagaccaccaacatgaagacccagaccgtggccagctacttcagatacagcctgatggacctgctgagcaagatggtggtgggccagccccacttcgtgagatgcatcaagcccaacagcgagagacaggccagaaagtacgacaaggagaaggtgctgctgcagctgagatacaccggcatcctggagaccgccagaatcagaagactgggcttcagccacagaatcctgttcgccaacttcatcaagagatactacctgctgtgctacaagagcagcgaggagcccagaatgagccccgacacctgcgccaccatcctggagaaggccggcctggacaactgggccctgggcaagaccaaggtgttcctgaagtactaccacgtggagcagctgaacctgatgagaaaggaggccatcgacaagctgatcctgatccaggcctgcgtgagagccttcctgtgcagcagaagataccagaagatccaggagaagagaaaggagagcgccatcatcatccagagcgccgccagaggccacctggtgagaaagcagagaaaggagatcgtggacatgaagaacaccgccgtgaccaccatccagaccagcgaccaggagttcgactacaagaagaacttcgagaacaccagagagagcttcgtgaagaagcaggccgagaacgccatcagcgccaacgagagattcatcagcgcccccaacaacaagggcagcgtgagcgtggtgaagaccagcaccttcaagcccgaggaggagaccaccaacgccgtggagagcaacaacagagtgtaccagacccccaagaagatgaacaacgtgtacgaggaggaggtgaagcaggagttctacctggtgggccccgaggtgagccccaagcagaagagcgtgaaggacctggaggagaacagcaacctgagaaaggtggagaaggaggaggccatgatccagagctactaccagagatacaccgaggagagaaactgcgaggagagcaaggccgcctacctggagagaaaggccatcagcgagagacccagctaccccgtgccctggctggccgagaacgagaccagcttcaagaagaccctggagcccaccctgagccagagaagcatctaccagaacgccaacagcatggagaaggagaagaagaccagcgtggtgacccagagagcccccatctgcagccaggaggagggcagaggcagactgagacacgagaccgtgaaggagagacaggtggagcccgtgacccaggcccaggaggaggaggacaaggccgccgtgttcatccagagcaagtacagaggctacaagagaagacagcagctgagaaaggacaagatgagcagcttcaagcaccagagaatcgtgaccacccccaccgaggtggccagaaacacccacaacctgtacagctaccccaccaagcacgaggagatcaacaacatcaagaagaaggacaacaaggacagcaaggccaccagcgagagagaggcctgcggcctggccatcttcagcaagcagatcagcaagctgagcgaggagtacttcatcctgcagaagaagctgaacgagatgatcctgagccagcagctgaagagcctgtacctgggcgtgagccaccacaagcccatcaacagaagagtgagcagccagcagtgcctgagcggcgtgtgcaagggcgaggagcccaagatcctgagaccccccagaagacccagaaagcccaagaccctgaacaaccccgaggacagcacctactactacctgctgcacaagagcatccaggaggagaagagaagacccagaaaggacagccagggcaagctgctggacctggaggacttctactacaaggagttcctgcccagcagaagcggccccaaggagcacagccccagcctgagagagagaagaccccagcaggagctgcagaaccagtgcatcaaggccaacgagagatgctgggccgccgagagccccgagaaggaggaggagagagagcccgccgccaacccctacgacttcagaagactgctgagaaagaccagccagagaagaagactggtgcagcagagctag

SEQ ID NO: 90002 - DNA, 594 bp, synthetic construct
  misc_feature 1..594: note = Description of Artificial Sequence: Synthetic coding sequence
  source 1..594: mol_type = other DNA
atgttccccctgatcggcaagaccatcatcttcgacaacttccccgaccccagcgacacctgggagatcaccgagaccatcggcaagggcacctacggcaaggtgttcaaggtgctgaacaagaagaacggccagaaggccgccgtgaagatcctggaccccatccacgacatcgacgaggagatcgaggccgagtacaacatcctgaaggccctgagcgaccaccccaacgtggtgagattctacggcatctacttcaagaaggacaaggtgaacggcgacaagctgtggctggtgctggagctgtgcagcggcggcagcgtgaccgacctggtgaagggcttcctgaagagaggcgagagaatgagcgagcccctgatcgcctacatcctgcacgaggccctgatgggcctgcagcacctgcacaacaacaagaccatccacagagacgtgaagggcaacaacatcctgctgaccaccgagggcggcgtgaagctggtggacttcggcgtgagcgcccagctgaccagcaccagacacagaagaaacaccagcgtgggcacccccttctggatggcccccgaggtgagatag

SEQ ID NO: 90003 - DNA, 744 bp, synthetic construct
  misc_feature 1..744: note = Description of Artificial Sequence: Synthetic coding sequence
  source 1..744: mol_type = other DNA
atgttccccctgatcggcaagaccatcatcttcgacaacttccccgaccccagcgacacctgggagatcaccgagaccatcggcaagggcacctacggcaaggtgttcaaggtgctgaacaagaagaacggccagaaggccgccgtgaagatcctggaccccatccacgacatcgacgaggagatcgaggccgagtacaacatcctgaaggccctgagcgaccaccccaacgtggtgagattctacggcatctacttcaagaaggacaaggtgaacggcgacaagctgtggctggtgctggagctgtgcagcggcggcagcgtgaccgacctggtgaagggcttcctgaagagaggcgagagaatgagcgagcccctgatcgcctacatcctgcacgaggccctgatgggcctgcagcacctgcacaacaacaagaccatccacagagacgtgaagggcaacaacatcctgctgaccaccgagggcggcgtgaagctggtggacttcggcgtgagcgcccagctgaccagcaccagacacagaagaaacaccagcgtgggcacccccttctggatggcccccgaggtgatcgcctgcgagcagcagctggacaccacctacgacgccagatgcgacacctggagcctgggcatcaccgccatcgagctgggcgacggcgacccccccctggccgacctgcaccccatgagagccctgttcaagatccccagaagcgacgactag

SEQ ID NO: 90004 - DNA, 1995 bp, synthetic construct
  misc_feature 1..1995: note = Description of Artificial Sequence: Synthetic coding sequence
  source 1..1995: mol_type = other DNA
atgttccccctgatcggcaagaccatcatcttcgacaacttccccgaccccagcgacacctgggagatcaccgagaccatcggcaagggcacctacggcaaggtgttcaaggtgctgaacaagaagaacggccagaaggccgccgtgaagatcctggaccccatccacgacatcgacgaggagatcgaggccgagtacaacatcctgaaggccctgagcgaccaccccaacgtggtgagattctacggcatctacttcaagaaggacaaggtgaacggcgacaagctgtggctggtgctggagctgtgcagcggcggcagcgtgaccgacctggtgaagggcttcctgaagagaggcgagagaatgagcgagcccctgatcgcctacatcctgcacgaggccctgatgggcctgcagcacctgcacaacaacaagaccatccacagagacgtgaagggcaacaacatcctgctgaccaccgagggcggcgtgaagctggtggacttcggcgtgagcgcccagctgaccagcaccagacacagaagaaacaccagcgtgggcacccccttctggatggcccccgaggtgatcgcctgcgagcagcagctggacaccacctacgacgccagatgcgacacctggagcctgggcatcaccgccatcgagctgggcgacggcgacccccccctggccgacctgcaccccatgagagccctgttcaagatccccagaaaccccccccccaagctgagacagcccgagctgtggagcgccgagttcaacgacttcatcagcaagtgcctgaccaaggactacgagaagagacccaccgtgagcgagctgctgcagcacaagttcatcacccagatcgagggcaaggacgtgatgctgcagaagcagctgaccgagttcatcggcatccaccagtgcatgggcggcaccgagaaggccagaagagagagaatccacaccaagaagggcaacttcaacagacccctgatcagcaacctgaaggacgtggacgacctggccaccctggagatcctggacgagaacaccgtgagcgagcagctggagaagtgctacagcagagaccagatctacgtgtacgtgggcgacatcctgatcgccctgaaccccttccagagcctgggcctgtacagcaccaagcacagcaagctgtacatcggcagcaagagaaccgccagccccccccacatcttcgccatggccgacctgggctaccagagcatgatcacctacaacagcgaccagtgcatcgtgatcagcggcgagagcggcgccggcaagaccgagaacgcccacctgctggtgcagcagctgaccgtgctgggcaaggccaacaacagaaccctgcaggagaagatcctgcaggtgaacaacctggtggaggccttcggcaacgcctgcaccatcatcaacgacaacagcagcagattcggcaagtacctggagatgaagttcaccagcagcggcgccgtggtgggcgcccagatcagcgagtacctgctggagaagagcagagtgatccaccaggccatcggcgagaagaacttccacatcttctactacatctacgccggcctggccgagaagaagaagctggcccactacaagctgcccgagaacaagccccccagatacctgcagaacgaccacctgagaaccgtgcaggacatcatgaacaacagcttctacaagagccagtacgagctgatcgagcagtgcttcaaggtgatcggcttcaccatggaggtgctgggcggcggcgagcccagagagggcggcggcgagagagccagcagccagcccctgagactgcaggaggcccccgcccagaacctgcccgcccccgcccccagacccgccgtgctgaccgtgcagagaggcagccacagaagaagaaaggccctggagcccgccggccagcagggccccagcagacacagcggcgccggcaccagcagacactag

SEQ ID NO: 90005 - DNA, 3834 bp, synthetic construct
  misc_feature 1..3834: note = Description of Artificial Sequence: Synthetic coding sequence
  source 1..3834: mol_type = other DNA
aagcacctgtacggcctgttccactacaaccccatgatgctgggcctggagagcctgcccgaccccaccgacacctgggagatcatcgagaccatcggcaagggcacctacggcaaggtgtacaaggtgaccaacaagagagacggcagcctggccgccgtgaagatcctggaccccgtgagcgacatggacgaggagatcgaggccgagtacaacatcctgcagttcctgcccaaccaccccaacgtggtgaagttctacggcatgttctacaaggccgaccactgcgtgggcggccagctgtggctggtgctggagctgtgcaacggcggcagcgtgaccgagctggtgaagggcctgctgagatgcggccagagactggacgaggccatgatcagctacatcctgtacggcgccctgctgggcctgcagcacctgcacaacaacagaatcatccacagagacgtgaagggcaacaacatcctgctgaccaccgagggcggcgtgaagctggtggacttcggcgtgagcgcccagctgaccagcaccagactgagaagaaacaccagcgtgggcacccccttctggatggcccccgaggtgatcgcctgcgagcagcagtacgacagcagctacgacgccagatgcgacgtgtggagcctgggcatcaccgccatcgagctgggcgacggcgacccccccctgttcgacatgcaccccgtgaagaccctgttcaagatccccagaaaccccccccccaccctgctgcaccccgagaagtggtgcgaggagttcaaccacttcatcagccagtgcctgatcaaggacttcgagagaagacccagcgtgacccacctgctggaccaccccttcatcaagggcgtgcacggcaaggtgctgttcctgcagaagcagctggccaaggtgctgcaggaccagaagcaccagaaccccgtggccaagaccagacacgagagaatgcacaccagaagaccctaccacgtggaggacgccgagaagtactgcctggaggacgacctggtgaacctggaggtgctggacgaggacaccatcatccaccagctgcagaagagatacgccgacctgctgatctacacctacgtgggcgacatcctgatcgccctgaaccccttccagaacctgagcatctacagcccccagttcagcagactgtaccacggcgtgaagagagccagcaaccccccccacatcttcgccagcgccgacgccgcctaccagtgcatggtgaccctgagcaaggaccagtgcatcgtgatcagcggcgagagcggcagcggcaagaccgagagcgcccacctgatcgtgcagcacctgaccttcctgggcaaggccaacaaccagaccctgagagagaagatcctgcaggtgaacagcctggtggaggccttcggcaacagctgcaccgccatcaacgacaacagcagcagattcggcaagtacctggagatgatgttcacccccaccggcgtggtgatgggcgccagaatcagcgagtacctgctggagaagagcagagtgatcaagcaggccgccagagagaagaacttccacatcttctactacatctacgccggcctgcaccaccagaagaagctgagcgacttcagactgcccgaggagaagccccccagatacatcgccgacgagaccggcagagtgatgcacgacatcaccagcaaggagagctacagaagacagttcgaggccatccagcactgcttcagaatcatcggcttcaccgacaaggaggtgcacagcgtgtacagaatcctggccggcatcctgaacatcggcaacatcgagttcgccgccatcagcagccagcaccagaccgacaagagcgaggtgcccaacgccgaggccctgcagaacgccgccagcgtgctgtgcatcagccccgaggagctgcaggaggccctgaccagccactgcgtggtgaccagaggcgagaccatcatcagagccaacaccgtggacagagccgccgacgtgagagacgccatgagcaaggccctgtacggcagactgttcagctggatcgtgaacagaatcaacaccctgctgcagcccgacgagaacatctgcagcgccggcggcggcatgaacgtgggcatcctggacatcttcggcttcgagaacttccagagaaacagcttcgagcagctgtgcatcaacatcgccaacgagcagatccagtactacttcaaccagcacgtgttcgccctggagcagatggagtaccagaacgagggcatcgacgccgtgcccgtggagtacgaggacaacagacccctgctggacatgttcctgcagaagcccctgggcctgctggccctgctggacgaggagagcagattcccccaggccaccgaccagaccctggtggacaagttcgaggacaacctgagatgcaagtacttctggagacccaagggcgtggagctgtgcttcggcatccagcactacgccggcaaggtgctgtacgacgccagcggcgtgctggagaagaacagagacaccctgcccgccgacgtggtggtggtgctgagaaccagcgagaacaagctgctgcagcagctgttcagcatccccctgaccaagaccggcaacctggcccagaccagagccagaatcaccgtggccagcagcagcctgcccccccacttcagcgccggcaaggccaaggtggacaccctggaggtgatcagacaccccgaggagaccaccaacatgaagagacagaccgtggccagctacttcagatacagcctgatggacctgctgagcaagatggtggtgggccagccccacttcgtgagatgcatcaagcccaacgacgacagagaggccctgcagttcagcagagagagagtgctggcccagctgagaagcaccggcatcctggagaccgtgagcatcagaagacagggctacagccacagaatcctgttcgaggagttcgtgaagagatactactacctggccttcaccgcccaccagacccccctggccagcaaggagagctgcgtggccatcctggagaagagcagactggaccactgggtgctgggcaagaccaaggtgttcctgaagtactaccacgtggagcagctgaacctgctgctgagagaggtgatcggcagagtggtggtgctgcaggcctacaccaagggctggctgggcgccagaagatacaagagagtgagagagaagagagagaagggcgccatcgccatccagagcgcctggagaggctacgacgccagaagaaagttcaagaagatcagcaacagaagaaacgagagcgccgcccacaaccaggccggcgacaccagcaaccagagcagcggcccccacagccccgtggccgccggcaccagaggcagcgccgaggtgcaggactgcagcgagcccggcgaccacaaggtgctgagaggcagcgtgcacagaagaagccacagccaggccgagagcaacaacggcagaacccagaccagcagcaacagccccgccgtgaccgagaagaacggccacagccaggcccagagcagccccaagggctgcgacatcttcgccggccacgccaacaagcacagcgtgagcggcaccgacctgctgagcagcagaatctgccaccccgcccccgaccagcagggcctgagcctgtggggcgccccccagaagcccgccttcccccactacggctgcaacttctacggcttcagaaagtggagctgcaccgaggccagcaacaccagccccaccatgagcgccgcccagaacgccgagtag

SEQ ID NO: 90006 - DNA, 4053 bp, synthetic construct
  misc_feature 1..4053: note = Description of Artificial Sequence: Synthetic coding sequence
  source 1..4053: mol_type = other DNA
atgctgcagagcgccctgctgagcaccagaaagcacctgtacggcctgttccactacaaccccatgatgctgggcctggagagcctgcccgaccccaccgacacctgggagatcatcgagaccatcggcaagggcacctacggcaaggtgtacaaggtgaccaacaagagagacggcagcctggccgccgtgaagatcctggaccccgtgagcgacatggacgaggagatcgaggccgagtacaacatcctgcagttcctgcccaaccaccccaacgtggtgaagttctacggcatgttctacaaggccgaccactgcgtgggcggccagctgtggctggtgctggagctgtgcaacggcggcagcgtgaccgagctggtgaagggcctgctgagatgcggccagagactggacgaggccatgatcagctacatcctgtacggcgccctgctgggcctgcagcacctgcacaacaacagaatcatccacagagacgtgaagggcaacaacatcctgctgaccaccgagggcggcgtgaagctggtggacttcggcgtgagcgcccagctgaccagcaccagactgagaagaaacaccagcgtgggcacccccttctggatggcccccgaggtgatcgcctgcgagcagcagtacgacagcagctacgacgccagatgcgacgtgtggagcctgggcatcaccgccatcgagctgggcgacggcgacccccccctgttcgacatgcaccccgtgaagaccctgttcaagatccccagaaaccccccccccaccctgctgcaccccgagaagtggtgcgaggagttcaaccacttcatcagccagtgcctgatcaaggacttcgagagaagacccagcgtgacccacctgctggaccaccccttcatcaagggcgtgcacggcaaggtgctgttcctgcagaagcagctggccaaggtgctgcaggaccagaagcaccagaaccccgtggccaagaccagacacgagagaatgcacaccagaagaccctaccacgtggaggacgccgagaagtactgcctggaggacgacctggtgaacctggaggtgctggacgaggacaccatcatccaccagctgcagaagagatacgccgacctgctgatctacacctacgtgggcgacatcctgatcgccctgaaccccttccagaacctgagcatctacagcccccagttcagcagactgtaccacggcgtgaagagagccagcaaccccccccacatcttcgccagcgccgacgccgcctaccagtgcatggtgaccctgagcaaggaccagtgcatcgtgatcagcggcgagagcggcagcggcaagaccgagagcgcccacctgatcgtgcagcacctgaccttcctgggcaaggccaacaaccagaccctgagagagaagatcctgcaggtgaacagcctggtggaggccttcggcaacagctgcaccgccatcaacgacaacagcagcagattcggcaagtacctggagatgatgttcacccccaccggcgtggtgatgggcgccagaatcagcgagtacctgctggagaagagcagagtgatcaagcaggccgccagagagaagaacttccacatcttctactacatctacgccggcctgcaccaccagaagaagctgagcgacttcagactgcccgaggagaagccccccagatacatcgccgacgagaccggcagagtgatgcacgacatcaccagcaaggagagctacagaagacagttcgaggccatccagcactgcttcagaatcatcggcttcaccgacaaggaggtgcacagcgtgtacagaatcctggccggcatcctgaacatcggcaacatcgagttcgccgccatcagcagccagcaccagaccgacaagagcgaggtgcccaacgccgaggccctgcagaacgccgccagcgtgctgtgcatcagccccgaggagctgcaggaggccctgaccagccactgcgtggtgaccagaggcgagaccatcatcagagccaacaccgtggacagagccgccgacgtgagagacgccatgagcaaggccctgtacggcagactgttcagctggatcgtgaacagaatcaacaccctgctgcagcccgacgagaacatctgcagcgccggcggcggcatgaacgtgggcatcctggacatcttcggcttcgagaacttccagagaaacagcttcgagcagctgtgcatcaacatcgccaacgagcagatccagtactacttcaaccagcacgtgttcgccctggagcagatggagtaccagaacgagggcatcgacgccgtgcccgtggagtacgaggacaacagacccctgctggacatgttcctgcagaagcccctgggcctgctggccctgctggacgaggagagcagattcccccaggccaccgaccagaccctggtggacaagttcgaggacaacctgagatgcaagtacttctggagacccaagggcgtggagctgtgcttcggcatccagcactacgccggcaaggtgctgtacgacgccagcggcgtgctggagaagaacagagacaccctgcccgccgacgtggtggtggtgctgagaaccagcgagaacaagctgctgcagcagctgttcagcatccccctgaccaagaccggcaacctggcccagaccagagccagaatcaccgtggccagcagcagcctgcccccccacttcagcgccggcaaggccaaggtggacaccctggaggtgatcagacaccccgaggagaccaccaacatgaagagacagaccgtggccagctacttcagatacagcctgatggacctgctgagcaagatggtggtgggccagccccacttcgtgagatgcatcaagcccaacgacgacagagaggccctgcagttcagcagagagagagtgctggcccagctgagaagcaccggcatcctggagaccgtgagcatcagaagacagggctacagccacagaatcctgttcgaggagttcgtgaagagatactactacctggccttcaccgcccaccagacccccctggccagcaaggagagctgcgtggccatcctggagaagagcagactggaccactgggtgctgggcaagaccaaggtgttcctgaagtactaccacgtggagcagctgaacctgctgctgagagaggtgatcggcagagtggtggtgctgcaggcctacaccaagggctggctgggcgccagaagatacaagagagtgagagagaagagagagaagggcgccatcgccatccagagcgcctggagaggctacgacgccagaagaaagttcaagaagatcagcaacagaagaaacgagagcgccgcccacaaccaggccggcgacaccagcaaccagagcagcggcccccacagccccgtggccgccggcaccagaggcagcgccgaggtgcaggactgcagcgagcccggcgaccacaaggtgctgagaggcagcgtgcacagaagaagccacagccaggccgagagcaacaacggcagaacccagaccagcagcaacagccccgccgtgaccgagaagaacggccacagccaggcccagagcagccccaagggctgcgacatcttcgccggccacgccaacaagcacagcgtgagcggcaccgacctgctgagcagcagaatctgccaccccgcccccgaccagcagggcctgagcctgtggggcgccccccagaagcccggcagcgagaacggcctggcccagaagcacagaacccccagaagaagatgccagcagcccaagatgctgagcagccccgaggacaccatgtactacaaccagctgaacggcaccctggagtaccagggcagcaagagaaagcccagaaagctgggccagatcaaggtgctggacggcgaggacgagtactacaagagcctgagccccgtggactgcatccccgaggagaacaacagcgcccaccccagcttcttcagcagcagcagcaagggcgacagcttcgcccagcactag

SEQ ID NO: 90007 - DNA, 4026 bp, synthetic construct
  misc_feature 1..4026: note = Description of Artificial Sequence: Synthetic coding sequence
  source 1..4026: mol_type = other DNA
atgaagcacctgtacggcctgttccactacaaccccatgatgctgggcctggagagcctgcccgaccccaccgacacctgggagatcatcgagaccatcggcaagggcacctacggcaaggtgtacaaggtgaccaacaagagagacggcagcctggccgccgtgaagatcctggaccccgtgagcgacatggacgaggagatcgaggccgagtacaacatcctgcagttcctgcccaaccaccccaacgtggtgaagttctacggcatgttctacaaggccgaccactgcgtgggcggccagctgtggctggtgctggagctgtgcaacggcggcagcgtgaccgagctggtgaagggcctgctgagatgcggccagagactggacgaggccatgatcagctacatcctgtacggcgccctgctgggcctgcagcacctgcacaacaacagaatcatccacagagacgtgaagggcaacaacatcctgctgaccaccgagggcggcgtgaagctggtggacttcggcgtgagcgcccagctgaccagcaccagactgagaagaaacaccagcgtgggcacccccttctggatggcccccgaggtgatcgcctgcgagcagcagtacgacagcagctacgacgccagatgcgacgtgtggagcctgggcatcaccgccatcgagctgggcgacggcgacccccccctgttcgacatgcaccccgtgaagaccctgttcaagatccccagaaaccccccccccaccctgctgcaccccgagaagtggtgcgaggagttcaaccacttcatcagccagtgcctgatcaaggacttcgagagaagacccagcgtgacccacctgctggaccaccccttcatcaagggcgtgcacggcaaggtgctgttcctgcagaagcagctggccaaggtgctgcaggaccagaagcaccagaaccccgtggccaagaccagacacgagagaatgcacaccagaagaccctaccacgtggaggacgccgagaagtactgcctggaggacgacctggtgaacctggaggtgctggacgaggacaccatcatccaccagctgcagaagagatacgccgacctgctgatctacacctacgtgggcgacatcctgatcgccctgaaccccttccagaacctgagcatctacagcccccagttcagcagactgtaccacggcgtgaagagagccagcaaccccccccacatcttcgccagcgccgacgccgcctaccagtgcatggtgaccctgagcaaggaccagtgcatcgtgatcagcggcgagagcggcagcggcaagaccgagagcgcccacctgatcgtgcagcacctgaccttcctgggcaaggccaacaaccagaccctgagagagaagatcctgcaggtgaacagcctggtggaggccttcggcaacagctgcaccgccatcaacgacaacagcagcagattcggcaagtacctggagatgatgttcacccccaccggcgtggtgatgggcgccagaatcagcgagtacctgctggagaagagcagagtgatcaagcaggccgccagagagaagaacttccacatcttctactacatctacgccggcctgcaccaccagaagaagctgagcgacttcagactgcccgaggagaagccccccagatacatcgccgacgagaccggcagagtgatgcacgacatcaccagcaaggagagctacagaagacagttcgaggccatccagcactgcttcagaatcatcggcttcaccgacaaggaggtgcacagcgtgtacagaatcctggccggcatcctgaacatcggcaacatcgagttcgccgccatcagcagccagcaccagaccgacaagagcgaggtgcccaacgccgaggccctgcagaacgccgccagcgtgctgtgcatcagccccgaggagctgcaggaggccctgaccagccactgcgtggtgaccagaggcgagaccatcatcagagccaacaccgtggacagagccgccgacgtgagagacgccatgagcaaggccctgtacggcagactgttcagctggatcgtgaacagaatcaacaccctgctgcagcccgacgagaacatctgcagcgccggcggcggcatgaacgtgggcatcctggacatcttcggcttcgagaacttccagagaaacagcttcgagcagctgtgcatcaacatcgccaacgagcagatccagtactacttcaaccagcacgtgttcgccctggagcagatggagtaccagaacgagggcatcgacgccgtgcccgtggagtacgaggacaacagacccctgctggacatgttcctgcagaagcccctgggcctgctggccctgctggacgaggagagcagattcccccaggccaccgaccagaccctggtggacaagttcgaggacaacctgagatgcaagtacttctggagacccaagggcgtggagctgtgcttcggcatccagcactacgccggcaaggtgctgtacgacgccagcggcgtgctggagaagaacagagacaccctgcccgccgacgtggtggtggtgctgagaaccagcgagaacaagctgctgcagcagctgttcagcatccccctgaccaagaccggcaacctggcccagaccagagccagaatcaccgtggccagcagcagcctgcccccccacttcagcgccggcaaggccaaggtggacaccctggaggtgatcagacaccccgaggagaccaccaacatgaagagacagaccgtggccagctacttcagatacagcctgatggacctgctgagcaagatggtggtgggccagccccacttcgtgagatgcatcaagcccaacgacgacagagaggccctgcagttcagcagagagagagtgctggcccagctgagaagcaccggcatcctggagaccgtgagcatcagaagacagggctacagccacagaatcctgttcgaggagttcgtgaagagatactactacctggccttcaccgcccaccagacccccctggccagcaaggagagctgcgtggccatcctggagaagagcagactggaccactgggtgctgggcaagaccaaggtgttcctgaagtactaccacgtggagcagctgaacctgctgctgagagaggtgatcggcagagtggtggtgctgcaggcctacaccaagggctggctgggcgccagaagatacaagagagtgagagagaagagagagaagggcgccatcgccatccagagcgcctggagaggctacgacgccagaagaaagttcaagaagatcagcaacagaagaaacgagagcgccgcccacaaccaggccggcgacaccagcaaccagagcagcggcccccacagccccgtggccgccggcaccagaggcagcgccgaggtgcaggactgcagcgagcccggcgaccacaaggtgctgagaggcagcgtgcacagaagaagccacagccaggccgagagcaacaacggcagaacccagaccagcagcaacagccccgccgtgaccgagaagaacggccacagccaggcccagagcagccccaagggctgcgacatcttcgccggccacgccaacaagcacagcgtgagcggcaccgacctgctgagcagcagaatctgccaccccgcccccgaccagcagggcctgagcctgtggggcgccccccagaagcccggcagcgagaacggcctggcccagaagcacagaacccccagaagaagatgccagcagcccaagatgctgagcagccccgaggacaccatgtactacaaccagctgaacggcaccctggagtaccagggcagcaagagaaagcccagaaagctgggccagatcaaggtgctggacggcgaggacgagtactacaagagcctgagccccgtggactgcatccccgaggagaacaacagcgcccaccccagcttcttcagcagcagcagcaagggcgacagcttcgcccagcactag

SEQ ID NO: 90008 - DNA, 3945 bp, synthetic construct
  misc_feature 1..3945: note = Description of Artificial Sequence: Synthetic coding sequence
  source 1..3945: mol_type = other DNA
atgaagcacctgtacggcctgttccactacaaccccatgatgctgggcctggagagcctgcccgaccccaccgacacctgggagatcatcgagaccatcggcaagggcacctacggcaaggtgtacaaggtgaccaacaagagagacggcagcctggccgccgtgaagatcctggaccccgtgagcgacatggacgaggagatcgaggccgagtacaacatcctgcagttcctgcccaaccaccccaacgtggtgaagttctacggcatgttctacaaggccgaccactgcgtgggcggccagctgtggctggtgctggagctgtgcaacggcggcagcgtgaccgagctggtgaagggcctgctgagatgcggccagagactggacgaggccatgatcagctacatcctgtacggcgccctgctgggcctgcagcacctgcacaacaacagaatcatccacagagacgtgaagggcaacaacatcctgctgaccaccgagggcggcgtgaagctggtggacttcggcgtgagcgcccagctgaccagcaccagactgagaagaaacaccagcgtgggcacccccttctggatggcccccgaggtgatcgcctgcgagcagcagtacgacagcagctacgacgccagatgcgacgtgtggagcctgggcatcaccgccatcgagctgggcgacggcgacccccccctgttcgacatgcaccccgtgaagaccctgttcaagatccccagaaaccccccccccaccctgctgcaccccgagaagtggtgcgaggagttcaaccacttcatcagccagtgcctgatcaaggacttcgagagaagacccagcgtgacccacctgctggaccaccccttcatcaagggcgtgcacggcaaggtgctgttcctgcagaagcagctggccaaggtgctgcaggaccagaagcaccagaaccccgtggccaagaccagacacgagagaatgcacaccagaagaccctaccacgtggaggacgccgagaagtactgcctggaggacgacctggtgaacctggaggtgctggacgaggacaccatcatccaccagctgcagaagagatacgccgacctgctgatctacacctacgtgggcgacatcctgatcgccctgaaccccttccagaacctgagcatctacagcccccagttcagcagactgtaccacggcgtgaagagagccagcaaccccccccacatcttcgccagcgccgacgccgcctaccagtgcatggtgaccctgagcaaggaccagtgcatcgtgatcagcggcgagagcggcagcggcaagaccgagagcgcccacctgatcgtgcagcacctgaccttcctgggcaaggccaacaaccagaccctgagagagaagatcctgcaggtgaacagcctggtggaggccttcggcaacagctgcaccgccatcaacgacaacagcagcagattcggcaagtacctggagatgatgttcacccccaccggcgtggtgatgggcgccagaatcagcgagtacctgctggagaagagcagagtgatcaagcaggccgccagagagaagaacttccacatcttctactacatctacgccggcctgcaccaccagaagaagctgagcgacttcagactgcccgaggagaagccccccagatacatcgccgacgagaccggcagagtgatgcacgacatcaccagcaaggagagctacagaagacagttcgaggccatccagcactgcttcagaatcatcggcttcaccgacaaggaggtgcacagcgtgtacagaatcctggccggcatcctgaacatcggcaacatcgagttcgccgccatcagcagccagcaccagaccgacaagagcgaggtgcccaacgccgaggccctgcagaacgccgccagcgtgctgtgcatcagccccgaggagctgcaggaggccctgaccagccactgcgtggtgaccagaggcgagaccatcatcagagccaacaccgtggacagagccgccgacgtgagagacgccatgagcaaggccctgtacggcagactgttcagctggatcgtgaacagaatcaacaccctgctgcagcccgacgagaacatctgcagcgccggcggcggcatgaacgtgggcatcctggacatcttcggcttcgagaacttccagagaaacagcttcgagcagctgtgcatcaacatcgccaacgagcagatccagtactacttcaaccagcacgtgttcgccctggagcagatggagtaccagaacgagggcatcgacgccgtgcccgtggagtacgaggacaacagacccctgctggacatgttcctgcagaagcccctgggcctgctggccctgctggacgaggagagcagattcccccaggccaccgaccagaccctggtggacaagttcgaggacaacctgagatgcaagtacttctggagacccaagggcgtggagctgtgcttcggcatccagcactacgccggcaaggtgctgtacgacgccagcggcgtgctggagaagaacagagacaccctgcccgccgacgtggtggtggtgctgagaaccagcgagaacaagctgctgcagcagctgttcagcatccccctgaccaagaccggcaacctggcccagaccagagccagaatcaccgtggccagcagcagcctgcccccccacttcagcgccggcaaggccaaggtggacaccctggaggtgatcagacaccccgaggagaccaccaacatgaagagacagaccgtggccagctacttcagatacagcctgatggacctgctgagcaagatggtggtgggccagccccacttcgtgagatgcatcaagcccaacgacgacagagaggccctgcagttcagcagagagagagtgctggcccagctgagaagcaccggcatcctggagaccgtgagcatcagaagacagggctacagccacagaatcctgttcgaggagttcgtgaagagatactactacctggccttcaccgcccaccagacccccctggccagcaaggagagctgcgtggccatcctggagaagagcagactggaccactgggtgctgggcaagaccaaggtgttcctgaagtactaccacgtggagcagctgaacctgctgctgagagaggtgatcggcagagtggtggtgctgcaggcctacaccaagggctggctgggcgccagaagatacaagagagtgagagagaagagagagaagggcgccatcgccatccagagcggcgacaccagcaaccagagcagcggcccccacagccccgtggccgccggcaccagaggcagcgccgaggtgcaggactgcagcgagcccggcgaccacaaggtgctgagaggcagcgtgcacagaagaagccacagccaggccgagagcaacaacggcagaacccagaccagcagcaacagccccgccgtgaccgagaagaacggccacagccaggcccagagcagccccaagggctgcgacatcttcgccggccacgccaacaagcacagcgtgagcggcaccgacctgctgagcagcagaatctgccaccccgcccccgaccagcagggcctgagcctgtggggcgccccccagaagcccggcagcgagaacggcctggcccagaagcacagaacccccagaagaagatgccagcagcccaagatgctgagcagccccgaggacaccatgtactacaaccagctgaacggcaccctggagtaccagggcagcaagagaaagcccagaaagctgggccagatcaaggtgctggacggcgaggacgagtactacaagagcctgagccccgtggactgcatccccgaggagaacaacagcgcccaccccagcttcttcagcagcagcagcaagggcgacagcttcgcccagcactag

SEQ ID NO: 90009 - DNA, 3390 bp, synthetic construct
  misc_feature 1..3390: note = Description of Artificial Sequence: Synthetic coding sequence
  source 1..3390: mol_type = other DNA
atgaacatcaacgacggcggcagaagaagattcgaggacaacgagcacaccctgagaatctaccccggcgccatcagcgagggcaccatctactgccccatccccgccagaaagaacagcaccgccgccgaggtgatcgagagcctgatcaacaagctgcacctggacaagaccaagtgctacgtgctggccgaggtgaaggagttcggcggcgaggagtggatcctgaaccccaccgactgccccgtgcagagaatgatgctgtggcccagaatggccctggagaacagactgagcggcgaggactacagattcctgctgagagagaagaacctggacggcagcatccactacggcagcctgcagagctggctgagagtgaccgaggagagaagaagaatgatggagagaggcttcctgccccagccccagcagaaggacttcgacgacctgtgcagcctgcccgacctgaacgagaagaccctgctggagaacctgagaaacagattcaagcacgagaagatctacacctacgtgggcagcatcctgatcgtgatcaaccccttcaagttcctgcccatctacaaccccaagtacgtgaagatgtacgacaaccaccagctgggcaagctggagccccacatctacgccgtggccgacgtggcctaccacgccatgctgcagagaaagaagaaccagtgcatcgtgatcagcggcgagagcggcagcggcaagacccagagcaccaacttcctgatccaccacctgaccgccctgagccagaagggcttcgccagcggcgtggagcagatcatcctgggcgccggccccgtgctggaggccttcggcaacgccaagaccgcccacaacaacaacagcagcagattcggcaagttcatccaggtgaactaccaggagaccggcaccgtgctgggcgcctacgtggagaagtacctgctggagaagagcagactggtgtaccaggagcacaacgagagaaactaccacgtgttctactacctgctggccggcgccagcgaggacgagagaagcgccttccacctgaagcagcccgaggagtaccactacctgaaccaggactgcttcaccgtggagggcgaggacctgagacacgacttcgagagactgcagctggccatggagatggtgggcttcctgcccaagaccagaagacagatcttcagcctgctgagcgccatcctgcacctgggcaacatctgctacaagaagaagacctacagagacgacagcatcgacatctgcaaccccgaggtgctgcccatcgtgagcgagctgctggaggtgaaggaggagatgctgttcgaggccctggtgaccagaaagaccgtgaccgtgggcgagaagctgatcctgccctacaagctggccgaggccgtgaccgtgagaaacagcatggccaagagcctgtacagcgccctgttcgactggatcgtgttcagaatcaaccacgccctgctgaacagcaaggacctggagcacaacaccaagaccctgagcatcggcgtgctggacatcttcggcttcgaggactacgagaacaacagcttcgagcagttctgcatcaacttcgccaacgagagactgcagcactacttcaaccagcacatcttcaagctggagcaggaggagtacagaaccgagggcatcagctggcacaacatcgactacatcgacaacacctgctgcatcaacctgatcagcaagaagcccaccggcctgctgcacctgctggacgaggagagcaacttcccccaggccaccaaccagaccctgctggacaagttcaagcaccagcacgaggacaacagctacatcgagttccccgccgtgatggagcccgccttcatcatcaagcactacgccggcaaggtgaagtacggcgtgaaggacttcagagagaagaacaccgaccacatgagacccgacatcgtggccctgctgagaagcagcaagaacgccttcatcagcggcatgatcggcatcgaccccgtggccgtgttcagatgggccatcctgagagccttcttcagagccatggtggccttcagagaggccggcaagagaaacatccacagaaagaccggccacgacgacaccgccccctgcgccatcctgaagagcatggacagcttcagcttcctgcagcaccccgtgcaccagagaagcctggagatcctgcagagatgcaaggaggagaagtacagcatcaccagaaagaaccccagaacccccctgagcgacctgcagggcatgaacgccctgaacgagaagaaccagcacgacaccttcgacatcgcctggaacggcagaaccggcatcagacagagcagactgagcagcggcaccagcctgctggacaaggacggcatcttcgccaacagcaccagcagcaagctgctggagagagcccacggcatcctgaccagaaacaagaacttcaagagcaagcccgccctgcccaagcacctgctggaggtgaacagcctgaagcacctgaccagactgaccctgcaggacagaatcaccaagagcctgctgcacctgcacaagaagaagaagccccccagcatcagcgcccagttccaggccagcctgagcaagctgatggagaccctgggccaggccgagccctacttcgtgaagtgcatcagaagcaacgccgagaagctgcccctgagattcagcgacgtgctggtgctgagacagctgagatacaccggcatgctggagaccgtgagaatcagacagagcggctacagcagcaagtacagcttccaggacttcgtgagccacttccacgtgctgctgcccagaaacatcatccccagcaagttcaacatccaggacttcttcagaaagatcaacctgaaccccgacaactaccaggtgggcaagaccatggtgttcctgaaggagcaggagagacagcacctgcaggacctgctgcaccaggaggtgctgagaagaatcatcctgctgcagagatggttcagagtgctgctgtgcagacagcacttcctgcacctgagacaggccagcgtgatcatccagagattctggagaaactacctgaaccagaagcaggtgagagacgccgccgtgcagaaggacgccttcgtgatggccagcgccgccgccctgctgcaggccagctggagagcccacctggagagacagagatacctggagctgagagccgccgccatcgtgatccagcagaagtggagagactactacagaagaagacacatggccgccatctgcatccaggccagatggaaggcctacagagagagcaagagataccaggagcagagaaagaactaccccttcgccatcaacatgtag

SEQ ID NO: 90010 - DNA, 7647 bp, synthetic construct
  misc_feature 1..7647: note = Description of Artificial Sequence: Synthetic coding sequence
  source 1..7647: mol_type = other DNA
atgaacatcaacgacggcggcagaagaagattcgaggacaacgagcacaccctgagaatctaccccggcgccatcagcgagggcaccatctactgccccatccccgccagaaagaacagcaccgccgccgaggtgatcgagagcctgatcaacaagctgcacctggacaagaccaagtgctacgtgctggccgaggtgaaggagttcggcggcgaggagtggatcctgaaccccaccgactgccccgtgcagagaatgatgctgtggcccagaatggccctggagaacagactgagcggcgaggactacagattcctgctgagagagaagaacctggacggcagcatccactacggcagcctgcagagctggctgagagtgaccgaggagagaagaagaatgatggagagaggcttcctgccccagccccagcagaaggacttcgacgacctgtgcagcctgcccgacctgaacgagaagaccctgctggagaacctgagaaacagattcaagcacgagaagatctacacctacgtgggcagcatcctgatcgtgatcaaccccttcaagttcctgcccatctacaaccccaagtacgtgaagatgtacgacaaccaccagctgggcaagctggagccccacatctacgccgtggccgacgtggcctaccacgccatgctgcagagaaagaagaaccagtgcatcgtgatcagcggcgagagcggcagcggcaagacccagagcaccaacttcctgatccaccacctgaccgccctgagccagaagggcttcgccagcggcgtggagcagatcatcctgggcgccggccccgtgctggaggccttcggcaacgccaagaccgcccacaacaacaacagcagcagattcggcaagttcatccaggtgaactaccaggagaccggcaccgtgctgggcgcctacgtggagaagtacctgctggagaagagcagactggtgtaccaggagcacaacgagagaaactaccacgtgttctactacctgctggccggcgccagcgaggacgagagaagcgccttccacctgaagcagcccgaggagtaccactacctgaaccagatcaccaagaagcccctgagacagagctgggacgactactgctacgacagcgagcccgactgcttcaccgtggagggcgaggacctgagacacgacttcgagagactgcagctggccatggagatggtgggcttcctgcccaagaccagaagacagatcttcagcctgctgagcgccatcctgcacctgggcaacatctgctacaagaagaagacctacagagacgacagcatcgacatctgcaaccccgaggtgctgcccatcgtgagcgagctgctggaggtgaaggaggagatgctgttcgaggccctggtgaccagaaagaccgtgaccgtgggcgagaagctgatcctgccctacaagctggccgaggccgtgaccgtgagaaacagcatggccaagagcctgtacagcgccctgttcgactggatcgtgttcagaatcaaccacgccctgctgaacagcaaggacctggagcacaacaccaagaccctgagcatcggcgtgctggacatcttcggcttcgaggactacgagaacaacagcttcgagcagttctgcatcaacttcgccaacgagagactgcagcactacttcaaccagcacatcttcaagctggagcaggaggagtacagaaccgagggcatcagctggcacaacatcgactacatcgacaacacctgctgcatcaacctgatcagcaagaagcccaccggcctgctgcacctgctggacgaggagagcaacttcccccaggccaccaaccagaccctgctggacaagttcaagcaccagcacgaggacaacagctacatcgagttccccgccgtgatggagcccgccttcatcatcaagcactacgccggcaaggtgaagtacggcgtgaaggacttcagagagaagaacaccgaccacatgagacccgacatcgtggccctgctgagaagcagcaagaacgccttcatcagcggcatgatcggcatcgaccccgtggccgtgttcagatgggccatcctgagagccttcttcagagccatggtggccttcagagaggccggcaagagaaacatccacagaaagaccggccacgacgacaccgccccctgcgccatcctgaagagcatggacagcttcagcttcctgcagcaccccgtgcaccagagaagcctggagatcctgcagagatgcaaggaggagaagtacagcatcaccagaaagaaccccagaacccccctgagcgacctgcagggcatgaacgccctgaacgagaagaaccagcacgacaccttcgacatcgcctggaacggcagaaccggcatcagacagagcagactgagcagcggcaccagcctgctggacaaggacggcatcttcgccaacagcaccagcagcaagctgctggagagagcccacggcatcctgaccagaaacaagaacttcaagagcaagcccgccctgcccaagcacctgctggaggtgaacagcctgaagcacctgaccagactgaccctgcaggacagaatcaccaagagcctgctgcacctgcacaagaagaagaagccccccagcatcagcgcccagttccaggccagcctgagcaagctgatggagaccctgggccaggccgagccctacttcgtgaagtgcatcagaagcaacgccgagaagctgcccctgagattcagcgacgtgctggtgctgagacagctgagatacaccggcatgctggagaccgtgagaatcagacagagcggctacagcagcaagtacagcttccaggacttcgtgagccacttccacgtgctgctgcccagaaacatcatccccagcaagttcaacatccaggacttcttcagaaagatcaacctgaaccccgacaactaccaggtgggcaagaccatggtgttcctgaaggagcaggagagacagcacctgcaggacctgctgcaccaggaggtgctgagaagaatcatcctgctgcagagatggttcagagtgctgctgtgcagacagcacttcctgcacctgagacaggccagcgtgatcatccagagattctggagaaactacctgaaccagaagcaggtgagagacgccgccgtgcagaaggacgccttcgtgatggccagcgccgccgccctgctgcaggccagctggagagcccacctggagagacagagatacctggagctgagagccgccgccatcgtgatccagcagaagtggagagactactacagaagaagacacatggccgccatctgcatccaggccagatggaaggcctacagagagagcaagagataccaggagcagagaaagaagatcatcctgctgcagagcacctgcagaggcttcagagccagacagagattcaaggccctgaaggagcagagactgagagagaccaagcccgaggtgggcctggtgaacatcaagggctacggcagcctggagatccagggcagcgaccccagcggctgggaggactgcagcttcgacaacagaatcaaggccatcgaggagtgcaagagcgtgatcgagagcaacagaatcagcagagagagcagcgtggactgcctgaaggagagccccaacaagcagcaggagagagcccagagccagagcggcgtggacctgcaggaggacgtgctggtgagagagagacccagaagcctggaggacctgcaccagaagaaggtgggcagagccaagagagagagcagaagaatgagagagctggagcaggccatcttcagcctggagctgctgaaggtgagaagcctgggcggcatcagccccagcgaggacagaagatggagcaccgagctggtgcccgagggcctgcagagccccagaggcacccccgacagcgagagcagccagggcagcctggagctgctgagctacgaggagagccagaagagcaagctggagagcgtgatcagcgacgagggcgacctgcagttccccagccccaagatcagcagcagccccaagttcgacagcagagacaacgccctgagcgccagcaacgagaccagcagcgccgagcacctgaaggacggcaccatgaaggagatggtggtgtgcagcagcgagagcatcacctgcaagccccagctgaaggacagcttcatcagcaacagcctgcccaccttcttctacatcccccagcaggaccccctgaagaccaacagccagctggacaccagcatccagagaaacaagctgctggagaacgaggacaccgccggcgaggccctgaccctggacatcaacagagagaccagaagataccactgcagcggcaaggaccagatcgtgcccagcctgaacaccgagagcagcaaccccgtgctgaagaagctggagaagctgaacaccgagaaggaggagagacagaagcagctgcagcagcagaacgagaaggagatgatggagcagatcagacagcagaccgacatcctggagaaggagagaaaggccttcaagaccatcgagaagcccagaatcggcgagtgcctggtggcccccagcagctaccagagcaagcagagagtggagagacccagcagcctgctgagcctgaacaccagcaacaagggcgagctgaacgtgctgggcagcctgagcctgaaggacgccgccctggcccagaaggacagcagcagcgcccacctgccccccaaggacagacccgtgaccgtgttcttcgagagaaagggcagcccctgccagagcagcaccgtgaaggagctgagcaagaccgacagaatgggcacccagctgaacgtggcctgcaagctgagcaacaacagaatcagcaagagagagcacttcagacccacccagagctacagccacaacagcgacgacctgagcagagagggcaacgccagacccatcttcttcacccccaaggacaacatgagcatccccctggtgagcaaggaggccctgaacagcaagaacccccagctgcacaaggaggacgagcccgcctggaagcccgtgaagctggccggccccggccagagagagaccagccagagattcagcagcgtggacgagcaggccaagctgcacaagaccatgagccagggcgagatcaccaagctggccgtgagacagaaggccagcgacagcgacatcagaccccagagagccaagatgagattctgggccaagggcaagcagggcgagaagaagaccaccagagtgaagcccaccacccagagcgaggtgagccccctgttcgccggcaccgacgtgatccccgcccaccagttccccgacgagctggccgcctaccaccccaccccccccctgagccccgagctgcccggcagctgcagaaaggagttcaaggagaacaaggagcccagccccaaggccaagagaaagagaagcgtgaagatcagcaacgtggccctggacagcatgcactggcagaacgacagcgtgcagatcatcgccagcgtgagcgacctgaagagcatggacgagttcctgctgaagaaggtgaacgacctggacaacgaggacagcaagaaggacaccctggtggacgtggtgttcaagaaggccctgaaggagttcagacagaacatcttcagcttctacagcagcgccctggccatggacgacggcaagagcatcagatacaaggacctgtacgccctgttcgagcagatcctggagaagaccatgagactggagcagagagacagcctgggcgagagccccgtgagagtgtgggtgaacaccttcaaggtgttcctggacgagtacatgaacgagttcaagaccagcgactgcaccgccaccaaggtgcccaagaccgagagaaagaagagaagaaagaaggagaccgacctggtggaggagcacaacggccacatcttcaaggccacccagtacagcatccccacctactgcgagtactgcagcagcctgatctggatcatggacagagccagcgtgtgcaagctgtgcaagtacgcctgccacaagaagtgctgcctgaagaccaccgccaagtgcagcaagaagtacgaccccgagctgagcagcagacagttcggcgtggagctgagcagactgaccagcgaggacagaaccgtgcccctggtggtggagaagctgatcaactacatcgagatgcacggcctgtacaccgagggcatctacagaaagagcggcagcaccaacaagatcaaggagctgagacagggcctggacaccgacgccgagagcgtgaacctggacgactacaacatccacgtgatcgccagcgtgttcaagcagtggctgagagacctgcccaaccccctgatgaccttcgagctgtacgaggagttcctgagagccatgggcctgcaggagagaaaggagaccatcagaggcgtgtacagcgtgatcgaccagctgagcagaacccacctgaacaccctggagagactgatcttccacctggtgagaatcgccctgcaggaggacaccaacagaatgagcgccaacgccctggccatcgtgttcgccccctgcatcctgagatgccccgacaccaccgaccccctgcagagcgtgcaggacatcagcaagaccaccacctgcgtggagctgatcgtggtggagcagatgaacaagtacaaggccagactgaaggacatcagcagcctggagttcgccgagaacaaggccaagaccagactgagcctgatcagaagaagcatgggcaagggcagaatcagaagaggcaactaccccggccccagcagccccgtggtggtgagactgcccagcgtgagcgacgtgagcgaggagaccctgaccagcgaggccgccatggagaccgacatcaccgagcagcagcaggccgccatgcagcaggaggagagagtgctgaccgagcagatcgagaacctgcagaaggagaaggaggagctgaccttcgagatgctggtgctggagcccagagccagcgacgacgagaccctggagagcgaggccagcatcggcaccgccgacagcagcgagaacctgaacatggagagcgagtacgccatcagcgagaagagcgagagaagcctggccctgagcagcctgaagaccgccggcaagagcgagcccagcagcaagctgagaaagcagctgaagaagcagcaggacagcctggacgtggtggacagcagcgtgagcagcctgtgcctgagcaacaccgccagcagccacggcaccagaaagctgttccagatctacagcaagagccccttctacagagccgccagcggcaacgaggccctgggcatggagggccccctgggccagaccaagttcctggaggacaagccccagttcatcagcagaggcaccttcaaccccgagaagggcaagcagaagctgaagaacgtgaagaacagcccccagaagaccaaggagacccccgagggcaccgtgatgagcggcagaagaaagaccgtggaccccgactgcaccagcaaccagcagctggccctgttcggcaacaacgagttcatggtgtag

SEQ ID NO: 90011 - DNA, 7860 bp, synthetic construct
  misc_feature 1..7860: note = Description of Artificial Sequence: Synthetic coding sequence
  source 1..7860: mol_type = other DNA
atgaacatcaacgacggcggcagaagaagattcgaggacaacgagcacaccctgagaatctaccccggcgccatcagcgagggcaccatctactgccccatccccgccagaaagaacagcaccgccgccgaggtgatcgagagcctgatcaacaagctgcacctggacaagaccaagtgctacgtgctggccgaggtgaaggagttcggcggcgaggagtggatcctgaaccccaccgactgccccgtgcagagaatgatgctgtggcccagaatggccctggagaacagactgagcggcgaggactacagattcctgctgagagagaagaacctggacggcagcatccactacggcagcctgcagagctggctgagagtgaccgaggagagaagaagaatgatggagagaggcttcctgccccagccccagcagaaggacttcgacgacctgtgcagcctgcccgacctgaacgagaagaccctgctggagaacctgagaaacagattcaagcacgagaagatctacacctacgtgggcagcatcctgatcgtgatcaaccccttcaagttcctgcccatctacaaccccaagtacgtgaagatgtacgacaaccaccagctgggcaagctggagccccacatctacgccgtggccgacgtggcctaccacgccatgctgcagagaaagaagaaccagtgcatcgtgatcagcggcgagagcggcagcggcaagacccagagcaccaacttcctgatccaccacctgaccgccctgagccagaagggcttcgccagcggcgtggagcagatcatcctgggcgccggccccgtgctggaggccttcggcaacgccaagaccgcccacaacaacaacagcagcagattcggcaagttcatccaggtgaactaccaggagaccggcaccgtgctgggcgcctacgtggagaagtacctgctggagaagagcagactggtgtaccaggagcacaacgagagaaactaccacgtgttctactacctgctggccggcgccagcgaggacgagagaagcgccttccacctgaagcagcccgaggagtaccactacctgaaccagatcaccaagaagcccctgagacagagctgggacgactactgctacgacagcgagcccgactgcttcaccgtggagggcgaggacctgagacacgacttcgagagactgcagctggccatggagatggtgggcttcctgcccaagaccagaagacagatcttcagcctgctgagcgccatcctgcacctgggcaacatctgctacaagaagaagacctacagagacgacagcatcgacatctgcaaccccgaggtgctgcccatcgtgagcgagctgctggaggtgaaggaggagatgctgttcgaggccctggtgaccagaaagaccgtgaccgtgggcgagaagctgatcctgccctacaagctggccgaggccgtgaccgtgagaaacagcatggccaagagcctgtacagcgccctgttcgactggatcgtgttcagaatcaaccacgccctgctgaacagcaaggacctggagcacaacaccaagaccctgagcatcggcgtgctggacatcttcggcttcgaggactacgagaacaacagcttcgagcagttctgcatcaacttcgccaacgagagactgcagcactacttcaaccagcacatcttcaagctggagcaggaggagtacagaaccgagggcatcagctggcacaacatcgactacatcgacaacacctgctgcatcaacctgatcagcaagaagcccaccggcctgctgcacctgctggacgaggagagcaacttcccccaggccaccaaccagaccctgctggacaagttcaagcaccagcacgaggacaacagctacatcgagttccccgccgtgatggagcccgccttcatcatcaagcactacgccggcaaggtgaagtacggcgtgaaggacttcagagagaagaacaccgaccacatgagacccgacatcgtggccctgctgagaagcagcaagaacgccttcatcagcggcatgatcggcatcgaccccgtggccgtgttcagatgggccatcctgagagccttcttcagagccatggtggccttcagagaggccggcaagagaaacatccacagaaagaccggccacgacgacaccgccccctgcgccatcctgaagagcatggacagcttcagcttcctgcagcaccccgtgcaccagagaagcctggagatcctgcagagatgcaaggaggagaagtacagcatcaccagaaagaaccccagaacccccctgagcgacctgcagggcatgaacgccctgaacgagaagaaccagcacgacaccttcgacatcgcctggaacggcagaaccggcatcagacagagcagactgagcagcggcaccagcctgctggacaaggacggcatcttcgccaacagcaccagcagcaagctgctggagagagcccacggcatcctgaccagaaacaagaacttcaagagcaagcccgccctgcccaagcacctgctggaggtgaacagcctgaagcacctgaccagactgaccctgcaggacagaatcaccaagagcctgctgcacctgcacaagaagaagaagccccccagcatcagcgcccagttccaggccagcctgagcaagctgatggagaccctgggccaggccgagccctacttcgtgaagtgcatcagaagcaacgccgagaagctgcccctgagattcagcgacgtgctggtgctgagacagctgagatacaccggcatgctggagaccgtgagaatcagacagagcggctacagcagcaagtacagcttccaggacttcgtgagccacttccacgtgctgctgcccagaaacatcatccccagcaagttcaacatccaggacttcttcagaaagatcaacctgaaccccgacaactaccaggtgggcaagaccatggtgttcctgaaggagcaggagagacagcacctgcaggacctgctgcaccaggaggtgctgagaagaatcatcctgctgcagagatggttcagagtgctgctgtgcagacagcacttcctgcacctgagacaggccagcgtgatcatccagagattctggagaaactacctgaaccagaagcaggtgagagacgccgccgtgcagaaggacgccttcgtgatggccagcgccgccgccctgctgcaggccagctggagagcccacctggagagacagagatacctggagctgagagccgccgccatcgtgatccagcagaagtggagagactactacagaagaagacacatggccgccatctgcatccaggccagatggaaggcctacagagagagcaagagataccaggagcagagaaagaagatcatcctgctgcagagcacctgcagaggcttcagagccagacagagattcaaggccctgaaggagcagagactgagagagaccaagcccgaggtgggcctggtgaacatcaagggctacggcagcctggagatccagggcagcgaccccagcggctgggaggactgcagcttcgacaacagaatcaaggccatcgaggagtgcaagagcgtgatcgagagcaacagaatcagcagagagagcagcgtggactgcctgaaggagagccccaacaagcagcaggagagagcccagagccagagcggcgtggacctgcaggaggacgtgctggtgagagagagacccagaagcctggaggacctgcaccagaagaaggtgggcagagccaagagagagagcagaagaatgagagagctggagcaggccatcttcagcctggagctgctgaaggtgagaagcctgggcggcatcagccccagcgaggacagaagatggagcaccgagctggtgcccgagggcctgcagagccccagaggcacccccgacagcgagagcagccagggcagcctggagctgctgagctacgaggagagccagaagagcaagctggagagcgtgatcagcgacgagggcgacctgcagttccccagccccaagatcagcagcagccccaagttcgacagcagagacaacgccctgagcgccagcaacgagaccagcagcgccgagcacctgaaggacggcaccatgaaggagatggtggtgtgcagcagcgagagcatcacctgcaagccccagctgaaggacagcttcatcagcaacagcctgcccaccttcttctacatcccccagcaggaccccctgaagaccaacagccagctggacaccagcatccagagaaacaagctgctggagaacgaggacaccgccggcgaggccctgaccctggacatcaacagagagaccagaagataccactgcagcggcaaggaccagatcgtgcccagcctgaacaccgagagcagcaaccccgtgctgaagaagctggagaagctgaacaccgagaaggaggagagacagaagcagctgcagcagcagaacgagaaggagatgatggagcagatcagacagcagaccgacatcctggagaaggagagaaaggccttcaagaccatcgagaagcccagaatcggcgagtgcctggtggcccccagcagctaccagagcaagcagagagtggagagacccagcagcctgctgagcctgaacaccagcaacaagggcgagctgaacgtgctgggcagcctgagcctgaaggacgccgccctggcccagaaggacagcagcagcgcccacctgccccccaaggacagacccgtgaccgtgttcttcgagagaaagggcagcccctgccagagcagcaccgtgaaggagctgagcaagaccgacagaatgggcacccagctgaacgtggcctgcaagctgagcaacaacagaatcagcaagagagagcacttcagacccacccagagctacagccacaacagcgacgacctgagcagagagggcaacgccagacccatcttcttcacccccaaggacaacatgagcatccccctggtgagcaaggaggccctgaacagcaagaacccccagctgcacaaggaggacgagcccgcctggaagcccgtgaagctggccggccccggccagagagaggtggccagacccgcccacaagaagaaggccagaatggccagaaccagaagcgacttcctgaccagaggcaccttcgccgacggcgagggcgacaccgaggaggacgactacgacgacatcatcgagcccctgctgagcctggaccaggccagccactgcgagctgggccccgcccccagcctgggccaggccagccacagcgacagcgagatgaccagccagagattcagcagcgtggacgagcaggccaagctgcacaagaccatgagccagggcgagatcaccaagctggccgtgagacagaaggccagcgacagcgacatcagaccccagagagccaagatgagattctgggccaagggcaagcagggcgagaagaagaccaccagagtgaagcccaccacccagagcgaggtgagccccctgttcgccggcaccgacgtgatccccgcccaccagttccccgacgagctggccgcctaccaccccaccccccccctgagccccgagctgcccggcagctgcagaaaggagttcaaggagaacaaggagcccagccccaaggccaagagaaagagaagcgtgaagatcagcaacgtggccctggacagcatgcactggcagaacgacagcgtgcagatcatcgccagcgtgagcgacctgaagagcatggacgagttcctgctgaagaaggtgaacgacctggacaacgaggacagcaagaaggacaccctggtggacgtggtgttcaagaaggccctgaaggagttcagacagaacatcttcagcttctacagcagcgccctggccatggacgacggcaagagcatcagatacaaggacctgtacgccctgttcgagcagatcctggagaagaccatgagactggagcagagagacagcctgggcgagagccccgtgagagtgtgggtgaacaccttcaaggtgttcctggacgagtacatgaacgagttcaagaccagcgactgcaccgccaccaaggtgcccaagaccgagagaaagaagagaagaaagaaggagaccgacctggtggaggagcacaacggccacatcttcaaggccacccagtacagcatccccacctactgcgagtactgcagcagcctgatctggatcatggacagagccagcgtgtgcaagctgtgcaagtacgcctgccacaagaagtgctgcctgaagaccaccgccaagtgcagcaagaagtacgaccccgagctgagcagcagacagttcggcgtggagctgagcagactgaccagcgaggacagaaccgtgcccctggtggtggagaagctgatcaactacatcgagatgcacggcctgtacaccgagggcatctacagaaagagcggcagcaccaacaagatcaaggagctgagacagggcctggacaccgacgccgagagcgtgaacctggacgactacaacatccacgtgatcgccagcgtgttcaagcagtggctgagagacctgcccaaccccctgatgaccttcgagctgtacgaggagttcctgagagccatgggcctgcaggagagaaaggagaccatcagaggcgtgtacagcgtgatcgaccagctgagcagaacccacctgaacaccctggagagactgatcttccacctggtgagaatcgccctgcaggaggacaccaacagaatgagcgccaacgccctggccatcgtgttcgccccctgcatcctgagatgccccgacaccaccgaccccctgcagagcgtgcaggacatcagcaagaccaccacctgcgtggagctgatcgtggtggagcagatgaacaagtacaaggccagactgaaggacatcagcagcctggagttcgccgagaacaaggccaagaccagactgagcctgatcagaagaagcatgggcaagggcagaatcagaagaggcaactaccccggccccagcagccccgtggtggtgagactgcccagcgtgagcgacgtgagcgaggagaccctgaccagcgaggccgccatggagaccgacatcaccgagcagcagcaggccgccatgcagcaggaggagagagtgctgaccgagcagatcgagaacctgcagaaggagaaggaggagctgaccttcgagatgctggtgctggagcccagagccagcgacgacgagaccctggagagcgaggccagcatcggcaccgccgacagcagcgagaacctgaacatggagagcgagtacgccatcagcgagaagagcgagagaagcctggccctgagcagcctgaagaccgccggcaagagcgagcccagcagcaagctgagaaagcagctgaagaagcagcaggacagcctggacgtggtggacagcagcgtgagcagcctgtgcctgagcaacaccgccagcagccacggcaccagaaagctgttccagatctacagcaagagccccttctacagagccgccagcggcaacgaggccctgggcatggagggccccctgggccagaccaagttcctggaggacaagccccagttcatcagcagaggcaccttcaaccccgagaagggcaagcagaagctgaagaacgtgaagaacagcccccagaagaccaaggagacccccgagggcaccgtgatgagcggcagaagaaagaccgtggaccccgactgcaccagcaaccagcagctggccctgttcggcaacaacgagttcatggtgtag

SEQ ID NO: 90012 - DNA, 7590 bp, synthetic construct
  misc_feature 1..7590: note = Description of Artificial Sequence: Synthetic coding sequence
  source 1..7590: mol_type = other DNA
atgaacatcaacgacggcggcagaagaagattcgaggacaacgagcacaccctgagaatctaccccggcgccatcagcgagggcaccatctactgccccatccccgccagaaagaacagcaccgccgccgaggtgatcgagagcctgatcaacaagctgcacctggacaagaccaagtgctacgtgctggccgaggtgaaggagttcggcggcgaggagtggatcctgaaccccaccgactgccccgtgcagagaatgatgctgtggcccagaatggccctggagaacagactgagcggcgaggactacagattcctgctgagagagaagaacctggacggcagcatccactacggcagcctgcagagctggctgagagtgaccgaggagagaagaagaatgatggagagaggcttcctgccccagccccagcagaaggacttcgacgacctgtgcagcctgcccgacctgaacgagaagaccctgctggagaacctgagaaacagattcaagcacgagaagatctacacctacgtgggcagcatcctgatcgtgatcaaccccttcaagttcctgcccatctacaaccccaagtacgtgaagatgtacgacaaccaccagctgggcaagctggagccccacatctacgccgtggccgacgtggcctaccacgccatgctgcagagaaagaagaaccagtgcatcgtgatcagcggcgagagcggcagcggcaagacccagagcaccaacttcctgatccaccacctgaccgccctgagccagaagggcttcgccagcggcgtggagcagatcatcctgggcgccggccccgtgctggaggccttcggcaacgccaagaccgcccacaacaacaacagcagcagattcggcaagttcatccaggtgaactaccaggagaccggcaccgtgctgggcgcctacgtggagaagtacctgctggagaagagcagactggtgtaccaggagcacaacgagagaaactaccacgtgttctactacctgctggccggcgccagcgaggacgagagaagcgccttccacctgaagcagcccgaggagtaccactacctgaaccaggactgcttcaccgtggagggcgaggacctgagacacgacttcgagagactgcagctggccatggagatggtgggcttcctgcccaagaccagaagacagatcttcagcctgctgagcgccatcctgcacctgggcaacatctgctacaagaagaagacctacagagacgacagcatcgacatctgcaaccccgaggtgctgcccatcgtgagcgagctgctggaggtgaaggaggagatgctgttcgaggccctggtgaccagaaagaccgtgaccgtgggcgagaagctgatcctgccctacaagctggccgaggccgtgaccgtgagaaacagcatggccaagagcctgtacagcgccctgttcgactggatcgtgttcagaatcaaccacgccctgctgaacagcaaggacctggagcacaacaccaagaccctgagcatcggcgtgctggacatcttcggcttcgaggactacgagaacaacagcttcgagcagttctgcatcaacttcgccaacgagagactgcagcactacttcaaccagcacatcttcaagctggagcaggaggagtacagaaccgagggcatcagctggcacaacatcgactacatcgacaacacctgctgcatcaacctgatcagcaagaagcccaccggcctgctgcacctgctggacgaggagagcaacttcccccaggccaccaaccagaccctgctggacaagttcaagcaccagcacgaggacaacagctacatcgagttccccgccgtgatggagcccgccttcatcatcaagcactacgccggcaaggtgaagtacggcgtgaaggacttcagagagaagaacaccgaccacatgagacccgacatcgtggccctgctgagaagcagcaagaacgccttcatcagcggcatgatcggcatcgaccccgtggccgtgttcagatgggccatcctgagagccttcttcagagccatggtggccttcagagaggccggcaagagaaacatccacagaaagaccggccacgacgacaccgccccctgcgccatcctgaagagcatggacagcttcagcttcctgcagcaccccgtgcaccagagaagcctggagatcctgcagagatgcaaggaggagaagtacagcatcaccagaaagaaccccagaacccccctgagcgacctgcagggcatgaacgccctgaacgagaagaaccagcacgacaccttcgacatcgcctggaacggcagaaccggcatcagacagagcagactgagcagcggcaccagcctgctggacaaggacggcatcttcgccaacagcaccagcagcaagctgctggagagagcccacggcatcctgaccagaaacaagaacttcaagagcaagcccgccctgcccaagcacctgctggaggtgaacagcctgaagcacctgaccagactgaccctgcaggacagaatcaccaagagcctgctgcacctgcacaagaagaagaagccccccagcatcagcgcccagttccaggccagcctgagcaagctgatggagaccctgggccaggccgagccctacttcgtgaagtgcatcagaagcaacgccgagaagctgcccctgagattcagcgacgtgctggtgctgagacagctgagatacaccggcatgctggagaccgtgagaatcagacagagcggctacagcagcaagtacagcttccaggacttcgtgagccacttccacgtgctgctgcccagaaacatcatccccagcaagttcaacatccaggacttcttcagaaagatcaacctgaaccccgacaactaccaggtgggcaagaccatggtgttcctgaaggagcaggagagacagcacctgcaggacctgctgcaccaggaggtgctgagaagaatcatcctgctgcagagatggttcagagtgctgctgtgcagacagcacttcctgcacctgagacaggccagcgtgatcatccagagattctggagaaactacctgaaccagaagcaggtgagagacgccgccgtgcagaaggacgccttcgtgatggccagcgccgccgccctgctgcaggccagctggagagcccacctggagagacagagatacctggagctgagagccgccgccatcgtgatccagcagaagtggagagactactacagaagaagacacatggccgccatctgcatccaggccagatggaaggcctacagagagagcaagagataccaggagcagagaaagaagatcatcctgctgcagagcacctgcagaggcttcagagccagacagagattcaaggccctgaaggagcagagactgagagagaccaagcccgaggtgggcctggtgaacatcaagggctacggcagcctggagatccagggcagcgaccccagcggctgggaggactgcagcttcgacaacagaatcaaggccatcgaggagtgcaagagcgtgatcgagagcaacagaatcagcagagagagcagcgtggactgcctgaaggagagccccaacaagcagcaggagagagcccagagccagagcggcgtggacctgcaggaggacgtgctggtgagagagagacccagaagcctggaggacctgcaccagaagaaggtgggcagagccaagagagagagcagaagaatgagagagctggagcaggccatcttcagcctggagctgctgaaggtgagaagcctgggcggcatcagccccagcgaggacagaagatggagcaccgagctggtgcccgagggcctgcagagccccagaggcacccccgacagcgagagcagccagggcagcctggagctgctgagctacgaggagagccagaagagcaagctggagagcgtgatcagcgacgagggcgacctgcagttccccagccccaagatcagcagcagccccaagttcgacagcagagacaacgccctgagcgccagcaacgagaccagcagcgccgagcacctgaaggacggcaccatgaaggagatggtggtgtgcagcagcgagagcatcacctgcaagccccagctgaaggacagcttcatcagcaacagcctgcccaccttcttctacatcccccagcaggaccccctgaagaccaacagccagctggacaccagcatccagagaaacaagctgctggagaacgaggacaccgccggcgaggccctgaccctggacatcaacagagagaccagaagataccactgcagcggcaaggaccagatcgtgcccagcctgaacaccgagagcagcaaccccgtgctgaagaagctggagaagctgaacaccgagaaggaggagagacagaagcagctgcagcagcagaacgagaaggagatgatggagcagatcagacagcagaccgacatcctggagaaggagagaaaggccttcaagaccatcgagaagcccagaatcggcgagtgcctggtggcccccagcagctaccagagcaagcagagagtggagagacccagcagcctgctgagcctgaacaccagcaacaagggcgagctgaacgtgctgggcagcctgagcctgaaggacgccgccctggcccagaaggacagcagcagcgcccacctgccccccaaggacagacccgtgaccgtgttcttcgagagaaagggcagcccctgccagagcagcaccgtgaaggagctgagcaagaccgacagaatgggcacccagctgaacgtggcctgcaagctgagcaacaacagaatcagcaagagagagcacttcagacccacccagagctacagccacaacagcgacgacctgagcagagagggcaacgccagacccatcttcttcacccccaaggacaacatgagcatccccctggtgagcaaggaggccctgaacagcaagaacccccagctgcacaaggaggacgagcccgcctggaagcccgtgaagctggccggccccggccagagagagaccagccagagattcagcagcgtggacgagcaggccaagctgcacaagaccatgagccagggcgagatcaccaagctggccgtgagacagaaggccagcgacagcgacatcagaccccagagagccaagatgagattctgggccaagggcaagcagggcgagaagaagaccaccagagtgaagcccaccacccagagcgaggtgagccccctgttcgccggcaccgacgtgatccccgcccaccagttccccgacgagctggccgcctaccaccccaccccccccctgagccccgagctgcccggcagctgcagaaaggagttcaaggagaacaaggagcccagccccaaggccaagagaaagagaagcgtgaagatcagcaacgtggccctggacagcatgcactggcagaacgacagcgtgcagatcatcgccagcgtgagcgacctgaagagcatggacgagttcctgctgaagaaggtgaacgacctggacaacgaggacagcaagaaggacaccctggtggacgtggtgttcaagaaggccctgaaggagttcagacagaacatcttcagcttctacagcagcgccctggccatggacgacggcaagagcatcagatacaaggacctgtacgccctgttcgagcagatcctggagaagaccatgagactggagcagagagacagcctgggcgagagccccgtgagagtgtgggtgaacaccttcaaggtgttcctggacgagtacatgaacgagttcaagaccagcgactgcaccgccaccaaggtgcccaagaccgagagaaagaagagaagaaagaaggagaccgacctggtggaggagcacaacggccacatcttcaaggccacccagtacagcatccccacctactgcgagtactgcagcagcctgatctggatcatggacagagccagcgtgtgcaagctgtgcaagtacgcctgccacaagaagtgctgcctgaagaccaccgccaagtgcagcaagaagtacgaccccgagctgagcagcagacagttcggcgtggagctgagcagactgaccagcgaggacagaaccgtgcccctggtggtggagaagctgatcaactacatcgagatgcacggcctgtacaccgagggcatctacagaaagagcggcagcaccaacaagatcaaggagctgagacagggcctggacaccgacgccgagagcgtgaacctggacgactacaacatccacgtgatcgccagcgtgttcaagcagtggctgagagacctgcccaaccccctgatgaccttcgagctgtacgaggagttcctgagagccatgggcctgcaggagagaaaggagaccatcagaggcgtgtacagcgtgatcgaccagctgagcagaacccacctgaacaccctggagagactgatcttccacctggtgagaatcgccctgcaggaggacaccaacagaatgagcgccaacgccctggccatcgtgttcgccccctgcatcctgagatgccccgacaccaccgaccccctgcagagcgtgcaggacatcagcaagaccaccacctgcgtggagctgatcgtggtggagcagatgaacaagtacaaggccagactgaaggacatcagcagcctggagttcgccgagaacaaggccaagaccagactgagcctgatcagaagaagcatgggcaagggcagaatcagaagaggcaactaccccggccccagcagccccgtggtggtgagactgcccagcgtgagcgacgtgagcgaggagaccctgaccagcgaggccgccatggagaccgacatcaccgagcagcagcaggccgccatgcagcaggaggagagagtgctgaccgagcagatcgagaacctgcagaaggagaaggaggagctgaccttcgagatgctggtgctggagcccagagccagcgacgacgagaccctggagagcgaggccagcatcggcaccgccgacagcagcgagaacctgaacatggagagcgagtacgccatcagcgagaagagcgagagaagcctggccctgagcagcctgaagaccgccggcaagagcgagcccagcagcaagctgagaaagcagctgaagaagcagcaggacagcctggacgtggtggacagcagcgtgagcagcctgtgcctgagcaacaccgccagcagccacggcaccagaaagctgttccagatctacagcaagagccccttctacagagccgccagcggcaacgaggccctgggcatggagggccccctgggccagaccaagttcctggaggacaagccccagttcatcagcagaggcaccttcaaccccgagaagggcaagcagaagctgaagaacgtgaagaacagcccccagaagaccaaggagacccccgagggcaccgtgatgagcggcagaagaaagaccgtggaccccgactgcaccagcaaccagcagctggccctgttcggcaacaacgagttcatggtgtag

SEQ ID NO: 90013 - DNA, 2190 bp, synthetic construct
  misc_feature 1..2190: note = Description of Artificial Sequence: Synthetic coding sequence
  source 1..2190: mol_type = other DNA
atgaacatcaacgacggcggcagaagaagattcgaggacaacgagcacaccctgagaatctaccccggcgccatcagcgagggcaccatctactgccccatccccgccagaaagaacagcaccgccgccgaggtgatcgagagcctgatcaacaagctgcacctggacaagaccaagtgctacgtgctggccgaggtgaaggagttcggcggcgaggagtggatcctgaaccccaccgactgccccgtgcagagaatgatgctgtggcccagaatggccctggagaacagactgagcggcgaggactacagattcctgctgagagagaagaacctggacggcagcatccactacggcagcctgcagagctggctgagagtgaccgaggagagaagaagaatgatggagagaggcttcctgccccagccccagcagaaggacttcgacgacctgtgcagcctgcccgacctgaacgagaagaccctgctggagaacctgagaaacagattcaagcacgagaagatctacacctacgtgggcagcatcctgatcgtgatcaaccccttcaagttcctgcccatctacaaccccaagtacgtgaagatgtacgacaaccaccagctgggcaagctggagccccacatctacgccgtggccgacgtggcctaccacgccatgctgcagagaaagaagaaccagtgcatcgtgatcagcggcgagagcggcagcggcaagacccagagcaccaacttcctgatccaccacctgaccgccctgagccagaagggcttcgccagcggcgtggagcagatcatcctgggcgccggccccgtgctggaggccttcggcaacgccaagaccgcccacaacaacaacagcagcagattcggcaagttcatccaggtgaactaccaggagaccggcaccgtgctgggcgcctacgtggagaagtacctgctggagaagagcagactggtgtaccaggagcacaacgagagaaactaccacgtgttctactacctgctggccggcgccagcgaggacgagagaagcgccttccacctgaagcagcccgaggagtaccactacctgaaccagatcaccaagaagcccctgagacagagctgggacgactactgctacgacagcgagcccgactgcttcaccgtggagggcgaggacctgagacacgacttcgagagactgcagctggccatggagatggtgggcttcctgcccaagaccagaagacagatcttcagcctgctgagcgccatcctgcacctgggcaacatctgctacaagaagaagacctacagagacgacagcatcgacatctgcaaccccgaggtgctgcccatcgtgagcgagctgctggaggtgaaggaggagatgctgttcgaggccctggtgaccagaaagaccgtgaccgtgggcgagaagctgatcctgccctacaagctggccgaggccgtgaccgtgagaaacagcatggccaagagcctgtacagcgccctgttcgactggatcgtgttcagaatcaaccacgccctgctgaacagcaaggacctggagcacaacaccaagaccctgagcatcggcgtgctggacatcttcggcttcgaggactacgagaacaacagcttcgagcagttctgcatcaacttcgccaacgagagactgcagcactacttcaaccagcacatcttcaagctggagcaggaggagtacagaaccgagggcatcagctggcacaacatcgactacatcgacaacacctgctgcatcaacctgatcagcaagaagcccaccggcctgctgcacctgctggacgaggagagcaacttcccccaggccaccaaccagaccctgctggacaagttcaagcaccagcacgaggacaacagctacatcgagttccccgccgtgatggagcccgccttcatcatcaagcactacgccggcaaggtgaagtacggcgtgaaggacttcagagagaagaacaccgaccacatgagacccgacatcgtggccctgctgagaagcagcaagaacgccttcatcagcggcatgatcggcatcgaccccgtggccgtgttcagatgggccatcctgagagccttcttcagagccatggtggccttcagagaggccggcaagagaaacatccacagaaagaccggcaagtag

SEQ ID NO: 90014 - DNA, 1509 bp, synthetic construct
  misc_feature 1..1509: note = Description of Artificial Sequence: Synthetic coding sequence
  source 1..1509: mol_type = other DNA
atggacaaggccctgctgtgcagcgtgtgcaagatgacctgccacaagaagtgcgtgcacaagatccagagccactgcagctacacctacggcagaaagggcgagcccggcgtggagcccggccacttcggcgtgtgcgtggacagcctgaccagcgacaaggccagcgtgcccatcgtgctggagaagctgctggagcacgtggagatgcacggcctgtacaccgagggcctgtacagaaagagcggcgccgccaacagaaccagagagctgagacaggccctgcagaccgaccccgccgccgtgaagctggagaacttccccatccacgccatcaccggcgtgctgaagcagtggctgagagagctgcccgagcccctgatgaccttcgcccagtacggcgacttcctgagagccgtggagctgcccgagaagcaggagcagctggccgccatctacgccgtgctggagcacctgcccgaggccaaccacaacagcctggagagactgatcttccacctgctggccgtggccctgctggaggacgtgaacagaatgagccccggcgccctggccatcatcttcgccccctgcctgctgagatgccccgacaacagcgaccccctgaccagcatgaaggacgtgctgaagatcaccacctgcgtggagatgctgatcaaggagcagatgagaaagtacaaggtgaagatggaggagatcagccagctggaggccgccgagagcatcgccttcagaagactgagcctgctgagacagaacgccccctggcccctgaagctgggcttcagcagcccctacgagggcgtgctgaacaagagccccaagaccagagacatccaggaggaggagctggaggtgctgctggaggaggaggccgccggcggcgacgaggacagagagaaggagatcctgatcgagagaatccagagcatcaaggaggagaagcaggacatcacctacagactgcccgagctggaccccagaggcagcgacgaggagaacctggacagcgagaccagcgccagcaccgagagcctgctggaggagagagccggcagaggcgccagcgagggcccccccgcccccgccctgccctgccccggcgcccccacccccagccccctgcccaccgtggccgccccccccagaagaagacccagcagcttcgtgaccgtgagagtgaagacccccagaagaacccccatcatgcccaccgccaacatcaagctgccccccggcctgcccagccacctgcccagatgggcccccggcgccagagaggccgccgcccccgtgagaagaagagagccccccgccagaagacccgaccagatccacagcgtgtacatcacccccggcgccgacctgcccgtgcagggcgccctggagcccctggaggaggacggccagccccccggcgccaagagaagatacagcgacccccccacctactgcctgccccccgccagcggccagaccaacggctag

SEQ ID NO: 90015 - DNA, 6069 bp, synthetic construct
  misc_feature 1..6069: note = Description of Artificial Sequence: Synthetic coding sequence
  source 1..6069: mol_type = other DNA
atgagcgtgaaggaggccggcagcagcggcagaagagagcaggccgcctaccacctgcacatctacccccagctgagcaccaccgagagccaggccagctgcagagtgaccgccaccaaggacagcaccaccagcgacgtgatcaaggacgccatcgccagcctgagactggacggcaccaagtgctacgtgctggtggaggtgaaggagagcggcggcgaggagtgggtgctggacgccaacgacagccccgtgcacagagtgctgctgtggcccagaagagcccaggacgagcacccccaggaggacggctactacttcctgctgcaggagagaaacgccgacggcaccatcaagtacgtgcacatgcagctggtggcccaggccaccgccaccagaagactggtggagagaggcctgctgcccagacagcaggccgacttcgacgacctgtgcaacctgcccgagctgaccgagggcaacctgctgaagaacctgaagcacagattcctgcagcagaagatctacacctacgccggcagcatcctggtggccatcaaccccttcaagttcctgcccatctacaaccccaagtacgtgaagatgtacgagaaccagcagctgggcaagctggagccccacgtgttcgccctggccgacgtggcctactacaccatgctgagaaagagagtgaaccagtgcatcgtgatcagcggcgagagcggcagcggcaagacccagagcaccaacttcctgatccactgcctgaccgccctgagccagaagggctacgccagcggcgtggagagaaccatcctgggcgccggccccgtgctggaggccttcggcaacgccaagaccgcccacaacaacaacagcagcagattcggcaagttcatccaggtgagctacctggagagcggcatcgtgagaggcgccgtggtggagaagtacctgctggagaagagcagactggtgagccaggagaaggacgagagaaactaccacgtgttctactacctgctgctgggcgtgagcgaggaggagagacaggagttccagctgaagcagcccgaggactacttctacctgaaccagcacaacctgaagatcgaggacggcgaggacctgaagcacgacttcgagagactgaagcaggccatggagatggtgggcttcctgcccgccaccaagaagcagatcttcgccgtgctgagcgccatcctgtacctgggcaacgtgacctacaagaagagagccaccggcagagaggagggcctggaggtgggcccccccgaggtgctggacaccctgagccagctgctgaaggtgaagagagagatcctggtggaggtgctgaccaagagaaagaccgtgaccgtgaacgacaagctgatcctgccctacagcctgagcgaggccatcaccgccagagacagcatggccaagagcctgtacagcgccctgttcgactggatcgtgctgagaatcaaccacgccctgctgaacaagaaggacgtggaggaggccgtgagctgcctgagcatcggcgtgctggacatcttcggcttcgaggacttcgagagaaacagcttcgagcagttctgcatcaactacgccaacgagcagctgcagtactacttcaaccagcacatcttcaagctggagcaggaggagtaccagggcgagggcatcacctggcacaacatcggctacaccgacaacgtgggctgcatccacctgatcagcaagaagcccaccggcctgttctacctgctggacgaggagagcaacttcccccacgccaccagccagaccctgctggccaagttcaagcagcagcacgaggacaacaagtacttcctgggcacccccgtgatggagcccgccttcatcatccagcacttcgccggcaaggtgaagtaccagatcaaggacttcagagagaagaacatggactacatgagacccgacatcgtggccctgctgagaggcagcgacagcagctacgtgagagagctgatcggcatggaccccgtggccgtgttcagatgggccgtgctgagagccgccatcagagccatggccgtgctgagagaggccggcagactgagagccgagagagccgagaaggccgccggcatgagcagccccggcgcccagagccaccccgaggagctgcccagaggcgccagcacccccagcgagaagctgtacagagacctgcacaaccagatgatcaagagcatcaagggcctgccctggcagggcgaggaccccagaagcctgctgcagagcctgagcagactgcagaagcccagagccttcatcctgaagagcaagggcatcaagcagaagcagatcatccccaagaacctgctggacagcaagagcctgaagctgatcatcagcatgaccctgcacgacagaaccaccaagagcctgctgcacctgcacaagaagaagaagccccccagcatcagcgcccagttccagaccagcctgaacaagctgctggaggccctgggcaaggccgagcccttcttcatcagatgcatcagaagcaacgccgagaagaaggagctgtgcttcgacgacgagctggtgctgcagcagctgagatacaccggcatgctggagaccgtgagaatcagaagaagcggctacagcgccaagtacaccttccaggacttcaccgagcagttccaggtgctgctgcccaaggacgcccagccctgcagagaggtgatcagcaccctgctggagaagatgaagatcgacaagagaaactaccagatcggcaagaccaaggtgttcctgaaggagaccgagagacaggccctgcaggagaccctgcacagagaggtggtgagaaagatcctgctgctgcagagctggttcagaatggtgctggagagaagacacttcctgcagatgaagagagccgccgtgaccatccaggcctgctggagaagctacagagtgagaagagccctggagagaacccaggccgccgtgtacctgcaggccagctggagaggctactggcagagaaagctgtacagacaccagaagcagagcatcatcagactgcagagcctgtgcagaggccacctgcagagaaagagcttcagccagatgatcagcgagaagcagaaggccgaggagaaggagagagaggccctggaggccgccagagccggcgccgaggagggcggccagggccaggccgccggcggccagcaggtggccgagcagggccccgagcccgccgaggacggcggccacctggccagcgagcccgaggtgcagcccagcgacagaagccccctggagcacagcagccccgagaaggaggcccccagccccgagaagaccctgcccccccagaagaccgtggccgccgagagccacgagaaggtgcccagcagcagagagaagagagagagcagaagacagagaggcctggagcacgtgaagttccagaacaagcacatccagagctgcaaggaggagagcgccctgagagagcccagcagaagagtgacccaggagcagggcgtgagcctgctggaggacaagaaggagagcagagaggacgagaccctgctggtggtggagaccgaggccgagaacaccagccagaagcagcccaccgagcagccccaggccatggccgtgggcaaggtgagcgaggagaccgagaagaccctgcccagcggcagccccagacccggccagctggagagacccaccagcctggccctggacagcagagtgagcccccccgcccccggcagcgcccccgagacccccgaggacaagagcaagccctgcggcagccccagagtgcaggagaagcccgacagccccggcggcagcacccagatccagagatacctggacgccgagagactggccagcgccgtggagctgtggagaggcaagaagctggtggccgccgccagccccagcgccatgctgagccagagcctggacctgagcgacagacacagagccaccggcgccgccctgacccccaccgaggagagaagaaccagcttcagcaccagcgacgtgagcaagctgctgcccagcctggccaaggcccagcccgccgccgagaccaccgacggcgagagaagcgccaagaagcccgccgtgcagaagaagaagcccggcgacgccagcagcctgcccgacgccggcctgagccccggcagccaggtggacagcaagagcaccttcaagagactgttcctgcacaagaccaaggacaagaagtacagcctggagggcgccgaggagctggagaacgccgtgagcggccacgtggtgctggaggccaccaccatgaagaagggcctggaggcccccagcggccagcagcacagacacgccgccggcgagaagagaaccaaggagcccggcggcaagggcaagaagaacagaaacgtgaagatcggcaagatcaccgtgagcgagaagtggagagagagcgtgttcagacagatcaccaacgccaacgagctgaagtacctggacgagttcctgctgaacaagatcaacgacctgagaagccagaagacccccatcgagagcctgttcatcgaggccaccgagaagttcagaagcaacatcaagaccatgtacagcgtgcccaacggcaagatccacgtgggctacaaggacctgatggagaactaccagatcgtggtgagcaacctggccaccgagagaggccagaaggacaccaacctggtgctgaacctgttccagagcctgctggacgagttcaccagaggctacaccaagaacgacttcgagcccgtgaagcagagcaaggcccagaagaagaagagaaagcaggagagagccgtgcaggagcacaacggccacgtgttcgccagctaccaggtgagcatcccccagagctgcgagcagtgcctgagctacatctggctgatggacaaggccctgctgtgcagcgtgtgcaagatgacctgccacaagaagtgcgtgcacaagatccagagccactgcagctacacctacggcagaaagggcgagcccggcgtggagcccggccacttcggcgtgtgcgtggacagcctgaccagcgacaaggccagcgtgcccatcgtgctggagaagctgctggagcacgtggagatgcacggcctgtacaccgagggcctgtacagaaagagcggcgccgccaacagaaccagagagctgagacaggccctgcagaccgaccccgccgccgtgaagctggagaacttccccatccacgccatcaccggcgtgctgaagcagtggctgagagagctgcccgagcccctgatgaccttcgcccagtacggcgacttcctgagagccgtggagctgcccgagaagcaggagcagctggccgccatctacgccgtgctggagcacctgcccgaggccaaccacaacagcctggagagactgatcttccacctggtgaaggtggccctgctggaggacgtgaacagaatgagccccggcgccctggccatcatcttcgccccctgcctgctgagatgccccgacaacagcgaccccctgaccagcatgaaggacgtgctgaagatcaccacctgcgtggagatgctgatcaaggagcagatgagaaagtacaaggtgaagatggaggagatcagccagctggaggccgccgagagcatcgccttcagaagactgagcctgctgagacagaacgccccctggcccctgaagctgggcttcagcagcccctacgagggcgtgctgaacaagagccccaagaccagagacatccaggaggaggagctggaggtgctgctggaggaggaggccgccggcggcgacgaggacagagagaaggagatcctgatcgagagaatccagagcatcaaggaggagaaggaggacatcacctacagactgcccgagctggaccccagaggcagcgacgaggagaacctggacagcgagaccagcgccagcaccgagagcctgctggaggagagagccggcagaggcgccagcgagggccagtactag

SEQ ID NO: 90016 - DNA, 6069 bp, synthetic construct; identical to SEQ ID NO: 90015
  misc_feature 1..6069: note = Description of Artificial Sequence: Synthetic coding sequence
  source 1..6069: mol_type = other DNA

SEQ ID NO: 90017 - DNA, 519 bp, synthetic construct
  misc_feature 1..519: note = Description of Artificial Sequence: Synthetic coding sequence
  source 1..519: mol_type = other DNA
atgagcagcaagaaggccaagaccaagaccaccaagaagagaccccagagagccaccagcaacgtgttcgccatgttcgaccagagccagatccaggagttcaaggaggccttcaacatgatcgaccagaacagagacggcttcatcgacaaggaggacctgcacgacatgctggccagcctgggcaagaaccccaccgacgcctacctggacgccatgatgaacgaggcccccggccccatcaacttcaccatgttcctgaccatgttcggcgagaagctgaacggcaccgaccccgaggacgtgatcagaaacgccttcgcctgcttcgacgaggaggccaccggcaccatccaggaggactacctgagagagctgctgaccaccatgggcgacagattcaccgacgaggaggtggacgagctgtacagagaggcccccatcgacaagaagggcaacttcaactacatcgagttcaccagaatcctgaagcacggcgccaaggacaaggacgactag

SEQ ID NO: 90018 - DNA, 1791 bp, synthetic construct
  misc_feature 1..1791: note = Description of Artificial Sequence: Synthetic coding sequence
  source 1..1791: mol_type = other DNA
atggccaccgagaacggcgccgtggagctgggcatccagaaccccagcaccgacaaggcccccaagggccccaccggcgagagacccctggccgccggcaaggaccccggcccccccgaccccaagaaggcccccgacccccccaccctgaagaaggacgccaaggcccccgccagcgagaagggcgacggcaccctggcccagcccagcaccagcagccagggccccaagggcgagggcgacagaggcggcggccccgccgagggcagcgccggcccccccgccgccctgccccagcagaccgccacccccgagaccagcgtgaagaagcccaaggccgagcagggcgccagcggcagccaggaccccggcaagcccagagtgggcaagaaggccgccgagggccaggccgccgccagaagaggcagccccgccttcctgcacagccccagctgccccgccatcatcagcagcagcgagaagctgctggccaagaagccccccagcgaggccagcgagctgaccttcgagggcgtgcccatgacccacagccccaccgaccccagacccgccaaggccgaggagggcaagaacatcctggccgagagccagaaggaggtgggcgagaagacccccggccaggccggccaggccaagatgcagggcgacaccagcagaggcatcgagttccaggccgtgcccagcgagaagagcgaggtgggccaggccctgtgcctgaccgccagagaggaggactgcttccagatcctggacgactgcccccccccccccgcccccttcccccacagaatggtggagctgagaaccggcaacgtgagcagcgagttcagcatgaacagcaaggaggccctgggcggcggcaagttcggcgccgtgtgcacctgcatggagaaggccaccggcctgaagctggccgccaaggtgatcaagaagcagacccccaaggacaaggagatggtgctgctggagatcgaggtgatgaaccagctgaaccacagaaacctgatccagctgtacgccgccatcgagaccccccacgagatcgtgctgttcatggagtacatcgagggcggcgagctgttcgagagaatcgtggacgaggactaccacctgaccgaggtggacaccatggtgttcgtgagacagatctgcgacggcatcctgttcatgcacaagatgagagtgctgcacctggacctgaagcccgagaacatcctgtgcgtgaacaccaccggccacctggtgaagatcatcgacttcggcctggccagaagatacaaccccaacgagaagctgaaggtgaacttcggcacccccgagttcctgagccccgaggtggtgaactacgaccagatcagcgacaagaccgacatgtggagcatgggcgtgatcacctacatgctgctgagcggcctgagccccttcctgggcgacgacgacaccgagaccctgaacaacgtgctgagcggcaactggtacttcgacgaggagaccttcgaggccgtgagcgacgaggccaaggacttcgtgagcaacctgatcgtgaaggaccagagagccagaatgaacgccgcccagtgcctggcccacccctggctgaacaacctggccgagaaggccaagagatgcaacagaagactgaagagccagatcctgctgaagaagtacctgatgaagagaagatggaagaagaacttcatcgccgtgagcgccgccaacagattcaagaagatcagcagcagcggcgccctgatggccctgggcgtgtag

SEQ ID NO: 90019 - DNA, 1791 bp, synthetic construct; identical to SEQ ID NO: 90018
  misc_feature 1..1791: note = Description of Artificial Sequence: Synthetic coding sequence
  source 1..1791: mol_type = other DNA

SEQ ID NO: 90020 - DNA, 2460 bp, synthetic construct
  misc_feature 1..2460: note = Description of Artificial Sequence: Synthetic coding sequence
  source 1..2460: mol_type = other DNA
atgagcggcaccagcaaggagagcctgggccacggcggcctgcccggcctgggcaagacctgcctgaccaccatggacaccaagctgaacatgctgaacgagaaggtggaccagctgctgcacttccaggaggacgtgaccgagaagctgcagagcatgtgcagagacatgggccacctggagagaggcctgcacagactggaggccagcagagcccccggccccggcggcgccgacggcgtgccccacatcgacacccaggccggctggcccgaggtgctggagctggtgagagccatgcagcaggacgccgcccagcacggcgccagactggaggccctgttcagaatggtggccgccgtggacagagccatcgccctggtgggcgccaccttccagaagagcaaggtggccgacttcctgatgcagggcagagtgccctggagaagaggcagccccggcgacagccccgaggagaacaaggagagagtggaggaggagggcggcaagcccaagcacgtgctgagcaccagcggcgtgcagagcgacgccagagagcccggcgaggagagccagaaggccgacgtgctggagggcaccgccgagagactgccccccatcagagccagcggcctgggcgccgaccccgcccaggccgtggtgagccccggccagggcgacggcgtgcccggccccgcccaggccttccccggccacctgcccctgcccaccaaggtggaggccaaggcccccgagacccccagcgagaacctgagaaccggcctggagctggcccccgcccccggcagagtgaacgtggtgagccccagcctggaggtggcccccggcgccggccagggcgccagcagcagcagacccgaccccgagcccctggaggagggcaccagactgacccccggccccggcccccagtgccccggcccccccggcctgcccgcccaggccagagccacccacagcggcggcgagaccccccccagaatcagcatccacatccaggagatggacacccccggcgagatgctgatgaccggcagaggcagcctgggccccaccctgaccaccgaggcccccgccgccgcccagcccggcaagcagggcccccccggcaccggcagatgcctgcaggcccccggcaccgagcccggcgagcagacccccgagggcgccagagagctgagccccctgcaggagagcagcagccccggcggcgtgaaggccgaggaggagcagagagccggcgccgagcccggcaccagacccagcctggccagaagcgacgacaacgaccacgaggtgggcgccctgggcctgcagcagggcaagagccccggcgccggcaaccccgagcccgagcaggactgcgccgccagagcccccgtgagagccgaggccgtgagaagaatgccccccggcgccgaggccggcagcgtggtgctggacgacagccccgccccccccgcccccttcgagcacagagtggtgagcgtgaaggagaccagcatcagcgccggctacgaggtgtgccagcacgaggtgctgggcggcggcagattcggccaggtgcacagatgcaccgagaagagcaccggcctgcccctggccgccaagatcatcaaggtgaagagcgccaaggacagagaggacgtgaagaacgagatcaacatcatgaaccagctgagccacgtgaacctgatccagctgtacgacgccttcgagagcaagcacagctgcaccctggtgatggagtacgtggacggcggcgagctgttcgacagaatcaccgacgagaagtaccacctgaccgagctggacgtggtgctgttcaccagacagatctgcgagggcgtgcactacctgcaccagcactacatcctgcacctggacctgaagcccgagaacatcctgtgcgtgaaccagaccggccaccagatcaagatcatcgacttcggcctggccagaagatacaagcccagagagaagctgaaggtgaacttcggcacccccgagttcctggcccccgaggtggtgaactacgagttcgtgagcttccccaccgacatgtggagcgtgggcgtgatcacctacatgctgctgagcggcctgagccccttcctgggcgagaccgacgccgagaccatgaacttcatcgtgaactgcagctgggacttcgacgccgacaccttcgagggcctgagcgaggaggccaaggacttcgtgagcagactgctggtgaaggagaagagctgcagaatgagcgccacccagtgcctgaagcacgagtggctgaacaacctgcccgccaaggccagcagaagcaagaccagactgaagagccagctgctgctgcagaagtacatcgcccagagaaagtggaagaagcacttctacgtggtgaccgccgccaacagactgagaaagttccccaccagcccctag

SEQ ID NO: 90021 - DNA, 1437 bp, synthetic construct
  misc_feature 1..1437: note = Description of Artificial Sequence: Synthetic coding sequence
  source 1..1437: mol_type = other DNA
atggacacccccggcgagatgctgatgaccggcagaggcagcctgggccccaccctgaccaccgaggcccccgccgccgcccagcccggcaagcagggcccccccggcaccggcagatgcctgcaggcccccggcaccgagcccggcgagcagacccccgagggcgccagagagctgagccccctgcaggagagcagcagccccggcggcgtgaaggccgaggaggagcagagagccggcgccgagcccggcaccagacccagcctggccagaagcgacgacaacgaccacgaggtgggcgccctgggcctgcagcagggcaagagccccggcgccggcaaccccgagcccgagcaggactgcgccgccagagcccccgtgagagccgaggccgtgagaagaatgccccccggcgccgaggccggcagcgtggtgctggacgacagccccgccccccccgcccccttcgagcacagagtggtgagcgtgaaggagaccagcatcagcgccggctacgaggtgtgccagcacgaggtgctgggcggcggcagattcggccaggtgcacagatgcaccgagaagagcaccggcctgcccctggccgccaagatcatcaaggtgaagagcgccaaggacagagaggacgtgaagaacgagatcaacatcatgaaccagctgagccacgtgaacctgatccagctgtacgacgccttcgagagcaagcacagctgcaccctggtgatggagtacgtggacggcggcgagctgttcgacagaatcaccgacgagaagtaccacctgaccgagctggacgtggtgctgttcaccagacagatctgcgagggcgtgcactacctgcaccagcactacatcctgcacctggacctgaagcccgagaacatcctgtgcgtgaaccagaccggccaccagatcaagatcatcgacttcggcctggccagaagatacaagcccagagagaagctgaaggtgaacttcggcacccccgagttcctggcccccgaggtggtgaactacgagttcgtgagcttccccaccgacatgtggagcgtgggcgtgatcacctacatgctgctgagcggcctgagccccttcctgggcgagaccgacgccgagaccatgaacttcatcgtgaactgcagctgggacttcgacgccgacaccttcgagggcctgagcgaggaggccaaggacttcgtgagcagactgctggtgaaggagaagagctgcagaatgagcgccacccagtgcctgaagcacgagtggctgaacaacctgcccgccaaggccagcagaagcaagaccagactgaagagccagctgctgctgcagaagtacatcgcccagagaaagtggaagaagcacttctacgtggtgaccgccgccaacagactgagaaagttccccaccagcccctag

SEQ ID NO: 90022 - DNA, 4212 bp, synthetic construct
  misc_feature 1..4212: note = Description of Artificial Sequence: Synthetic coding sequence
  source 1..4212: mol_type = other DNA
tgactgctgctggagagctgcgagaaggagaagcaggccctgctgcagaacctgaaggaggtggaggacaaggccagcgcctacgaggaccagctgcagggccaggcccagcaggtggagaccctgcagaaggagaagctgagcgccaccttcgagggcagcgagcaggtgcaccagctggaggagcagctggaggccagagaggccagcgtgagaagactggccgagcacgtgcagagcctgtgcgacgagagagacctgctgagacagagattccaggagctgaccgagagagtggccaccagcgacgaggacgtggccgagctgagagagaagctgagaagaagagaggccgacaaccagagcctggagcacagctaccagagagtgagcagccagctgcagagcatgcacaccctgctgagagagaaggaggaggagctggagagaatcaaggaggcccacgagaaggtgctggagaagaaggagcaggacctgaacgaggccctggtgaagatggtggccctgggcagcagcctggaggagaccgagatcaagctgcaggccaaggaggagatcctgagaaagttcgccagcgagagccccaaggacatggaggagcccagaagcacccccgaggagaccgagagagacggcaccctgctgcccggccagcccgtgcaggccaccagagcccccctgggcctgccccacaccagactggaggacgaggacgaggacctgggcgccccccccggcgaggagtacggcgacggcagccccagcagagaggacagcatggtgccccccaagagcgtggaggtgctggacagagagggccaccagcagggcaccgccaagctggaccagggcgcccccggcgtgaagagacagagaatcagattcagcaccatccagtgccagagatacatccaccccgagggcagcgagaagacctggaccagcagcaccagcagcgacaccagccaggacagaagccccagcgaggagagcatgagcagcgagcccgcccccagcgtgctgcccgccaccggcgacagcgacacctacctgagcatcatccacagcctggagaccaagctgtacgtgaccgaggagaagctgaaggacgtgaccgtgagactggagagccagcagggccagagcagagaggccctgctggccctgcaccaccagtgggccggcaccgaggcccagctgagagagcagctgagagccagcctgctgcaggtgggcgccctggccagccagctggagcaggagagacaggagagagccagaagagtggagggccacgtgggcgagctgggcgacttccaggtgaagaacagccaggccctgatgtgcctggagaactgcagagagcagctgagaagcctgcccagagccagccaggaggacgagcaggacgccagagccgccagcctggccagcgtggagagcgccctggtgagcgccatccaggccctgcagcactggcccgcccccgcccacggcggcgccagagcccagctggagaccggcggcaccgaggagaacggcaagcccgccagcctgcagcagtgcagccagagcgagctgaccgagcaggagcaggtgagactgctgagcgaccagatcgccctggaggccagcctgatcagccagatcgccgacagcctgaagaacaccaccagcgacgtgagcagaatgctgcacgagatcagctggagcggccagccccccatggagagcgccggcgcccccgtggacacctgggccagaaaggtgctggtggacggcgagttctggagccaggtggagagcctgagaaagcacctgggcaccctgggcggcgaggccgtgggcgccagcggcgacggccagcagagcatcccccagggcctggcccccatcctggccaacgccacctgggtgagagccgagctgagcttcgccacccagagcgtgagagagagcttccacagaagactgcagagcatccaggagaccctgagaggcacccagaccgccctgagacagcacaagtgcctgctgagagagatcctgggcgcctaccagacccccgacttcgagagagtgatgcagcaggtgctggaggccctgagactgcccgccggccacgaggacggcgtgcagctgagctgggacctgagccccctgggcgaggtgctgggcagagacagcgacagcagccaggagcccttcgacgtgagcgaccagagccccggcgccttcgtggccatccaggaggagctggcccagcagctgaaggagaaggccagcctgctggaggagatcgccgccgccctgcccagcctgccccccgtggagagcctgagagactgccagaagctgctgcaggtgagccagagcctgagctacaacacctgcctgggcggcctgggccagtacagcagcctgctggtgcaggacgccatcatccaggcccaggtgtgctacgccagctgcagaatcagactggagtacgagaaggagctgcagctgtgcaaggagagctggcagaccagagagcccagctgcagcgagcaggcccaggccgccagagccctgagagaggagtacgaggagctgctgagaaagcagaagagcgagtacctggacgtgatcgccatcgtggagagagagaacgccgagctgaaggccaaggccgcccagctggaccaccagcagcagtgcctggaggacgccgagagcaagcacagcatgagcatgttcaccctgagaggcagatacgaggaggagatcagatgcgtggtggagcagctgaccagaaccgagagcaccctgcaggccgagagaagcagagtgctgagccagctggacgccagcgtgagagacagacaggacatggagagacaccacggcgagcagatccagaccctggaggacagattccagctgaaggtgagagagctgcagaccatccacgaggaggagctgagaaccctgcaggagcactacagccagagcctgagatgcctgcaggacaccctgtgcctgcaccagggcccccaccccaaggccctgcccgcccccgcccccaactggcaggccacccagggcgaggccgacagcatgaccggcctgagagagagaatccaggagctggaggcccagatggacgtgatgagagaggagctgggccacaaggacctggagggcgacgccgccaccctgagagagaagtaccagagagacctggagagcctgaaggccacctgcgagagaggcttcgccgccatggaggagacccaccagaagaagatcgaggacctgcagagacagcaccagagagagctggagaagctgagagaggagaaggacagactgctggccgaggagaccgccgccaccatcagcgccatcgaggccatgaagaacgcccacagagaggagatggagagagagctggagaagagccagagaagccagatcagcagcgtgaacagcgacgtggaggccctgagaagacagtacctggaggagctgcagagcgtgcagagagagctggaggtgctgagcgagcagtacagccagaagtgcctggagaacgcccacctggcccaggccctggaggccgagagacaggccctgagacagtgccagagagagaaccaggagctgaacgcccacaaccaggagctgaacaacagactggccgccgagatcaccagactgagaaccctgctgaccggcgacggcggcggcgaggccaccggcagccccctggcccagggcaaggacgcctacgagctggaggtgctgctgagagtgaaggagagcgagatccagtacctgaagcaggagatcagcagcctgaaggacgagctgcagaccgccctgagagacaagaagtacgccagcgacaagtacaaggacatctacaccgagctgagcatcgccaaggccaaggccgactgcgacatcagcagactgaaggagcagctgaaggccgccaccgaggccctgggcgagaagagccccgacagcgccaccgtgagcggctacgacatcatgaagagcaagagcaaccccgacttcctgaagaaggacagaagctgcgtgaccagacagctgagaaacatcagaagcaagagcctgaaggagggcctgaccgtgcaggagagactgaagctgttcgagagcagagacctgaagaaggactag

SEQ ID NO: 90023 - DNA, 3078 bp, synthetic construct
  misc_feature 1..3078: note = Description of Artificial Sequence: Synthetic coding sequence
  source 1..3078: mol_type = other DNA
atgagcgccgccaaggagaacccctgcagaaagttccaggccaacatcttcaacaagagcaagtgccagaactgcttcaagcccagagagagccacctgctgaacgacgaggacctgacccaggccaagcccatctacggcggctggctgctgctggcccccgacggcaccgacttcgacaaccccgtgcacagaagcagaaagtggcagagaagattcttcatcctgtacgagcacggcctgctgagatacgccctggacgagatgcccaccaccctgccccagggcaccatcaacatgaaccagtgcaccgacgtggtggacggcgagggcagaaccggccagaagttcagcctgtgcatcctgacccccgagaaggagcacttcatcagagccgagaccaaggagatcgtgagcggctggctggagatgctgatggtgtaccccagaaccaacaagcagaaccagaagaagaagagaaaggtggagccccccaccccccaggagcccggccccgccaaggtggccgtgaccagcagcagcagcagcagcagcagcagcagcagcatccccagcgccgagaaggtgcccaccaccaagagcaccctgtggcaggaggagatgagaaccaaggaccagcccgacggcagcagcctgagccccgcccagagccccagccagagccagccccccgccgccagcagcctgagagagcccggcctggagagcaaggaggaggagagcgccatgagcagcgacagaatggactgcggcagaaaggtgagagtggagagcggctacttcagcctggagaagaccaagcaggacctgaaggccgaggagcagcagctgcccccccccctgagcccccccagccccagcacccccaaccacagaagaagccaggtgatcgagaagttcgaggccctggacatcgagaaggccgagcacatggagaccaacgccgtgggccccagccccagcagcgacaccagacagggcagaagcgagaagagagccttccccagaaagagagacttcaccaacgaggccccccccgcccccctgcccgacgccagcgccagccccctgagcccccacagaagagccaagagcctggacagaagaagcaccgagcccagcgtgacccccgacctgctgaacttcaagaagggctggctgaccaagcagtacgaggacggccagtggaagaagcactggttcgtgctggccgaccagagcctgagatactacagagacagcgtggccgaggaggccgccgacctggacggcgagatcgacctgagcgcctgctacgacgtgaccgagtaccccgtgcagagaaactacggcttccagatccacaccaaggagggcgagttcaccctgagcgccatgaccagcggcatcagaagaaactggatccagaccatcatgaagcacgtgcaccccaccaccgcccccgacgtgaccagcagcctgcccgaggagaagaacaagagcagctgcagcttcgagacctgccccagacccaccgagaagcaggaggccgagctgggcgagcccgaccccgagcagaagagaagcagagccagagagagaagaagagagggcagaagcaagaccttcgactgggccgagttcagacccatccagcaggccctggcccaggagagagtgggcggcgtgggccccgccgacacccacgagcccctgagacccgaggccgagcccggcgagctggagagagagagagccagaagaagagaggagagaagaaagagattcggcatgctggacgccaccgacggccccggcaccgaggacgccgccctgagaatggaggtggacagaagccccggcctgcccatgagcgacctgaagacccacaacgtgcacgtggagatcgagcagagatggcaccaggtggagaccacccccctgagagaggagaagcaggtgcccatcgcccccgtgcacctgagcagcgaggacggcggcgacagactgagcacccacgagctgaccagcctgctggagaaggagctggagcagagccagaaggaggccagcgacctgctggagcagaacagactgctgcaggaccagctgagagtggccctgggcagagagcagagcgccagagagggctacgtgctgcaggccacctgcgagagaggcttcgccgccatggaggagacccaccagaagaagatcgaggacctgcagagacagcaccagagagagctggagaagctgagagaggagaaggacagactgctggccgaggagaccgccgccaccatcagcgccatcgaggccatgaagaacgcccacagagaggagatggagagagagctggagaagagccagagaagccagatcagcagcgtgaacagcgacgtggaggccctgagaagacagtacctggaggagctgcagagcgtgcagagagagctggaggtgctgagcgagcagtacagccagaagtgcctggagaacgcccacctggcccaggccctggaggccgagagacaggccctgagacagtgccagagagagaaccaggagctgaacgcccacaaccaggagctgaacaacagactggccgccgagatcaccagactgagaaccctgctgaccggcgacggcggcggcgaggccaccggcagccccctggcccagggcaaggacgcctacgagctggaggtgctgctgagagtgaaggagagcgagatccagtacctgaagcaggagatcagcagcctgaaggacgagctgcagaccgccctgagagacaagaagtacgccagcgacaagtacaaggacatctacaccgagctgagcatcgccaaggccaaggccgactgcgacatcagcagactgaaggagcagctgaaggccgccaccgaggccctgggcgagaagagccccgacagcgccaccgtgagcggctacgacatcatgaagagcaagagcaaccccgacttcctgaagaaggacagaagctgcgtgaccagacagctgagaaacatcagaagcaagagcgtgatcgagcaggtgagctgggacacctag

SEQ ID NO: 90024 - DNA, 3078 bp, synthetic construct; identical to SEQ ID NO: 90023
  misc_feature 1..3078: note = Description of Artificial Sequence: Synthetic coding sequence
  source 1..3078: mol_type = other DNA

SEQ ID NO: 90025 - DNA, 192 bp, synthetic construct
  misc_feature 1..192: note = Description of Artificial Sequence: Synthetic coding sequence
  source 1..192: mol_type = other DNA
atgagcgccgccaaggagaacccctgcagaaagttccaggccaacatcttcaacaagagcaagtgccagaactgcttcaagcccagagagagccacctgctgaacgacgaggacctgacccagcagaacacccaccccctggagatgaagagaggcgcccacatctacgacgccagaatgttcagctgctag

SEQ ID NO: 90026 - DNA, 282 bp, synthetic construct
  misc_feature 1..282: note = Description of Artificial Sequence: Synthetic coding sequence
  source 1..282: mol_type = other DNA
atgagcgccgccaaggagaacccctgcagaaagttccaggccaacatcttcaacaagagcaagtgccagaactgcttcaagcccagagagagccacctgctgaacgacgaggacctgacccaggccaagcccatctacggcggctggctgctgctggcccccgacggcaccgacttcgacaaccccgtgcacagaagcagaaagtggcagagaagattcttcatcctgtacgagcacggcctgctgagatacgccctggacgagatgatgagcagccagtag

SEQ ID NO: 90027 - DNA, 3117 bp, synthetic construct
  misc_feature 1..3117: note = Description of Artificial Sequence: Synthetic coding sequence
  source 1..3117: mol_type = other DNA
atgagcgccgccaaggagaacccctgcagaaagttccaggccaacatcttcaacaagagcaagtgccagaactgcttcaagcccagagagagccacctgctgaacgacgaggacctgacccaggccaagcccatctacggcggctggctgctgctggcccccgacggcaccgacttcgacaaccccgtgcacagaagcagaaagtggcagagaagattcttcatcctgtacgagcacggcctgctgagatacgccctggacgagatgcccaccaccctgccccagggcaccatcaacatgaaccagtgcaccgacgtggtggacggcgagggcagaaccggccagaagttcagcctgtgcatcctgacccccgagaaggagcacttcatcagagccgagaccaaggagatcgtgagcggctggctggagatgctgatggtgtaccccagaaccaacaagcagaaccagaagaagaagagaaaggtggagccccccaccccccaggagcccggccccgccaaggtggccgtgaccagcagcagcagcagcagcagcagcagcagcagcatccccagcgccgagaaggtgcccaccaccaagagcaccctgtggcaggaggagatgagaaccaaggaccagcccgacggcagcagcctgagccccgcccagagccccagccagagccagccccccgccgccagcagcctgagagagcccggcctggagagcaaggaggaggagagcgccatgagcagcgacagaatggactgcggcagaaaggtgagagtggagagcggctacttcagcctggagaagaccaagcaggacctgaaggccgaggagcagcagctgcccccccccctgagcccccccagccccagcacccccaaccacagaagaagccaggtgatcgagaagttcgaggccctggacatcgagaaggccgagcacatggagaccaacgccgtgggccccagccccagcagcgacaccagacagggcagaagcgagaagagagccttccccagaaagagagacttcaccaacgaggccccccccgcccccctgcccgacgccagcgccagccccctgagcccccacagaagagccaagagcctggacagaagaagcaccgagcccagcgtgacccccgacctgctgaacttcaagaagggctggctgaccaagcagtacgaggacggccagtggaagaagcactggttcgtgctggccgaccagagcctgagatactacagagacagcgtggccgaggaggccgccgacctggacggcgagatcgacctgagcgcctgctacgacgtgaccgagtaccccgtgcagagaaactacggcttccagatccacaccaaggagggcgagttcaccctgagcgccatgaccagcggcatcagaagaaactggatccagaccatcatgaagcacgtgcaccccaccaccgcccccgacgtgaccagcagcctgcccgaggagaagaacaagagcagctgcagcttcgagacctgccccagacccaccgagaagcaggaggccgagctgggcgagcccgaccccgagcagaagagaagcagagccagagagagaagaagagagggcagaagcaagaccttcgactgggccgagttcagacccatccagcaggccctggcccaggagagagtgggcggcgtgggccccgccgacacccacgagcccctgagacccgaggccgagcccggcgagctggagagagagagagccagaagaagagaggagagaagaaagagattcggcatgctggacgccaccgacggccccggcaccgaggacgccgccctgagaatggaggtggacagaagccccggcctgcccatgagcgacctgaagacccacaacgtgcacgtggagatcgagcagagatggcaccaggtggagaccacccccctgagagaggagaagcaggtgcccatcgcccccgtgcacctgagcagcgaggacggcggcgacagactgagcacccacgagctgaccagcctgctggagaaggagctggagcagagccagaaggaggccagcgacctgctggagcagaacagactgctgcaggaccagctgagagtggccctgggcagagagcagagcgccagagagggctacgtgctgcaggccacctgcgagagaggcttcgccgccatggaggagacccaccagaagaagatcgaggacctgcagagacagcaccagagagagctggagaagctgagagaggagaaggacagactgctggccgaggagaccgccgccaccatcagcgccatcgaggccatgaagaacgcccacagagaggagatggagagagagctggagaagagccagagaagccagatcagcagcgtgaacagcgacgtggaggccctgagaagacagtacctggaggagctgcagagcgtgcagagagagctggaggtgctgagcgagcagtacagccagaagtgcctggagaacgcccacctggcccaggccctggaggccgagagacaggccctgagacagtgccagagagagaaccaggagctgaacgcccacaaccaggagctgaacaacagactggccgccgagatcaccagactgagaaccctgctgaccggcgacggcggcggcgaggccaccggcagccccctggcccagggcaaggacgcctacgagctggaggtgctgctgagagtgaaggagagcgagatccagtacctgaagcaggagatcagcagcctgaaggacgagctgcagaccgccctgagagacaagaagtacgccagcgacaagtacaaggacatctacaccgagctgagcatcgccaaggccaaggccgactgcgacatcagcagactgaaggagcagctgaaggccgccaccgaggccctgggcgagaagagccccgacagcgccaccgtgagcggctacgacatcatgaagagcaagagcaaccccgacttcctgaagaaggacagaagctgcgtgaccagacagctgagaaacatcagaagcaagagcctgaaggagggcctgaccgtgcaggagagactgaagctgttcgagagcagagacctgaagaaggactag

SEQ ID NO: 90028 - DNA, 3276 bp, synthetic construct
  misc_feature 1..3276: note = Description of Artificial Sequence: Synthetic coding sequence
  source 1..3276: mol_type = other DNA
tgaagattcagcaccatccagtgccagagatacatccaccccgagggcagcgagaagacctggaccagcagcaccagcagcgacaccagccaggacagaagccccagcgaggagagcatgagcagcgagcccgcccccagcgtgctgcccgccaccggcgacagcgacacctacctgagcatcatccacagcctggagaccaagctgtacgtgaccgaggagaagctgaaggacgtgaccgtgagactggagagccagcagggccagagcagagaggccctgctggccctgcaccaccagtgggccggcaccgaggcccagctgagagagcagctgagagccagcctgctgcaggtgggcgccctggccagccagctggagcaggagagacaggagagagccagaagagtggagggccacgtgggcgagctgggcgacttccaggtgaagaacagccaggccctgatgtgcctggagaactgcagagagcagctgagaagcctgcccagagccagccaggaggacgagcaggacgccagagccgccagcctggccagcgtggagagcgccctggtgagcgccatccaggccctgcagcactggcccgcccccgcccacggcggcgccagagcccagctggagaccggcggcaccgaggagaacggcaagcccgccagcctgcagcagtgcagccagagcgagctgaccgagcaggagcaggtgagactgctgagcgaccagatcgccctggaggccagcctgatcagccagatcgccgacagcctgaagaacaccaccagcgacgtgagcagaatgctgcacgagatcagctggagcggccagccccccatggagagcgccggcgcccccgtggacacctgggccagaaaggtgctggtggacggcgagttctggagccaggtggagagcctgagaaagcacctgggcaccctgggcggcgaggccgtgggcgccagcggcgacggccagcagagcatcccccagggcctggcccccatcctggccaacgccacctgggtgagagccgagctgagcttcgccacccagagcgtgagagagagcttccacagaagactgcagagcatccaggagaccctgagaggcacccagaccgccctgagacagcacaagtgcctgctgagagagatcctgggcgcctaccagacccccgacttcgagagagtgatgcagcaggtgctggaggccctgagactgcccgccggccacgaggacggcgtgcagctgagctgggacctgagccccctgggcgaggtgctgggcagagacagcgacagcagccaggagcccttcgacgtgagcgaccagagccccggcgccttcgtggccatccaggaggagctggcccagcagctgaaggagaaggccagcctgctggaggagatcgccgccgccctgcccagcctgccccccgtggagagcctgagagactgccagaagctgctgcaggtgagccagagcctgagctacaacacctgcctgggcggcctgggccagtacagcagcctgctggtgcaggacgccatcatccaggcccaggtgtgctacgccagctgcagaatcagactggagtacgagaaggagctgcagctgtgcaaggagagctggcagaccagagagcccagctgcagcgagcaggcccaggccgccagagccctgagagaggagtacgaggagctgctgagaaagcagaagagcgagtacctggacgtgatcgccatcgtggagagagagaacgccgagctgaaggccaaggccgcccagctggaccaccagcagcagtgcctggaggacgccgagagcaagcacagcatgagcatgttcaccctgagaggcagatacgaggaggagatcagatgcgtggtggagcagctgaccagaaccgagagcaccctgcaggccgagagaagcagagtgctgagccagctggacgccagcgtgagagacagacaggacatggagagacaccacggcgagcagatccagaccctggaggacagattccagctgaaggtgagagagctgcagaccatccacgaggaggagctgagaaccctgcaggagcactacagccagagcctgagatgcctgcaggacaccctgtgcctgcaccagggcccccaccccaaggccctgcccgcccccgcccccaactggcaggccacccagggcgaggccgacagcatgaccggcctgagagagagaatccaggagctggaggcccagatggacgtgatgagagaggagctgggccacaaggacctggagggcgacgccgccaccctgagagagaagtaccagagagacctggagagcctgaaggccacctgcgagagaggcttcgccgccatggaggagacccaccagaagaagatcgaggacctgcagagacagcaccagagagagctggagaagctgagagaggagaaggacagactgctggccgaggagaccgccgccaccatcagcgccatcgaggccatgaagaacgcccacagagaggagatggagagagagctggagaagagccagagaagccagatcagcagcgtgaacagcgacgtggaggccctgagaagacagtacctggaggagctgcagagcgtgcagagagagctggaggtgctgagcgagcagtacagccagaagtgcctggagaacgcccacctggcccaggccctggaggccgagagacaggccctgagacagtgccagagagagaaccaggagctgaacgcccacaaccaggagctgaacaacagactggccgccgagatcaccagactgagaaccctgctgaccggcgacggcggcggcgaggccaccggcagccccctggcccagggcaaggacgcctacgagctggaggtgctgctgagagtgaaggagagcgagatccagtacctgaagcaggagatcagcagcctgaaggacgagctgcagaccgccctgagagacaagaagtacgccagcgacaagtacaaggacatctacaccgagctgagcatcgccaaggccaaggccgactgcgacatcagcagactgaaggagcagctgaaggccgccaccgaggccctgggcgagaagagccccgacagcgccaccgtgagcggctacgacatcatgaagagcaagagcaaccccgacttcctgaagaaggacagaagctgcgtgaccagacagctgagaaacatcagaagcaagagcgtgatcgagcaggtgagctgggacacctag

SEQ ID NO: 90029 - DNA, 840 bp, synthetic construct
  misc_feature 1..840: note = Description of Artificial Sequence: Synthetic coding sequence
  source 1..840: mol_type = other DNA
tgacaggaggccgagctgggcgagcccgaccccgagcagaagagaagcagagccagagagagaagaagagagggcagaagcaagaccttcgactgggccgagttcagacccatccagcaggccctggcccaggagagagtgggcggcgtgggccccgccgacacccacgagcccctgagacccgaggccgagcccggcgagctggagagagagagagccagaagaagagaggagagaagaaagagattcggcatgctggacgccaccgacggccccggcaccgaggacgccgccctgagaatggaggtggacagaagccccggcctgcccatgagcgacctgaagacccacaacgtgcacgtggagatcgagcagagatggcaccaggtggagaccacccccctgagagaggagaagcaggtgcccatcgcccccgtgcacctgagcagcgaggacggcggcgacagactgagcacccacgagctgaccagcctgctggagaaggagctggagcagagccagaaggaggccagcgacctgctggagcagaacagactgctgcaggaccagctgagagtggccctgggcagagagcagagcgccagagagggctacgtgctgcagaccgaggtggccgccagccccagcggcgcctggcagagactgcacagagtgaaccaggacctgcagagcgagctggaggcccagtgccagagacaggagctgatcacccaccagatccagaccctgaagagaagctacggcgaggccaaggacaccatcagacaccacgaggccgagatcagaagcctgcaggccagactgagcaacgccgcctag

SEQ ID NO: 90030 - DNA, 585 bp, synthetic construct
  misc_feature 1..585: note = Description of Artificial Sequence: Synthetic coding sequence
  source 1..585: mol_type = other DNA
ctgagacagcagaccgtggaggagctgcagagcgtgcagagagagctggaggtgctgagcgagcagtacagccagaagtgcctggagaacgcccacctggcccaggccctggaggccgagagacaggccctgagacagtgccagagagagaaccaggagctgaacgcccacaaccaggtgctgctgagagtgaaggagagcgagatccagtacctgaagcaggagatcagcagcctgaaggacgagctgcagaccgccctgagagacaagaagtacgccagcgacaagtacaaggacatctacaccgagctgagcatcgccaaggccaaggccgactgcgacatcagcagactgaaggagcagctgaaggccgccaccgaggccctgggcgagaagagccccgacagcgccaccgtgagcggctacgacatcatgaagagcaagagcaaccccgacttcctgaagaaggacagaagctgcgtgaccagacagctgagaaacatcagaagcaagagcctgaaggagggcctgaccgtgcaggagagactgaagctgttcgagagcagagacctgaagaaggactag

SEQ ID NO: 90031 - DNA, 3003 bp, synthetic construct
  misc_feature 1..3003: note = Description of Artificial Sequence: Synthetic coding sequence
  source 1..3003: mol_type = other DNA
atgagcgccgccaaggagaacccctgcagaaagttccaggccaacatcttcaacaagagcaagtgccagaactgcttcaagcccagagagagccacctgctgaacgacgaggacctgacccaggccaagcccatctacggcggctggctgctgctggcccccgacggcaccgacttcgacaaccccgtgcacagaagcagaaagtggcagagaagattcttcatcctgtacgagcacggcctgctgagatacgccctggacgagatgcccaccaccctgccccagggcaccatcaacatgaaccagtgcaccgacgtggtggacggcgagggcagaaccggccagaagttcagcctgtgcatcctgacccccgagaaggagcacttcatcagagccgagaccaaggagatcgtgagcggctggctggagatgctgatggtgtaccccagaaccaacaagcagaaccagaagaagaagagaaaggtggagccccccaccccccaggagcccggccccgccaaggtggccgtgaccagcagcagcagcagcagcagcagcagcagcagcatccccagcgccgagaaggtgcccaccaccaagagcaccctgtggcaggaggagatgagaaccaaggaccagcccgacggcagcagcctgagccccgcccagagccccagccagagccagccccccgccgccagcagcctgagagagcccggcctggagagcaaggaggaggagagcgccatgagcagcgacagaatggactgcggcagaaaggtgagagtggagagcggctacttcagcctggagaagaccaagcaggacctgaaggccgaggagcagcagctgcccccccccctgagcccccccagccccagcacccccaaccacagaagaagccaggtgatcgagaagttcgaggccctggacatcgagaaggccgagcacatggagaccaacgccgtgggccccagccccagcagcgacaccagacagggcagaagcgagaagagagccttccccagaaagagacccgacctgctgaacttcaagaagggctggctgaccaagcagtacgaggacggccagtggaagaagcactggttcgtgctggccgaccagagcctgagatactacagagacagcgtggccgaggaggccgccgacctggacggcgagatcgacctgagcgcctgctacgacgtgaccgagtaccccgtgcagagaaactacggcttccagatccacaccaaggagggcgagttcaccctgagcgccatgaccagcggcatcagaagaaactggatccagaccatcatgaagcacgtgcaccccaccaccgcccccgacgtgaccagcagcctgcccgaggagaagaacaagagcagctgcagcttcgagacctgccccagacccaccgagaagcaggaggccgagctgggcgagcccgaccccgagcagaagagaagcagagccagagagagaagaagagagggcagaagcaagaccttcgactgggccgagttcagacccatccagcaggccctggcccaggagagagtgggcggcgtgggccccgccgacacccacgagcccctgagacccgaggccgagcccggcgagctggagagagagagagccagaagaagagaggagagaagaaagagattcggcatgctggacgccaccgacggccccggcaccgaggacgccgccctgagaatggaggtggacagaagccccggcctgcccatgagcgacctgaagacccacaacgtgcacgtggagatcgagcagagatggcaccaggtggagaccacccccctgagagaggagaagcaggtgcccatcgcccccgtgcacctgagcagcgaggacggcggcgacagactgagcacccacgagctgaccagcctgctggagaaggagctggagcagagccagaaggaggccagcgacctgctggagcagaacagactgctgcaggaccagctgagagtggccctgggcagagagcagagcgccagagagggctacgtgctgcaggccacctgcgagagaggcttcgccgccatggaggagacccaccagaagaagatcgaggacctgcagagacagcaccagagagagctggagaagctgagagaggagaaggacagactgctggccgaggagaccgccgccaccatcagcgccatcgaggccatgaagaacgcccacagagaggagatggagagagagctggagaagagccagagaagccagatcagcagcgtgaacagcgacgtggaggccctgagaagacagtacctggaggagctgcagagcgtgcagagagagctggaggtgctgagcgagcagtacagccagaagtgcctggagaacgcccacctggcccaggccctggaggccgagagacaggccctgagacagtgccagagagagaaccaggagctgaacgcccacaaccaggagctgaacaacagactggccgccgagatcaccagactgagaaccctgctgaccggcgacggcggcggcgaggccaccggcagccccctggcccagggcaaggacgcctacgagctggaggtgctgctgagagtgaaggagagcgagatccagtacctgaagcaggagatcagcagcctgaaggacgagctgcagaccgccctgagagacaagaagtacgccagcgacaagtacaaggacatctacaccgagctgagcatcgccaaggccaaggccgactgcgacatcagcagactgaaggagcagctgaaggccgccaccgaggccctgggcgagaagagccccgacagcgccaccgtgagcggctacgacatcatgaagagcaagagcaaccccgacttcctgaagaaggacagaagctgcgtgaccagacagctgagaaacatcagaagcaagagcctgaaggagggcctgaccgtgcaggagagactgaagctgttcgagagcagagacctgaagaaggactag

SEQ ID NO: 90032 - DNA, 795 bp, synthetic construct
  misc_feature 1..795: note = Description of Artificial Sequence: Synthetic coding sequence
  source 1..795: mol_type = other DNA
atggagaactacggcatcgagtggcacagcgtgagagacagcgagggccagaagctgctgatcggcgtgggccccgagggcatcagcatctgcaaggacgacttcagccccatcaacagaatcgcctaccccgtggtgcagatggccacccagagcggcaagaacgtgtacctgaccgtgaccaaggagagcggcaacagcatcgtgctgctgttcaagatgatcagcaccagagccgccagcggcctgtacagagccatcaccgagacccacgccttctacagatgcgacaccgtgaccagcgccgtgatgatgcagtacagcagagacctgaagggccacctggccagcctgttcctgaacgagaacatcaacctgggcaagaagtacgtgttcgacatcaagagaaccagcaaggaggtgtacgaccacgccagaagagccctgtacaacgccggcgtggtggacctggtgagcagaaacaaccagagccccagccacagccccctgaagagcagcgagagcagcatgaactgcagcagctgcgagggcctgagctgccagcagaccagagtgctgcaggagaagctgagaaagctgaaggaggccatgctgtgcatggtgtgctgcgaggaggagatcaacagcaccttctgcccctgcggccacaccgtgtgctgcgagagctgcgccgcccagctgcagagctgccccgtgtgcagaagcagagtggagcacgtgcagcacgtgtacctgcccacccacaccagcctgctgaacctgaccgtgatctag

SEQ ID NO: 90033 - DNA, 1338 bp, synthetic construct
  misc_feature 1..1338: note = Description of Artificial Sequence: Synthetic coding sequence
  source 1..1338: mol_type = other DNA
atgctgtgctacgtgaccagacccgacgccgtgctgatggaggtggaggtggaggccaaggccaacggcgaggactgcctgaaccaggtgtgcagaagactgggcatcatcgaggtggactacttcggcctgcagttcaccggcagcaagggcgagagcctgtggctgaacctgagaaacagaatcagccagcagatggacggcctggccccctacagactgaagctgagagtgaagttcttcgtggagccccacctgatcctgcaggagcagaccagacacatcttcttcctgcacatcaaggaggccctgctggccggccacctgctgtgcagccccgagcaggccgtggagctgagcgccctgctggcccagaccaagttcggcgactacaaccagaacaccgccaagtacaactacgaggagctgtgcgccaaggagctgagcagcgccaccctgaacagcatcgtggccaagcacaaggagctggagggcaccagccaggccagcgccgagtaccaggtgctgcagatcgtgagcgccatggagaactacggcatcgagtggcacagcgtgagagacagcgagggccagaagctgctgatcggcgtgggccccgagggcatcagcatctgcaaggacgacttcagccccatcaacagaatcgcctaccccgtggtgcagatggccacccagagcggcaagaacgtgtacctgaccgtgaccaaggagagcggcaacagcatcgtgctgctgttcaagatgatcagcaccagagccgccagcggcctgtacagagccatcaccgagacccacgccttctacagatgcgacaccgtgaccagcgccgtgatgatgcagtacagcagagacctgaagggccacctggccagcctgttcctgaacgagaacatcaacctgggcaagaagtacgtgttcgacatcaagagaaccagcaaggaggtgtacgaccacgccagaagagccctgtacaacgccggcgtggtggacctggtgagcagaaacaaccagagccccagccacagccccctgaagagcagcgagagcagcatgaactgcagcagctgcgagggcctgagctgccagcagaccagagtgctgcaggagaagctgagaaagctgaaggaggccatgctgtgcatggtgtgctgcgaggaggagatcaacagcaccttctgcccctgcggccacaccgtgtgctgcgagagctgcgccgcccagctgcagagctgccccgtgtgcagaagcagagtggagcacgtgcagcacgtgtacctgcccacccacaccagcctgctgaacctgaccgtgatctag

SEQ ID NO: 90034 - DNA, 5487 bp, synthetic construct
  misc_feature 1..5487: note = Description of Artificial Sequence: Synthetic coding sequence
  source 1..5487: mol_type = other DNA
atggccgccagcgagctgtacaccaagttcgccagagtgtggatccccgaccccgaggaggtgtggaagagcgccgagctgctgaaggactacaagcccggcgacaaggtgctgctgctgcacctggaggagggcaaggacctggagtaccacctggaccccaagaccaaggagctgccccacctgagaaaccccgacatcctggtgggcgagaacgacctgaccgccctgagctacctgcacgagcccgccgtgctgcacaacctgagagtgagattcatcgacagcaagctgatctacacctactgcggcatcgtgctggtggccatcaacccctacgagcagctgcccatctacggcgaggacatcatcaacgcctacagcggccagaacatgggcgacatggacccccacatcttcgccgtggccgaggaggcctacaagcagatggccagagacgagagaaaccagagcatcatcgtgagcggcgagagcggcgccggcaagaccgtgagcgccaagtacgccatgagatacttcgccaccgtgagcggcagcgccagcgaggccaacgtggaggagaaggtgctggccagcaaccccatcatggagagcatcggcaacgccaagaccaccagaaacgacaacagcagcagattcggcaagtacatcgagatcggcttcgacaagagatacagaatcatcggcgccaacatgagaacctacctgctggagaagagcagagtggtgttccaggccgaggaggagagaaactaccacatcttctaccagctgtgcgccagcgccaagctgcccgagttcaagatgctgagactgggcaacgccgacaacttcaactacaccaagcagggcggcagccccgtgatcgagggcgtggacgacgccaaggagatggcccacaccagacaggcctgcaccctgctgggcatcagcgagagccaccagatgggcatcttcagaatcctggccggcatcctgcacctgggcaacgtgggcttcaccagcagagacgccgacagctgcaccatcccccccaagcacgagcccctgtgcatcttctgcgagctgatgggcgtggactacgaggagatgtgccactggctgtgccacagaaagctggccaccgccaccgagacctacatcaagcccatcagcaagctgcaggccaccaacgccagagacgccctggccaagcacatctacgccaagctgttcaactggatcgtggacaacgtgaaccaggccctgcacagcgccgtgaagcagcacagcttcatcggcgtgctggacatctacggcttcgagaccttcgagatcaacagcttcgagcagttctgcatcaactacgccaacgagaagctgcagcagcagttcaacatgcacgtgttcaagctggagcaggaggagtacatgaaggagcagatcccctggaccctgatcgacttctacgacaaccagccctgcatcaacctgatcgagagcaagctgggcatcctggacctgctggacgaggagtgcaagatgcccaagggcaccgacgacacctgggcccagaagctgtacaacacccacctgaacaagtgcgccctgttcgagaagcccagactgagcaacaaggccttcatcatccagcacttcgccgacaaggtggagtaccagtgcgagggcttcctggagaagaacaaggacaccgtgttcgaggagcagatcaaggtgctgaagagcagcaagttcaagatgctgcccgagctgttccaggacgacgagaaggccatcagccccaccagcgccaccagcagcggcagaacccccctgaccagaacccccgccaagcccaccaagggcagacccggccagatggccaaggagcacaagaagaccgtgggccaccagttcagaaacagcctgcacctgctgatggagaccctgaacgccaccaccccccactacgtgagatgcatcaagcccaacgacttcaagttccccttcaccttcgacgagaagagagccgtgcagcagctgagagcctgcggcgtgctggagaccatcagaatcagcgccgccggcttccccagcagatggacctaccaggagttcttcagcagatacagagtgctgatgaagcagaaggacgtgctgagcgacagaaagcagacctgcaagaacgtgctggagaagctgatcctggacaaggacaagtaccagttcggcaagaccaagatcttcttcagagccggccaggtggcctacctggagaagctgagagccgacaagctgagagccgcctgcatcagaatccagaagaccatcagaggctggctgctgagaaagaagtacctgagaatgagaaaggccgccatcaccatgcagagatacgtgagaggctaccaggccagatgctacgccaagttcctgagaagaaccaaggccgccaccatcatccagaagtactggagaatgtacgtggtgagaagaagatacaagatcagaagagccgccaccatcgtgctgcagagctacctgagaggcttcctggccagaaacagatacagaaagatcctgagagagcacaaggccgtgatcatccagaagagagtgagaggctggctggccagaacccactacaagagaagcatgcacgccatcatctacctgcagtgctgcttcagaagaatgatggccaagagagagctgaagaagctgaagatcgaggccagaagcgtggagagatacaagaagctgcacatcggcatggagaacaagatcatgcagctgcagagaaaggtggacgagcagaacaaggactacaagtgcctggtggagaagctgaccaacctggagggcatctacaacagcgagaccgagaagctgagaagcgacctggagagactgcagctgagcgaggaggaggccaaggtggccaccggcagagtgctgagcctgcaggaggagatcgccaagctgagaaaggacctggagcagaccagaagcgagaagaagtgcatcgaggagcacgccgacagatacaagcaggagaccgagcagctggtgagcaacctgaaggaggagaacaccctgctgaagcaggagaaggaggccctgaaccacagaatcgtgcagcaggccaaggagatgaccgagaccatggagaagaagctggtggaggagaccaagcagctggagctggacctgaacgacgagagactgagataccagaacctgctgaacgagttcagcagactggaggagagatacgacgacctgaaggaggagatgaccctgatggtgcacgtgcccaagcccggccacaagagaaccgacagcacccacagcagcaacgagagcgagtacatcttcagcagcgagatcgccgagatggaggacatccccagcagaaccgaggagcccagcgagaagaaggtgcccctggacatgagcctgttcctgaagctgcagaagagagtgaccgagctggagcaggagaagcaggtgatgcaggacgagctggacagaaaggaggagcaggtgctgagaagcaaggccaaggaggaggagagaccccagatcagaggcgccgagctggagtacgagagcctgaagagacaggagctggagagcgagaacaagaagctgaagaacgagctgaacgagctgagaaaggccctgagcgagaagagcgcccccgaggtgaccgcccccggcgcccccgcctacagagtgctgatggagcagctgaccagcgtgagcgaggagctggacgtgagaaaggaggaggtgctgatcctgagaagccagctggtgagccagaaggaggccatccagcccaaggacgacaagaacaccatgaccgacagcaccatcctgctggaggacgtgcagaagatgaaggacaagggcgagatcgcccaggcctacatcggcctgaaggagaccaacagactgctggagagccagctgcagagccagaagagaagccacgagaacgaggccgaggccctgagaggcgagatccagagcctgaaggaggagaacaacagacagcagcagctgctggcccagaacctgcagctgccccccgaggccagaatcgaggccagcctgcagcacgagatcaccagactgaccaacgagaacctggacctgatggagcagctggagaagcaggacaagaccgtgagaaagctgaagaagcagctgaaggtgttcgccaagaagatcggcgagctggaggtgggccagatggagaacatcagccccggccagatcatcgacgagcccatcagacccgtgaacatccccagaaaggagaaggacttccagggcatgctggagtacaagaaggaggacgagcagaagctggtgaagaacctgatcctggagctgaagcccagaggcgtggccgtgaacctgatccccggcctgcccgcctacatcctgttcatgtgcgtgagacacgccgactacctgaacgacgaccagaaggtgagaagcctgctgaccagcaccatcaacagcatcaagaaggtgctgaagaagagaggcgacgacttcgagaccgtgagcttctggctgagcaacacctgcagattcctgcactgcctgaagcagtacagcggcgaggagggcttcatgaagcacaacaccagcagacagaacgagcactgcctgaccaacttcgacctggccgagtacagacaggtgctgagcgacctggccatccagatctaccagcagctggtgagagtgctggagaacatcctgcagcccatgatcgtgagcggcatgctggagcacgagaccatccagggcgtgagcggcgtgaagcccaccggcctgagaaagagaaccagcagcatcgccgacgagggcacctacaccctggacagcatcctgagacagctgaacagcttccacagcgtgatgtgccagcacggcatggaccccgagctgatcaagcaggtggtgaagcagatgttctacatcatcggcgccatcaccctgaacaacctgctgctgagaaaggacatgtgcagctggagcaagggcatgcagatcagatacaacgtgagccagctggaggagtggctgagagacaagaacctgatgaacagcggcgccaaggagaccctggagcccctgatccaggccgcccagctgctgcaggtgaagaagaagaccgacgacgacgccgaggccatctgcagcatgtgcaacgccctgaccaccgcccagatcgtgaaggtgctgaacctgtacacccccgtgaacgagttcgaggagagagtgagcgtgagcttcatcagaaccatccagatgagactgagagacagaaaggacagcccccagctgctgatggacgccaagcacatcttccccgtgaccttccccttcaaccccagcagcctggccctggagaccatccagatccccgccagcctgggcctgggcttcatcagcagagtgtag

SEQ ID NO: 90035 - DNA, 5643 bp, synthetic construct
  misc_feature 1..5643: note = Description of Artificial Sequence: Synthetic coding sequence
  source 1..5643: mol_type = other DNA
atgaagagcagcagcctggagaccatgttcgccagagtgtggatccccgaccccgaggaggtgtggaagagcgccgagctgctgaaggactacaagcccggcgacaaggtgctgctgctgcacctggaggagggcaaggacctggagtaccacctggaccccaagaccaaggagctgccccacctgagaaaccccgacatcctggtgggcgagaacgacctgaccgccctgagctacctgcacgagcccgccgtgctgcacaacctgagagtgagattcatcgacagcaagctgatctacacctactgcggcatcgtgctggtggccatcaacccctacgagcagctgcccatctacggcgaggacatcatcaacgcctacagcggccagaacatgggcgacatggacccccacatcttcgccgtggccgaggaggcctacaagcagatggccagagacgagagaaaccagagcatcatcgtgagcggcgagagcggcgccggcaagaccgtgagcgccaagtacgccatgagatacttcgccaccgtgagcggcagcgccagcgaggccaacgtggaggagaaggtgctggccagcaaccccatcatggagagcatcggcaacgccaagaccaccagaaacgacaacagcagcagattcggcaagtacatcgagatcggcttcgacaagagatacagaatcatcggcgccaacatgagaacctacctgctggagaagagcagagtggtgttccaggccgaggaggagagaaactaccacatcttctaccagctgtgcgccagcgccaagctgcccgagttcaagatgctgagactgggcaacgccgacaacttcaactacaccaagcagggcggcagccccgtgatcgagggcgtggacgacgccaaggagatggcccacaccagacaggcctgcaccctgctgggcatcagcgagagccaccagatgggcatcttcagaatcctggccggcatcctgcacctgggcaacgtgggcttcaccagcagagacgccgacagctgcaccatcccccccaagcacgagcccctgtgcatcttctgcgagctgatgggcgtggactacgaggagatgtgccactggctgtgccacagaaagctggccaccgccaccgagacctacatcaagcccatcagcaagctgcaggccaccaacgccagagacgccctggccaagcacatctacgccaagctgttcaactggatcgtggacaacgtgaaccaggccctgcacagcgccgtgaagcagcacagcttcatcggcgtgctggacatctacggcttcgagaccttcgagatcaacagcttcgagcagttctgcatcaactacgccaacgagaagctgcagcagcagttcaacatgcacgtgttcaagctggagcaggaggagtacatgaaggagcagatcccctggaccctgatcgacttctacgacaaccagccctgcatcaacctgatcgagagcaagctgggcatcctggacctgctggacgaggagtgcaagatgcccaagggcaccgacgacacctgggcccagaagctgtacaacacccacctgaacaagtgcgccctgttcgagaagcccagactgagcaacaaggccttcatcatccagcacttcgccgacaaggtggagtaccagtgcgagggcttcctggagaagaacaaggacaccgtgttcgaggagcagatcaaggtgctgaagagcagcaagttcaagatgctgcccgagctgttccaggacgacgagaaggccatcagccccaccagcgccaccagcagcggcagaacccccctgaccagaacccccgccaagcccaccaagggcagacccggccagatggccaaggagcacaagaagaccgtgggccaccagttcagaaacagcctgcacctgctgatggagaccctgaacgccaccaccccccactacgtgagatgcatcaagcccaacgacttcaagttccccttcaccttcgacgagaagagagccgtgcagcagctgagagcctgcggcgtgctggagaccatcagaatcagcgccgccggcttccccagcagatggacctaccaggagttcttcagcagatacagagtgctgatgaagcagaaggacgtgctgagcgacagaaagcagacctgcaagaacgtgctggagaagctgatcctggacaaggacaagtaccagttcggcaagaccaagatcttcttcagagccggccaggtggcctacctggagaagctgagagccgacaagctgagagccgcctgcatcagaatccagaagaccatcagaggctggctgctgagaaagaagtacctgagaatgagaaaggccgccatcaccatgcagagatacgtgagaggctaccaggccagatgctacgccaagttcctgagaagaaccaaggccgccaccatcatccagaagtactggagaatgtacgtggtgagaagaagatacaagatcagaagagccgccaccatcgtgctgcagagctacctgagaggcttcctggccagaaacagatacagaaagatcctgagagagcacaaggccgtgatcatccagaagagagtgagaggctggctggccagaacccactacaagagaagcatgcacgccatcatctacctgcagtgctgcttcagaagaatgatggccaagagagagctgaagaagctgaagatcgaggccagaagcgtggagagatacaagaagctgcacatcggcatggagaacaagatcatgcagctgcagagaaaggtggacgagcagaacaaggactacaagtgcctggtggagaagctgaccaacctggagggcatctacaacagcgagaccgagaagctgagaagcgacctggagagactgcagctgagcgaggaggaggccaaggtggccaccggcagagtgctgagcctgcaggaggagatcgccaagctgagaaaggacctggagcagaccagaagcgagaagaagtgcatcgaggagcacgccgacagatacaagcaggagaccgagcagctggtgagcaacctgaaggaggagaacaccctgctgaagcaggagaaggaggccctgaaccacagaatcgtgcagcaggccaaggagatgaccgagaccatggagaagaagctggtggaggagaccaagcagctggagctggacctgaacgacgagagactgagataccagaacctgctgaacgagttcagcagactggaggagagatacgacgacctgaaggaggagatgaccctgatggtgcacgtgcccaagcccggccacaagagaaccgacagcacccacagcagcaacgagagcgagtacatcttcagcagcgagatcgccgagatggaggacatccccagcagaaccgaggagcccagcgagaagaaggtgcccctggacatgagcctgttcctgaagctgcagaagagagtgaccgagctggagcaggagaagcaggtgatgcaggacgagctggacagaaaggaggagcaggtgctgagaagcaaggccaaggaggaggagagaccccagatcagaggcgccgagctggagtacgagagcctgaagagacaggagctggagagcgagaacaagaagctgaagaacgagctgaacgagctgagaaaggccctgagcgagaagagcgcccccgaggtgaccgcccccggcgcccccgcctacagagtgctgatggagcagctgaccagcgtgagcgaggagctggacgtgagaaaggaggaggtgctgatcctgagaagccagctggtgagccagaaggaggccatccagcccaagctgcacgagaacaccatgaccgacagcaccatcctgctggaggacgtgcagaagatgaaggacaagggcgagatcgcccaggcctacatcggcctgaaggagaccaacagaagcagcgccctggactaccacgagctgaacgaggacggcgagctgtggctggtgtacgagggcctgaagcaggccaacagactgctggagagccagctgcagagccagaagagaagccacgagaacgaggccgaggccctgagaggcgagatccagagcctgaaggaggagaacaacagacagcagcagctgctggcccagaacctgcagctgccccccgaggccagaatcgaggccagcctgcagcacgagatcaccagactgaccaacgagaacctgtacttcgaggagctgtacgccgacgaccccaagaagtaccagagctacagaatcagcctgtacaagagaatgatcgacctgatggagcagctggagaagcaggacaagaccgtgagaaagctgaagaagcagctgaaggtgttcgccaagaagatcggcgagctggaggtgggccagatggagaacatcagccccggccagatcatcgacgagcccatcagacccgtgaacatccccagaaaggagaaggacttccagggcatgctggagtacaagaaggaggacgagcagaagctggtgaagaacctgatcctggagctgaagcccagaggcgtggccgtgaacctgatccccggcctgcccgcctacatcctgttcatgtgcgtgagacacgccgactacctgaacgacgaccagaaggtgagaagcctgctgaccagcaccatcaacagcatcaagaaggtgctgaagaagagaggcgacgacttcgagaccgtgagcttctggctgagcaacacctgcagattcctgcactgcctgaagcagtacagcggcgaggagggcttcatgaagcacaacaccagcagacagaacgagcactgcctgaccaacttcgacctggccgagtacagacaggtgctgagcgacctggccatccagatctaccagcagctggtgagagtgctggagaacatcctgcagcccatgatcgtgagcggcatgctggagcacgagaccatccagggcgtgagcggcgtgaagcccaccggcctgagaaagagaaccagcagcatcgccgacgagggcacctacaccctggacagcatcctgagacagctgaacagcttccacagcgtgatgtgccagcacggcatggaccccgagctgatcaagcaggtggtgaagcagatgttctacatcatcggcgccatcaccctgaacaacctgctgctgagaaaggacatgtgcagctggagcaagggcatgcagatcagatacaacgtgagccagctggaggagtggctgagagacaagaacctgatgaacagcggcgccaaggagaccctggagcccctgatccaggccgcccagctgctgcaggtgaagaagaagaccgacgacgacgccgaggccatctgcagcatgtgcaacgccctgaccaccgcccagatcgtgaaggtgctgaacctgtacacccccgtgaacgagttcgaggagagagtgagcgtgagcttcatcagaaccatccagatgagactgagagacagaaaggacagcccccagctgctgatggacgccaagcacatcttccccgtgaccttccccttcaaccccagcagcctggccctggagaccatccagatccccgccagcctgggcctgggcttcatcagcagagtgtag

SEQ ID NO: 90036 - DNA, 4089 bp, synthetic construct
  misc_feature 1..4089: note = Description of Artificial Sequence: Synthetic coding sequence
  source 1..4089: mol_type = other DNA
atgcacgtgttcaagctggagcaggaggagtacatgaaggagcagatcccctggaccctgatcgacttctacgacaaccagccctgcatcaacctgatcgagagcaagctgggcatcctggacctgctggacgaggagtgcaagatgcccaagggcaccgacgacacctgggcccagaagctgtacaacacccacctgaacaagtgcgccctgttcgagaagcccagactgagcaacaaggccttcatcatccagcacttcgccgacaaggtggagtaccagtgcgagggcttcctggagaagaacaaggacaccgtgttcgaggagcagatcaaggtgctgaagagcagcaagttcaagatgctgcccgagctgttccaggacgacgagaaggccatcagccccaccagcgccaccagcagcggcagaacccccctgaccagaacccccgccaagcccaccaagggcagacccggccagatggccaaggagcacaagaagaccgtgggccaccagttcagaaacagcctgcacctgctgatggagaccctgaacgccaccaccccccactacgtgagatgcatcaagcccaacgacttcaagttccccttcaccttcgacgagaagagagccgtgcagcagctgagagcctgcggcgtgctggagaccatcagaatcagcgccgccggcttccccagcagatggacctaccaggagttcttcagcagatacagagtgctgatgaagcagaaggacgtgctgagcgacagaaagcagacctgcaagaacgtgctggagaagctgatcctggacaaggacaagtaccagttcggcaagaccaagatcttcttcagagccggccaggtggcctacctggagaagctgagagccgacaagctgagagccgcctgcatcagaatccagaagaccatcagaggctggctgctgagaaagaagtacctgagaatgagaaaggccgccatcaccatgcagagatacgtgagaggctaccaggccagatgctacgccaagttcctgagaagaaccaaggccgccaccatcatccagaagtactggagaatgtacgtggtgagaagaagatacaagatcagaagagccgccaccatcgtgctgcagagctacctgagaggcttcctggccagaaacagatacagaaagatcctgagagagcacaaggccgtgatcatccagaagagagtgagaggctggctggccagaacccactacaagagaagcatgcacgccatcatctacctgcagtgctgcttcagaagaatgatggccaagagagagctgaagaagctgaagatcgaggccagaagcgtggagagatacaagaagctgcacatcggcatggagaacaagatcatgcagctgcagagaaaggtggacgagcagaacaaggactacaagtgcctggtggagaagctgaccaacctggagggcatctacaacagcgagaccgagaagctgagaagcgacctggagagactgcagctgagcgaggaggaggccaaggtggccaccggcagagtgctgagcctgcaggaggagatcgccaagctgagaaaggacctggagcagaccagaagcgagaagaagtgcatcgaggagcacgccgacagatacaagcaggagaccgagcagctggtgagcaacctgaaggaggagaacaccctgctgaagcaggagaaggaggccctgaaccacagaatcgtgcagcaggccaaggagatgaccgagaccatggagaagaagctggtggaggagaccaagcagctggagctggacctgaacgacgagagactgagataccagaacctgctgaacgagttcagcagactggaggagagatacgacgacctgaaggaggagatgaccctgatggtgcacgtgcccaagcccggccacaagagaaccgacagcacccacagcagcaacgagagcgagtacatcttcagcagcgagatcgccgagatggaggacatccccagcagaaccgaggagcccagcgagaagaaggtgcccctggacatgagcctgttcctgaagctgcagaagagagtgaccgagctggagcaggagaagcaggtgatgcaggacgagctggacagaaaggaggagcaggtgctgagaagcaaggccaaggaggaggagagaccccagatcagaggcgccgagctggagtacgagagcctgaagagacaggagctggagagcgagaacaagaagctgaagaacgagctgaacgagctgagaaaggccctgagcgagaagagcgcccccgaggtgaccgcccccggcgcccccgcctacagagtgctgatggagcagctgaccagcgtgagcgaggagctggacgtgagaaaggaggaggtgctgatcctgagaagccagctggtgagccagaaggaggccatccagcccaaggacgacaagaacaccatgaccgacagcaccatcctgctggaggacgtgcagaagatgaaggacaagggcgagatcgcccaggcctacatcggcctgaaggagaccaacagactgctggagagccagctgcagagccagaagagaagccacgagaacgaggccgaggccctgagaggcgagatccagagcctgaaggaggagaacaacagacagcagcagctgctggcccagaacctgcagctgccccccgaggccagaatcgaggccagcctgcagcacgagatcaccagactgaccaacgagaacctggacctgatggagcagctggagaagcaggacaagaccgtgagaaagctgaagaagcagctgaaggtgttcgccaagaagatcggcgagctggaggtgggccagatggagaacatcagccccggccagatcatcgacgagcccatcagacccgtgaacatccccagaaaggagaaggacttccagggcatgctggagtacaagaaggaggacgagcagaagctggtgaagaacctgatcctggagctgaagcccagaggcgtggccgtgaacctgatccccggcctgcccgcctacatcctgttcatgtgcgtgagacacgccgactacctgaacgacgaccagaaggtgagaagcctgctgaccagcaccatcaacagcatcaagaaggtgctgaagaagagaggcgacgacttcgagaccgtgagcttctggctgagcaacacctgcagattcctgcactgcctgaagcagtacagcggcgaggagggcttcatgaagcacaacaccagcagacagaacgagcactgcctgaccaacttcgacctggccgagtacagacaggtgctgagcgacctggccatccagatctaccagcagctggtgagagtgctggagaacatcctgcagcccatgatcgtgagcggcatgctggagcacgagaccatccagggcgtgagcggcgtgaagcccaccggcctgagaaagagaaccagcagcatcgccgacgagggcacctacaccctggacagcatcctgagacagctgaacagcttccacagcgtgatgtgccagcacggcatggaccccgagctgatcaagcaggtggtgaagcagatgttctacatcatcggcgccatcaccctgaacaacctgctgctgagaaaggacatgtgcagctggagcaagggcatgcagatcagatacaacgtgagccagctggaggagtggctgagagacaagaacctgatgaacagcggcgccaaggagaccctggagcccctgatccaggccgcccagctgctgcaggtgaagaagaagaccgacgacgacgccgaggccatctgcagcatgtgcaacgccctgaccaccgcccagatcgtgaaggtgctgaacctgtacacccccgtgaacgagttcgaggagagagtgagcgtgagcttcatcagaaccatccagatgagactgagagacagaaaggacagcccccagctgctgatggacgccaagcacatcttccccgtgaccttccccttcaaccccagcagcctggccctggagaccatccagatccccgccagcctgggcctgggcttcatcagcagagtgtag

SEQ ID NO: 90037 - DNA, 5568 bp, synthetic construct
  misc_feature 1..5568: note = Description of Artificial Sequence: Synthetic coding sequence
  source 1..5568: mol_type = other DNA
atggccgccagcgagctgtacaccaagttcgccagagtgtggatccccgaccccgaggaggtgtggaagagcgccgagctgctgaaggactacaagcccggcgacaaggtgctgctgctgcacctggaggagggcaaggacctggagtaccacctggaccccaagaccaaggagctgccccacctgagaaaccccgacatcctggtgggcgagaacgacctgaccgccctgagctacctgcacgagcccgccgtgctgcacaacctgagagtgagattcatcgacagcaagctgatctacacctactgcggcatcgtgctggtggccatcaacccctacgagcagctgcccatctacggcgaggacatcatcaacgcctacagcggccagaacatgggcgacatggacccccacatcttcgccgtggccgaggaggcctacaagcagatggccagagacgagagaaaccagagcatcatcgtgagcggcgagagcggcgccggcaagaccgtgagcgccaagtacgccatgagatacttcgccaccgtgagcggcagcgccagcgaggccaacgtggaggagaaggtgctggccagcaaccccatcatggagagcatcggcaacgccaagaccaccagaaacgacaacagcagcagattcggcaagtacatcgagatcggcttcgacaagagatacagaatcatcggcgccaacatgagaacctacctgctggagaagagcagagtggtgttccaggccgaggaggagagaaactaccacatcttctaccagctgtgcgccagcgccaagctgcccgagttcaagatgctgagactgggcaacgccgacaacttcaactacaccaagcagggcggcagccccgtgatcgagggcgtggacgacgccaaggagatggcccacaccagacaggcctgcaccctgctgggcatcagcgagagccaccagatgggcatcttcagaatcctggccggcatcctgcacctgggcaacgtgggcttcaccagcagagacgccgacagctgcaccatcccccccaagcacgagcccctgtgcatcttctgcgagctgatgggcgtggactacgaggagatgtgccactggctgtgccacagaaagctggccaccgccaccgagacctacatcaagcccatcagcaagctgcaggccaccaacgccagagacgccctggccaagcacatctacgccaagctgttcaactggatcgtggacaacgtgaaccaggccctgcacagcgccgtgaagcagcacagcttcatcggcgtgctggacatctacggcttcgagaccttcgagatcaacagcttcgagcagttctgcatcaactacgccaacgagaagctgcagcagcagttcaacatgcacgtgttcaagctggagcaggaggagtacatgaaggagcagatcccctggaccctgatcgacttctacgacaaccagccctgcatcaacctgatcgagagcaagctgggcatcctggacctgctggacgaggagtgcaagatgcccaagggcaccgacgacacctgggcccagaagctgtacaacacccacctgaacaagtgcgccctgttcgagaagcccagactgagcaacaaggccttcatcatccagcacttcgccgacaaggtggagtaccagtgcgagggcttcctggagaagaacaaggacaccgtgttcgaggagcagatcaaggtgctgaagagcagcaagttcaagatgctgcccgagctgttccaggacgacgagaaggccatcagccccaccagcgccaccagcagcggcagaacccccctgaccagaacccccgccaagcccaccaagggcagacccggccagatggccaaggagcacaagaagaccgtgggccaccagttcagaaacagcctgcacctgctgatggagaccctgaacgccaccaccccccactacgtgagatgcatcaagcccaacgacttcaagttccccttcaccttcgacgagaagagagccgtgcagcagctgagagcctgcggcgtgctggagaccatcagaatcagcgccgccggcttccccagcagatggacctaccaggagttcttcagcagatacagagtgctgatgaagcagaaggacgtgctgagcgacagaaagcagacctgcaagaacgtgctggagaagctgatcctggacaaggacaagtaccagttcggcaagaccaagatcttcttcagagccggccaggtggcctacctggagaagctgagagccgacaagctgagagccgcctgcatcagaatccagaagaccatcagaggctggctgctgagaaagaagtacctgagaatgagaaaggccgccatcaccatgcagagatacgtgagaggctaccaggccagatgctacgccaagttcctgagaagaaccaaggccgccaccatcatccagaagtactggagaatgtacgtggtgagaagaagatacaagatcagaagagccgccaccatcgtgctgcagagctacctgagaggcttcctggccagaaacagatacagaaagatcctgagagagcacaaggccgtgatcatccagaagagagtgagaggctggctggccagaacccactacaagagaagcatgcacgccatcatctacctgcagtgctgcttcagaagaatgatggccaagagagagctgaagaagctgaagatcgaggccagaagcgtggagagatacaagaagctgcacatcggcatggagaacaagatcatgcagctgcagagaaaggtggacgagcagaacaaggactacaagtgcctggtggagaagctgaccaacctggagggcatctacaacagcgagaccgagaagctgagaagcgacctggagagactgcagctgagcgaggaggaggccaaggtggccaccggcagagtgctgagcctgcaggaggagatcgccaagctgagaaaggacctggagcagaccagaagcgagaagaagtgcatcgaggagcacgccgacagatacaagcaggagaccgagcagctggtgagcaacctgaaggaggagaacaccctgctgaagcaggagaaggaggccctgaaccacagaatcgtgcagcaggccaaggagatgaccgagaccatggagaagaagctggtggaggagaccaagcagctggagctggacctgaacgacgagagactgagataccagaacctgctgaacgagttcagcagactggaggagagatacgacgacctgaaggaggagatgaccctgatggtgcacgtgcccaagcccggccacaagagaaccgacagcacccacagcagcaacgagagcgagtacatcttcagcagcgagatcgccgagatggaggacatccccagcagaaccgaggagcccagcgagaagaaggtgcccctggacatgagcctgttcctgaagctgcagaagagagtgaccgagctggagcaggagaagcaggtgatgcaggacgagctggacagaaaggaggagcaggtgctgagaagcaaggccaaggaggaggagagaccccagatcagaggcgccgagctggagtacgagagcctgaagagacaggagctggagagcgagaacaagaagctgaagaacgagctgaacgagctgagaaaggccctgagcgagaagagcgcccccgaggtgaccgcccccggcgcccccgcctacagagtgctgatggagcagctgaccagcgtgagcgaggagctggacgtgagaaaggaggaggtgctgatcctgagaagccagctggtgagccagaaggaggccatccagcccaaggacgacaagaacaccatgaccgacagcaccatcctgctggaggacgtgcagaagatgaaggacaagggcgagatcgcccaggcctacatcggcctgaaggagaccaacagaagcagcgccctggactaccacgagctgaacgaggacggcgagctgtggctggtgtacgagggcctgaagcaggccaacagactgctggagagccagctgcagagccagaagagaagccacgagaacgaggccgaggccctgagaggcgagatccagagcctgaaggaggagaacaacagacagcagcagctgctggcccagaacctgcagctgccccccgaggccagaatcgaggccagcctgcagcacgagatcaccagactgaccaacgagaacctggacctgatggagcagctggagaagcaggacaagaccgtgagaaagctgaagaagcagctgaaggtgttcgccaagaagatcggcgagctggaggtgggccagatggagaacatcagccccggccagatcatcgacgagcccatcagacccgtgaacatccccagaaaggagaaggacttccagggcatgctggagtacaagaaggaggacgagcagaagctggtgaagaacctgatcctggagctgaagcccagaggcgtggccgtgaacctgatccccggcctgcccgcctacatcctgttcatgtgcgtgagacacgccgactacctgaacgacgaccagaaggtgagaagcctgctgaccagcaccatcaacagcatcaagaaggtgctgaagaagagaggcgacgacttcgagaccgtgagcttctggctgagcaacacctgcagattcctgcactgcctgaagcagtacagcggcgaggagggcttcatgaagcacaacaccagcagacagaacgagcactgcctgaccaacttcgacctggccgagtacagacaggtgctgagcgacctggccatccagatctaccagcagctggtgagagtgctggagaacatcctgcagcccatgatcgtgagcggcatgctggagcacgagaccatccagggcgtgagcggcgtgaagcccaccggcctgagaaagagaaccagcagcatcgccgacgagggcacctacaccctggacagcatcctgagacagctgaacagcttccacagcgtgatgtgccagcacggcatggaccccgagctgatcaagcaggtggtgaagcagatgttctacatcatcggcgccatcaccctgaacaacctgctgctgagaaaggacatgtgcagctggagcaagggcatgcagatcagatacaacgtgagccagctggaggagtggctgagagacaagaacctgatgaacagcggcgccaaggagaccctggagcccctgatccaggccgcccagctgctgcaggtgaagaagaagaccgacgacgacgccgaggccatctgcagcatgtgcaacgccctgaccaccgcccagatcgtgaaggtgctgaacctgtacacccccgtgaacgagttcgaggagagagtgagcgtgagcttcatcagaaccatccagatgagactgagagacagaaaggacagcccccagctgctgatggacgccaagcacatcttccccgtgaccttccccttcaaccccagcagcctggccctggagaccatccagatccccgccagcctgggcctgggcttcatcagcagagtgtag

SEQ ID NO: 90038 - DNA, 5559 bp, synthetic construct
  misc_feature 1..5559: note = Description of Artificial Sequence: Synthetic coding sequence
  source 1..5559: mol_type = other DNA
atggccgccagcgagctgtacaccaagttcgccagagtgtggatccccgaccccgaggaggtgtggaagagcgccgagctgctgaaggactacaagcccggcgacaaggtgctgctgctgcacctggaggagggcaaggacctggagtaccacctggaccccaagaccaaggagctgccccacctgagaaaccccgacatcctggtgggcgagaacgacctgaccgccctgagctacctgcacgagcccgccgtgctgcacaacctgagagtgagattcatcgacagcaagctgatctacacctactgcggcatcgtgctggtggccatcaacccctacgagcagctgcccatctacggcgaggacatcatcaacgcctacagcggccagaacatgggcgacatggacccccacatcttcgccgtggccgaggaggcctacaagcagatggccagagacgagagaaaccagagcatcatcgtgagcggcgagagcggcgccggcaagaccgtgagcgccaagtacgccatgagatacttcgccaccgtgagcggcagcgccagcgaggccaacgtggaggagaaggtgctggccagcaaccccatcatggagagcatcggcaacgccaagaccaccagaaacgacaacagcagcagattcggcaagtacatcgagatcggcttcgacaagagatacagaatcatcggcgccaacatgagaacctacctgctggagaagagcagagtggtgttccaggccgaggaggagagaaactaccacatcttctaccagctgtgcgccagcgccaagctgcccgagttcaagatgctgagactgggcaacgccgacaacttcaactacaccaagcagggcggcagccccgtgatcgagggcgtggacgacgccaaggagatggcccacaccagacaggcctgcaccctgctgggcatcagcgagagccaccagatgggcatcttcagaatcctggccggcatcctgcacctgggcaacgtgggcttcaccagcagagacgccgacagctgcaccatcccccccaagcacgagcccctgtgcatcttctgcgagctgatgggcgtggactacgaggagatgtgccactggctgtgccacagaaagctggccaccgccaccgagacctacatcaagcccatcagcaagctgcaggccaccaacgccagagacgccctggccaagcacatctacgccaagctgttcaactggatcgtggacaacgtgaaccaggccctgcacagcgccgtgaagcagcacagcttcatcggcgtgctggacatctacggcttcgagaccttcgagatcaacagcttcgagcagttctgcatcaactacgccaacgagaagctgcagcagcagttcaacatgcacgtgttcaagctggagcaggaggagtacatgaaggagcagatcccctggaccctgatcgacttctacgacaaccagccctgcatcaacctgatcgagagcaagctgggcatcctggacctgctggacgaggagtgcaagatgcccaagggcaccgacgacacctgggcccagaagctgtacaacacccacctgaacaagtgcgccctgttcgagaagcccagactgagcaacaaggccttcatcatccagcacttcgccgacaaggtggagtaccagtgcgagggcttcctggagaagaacaaggacaccgtgttcgaggagcagatcaaggtgctgaagagcagcaagttcaagatgctgcccgagctgttccaggacgacgagaaggccatcagccccaccagcgccaccagcagcggcagaacccccctgaccagaacccccgccaagcccaccaagggcagacccggccagatggccaaggagcacaagaagaccgtgggccaccagttcagaaacagcctgcacctgctgatggagaccctgaacgccaccaccccccactacgtgagatgcatcaagcccaacgacttcaagttccccttcaccttcgacgagaagagagccgtgcagcagctgagagcctgcggcgtgctggagaccatcagaatcagcgccgccggcttccccagcagatggacctaccaggagttcttcagcagatacagagtgctgatgaagcagaaggacgtgctgagcgacagaaagcagacctgcaagaacgtgctggagaagctgatcctggacaaggacaagtaccagttcggcaagaccaagatcttcttcagagccggccaggtggcctacctggagaagctgagagccgacaagctgagagccgcctgcatcagaatccagaagaccatcagaggctggctgctgagaaagaagtacctgagaatgagaaaggccgccatcaccatgcagagatacgtgagaggctaccaggccagatgctacgccaagttcctgagaagaaccaaggccgccaccatcatccagaagtactggagaatgtacgtggtgagaagaagatacaagatcagaagagccgccaccatcgtgctgcagagctacctgagaggcttcctggccagaaacagatacagaaagatcctgagagagcacaaggccgtgatcatccagaagagagtgagaggctggctggccagaacccactacaagagaagcatgcacgccatcatctacctgcagtgctgcttcagaagaatgatggccaagagagagctgaagaagctgaagatcgaggccagaagcgtggagagatacaagaagctgcacatcggcatggagaacaagatcatgcagctgcagagaaaggtggacgagcagaacaaggactacaagtgcctggtggagaagctgaccaacctggagggcatctacaacagcgagaccgagaagctgagaagcgacctggagagactgcagctgagcgaggaggaggccaaggtggccaccggcagagtgctgagcctgcaggaggagatcgccaagctgagaaaggacctggagcagaccagaagcgagaagaagtgcatcgaggagcacgccgacagatacaagcaggagaccgagcagctggtgagcaacctgaaggaggagaacaccctgctgaagcaggagaaggaggccctgaaccacagaatcgtgcagcaggccaaggagatgaccgagaccatggagaagaagctggtggaggagaccaagcagctggagctggacctgaacgacgagagactgagataccagaacctgctgaacgagttcagcagactggaggagagatacgacgacctgaaggaggagatgaccctgatggtgcacgtgcccaagcccggccacaagagaaccgacagcacccacagcagcaacgagagcgagtacatcttcagcagcgagatcgccgagatggaggacatccccagcagaaccgaggagcccagcgagaagaaggtgcccctggacatgagcctgttcctgaagctgcagaagagagtgaccgagctggagcaggagaagcaggtgatgcaggacgagctggacagaaaggaggagcaggtgctgagaagcaaggccaaggaggaggagagaccccagatcagaggcgccgagctggagtacgagagcctgaagagacaggagctggagagcgagaacaagaagctgaagaacgagctgaacgagctgagaaaggccctgagcgagaagagcgcccccgaggtgaccgcccccggcgcccccgcctacagagtgctgatggagcagctgaccagcgtgagcgaggagctggacgtgagaaaggaggaggtgctgatcctgagaagccagctggtgagccagaaggaggccatccagcccaagaacaccatgaccgacagcaccatcctgctggaggacgtgcagaagatgaaggacaagggcgagatcgcccaggcctacatcggcctgaaggagaccaacagaagcagcgccctggactaccacgagctgaacgaggacggcgagctgtggctggtgtacgagggcctgaagcaggccaacagactgctggagagccagctgcagagccagaagagaagccacgagaacgaggccgaggccctgagaggcgagatccagagcctgaaggaggagaacaacagacagcagcagctgctggcccagaacctgcagctgccccccgaggccagaatcgaggccagcctgcagcacgagatcaccagactgaccaacgagaacctggacctgatggagcagctggagaagcaggacaagaccgtgagaaagctgaagaagcagctgaaggtgttcgccaagaagatcggcgagctggaggtgggccagatggagaacatcagccccggccagatcatcgacgagcccatcagacccgtgaacatccccagaaaggagaaggacttccagggcatgctggagtacaagaaggaggacgagcagaagctggtgaagaacctgatcctggagctgaagcccagaggcgtggccgtgaacctgatccccggcctgcccgcctacatcctgttcatgtgcgtgagacacgccgactacctgaacgacgaccagaaggtgagaagcctgctgaccagcaccatcaacagcatcaagaaggtgctgaagaagagaggcgacgacttcgagaccgtgagcttctggctgagcaacacctgcagattcctgcactgcctgaagcagtacagcggcgaggagggcttcatgaagcacaacaccagcagacagaacgagcactgcctgaccaacttcgacctggccgagtacagacaggtgctgagcgacctggccatccagatctaccagcagctggtgagagtgctggagaacatcctgcagcccatgatcgtgagcggcatgctggagcacgagaccatccagggcgtgagcggcgtgaagcccaccggcctgagaaagagaaccagcagcatcgccgacgagggcacctacaccctggacagcatcctgagacagctgaacagcttccacagcgtgatgtgccagcacggcatggaccccgagctgatcaagcaggtggtgaagcagatgttctacatcatcggcgccatcaccctgaacaacctgctgctgagaaaggacatgtgcagctggagcaagggcatgcagatcagatacaacgtgagccagctggaggagtggctgagagacaagaacctgatgaacagcggcgccaaggagaccctggagcccctgatccaggccgcccagctgctgcaggtgaagaagaagaccgacgacgacgccgaggccatctgcagcatgtgcaacgccctgaccaccgcccagatcgtgaaggtgctgaacctgtacacccccgtgaacgagttcgaggagagagtgagcgtgagcttcatcagaaccatccagatgagactgagagacagaaaggacagcccccagctgctgatggacgccaagcacatcttccccgtgaccttccccttcaaccccagcagcctggccctggagaccatccagatccccgccagcctgggcctgggcttcatcagcagagtgtag

SEQ ID NO: 90039 - DNA, 4377 bp, synthetic construct
  misc_feature 1..4377: note = Description of Artificial Sequence: Synthetic coding sequence
  source 1..4377: mol_type = other DNA
atgtgccactggctgtgccacagaaagctggccaccgccaccgagacctacatcaagcccatcagcaagctgcaggccaccaacgccagagacgccctggccaagcacatctacgccaagctgttcaactggatcgtggacaacgtgaaccaggccctgcacagcgccgtgaagcagcacagcttcatcggcgtgctggacatctacggcttcgagaccttcgagatcaacagcttcgagcagttctgcatcaactacgccaacgagaagctgcagcagcagttcaacatgcacgtgttcaagctggagcaggaggagtacatgaaggagcagatcccctggaccctgatcgacttctacgacaaccagccctgcatcaacctgatcgagagcaagctgggcatcctggacctgctggacgaggagtgcaagatgcccaagggcaccgacgacacctgggcccagaagctgtacaacacccacctgaacaagtgcgccctgttcgagaagcccagactgagcaacaaggccttcatcatccagcacttcgccgacaaggtggagtaccagtgcgagggcttcctggagaagaacaaggacaccgtgttcgaggagcagatcaaggtgctgaagagcagcaagttcaagatgctgcccgagctgttccaggacgacgagaaggccatcagccccaccagcgccaccagcagcggcagaacccccctgaccagaacccccgccaagcccaccaagggcagacccggccagatggccaaggagcacaagaagaccgtgggccaccagttcagaaacagcctgcacctgctgatggagaccctgaacgccaccaccccccactacgtgagatgcatcaagcccaacgacttcaagttccccttcaccttcgacgagaagagagccgtgcagcagctgagagcctgcggcgtgctggagaccatcagaatcagcgccgccggcttccccagcagatggacctaccaggagttcttcagcagatacagagtgctgatgaagcagaaggacgtgctgagcgacagaaagcagacctgcaagaacgtgctggagaagctgatcctggacaaggacaagtaccagttcggcaagaccaagatcttcttcagagccggccaggtggcctacctggagaagctgagagccgacaagctgagagccgcctgcatcagaatccagaagaccatcagaggctggctgctgagaaagaagtacctgagaatgagaaaggccgccatcaccatgcagagatacgtgagaggctaccaggccagatgctacgccaagttcctgagaagaaccaaggccgccaccatcatccagaagtactggagaatgtacgtggtgagaagaagatacaagatcagaagagccgccaccatcgtgctgcagagctacctgagaggcttcctggccagaaacagatacagaaagatcctgagagagcacaaggccgtgatcatccagaagagagtgagaggctggctggccagaacccactacaagagaagcatgcacgccatcatctacctgcagtgctgcttcagaagaatgatggccaagagagagctgaagaagctgaagatcgaggccagaagcgtggagagatacaagaagctgcacatcggcatggagaacaagatcatgcagctgcagagaaaggtggacgagcagaacaaggactacaagtgcctggtggagaagctgaccaacctggagggcatctacaacagcgagaccgagaagctgagaagcgacctggagagactgcagctgagcgaggaggaggccaaggtggccaccggcagagtgctgagcctgcaggaggagatcgccaagctgagaaaggacctggagcagaccagaagcgagaagaagtgcatcgaggagcacgccgacagatacaagcaggagaccgagcagctggtgagcaacctgaaggaggagaacaccctgctgaagcaggagaaggaggccctgaaccacagaatcgtgcagcaggccaaggagatgaccgagaccatggagaagaagctggtggaggagaccaagcagctggagctggacctgaacgacgagagactgagataccagaacctgctgaacgagttcagcagactggaggagagatacgacgacctgaaggaggagatgaccctgatggtgcacgtgcccaagcccggccacaagagaaccgacagcacccacagcagcaacgagagcgagtacatcttcagcagcgagatcgccgagatggaggacatccccagcagaaccgaggagcccagcgagaagaaggtgcccctggacatgagcctgttcctgaagctgcagaagagagtgaccgagctggagcaggagaagcaggtgatgcaggacgagctggacagaaaggaggagcaggtgctgagaagcaaggccaaggaggaggagagaccccagatcagaggcgccgagctggagtacgagagcctgaagagacaggagctggagagcgagaacaagaagctgaagaacgagctgaacgagctgagaaaggccctgagcgagaagagcgcccccgaggtgaccgcccccggcgcccccgcctacagagtgctgatggagcagctgaccagcgtgagcgaggagctggacgtgagaaaggaggaggtgctgatcctgagaagccagctggtgagccagaaggaggccatccagcccaagctgcacgagaacaccatgaccgacagcaccatcctgctggaggacgtgcagaagatgaaggacaagggcgagatcgcccaggcctacatcggcctgaaggagaccaacagactgctggagagccagctgcagagccagaagagaagccacgagaacgaggccgaggccctgagaggcgagatccagagcctgaaggaggagaacaacagacagcagcagctgctggcccagaacctgcagctgccccccgaggccagaatcgaggccagcctgcagcacgagatcaccagactgaccaacgagaacctggacctgatggagcagctggagaagcaggacaagaccgtgagaaagctgaagaagcagctgaaggtgttcgccaagaagatcggcgagctggaggtgggccagatggagaacatcagccccggccagatcatcgacgagcccatcagacccgtgaacatccccagaaaggagaaggacttccagggcatgctggagtacaagaaggaggacgagcagaagctggtgaagaacctgatcctggagctgaagcccagaggcgtggccgtgaacctgatccccggcctgcccgcctacatcctgttcatgtgcgtgagacacgccgactacctgaacgacgaccagaaggtgagaagcctgctgaccagcaccatcaacagcatcaagaaggtgctgaagaagagaggcgacgacttcgagaccgtgagcttctggctgagcaacacctgcagattcctgcactgcctgaagcagtacagcggcgaggagggcttcatgaagcacaacaccagcagacagaacgagcactgcctgaccaacttcgacctggccgagtacagacaggtgctgagcgacctggccatccagatctaccagcagctggtgagagtgctggagaacatcctgcagcccatgatcgtgagcggcatgctggagcacgagaccatccagggcgtgagcggcgtgaagcccaccggcctgagaaagagaaccagcagcatcgccgacgagggcacctacaccctggacagcatcctgagacagctgaacagcttccacagcgtgatgtgccagcacggcatggaccccgagctgatcaagcaggtggtgaagcagatgttctacatcatcggcgccatcaccctgaacaacctgctgctgagaaaggacatgtgcagctggagcaagggcatgcagatcagatacaacgtgagccagctggaggagtggctgagagacaagaacctgatgaacagcggcgccaaggagaccctggagcccctgatccaggccgcccagctgctgcaggtgaagaagaagaccgacgacgacgccgaggccatctgcagcatgtgcaacgccctgaccaccgcccagatcgtgaaggtgctgaacctgtacacccccgtgaacgagttcgaggagagagtgagcgtgagcttcatcagaaccatccagatgagactgagagacagaaaggacagcccccagctgctgatggacgccaagcacatcttccccgtgaccttccccttcaaccccagcagcctggccctggagaccatccagatccccgccagcctgggcctgggcttcatcagcagagtgtag

SEQ ID NO: 90040 - DNA, 5562 bp, synthetic construct
  misc_feature 1..5562: note = Description of Artificial Sequence: Synthetic coding sequence
  source 1..5562: mol_type = other DNA
atggccgccagcgagctgtacaccaagttcgccagagtgtggatccccgaccccgaggaggtgtggaagagcgccgagctgctgaaggactacaagcccggcgacaaggtgctgctgctgcacctggaggagggcaaggacctggagtaccacctggaccccaagaccaaggagctgccccacctgagaaaccccgacatcctggtgggcgagaacgacctgaccgccctgagctacctgcacgagcccgccgtgctgcacaacctgagagtgagattcatcgacagcaagctgatctacacctactgcggcatcgtgctggtggccatcaacccctacgagcagctgcccatctacggcgaggacatcatcaacgcctacagcggccagaacatgggcgacatggacccccacatcttcgccgtggccgaggaggcctacaagcagatggccagagacgagagaaaccagagcatcatcgtgagcggcgagagcggcgccggcaagaccgtgagcgccaagtacgccatgagatacttcgccaccgtgagcggcagcgccagcgaggccaacgtggaggagaaggtgctggccagcaaccccatcatggagagcatcggcaacgccaagaccaccagaaacgacaacagcagcagattcggcaagtacatcgagatcggcttcgacaagagatacagaatcatcggcgccaacatgagaacctacctgctggagaagagcagagtggtgttccaggccgaggaggagagaaactaccacatcttctaccagctgtgcgccagcgccaagctgcccgagttcaagatgctgagactgggcaacgccgacaacttcaactacaccaagcagggcggcagccccgtgatcgagggcgtggacgacgccaaggagatggcccacaccagacaggcctgcaccctgctgggcatcagcgagagccaccagatgggcatcttcagaatcctggccggcatcctgcacctgggcaacgtgggcttcaccagcagagacgccgacagctgcaccatcccccccaagcacgagcccctgtgcatcttctgcgagctgatgggcgtggactacgaggagatgtgccactggctgtgccacagaaagctggccaccgccaccgagacctacatcaagcccatcagcaagctgcaggccaccaacgccagagacgccctggccaagcacatctacgccaagctgttcaactggatcgtggacaacgtgaaccaggccctgcacagcgccgtgaagcagcacagcttcatcggcgtgctggacatctacggcttcgagaccttcgagatcaacagcttcgagcagttctgcatcaactacgccaacgagaagctgcagcagcagttcaacatgcacgtgttcaagctggagcaggaggagtacatgaaggagcagatcccctggaccctgatcgacttctacgacaaccagccctgcatcaacctgatcgagagcaagctgggcatcctggacctgctggacgaggagtgcaagatgcccaagggcaccgacgacacctgggcccagaagctgtacaacacccacctgaacaagtgcgccctgttcgagaagcccagactgagcaacaaggccttcatcatccagcacttcgccgacaaggtggagtaccagtgcgagggcttcctggagaagaacaaggacaccgtgttcgaggagcagatcaaggtgctgaagagcagcaagttcaagatgctgcccgagctgttccaggacgacgagaaggccatcagccccaccagcgccaccagcagcggcagaacccccctgaccagaacccccgccaagcccaccaagggcagacccggccagatggccaaggagcacaagaagaccgtgggccaccagttcagaaacagcctgcacctgctgatggagaccctgaacgccaccaccccccactacgtgagatgcatcaagcccaacgacttcaagttccccttcaccttcgacgagaagagagccgtgcagcagctgagagcctgcggcgtgctggagaccatcagaatcagcgccgccggcttccccagcagatggacctaccaggagttcttcagcagatacagagtgctgatgaagcagaaggacgtgctgagcgacagaaagcagacctgcaagaacgtgctggagaagctgatcctggacaaggacaagtaccagttcggcaagaccaagatcttcttcagagccggccaggtggcctacctggagaagctgagagccgacaagctgagagccgcctgcatcagaatccagaagaccatcagaggctggctgctgagaaagaagtacctgagaatgagaaaggccgccatcaccatgcagagatacgtgagaggctaccaggccagatgctacgccaagttcctgagaagaaccaaggccgccaccatcatccagaagtactggagaatgtacgtggtgagaagaagatacaagatcagaagagccgccaccatcgtgctgcagagctacctgagaggcttcctggccagaaacagatacagaaagatcctgagagagcacaaggccgtgatcatccagaagagagtgagaggctggctggccagaacccactacaagagaagcatgcacgccatcatctacctgcagtgctgcttcagaagaatgatggccaagagagagctgaagaagctgaagatcgaggccagaagcgtggagagatacaagaagctgcacatcggcatggagaacaagatcatgcagctgcagagaaaggtggacgagcagaacaaggactacaagtgcctggtggagaagctgaccaacctggagggcatctacaacagcgagaccgagaagctgagaagcgacctggagagactgcagctgagcgaggaggaggccaaggtggccaccggcagagtgctgagcctgcaggaggagatcgccaagctgagaaaggacctggagcagaccagaagcgagaagaagtgcatcgaggagcacgccgacagatacaagcaggagaccgagcagctggtgagcaacctgaaggaggagaacaccctgctgaagcaggagaaggaggccctgaaccacagaatcgtgcagcaggccaaggagatgaccgagaccatggagaagaagctggtggaggagaccaagcagctggagctggacctgaacgacgagagactgagataccagaacctgctgaacgagttcagcagactggaggagagatacgacgacctgaaggaggagatgaccctgatggtgcacgtgcccaagcccggccacaagagaaccgacagcacccacagcagcaacgagagcgagtacatcttcagcagcgagatcgccgagatggaggacatccccagcagaaccgaggagcccagcgagaagaaggtgcccctggacatgagcctgttcctgaagctgcagaagagagtgaccgagctggagcaggagaagcaggtgatgcaggacgagctggacagaaaggaggagcaggtgctgagaagcaaggccaaggaggaggagagaccccagatcagaggcgccgagctggagtacgagagcctgaagagacaggagctggagagcgagaacaagaagctgaagaacgagctgaacgagctgagaaaggccctgagcgagaagagcgcccccgaggtgaccgcccccggcgcccccgcctacagagtgctgatggagcagctgaccagcgtgagcgaggagctggacgtgagaaaggaggaggtgctgatcctgagaagccagctggtgagccagaaggaggccatccagcccaaggacgacaagaacaccatgaccgacagcaccatcctgctggaggacgtgcagaagatgaaggacaagggcgagatcgcccaggcctacatcggcctgaaggagaccaacagactgctggagagccagctgcagagccagaagagaagccacgagaacgaggccgaggccctgagaggcgagatccagagcctgaaggaggagaacaacagacagcagcagctgctggcccagaacctgcagctgccccccgaggccagaatcgaggccagcctgcagcacgagatcaccagactgaccaacgagaacctgtacttcgaggagctgtacgccgacgaccccaagaagtaccagagctacagaatcagcctgtacaagagaatgatcgacctgatggagcagctggagaagcaggacaagaccgtgagaaagctgaagaagcagctgaaggtgttcgccaagaagatcggcgagctggaggtgggccagatggagaacatcagccccggccagatcatcgacgagcccatcagacccgtgaacatccccagaaaggagaaggacttccagggcatgctggagtacaagaaggaggacgagcagaagctggtgaagaacctgatcctggagctgaagcccagaggcgtggccgtgaacctgatccccggcctgcccgcctacatcctgttcatgtgcgtgagacacgccgactacctgaacgacgaccagaaggtgagaagcctgctgaccagcaccatcaacagcatcaagaaggtgctgaagaagagaggcgacgacttcgagaccgtgagcttctggctgagcaacacctgcagattcctgcactgcctgaagcagtacagcggcgaggagggcttcatgaagcacaacaccagcagacagaacgagcactgcctgaccaacttcgacctggccgagtacagacaggtgctgagcgacctggccatccagatctaccagcagctggtgagagtgctggagaacatcctgcagcccatgatcgtgagcggcatgctggagcacgagaccatccagggcgtgagcggcgtgaagcccaccggcctgagaaagagaaccagcagcatcgccgacgagggcacctacaccctggacagcatcctgagacagctgaacagcttccacagcgtgatgtgccagcacggcatggaccccgagctgatcaagcaggtggtgaagcagatgttctacatcatcggcgccatcaccctgaacaacctgctgctgagaaaggacatgtgcagctggagcaagggcatgcagatcagatacaacgtgagccagctggaggagtggctgagagacaagaacctgatgaacagcggcgccaaggagaccctggagcccctgatccaggccgcccagctgctgcaggtgaagaagaagaccgacgacgacgccgaggccatctgcagcatgtgcaacgccctgaccaccgcccagatcgtgaaggtgctgaacctgtacacccccgtgaacgagttcgaggagagagtgagcgtgagcttcatcagaaccatccagatgagactgagagacagaaaggacagcccccagctgctgatggacgccaagcacatcttccccgtgaccttccccttcaaccccagcagcctggccctggagaccatccagatccccgccagcctgggcctgggcttcatcagcagagtgtag

SEQ ID NO: 90041 - DNA, 5547 bp, synthetic construct
  misc_feature 1..5547: note = Description of Artificial Sequence: Synthetic coding sequence
  source 1..5547: mol_type = other DNA
atgagcgtgggcgagctgtacagccagtgcaccagagtgtggatccccgaccccgacgaggtgtggagaagcgccgagctgaccaaggactacaaggagggcgacaagagcctgcagctgagactggaggacgagaccatcctggagtaccccatcgacgtgcagagaaaccagctgcccttcctgagaaaccccgacatcctggtgggcgagaacgacctgaccgccctgagctacctgcacgagcccgccgtgctgcacaacctgaaggtgagattcctggagagcaaccacatctacacctactgcggcatcgtgctggtggccatcaacccctacgagcagctgcccatctacggccaggacgtgatctacacctacagcggccagaacatgggcgacatggacccccacatcttcgccgtggccgaggaggcctacaagcagatggccagagacgagaagaaccagagcatcatcgtgagcggcgagagcggcgccggcaagaccgtgagcgccaagtacgccatgagatacttcgccaccgtgggcggcagcgccagcgagaccaacatcgaggagaaggtgctggccagcagccccatcatggaggccatcggcaacgccaagaccaccagaaacgacaacagcagcagattcggcaagtacatccagatcggcttcgacaagagataccacatcatcggcgccaacatgagaacctacctgctggagaagagcagagtggtgttccaggccgacgacgagagaaactaccacatcttctaccagctgtgcgccgccgccggcctgcccgagttcaaggagctggccctgaccagcgccgaggacttcttctacaccagccagggcggcgacaccagcatcgagggcgtggacgacgccgaggacttcgagaagaccagacaggccttcaccctgctgggcgtgaaggagagccaccagatgagcatcttcaagatcatcgccagcatcctgcacctgggcagcgtggccatccaggccgagagagacggcgacagctgcagcatcagcccccaggacgtgtacctgagcaacttctgcagactgctgggcgtggagcacagccagatggagcactggctgtgccacagaaagctggtgaccaccagcgagacctacgtgaagaccatgagcctgcagcaggtgatcaacgccagaaacgccctggccaagcacatctacgcccagctgttcggctggatcgtggagcacatcaacaaggccctgcacaccagcctgaagcagcacagcttcatcggcgtgctggacatctacggcttcgagaccttcgaggtgaacagcttcgagcagttctgcatcaactacgccaacgagaagctgcagcagcagttcaacagccacgtgttcaagctggagcaggaggagtacatgaaggagcagatcccctggaccctgatcgacttctacgacaaccagccctgcatcgacctgatcgaggccaagctgggcatcctggacctgctggacgaggagtgcaaggtgcccaagggcaccgaccagaactgggcccagaagctgtacgacagacacagcagcagccagcacttccagaagcccagaatgagcaacaccgccttcatcatcgtgcacttcgccgacaaggtggagtacctgagcgacggcttcctggagaagaacagagacaccgtgtacgaggagcagatcaacatcctgaaggccagcaagttccccctggtggccgacctgttccacgacgacaaggaccccgtgcccgccaccacccccggcaagggcagcagcagcaagatcagcgtgagaagcgccagaccccccatgaaggtgagcaacaaggagcacaagaagaccgtgggccaccagttcagaaccagcctgcacctgctgatggagaccctgaacgccaccaccccccactacgtgagatgcatcaagcccaacgacgagaagctgcccttccacttcgaccccaagagagccgtgcagcagctgagagcctgcggcgtgctggagaccatcagaatcagcgccgccggctaccccagcagatgggcctaccacgacttcttcaacagatacagagtgctggtgaagaagagagagctggccaacaccgacaagaaggccatctgcagaagcgtgctggagaacctgatcaaggaccccgacaagttccagttcggcagaaccaagatcttcttcagagccggccaggtggcctacctggagaagctgagagccgacaagttcagaaccgccaccatcatgatccagaagaccgtgagaggctggctgcagaaggtgaagtaccacagactgaagggcgccaccctgaccctgcagagatactgcagaggccacctggccagaagactggccgagcacctgagaagaatcagagccgccgtggtgctgcagaagcactacagaatgcagagagccagacaggcctaccagagagtgagaagagccgccgtggtgatccaggccttcaccagagccatgttcgtgagaagaacctacagacaggtgctgatggagcacaaggccaccaccatccagaagcacgtgagaggctggatggccagaagacacttccagagactgagagacgccgccatcgtgatccagtgcgccttcagaatgctgaaggccagaagagagctgaaggccctgagaatcgaggccagaagcgccgagcacctgaagagactgaacgtgggcatggagaacaaggtggtgcagctgcagagaaagatcgacgagcagaacaaggagttcaagaccctgagcgagcagctgagcgtgaccaccagcacctacaccatggaggtggagagactgaagaaggagctggtgcactaccagcagagccccggcgaggacaccagcctgagactgcaggaggaggtggagagcctgagaaccgagctgcagagagcccacagcgagagaaagatcctggaggacgcccacagcagagagaaggacgagctgagaaagagagtggccgacctggagcaggagaacgccctgctgaaggacgagaaggagcagctgaacaaccagatcctgtgccagagcaaggacgagttcgcccagaacagcgtgaaggagaacctgatgaagaaggagctggaggaggagagaagcagataccagaacctggtgaaggagtacagccagctggagcagagatacgacaacctgagagacgagatgaccatcatcaagcagacccccggccacagaagaaaccccagcaaccagagcagcctggagagcgacagcaactaccccagcatcagcaccagcgagatcggcgacaccgaggacgccctgcagcaggtggaggagatcggcctggagaaggccgccatggacatgaccgtgttcctgaagctgcagaagagagtgagagagctggagcaggagagaaagaagctgcaggtgcagctggagaagagagagcagcaggacagcaagaaggtgcaggccgagcccccccagaccgacatcgacctggaccccaacgccgacctggcctacaacagcctgaagagacaggagctggagagcgagaacaagaagctgaagaacgacctgaacgagctgagaaaggccgtggccgaccaggccacccagaacaacagcagccacggcagccccgacagctacagcctgctgctgaaccagctgaagctggcccacgaggagctggaggtgagaaaggaggaggtgctgatcctgagaacccagatcgtgagcgccgaccagagaagactggccggcagaaacgccgagcccaacatcaacgccagaagcagctggcccaacagcgagaagcacgtggaccaggaggacgccatcgaggcctaccacggcgtgtgccagaccaacagcaagaccgaggactggggctacctgaacgaggacggcgagctgggcctggcctaccagggcctgaagcaggtggccagactgctggaggcccagctgcaggcccagagcctggagcacgaggaggaggtggagcacctgaaggcccagctggaggccctgaaggaggagatggacaagcagcagcagaccttctgccagaccctgctgctgagccccgaggcccaggtggagttcggcgtgcagcaggagatcagcagactgaccaacgagaacctggacctgaaggagctggtggagaagctggagaagaacgagagaaagctgaagaagcagctgaagatctacatgaagaaggcccaggacctggaggccgcccaggccctggcccagagcgagagaaagagacacgagctgaacagacaggtgaccgtgcagagaaaggagaaggacttccagggcatgctggagtaccacaaggaggacgaggccctgctgatcagaaacctggtgaccgacctgaagccccagatgctgagcggcaccgtgccctgcctgcccgcctacatcctgtacatgtgcatcagacacgccgactacaccaacgacgacctgaaggtgcacagcctgctgaccagcaccatcaacggcatcaagaaggtgctgaagaagcacaacgacgacttcgagatgaccagcttctggctgagcaacacctgcagactgctgcactgcctgaagcagtacagcggcgacgagggcttcatgacccagaacaccgccaagcagaacgagcactgcctgaagaacttcgacctgaccgagtacagacaggtgctgagcgacctgagcatccagatctaccagcagctgatcaagatcgccgagggcgtgctgcagcccatgatcgtgagcgccatgctggagaacgagagcatccagggcctgagcggcgtgaagcccaccggctacagaaagagaagcagcagcatggccgacggcgacaacagctactgcctggaggccatcatcagacagatgaacgccttccacaccgtgatgtgcgaccagggcctggaccccgagatcatcctgcaggtgttcaagcagctgttctacatgatcaacgccgtgaccctgaacaacctgctgctgagaaaggacgtgtgcagctggagcaccggcatgcagctgagatacaacatcagccagctggaggagtggctgagaggcagaaacctgcaccagagcggcgccgtgcagaccatggagcccctgatccaggccgcccagctgctgcagctgaagaagaagacccaggaggacgccgaggccatctgcagcctgtgcaccagcctgagcacccagcagatcgtgaagatcctgaacctgtacacccccctgaacgagttcgaggagagagtgaccgtggccttcatcagaaccatccaggcccagctgcaggagagaaacgacccccagcagctgctgctggacgccaagcacatgttccccgtgctgttccccttcaaccccagcagcctgaccatggacagcatccacatccccgcctgcctgaacctggagttcctgaacgaggtgtag

SEQ ID NO: 90042 - DNA, 2892 bp, synthetic construct
  misc_feature 1..2892: note = Description of Artificial Sequence: Synthetic coding sequence
  source 1..2892: mol_type = other DNA
atggagcacaaggccaccaccatccagaagcacgtgagaggctggatggccagaagacacttccagagactgagagacgccgccatcgtgatccagtgcgccttcagaatgctgaaggccagaagagagctgaaggccctgagaatcgaggccagaagcgccgagcacctgaagagactgaacgtgggcatggagaacaaggtggtgcagctgcagagaaagatcgacgagcagaacaaggagttcaagaccctgagcgagcagctgagcgtgaccaccagcacctacaccatggaggtggagagactgaagaaggagctggtgcactaccagcagagccccggcgaggacaccagcctgagactgcaggaggaggtggagagcctgagaaccgagctgcagagagcccacagcgagagaaagatcctggaggacgcccacagcagagagaaggacgagctgagaaagagagtggccgacctggagcaggagaacgccctgctgaaggacgagaaggagcagctgaacaaccagatcctgtgccagagcaaggacgagttcgcccagaacagcgtgaaggagaacctgatgaagaaggagctggaggaggagagaagcagataccagaacctggtgaaggagtacagccagctggagcagagatacgacaacctgagagacgagatgaccatcatcaagcagacccccggccacagaagaaaccccagcaaccagagcagcctggagagcgacagcaactaccccagcatcagcaccagcgagatcggcgacaccgaggacgccctgcagcaggtggaggagatcggcctggagaaggccgccatggacatgaccgtgttcctgaagctgcagaagagagtgagagagctggagcaggagagaaagaagctgcaggtgcagctggagaagagagagcagcaggacagcaagaaggtgcaggccgagcccccccagaccgacatcgacctggaccccaacgccgacctggcctacaacagcctgaagagacaggagctggagagcgagaacaagaagctgaagaacgacctgaacgagctgagaaaggccgtggccgaccaggccacccagaacaacagcagccacggcagccccgacagctacagcctgctgctgaaccagctgaagctggcccacgaggagctggaggtgagaaaggaggaggtgctgatcctgagaacccagatcgtgagcgccgaccagagaagactggccggcagaaacgccgagcccaacatcaacgccagaagcagctggcccaacagcgagaagcacgtggaccaggaggacgccatcgaggcctaccacggcgtgtgccagaccaacagactgctggaggcccagctgcaggcccagagcctggagcacgaggaggaggtggagcacctgaaggcccagctggaggccctgaaggaggagatggacaagcagcagcagaccttctgccagaccctgctgctgagccccgaggcccaggtggagttcggcgtgcagcaggagatcagcagactgaccaacgagaacctggacctgaaggagctggtggagaagctggagaagaacgagagaaagctgaagaagcagctgaagatctacatgaagaaggcccaggacctggaggccgcccaggccctggcccagagcgagagaaagagacacgagctgaacagacaggtgaccgtgcagagaaaggagaaggacttccagggcatgctggagtaccacaaggaggacgaggccctgctgatcagaaacctggtgaccgacctgaagccccagatgctgagcggcaccgtgccctgcctgcccgcctacatcctgtacatgtgcatcagacacgccgactacaccaacgacgacctgaaggtgcacagcctgctgaccagcaccatcaacggcatcaagaaggtgctgaagaagcacaacgacgacttcgagatgaccagcttctggctgagcaacacctgcagactgctgcactgcctgaagcagtacagcggcgacgagggcttcatgacccagaacaccgccaagcagaacgagcactgcctgaagaacttcgacctgaccgagtacagacaggtgctgagcgacctgagcatccagatctaccagcagctgatcaagatcgccgagggcgtgctgcagcccatgatcgtgagcgccatgctggagaacgagagcatccagggcctgagcggcgtgaagcccaccggctacagaaagagaagcagcagcatggccgacggcgacaacagctactgcctggaggccatcatcagacagatgaacgccttccacaccgtgatgtgcgaccagggcctggaccccgagatcatcctgcaggtgttcaagcagctgttctacatgatcaacgccgtgaccctgaacaacctgctgctgagaaaggacgtgtgcagctggagcaccggcatgcagctgagatacaacatcagccagctggaggagtggctgagaggcagaaacctgcaccagagcggcgccgtgcagaccatggagcccctgatccaggccgcccagctgctgcagctgaagaagaagacccaggaggacgccgaggccatctgcagcctgtgcaccagcctgagcacccagcagatcgtgaagatcctgaacctgtacacccccctgaacgagttcgaggagagagtgaccgtggccttcatcagaaccatccaggcccagctgcaggagagaaacgacccccagcagctgctgctggacgccaagcacatgttccccgtgctgttccccttcaaccccagcagcctgaccatggacagcatccacatccccgcctgcctgaacctggagttcctgaacgaggtgtag

SEQ ID NO: 90043 - DNA, 2163 bp, synthetic construct
  misc_feature 1..2163: note = Description of Artificial Sequence: Synthetic coding sequence
  source 1..2163: mol_type = other DNA
atgcactggcccgtgaccagagagtgcaccagagtgtggatccccgaccccgacgaggtgtggagaagcgccgagctgaccaaggactacaaggagggcgacaagagcctgcagctgagactggaggacgagaccatcctggagtaccccatcgacgtgcagagaaaccagctgcccttcctgagaaaccccgacatcctggtgggcgagaacgacctgaccgccctgagctacctgcacgagcccgccgtgctgcacaacctgaaggtgagattcctggagagcaaccacatctacacctactgcggcatcgtgctggtggccatcaacccctacgagcagctgcccatctacggccaggacgtgatctacacctacagcggccagaacatgggcgacatggacccccacatcttcgccgtggccgaggaggcctacaagcagatggccagagacgagaagaaccagagcatcatcgtgagcggcgagagcggcgccggcaagaccgtgagcgccaagtacgccatgagatacttcgccaccgtgggcggcagcgccagcgagaccaacatcgaggagaaggtgctggccagcagccccatcatggaggccatcggcaacgccaagaccaccagaaacgacaacagcagcagattcggcaagtacatccagatcggcttcgacaagagataccacatcatcggcgccaacatgagaacctacctgctggagaagagcagagtggtgttccaggccgacgacgagagaaactaccacatcttctaccagctgtgcgccgccgccggcctgcccgagttcaaggagctggccctgaccagcgccgaggacttcttctacaccagccagggcggcgacaccagcatcgagggcgtggacgacgccgaggacttcgagaagaccagacaggccttcaccctgctgggcgtgaaggagagccaccagatgagcatcttcaagatcatcgccagcatcctgcacctgggcagcgtggccatccaggccgagagagacggcgacagctgcagcatcagcccccaggacgtgtacctgagcaacttctgcagactgctgggcgtggagcacagccagatggagcactggctgtgccacagaaagctggtgaccaccagcgagacctacgtgaagaccatgagcctgcagcaggtgatcaacgccagaaacgccctggccaagcacatctacgcccagctgttcggctggatcgtggagcacatcaacaaggccctgcacaccagcctgaagcagcacagcttcatcggcgtgctggacatctacggcttcgagaccttcgaggtgaacagcttcgagcagttctgcatcaactacgccaacgagaagctgcagcagcagttcaacagccacgtgttcaagctggagcaggaggagtacatgaaggagcagatcccctggaccctgatcgacttctacgacaaccagccctgcatcgacctgatcgaggccaagctgggcatcctggacctgctggacgaggagtgcaaggtgcccaagggcaccgaccagaactgggcccagaagctgtacgacagacacagcagcagccagcacttccagaagcccagaatgagcaacaccgccttcatcatcgtgcacttcgccgacaaggtggagtacctgagcgacggcttcctggagaagaacagagacaccgtgtacgaggagcagatcaacatcctgaaggccagcaagttccccctggtggccgacctgttccacgacgacaaggaccccgtgcccgccaccacccccggcaagggcagcagcagcaagatcagcgtgagaagcgccagaccccccatgaaggtgagcaacaaggagcacaagaagaccgtgggccaccagttcagaaccagcctgagcacccagcagatcgtgaagatcctgaacctgtacacccccctgaacgagttcgaggagagagtgaccgtggccttcatcagaaccatccaggcccagctgcaggagagaaacgacccccagcagctgctgctggacgccaagcacatgttccccgtgctgttccccttcaaccccagcagcctgaccatggacagcatccacatccccgcctgcctgaacctggagttcctgaacgaggtgtag

SEQ ID NO: 90044 - DNA, 5229 bp, synthetic construct
  misc_feature 1..5229: note = Description of Artificial Sequence: Synthetic coding sequence
  source 1..5229: mol_type = other DNA
atggccgtggccgagctgtacacccagtacaacagagtgtggatccccgaccccgaggaggtgtggaagagcgccgagatcgccaaggactacagagtgggcgacaaggtgctgagactgctgctggaggacggcaccgagctggactacagcgtgaaccccgagagcctgccccccctgagaaaccccgacatcctggtgggcgagaacgacctgaccgccctgagctacctgcacgagcccgccgtgctgcacaacctgagaatcagattcgccgagagcaagctgatctacacctacagcggcatcatcctggtggccatgaacccctacaagcagctgcccatctacggcgacgccatcatccacgcctacagcggccagaacatgggcgacatggacccccacatcttcgccgtggccgaggaggcctacaagcagatggccagaaacaacagaaaccagagcatcatcgtgagcggcgagagcggcgccggcaagaccgtgagcgccagatacgccatgagatacttcgccaccgtgagcaagagcggcagcaacgcccacgtggaggacaaggtgctggccagcaaccccatcaccgaggccgtgggcaacgccaagaccaccagaaacgacaacagcagcagattcggcaagtacaccgagatcagcttcgacgagcagaaccagatcatcggcgccaacatgagcacctacctgctggagaagagcagagtggtgttccagagcgagaacgagagaaactaccacatcttctaccagctgtgcgccagcgcccagcagagcgagttcaagcacctgaagctgggcagcgccgaggagttcaactacaccagaatgggcggcaacaccgtgatcgagggcgtgaacgacagagccgagatggtggagacccagaagaccttcaccctgctgggcttcaaggaggacttccagatggacgtgttcaagatcctggccgccatcctgcacctgggcaacgtgcagatcaccgccgtgggcaacgagagaagcagcgtgagcgaggacgacagccacctgaaggtgttctgcgagctgctgggcctggagagcggcagagtggcccagtggctgtgcaacagaaagatcgtgaccagcagcgagaccgtggtgaagcccatgaccagaccccaggccgtgaacgccagagacgccctggccaagaagatctacgcccacctgttcgacttcatcgtggagagaatcaaccaggccctgcagttcagcggcaagcagcacaccttcatcggcgtgctggacatctacggcttcgagaccttcgacgtgaacagcttcgagcagttctgcatcaactacgccaacgagaagctgcagcagcagttcaacatgcacgtgttcaagctggagcaggaggagtacatgaaggaggacatcccctggaccctgatcgacttctacgacaaccagcccgtgatcgacctgatcgaggccaagatgggcatcctggagctgctggacgaggagtgcctgctgccccacggcaccgacgagaactggctgcagaagctgtacaacaacttcgtgaacagaaaccccctgttcgagaagcccagaatgagcaacaccagcttcgtgatccagcacttcgccgacaaggtggagtacaagtgcgagggcttcctggagaagaacagagacaccgtgtacgacatgctggtggagatcctgagagccagcaagttccacctgtgcgccaacttcttccaggagaaccccaccccccccagccccttcggcagcatgatcaccgtgaagagcgccaagcaggtgatcaagcccaacagcaagcacttcagaaccaccgtgggcagcaagttcagaagcagcctgtacctgctgatggagaccctgaacgccaccaccccccactacgtgagatgcatcaagcccaacgacgagaagctgcccttcgagttcgacagcaagagaatcgtgcagcagctgagagcctgcggcgtgctggagaccatcagaatcagcgcccagagctaccccagcagatggacctacatcgagttctacagcagatacggcatcctgatgaccaagcaggagctgagcttcagcgacaagaaggaggtgtgcaaggtggtgctgcacagactgatccaggacagcaaccagtaccagttcggcaagaccaagatcttcttcagagccggccaggtggcctacctggagaagctgagactggacaagctgagacagagctgcgtgatggtgcagaagcacatgagaggctggctgcagagaaagaagttcctgagagagagaagagccgccctgatcatccagcagtacttcagaggccagcagaccgtgagaaaggccatcaccgccgtggccctgaaggaggcctgggccgccatcatcatccagaagcactgcagaggctacctggtgagaagcctgtaccagctgatcagaatggccaccatcaccatgcaggcctacagcagaggcttcctggccagaagaagatacagaaagatgctggaggagcacaaggccgtgatcctgcagaagtacgccagagcctggctggccagaagaagattccagagcatcagaagattcgtgctgaacatccagctgacctacagagtgcagagactgcagaagaagctggaggaccagaacaaggagaaccacggcctggtggagaagctgaccagcctggccgccctgagagccggcgacgtggagaagatccagaagctggaggccgagctggagaaggccgccacccacagaagaaactacgaggagaagggcaagagatacagagacgccgtggaggagaagctggccaagctgcagaagcacaacagcgagctggagacccagaaggagcagatccagctgaagctgcaggagaagaccgaggagctgaaggagaagatggacaacctgaccaagcagctgttcgacgacgtgcagaaggaggagagacagagaatgctgctggagaagagcttcgagctgaagacccaggactacgagaagcagatccagagcctgaaggaggagatcaaggccctgaaggacgagaagatgcagctgcagcacctggtggagggcgagcacgtgaccagcgacggcctgaaggccgaggtggccagactgagcaagcaggtgaagaccatcagcgagttcgagaaggagatcgagctgctgcaggcccagaagatcgacgtggagaagcacgtgcagagccagaagagagagatgagagagaagatgagcgagatcaccaagcagctgctggagagctacgacatcgaggacgtgagaagcagactgagcgtggaggacctggagcacctgaacgaggacggcgagctgtggttcgcctacgagggcctgaagaaggccaccagagtgctggagagccacttccagagccagaaggactgctacgagaaggagatcgaggccctgaacttcaaggtggtgcacctgagccaggagatcaaccacctgcagaagctgttcagagaggagaacgacatcaacgagagcatcagacacgaggtgaccagactgaccagcgagaacatgatgatccccgacttcaagcagcagatcagcgagctggagaagcagaagcaggacctggagatcagactgaacgagcaggccgagaagatgaagggcaagctggaggagctgagcaaccagctgcacagaagccaggaggaggagggcacccagagaaaggccctggaggcccagaacgagatccacaccaaggagaaggagaagctgatcgacaagatccaggagatgcaggaggccagcgaccacctgaagaagcagttcgagaccgagagcgaggtgaagtgcaacttcagacaggaggccagcagactgaccctggagaacagagacctggaggaggagctggacatgaaggacagagtgatcaagaagctgcaggaccaggtgaagaccctgagcaagaccatcggcaaggccaacgacgtgcacagcagcagcggccccaaggagtacctgggcatgctgcagtacaagagagaggacgaggccaagctgatccagaacctgatcctggacctgaagcccagaggcgtggtggtgaacatgatccccggcctgcccgcccacatcctgttcatgtgcgtgagatacgccgacagcctgaacgacgccaacatgctgaagagcctgatgaacagcaccatcaacggcatcaagcaggtggtgaaggagcacctggaggacttcgagatgctgagcttctggctgagcaacacctgccacttcctgaactgcctgaagcagtacagcggcgaggaggagttcatgaagcacaacagcccccagcagaacaagaactgcctgaacaacttcgacctgagcgagtacagacagatcctgagcgacgtggccatcagaatctaccaccagttcatcatcatcatggagaagaacatccagcccatcatcgtgcccggcatgctggagtacgagagcctgcagggcatcagcggcctgaagcccaccggcttcagaaagagaagcagcagcatcgacgacaccgacggctacaccatgaccagcgtgctgcagcagctgagctacttctacaccaccatgtgccagaacggcctggaccccgagctggtgagacaggccgtgaagcagctgttcttcctgatcggcgccgtgaccctgaacagcctgttcctgagaaaggacatgtgcagctgcagaaagggcatgcagatcagatgcaacatcagctacctggaggagtggctgaaggacaagaacctgcagaacagcctggccaaggagaccctggagcccctgagccaggccgcctggctgctgcaggtgaagaagaccaccgacagcgacgccaaggagatctacgagagatgcaccagcctgagcgccgtgcagatcatcaagatcctgaacagctacacccccatcgacgacttcgagaagagagtgacccccagcttcgtgagaaaggtgcaggccctgctgaacagcagagaggacagcagccagctgatgctggacaccaagtacctgttccaggtgaccttccccttcacccccagcccccacgccctggagatgatccagatccccagcagcttcaagctgggcttcctgaacagactgtag

SEQ ID NO: 90045 - DNA, 1122 bp, synthetic construct
  misc_feature 1..1122: note = Description of Artificial Sequence: Synthetic coding sequence
  source 1..1122: mol_type = other DNA
atgcccagcagcacccccaccgccggcagaacctgggccatctggacccacacctacctgccctggcagaagagacacaccagcagatggcccgacggcaagagcgaggcccaggacctggacctgctgaccctgtacctgaacctgtactgcatcacccccgccgccgcccccgagctgccccccctgtacgtgttcgtgtgcgagctggacagccagagagcccccatccccggcagcgacgcctacaacgagggcgccggcggcgcctacatgagaaacaacagaaaccagagcatcatcgtgagcggcgagagcggcgccggcaagaccgtgagcgccagatacgccatgagatacttcgccaccgtgagcaagagcggcagcaacgcccacgtggaggacaaggtgctggccagcaaccccatcaccgaggccgtgggcaacgccaagaccaccagaaacgacaacagcagcagattcggcaagtacaccgagatcagcttcgacgagcagaaccagatcatcggcgccaacatgagcacctacctgctggagaagagcagagtggtgttccagagcgagaacgagagaaactaccacatcttctaccagctgtgcgccagcgcccagcagagcgagttcaagcacctgaagctgggcagcgccgaggagttcaactacaccagaatgggcggcaacaccgtgatcgagggcgtgaacgacagagccgagatggtggagacccagaagaccttcaccctgctgggcttcaaggaggacttccagatggacgtgttcaagatcctggccgccatcctgcacctgggcaacgtgcagatcaccgccgtgggcaacgagagaagcagcgtgagcgaggacgacagccacctgaaggtgttctgcgagctgctgggcctggagagcggcagagtggcccagtggctgtgcaacagaaagatcgtgaccagcagcgagaccgtggtgaagcccatgaccagaccccaggccgtgaacgccagagacgccctggccaagaagatctacgcccacctgttcgacttcatcgtggagagaatcaaccaggccctgcagttcagcgtgctgaagcccctgatgtag

SEQ ID NO: 90046 - DNA, 321 bp, synthetic construct
  misc_feature 1..321: note = Description of Artificial Sequence: Synthetic coding sequence
  source 1..321: mol_type = other DNA
atgaacccctacaagcagctgcccatctacggcgacgccatcatccacgcctacagcggccagaacatgggcgacatggacccccacatcttcgccgtggccgaggaggcctacaagcagatggccagaaacaacagaaaccagagcatcatcgtgagcggcgagagcggcgccggcaagaccgtgagcgccagatacgccatgagatacttcgccaccgtgagcaagagcggcagcaacgcccacgtggaggacaaggtgctggccagcaaccccatcaccgaggccgtgggcaacgccaagaccaccagaaacgactag

SEQ ID NO: 90047 - DNA, 1293 bp, synthetic construct
  misc_feature 1..1293: note = Description of Artificial Sequence: Synthetic coding sequence
  source 1..1293: mol_type = other DNA
atggccgtggccgagctgtacacccagtacaacagagtgtggatccccgaccccgaggaggtgtggaagagcgccgagatcgccaaggactacagagtgggcgacaaggtgctgagactgctgctggaggacggcaccgagctggactacagcgtgaaccccgagagcctgccccccctgagaaaccccgacatcctggtgggcgagaacgacctgaccgccctgagctacctgcacgagcccgccgtgctgcacaacctgagaatcagattcgccgagagcaagctgatctacacctacagcggcatcatcctggtggccatgaacccctacaagcagctgcccatctacggcgacgccatcatccacgcctacagcggccagaacatgggcgacatggacccccacatcttcgccgtggccgaggaggcctacaagcagatggccagaaacaacagaaaccagagcatcatcgtgagcggcgagagcggcgccggcaagaccgtgagcgccagatacgccatgagatacttcgccaccgtgagcaagagcggcagcaacgcccacgtggaggacaaggtgctggccagcaaccccatcaccgaggccgtgggcaacgccaagaccaccagaaacgacaacagcagcagattcggcaagtacaccgagatcagcttcgacgagcagaaccagatcatcggcgccaacatgagcacctacctgctggagaagagcagagtggtgttccagagcgagaacgagagaaactaccacatcttctaccagctgtgcgccagcgcccagcagagcgagttcaagcacctgaagctgggcagcgccgaggagttcaactacaccagaatgggcggcaacaccgtgatcgagggcgtgaacgacagagccgagatggtggagacccagaagaccttcaccctgctgggcttcaaggaggacttccagatggacgtgttcaagatcctggccgccatcctgcacctgggcaacgtgcagatcaccgccgtgggcaacgagagaagcagcgtgagcgaggacgacagccacctgaaggtgttctgcgagctgctgggcctggagagcggcagagtggcccagtggctgtgcaacagaaagatcgtgaccagcagcgagaccgtggtgaagcccatgaccagaccccaggccgtgaacgccagagacgccctggccaagaagatctacgcccacctgttcgacttcatcgtggagagaatcaaccaggccctgcagttcagcgtgctgaagcccctgatgtag

SEQ ID NO: 90048 - DNA, 810 bp, synthetic construct
  misc_feature 1..810: note = Description of Artificial Sequence: Synthetic coding sequence
  source 1..810: mol_type = other DNA
atggccgtggccgagctgtacacccagtacaacagagtgtggatccccgaccccgaggaggtgtggaagagcgccgagatcgccaaggactacagagtgggcgacaaggtgctgagactgctgctggaggacggcaccgagctggactacagcgtgaaccccgagagcctgccccccctgagaaaccccgacatcctggtgggcgagaacgacctgaccgccctgagctacctgcacgagcccgccgtgctgcacaacctgagaatcagattcgccgagagcaagctgatctacacctacagcggcatcatcctggtggccatgaacccctacaagcagctgcccatctacggcgacgccatcatccacgcctacagcggccagaacatgggcgacatggacccccacatcttcgccgtggccgaggaggcctacaagcagatggccagaaacaacagaaaccagagcatcatcgtgagcggcgagagcggcgccggcaagaccgtgagcgccagatacgccatgagatacttcgccaccgtgagcaagagcggcagcaacgcccacgtggaggacaaggtgctggccagcaaccccatcaccgaggccgtgggcaacgccaagaccaccagaaacgacaacagcagcagattcggcaagtacaccgagatcagcttcgacgagcagaaccagatcatcggcgccaacatgagcacctacctgctggagaagagcagagtggtgttccagggcgtgcccaagaacctgatcatccaggagtgggaggccatcctgagcctgagagtgtag

SEQ ID NO: 90049 - DNA, 3762 bp, synthetic construct
  misc_feature 1..3762: note = Description of Artificial Sequence: Synthetic coding sequence
  source 1..3762: mol_type = other DNA
atggaggacggcaagcccgtgtgggccccccaccccaccgacggcttccagatgggcaacatcgtggacatcggccccgacagcctgaccatcgagcccctgaaccagaagggcaagaccttcctggccctgatcaaccaggtgttccccgccgaggaggacagcaagaaggacgtggaggacaactgcagcctgatgtacctgaacgaggccaccctgctgcacaacatcaaggtgagatacagcaaggacagaatctacacctacgtggccaacatcctgatcgccgtgaacccctacttcgacatccccaagatctacagcagcgaggccatcaagagctaccagggcaagagcctgggcaccagacccccccacgtgttcgccatcgccgacaaggccttcagagacatgaaggtgctgaagatgagccagagcatcatcgtgagcggcgagagcggcgccggcaagaccgagaacaccaagttcgtgctgagatacctgaccgagagctacggcaccggccaggacatcgacgacagaatcgtggaggccaaccccctgctggaggccttcggcaacgccaagaccgtgagaaacaacaacagcagcagattcggcaagttcgtggagatccacttcaacgagaagagcagcgtggtgggcggcttcgtgagccactacctgctggagaagagcagaatctgcgtgcagggcaaggaggagagaaactaccacatcttctacagactgtgcgccggcgccagcgaggacatcagagagaagctgcacctgagcagccccgacaacttcagatacctgaacagaggctgcaccagatacttcgccaacaaggagaccgacaagcagatcctgcagaacagaaagagccccgagtacctgaaggccggcagcatgaaggaccccctgctggacgaccacggcgacttcatcagaatgtgcaccgccatgaagaagatcggcctggacgacgaggagaagctggacctgttcagagtggtggccggcgtgctgcacctgggcaacatcgacttcgaggaggccggcagcaccagcggcggctgcaacctgaagaacaagagcgcccagagcctggagtactgcgccgagctgctgggcctggaccaggacgacctgagagtgagcctgaccaccagagtgatgctgaccaccgccggcggcaccaagggcaccgtgatcaaggtgcccctgaaggtggagcaggccaacaacgccagagacgccctggccaagaccgtgtacagccacctgttcgaccacgtggtgaacagagtgaaccagtgcttccccttcgagaccagcagctacttcatcggcgtgctggacatcgccggcttcgagtacttcgagcacaacagcttcgagcagttctgcatcaactactgcaacgagaagctgcagcagttcttcaacgagagaatcctgaaggaggagcaggagctgtaccagaaggagggcctgggcgtgaacgaggtgcactacgtggacaaccaggactgcatcgacctgatcgaggccaagctggtgggcatcctggacatcctggacgaggagaacagactgccccagcccagcgaccagcacttcaccagcgccgtgcaccagaagcacaaggaccacttcagactgaccatccccagaaagagcaagctggccgtgcacagaaacatcagagacgacgagggcttcatcatcagacacttcgccggcgccgtgtgctacgagaccacccagttcgtggagaagaacaacgacgccctgcacatgagcctggagagcctgatctgcgagagcagagacaagttcatcagagagctgttcgagagcagcaccaacaacaacaaggacaccaagcagaaggccggcaagctgagcttcatcagcgtgggcaacaagttcaagacccagctgaacctgctgctggacaagctgagaagcaccggcgccagcttcatcagatgcatcaagcccaacctgaagatgaccagccaccacttcgagggcgcccagatcctgagccagctgcagtgcagcggcatggtgagcgtgctggacctgatgcagggcggctaccccagcagagccagcttccacgagctgtacaacatgtacaagaagtacatgcccgacaagctggccagactggaccccagactgttctgcaaggccctgttcaaggccctgggcctgaacgagaacgactacaagttcggcctgaccaaggtgttcttcagacccggcaagttcgccgagttcgaccagatcatgaagagcgaccccgaccacctggccgagctggtgaagagagtgaaccactggctgacctgcagcagatggaagaaggtgcagtggtgcagcctgagcgtgatcaagctgaagaacaagatcaagtacagagccgaggcctgcatcaagatgcagaagaccatcagaatgtggctgtgcaagagaagacacaagcccagaatcgacggcctggtgaaggtgggcaccctgaagaagagactggacaagttcaacgaggtggtgagcgtgctgaaggacggcaagcccgagatgaacaagcagatcaagaacctggagatcagcatcgacaccctgatggccaagatcaagagcaccatgatgacccaggagcagatccagaaggagtacgacgccctggtgaagagcagcgaggagctgctgagcgccctgcagaagaagaagcagcaggaggaggaggccgagagactgagaagaatccaggaggagatggagaaggagagaaagagaagagaggaggacgagaagagaagaagaaaggaggaggaggagagaagaatgaagctggagatggaggccaagagaaagcaggaggaggaggagagaaagaagagagaggacgacgagaagagaatccaggccgaggtggaggcccagctggccagacagaaggaggaggagagccagcagcaggccgtgctggagcaggagagaagagacagagagctggccctgagaatcgcccagagcgaggccgagctgatcagcgacgaggcccaggccgacctggccctgagaagaggccccgccgtgctggccaccaaggccgccgccggcaccaagaagtacgacctgagcaagtggaagtacgccgagctgagagacaccatcaacaccagctgcgacatcgagctgctggccgcctgcagagaggagttccacagaagactgaaggtgtaccacgcctggaagagcaagaacaagaagagaaacaccgagaccgagcagagagcccccaagagcgtgaccgactacgcccagcagaaccccgccgcccagatccccgccagacagagagagatcgagatgaacagacagcagagattcttcagaatccccttcatcagacccgccgaccagtacaaggacccccagagcaagaagaagggctggtggtacgcccacttcgacggcccctggatcgccagacagatggagctgcaccccgacaagccccccatcctgctggtggccggcaaggacgacatggagatgtgcgagctgaacctggaggagaccggcctgaccagaaagagaggcgccgagatcctgcccagacagttcgaggagatctgggagagatgcggcggcatccagtacctgcagaacgccatcgagagcagacaggccagacccacctacgccaccgccatgctgcagagcctgctgaagtag

SEQ ID NO: 90050 - DNA, 3858 bp, synthetic construct
  misc_feature 1..3858: note = Description of Artificial Sequence: Synthetic coding sequence
  source 1..3858: mol_type = other DNA
atggaggacggcaagcccgtgtgggccccccaccccaccgacggcttccagatgggcaacatcgtggacatcggccccgacagcctgaccatcgagcccctgaaccagaagggcaagaccttcctggccctgatcaaccaggtgttccccgccgaggaggacagcaagaaggacgtggaggacaactgcagcctgatgtacctgaacgaggccaccctgctgcacaacatcaaggtgagatacagcaaggacagaatctacacctacgtggccaacatcctgatcgccgtgaacccctacttcgacatccccaagatctacagcagcgaggccatcaagagctaccagggcaagagcctgggcaccagacccccccacgtgttcgccatcgccgacaaggccttcagagacatgaaggtgctgaagatgagccagagcatcatcgtgagcggcgagagcggcgccggcaagaccgagaacaccaagttcgtgctgagatacctgaccgagagctacggcaccggccaggacatcgacgacagaatcgtggaggccaaccccctgctggaggccttcggcaacgccaagaccgtgagaaacaacaacagcagcagattcggcaagttcgtggagatccacttcaacgagaagagcagcgtggtgggcggcttcgtgagccactacctgctggagaagagcagaatctgcgtgcagggcaaggaggagagaaactaccacatcttctacagactgtgcgccggcgccagcgaggacatcagagagaagctgcacctgagcagccccgacaacttcagatacctgaacagaggctgcaccagatacttcgccaacaaggagaccgacaagcagatcctgcagaacagaaagagccccgagtacctgaaggccggcagcatgaaggaccccctgctggacgaccacggcgacttcatcagaatgtgcaccgccatgaagaagatcggcctggacgacgaggagaagctggacctgttcagagtggtggccggcgtgctgcacctgggcaacatcgacttcgaggaggccggcagcaccagcggcggctgcaacctgaagaacaagagcgcccagagcctggagtactgcgccgagctgctgggcctggaccaggacgacctgagagtgagcctgaccaccagagtgatgctgaccaccgccggcggcaccaagggcaccgtgatcaaggtgcccctgaaggtggagcaggccaacaacgccagagacgccctggccaagaccgtgtacagccacctgttcgaccacgtggtgaacagagtgaaccagtgcttccccttcgagaccagcagctacttcatcggcgtgctggacatcgccggcttcgagtacttcgagcacaacagcttcgagcagttctgcatcaactactgcaacgagaagctgcagcagttcttcaacgagagaatcctgaaggaggagcaggagctgtaccagaaggagggcctgggcgtgaacgaggtgcactacgtggacaaccaggactgcatcgacctgatcgaggccaagctggtgggcatcctggacatcctggacgaggagaacagactgccccagcccagcgaccagcacttcaccagcgccgtgcaccagaagcacaaggaccacttcagactgaccatccccagaaagagcaagctggccgtgcacagaaacatcagagacgacgagggcttcatcatcagacacttcgccggcgccgtgtgctacgagaccacccagttcgtggagaagaacaacgacgccctgcacatgagcctggagagcctgatctgcgagagcagagacaagttcatcagagagctgttcgagagcagcaccaacaacaacaaggacaccaagcagaaggccggcaagctgagcttcatcagcgtgggcaacaagttcaagacccagctgaacctgctgctggacaagctgagaagcaccggcgccagcttcatcagatgcatcaagcccaacctgaagatgaccagccaccacttcgagggcgcccagatcctgagccagctgcagtgcagcggcatggtgagcgtgctggacctgatgcagggcggctaccccagcagagccagcttccacgagctgtacaacatgtacaagaagtacatgcccgacaagctggccagactggaccccagactgttctgcaaggccctgttcaaggccctgggcctgaacgagaacgactacaagttcggcctgaccaaggtgttcttcagacccggcaagttcgccgagttcgaccagatcatgaagagcgaccccgaccacctggccgagctggtgaagagagtgaaccactggctgacctgcagcagatggaagaaggtgcagtggtgcagcctgagcgtgatcaagctgaagaacaagatcaagtacagagccgaggcctgcatcaagatgcagaagaccatcagaatgtggctgtgcaagagaagacacaagcccagaatcgacggcctggtgaaggtgggcaccctgaagaagagactggacaagttcaacgaggtggtgagcgtgctgaaggacggcaagcccgagatgaacaagcagatcaagaacctggagatcagcatcgacaccctgatggccaagatcaagagcaccatgatgacccaggagcagatccagaaggagtacgacgccctggtgaagagcagcgaggagctgctgagcgccctgcagaagaagaagcagcaggaggaggaggccgagagactgagaagaatccaggaggagatggagaaggagagaaagagaagagaggaggacgagaagagaagaagaaaggaggaggaggagagaagaatgaagctggagatggaggccaagagaaagcaggaggaggaggagagaaagaagagagaggacgacgagaagagaatccaggccgaggtggaggcccagctggccagacagaaggaggaggagagccagcagcaggccgtgctggagcaggagagaagagacagagagctggccctgagaatcgcccagagcgaggccgagctgatcagcgacgaggcccaggccgacctggccctgagaagaaacgacggcaccagacccaagatgacccccgagcagatggccaaggagatgagcgagttcctgagcagaggccccgccgtgctggccaccaaggccgccgccggcaccaagaagtacgacctgagcaagtggaagtacgccgagctgagagacaccatcaacaccagctgcgacatcgagctgctggccgcctgcagagaggagttccacagaagactgaaggtgtaccacgcctggaagagcaagaacaagaagagaaacaccgagaccgagcagagagcccccaagagcgtgaccgactacgacttcgcccccttcctgaacaacagcccccagcagaaccccgccgcccagatccccgccagacagagagagatcgagatgaacagacagcagagattcttcagaatccccttcatcagacccgccgaccagtacaaggacccccagagcaagaagaagggctggtggtacgcccacttcgacggcccctggatcgccagacagatggagctgcaccccgacaagccccccatcctgctggtggccggcaaggacgacatggagatgtgcgagctgaacctggaggagaccggcctgaccagaaagagaggcgccgagatcctgcccagacagttcgaggagatctgggagagatgcggcggcatccagtacctgcagaacgccatcgagagcagacaggccagacccacctacgccaccgccatgctgcagagcctgctgaagtag

SEQ ID NO: 90051 - DNA, 3861 bp, synthetic construct
  misc_feature 1..3861: note = Description of Artificial Sequence: Synthetic coding sequence
  source 1..3861: mol_type = other DNA
atggaggacggcaagcccgtgtgggccccccaccccaccgacggcttccagatgggcaacatcgtggacatcggccccgacagcctgaccatcgagcccctgaaccagaagggcaagaccttcctggccctgatcaaccaggtgttccccgccgaggaggacagcaagaaggacgtggaggacaactgcagcctgatgtacctgaacgaggccaccctgctgcacaacatcaaggtgagatacagcaaggacagaatctacacctacgtggccaacatcctgatcgccgtgaacccctacttcgacatccccaagatctacagcagcgaggccatcaagagctaccagggcaagagcctgggcaccagacccccccacgtgttcgccatcgccgacaaggccttcagagacatgaaggtgctgaagatgagccagagcatcatcgtgagcggcgagagcggcgccggcaagaccgagaacaccaagttcgtgctgagatacctgaccgagagctacggcaccggccaggacatcgacgacagaatcgtggaggccaaccccctgctggaggccttcggcaacgccaagaccgtgagaaacaacaacagcagcagattcggcaagttcgtggagatccacttcaacgagaagagcagcgtggtgggcggcttcgtgagccactacctgctggagaagagcagaatctgcgtgcagggcaaggaggagagaaactaccacatcttctacagactgtgcgccggcgccagcgaggacatcagagagaagctgcacctgagcagccccgacaacttcagatacctgaacagaggctgcaccagatacttcgccaacaaggagaccgacaagcagatcctgcagaacagaaagagccccgagtacctgaaggccggcagcatgaaggaccccctgctggacgaccacggcgacttcatcagaatgtgcaccgccatgaagaagatcggcctggacgacgaggagaagctggacctgttcagagtggtggccggcgtgctgcacctgggcaacatcgacttcgaggaggccggcagcaccagcggcggctgcaacctgaagaacaagagcgcccagagcctggagtactgcgccgagctgctgggcctggaccaggacgacctgagagtgagcctgaccaccagagtgatgctgaccaccgccggcggcaccaagggcaccgtgatcaaggtgcccctgaaggtggagcaggccaacaacgccagagacgccctggccaagaccgtgtacagccacctgttcgaccacgtggtgaacagagtgaaccagtgcttccccttcgagaccagcagctacttcatcggcgtgctggacatcgccggcttcgagtacttcgagcacaacagcttcgagcagttctgcatcaactactgcaacgagaagctgcagcagttcttcaacgagagaatcctgaaggaggagcaggagctgtaccagaaggagggcctgggcgtgaacgaggtgcactacgtggacaaccaggactgcatcgacctgatcgaggccaagctggtgggcatcctggacatcctggacgaggagaacagactgccccagcccagcgaccagcacttcaccagcgccgtgcaccagaagcacaaggaccacttcagactgaccatccccagaaagagcaagctggccgtgcacagaaacatcagagacgacgagggcttcatcatcagacacttcgccggcgccgtgtgctacgagaccacccagttcgtggagaagaacaacgacgccctgcacatgagcctggagagcctgatctgcgagagcagagacaagttcatcagagagctgttcgagagcagcaccaacaacaacaaggacaccaagcagaaggccggcaagctgagcttcatcagcgtgggcaacaagttcaagacccagctgaacctgctgctggacaagctgagaagcaccggcgccagcttcatcagatgcatcaagcccaacctgaagatgaccagccaccacttcgagggcgcccagatcctgagccagctgcagtgcagcggcatggtgagcgtgctggacctgatgcagggcggctaccccagcagagccagcttccacgagctgtacaacatgtacaagaagtacatgcccgacaagctggccagactggaccccagactgttctgcaaggccctgttcaaggccctgggcctgaacgagaacgactacaagttcggcctgaccaaggtgttcttcagacccggcaagttcgccgagttcgaccagatcatgaagagcgaccccgaccacctggccgagctggtgaagagagtgaaccactggctgacctgcagcagatggaagaaggtgcagtggtgcagcctgagcgtgatcaagctgaagaacaagatcaagtacagagccgaggcctgcatcaagatgcagaagaccatcagaatgtggctgtgcaagagaagacacaagcccagaatcgacggcctggtgaaggtgggcaccctgaagaagagactggacaagttcaacgaggtggtgagcgtgctgaaggacggcaagcccgagatgaacaagcagatcaagaacctggagatcagcatcgacaccctgatggccaagatcaagagcaccatgatgacccaggagcagatccagaaggagtacgacgccctggtgaagagcagcgaggagctgctgagcgccctgcagaagaagaagcagcaggaggaggaggccgagagactgagaagaatccaggaggagatggagaaggagagaaagagaagagaggaggacgagaagagaagaagaaaggaggaggaggagagaagaatgaagctggagatggaggccaagagaaagcaggaggaggaggagagaaagaagagagaggacgacgagaagagaatccaggccgaggtggaggcccagctggccagacagaaggaggaggagagccagcagcaggccgtgctggagcaggagagaagagacagagagctggccctgagaatcgcccagagcgaggccgagctgatcagcgacgaggcccaggccgacctggccctgagaagatacctggacagctaccccgtgaccagcaagaacgacggcaccagacccaagatgacccccgagcagatggccaaggagatgagcgagttcctgagcagaggccccgccgtgctggccaccaaggccgccgccggcaccaagaagtacgacctgagcaagtggaagtacgccgagctgagagacaccatcaacaccagctgcgacatcgagctgctggccgcctgcagagaggagttccacagaagactgaaggtgtaccacgcctggaagagcaagaacaagaagagaaacaccgagaccgagcagagagcccccaagagcgtgaccgactacgcccagcagaaccccgccgcccagatccccgccagacagagagagatcgagatgaacagacagcagagattcttcagaatccccttcatcagacccgccgaccagtacaaggacccccagagcaagaagaagggctggtggtacgcccacttcgacggcccctggatcgccagacagatggagctgcaccccgacaagccccccatcctgctggtggccggcaaggacgacatggagatgtgcgagctgaacctggaggagaccggcctgaccagaaagagaggcgccgagatcctgcccagacagttcgaggagatctgggagagatgcggcggcatccagtacctgcagaacgccatcgagagcagacaggccagacccacctacgccaccgccatgctgcagagcctgctgaagtag

SEQ ID NO: 90052 - DNA, 3789 bp, synthetic construct
  misc_feature 1..3789: note = Description of Artificial Sequence: Synthetic coding sequence
  source 1..3789: mol_type = other DNA
atggaggacggcaagcccgtgtgggccccccaccccaccgacggcttccagatgggcaacatcgtggacatcggccccgacagcctgaccatcgagcccctgaaccagaagggcaagaccttcctggccctgatcaaccaggtgttccccgccgaggaggacagcaagaaggacgtggaggacaactgcagcctgatgtacctgaacgaggccaccctgctgcacaacatcaaggtgagatacagcaaggacagaatctacacctacgtggccaacatcctgatcgccgtgaacccctacttcgacatccccaagatctacagcagcgaggccatcaagagctaccagggcaagagcctgggcaccagacccccccacgtgttcgccatcgccgacaaggccttcagagacatgaaggtgctgaagatgagccagagcatcatcgtgagcggcgagagcggcgccggcaagaccgagaacaccaagttcgtgctgagatacctgaccgagagctacggcaccggccaggacatcgacgacagaatcgtggaggccaaccccctgctggaggccttcggcaacgccaagaccgtgagaaacaacaacagcagcagattcggcaagttcgtggagatccacttcaacgagaagagcagcgtggtgggcggcttcgtgagccactacctgctggagaagagcagaatctgcgtgcagggcaaggaggagagaaactaccacatcttctacagactgtgcgccggcgccagcgaggacatcagagagaagctgcacctgagcagccccgacaacttcagatacctgaacagaggctgcaccagatacttcgccaacaaggagaccgacaagcagatcctgcagaacagaaagagccccgagtacctgaaggccggcagcatgaaggaccccctgctggacgaccacggcgacttcatcagaatgtgcaccgccatgaagaagatcggcctggacgacgaggagaagctggacctgttcagagtggtggccggcgtgctgcacctgggcaacatcgacttcgaggaggccggcagcaccagcggcggctgcaacctgaagaacaagagcgcccagagcctggagtactgcgccgagctgctgggcctggaccaggacgacctgagagtgagcctgaccaccagagtgatgctgaccaccgccggcggcaccaagggcaccgtgatcaaggtgcccctgaaggtggagcaggccaacaacgccagagacgccctggccaagaccgtgtacagccacctgttcgaccacgtggtgaacagagtgaaccagtgcttccccttcgagaccagcagctacttcatcggcgtgctggacatcgccggcttcgagtacttcgagcacaacagcttcgagcagttctgcatcaactactgcaacgagaagctgcagcagttcttcaacgagagaatcctgaaggaggagcaggagctgtaccagaaggagggcctgggcgtgaacgaggtgcactacgtggacaaccaggactgcatcgacctgatcgaggccaagctggtgggcatcctggacatcctggacgaggagaacagactgccccagcccagcgaccagcacttcaccagcgccgtgcaccagaagcacaaggaccacttcagactgaccatccccagaaagagcaagctggccgtgcacagaaacatcagagacgacgagggcttcatcatcagacacttcgccggcgccgtgtgctacgagaccacccagttcgtggagaagaacaacgacgccctgcacatgagcctggagagcctgatctgcgagagcagagacaagttcatcagagagctgttcgagagcagcaccaacaacaacaaggacaccaagcagaaggccggcaagctgagcttcatcagcgtgggcaacaagttcaagacccagctgaacctgctgctggacaagctgagaagcaccggcgccagcttcatcagatgcatcaagcccaacctgaagatgaccagccaccacttcgagggcgcccagatcctgagccagctgcagtgcagcggcatggtgagcgtgctggacctgatgcagggcggctaccccagcagagccagcttccacgagctgtacaacatgtacaagaagtacatgcccgacaagctggccagactggaccccagactgttctgcaaggccctgttcaaggccctgggcctgaacgagaacgactacaagttcggcctgaccaaggtgttcttcagacccggcaagttcgccgagttcgaccagatcatgaagagcgaccccgaccacctggccgagctggtgaagagagtgaaccactggctgacctgcagcagatggaagaaggtgcagtggtgcagcctgagcgtgatcaagctgaagaacaagatcaagtacagagccgaggcctgcatcaagatgcagaagaccatcagaatgtggctgtgcaagagaagacacaagcccagaatcgacggcctggtgaaggtgggcaccctgaagaagagactggacaagttcaacgaggtggtgagcgtgctgaaggacggcaagcccgagatgaacaagcagatcaagaacctggagatcagcatcgacaccctgatggccaagatcaagagcaccatgatgacccaggagcagatccagaaggagtacgacgccctggtgaagagcagcgaggagctgctgagcgccctgcagaagaagaagcagcaggaggaggaggccgagagactgagaagaatccaggaggagatggagaaggagagaaagagaagagaggaggacgagaagagaagaagaaaggaggaggaggagagaagaatgaagctggagatggaggccaagagaaagcaggaggaggaggagagaaagaagagagaggacgacgagaagagaatccaggccgaggtggaggcccagctggccagacagaaggaggaggagagccagcagcaggccgtgctggagcaggagagaagagacagagagctggccctgagaatcgcccagagcgaggccgagctgatcagcgacgaggcccaggccgacctggccctgagaagaggccccgccgtgctggccaccaaggccgccgccggcaccaagaagtacgacctgagcaagtggaagtacgccgagctgagagacaccatcaacaccagctgcgacatcgagctgctggccgcctgcagagaggagttccacagaagactgaaggtgtaccacgcctggaagagcaagaacaagaagagaaacaccgagaccgagcagagagcccccaagagcgtgaccgactacgacttcgcccccttcctgaacaacagcccccagcagaaccccgccgcccagatccccgccagacagagagagatcgagatgaacagacagcagagattcttcagaatccccttcatcagacccgccgaccagtacaaggacccccagagcaagaagaagggctggtggtacgcccacttcgacggcccctggatcgccagacagatggagctgcaccccgacaagccccccatcctgctggtggccggcaaggacgacatggagatgtgcgagctgaacctggaggagaccggcctgaccagaaagagaggcgccgagatcctgcccagacagttcgaggagatctgggagagatgcggcggcatccagtacctgcagaacgccatcgagagcagacaggccagacccacctacgccaccgccatgctgcagagcctgctgaagtag

SEQ ID NO: 90053 - DNA, 3888 bp, synthetic construct
  misc_feature 1..3888: note = Description of Artificial Sequence: Synthetic coding sequence
  source 1..3888: mol_type = other DNA
atggaggacggcaagcccgtgtgggccccccaccccaccgacggcttccagatgggcaacatcgtggacatcggccccgacagcctgaccatcgagcccctgaaccagaagggcaagaccttcctggccctgatcaaccaggtgttccccgccgaggaggacagcaagaaggacgtggaggacaactgcagcctgatgtacctgaacgaggccaccctgctgcacaacatcaaggtgagatacagcaaggacagaatctacacctacgtggccaacatcctgatcgccgtgaacccctacttcgacatccccaagatctacagcagcgaggccatcaagagctaccagggcaagagcctgggcaccagacccccccacgtgttcgccatcgccgacaaggccttcagagacatgaaggtgctgaagatgagccagagcatcatcgtgagcggcgagagcggcgccggcaagaccgagaacaccaagttcgtgctgagatacctgaccgagagctacggcaccggccaggacatcgacgacagaatcgtggaggccaaccccctgctggaggccttcggcaacgccaagaccgtgagaaacaacaacagcagcagattcggcaagttcgtggagatccacttcaacgagaagagcagcgtggtgggcggcttcgtgagccactacctgctggagaagagcagaatctgcgtgcagggcaaggaggagagaaactaccacatcttctacagactgtgcgccggcgccagcgaggacatcagagagaagctgcacctgagcagccccgacaacttcagatacctgaacagaggctgcaccagatacttcgccaacaaggagaccgacaagcagatcctgcagaacagaaagagccccgagtacctgaaggccggcagcatgaaggaccccctgctggacgaccacggcgacttcatcagaatgtgcaccgccatgaagaagatcggcctggacgacgaggagaagctggacctgttcagagtggtggccggcgtgctgcacctgggcaacatcgacttcgaggaggccggcagcaccagcggcggctgcaacctgaagaacaagagcgcccagagcctggagtactgcgccgagctgctgggcctggaccaggacgacctgagagtgagcctgaccaccagagtgatgctgaccaccgccggcggcaccaagggcaccgtgatcaaggtgcccctgaaggtggagcaggccaacaacgccagagacgccctggccaagaccgtgtacagccacctgttcgaccacgtggtgaacagagtgaaccagtgcttccccttcgagaccagcagctacttcatcggcgtgctggacatcgccggcttcgagtacttcgagcacaacagcttcgagcagttctgcatcaactactgcaacgagaagctgcagcagttcttcaacgagagaatcctgaaggaggagcaggagctgtaccagaaggagggcctgggcgtgaacgaggtgcactacgtggacaaccaggactgcatcgacctgatcgaggccaagctggtgggcatcctggacatcctggacgaggagaacagactgccccagcccagcgaccagcacttcaccagcgccgtgcaccagaagcacaaggaccacttcagactgaccatccccagaaagagcaagctggccgtgcacagaaacatcagagacgacgagggcttcatcatcagacacttcgccggcgccgtgtgctacgagaccacccagttcgtggagaagaacaacgacgccctgcacatgagcctggagagcctgatctgcgagagcagagacaagttcatcagagagctgttcgagagcagcaccaacaacaacaaggacaccaagcagaaggccggcaagctgagcttcatcagcgtgggcaacaagttcaagacccagctgaacctgctgctggacaagctgagaagcaccggcgccagcttcatcagatgcatcaagcccaacctgaagatgaccagccaccacttcgagggcgcccagatcctgagccagctgcagtgcagcggcatggtgagcgtgctggacctgatgcagggcggctaccccagcagagccagcttccacgagctgtacaacatgtacaagaagtacatgcccgacaagctggccagactggaccccagactgttctgcaaggccctgttcaaggccctgggcctgaacgagaacgactacaagttcggcctgaccaaggtgttcttcagacccggcaagttcgccgagttcgaccagatcatgaagagcgaccccgaccacctggccgagctggtgaagagagtgaaccactggctgacctgcagcagatggaagaaggtgcagtggtgcagcctgagcgtgatcaagctgaagaacaagatcaagtacagagccgaggcctgcatcaagatgcagaagaccatcagaatgtggctgtgcaagagaagacacaagcccagaatcgacggcctggtgaaggtgggcaccctgaagaagagactggacaagttcaacgaggtggtgagcgtgctgaaggacggcaagcccgagatgaacaagcagatcaagaacctggagatcagcatcgacaccctgatggccaagatcaagagcaccatgatgacccaggagcagatccagaaggagtacgacgccctggtgaagagcagcgaggagctgctgagcgccctgcagaagaagaagcagcaggaggaggaggccgagagactgagaagaatccaggaggagatggagaaggagagaaagagaagagaggaggacgagaagagaagaagaaaggaggaggaggagagaagaatgaagctggagatggaggccaagagaaagcaggaggaggaggagagaaagaagagagaggacgacgagaagagaatccaggccgaggtggaggcccagctggccagacagaaggaggaggagagccagcagcaggccgtgctggagcaggagagaagagacagagagctggccctgagaatcgcccagagcgaggccgagctgatcagcgacgaggcccaggccgacctggccctgagaagatacctggacagctaccccgtgaccagcaagaacgacggcaccagacccaagatgacccccgagcagatggccaaggagatgagcgagttcctgagcagaggccccgccgtgctggccaccaaggccgccgccggcaccaagaagtacgacctgagcaagtggaagtacgccgagctgagagacaccatcaacaccagctgcgacatcgagctgctggccgcctgcagagaggagttccacagaagactgaaggtgtaccacgcctggaagagcaagaacaagaagagaaacaccgagaccgagcagagagcccccaagagcgtgaccgactacgacttcgcccccttcctgaacaacagcccccagcagaaccccgccgcccagatccccgccagacagagagagatcgagatgaacagacagcagagattcttcagaatccccttcatcagacccgccgaccagtacaaggacccccagagcaagaagaagggctggtggtacgcccacttcgacggcccctggatcgccagacagatggagctgcaccccgacaagccccccatcctgctggtggccggcaaggacgacatggagatgtgcgagctgaacctggaggagaccggcctgaccagaaagagaggcgccgagatcctgcccagacagttcgaggagatctgggagagatgcggcggcatccagtacctgcagaacgccatcgagagcagacaggccagacccacctacgccaccgccatgctgcagagcctgctgaagtag

SEQ ID NO: 90054 - DNA, 525 bp, synthetic construct
  misc_feature 1..525: note = Description of Artificial Sequence: Synthetic coding sequence
  source 1..525: mol_type = other DNA
aagagaagagaggaggacgagaagagaagaagaaaggaggaggaggagagaagaatgaagctggagatggaggccaagagaaagcaggaggaggaggagagaaagaagagagaggacgacgagaagagaatccaggccgaggtggaggcccagctggccagacagaaggaggaggagagccagcagcaggccgtgctggagcaggagagaagagacagagagctggccctgagaatcgcccagagcgaggccgagctgatcagcgacgaggcccaggccgacctggccctgagaagcctggacagctaccccgtgaccagcaagaacgacggcaccagacccaagatgacccccggccccgccgtgctggccaccaaggccgccgccggcaccaagaagtacgacctgagcaagtggaagtacgccgagctgagagacaccatcaacaccagctgcgacatcgagctgctggccgcctgcagagaggagttccacagaagactgaaggtgtaccacgcctggtag

SEQ ID NO: 90055 - DNA, 6276 bp, synthetic construct
  misc_feature 1..6276: note = Description of Artificial Sequence: Synthetic coding sequence
  source 1..6276: mol_type = other DNA
gccctgctgcagaagggcgaccacgtgtggatggacctgagactgggccaggagttcgacgtgcccatcggcgccgtggtgaagctgtgcgacagcggccaggtgcaggtggtggacgacgaggacaacgagcactggatcagcccccagaacgccacccacatcaagcccatgcaccccaccagcgtgcacggcgtggaggacatgatcagactgggcgacctgaacgaggccggcatcctgagaaacctgctgatcagatacagagaccacctgatctacacctacaccggcagcatcctggtggccgtgaacccctaccagctgctgagcatctacagccccgagcacatcagacagtacaccaacaagaagatcggcgagatgcccccccacatcttcgccatcgccgacaactgctacttcaacatgaagagaaacagcagagaccagtgctgcatcatcagcggcgagagcggcgccggcaagaccgagagcaccaagctgatcctgcagttcctggccgccatcagcggccagcacagctggatcgagcagcaggtgctggaggccacccccatcctggaggccttcggcaacgccaagaccatcagaaacgacaacagcagcagattcggcaagtacatcgacatccacttcaacaagagaggcgccatcgagggcgccaagatcgagcagtacctgctggagaagagcagagtgtgcagacaggccctggacgagagaaactaccacgtgttctactgcatgctggagggcatgagcgaggaccagaagaagaagctgggcctgggccaggccagcgactacaactacctggccatggtgaacccccccgacctgatgagctgcctgaccagcagaaccctgatcaccagaggcgagaccgtgagcacccccctgagcagagagcaggccctggacgtgagagacgccttcgtgaagggcatctacggcagactgttcgtgtggatcgtggacaagatcaacgccgccatctacaagccccccagccaggacgtgaagaacagcagaagaagcatcggcctgctggacatcttcggcttcgagaacttcgccgtgaacagcttcgagcagctgtgcatcaacttcgccaacgagcacctgcagcagttcttcgtgagacacgtgttcaagctggagcaggaggagtacgacctggagagcatcgactggctgcacatcgagttcaccgacaaccaggacgccctggacatgatcgccaacaagcccatgaacatcatcagcctgatcgacgaggagagcaagttccccaagttcctggagaagaacagagacaccctgcacggcgacatcatccagctggtgcacagcagcagaaacaagttcatcaagcagatcttccaggccgacgtggccatgggcgccgagaccagaaagagaagccccaccctgagcagccagttcaagagaagcctggagctgctgatgagaaccctgggcgcctgccagcccttcttcgtgagatgcatcaagcccaacgagttcaagaagcccatgctgttcgacagacacctgtgcgtgagacagctgagatacagcggcatgatggagaccatcagaatcagaagagccggctaccccatcagatacagcttcgtggagttcgtggagagatacagagtgctgctgcccggcgtgaagcccgcctacaagcagggcgacctgagaggcacctgccagagaatggccgaggccgtgctgggcacccacgacgactggcagatcggcaagaccaagatcttcctgaaggaccaccacgacatgctgctggaggtggagagagacaaggccatcaccgacagagtgatcctgctgcagaaggtgatcagaggcttcaaggacagaagcaacttcctgaagctgaagaacgccgccaccctgatccagagacactggagaggccacaactgcagaaagaactacggcctgatgagactgggcttcctgagactgcaggccctgcacagaagcagaaagctgcaccagcagtacagactggccagacagagaatcatccagttccaggccagatgcagagcctacctggtgagaaaggccttcagacacagactgtgggccgtgctgaccgtgcaggcctacgccagaggcatgatcgccagaagactgcaccagagactgagagccgagtacctgtggagactggaggccgagaagatgagactggccgaggaggagaagctgagaaaggagatgagcgccaagaaggccaaggaggaggccgagagaaagcaccaggagagactggcccagctggccagagaggacgccgagagagagctgaaggagaaggaggccgccagaagaaagaaggagctgctggagcagatggagagagccagacacgagcccgtgaaccacagcgacatggtggacaagatgttcggcttcctgggcaccagcggcggcctgcccggccaggagggccaggcccccagcggcttcgaggacctggagagaggcagaagagagatggtggaggaggacctggacgccgccctgcccctgcccgacgaggacgaggaggacctgagcgagtacaagttcgccaagttcgccgccacctacttccagggcaccaccacccacagctacaccagaagacccctgaagcagcccctgctgtaccacgacgacgagggcgaccagctggccgccctggccgtgtggatcaccatcctgagattcatgggcgacctgcccgagcccaagtaccacaccgccatgagcgacggcagcgagaagatccccgtgatgaccaagatctacgagaccctgggcaagaagacctacaagagagagctgcaggccctgcagggcgagggcgaggcccagctgcccgagggccagaagaagagcagcgtgagacacaagctggtgcacctgaccctgaagaagaagagcaagctgaccgaggaggtgaccaagagactgcacgacggcgagagcaccgtgcagggcaacagcatgctggaggacagacccaccagcaacctggagaagctgcacttcatcatcggcaacggcatcctgagacccgccctgagagacgagatctactgccagatcagcaagcagctgacccacaaccccagcaagagcagctacgccagaggctggatcctggtgagcctgtgcgtgggctgcttcgcccccagcgagaagttcgtgaagtacctgagaaacttcatccacggcggcccccccggctacgccccctactgcgaggagagactgagaagaaccttcgtgaacggcaccagaacccagccccccagctggctggagctgcaggccaccaagagcaagaagcccatcatgctgcccgtgaccttcatggacggcaccaccaagaccctgctgaccgacagcgccaccaccgccaaggagctgtgcaacgccctggccgacaagatcagcctgaaggacagattcggcttcagcctgtacatcgccctgttcgacaaggtgagcagcctgggcagcggcagcgaccacgtgatggacgccatcagccagtgcgagcagtacgccaaggagcagggcgcccaggagagaaacgccccctggagactgttcttcagaaaggaggtgttcaccccctggcacagccccagcgaggacaacgtggccaccaacctgatctaccagcaggtggtgagaggcgtgaagttcggcgagtacagatgcgagaaggaggacgacctggccgagctggccagccagcagtacttcgtggactacggcagcgagatgatcctggagagactgctgaacctggtgcccacctacatccccgacagagagatcacccccctgaagaccctggagaagtgggcccagctggccatcgccgcccacaagaagggcatctacgcccagagaagaaccgacgcccagaaggtgaaggaggacgtggtgagctacgccagattcaagtggcccctgctgttcagcagattctacgaggcctacaagttcagcggccccagcctgcccaagaacgacgtgatcgtggccgtgaactggaccggcgtgtacttcgtggacgagcaggagcaggtgctgctggagctgagcttccccgagatcatggccgtgagcagcagcagagagtgcagagtgtggctgagcctgggctgcagcgacctgggctgcgccgccccccacagcggctgggccggcctgacccccgccggcccctgcagcccctgctggagctgcagaggcgccaagaccaccgcccccagcttcaccctggccaccatcaagggcgacgagtacaccttcaccagcagcaacgccgaggacatcagagacctggtggtgaccttcctggagggcctgagaaagagaagcaagtacgtggtggccctgcaggacaaccccaaccccgccggcgaggagagcggcttcctgagcttcgccaagggcgacctgatcatcctggaccacgacaccggcgagcaggtgatgaacagcggctgggccaacggcatcaacgagagaaccaagcagagaggcgacttccccaccgacagcgtgtacgtgatgcccaccgtgaccatgccccccagagagatcgtggccctggtgaccatgacccccgaccagagacaggacgtggtgagactgctgcagctgagaaccgccgagcccgaggtgagagccaagccctacaccctggaggagttcagctacgactacttcagacccccccccaagcacaccctgagcagagtgatggtgagcaaggccagaggcaaggacagactgtggagccacaccagagagcccctgaagcaggccctgctgaagaagctgctgggcagcgaggagctgagccaggaggcctgcctggccttcatcgccgtgctgaagtacatgggcgactaccccagcaagagaaccagaagcgtgaacgagctgaccgaccagatcttcgagggccccctgaaggccgagcccctgaaggacgaggcctacgtgcagatcctgaagcagctgaccgacaaccacatcagatacagcgaggagagaggctgggagctgctgtggctgtgcaccggcctgttcccccccagcaacatcctgctgccccacgtgcagagattcctgcagagcagaaagcactgccccctggccatcgactgcctgcagagactgcagaaggccctgagaaacggcagcagaaagtaccccccccacctggtggaggtggaggccatccagcacaagaccacccagatcttccacaaggtgtacttccccgacgacaccgacgaggccttcgaggtggagagcagcaccaaggccaaggacttctgccagaacatcgccaccagactgctgctgaagagcagcgagggcttcagcctgttcgtgaagatcgccgacaaggtgctgagcgtgcccgagaacgacttcttcttcgacttcgtgagacacctgaccgactggatcaagaaggccagacccatcaaggacggcatcgtgcccagcctgacctaccaggtgttcttcatgaagaagctgtggaccaccaccgtgcccggcaaggaccccatggccgacagcatcttccactactaccaggagctgcccaagtacctgagaggctaccacaagtgcaccagagaggaggtgctgcagctgggcgccctgatctacagagtgaagttcgaggaggacaagagctacttccccagcatccccaagctgctgagagagctggtgccccaggacctgatcagacaggtgagccccgacgactggaagagaagcatcgtggcctacttcaacaagcacgccggcaagagcaaggaggaggccaagctggccttcctgaagctgatcttcaagtggcccaccttcggcagcgccttcttcgaggtgaagcagaccaccgagcccaacttccccgagatcctgctgatcgccatcaacaagtacggcgtgagcctgatcgaccccaagaccaaggacatcctgaccacccaccccttcaccaagatcagcaactggagcagcggcaacacctacttccacatcaccatcggcaacctggtgagaggcagcaagctgctgtgcgagaccagcctgggctacaagatggacgacctgctgaccagctacatcagccagatgctgaccgccatgagcaagcagagaggcagcagaagcggcaagtag

SEQ ID NO: 90056 - DNA, 6555 bp, synthetic construct
  misc_feature 1..6555: note = Description of Artificial Sequence: Synthetic coding sequence
  source 1..6555: mol_type = other DNA
gccctgctgcagaagggcgaccacgtgtggatggacctgagactgggccaggagttcgacgtgcccatcggcgccgtggtgaagctgtgcgacagcggccaggtgcaggtggtggacgacgaggacaacgagcactggatcagcccccagaacgccacccacatcaagcccatgcaccccaccagcgtgcacggcgtggaggacatgatcagactgggcgacctgaacgaggccggcatcctgagaaacctgctgatcagatacagagaccacctgatctacacctacaccggcagcatcctggtggccgtgaacccctaccagctgctgagcatctacagccccgagcacatcagacagtacaccaacaagaagatcggcgagatgcccccccacatcttcgccatcgccgacaactgctacttcaacatgaagagaaacagcagagaccagtgctgcatcatcagcggcgagagcggcgccggcaagaccgagagcaccaagctgatcctgcagttcctggccgccatcagcggccagcacagctggatcgagcagcaggtgctggaggccacccccatcctggaggccttcggcaacgccaagaccatcagaaacgacaacagcagcagattcggcaagtacatcgacatccacttcaacaagagaggcgccatcgagggcgccaagatcgagcagtacctgctggagaagagcagagtgtgcagacaggccctggacgagagaaactaccacgtgttctactgcatgctggagggcatgagcgaggaccagaagaagaagctgggcctgggccaggccagcgactacaactacctggccatgggcaactgcatcacctgcgagggcagagtggacagccaggagtacgccaacatcagaagcgccatgaaggtgctgatgttcaccgacaccgagaactgggagatcagcaagctgctggccgccatcctgcacctgggcaacctgcagtacgaggccagaaccttcgagaacctggacgcctgcgaggtgctgttcagccccagcctggccaccgccgccagcctgctggaggtgaacccccccgacctgatgagctgcctgaccagcagaaccctgatcaccagaggcgagaccgtgagcacccccctgagcagagagcaggccctggacgtgagagacgccttcgtgaagggcatctacggcagactgttcgtgtggatcgtggacaagatcaacgccgccatctacaagccccccagccaggacgtgaagaacagcagaagaagcatcggcctgctggacatcttcggcttcgagaacttcgccgtgaacagcttcgagcagctgtgcatcaacttcgccaacgagcacctgcagcagttcttcgtgagacacgtgttcaagctggagcaggaggagtacgacctggagagcatcgactggctgcacatcgagttcaccgacaaccaggacgccctggacatgatcgccaacaagcccatgaacatcatcagcctgatcgacgaggagagcaagttccccaagggcaccgacaccaccatgctgcacaagctgaacagccagcacaagctgaacgccaactacatcccccccaagaacaaccacgagacccagttcggcatcaaccacttcgccggcatcgtgtactacgagacccagggcttcctggagaagaacagagacaccctgcacggcgacatcatccagctggtgcacagcagcagaaacaagttcatcaagcagatcttccaggccgacgtggccatgggcgccgagaccagaaagagaagccccaccctgagcagccagttcaagagaagcctggagctgctgatgagaaccctgggcgcctgccagcccttcttcgtgagatgcatcaagcccaacgagttcaagaagcccatgctgttcgacagacacctgtgcgtgagacagctgagatacagcggcatgatggagaccatcagaatcagaagagccggctaccccatcagatacagcttcgtggagttcgtggagagatacagagtgctgctgcccggcgtgaagcccgcctacaagcagggcgacctgagaggcacctgccagagaatggccgaggccgtgctgggcacccacgacgactggcagatcggcaagaccaagatcttcctgaaggaccaccacgacatgctgctggaggtggagagagacaaggccatcaccgacagagtgatcctgctgcagaaggtgatcagaggcttcaaggacagaagcaacttcctgaagctgaagaacgccgccaccctgatccagagacactggagaggccacaactgcagaaagaactacggcctgatgagactgggcttcctgagactgcaggccctgcacagaagcagaaagctgcaccagcagtacagactggccagacagagaatcatccagttccaggccagatgcagagcctacctggtgagaaaggccttcagacacagactgtgggccgtgctgaccgtgcaggcctacgccagaggcatgatcgccagaagactgcaccagagactgagagccgagtacctgtggagactggaggccgagaagatgagactggccgaggaggagaagctgagaaaggagatgagcgccaagaaggccaaggaggaggccgagagaaagcaccaggagagactggcccagctggccagagaggacgccgagagagagctgaaggagaaggaggccgccagaagaaagaaggagctgctggagcagatggagagagccagacacgagcccgtgaaccacagcgacatggtggacaagatgttcggcttcctgggcaccagcggcggcctgcccggccaggagggccaggcccccagcggcttcgaggacctggagagaggcagaagagagatggtggaggaggacctggacgccgccctgcccctgcccgacgaggacgaggaggacctgagcgagtacaagttcgccaagttcgccgccacctacttccagggcaccaccacccacagctacaccagaagacccctgaagcagcccctgctgtaccacgacgacgagggcgaccagctggccgccctggccgtgtggatcaccatcctgagattcatgggcgacctgcccgagcccaagtaccacaccgccatgagcgacggcagcgagaagatccccgtgatgaccaagatctacgagaccctgggcaagaagacctacaagagagagctgcaggccctgcagggcgagggcgaggtgaccaagagactgcacgacggcgagagcaccgtgcagggcaacagcatgctggaggacagacccaccagcaacctggagaagctgcacttcatcatcggcaacggcatcctgagacccgccctgagagacgagatctactgccagatcagcaagcagctgacccacaaccccagcaagagcagctacgccagaggctggatcctggtgagcctgtgcgtgggctgcttcgcccccagcgagaagttcgtgaagtacctgagaaacttcatccacggcggcccccccggctacgccccctactgcgaggagagactgagaagaaccttcgtgaacggcaccagaacccagccccccagctggctggagctgcaggccaccaagagcaagaagcccatcatgctgcccgtgaccttcatggacggcaccaccaagaccctgctgaccgacagcgccaccaccgccaaggagctgtgcaacgccctggccgacaagatcagcctgaaggacagattcggcttcagcctgtacatcgccctgttcgacaaggtgagcagcctgggcagcggcagcgaccacgtgatggacgccatcagccagtgcgagcagtacgccaaggagcagggcgcccaggagagaaacgccccctggagactgttcttcagaaaggaggtgttcaccccctggcacagccccagcgaggacaacgtggccaccaacctgatctaccagcaggtggtgagaggcgtgaagttcggcgagtacagatgcgagaaggaggacgacctggccgagctggccagccagcagtacttcgtggactacggcagcgagatgatcctggagagactgctgaacctggtgcccacctacatccccgacagagagatcacccccctgaagaccctggagaagtgggcccagctggccatcgccgcccacaagaagggcatctacgcccagagaagaaccgacgcccagaaggtgaaggaggacgtggtgagctacgccagattcaagtggcccctgctgttcagcagattctacgaggcctacaagttcagcggccccagcctgcccaagaacgacgtgatcgtggccgtgaactggaccggcgtgtacttcgtggacgagcaggagcaggtgctgctggagctgagcttccccgagatcatggccgtgagcagcagcagagagtgcagagtgtggctgagcctgggctgcagcgacctgggctgcgccgccccccacagcggctgggccggcctgacccccgccggcccctgcagcccctgctggagctgcagaggcgccaagaccaccgcccccagcttcaccctggccaccatcaagggcgacgagtacaccttcaccagcagcaacgccgaggacatcagagacctggtggtgaccttcctggagggcctgagaaagagaagcaagtacgtggtggccctgcaggacaaccccaaccccgccggcgaggagagcggcttcctgagcttcgccaagggcgacctgatcatcctggaccacgacaccggcgagcaggtgatgaacagcggctgggccaacggcatcaacgagagaaccaagcagagaggcgacttccccaccgacagcgtgtacgtgatgcccaccgtgaccatgccccccagagagatcgtggccctggtgaccatgacccccgaccagagacaggacgtggtgagactgctgcagctgagaaccgccgagcccgaggtgagagccaagccctacaccctggaggagttcagctacgactacttcagacccccccccaagcacaccctgagcagagtgatggtgagcaaggccagaggcaaggacagactgtggagccacaccagagagcccctgaagcaggccctgctgaagaagctgctgggcagcgaggagctgagccaggaggcctgcctggccttcatcgccgtgctgaagtacatgggcgactaccccagcaagagaaccagaagcgtgaacgagctgaccgaccagatcttcgagggccccctgaaggccgagcccctgaaggacgaggcctacgtgcagatcctgaagcagctgaccgacaaccacatcagatacagcgaggagagaggctgggagctgctgtggctgtgcaccggcctgttcccccccagcaacatcctgctgccccacgtgcagagattcctgcagagcagaaagcactgccccctggccatcgactgcctgcagagactgcagaaggccctgagaaacggcagcagaaagtaccccccccacctggtggaggtggaggccatccagcacaagaccacccagatcttccacaaggtgtacttccccgacgacaccgacgaggccttcgaggtggagagcagcaccaaggccaaggacttctgccagaacatcgccaccagactgctgctgaagagcagcgagggcttcagcctgttcgtgaagatcgccgacaaggtgctgagcgtgcccgagaacgacttcttcttcgacttcgtgagacacctgaccgactggatcaagaaggccagacccatcaaggacggcatcgtgcccagcctgacctaccaggtgttcttcatgaagaagctgtggaccaccaccgtgcccggcaaggaccccatggccgacagcatcttccactactaccaggagctgcccaagtacctgagaggctaccacaagtgcaccagagaggaggtgctgcagctgggcgccctgatctacagagtgaagttcgaggaggacaagagctacttccccagcatccccaagctgctgagagagctggtgccccaggacctgatcagacaggtgagccccgacgactggaagagaagcatcgtggcctacttcaacaagcacgccggcaagagcaaggaggaggccaagctggccttcctgaagctgatcttcaagtggcccaccttcggcagcgccttcttcgaggtgaagcagaccaccgagcccaacttccccgagatcctgctgatcgccatcaacaagtacggcgtgagcctgatcgaccccaagaccaaggacatcctgaccacccaccccttcaccaagatcagcaactggagcagcggcaacacctacttccacatcaccatcggcaacctggtgagaggcagcaagctgctgtgcgagaccagcctgggctacaagatggacgacctgctgaccagctacatcagccagatgctgaccgccatgagcaagcagagaggcagcagaagcggcaagtag

SEQ ID NO: 90057 - DNA, 3609 bp, synthetic construct
  misc_feature 1..3609: note = Description of Artificial Sequence: Synthetic coding sequence
  source 1..3609: mol_type = other DNA
gccctgctgcagaagggcgaccacgtgtggatggacctgagactgggccaggagttcgacgtgcccatcggcgccgtggtgaagctgtgcgacagcggccaggtgcaggtggtggacgacgaggacaacgagcactggatcagcccccagaacgccacccacatcaagcccatgcaccccaccagcgtgcacggcgtggaggacatgatcagactgggcgacctgaacgaggccggcatcctgagaaacctgctgatcagatacagagaccacctgatctacacctacaccggcagcatcctggtggccgtgaacccctaccagctgctgagcatctacagccccgagcacatcagacagtacaccaacaagaagatcggcgagatgcccccccacatcttcgccatcgccgacaactgctacttcaacatgaagagaaacagcagagaccagtgctgcatcatcagcggcgagagcggcgccggcaagaccgagagcaccaagctgatcctgcagttcctggccgccatcagcggccagcacagctggatcgagcagcaggtgctggaggccacccccatcctggaggccttcggcaacgccaagaccatcagaaacgacaacagcagcagattcggcaagtacatcgacatccacttcaacaagagaggcgccatcgagggcgccaagatcgagcagtacctgctggagaagagcagagtgtgcagacaggccctggacgagagaaactaccacgtgttctactgcatgctggagggcatgagcgaggaccagaagaagaagctgggcctgggccaggccagcgactacaactacctggccatgggcaactgcatcacctgcgagggcagagtggacagccaggagtacgccaacatcagaagcgccatgaaggtgctgatgttcaccgacaccgagaactgggagatcagcaagctgctggccgccatcctgcacctgggcaacctgcagtacgaggccagaaccttcgagaacctggacgcctgcgaggtgctgttcagccccagcctggccaccgccgccagcctgctggaggtgaacccccccgacctgatgagctgcctgaccagcagaaccctgatcaccagaggcgagaccgtgagcacccccctgagcagagagcaggccctggacgtgagagacgccttcgtgaagggcatctacggcagactgttcgtgtggatcgtggacaagatcaacgccgccatctacaagccccccagccaggacgtgaagaacagcagaagaagcatcggcctgctggacatcttcggcttcgagaacttcgccgtgaacagcttcgagcagctgtgcatcaacttcgccaacgagcacctgcagcagttcttcgtgagacacgtgttcaagctggagcaggaggagtacgacctggagagcatcgactggctgcacatcgagttcaccgacaaccaggacgccctggacatgatcgccaacaagcccatgaacatcatcagcctgatcgacgaggagagcaagttccccaagggcaccgacaccaccatgctgcacaagctgaacagccagcacaagctgaacgccaactacatcccccccaagaacaaccacgagacccagttcggcatcaaccacttcgccggcatcgtgtactacgagacccagggcttcctggagaagaacagagacaccctgcacggcgacatcatccagctggtgcacagcagcagaaacaagttcatcaagcagatcttccaggccgacgtggccatgggcgccgagaccagaaagagaagccccaccctgagcagccagttcaagagaagcctggagctgctgatgagaaccctgggcgcctgccagcccttcttcgtgagatgcatcaagcccaacgagttcaagaagcccatgctgttcgacagacacctgtgcgtgagacagctgagatacagcggcatgatggagaccatcagaatcagaagagccggctaccccatcagatacagcttcgtggagttcgtggagagatacagagtgctgctgcccggcgtgaagcccgcctacaagcagggcgacctgagaggcacctgccagagaatggccgaggccgtgctgggcacccacgacgactggcagatcggcaagaccaagatcttcctgaaggaccaccacgacatgctgctggaggtggagagagacaaggccatcaccgacagagtgatcctgctgcagaaggtgatcagaggcttcaaggacagaagcaacttcctgaagctgaagaacgccgccaccctgatccagagacactggagaggccacaactgcagaaagaactacggcctgatgagactgggcttcctgagactgcaggccctgcacagaagcagaaagctgcaccagcagtacagactggccagacagagaatcatccagttccaggccagatgcagagcctacctggtgagaaaggccttcagacacagactgtgggccgtgctgaccgtgcaggcctacgccagaggcatgatcgccagaagactgcaccagagactgagagccgagtacctgtggagactggaggccgagaagatgagactggccgaggaggagaagctgagaaaggagatgagcgccaagaaggccaaggaggaggccgagagaaagcaccaggagagactggcccagctggccagagaggacgccgagagagagctgaaggagaaggaggccgccagaagaaagaaggagctgctggagcagatggagagagccagacacgagcccgtgaaccacagcgacatggtggacaagatgttcggcttcctgggcaccagcggcggcctgcccggccaggagggccaggcccccagcggcttcgaggacctggagagaggcagaagagagatggtggaggaggacctggacgccgccctgcccctgcccgacgaggacgaggaggacctgagcgagtacaagttcgccaagttcgccgccacctacttccagggcaccaccacccacagctacaccagaagacccctgaagcagcccctgctgtaccacgacgacgagggcgaccagctggccgccctggccgtgtggatcaccatcctgagattcatgggcgacctgcccgagcccaagtaccacaccgccatgagcgacggcagcgagaagatccccgtgatgaccaagatctacgagaccctgggcaagaagacctacaagagagagctgcaggccctgcagggcgagggcgaggtgctgcaggcccagctgcccgagggccagaagaagagcagcgtgagacacaagctggtgcacctgaccctgaagaagaagagcaagctgaccgaggaggtgaccaagagactgcacgacggcgagagcaccgtgcagggcaacagcatgctggaggacagacccaccagcaacctggagaagctgcacttcatcatcggcaacggcatcctgagacccgccctgagaagcgtgccccccgagagcctgctggtggccgagtggtgcctgtgccagcccagcaagagactgagccaggcccccggcttcggcttcgccgccagctag

SEQ ID NO: 90058 - DNA, 6645 bp, synthetic construct
  misc_feature 1..6645: note = Description of Artificial Sequence: Synthetic coding sequence
  source 1..6645: mol_type = other DNA
gccctgctgcagaagggcgaccacgtgtggatggacctgagactgggccaggagttcgacgtgcccatcggcgccgtggtgaagctgtgcgacagcggccaggtgcaggtggtggacgacgaggacaacgagcactggatcagcccccagaacgccacccacatcaagcccatgcaccccaccagcgtgcacggcgtggaggacatgatcagactgggcgacctgaacgaggccggcatcctgagaaacctgctgatcagatacagagaccacctgatctacacctacaccggcagcatcctggtggccgtgaacccctaccagctgctgagcatctacagccccgagcacatcagacagtacaccaacaagaagatcggcgagatgcccccccacatcttcgccatcgccgacaactgctacttcaacatgaagagaaacagcagagaccagtgctgcatcatcagcggcgagagcggcgccggcaagaccgagagcaccaagctgatcctgcagttcctggccgccatcagcggccagcacagctggatcgagcagcaggtgctggaggccacccccatcctggaggccttcggcaacgccaagaccatcagaaacgacaacagcagcagattcggcaagtacatcgacatccacttcaacaagagaggcgccatcgagggcgccaagatcgagcagtacctgctggagaagagcagagtgtgcagacaggccctggacgagagaaactaccacgtgttctactgcatgctggagggcatgagcgaggaccagaagaagaagctgggcctgggccaggccagcgactacaactacctggccatgggcaactgcatcacctgcgagggcagagtggacagccaggagtacgccaacatcagaagcgccatgaaggtgctgatgttcaccgacaccgagaactgggagatcagcaagctgctggccgccatcctgcacctgggcaacctgcagtacgaggccagaaccttcgagaacctggacgcctgcgaggtgctgttcagccccagcctggccaccgccgccagcctgctggaggtgaacccccccgacctgatgagctgcctgaccagcagaaccctgatcaccagaggcgagaccgtgagcacccccctgagcagagagcaggccctggacgtgagagacgccttcgtgaagggcatctacggcagactgttcgtgtggatcgtggacaagatcaacgccgccatctacaagccccccagccaggacgtgaagaacagcagaagaagcatcggcctgctggacatcttcggcttcgagaacttcgccgtgaacagcttcgagcagctgtgcatcaacttcgccaacgagcacctgcagcagttcttcgtgagacacgtgttcaagctggagcaggaggagtacgacctggagagcatcgactggctgcacatcgagttcaccgacaaccaggacgccctggacatgatcgccaacaagcccatgaacatcatcagcctgatcgacgaggagagcaagttccccaagggcaccgacaccaccatgctgcacaagctgaacagccagcacaagctgaacgccaactacatcccccccaagaacaaccacgagacccagttcggcatcaaccacttcgccggcatcgtgtactacgagacccagggcttcctggagaagaacagagacaccctgcacggcgacatcatccagctggtgcacagcagcagaaacaagttcatcaagcagatcttccaggccgacgtggccatgggcgccgagaccagaaagagaagccccaccctgagcagccagttcaagagaagcctggagctgctgatgagaaccctgggcgcctgccagcccttcttcgtgagatgcatcaagcccaacgagttcaagaagcccatgctgttcgacagacacctgtgcgtgagacagctgagatacagcggcatgatggagaccatcagaatcagaagagccggctaccccatcagatacagcttcgtggagttcgtggagagatacagagtgctgctgcccggcgtgaagcccgcctacaagcagggcgacctgagaggcacctgccagagaatggccgaggccgtgctgggcacccacgacgactggcagatcggcaagaccaagatcttcctgaaggaccaccacgacatgctgctggaggtggagagagacaaggccatcaccgacagagtgatcctgctgcagaaggtgatcagaggcttcaaggacagaagcaacttcctgaagctgaagaacgccgccaccctgatccagagacactggagaggccacaactgcagaaagaactacggcctgatgagactgggcttcctgagactgcaggccctgcacagaagcagaaagctgcaccagcagtacagactggccagacagagaatcatccagttccaggccagatgcagagcctacctggtgagaaaggccttcagacacagactgtgggccgtgctgaccgtgcaggcctacgccagaggcatgatcgccagaagactgcaccagagactgagagccgagtacctgtggagactggaggccgagaagatgagactggccgaggaggagaagctgagaaaggagatgagcgccaagaaggccaaggaggaggccgagagaaagcaccaggagagactggcccagctggccagagaggacgccgagagagagctgaaggagaaggaggccgccagaagaaagaaggagctgctggagcagatggagagagccagacacgagcccgtgaaccacagcgacatggtggacaagatgttcggcttcctgggcaccagcggcggcctgcccggccaggagggccaggcccccagcggcttcgaggacctggagagaggcagaagagagatggtggaggaggacctggacgccgccctgcccctgcccgacgaggacgaggaggacctgagcgagtacaagttcgccaagttcgccgccacctacttccagggcaccaccacccacagctacaccagaagacccctgaagcagcccctgctgtaccacgacgacgagggcgaccagctggccgccctggccgtgtggatcaccatcctgagattcatgggcgacctgcccgagcccaagtaccacaccgccatgagcgacggcagcgagaagatccccgtgatgaccaagatctacgagaccctgggcaagaagacctacaagagagagctgcaggccctgcagggcgagggcgaggcccagctgcccgagggccagaagaagagcagcgtgagacacaagctggtgcacctgaccctgaagaagaagagcaagctgaccgaggaggtgaccaagagactgcacgacggcgagagcaccgtgcagggcaacagcatgctggaggacagacccaccagcaacctggagaagctgcacttcatcatcggcaacggcatcctgagacccgccctgagagacgagatctactgccagatcagcaagcagctgacccacaaccccagcaagagcagctacgccagaggctggatcctggtgagcctgtgcgtgggctgcttcgcccccagcgagaagttcgtgaagtacctgagaaacttcatccacggcggcccccccggctacgccccctactgcgaggagagactgagaagaaccttcgtgaacggcaccagaacccagccccccagctggctggagctgcaggccaccaagagcaagaagcccatcatgctgcccgtgaccttcatggacggcaccaccaagaccctgctgaccgacagcgccaccaccgccaaggagctgtgcaacgccctggccgacaagatcagcctgaaggacagattcggcttcagcctgtacatcgccctgttcgacaaggtgagcagcctgggcagcggcagcgaccacgtgatggacgccatcagccagtgcgagcagtacgccaaggagcagggcgcccaggagagaaacgccccctggagactgttcttcagaaaggaggtgttcaccccctggcacagccccagcgaggacaacgtggccaccaacctgatctaccagcaggtggtgagaggcgtgaagttcggcgagtacagatgcgagaaggaggacgacctggccgagctggccagccagcagtacttcgtggactacggcagcgagatgatcctggagagactgctgaacctggtgcccacctacatccccgacagagagatcacccccctgaagaccctggagaagtgggcccagctggccatcgccgcccacaagaagggcatctacgcccagagaagaaccgacgcccagaaggtgaaggaggacgtggtgagctacgccagattcaagtggcccctgctgttcagcagattctacgaggcctacaagttcagcggccccagcctgcccaagaacgacgtgatcgtggccgtgaactggaccggcgtgtacttcgtggacgagcaggagcaggtgctgctggagctgagcttccccgagatcatggccgtgagcagcagcagagagtgcagagtgtggctgagcctgggctgcagcgacctgggctgcgccgccccccacagcggctgggccggcctgacccccgccggcccctgcagcccctgctggagctgcagaggcgccaagaccaccgcccccagcttcaccctggccaccatcaagggcgacgagtacaccttcaccagcagcaacgccgaggacatcagagacctggtggtgaccttcctggagggcctgagaaagagaagcaagtacgtggtggccctgcaggacaaccccaaccccgccggcgaggagagcggcttcctgagcttcgccaagggcgacctgatcatcctggaccacgacaccggcgagcaggtgatgaacagcggctgggccaacggcatcaacgagagaaccaagcagagaggcgacttccccaccgacagcgtgtacgtgatgcccaccgtgaccatgccccccagagagatcgtggccctggtgaccatgacccccgaccagagacaggacgtggtgagactgctgcagctgagaaccgccgagcccgaggtgagagccaagccctacaccctggaggagttcagctacgactacttcagacccccccccaagcacaccctgagcagagtgatggtgagcaaggccagaggcaaggacagactgtggagccacaccagagagcccctgaagcaggccctgctgaagaagctgctgggcagcgaggagctgagccaggaggcctgcctggccttcatcgccgtgctgaagtacatgggcgactaccccagcaagagaaccagaagcgtgaacgagctgaccgaccagatcttcgagggccccctgaaggccgagcccctgaaggacgaggcctacgtgcagatcctgaagcagctgaccgacaaccacatcagatacagcgaggagagaggctgggagctgctgtggctgtgcaccggcctgttcccccccagcaacatcctgctgccccacgtgcagagattcctgcagagcagaaagcactgccccctggccatcgactgcctgcagagactgcagaaggccctgagaaacggcagcagaaagtaccccccccacctggtggaggtggaggccatccagcacaagaccacccagatcttccacaaggtgtacttccccgacgacaccgacgaggccttcgaggtggagagcagcaccaaggccaaggacttctgccagaacatcgccaccagactgctgctgaagagcagcgagggcttcagcctgttcgtgaagatcgccgacaaggtgctgagcgtgcccgagaacgacttcttcttcgacttcgtgagacacctgaccgactggatcaagaaggccagacccatcaaggacggcatcgtgcccagcctgacctaccaggtgttcttcatgaagaagctgtggaccaccaccgtgcccggcaaggaccccatggccgacagcatcttccactactaccaggagctgcccaagtacctgagaggctaccacaagtgcaccagagaggaggtgctgcagctgggcgccctgatctacagagtgaagttcgaggaggacaagagctacttccccagcatccccaagctgctgagagagctggtgccccaggacctgatcagacaggtgagccccgacgactggaagagaagcatcgtggcctacttcaacaagcacgccggcaagagcaaggaggaggccaagctggccttcctgaagctgatcttcaagtggcccaccttcggcagcgccttcttcgaggtgaagcagaccaccgagcccaacttccccgagatcctgctgatcgccatcaacaagtacggcgtgagcctgatcgaccccaagaccaaggacatcctgaccacccaccccttcaccaagatcagcaactggagcagcggcaacacctacttccacatcaccatcggcaacctggtgagaggcagcaagctgctgtgcgagaccagcctgggctacaagatggacgacctgctgaccagctacatcagccagatgctgaccgccatgagcaagcagagaggcagcagaagcggcaagtag

SEQ ID NO: 90059 - DNA, 6648 bp, synthetic construct
  misc_feature 1..6648: note = Description of Artificial Sequence: Synthetic coding sequence
  source 1..6648: mol_type = other DNA
atggtgatcctgcagcagggcgaccacgtgtggatggacctgagactgggccaggagttcgacgtgcccatcggcgccgtggtgaagctgtgcgacagcggccaggtgcaggtggtggacgacgaggacaacgagcactggatcagcccccagaacgccacccacatcaagcccatgcaccccaccagcgtgcacggcgtggaggacatgatcagactgggcgacctgaacgaggccggcatcctgagaaacctgctgatcagatacagagaccacctgatctacacctacaccggcagcatcctggtggccgtgaacccctaccagctgctgagcatctacagccccgagcacatcagacagtacaccaacaagaagatcggcgagatgcccccccacatcttcgccatcgccgacaactgctacttcaacatgaagagaaacagcagagaccagtgctgcatcatcagcggcgagagcggcgccggcaagaccgagagcaccaagctgatcctgcagttcctggccgccatcagcggccagcacagctggatcgagcagcaggtgctggaggccacccccatcctggaggccttcggcaacgccaagaccatcagaaacgacaacagcagcagattcggcaagtacatcgacatccacttcaacaagagaggcgccatcgagggcgccaagatcgagcagtacctgctggagaagagcagagtgtgcagacaggccctggacgagagaaactaccacgtgttctactgcatgctggagggcatgagcgaggaccagaagaagaagctgggcctgggccaggccagcgactacaactacctggccatgggcaactgcatcacctgcgagggcagagtggacagccaggagtacgccaacatcagaagcgccatgaaggtgctgatgttcaccgacaccgagaactgggagatcagcaagctgctggccgccatcctgcacctgggcaacctgcagtacgaggccagaaccttcgagaacctggacgcctgcgaggtgctgttcagccccagcctggccaccgccgccagcctgctggaggtgaacccccccgacctgatgagctgcctgaccagcagaaccctgatcaccagaggcgagaccgtgagcacccccctgagcagagagcaggccctggacgtgagagacgccttcgtgaagggcatctacggcagactgttcgtgtggatcgtggacaagatcaacgccgccatctacaagccccccagccaggacgtgaagaacagcagaagaagcatcggcctgctggacatcttcggcttcgagaacttcgccgtgaacagcttcgagcagctgtgcatcaacttcgccaacgagcacctgcagcagttcttcgtgagacacgtgttcaagctggagcaggaggagtacgacctggagagcatcgactggctgcacatcgagttcaccgacaaccaggacgccctggacatgatcgccaacaagcccatgaacatcatcagcctgatcgacgaggagagcaagttccccaagggcaccgacaccaccatgctgcacaagctgaacagccagcacaagctgaacgccaactacatcccccccaagaacaaccacgagacccagttcggcatcaaccacttcgccggcatcgtgtactacgagacccagggcttcctggagaagaacagagacaccctgcacggcgacatcatccagctggtgcacagcagcagaaacaagttcatcaagcagatcttccaggccgacgtggccatgggcgccgagaccagaaagagaagccccaccctgagcagccagttcaagagaagcctggagctgctgatgagaaccctgggcgcctgccagcccttcttcgtgagatgcatcaagcccaacgagttcaagaagcccatgctgttcgacagacacctgtgcgtgagacagctgagatacagcggcatgatggagaccatcagaatcagaagagccggctaccccatcagatacagcttcgtggagttcgtggagagatacagagtgctgctgcccggcgtgaagcccgcctacaagcagggcgacctgagaggcacctgccagagaatggccgaggccgtgctgggcacccacgacgactggcagatcggcaagaccaagatcttcctgaaggaccaccacgacatgctgctggaggtggagagagacaaggccatcaccgacagagtgatcctgctgcagaaggtgatcagaggcttcaaggacagaagcaacttcctgaagctgaagaacgccgccaccctgatccagagacactggagaggccacaactgcagaaagaactacggcctgatgagactgggcttcctgagactgcaggccctgcacagaagcagaaagctgcaccagcagtacagactggccagacagagaatcatccagttccaggccagatgcagagcctacctggtgagaaaggccttcagacacagactgtgggccgtgctgaccgtgcaggcctacgccagaggcatgatcgccagaagactgcaccagagactgagagccgagtacctgtggagactggaggccgagaagatgagactggccgaggaggagaagctgagaaaggagatgagcgccaagaaggccaaggaggaggccgagagaaagcaccaggagagactggcccagctggccagagaggacgccgagagagagctgaaggagaaggaggccgccagaagaaagaaggagctgctggagcagatggagagagccagacacgagcccgtgaaccacagcgacatggtggacaagatgttcggcttcctgggcaccagcggcggcctgcccggccaggagggccaggcccccagcggcttcgaggacctggagagaggcagaagagagatggtggaggaggacctggacgccgccctgcccctgcccgacgaggacgaggaggacctgagcgagtacaagttcgccaagttcgccgccacctacttccagggcaccaccacccacagctacaccagaagacccctgaagcagcccctgctgtaccacgacgacgagggcgaccagctggccgccctggccgtgtggatcaccatcctgagattcatgggcgacctgcccgagcccaagtaccacaccgccatgagcgacggcagcgagaagatccccgtgatgaccaagatctacgagaccctgggcaagaagacctacaagagagagctgcaggccctgcagggcgagggcgaggcccagctgcccgagggccagaagaagagcagcgtgagacacaagctggtgcacctgaccctgaagaagaagagcaagctgaccgaggaggtgaccaagagactgcacgacggcgagagcaccgtgcagggcaacagcatgctggaggacagacccaccagcaacctggagaagctgcacttcatcatcggcaacggcatcctgagacccgccctgagagacgagatctactgccagatcagcaagcagctgacccacaaccccagcaagagcagctacgccagaggctggatcctggtgagcctgtgcgtgggctgcttcgcccccagcgagaagttcgtgaagtacctgagaaacttcatccacggcggcccccccggctacgccccctactgcgaggagagactgagaagaaccttcgtgaacggcaccagaacccagccccccagctggctggagctgcaggccaccaagagcaagaagcccatcatgctgcccgtgaccttcatggacggcaccaccaagaccctgctgaccgacagcgccaccaccgccaaggagctgtgcaacgccctggccgacaagatcagcctgaaggacagattcggcttcagcctgtacatcgccctgttcgacaaggtgagcagcctgggcagcggcagcgaccacgtgatggacgccatcagccagtgcgagcagtacgccaaggagcagggcgcccaggagagaaacgccccctggagactgttcttcagaaaggaggtgttcaccccctggcacagccccagcgaggacaacgtggccaccaacctgatctaccagcaggtggtgagaggcgtgaagttcggcgagtacagatgcgagaaggaggacgacctggccgagctggccagccagcagtacttcgtggactacggcagcgagatgatcctggagagactgctgaacctggtgcccacctacatccccgacagagagatcacccccctgaagaccctggagaagtgggcccagctggccatcgccgcccacaagaagggcatctacgcccagagaagaaccgacgcccagaaggtgaaggaggacgtggtgagctacgccagattcaagtggcccctgctgttcagcagattctacgaggcctacaagttcagcggccccagcctgcccaagaacgacgtgatcgtggccgtgaactggaccggcgtgtacttcgtggacgagcaggagcaggtgctgctggagctgagcttccccgagatcatggccgtgagcagcagcagagagtgcagagtgtggctgagcctgggctgcagcgacctgggctgcgccgccccccacagcggctgggccggcctgacccccgccggcccctgcagcccctgctggagctgcagaggcgccaagaccaccgcccccagcttcaccctggccaccatcaagggcgacgagtacaccttcaccagcagcaacgccgaggacatcagagacctggtggtgaccttcctggagggcctgagaaagagaagcaagtacgtggtggccctgcaggacaaccccaaccccgccggcgaggagagcggcttcctgagcttcgccaagggcgacctgatcatcctggaccacgacaccggcgagcaggtgatgaacagcggctgggccaacggcatcaacgagagaaccaagcagagaggcgacttccccaccgacagcgtgtacgtgatgcccaccgtgaccatgccccccagagagatcgtggccctggtgaccatgacccccgaccagagacaggacgtggtgagactgctgcagctgagaaccgccgagcccgaggtgagagccaagccctacaccctggaggagttcagctacgactacttcagacccccccccaagcacaccctgagcagagtgatggtgagcaaggccagaggcaaggacagactgtggagccacaccagagagcccctgaagcaggccctgctgaagaagctgctgggcagcgaggagctgagccaggaggcctgcctggccttcatcgccgtgctgaagtacatgggcgactaccccagcaagagaaccagaagcgtgaacgagctgaccgaccagatcttcgagggccccctgaaggccgagcccctgaaggacgaggcctacgtgcagatcctgaagcagctgaccgacaaccacatcagatacagcgaggagagaggctgggagctgctgtggctgtgcaccggcctgttcccccccagcaacatcctgctgccccacgtgcagagattcctgcagagcagaaagcactgccccctggccatcgactgcctgcagagactgcagaaggccctgagaaacggcagcagaaagtaccccccccacctggtggaggtggaggccatccagcacaagaccacccagatcttccacaaggtgtacttccccgacgacaccgacgaggccttcgaggtggagagcagcaccaaggccaaggacttctgccagaacatcgccaccagactgctgctgaagagcagcgagggcttcagcctgttcgtgaagatcgccgacaaggtgctgagcgtgcccgagaacgacttcttcttcgacttcgtgagacacctgaccgactggatcaagaaggccagacccatcaaggacggcatcgtgcccagcctgacctaccaggtgttcttcatgaagaagctgtggaccaccaccgtgcccggcaaggaccccatggccgacagcatcttccactactaccaggagctgcccaagtacctgagaggctaccacaagtgcaccagagaggaggtgctgcagctgggcgccctgatctacagagtgaagttcgaggaggacaagagctacttccccagcatccccaagctgctgagagagctggtgccccaggacctgatcagacaggtgagccccgacgactggaagagaagcatcgtggcctacttcaacaagcacgccggcaagagcaaggaggaggccaagctggccttcctgaagctgatcttcaagtggcccaccttcggcagcgccttcttcgaggtgaagcagaccaccgagcccaacttccccgagatcctgctgatcgccatcaacaagtacggcgtgagcctgatcgaccccaagaccaaggacatcctgaccacccaccccttcaccaagatcagcaactggagcagcggcaacacctacttccacatcaccatcggcaacctggtgagaggcagcaagctgctgtgcgagaccagcctgggctacaagatggacgacctgctgaccagctacatcagccagatgctgaccgccatgagcaagcagagaggcagcagaagcggcaagtag

SEQ ID NO: 90060 - DNA, 3537 bp, synthetic construct
  misc_feature 1..3537: note = Description of Artificial Sequence: Synthetic coding sequence
  source 1..3537: mol_type = other DNA
atggtgatcctgcagcagggcgaccacgtgtggatggacctgagactgggccaggagttcgacgtgcccatcggcgccgtggtgaagctgtgcgacagcggccaggtgcaggtggtggacgacgaggacaacgagcactggatcagcccccagaacgccacccacatcaagcccatgcaccccaccagcgtgcacggcgtggaggacatgatcagactgggcgacctgaacgaggccggcatcctgagaaacctgctgatcagatacagagaccacctgatctacacctacaccggcagcatcctggtggccgtgaacccctaccagctgctgagcatctacagccccgagcacatcagacagtacaccaacaagaagatcggcgagatgcccccccacatcttcgccatcgccgacaactgctacttcaacatgaagagaaacagcagagaccagtgctgcatcatcagcggcgagagcggcgccggcaagaccgagagcaccaagctgatcctgcagttcctggccgccatcagcggccagcacagctggatcgagcagcaggtgctggaggccacccccatcctggaggccttcggcaacgccaagaccatcagaaacgacaacagcagcagattcggcaagtacatcgacatccacttcaacaagagaggcgccatcgagggcgccaagatcgagcagtacctgctggagaagagcagagtgtgcagacaggccctggacgagagaaactaccacgtgttctactgcatgctggagggcatgagcgaggaccagaagaagaagctgggcctgggccaggccagcgactacaactacctggccatgggcaactgcatcacctgcgagggcagagtggacagccaggagtacgccaacatcagaagcgccatgaaggtgctgatgttcaccgacaccgagaactgggagatcagcaagctgctggccgccatcctgcacctgggcaacctgcagtacgaggccagaaccttcgagaacctggacgcctgcgaggtgctgttcagccccagcctggccaccgccgccagcctgctggaggtgaacccccccgacctgatgagctgcctgaccagcagaaccctgatcaccagaggcgagaccgtgagcacccccctgagcagagagcaggccctggacgtgagagacgccttcgtgaagggcatctacggcagactgttcgtgtggatcgtggacaagatcaacgccgccatctacaagccccccagccaggacgtgaagaacagcagaagaagcatcggcctgctggacatcttcggcttcgagaacttcgccgtgaacagcttcgagcagctgtgcatcaacttcgccaacgagcacctgcagcagttcttcgtgagacacgtgttcaagctggagcaggaggagtacgacctggagagcatcgactggctgcacatcgagttcaccgacaaccaggacgccctggacatgatcgccaacaagcccatgaacatcatcagcctgatcgacgaggagagcaagttccccaagggcaccgacaccaccatgctgcacaagctgaacagccagcacaagctgaacgccaactacatcccccccaagaacaaccacgagacccagttcggcatcaaccacttcgccggcatcgtgtactacgagacccagggcttcctggagaagaacagagacaccctgcacggcgacatcatccagctggtgcacagcagcagaaacaagttcatcaagcagatcttccaggccgacgtggccatgggcgccgagaccagaaagagaagccccaccctgagcagccagttcaagagaagcctggagctgctgatgagaaccctgggcgcctgccagcccttcttcgtgagatgcatcaagcccaacgagttcaagaagcccatgctgttcgacagacacctgtgcgtgagacagctgagatacagcggcatgatggagaccatcagaatcagaagagccggctaccccatcagatacagcttcgtggagttcgtggagagatacagagtgctgctgcccggcgtgaagcccgcctacaagcagggcgacctgagaggcacctgccagagaatggccgaggccgtgctgggcacccacgacgactggcagatcggcaagaccaagatcttcctgaaggaccaccacgacatgctgctggaggtggagagagacaaggccatcaccgacagagtgatcctgctgcagaaggtgatcagaggcttcaaggacagaagcaacttcctgaagctgaagaacgccgccaccctgatccagagacactggagaggccacaactgcagaaagaactacggcctgatgagactgggcttcctgagactgcaggccctgcacagaagcagaaagctgcaccagcagtacagactggccagacagagaatcatccagttccaggccagatgcagagcctacctggtgagaaaggccttcagacacagactgtgggccgtgctgaccgtgcaggcctacgccagaggcatgatcgccagaagactgcaccagagactgagagccgagtacctgtggagactggaggccgagaagatgagactggccgaggaggagaagctgagaaaggagatgagcgccaagaaggccaaggaggaggccgagagaaagcaccaggagagactggcccagctggccagagaggacgccgagagagagctgaaggagaaggaggccgccagaagaaagaaggagctgctggagcagatggagagagccagacacgagcccgtgaaccacagcgacatggtggacaagatgttcggcttcctgggcaccagcggcggcctgcccggccaggagggccaggcccccagcggcttcgaggacctggagagaggcagaagagagatggtggaggaggacctggacgccgccctgcccctgcccgacgaggacgaggaggacctgagcgagtacaagttcgccaagttcgccgccacctacttccagggcaccaccacccacagctacaccagaagacccctgaagcagcccctgctgtaccacgacgacgagggcgaccagctggccgccctggccgtgtggatcaccatcctgagattcatgggcgacctgcccgagcccaagtaccacaccgccatgagcgacggcagcgagaagatccccgtgatgaccaagatctacgagaccctgggcaagaagacctacaagagagagctgcaggccctgcagggcgagggcgaggcccagctgcccgagggccagaagaagagcagcgtgagacacaagctggtgcacctgaccctgaagaagaagagcaagctgaccgaggaggtgaccaagagactgcacgacggcgagagcaccgtgcagggcaacagcatgctggaggacagacccaccagcaacctggagaagctgcacttcatcatcggcaacggcatcctgagacccgccctgagaagcgtgcccggcggcggcgacaccagagcctag

SEQ ID NO: 90061 - DNA, 6528 bp, synthetic construct
  misc_feature 1..6528: note = Description of Artificial Sequence: Synthetic coding sequence
  source 1..6528: mol_type = other DNA
atggtgatcctgcagcagggcgaccacgtgtggatggacctgagactgggccaggagttcgacgtgcccatcggcgccgtggtgaagctgtgcgacagcggccaggtgcaggtggtggacgacgaggacaacgagcactggatcagcccccagaacgccacccacatcaagcccatgcaccccaccagcgtgcacggcgtggaggacatgatcagactgggcgacctgaacgaggccggcatcctgagaaacctgctgatcagatacagagaccacctgatctacacctacaccggcagcatcctggtggccgtgaacccctaccagctgctgagcatctacagccccgagcacatcagacagtacaccaacaagaagatcggcgagatgcccccccacatcttcgccatcgccgacaactgctacttcaacatgaagagaaacagcagagaccagtgctgcatcatcagcggcgagagcggcgccggcaagaccgagagcaccaagctgatcctgcagttcctggccgccatcagcggccagcacagctggatcgagcagcaggtgctggaggccacccccatcctggaggccttcggcaacgccaagaccatcagaaacgacaacagcagcagattcggcaagtacatcgacatccacttcaacaagagaggcgccatcgagggcgccaagatcgagcagtacctgctggagaagagcagagtgtgcagacaggccctggacgagagaaactaccacgtgttctactgcatgctggagggcatgagcgaggaccagaagaagaagctgggcctgggccaggccagcgactacaactacctggccatgggcaactgcatcacctgcgagggcagagtggacagccaggagtacgccaacatcagaagcgccatgaaggtgctgatgttcaccgacaccgagaactgggagatcagcaagctgctggccgccatcctgcacctgggcaacctgcagtacgaggccagaaccttcgagaacctggacgcctgcgaggtgctgttcagccccagcctggccaccgccgccagcctgctggaggtgaacccccccgacctgatgagctgcctgaccagcagaaccctgatcaccagaggcgagaccgtgagcacccccctgagcagagagcaggccctggacgtgagagacgccttcgtgaagggcatctacggcagactgttcgtgtggatcgtggacaagatcaacgccgccatctacaagccccccagccaggacgtgaagaacagcagaagaagcatcggcctgctggacatcttcggcttcgagaacttcgccgtgaacagcttcgagcagctgtgcatcaacttcgccaacgagcacctgcagcagttcttcgtgagacacgtgttcaagctggagcaggaggagtacgacctggagagcatcgactggctgcacatcgagttcaccgacaaccaggacgccctggacatgatcgccaacaagcccatgaacatcatcagcctgatcgacgaggagagcaagttccccaagggcaccgacaccaccatgctgcacaagctgaacagccagcacaagctgaacgccaactacatcccccccaagaacaaccacgagacccagttcggcatcaaccacttcgccggcatcgtgtactacgagacccagggcttcctggagaagaacagagacaccctgcacggcgacatcatccagctggtgcacagcagcagaaacaagttcatcaagcagatcttccaggccgacgtggccatgggcgccgagaccagaaagagaagccccaccctgagcagccagttcaagagaagcctggagctgctgatgagaaccctgggcgcctgccagcccttcttcgtgagatgcatcaagcccaacgagttcaagaagcccatgctgttcgacagacacctgtgcgtgagacagctgagatacagcggcatgatggagaccatcagaatcagaagagccggctaccccatcagatacagcttcgtggagttcgtggagagatacagagtgctgctgcccggcgtgaagcccgcctacaagcagggcgacctgagaggcacctgccagagaatggccgaggccgtgctgggcacccacgacgactggcagatcggcaagaccaagatcttcctgaaggaccaccacgacatgctgctggaggtggagagagacaaggccatcaccgacagagtgatcctgctgcagaaggtgatcagaggcttcaaggacagaagcaacttcctgaagctgaagaacgccgccaccctgatccagagacactggagaggccacaactgcagaaagaactacggcctgatgagactgggcttcctgagactgcaggccctgcacagaagcagaaagctgcaccagcagtacagactggccagacagagaatcatccagttccaggccagatgcagagcctacctggtgagaaaggccttcagacacagactgtgggccgtgctgaccgtgcaggcctacgccagaggcatgatcgccagaagactgcaccagagactgagagccgagtacctgtggagactggaggccgagaagatgagactggccgaggaggagaagctgagaaaggagatgagcgccaagaaggccaaggaggaggccgagagaaagcaccaggagagactggcccagctggccagagaggacgccgagagagagctgaaggagaaggaggccgccagaagaaagaaggagctgctggagcagatggagagagccagacacgagcccgtgaaccacagcgacatggtggacaagatgttcggcttcctgggcaccagcggcggcctgcccggccaggagggccaggcccccagcggcttcgaggacctggagagaggcagaagagagatggtggaggaggacctggacgccgccctgcccctgcccgacgaggacgaggaggacctgagcgagtacaagttcgccaagttcgccgccacctacttccagggcaccaccacccacagctacaccagaagacccctgaagcagcccctgctgtaccacgacgacgagggcgaccagctggccgccctggccgtgtggatcaccatcctgagattcatgggcgacctgcccgagcccaagtaccacaccgccatgagcgacggcagcgagaagatccccgtgatgaccaagatctacgagaccctgggcaagaagacctacaagagagagctgcaggccctgcagggcgagggcgaggcccagctgcccgagggccagaagaagagcagcgtgagacacaagctggtgcacctgaccctgaagaagaagagcaagctgaccgaggaggtgaccaagagactgcacgacggcgagagcaccgtgcagggcaacagcatgctggaggacagacccaccagcaacctggagaagctgcacttcatcatcggcaacggcatcctgagacccgccctgagagacgagatctactgccagatcagcaagcagctgacccacaaccccagcaagagcagctacgccagaggctggatcctggtgagcctgtgcgtgggctgcttcgcccccagcgagaagttcgtgaagtacctgagaaacttcatccacggcggcccccccggctacgccccctactgcgaggagagactgagaagaaccttcgtgaacggcaccagaacccagccccccagctggctggagctgcaggccaccaagagcaagaagcccatcatgctgcccgtgaccttcatggacggcaccaccaagaccctgctgaccgacagcgccaccaccgccaaggagctgtgcaacgccctggccgacaagatcagcctgaaggacagattcggcttcagcctgtacatcgccctgttcgacaaggtgagcagcctgggcagcggcagcgaccacgtgatggacgccatcagccagtgcgagcagtacgccaaggagcagggcgcccaggagagaaacgccccctggagactgttcttcagaaaggaggtgttcaccccctggcacagccccagcgaggacaacgtggccaccaacctgatctaccagcaggtggtgagaggcgtgaagttcggcgagtacagatgcgagaaggaggacgacctggccgagctggccagccagcagtacttcgtggactacggcagcgagatgatcctggagagactgctgaacctggtgcccacctacatccccgacagagagatcacccccctgaagaccctggagaagtgggcccagctggccatcgccgcccacaagaagggcatctacgcccagagaagaaccgacgcccagaaggtgaaggaggacgtggtgagctacgccagattcaagtggcccctgctgttcagcagattctacgaggcctacaagttcagcggccccagcctgcccaagaacgacgtgatcgtggccgtgaactggaccggcgtgtacttcgtggacgagcaggagcaggtgctgctggagctgagcttccccgagatcatggccgtgagcagcagcagaggcgccaagaccaccgcccccagcttcaccctggccaccatcaagggcgacgagtacaccttcaccagcagcaacgccgaggacatcagagacctggtggtgaccttcctggagggcctgagaaagagaagcaagtacgtggtggccctgcaggacaaccccaaccccgccggcgaggagagcggcttcctgagcttcgccaagggcgacctgatcatcctggaccacgacaccggcgagcaggtgatgaacagcggctgggccaacggcatcaacgagagaaccaagcagagaggcgacttccccaccgacagcgtgtacgtgatgcccaccgtgaccatgccccccagagagatcgtggccctggtgaccatgacccccgaccagagacaggacgtggtgagactgctgcagctgagaaccgccgagcccgaggtgagagccaagccctacaccctggaggagttcagctacgactacttcagacccccccccaagcacaccctgagcagagtgatggtgagcaaggccagaggcaaggacagactgtggagccacaccagagagcccctgaagcaggccctgctgaagaagctgctgggcagcgaggagctgagccaggaggcctgcctggccttcatcgccgtgctgaagtacatgggcgactaccccagcaagagaaccagaagcgtgaacgagctgaccgaccagatcttcgagggccccctgaaggccgagcccctgaaggacgaggcctacgtgcagatcctgaagcagctgaccgacaaccacatcagatacagcgaggagagaggctgggagctgctgtggctgtgcaccggcctgttcccccccagcaacatcctgctgccccacgtgcagagattcctgcagagcagaaagcactgccccctggccatcgactgcctgcagagactgcagaaggccctgagaaacggcagcagaaagtaccccccccacctggtggaggtggaggccatccagcacaagaccacccagatcttccacaaggtgtacttccccgacgacaccgacgaggccttcgaggtggagagcagcaccaaggccaaggacttctgccagaacatcgccaccagactgctgctgaagagcagcgagggcttcagcctgttcgtgaagatcgccgacaaggtgctgagcgtgcccgagaacgacttcttcttcgacttcgtgagacacctgaccgactggatcaagaaggccagacccatcaaggacggcatcgtgcccagcctgacctaccaggtgttcttcatgaagaagctgtggaccaccaccgtgcccggcaaggaccccatggccgacagcatcttccactactaccaggagctgcccaagtacctgagaggctaccacaagtgcaccagagaggaggtgctgcagctgggcgccctgatctacagagtgaagttcgaggaggacaagagctacttccccagcatccccaagctgctgagagagctggtgccccaggacctgatcagacaggtgagccccgacgactggaagagaagcatcgtggcctacttcaacaagcacgccggcaagagcaaggaggaggccaagctggccttcctgaagctgatcttcaagtggcccaccttcggcagcgccttcttcgagcagaccaccgagcccaacttccccgagatcctgctgatcgccatcaacaagtacggcgtgagcctgatcgaccccaagaccaaggacatcctgaccacccaccccttcaccaagatcagcaactggagcagcggcaacacctacttccacatcaccatcggcaacctggtgagaggcagcaagctgctgtgcgagaccagcctgggctacaagatggacgacctgctgaccagctacatcagccagatgctgaccgccatgagcaagcagagaggcagcagaagcggcaagtag

SEQ ID NO: 90062 - DNA, 2532 bp, synthetic construct
  misc_feature 1..2532: note = Description of Artificial Sequence: Synthetic coding sequence
  source 1..2532: mol_type = other DNA
ggcctgagcgtgcagtggctgctggacggcctggcctgcttcttcgccagcctgcacgtgcccctgggcagagtgcagctgcacgccagcgccagaggcatccaggagaaggaggacgacctggccgagctggccagccagcagtacttcgtggactacggcagcgagatgatcctggagagactgctgaacctggtgcccacctacatccccgacagagagatcacccccctgaagaccctggagaagtgggcccagctggccatcgccgcccacaagaagggcatctacgcccagagaagaaccgacgcccagaaggtgaaggaggacgtggtgagctacgccagattcaagtggcccctgctgttcagcagattctacgaggcctacaagttcagcggccccagcctgcccaagaacgacgtgatcgtggccgtgaactggaccggcgtgtacttcgtggacgagcaggagcaggtgctgctggagctgagcttccccgagatcatggccgtgagcagcagcagaggcgccaagaccaccgcccccagcttcaccctggccaccatcaagggcgacgagtacaccttcaccagcagcaacgccgaggacatcagagacctggtggtgaccttcctggagggcctgagaaagagaagcaagtacgtggtggccctgcaggacaaccccaaccccgccggcgaggagagcggcttcctgagcttcgccaagggcgacctgatcatcctggaccacgacaccggcgagcaggtgatgaacagcggctgggccaacggcatcaacgagagaaccaagcagagaggcgacttccccaccgacagcgtgtacgtgatgcccaccgtgaccatgccccccagagagatcgtggccctggtgaccatgacccccgaccagagacaggacgtggtgagactgctgcagctgagaaccgccgagcccgaggtgagagccaagccctacaccctggaggagttcagctacgactacttcagacccccccccaagcacaccctgagcagagtgatggtgagcaaggccagaggcaaggacagactgtggagccacaccagagagcccctgaagcaggccctgctgaagaagctgctgggcagcgaggagctgagccaggaggcctgcctggccttcatcgccgtgctgaagtacatgggcgactaccccagcaagagaaccagaagcgtgaacgagctgaccgaccagatcttcgagggccccctgaaggccgagcccctgaaggacgaggcctacgtgcagatcctgaagcagctgaccgacaaccacatcagatacagcgaggagagaggctgggagctgctgtggctgtgcaccggcctgttcccccccagcaacatcctgctgccccacgtgcagagattcctgcagagcagaaagcactgccccctggccatcgactgcctgcagagactgcagaaggccctgagaaacggcagcagaaagtaccccccccacctggtggaggtggaggccatccagcacaagaccacccagatcttccacaaggtgtacttccccgacgacaccgacgaggccttcgaggtggagagcagcaccaaggccaaggacttctgccagaacatcgccaccagactgctgctgaagagcagcgagggcttcagcctgttcgtgaagatcgccgacaaggtgctgagcgtgcccgagaacgacttcttcttcgacttcgtgagacacctgaccgactggatcaagaaggccagacccatcaaggacggcatcgtgcccagcctgacctaccaggtgttcttcatgaagaagctgtggaccaccaccgtgcccggcaaggaccccatggccgacagcatcttccactactaccaggagctgcccaagtacctgagaggctaccacaagtgcaccagagaggaggtgctgcagctgggcgccctgatctacagagtgaagttcgaggaggacaagagctacttccccagcatccccaagctgctgagagagctggtgccccaggacctgatcagacaggtgagccccgacgactggaagagaagcatcgtggcctacttcaacaagcacgccggcaagagcaaggaggaggccaagctggccttcctgaagctgatcttcaagtggcccaccttcggcagcgccttcttcgaggtgaaggtgcaccacggcctgctgagagccgaggaggagggcaacagagccctgatcaagcacagagacagcagcctgggcctgtgggagagagccatggccctggacacctgccccggcgagggcagaagagccgcccccagcgccctgagccagctgagcgtgctggccggcgtgagccccggcgacagaggcaccagaagaagcagcgcctggcagtggagacagacctgcaagcaggccggcgtgatggaggacggcctgtgcagcgacaccggcgagcccagccccagatggcagagcagcggcggcagcgccggctgcgagaaggccagctag

SEQ ID NO: 90063 - DNA, 4167 bp, synthetic construct
  misc_feature 1..4167: note = Description of Artificial Sequence: Synthetic coding sequence
  source 1..4167: mol_type = other DNA
atgagactgggcttcctgagactgcaggccctgcacagaagcagaaagctgcaccagcagtacagactggccagacagagaatcatccagttccaggccagatgcagagcctacctggtgagaaaggccttcagacacagactgtgggccgtgctgaccgtgcaggcctacgccagaggcatgatcgccagaagactgcaccagagactgagagccgagtacctgtggagactggaggccgagaagatgagactggccgaggaggagaagctgagaaaggagatgagcgccaagaaggccaaggaggaggccgagagaaagcaccaggagagactggcccagctggccagagaggacgccgagagagagctgaaggagaaggaggccgccagaagaaagaaggagctgctggagcagatggagagagccagacacgagcccgtgaaccacagcgacatggtggacaagatgttcggcttcctgggcaccagcggcggcctgcccggccaggagggccaggcccccagcggcttcgaggacctggagagaggcagaagagagatggtggaggaggacctggacgccgccctgcccctgcccgacgaggacgaggaggacctgagcgagtacaagttcgccaagttcgccgccacctacttccagggcaccaccacccacagctacaccagaagacccctgaagcagcccctgctgtaccacgacgacgagggcgaccagctggccgccctggccgtgtggatcaccatcctgagattcatgggcgacctgcccgagcccaagtaccacaccgccatgagcgacggcagcgagaagatccccgtgatgaccaagatctacgagaccctgggcaagaagacctacaagagagagctgcaggccctgcagggcgagggcgaggcccagctgcccgagggccagaagaagagcagcgtgagacacaagctggtgcacctgaccctgaagaagaagagcaagctgaccgaggaggtgaccaagagactgcacgacggcgagagcaccgtgcagggcaacagcatgctggaggacagacccaccagcaacctggagaagctgcacttcatcatcggcaacggcatcctgagacccgccctgagagacgagatctactgccagatcagcaagcagctgacccacaaccccagcaagagcagctacgccagaggctggatcctggtgagcctgtgcgtgggctgcttcgcccccagcgagaagttcgtgaagtacctgagaaacttcatccacggcggcccccccggctacgccccctactgcgaggagagactgagaagaaccttcgtgaacggcaccagaacccagccccccagctggctggagctgcaggccaccaagagcaagaagcccatcatgctgcccgtgaccttcatggacggcaccaccaagaccctgctgaccgacagcgccaccaccgccaaggagctgtgcaacgccctggccgacaagatcagcctgaaggacagattcggcttcagcctgtacatcgccctgttcgacaaggtgagcagcctgggcagcggcagcgaccacgtgatggacgccatcagccagtgcgagcagtacgccaaggagcagggcgcccaggagagaaacgccccctggagactgttcttcagaaaggaggtgttcaccccctggcacagccccagcgaggacaacgtggccaccaacctgatctaccagcaggtggtgagaggcgtgaagttcggcgagtacagatgcgagaaggaggacgacctggccgagctggccagccagcagtacttcgtggactacggcagcgagatgatcctggagagactgctgaacctggtgcccacctacatccccgacagagagatcacccccctgaagaccctggagaagtgggcccagctggccatcgccgcccacaagaagggcatctacgcccagagaagaaccgacgcccagaaggtgaaggaggacgtggtgagctacgccagattcaagtggcccctgctgttcagcagattctacgaggcctacaagttcagcggccccagcctgcccaagaacgacgtgatcgtggccgtgaactggaccggcgtgtacttcgtggacgagcaggagcaggtgctgctggagctgagcttccccgagatcatggccgtgagcagcagcagaggcgccaagaccaccgcccccagcttcaccctggccaccatcaagggcgacgagtacaccttcaccagcagcaacgccgaggacatcagagacctggtggtgaccttcctggagggcctgagaaagagaagcaagtacgtggtggccctgcaggacaaccccaaccccgccggcgaggagagcggcttcctgagcttcgccaagggcgacctgatcatcctggaccacgacaccggcgagcaggtgatgaacagcggctgggccaacggcatcaacgagagaaccaagcagagaggcgacttccccaccgacagcgtgtacgtgatgcccaccgtgaccatgccccccagagagatcgtggccctggtgaccatgacccccgaccagagacaggacgtggtgagactgctgcagctgagaaccgccgagcccgaggtgagagccaagccctacaccctggaggagttcagctacgactacttcagacccccccccaagcacaccctgagcagagtgatggtgagcaaggccagaggcaaggacagactgtggagccacaccagagagcccctgaagcaggccctgctgaagaagctgctgggcagcgaggagctgagccaggaggcctgcctggccttcatcgccgtgctgaagtacatgggcgactaccccagcaagagaaccagaagcgtgaacgagctgaccgaccagatcttcgagggccccctgaaggccgagcccctgaaggacgaggcctacgtgcagatcctgaagcagctgaccgacaaccacatcagatacagcgaggagagaggctgggagctgctgtggctgtgcaccggcctgttcccccccagcaacatcctgctgccccacgtgcagagattcctgcagagcagaaagcactgccccctggccatcgactgcctgcagagactgcagaaggccctgagaaacggcagcagaaagtaccccccccacctggtggaggtggaggccatccagcacaagaccacccagatcttccacaaggtgtacttccccgacgacaccgacgaggccttcgaggtggagagcagcaccaaggccaaggacttctgccagaacatcgccaccagactgctgctgaagagcagcgagggcttcagcctgttcgtgaagatcgccgacaaggtgctgagcgtgcccgagaacgacttcttcttcgacttcgtgagacacctgaccgactggatcaagaaggccagacccatcaaggacggcatcgtgcccagcctgacctaccaggtgttcttcatgaagaagctgtggaccaccaccgtgcccggcaaggaccccatggccgacagcatcttccactactaccaggagctgcccaagtacctgagaggctaccacaagtgcaccagagaggaggtgctgcagctgggcgccctgatctacagagtgaagttcgaggaggacaagagctacttccccagcatccccaagctgctgagagagctggtgccccaggacctgatcagacaggtgagccccgacgactggaagagaagcatcgtggcctacttcaacaagcacgccggcaagagcaaggaggaggccaagctggccttcctgaagctgatcttcaagtggcccaccttcggcagcgccttcttcgaggtgaagcagaccaccgagcccaacttccccgagatcctgctgatcgccatcaacaagtacggcgtgagcctgatcgaccccaagaccaaggacatcctgaccacccaccccttcaccaagatcagcaactggagcagcggcaacacctacttccacatcaccatcggcaacctggtgagaggcagcaagctgctgtgcgagaccagcctgggctacaagatggacgacctgctgaccagctacatcagccagatgctgaccgccatgagcaagcagagaggcagcagaagcggcaagtag

SEQ ID NO: 90064 - DNA, 2580 bp, synthetic construct
  misc_feature 1..2580: note = Description of Artificial Sequence: Synthetic coding sequence
  source 1..2580: mol_type = other DNA
atgggcagaaagctggacctgagcggcctgaccgacgacgagaccgagcacgtgctgcaggtggtgcagagagacttcaacctgagaaagaaggaggaggagagactgagcgagctgaagcagaagctggacgaggagggcagcaagtgcagcatcctgagcaagcaccagcagttcgtggagcactgctgcatgagatgctgcagccccttcaccttcctggtgaacaccaagagacagtgcggcgactgcaagttcaacgtgtgcaagagctgctgcagctaccagaagcacgagaaggcctgggtgtgctgcgtgtgccagcaggccagactgctgagagcccagagcctggagtggttctacaacaacgtgaagagcagattcaagagattcggcagcgccaaggtgctgaagaacctgtacagaaagcacagactggagagcggcgcctgcttcgacatcctgggcggcagcctgttcgagagcaacctggagaacgagggcagcatcagcggcagcgacagcaccttctacagacagagcgagggccacagcgtgatggacaccctggccgtggccctgagagtggccgaggaggccatcgaggaggccatcagcaaggccgaggcctacggcgacagcctggacaagcagaacgaggccagctacctgagagaccacaaggaggagctgaccgaggagctggccaccaccatcctgcagaagatcatcagaaagcagaagagcaagagcgagcagcaggtggaggaggagcccggctggccccacccccagagctgcagcaccaaggtggccgacgagggcaccagcgccagccccggcggctacagagcccccgccgccctgtggagaagccagagcgccttcagcatcaccggcgaggaggccctgaagaccccccccgtggaggcccccagcagacagcccagagaccagggccagcaccccagagccgagagcgccctgcccagctggaagagcgtggacagactggacgagaccaacctggcccccgtgctgcagagccccgacggcaactgggtggccctgaaggacggcgcccccccccccaccagactgctggccaagcccaagagcggcaccttccaggccctggaggtggccagcagcgtggccagcgcctacgacgagatgggcagcgacagcgaggaggacttcgactggagcgaggccctgagcaagctgtgccccagaagcagagccctgcccagaaacccccagccccagcccacccaggcccagagcagcgaccagggccccatcgccgccagccccagcagcgccctgagccccaaccccgaggccatgtgcagcgacagcgagaccagcagcgccggcagcagcagagaggtgggccaccaggccagactgagctggctgcagagaaaggcccccagaaaccccgccgccgagaagatgagactgcacggcgagctggacgtgaacttcaacccccagctggccagcagagagaccagcgacagcagcgagcccgaggaggccccccacaccaccgacagaagagccagaagatggagaagagccagactgggcagcgaggagcccagcaaggagcccagcagccccagcgcccagctgagagacctggacacccaccaggtgagcgacgacctgagcgagaccgacatcagcaacgaggccagagacccccagaccctgaccgacaccaccgaggagaagagaagaaacagactgtacgagctggccatgaagatgagcgagaaggagaccagcagcggcgaggaccaggagagcgagcccaagaccgagagcgagaaccagaaggagagcctgagcagcgaggacaacagccagagcgtgcaggaggagctgaagaagaagttcagcgccgtgagcctgtgcaacatcagcaccgaggtgctgaaggtgatcaacgccaccgaggagctgatcgccggcagcaccggcccctgggagagcccccaggtgccccccgacagacagaagggcatgttccccagaggcaccgaccaggtgagactggacgagcagctgaccagcctggaggagaacgtgtacctggccgccggcaccgtgtacggcctggagacccagctgaccgagctggaggacgccgccagatgcatccacagcggcaccgacgagacccacctggccgacctggaggaccaggtggccaccgccgccgcccaggtgcaccacgccgagctgcagatcagcgacatcgagagcagaatcagcgccctgaccatcgccggcctgaacatcgccccctgcgtgagattcaccagaagaagagaccagaagcagagaacccaggtgcagaccatcgacaccagcagacagcagagaagaaagctgcccgccccccccgtgaaggccgagaagatcgagaccagcagcgtgaccaccatcaagaccttcaaccacaacttcatcctgcagggcagcagcaccaacagaaccaaggagagaaagggcaccaccaaggacctgatggagcccgccctggagagcgccgtgatgtactag

SEQ ID NO: 90065 - DNA, 2313 bp, synthetic construct
  misc_feature 1..2313: note = Description of Artificial Sequence: Synthetic coding sequence
  source 1..2313: mol_type = other DNA
atgagaaaggccgccagcgccgccagcagcagaagcaccagcagcctgtggagcaccgccgcctgcgccgccgccagacccagccccagcagcagcacccccagcgccagcgtggagatcgccaacagcatgagcgccagagccgccgcccccaccagaagcaccaagagacccggcagcgccgccagcgccagcaagagaggcggcagcctgttcgagagcaacctggagaacgagggcagcatcagcggcagcgacagcaccttctacagacagagcgagggccacagcgtgatggacaccctggccgtggccctgagagtggccgaggaggccatcgaggaggccatcagcaaggccgaggcctacggcgacagcctggacaagcagaacgaggccagctacctgagagaccacaaggaggagctgaccgaggagctggccaccaccatcctgcagaagatcatcagaaagcagaagagcaagagcgagcagcaggtggaggaggagcccggctggccccacccccagagctgcagcaccaaggtggccgacgagggcaccagcgccagccccggcggctacagagcccccgccgccctgtggagaagccagagcgccttcagcatcaccggcgaggaggccctgaagaccccccccgtggaggcccccagcagacagcccagagaccagggccagcaccccagagccgagagcgccctgcccagctggaagagcgtggacagactggacgagaccaacctggcccccgtgctgcagagccccgacggcaactgggtggccctgaaggacggcgcccccccccccaccagactgctggccaagcccaagagcggcaccttccaggccctggaggtggccagcagcgtggccagcgcctacgacgagatgggcagcgacagcgaggaggacttcgactggagcgaggccctgagcaagctgtgccccagaagcagagccctgcccagaaacccccagccccagcccacccaggcccagagcagcgaccagggccccatcgccgccagccccagcagcgccctgagccccaaccccgaggccatgtgcagcgacagcgagaccagcagcgccggcagcagcagagaggtgggccaccaggccagactgagctggctgcagagaaaggcccccagaaaccccgccgccgagaagatgagactgcacggcgagctggacgtgaacttcaacccccagctggccagcagagagaccagcgacagcagcgagcccgaggaggccccccacaccaccgacagaagagccagaagatggagaagagccagactgggcagcgaggagcccagcaaggagcccagcagccccagcgcccagctgagagacctggacacccaccaggtgagcgacgacctgagcgagaccgacatcagcaacgaggccagagacccccagaccctgaccgacaccaccgaggagaagagaagaaacagactgtacgagctggccatgaagatgagcgagaaggagaccagcagcggcgaggaccaggagagcgagcccaagaccgagagcgagaaccagaaggagagcctgagcagcgaggacaacagccagagcgtgcaggaggagctgaagaagaagttcagcgccgtgagcctgtgcaacatcagcaccgaggtgctgaaggtgatcaacgccaccgaggagctgatcgccggcagcaccggcccctgggagagcccccaggtgccccccgacagacagaagggcatgttccccagaggcaccgaccaggtgagactggacgagcagctgaccagcctggaggagaacgtgtacctggccgccggcaccgtgtacggcctggagacccagctgaccgagctggaggacgccgccagatgcatccacagcggcaccgacgagacccacctggccgacctggaggaccaggtggccaccgccgccgcccaggtgcaccacgccgagctgcagatcagcgacatcgagagcagaatcagcgccctgaccatcgccggcctgaacatcgccccctgcgtgagattcaccagaagaagagaccagaagcagagaacccaggtgcagaccatcgacaccagcagacagcagagaagaaagctgcccgccccccccgtgaaggccgagaagatcgagaccagcagcgtgaccaccatcaagaccttcaaccacaacttcatcctgcagggcagcagcaccaacagaaccaaggagagaaagggcaccaccaaggacctgatggagcccgccctggagagcgccgtgatgtactag

SEQ ID NO: 90066 - DNA, 2580 bp, synthetic construct; identical to SEQ ID NO: 90064
  misc_feature 1..2580: note = Description of Artificial Sequence: Synthetic coding sequence
  source 1..2580: mol_type = other DNA

SEQ ID NO: 90067 - DNA, 2019 bp, synthetic construct
  misc_feature 1..2019: note = Description of Artificial Sequence: Synthetic coding sequence
  source 1..2019: mol_type = other DNA
atggacaccctggccgtggccctgagagtggccgaggaggccatcgaggaggccatcagcaaggccgaggcctacggcgacagcctggacaagcagaacgaggccagctacctgagagaccacaaggaggagctgaccgaggagctggccaccaccatcctgcagaagatcatcagaaagcagaagagcaagagcgagcagcaggtggaggaggagcccggctggccccacccccagagctgcagcaccaaggtggccgacgagggcaccagcgccagccccggcggctacagagcccccgccgccctgtggagaagccagagcgccttcagcatcaccggcgaggaggccctgaagaccccccccgtggaggcccccagcagacagcccagagaccagggccagcaccccagagccgagagcgccctgcccagctggaagagcgtggacagactggacgagaccaacctggcccccgtgctgcagagccccgacggcaactgggtggccctgaaggacggcgcccccccccccaccagactgctggccaagcccaagagcggcaccttccaggccctggaggtggccagcagcgtggccagcgcctacgacgagatgggcagcgacagcgaggaggacttcgactggagcgaggccctgagcaagctgtgccccagaagcagagccctgcccagaaacccccagccccagcccacccaggcccagagcagcgaccagggccccatcgccgccagccccagcagcgccctgagccccaaccccgaggccatgtgcagcgacagcgagaccagcagcgccggcagcagcagagaggtgggccaccaggccagactgagctggctgcagagaaaggcccccagaaaccccgccgccgagaagatgagactgcacggcgagctggacgtgaacttcaacccccagctggccagcagagagaccagcgacagcagcgagcccgaggaggccccccacaccaccgacagaagagccagaagatggagaagagccagactgggcagcgaggagcccagcaaggagcccagcagccccagcgcccagctgagagacctggacacccaccaggtgagcgacgacctgagcgagaccgacatcagcaacgaggccagagacccccagaccctgaccgacaccaccgaggagaagagaagaaacagactgtacgagctggccatgaagatgagcgagaaggagaccagcagcggcgaggaccaggagagcgagcccaagaccgagagcgagaaccagaaggagagcctgagcagcgaggacaacagccagagcgtgcaggaggagctgaagaagaagttcagcgccgtgagcctgtgcaacatcagcaccgaggtgctgaaggtgatcaacgccaccgaggagctgatcgccggcagcaccggcccctgggagagcccccaggtgccccccgacagacagaagggcatgttccccagaggcaccgaccaggtgagactggacgagcagctgaccagcctggaggagaacgtgtacctggccgccggcaccgtgtacggcctggagacccagctgaccgagctggaggacgccgccagatgcatccacagcggcaccgacgagacccacctggccgacctggaggaccaggtggccaccgccgccgcccaggtgcaccacgccgagctgcagatcagcgacatcgagagcagaatcagcgccctgaccatcgccggcctgaacatcgccccctgcgtgagattcaccagaagaagagaccagaagcagagaacccaggtgcagaccatcgacaccagcagacagcagagaagaaagctgcccgccccccccgtgaaggccgagaagatcgagaccagcagcgtgaccaccatcaagaccttcaaccacaacttcatcctgcagggcagcagcaccaacagaaccaaggagagaaagggcaccaccaaggacctgatggagcccgccctggagagcgccgtgatgtactag

SEQ ID NO: 90068 - DNA, 2886 bp, synthetic construct
  misc_feature 1..2886: note = Description of Artificial Sequence: Synthetic coding sequence
  source 1..2886: mol_type = other DNA
atgaagtacctgctgaacttcatcggccagggccccgccacctacggccccttctgcgccgagagactgagaagaacctacgccaacggcgtgagagccgagccccccacctggctggagctgcaggccgtgaagagcaagaagcacatccccatccaggtgatcctggccaccggcgagagcctgaccgtgcccgtggacagcgccagcaccagcagagagatgtgcatgcacatcgcccacaagcagggcctgagcgaccacctgggcttcagcctgcaggtggccgtgtacgacaagttctggagcctgggcagcggcagagaccacatgatggacgccatcgccagatgcgagcagatggcccaggagagaggcgagagccagagacagagcccctggagaatctacttcagaaaggagttcttcaccccctggcacgacagcagagaggaccccgtgagcaccgagctgatctacagacaggtgctgagaggcgtgtggagcggcgagtacagcttcgagaaggaggaggagctggtggagctgctggccagacactgctacgtgcagctgggcgccagcgccgagagcaaggccgtgcaggagctgctgcccagctgcatcccccacaagctgtacagaaccaagccccccgacagatgggccagcctggtgaccgccgcctgcgccaaggccccctacacccagaagcaggtgacccccctggccgtgagagagcaggtggtggacgccgccagactgcagtggcccctgctgttcagcagactgttcgaggtgatcaccctgagcgccttcaccctgcccagcctgctggccagacccccccccgcccaggacgccggccccgccggcgaggacgccgccggcaccctgttccccagaggccacggcagcggccaccagcaggtgagagccctgagagaggacctgttcctgcacaccgagccccacccccccgcccccggcagaaccgcccacgaggtgctgcactggggcatcaccagatgcaccggcagcttcagcctgaagcccagaagcaccagaaagggccagggcagcgtgcagcccctggccggcacctacctggagggcagcttcctgtgccacggcagagagctggtggcctggagagtgcaggtggtgtgggagggcgacaagggccagtgcctggccggcgccgacccccacagccacggcagcccctggatcagcctgaccggcaacttcagcatgcccttcggcaagagcacccagcagagcggcacctgcatcagcggcctgtgccaggtgtacagcggccaccacagccccctggccaccagccccagaagcaccgacagcatcacccacagcgccgacgagagaatgagcaagctgaagcacgccgaggtgagatggctgagagtgagcacctggcagagcagacagctgatcagcgccctgaccttcgccgtgagcctgagatgccactgcacccccgccaccagcctgagcgcccacagccagccccacacctgggccgcccccctgagcgccagcgagagacccaccgtggtgagcggcctggtgctggccctggccgagcagctgtgcgtgctgatcagatggagaggcctgctggtgaccctgagcttcatcagcagagaggcccagggcggccagagactgctgctgagcaccatgcacgaggagtacgagttcgtgagccccagcagcgtggccatcgccgagctggtggccctgttcctggagggcctgaaggagagaagcatcttcgccatggccctgcaggacagaaaggccaccgacgacaccaccctgctggccttcaagaagggcgacctgctggtgctgaccaagaagcagggcctgctggccagcgagaactggaccctgggccagaacgacagaaccggcaagaccggcctggtgcccatggcctgcctgtacaccatccccaccgtgaccaagcccagcgcccagctgctgagcctgctggccatgagccccgagaagagaaagctggccgcccaggagggccagttcaccgagcccagacccgaggagccccccaaggagaagctgcacaccctggaggagttcagctacgagttcttcagagcccccgagaaggacatggtgagcatggccgtgctgcccctggccagagccagaggccacctgtgggcctacagctgcgagcccctgagacagcccctgctgaagagagtgcacgccaacgtggacctgtgggacatcgcctgccagatcttcgccacccccatcctgagatacatgggcgactaccccagcagacaggcctggcccaccctggagctgaccgaccagatcttcaccctggccctgcagcaccccgccctgcaggacgaggtgtactgccagatcctgaagcagctgacccacaacagcaacagacacagcgaggagagaggctggcagctgctgtggctgtgcaccggcctgttcccccccagcaagggcctgctgccccacgcccagaagttcatcgacaccagaagaggcaagctgctggcccccgactgcagcagaagaatccagaaggtgctgagaaccggccccagaaagcagcccccccaccaggtggaggtggaggccgccgagcagaacgtgagcagaatctgccacaagatctacttccccaacgacaccagcgagatgctggaggtggtggccaacaccagagtgagagacgtgtgcgacagcatcgccaccagactgcagctggccagctgggagggctgcagcctgttcatcaagatcagcgacaaggtgatcagccagaaggagggcgacttcttcttcgacagcctgagagagtag

SEQ ID NO: 90069 - DNA, 6354 bp, synthetic construct
  misc_feature 1..6354: note = Description of Artificial Sequence: Synthetic coding sequence
  source 1..6354: mol_type = other DNA
atgagcggcttcagactgggcgaccacgtgtggctggagccccccagcacccacaagaccggcgtggccatcggcggcatcatcaaggaggccaagcccggcaaggtgctggtggaggacgacgagggcaaggagcactggatcagagccgaggacttcggcgtgctgagccccatgcaccccaacagcgtgcagggcgtggacgacatgatcagactgggcgacctgaacgaggccggcatggtgcacaacctgctgatcagataccagcagcacaagatctacacctacaccggcagcatcctggtggccgtgaaccccttccaggtgctgcccctgtacaccctggagcaggtgcagctgtactacagcagacacatgggcgagctgcccccccacgtgttcgccatcgccaacaactgctacttcagcatgaagagaaacaagagagaccagtgctgcatcatcagcggcgagagcggcgccggcaagaccgagaccaccaagctgatcctgcagttcctggccaccatcagcggccagcacagctggatcgagcagcaggtgctggaggccaaccccatcctggaggccttcggcaacgccaagaccatcagaaacgacaacagcagcagattcggcaagtacatcgacatctacttcaaccccagcggcgtgatcgagggcgccagaatcgagcagttcctgctggagaagagcagagtgtgcagacaggcccccgaggagagaaactaccacatcttctactgcatgctgatgggcgtgagcgccgaggacaagcagctgctgagcctgggcacccccagcgagtaccactacctgaccatgggcaactgcaccagctgcgagggcctgaacgacgccaaggactacgcccacatcagaagcgccatgaagatcctgcagttcagcgacagcgagagctgggacgtgatcaagctgctggccgccatcctgcacctgggcaacgtgggcttcatggccagcgtgttcgagaacctggacgccagcgacgtgatggagacccccgccttccccaccgtgatgaagctgctggaggtgcagcaccaggagctgagagactgcctgatcaagcacaccatcctgatcagaggcgagttcgtgaccagaagcctgaacatcgcccaggccgccgacagaagagacgccttcgtgaagggcatctacggccacctgttcctgtggatcgtgaagaagatcaacgccgccatcttcaccccccccgcccaggaccccaagaacgtgagaagagccatcggcctgctggacatcttcggcttcgagaacttcgagaacaacagcttcgagcagctgtgcatcaacttcgccaacgagcacctgcagcagttcttcgtgcagcacgtgttcaccatggagcaggaggagtacagaagcgagaacatcagctgggactacatccactacaccgacaacagacccaccctggacctgctggccctgaagcccatgagcatcatcagcctgctggacgaggagagcagattcccccagggcaccgacctgaccatgctgcagaagctgaacagcgtgcacgccaacaacaaggccttcctgcagcccaagaacatccacgacgccagattcggcatcgcccacttcgccggcgaggtgtactaccaggccgagggcttcctggagaagaacagagacgtgctgagcaccgacatcctgaccctggtgtacagcagcaagaacaagttcctgagagagatcttcaacctggagctggccgagaccaagctgggccacggcaccatcagacaggccaaggccggcaaccacctgttcaagagcgccgacagcaacaagagacccagcaccctgggcagccagttcaagcagagcctggaccagctgatgaagatcctgaccaactgccagccctacttcatcagatgcatcaagcccaacgagtacaagaagcccctgctgttcgacagagagctgtgcctgagacagctgagatacagcggcatgatggagaccgtgcacatcagaaagagcggcttccccatcagatacaccttcgaggagttcagccagagattcggcgtgctgctgcccaacgccatgagaatgcagctgcagggcaagctgagacagatgaccctgggcatcaccgacgtgtggctgagaaccgacaaggactggaaggccggcaagaccaagatcttcctgagagaccaccaggacaccctgctggaggtgcagagaagccaggtgctggacagagccgccctgagcatccagaaggtgctgagaggctacagatacagaaaggagttcctgagacagagaagagccgccgtgaccctgcaggcctggtggagaggctactgcaacagaagaaacttcaagctgatcctggtgggcttcgagagactgcaggccatcgccagaagccagcccctggccagacagtaccaggccatgagacagagaaccgtgcagctgcaggccctgtgcagaggctacctggtgagacagcaggtgcaggccaagagaagagccgtggtggtgatccaggcccacgccagaggcatggccgccagaagaaacttccagcagagaaaggccaacgcccccctggtgatccccgccgagggccagaagagccagggcgccctgcccgccaagaagagaagaagcatctacgacaccgtgaccgacaccgagatggtggagaaggtgttcggcttcctgcccgccatgatcggcggccaggagggccaggccagcccccacttcgaggacctggagagcaagacccagaagctgctggaggtggacctggacaccgtgcccatggccgaggagcccgaggaggacgtggacggcctggccgagtacaccttccccaagttcgccgtgacctacttccagaagagcgccagccacacccacatcagaagacccctgagataccccctgctgtaccacgaggacgacaccgactgcctggccgccctggtgatctggaacgtgatcctgagattcatgggcgacctgcccgagcccgtgctgtacgccagaagcagccagcagggcagcagcgtgatgagacagatccacgacaccctgggcagagagcacggcgcccaggtgccccagcacagcagaagcgcccaggtggccagccagctgaacatcggcgaggaggccctggagcccgacggcctgggcgccgacagacccatgagcaacctggagaaggtgcacttcatcgtgggctacgccatcctgagacccagcctgagagacgagatctactgccagatctgcaagcagctgagcgagaacttcaagaccagcagcctggccagaggctggatcctgctgagcctgtgcctgggctgcttcccccccagcgagagattcatgaagtacctgctgaacttcatcggccagggccccgccacctacggccccttctgcgccgagagactgagaagaacctacgccaacggcgtgagagccgagccccccacctggctggagctgcaggccgtgaagagcaagaagcacatccccatccaggtgatcctggccaccggcgagagcctgaccgtgcccgtggacagcgccagcaccagcagagagatgtgcatgcacatcgcccacaagcagggcctgagcgaccacctgggcttcagcctgcaggtggccgtgtacgacaagttctggagcctgggcagcggcagagaccacatgatggacgccatcgccagatgcgagcagatggcccaggagagaggcgagagccagagacagagcccctggagaatctacttcagaaaggagttcttcaccccctggcacgacagcagagaggaccccgtgagcaccgagctgatctacagacaggtgctgagaggcgtgtggagcggcgagtacagcttcgagaaggaggaggagctggtggagctgctggccagacactgctacgtgcagctgggcgccagcgccgagagcaaggccgtgcaggagctgctgcccagctgcatcccccacaagctgtacagaaccaagccccccgacagatgggccagcctggtgaccgccgcctgcgccaaggccccctacacccagaagcaggtgacccccctggccgtgagagagcaggtggtggacgccgccagactgcagtggcccctgctgttcagcagactgttcgaggtgatcaccctgagcggccccagactgcccaagacccagctgatcctggccgtgaactggaagggcctgtgcttcctggaccagcaggagaagatgctgctggagctgagcttccccgaggtgatgggcctggccaccaacagagaggcccagggcggccagagactgctgctgagcaccatgcacgaggagtacgagttcgtgagccccagcagcgtggccatcgccgagctggtggccctgttcctggagggcctgaaggagagaagcatcttcgccatggccctgcaggacagaaaggccaccgacgacaccaccctgctggccttcaagaagggcgacctgctggtgctgaccaagaagcagggcctgctggccagcgagaactggaccctgggccagaacgacagaaccggcaagaccggcctggtgcccatggcctgcctgtacaccatccccaccgtgaccaagcccagcgcccagctgctgagcctgctggccatgagccccgagaagagaaagctggccgcccaggagggccagttcaccgagcccagacccgaggagccccccaaggagaagctgcacaccctggaggagttcagctacgagttcttcagagcccccgagaaggacatggtgagcatggccgtgctgcccctggccagagccagaggccacctgtgggcctacagctgcgagcccctgagacagcccctgctgaagagagtgcacgccaacgtggacctgtgggacatcgcctgccagatcttcgccacccccatcctgagatacatgggcgactaccccagcagacaggcctggcccaccctggagctgaccgaccagatcttcaccctggccctgcagcaccccgccctgcaggacgaggtgtactgccagatcctgaagcagctgacccacaacagcaacagacacagcgaggagagaggctggcagctgctgtggctgtgcaccggcctgttcccccccagcaagggcctgctgccccacgcccagaagttcatcgacaccagaagaggcaagctgctggcccccgactgcagcagaagaatccagaaggtgctgagaaccggccccagaaagcagcccccccaccaggtggaggtggaggccgccgagcagaacgtgagcagaatctgccacaagatctacttccccaacgacaccagcgagatgctggaggtggtggccaacaccagagtgagagacgtgtgcgacagcatcgccaccagactgcagctggccagctgggagggctgcagcctgttcatcaagatcagcgacaaggtgatcagccagaaggagggcgacttcttcttcgacagcctgagagaggtgagcgactgggtgaagaagaacaagccccagaaggagggcgcccccgtgaccctgccctaccaggtgtacttcatgagaaagctgtggctgaacatcagccccggcaaggacgtgaacgccgacaccatcctgcactaccaccaggagctgcccaagtacctgagaggcttccacaagtgcagcagagaggacgccatccacctggccggcctgatctacaaggcccagttcaacaacgacagaagccagctggccagcgtgcccaagatcctgagagagctggtgcccgagaacctgaccagactgatgagcagcgaggagtggaagaagagcatcctgctggcctacgacaagcacaaggacaagaccgtggaggaggccaaggtggccttcctgaagtggatctgcagatggcccaccttcggcagcgccttcttcgaggtgaagcagaccagcgagcccagctaccccgacgtgatcctgatcgccatcaacagacacggcgtgctgctgatccaccccaagaccaaggacctgctgaccacctaccccttcaccaagatcagcagctggagcagcggcagcacctacttccacatggccctgggcagcctgggcagaggcagcagactgctgtgcgagaccagcctgggctacaagatggacgacctgctgaccagctacgtgcagcagctgctgagcgccatgaacaagcagagaggcagcaaggcccccgccctggccagcacctag

SEQ ID NO: 90070 - DNA, 6351 bp, synthetic construct
  misc_feature 1..6351: note = Description of Artificial Sequence: Synthetic coding sequence
  source 1..6351: mol_type = other DNA
atgagcggcttcagactgggcgaccacgtgtggctggagccccccagcacccacaagaccggcgtggccatcggcggcatcatcaaggaggccaagcccggcaaggtgctggtggaggacgacgagggcaaggagcactggatcagagccgaggacttcggcgtgctgagccccatgcaccccaacagcgtgcagggcgtggacgacatgatcagactgggcgacctgaacgaggccggcatggtgcacaacctgctgatcagataccagcagcacaagatctacacctacaccggcagcatcctggtggccgtgaaccccttccaggtgctgcccctgtacaccctggagcaggtgcagctgtactacagcagacacatgggcgagctgcccccccacgtgttcgccatcgccaacaactgctacttcagcatgaagagaaacaagagagaccagtgctgcatcatcagcggcgagagcggcgccggcaagaccgagaccaccaagctgatcctgcagttcctggccaccatcagcggccagcacagctggatcgagcagcaggtgctggaggccaaccccatcctggaggccttcggcaacgccaagaccatcagaaacgacaacagcagcagattcggcaagtacatcgacatctacttcaaccccagcggcgtgatcgagggcgccagaatcgagcagttcctgctggagaagagcagagtgtgcagacaggcccccgaggagagaaactaccacatcttctactgcatgctgatgggcgtgagcgccgaggacaagcagctgctgagcctgggcacccccagcgagtaccactacctgaccatgggcaactgcaccagctgcgagggcctgaacgacgccaaggactacgcccacatcagaagcgccatgaagatcctgcagttcagcgacagcgagagctgggacgtgatcaagctgctggccgccatcctgcacctgggcaacgtgggcttcatggccagcgtgttcgagaacctggacgccagcgacgtgatggagacccccgccttccccaccgtgatgaagctgctggaggtgcagcaccaggagctgagagactgcctgatcaagcacaccatcctgatcagaggcgagttcgtgaccagaagcctgaacatcgcccaggccgccgacagaagagacgccttcgtgaagggcatctacggccacctgttcctgtggatcgtgaagaagatcaacgccgccatcttcaccccccccgcccaggaccccaagaacgtgagaagagccatcggcctgctggacatcttcggcttcgagaacttcgagaacaacagcttcgagcagctgtgcatcaacttcgccaacgagcacctgcagcagttcttcgtgcagcacgtgttcaccatggagcaggaggagtacagaagcgagaacatcagctgggactacatccactacaccgacaacagacccaccctggacctgctggccctgaagcccatgagcatcatcagcctgctggacgaggagagcagattcccccagggcaccgacctgaccatgctgcagaagctgaacagcgtgcacgccaacaacaaggccttcctgcagcccaagaacatccacgacgccagattcggcatcgcccacttcgccggcgaggtgtactaccaggccgagggcttcctggagaagaacagagacgtgctgagcaccgacatcctgaccctggtgtacagcagcaagaacaagttcctgagagagatcttcaacctggagctggccgagaccaagctgggccacggcaccatcagacaggccaaggccggcaaccacctgttcaagagcgccgacagcaacaagagacccagcaccctgggcagccagttcaagcagagcctggaccagctgatgaagatcctgaccaactgccagccctacttcatcagatgcatcaagcccaacgagtacaagaagcccctgctgttcgacagagagctgtgcctgagacagctgagatacagcggcatgatggagaccgtgcacatcagaaagagcggcttccccatcagatacaccttcgaggagttcagccagagattcggcgtgctgctgcccaacgccatgagaatgcagctgcagggcaagctgagacagatgaccctgggcatcaccgacgtgtggctgagaaccgacaaggactggaaggccggcaagaccaagatcttcctgagagaccaccaggacaccctgctggaggtgcagagaagccaggtgctggacagagccgccctgagcatccagaaggtgctgagaggctacagatacagaaaggagttcctgagacagagaagagccgccgtgaccctgcaggcctggtggagaggctactgcaacagaagaaacttcaagctgatcctggtgggcttcgagagactgcaggccatcgccagaagccagcccctggccagacagtaccaggccatgagacagagaaccgtgcagctgcaggccctgtgcagaggctacctggtgagacagcaggtgcaggccaagagaagagccgtggtggtgatccaggcccacgccagaggcatggccgccagaagaaacttccagcagagaaaggccaacgcccccctggtgatccccgccgagggccagaagagccagggcgccctgcccgccaagaagagaagaagcatctacgacaccgtgaccgacaccgagatggtggagaaggtgttcggcttcctgcccgccatgatcggcggccaggagggccaggccagcccccacttcgaggacctggagagcaagacccagaagctgctggaggtggacctggacaccgtgcccatggccgaggagcccgaggaggacgtggacggcctggccgagtacaccttccccaagttcgccgtgacctacttccagaagagcgccagccacacccacatcagaagacccctgagataccccctgctgtaccacgaggacgacaccgactgcctggccgccctggtgatctggaacgtgatcctgagattcatgggcgacctgcccgagcccgtgctgtacgccagaagcagccagcagggcagcagcgtgatgagacagatccacgacaccctgggcagagagcacggcgcccaggtgccccagcacagcagaagcgcccaggtggccagccagctgaacatcggcgaggaggccctggagcccgacggcctgggcgccgacagacccatgagcaacctggagaaggtgcacttcatcgtgggctacgccatcctgagacccagcctgagagacgagatctactgccagatctgcaagcagctgagcgagaacttcaagaccagcagcctggccagaggctggatcctgctgagcctgtgcctgggctgcttcccccccagcgagagattcatgaagtacctgctgaacttcatcggccagggccccgccacctacggccccttctgcgccgagagactgagaagaacctacgccaacggcgtgagagccgagccccccacctggctggagctgcaggccgtgaagagcaagaagcacatccccatccaggtgatcctggccaccggcgagagcctgaccgtgcccgtggacagcgccagcaccagcagagagatgtgcatgcacatcgcccacaagcagggcctgagcgaccacctgggcttcagcctgcaggtggccgtgtacgacaagttctggagcctgggcagcggcagagaccacatgatggacgccatcgccagatgcgagcagatggcccaggagagaggcgagagccagagacagagcccctggagaatctacttcagaaaggagttcttcaccccctggcacgacagcagagaggaccccgtgagcaccgagctgatctacagacaggtgctgagaggcgtgtggagcggcgagtacagcttcgagaaggaggaggagctggtggagctgctggccagacactgctacgtgcagctgggcgccagcgccgagagcaaggccgtgcaggagctgctgcccagctgcatcccccacaagctgtacagaaccaagccccccgacagatgggccagcctggtgaccgccgcctgcgccaaggccccctacacccagaagcaggtgacccccctggccgtgagagagcaggtggtggacgccgccagactgcagtggcccctgctgttcagcagactgttcgaggtgatcaccctgagcggccccagactgcccaagacccagctgatcctggccgtgaactggaagggcctgtgcttcctggaccagcaggagaagatgctgctggagctgagcttccccgaggtgatgggcctggccaccaacagagaggcccagggcggccagagactgctgctgagcaccatgcacgaggagtacgagttcgtgagccccagcagcgtggccatcgccgagctggtggccctgttcctggagggcctgaaggagagaagcatcttcgccatggccctgcaggacagaaaggccaccgacgacaccaccctgctggccttcaagaagggcgacctgctggtgctgaccaagaagcagggcctgctggccagcgagaactggaccctgggccagaacgacagaaccggcaagaccggcctggtgcccatggcctgcctgtacaccatccccaccgtgaccaagcccagcgcccagctgctgagcctgctggccatgagccccgagaagagaaagctggccgcccaggagggccagttcaccgagcccagacccgaggagccccccaaggagaagctgcacaccctggaggagttcagctacgagttcttcagagcccccgagaaggacatggtgagcatggccgtgctgcccctggccagagccagaggccacctgtgggcctacagctgcgagcccctgagacagcccctgctgaagagagtgcacgccaacgtggacctgtgggacatcgcctgccagatcttcgtggccatcctgagatacatgggcgactaccccagcagacaggcctggcccaccctggagctgaccgaccagatcttcaccctggccctgcagcaccccgccctgcaggacgaggtgtactgccagatcctgaagcagctgacccacaacagcaacagacacagcgaggagagaggctggcagctgctgtggctgtgcaccggcctgttcccccccagcaagggcctgctgccccacgcccagaagttcatcgacaccagaagaggcaagctgctggcccccgactgcagcagaagaatccagaaggtgctgagaaccggccccagaaagcagcccccccaccaggtggaggtggaggccgccgagcagaacgtgagcagaatctgccacaagatctacttccccaacgacaccagcgagatgctggaggtggtggccaacaccagagtgagagacgtgtgcgacagcatcgccaccagactgcagctggccagctgggagggctgcagcctgttcatcaagatcagcgacaaggtgatcagccagaaggagggcgacttcttcttcgacagcctgagagaggtgagcgactgggtgaagaagaacaagccccagaaggagggcgcccccgtgaccctgccctaccaggtgtacttcatgagaaagctgtggctgaacatcagccccggcaaggacgtgaacgccgacaccatcctgcactaccaccaggagctgcccaagtacctgagaggcttccacaagtgcagcagagaggacgccatccacctggccggcctgatctacaaggcccagttcaacaacgacagaagccagctggccagcgtgcccaagatcctgagagagctggtgcccgagaacctgaccagactgatgagcagcgaggagtggaagaagagcatcctgctggcctacgacaagcacaaggacaagaccgtggaggaggccaaggtggccttcctgaagtggatctgcagatggcccaccttcggcagcgccttcttcgaggtgaagcagaccagcgagcccagctaccccgacgtgatcctgatcgccatcaacagacacggcgtgctgctgatccaccccaagaccaaggacctgctgaccacctaccccttcaccaagatcagcagctggagcagcggcagcacctacttccacatggccctgggcagcctgggcagaggcagcagactgctgtgcgagaccagcctgggctacaagatggacgacctgctgaccagctacgtgcagcagctgctgagcgccatgaacaagcagagaggcagcaaggcccccgccctggccagcacctag

SEQ ID NO: 90071 - DNA, 6351 bp, synthetic construct; identical to SEQ ID NO: 90070
  misc_feature 1..6351: note = Description of Artificial Sequence: Synthetic coding sequence
  source 1..6351: mol_type = other DNA

SEQ ID NO: 90072 - DNA, 4248 bp, synthetic construct
  misc_feature 1..4248: note = Description of Artificial Sequence: Synthetic coding sequence
  source 1..4248: mol_type = other DNA
atgcccgaccagttcgaccaggccgtggtgctgaaccagctgagatacagcggcatgctggagaccgtgagaatcagaaaggccggctacgccgtgagaagacccttccaggacttctacaagagatacaaggtgctgatgagaaacctggccctgcccgaggacgtgagaggcaagtgcaccagcctgctgcagctgtacgacgccagcaacagcgagtggcagctgggcaagaccaaggtgttcctgagagagagcctggagcagaagctggagaagagaagagaggaggaggtgagccacgccgccatggtgatcagagcccacgtgctgggcttcctggccagaaagcagtacagaaaggtgctgtactgcgtggtgatcatccagaagaactacagagccttcctgctgagaagaagattcctgcacctgaagaaggccgccatcgtgttccagaagcagctgagaggccagatcgccagaagagtgtacagacagctgctggccgagaagagagagcaggaggagaagaagaagcaggaggaggaggagaagaagaagagagaggaggaggagagagagagagagagagagagaagagaggccgagctgagagcccagcaggaggaggagaccagaaagcagcaggagctggaggccctgcagaagagccagaaggaggccgagctgaccagagagctggagaagcagaaggagaacaagcaggtggaggagatcctgagactggagaaggagatcgaggacctgcagagaatgaaggagcagcaggagctgagcctgaccgaggccagcctgcagaagctgcaggagagaagagaccaggagctgagaagactggaggaggaggcctgcagagccgcccaggagttcctggagagcctgaacttcgacgagatcgacgagtgcgtgagaaacatcgagagaagcctgagcgtgggcagcgagttcagcagcgagctggccgagagcgcctgcgaggagaagcccaacttcaacttcagccagccctaccccgaggaggaggtggacgagggcttcgaggccgacgacgacgccttcaaggacagccccaaccccagcgagcacggccacagcgaccagagaaccagcggcatcagaaccagcgacgacagcagcgaggaggacccctacatgaacgacaccgtggtgcccaccagccccagcgccgacagcaccgtgctgctggcccccagcgtgcaggacagcggcagcctgcacaacagcagcagcggcgagagcacctactgcatgccccagaacgccggcgacctgcccagccccgacggcgactacgactacgaccaggacgactacgaggacggcgccatcaccagcggcagcagcgtgaccttcagcaacagctacggcagccagtggagccccgactacagatgcagcgtgggcacctacaacagcagcggcgcctacagattcagcagcgagggcgcccagagcagcttcgaggacagcgaggaggacttcgacagcagattcgacaccgacgacgagctgagctacagaagagacagcgtgtacagctgcgtgaccctgccctacttccacagcttcctgtacatgaagggcggcctgatgaacagctggaagagaagatggtgcgtgctgaaggacgagaccttcctgtggttcagaagcaagcaggaggccctgaagcagggctggctgcacaagaagggcggcggcagcagcaccctgagcagaagaaactggaagaagagatggttcgtgctgagacagagcaagctgatgtacttcgagaacgacagcgaggagaagctgaagggcaccgtggaggtgagaaccgccaaggagatcatcgacaacaccaccaaggagaacggcatcgacatcatcatggccgacagaaccttccacctgatcgccgagagccccgaggacgccagccagtggttcagcgtgctgagccaggtgcacgccagcaccgaccaggagatccaggagatgcacgacgagcaggccaacccccagaacgccgtgggcaccctggacgtgggcctgatcgacagcgtgtgcgccagcgacagccccgacagacccaacagcttcgtgatcatcaccgccaacagagtgctgcactgcaacgccgacacccccgaggagatgcaccactggatcaccctgctgcagagaagcaagggcgacaccagagtggagggccaggagttcatcgtgagaggctggctgcacaaggaggtgaagaacagccccaagatgagcagcctgaagctgaagaagagatggttcgtgctgacccacaacagcctggactactacaagagcagcgagaagaacgccctgaagctgggcaccctggtgctgaacagcctgtgcagcgtggtgccccccgacgagaagatcttcaaggagaccggctactggaacgtgaccgtgtacggcagaaagcactgctacagactgtacaccaagctgctgaacgaggccaccagatggagcagcgccatccagaacgtgaccgacaccaaggcccccatcgacacccccacccagcagctgatccaggacatcaaggagaactgcctgaacagcgacgtggtggagcagatctacaagagaaaccccatcctgagatacacccaccaccccctgcacagccccctgctgcccctgccctacggcgacatcaacctgaacctgctgaaggacaagggctacaccaccctgcaggacgaggccatcaagatcttcaacagcctgcagcagctggagagcatgagcgaccccatccccatcatccagggcatcctgcagaccggccacgacctgagacccctgagagacgagctgtactgccagctgatcaagcagaccaacaaggtgccccaccccggcagcgtgggcaacctgtacagctggcagatcctgacctgcctgagctgcaccttcctgcccagcagaggcatcctgaagtacctgaagttccacctgaagagaatcagagagcagttccccggcagcgagatggagaagtacgccctgttcacctacgagagcctgaagaagaccaagtgcagagagttcgtgcccagcagagacgagatcgaggccctgatccacagacaggagatgaccagcaccgtgtactgccacggcggcggcagctgcaagatcaccatcaacagccacaccaccgccggcgaggtggtggagaagctgatcagaggcctggccatggaggacagcagaaacatgttcgccctgttcgagtacaacggccacgtggacaaggccatcgagagcagaaccgtggtggccgacgtgctggccaagttcgagaagctggccgccaccagcgaggtgggcgacctgccctggaagttctacttcaagctgtactgcttcctggacaccgacaacgtgcccaaggacagcgtggagttcgccttcatgttcgagcaggcccacgaggccgtgatccacggccaccaccccgcccccgaggagaacctgcaggtgctggccgccctgagactgcagtacctgcagggcgactacaccctgcacgccgccatcccccccctggaggaggtgtacagcctgcagagactgaaggccagaatcagccagagcaccaagaccttcaccccctgcgagagactggagaagagaagaaccagcttcctggagggcaccctgagaagaagcttcagaaccggcagcgtggtgagacagaaggtggaggaggagcagatgctggacatgtggatcaaggaggaggtgagcagcgccagagccagcatcatcgacaagtggagaaagttccagggcatgaaccaggagcaggccatggccaagtacatggccctgatcaaggagtggcccggctacggcagcaccctgttcgacgtggagtgcaaggagggcggcttcccccaggagctgtggctgggcgtgagcgccgacgccgtgagcgtgtacaagagaggcgagggcagacccctggaggtgttccagtacgagcacatcctgagcttcggcgcccccctggccaacacctacaagatcgtggtggacgagagagagctgctgttcgagaccagcgaggtggtggacgtggccaagctgatgaaggcctacatcagcatgatcgtgaagaagagatacagcaccaccagaagcgccagcagccagggcagcagcagatag

SEQ ID NO: 90073 - DNA, 4248 bp, synthetic construct; identical to SEQ ID NO: 90072
  misc_feature 1..4248: note = Description of Artificial Sequence: Synthetic coding sequence
  source 1..4248: mol_type = other DNA

SEQ ID NO: 90074 - DNA, 4194 bp, synthetic construct
  misc_feature 1..4194: note = Description of Artificial Sequence: Synthetic coding sequence
  source 1..4194: mol_type = other DNA
atgctggagaccgtgagaatcagaaaggccggctacgccgtgagaagacccttccaggacttctacaagagatacaaggtgctgatgagaaacctggccctgcccgaggacgtgagaggcaagtgcaccagcctgctgcagctgtacgacgccagcaacagcgagtggcagctgggcaagaccaaggtgttcctgagagagagcctggagcagaagctggagaagagaagagaggaggaggtgagccacgccgccatggtgatcagagcccacgtgctgggcttcctggccagaaagcagtacagaaaggtgctgtactgcgtggtgatcatccagaagaactacagagccttcctgctgagaagaagattcctgcacctgaagaaggccgccatcgtgttccagaagcagctgagaggccagatcgccagaagagtgtacagacagctgctggccgagaagagagagcaggaggagaagaagaagcaggaggaggaggagaagaagaagagagaggaggaggagagagagagagagagagagagaagagaggccgagctgagagcccagcaggaggaggagaccagaaagcagcaggagctggaggccctgcagaagagccagaaggaggccgagctgaccagagagctggagaagcagaaggagaacaagcaggtggaggagatcctgagactggagaaggagatcgaggacctgcagagaatgaaggagcagcaggagctgagcctgaccgaggccagcctgcagaagctgcaggagagaagagaccaggagctgagaagactggaggaggaggcctgcagagccgcccaggagttcctggagagcctgaacttcgacgagatcgacgagtgcgtgagaaacatcgagagaagcctgagcgtgggcagcgagttcagcagcgagctggccgagagcgcctgcgaggagaagcccaacttcaacttcagccagccctaccccgaggaggaggtggacgagggcttcgaggccgacgacgacgccttcaaggacagccccaaccccagcgagcacggccacagcgaccagagaaccagcggcatcagaaccagcgacgacagcagcgaggaggacccctacatgaacgacaccgtggtgcccaccagccccagcgccgacagcaccgtgctgctggcccccagcgtgcaggacagcggcagcctgcacaacagcagcagcggcgagagcacctactgcatgccccagaacgccggcgacctgcccagccccgacggcgactacgactacgaccaggacgactacgaggacggcgccatcaccagcggcagcagcgtgaccttcagcaacagctacggcagccagtggagccccgactacagatgcagcgtgggcacctacaacagcagcggcgcctacagattcagcagcgagggcgcccagagcagcttcgaggacagcgaggaggacttcgacagcagattcgacaccgacgacgagctgagctacagaagagacagcgtgtacagctgcgtgaccctgccctacttccacagcttcctgtacatgaagggcggcctgatgaacagctggaagagaagatggtgcgtgctgaaggacgagaccttcctgtggttcagaagcaagcaggaggccctgaagcagggctggctgcacaagaagggcggcggcagcagcaccctgagcagaagaaactggaagaagagatggttcgtgctgagacagagcaagctgatgtacttcgagaacgacagcgaggagaagctgaagggcaccgtggaggtgagaaccgccaaggagatcatcgacaacaccaccaaggagaacggcatcgacatcatcatggccgacagaaccttccacctgatcgccgagagccccgaggacgccagccagtggttcagcgtgctgagccaggtgcacgccagcaccgaccaggagatccaggagatgcacgacgagcaggccaacccccagaacgccgtgggcaccctggacgtgggcctgatcgacagcgtgtgcgccagcgacagccccgacagacccaacagcttcgtgatcatcaccgccaacagagtgctgcactgcaacgccgacacccccgaggagatgcaccactggatcaccctgctgcagagaagcaagggcgacaccagagtggagggccaggagttcatcgtgagaggctggctgcacaaggaggtgaagaacagccccaagatgagcagcctgaagctgaagaagagatggttcgtgctgacccacaacagcctggactactacaagagcagcgagaagaacgccctgaagctgggcaccctggtgctgaacagcctgtgcagcgtggtgccccccgacgagaagatcttcaaggagaccggctactggaacgtgaccgtgtacggcagaaagcactgctacagactgtacaccaagctgctgaacgaggccaccagatggagcagcgccatccagaacgtgaccgacaccaaggcccccatcgacacccccacccagcagctgatccaggacatcaaggagaactgcctgaacagcgacgtggtggagcagatctacaagagaaaccccatcctgagatacacccaccaccccctgcacagccccctgctgcccctgccctacggcgacatcaacctgaacctgctgaaggacaagggctacaccaccctgcaggacgaggccatcaagatcttcaacagcctgcagcagctggagagcatgagcgaccccatccccatcatccagggcatcctgcagaccggccacgacctgagacccctgagagacgagctgtactgccagctgatcaagcagaccaacaaggtgccccaccccggcagcgtgggcaacctgtacagctggcagatcctgacctgcctgagctgcaccttcctgcccagcagaggcatcctgaagtacctgaagttccacctgaagagaatcagagagcagttccccggcagcgagatggagaagtacgccctgttcacctacgagagcctgaagaagaccaagtgcagagagttcgtgcccagcagagacgagatcgaggccctgatccacagacaggagatgaccagcaccgtgtactgccacggcggcggcagctgcaagatcaccatcaacagccacaccaccgccggcgaggtggtggagaagctgatcagaggcctggccatggaggacagcagaaacatgttcgccctgttcgagtacaacggccacgtggacaaggccatcgagagcagaaccgtggtggccgacgtgctggccaagttcgagaagctggccgccaccagcgaggtgggcgacctgccctggaagttctacttcaagctgtactgcttcctggacaccgacaacgtgcccaaggacagcgtggagttcgccttcatgttcgagcaggcccacgaggccgtgatccacggccaccaccccgcccccgaggagaacctgcaggtgctggccgccctgagactgcagtacctgcagggcgactacaccctgcacgccgccatcccccccctggaggaggtgtacagcctgcagagactgaaggccagaatcagccagagcaccaagaccttcaccccctgcgagagactggagaagagaagaaccagcttcctggagggcaccctgagaagaagcttcagaaccggcagcgtggtgagacagaaggtggaggaggagcagatgctggacatgtggatcaaggaggaggtgagcagcgccagagccagcatcatcgacaagtggagaaagttccagggcatgaaccaggagcaggccatggccaagtacatggccctgatcaaggagtggcccggctacggcagcaccctgttcgacgtggagtgcaaggagggcggcttcccccaggagctgtggctgggcgtgagcgccgacgccgtgagcgtgtacaagagaggcgagggcagacccctggaggtgttccagtacgagcacatcctgagcttcggcgcccccctggccaacacctacaagatcgtggtggacgagagagagctgctgttcgagaccagcgaggtggtggacgtggccaagctgatgaaggcctacatcagcatgatcgtgaagaagagatacagcaccaccagaagcgccagcagccagggcagcagcagatag

SEQ ID NO: 90075 - DNA, 6177 bp, synthetic construct
  misc_feature 1..6177: note = Description of Artificial Sequence: Synthetic coding sequence
  source 1..6177: mol_type = other DNA
atggacaacttcttcaccgagggcaccagagtgtggctgagagagaacggccagcacttccccagcaccgtgaacagctgcgccgagggcatcgtggtgttcagaaccgactacggccaggtgttcacctacaagcagagcaccatcacccaccagaaggtgaccgccatgcaccccaccaacgaggagggcgtggacgacatggccagcctgaccgagctgcacggcggcagcatcatgtacaacctgttccagagatacaagagaaaccagatctacacctacatcggcagcatcctggccagcgtgaacccctaccagcccatcgccggcctgtacgagcccgccaccatggagcagtacagcagaagacacctgggcgagctgcccccccacatcttcgccatcgccaacgagtgctacagatgcctgtggaagagacacgacaaccagtgcatcctgatcagcggcgagagcggcgccggcaagaccgagagcaccaagctgatcctgaagttcctgagcgtgatcagccagcagagcctggagctgagcctgaaggagaagaccagctgcgtggagagagccatcctggagagcagccccatcatggaggccttcggcaacgccaagaccgtgtacaacaacaacagcagcagattcggcaagttcgtgcagctgaacatctgccagaagggcaacatccagggcggcagaatcgtggactacctgctggagaagaacagagtggtgagacagaaccccggcgagagaaactaccacatcttctacgccctgctggccggcctggagcacgaggagagagaggagttctacctgagcacccccgagaactaccactacctgaaccagagcggctgcgtggaggacaagaccatcagcgaccaggagagcttcagagaggtgatcaccgccatggacgtgatgcagttcagcaaggaggaggtgagagaggtgagcagactgctggccggcatcctgcacctgggcaacatcgagttcatcaccgccggcggcgcccaggtgagcttcaagaccgccctgggcagaagcgccgagctgctgggcctggaccccacccagctgaccgacgccctgacccagagaagcatgttcctgagaggcgaggagatcctgacccccctgaacgtgcagcaggccgtggacagcagagacagcctggccatggccctgtacgcctgctgcttcgagtgggtgatcaagaagatcaacagcagaatcaagggcaacgaggacttcaagagcatcggcatcctggacatcttcggcttcgagaacttcgaggtgaaccacttcgagcagttcaacatcaactacgccaacgagaagctgcaggagtacttcaacaagcacatcttcagcctggagcagctggagtacagcagagagggcctggtgtgggaggacatcgactggatcgacaacggcgagtgcctggacctgatcgagaagaagctgggcctgctggccctgatcaacgaggagagccacttcccccaggccaccgacagcaccctgctggagaagctgcacagccagcacgccaacaaccacttctacgtgaagcccagagtggccgtgaacaacttcggcgtgaagcactacgccggcgaggtgcagtacgacgtgagaggcatcctggagaagaacagagacaccttcagagacgacctgctgaacctgctgagagagagcagattcgacttcatctacgacctgttcgagcacgtgagcagcagaaacaaccaggacaccctgaagtgcggcagcaagcacagaagacccaccgtgagcagccagttcaaggacagcctgcacagcctgatggccaccctgagcagcagcaaccccttcttcgtgagatgcatcaagcccaacatgcagaagatgcccgaccagttcgaccaggccgtggtgctgaaccagctgagatacagcggcatgctggagaccgtgagaatcagaaaggccggctacgccgtgagaagacccttccaggacttctacaagagatacaaggtgctgatgagaaacctggccctgcccgaggacgtgagaggcaagtgcaccagcctgctgcagctgtacgacgccagcaacagcgagtggcagctgggcaagaccaaggtgttcctgagagagagcctggagcagaagctggagaagagaagagaggaggaggtgagccacgccgccatggtgatcagagcccacgtgctgggcttcctggccagaaagcagtacagaaaggtgctgtactgcgtggtgatcatccagaagaactacagagccttcctgctgagaagaagattcctgcacctgaagaaggccgccatcgtgttccagaagcagctgagaggccagatcgccagaagagtgtacagacagctgctggccgagaagagagagcaggaggagaagaagaagcaggaggaggaggagaagaagaagagagaggaggaggagagagagagagagagagagagaagagaggccgagctgagagcccagcaggaggaggagaccagaaagcagcaggagctggaggccctgcagaagagccagaaggaggccgagctgaccagagagctggagaagcagaaggagaacaagcaggtggaggagatcctgagactggagaaggagatcgaggacctgcagagaatgaaggagcagcaggagctgagcctgaccgaggccagcctgcagaagctgcaggagagaagagaccaggagctgagaagactggaggaggaggcctgcagagccgcccaggagttcctggagagcctgaacttcgacgagatcgacgagtgcgtgagaaacatcgagagaagcctgagcgtgggcagcgagttcagcagcgagctggccgagagcgcctgcgaggagaagcccaacttcaacttcagccagccctaccccgaggaggaggtggacgagggcttcgaggccgacgacgacgccttcaaggacagccccaaccccagcgagcacggccacagcgaccagagaaccagcggcatcagaaccagcgacgacagcagcgaggaggacccctacatgaacgacaccgtggtgcccaccagccccagcgccgacagcaccgtgctgctggcccccagcgtgcaggacagcggcagcctgcacaacagcagcagcggcgagagcacctactgcatgccccagaacgccggcgacctgcccagccccgacggcgactacgactacgaccaggacgactacgaggacggcgccatcaccagcggcagcagcgtgaccttcagcaacagctacggcagccagtggagccccgactacagatgcagcgtgggcacctacaacagcagcggcgcctacagattcagcagcgagggcgcccagagcagcttcgaggacagcgaggaggacttcgacagcagattcgacaccgacgacgagctgagctacagaagagacagcgtgtacagctgcgtgaccctgccctacttccacagcttcctgtacatgaagggcggcctgatgaacagctggaagagaagatggtgcgtgctgaaggacgagaccttcctgtggttcagaagcaagcaggaggccctgaagcagggctggctgcacaagaagggcggcggcagcagcaccctgagcagaagaaactggaagaagagatggttcgtgctgagacagagcaagctgatgtacttcgagaacgacagcgaggagaagctgaagggcaccgtggaggtgagaaccgccaaggagatcatcgacaacaccaccaaggagaacggcatcgacatcatcatggccgacagaaccttccacctgatcgccgagagccccgaggacgccagccagtggttcagcgtgctgagccaggtgcacgccagcaccgaccaggagatccaggagatgcacgacgagcaggccaacccccagaacgccgtgggcaccctggacgtgggcctgatcgacagcgtgtgcgccagcgacagccccgacagacccaacagcttcgtgatcatcaccgccaacagagtgctgcactgcaacgccgacacccccgaggagatgcaccactggatcaccctgctgcagagaagcaagggcgacaccagagtggagggccaggagttcatcgtgagaggctggctgcacaaggaggtgaagaacagccccaagatgagcagcctgaagctgaagaagagatggttcgtgctgacccacaacagcctggactactacaagagcagcgagaagaacgccctgaagctgggcaccctggtgctgaacagcctgtgcagcgtggtgccccccgacgagaagatcttcaaggagaccggctactggaacgtgaccgtgtacggcagaaagcactgctacagactgtacaccaagctgctgaacgaggccaccagatggagcagcgccatccagaacgtgaccgacaccaaggcccccatcgacacccccacccagcagctgatccaggacatcaaggagaactgcctgaacagcgacgtggtggagcagatctacaagagaaaccccatcctgagatacacccaccaccccctgcacagccccctgctgcccctgccctacggcgacatcaacctgaacctgctgaaggacaagggctacaccaccctgcaggacgaggccatcaagatcttcaacagcctgcagcagctggagagcatgagcgaccccatccccatcatccagggcatcctgcagaccggccacgacctgagacccctgagagacgagctgtactgccagctgatcaagcagaccaacaaggtgccccaccccggcagcgtgggcaacctgtacagctggcagatcctgacctgcctgagctgcaccttcctgcccagcagaggcatcctgaagtacctgaagttccacctgaagagaatcagagagcagttccccggcagcgagatggagaagtacgccctgttcacctacgagagcctgaagaagaccaagtgcagagagttcgtgcccagcagagacgagatcgaggccctgatccacagacaggagatgaccagcaccgtgtactgccacggcggcggcagctgcaagatcaccatcaacagccacaccaccgccggcgaggtggtggagaagctgatcagaggcctggccatggaggacagcagaaacatgttcgccctgttcgagtacaacggccacgtggacaaggccatcgagagcagaaccgtggtggccgacgtgctggccaagttcgagaagctggccgccaccagcgaggtgggcgacctgccctggaagttctacttcaagctgtactgcttcctggacaccgacaacgtgcccaaggacagcgtggagttcgccttcatgttcgagcaggcccacgaggccgtgatccacggccaccaccccgcccccgaggagaacctgcaggtgctggccgccctgagactgcagtacctgcagggcgactacaccctgcacgccgccatcccccccctggaggaggtgtacagcctgcagagactgaaggccagaatcagccagagcaccaagaccttcaccccctgcgagagactggagaagagaagaaccagcttcctggagggcaccctgagaagaagcttcagaaccggcagcgtggtgagacagaaggtggaggaggagcagatgctggacatgtggatcaaggaggaggtgagcagcgccagagccagcatcatcgacaagtggagaaagttccagggcatgaaccaggagcaggccatggccaagtacatggccctgatcaaggagtggcccggctacggcagcaccctgttcgacgtggagtgcaaggagggcggcttcccccaggagctgtggctgggcgtgagcgccgacgccgtgagcgtgtacaagagaggcgagggcagacccctggaggtgttccagtacgagcacatcctgagcttcggcgcccccctggccaacacctacaagatcgtggtggacgagagagagctgctgttcgagaccagcgaggtggtggacgtggccaagctgatgaaggcctacatcagcatgatcgtgaagaagagatacagcaccaccagaagcgccagcagccagggcagcagcagatag

SEQ ID NO: 90076 - DNA, 4194 bp, synthetic construct; identical to SEQ ID NO: 90074
  misc_feature 1..4194: note = Description of Artificial Sequence: Synthetic coding sequence
  source 1..4194: mol_type = other DNA

SEQ ID NO: 90077 - DNA, 552 bp, synthetic construct
  misc_feature 1..552: note = Description of Artificial Sequence: Synthetic coding sequence
  source 1..552: mol_type = other DNA
atggagaacggcgccgtgtacagccccaccaccgaggaggaccccggccccgccagaggccccagaagcggcctggccgcctacttcttcatgggcagactgcccctgctgagaagagtgctgaagggcctgcagctgctgctgagcctgctggccttcatctgcgaggaggtggtgagccagtgcaccctgtgcggcggcctgtacttcttcgagttcgtgagctgcagcgccttcctgctgagcctgctgatcctgatcgtgtactgcacccccttctacgagagagtggacaccaccaaggtgaagagcagcgacttctacatcaccctgggcaccggctgcgtgttcctgctggccagcatcatcttcgtgagcacccacgacagaaccagcgccgagatcgccgccatcgtgttcggcttcatcgccagcttcatgttcctgctggacttcatcaccatgctgtacgagaagagacaggagagccagctgagaaagcccgagaacaccaccagagccgaggccctgaccgagcccctgaacgcctag

SEQ ID NO: 90078 - DNA, 1437 bp, synthetic construct
  misc_feature 1..1437: note = Description of Artificial Sequence: Synthetic coding sequence
  source 1..1437: mol_type = other DNA
atgctggagttcgcccagaagtacttcagagacccccagagaagaccccaggacggcctgagactgaagagcaaggagcccagagagagcagaaccctggaggacatgctgtgcttcaccaagacccccctgcaggagagcctgatcgagctgagcgacagcagcctgagcaagatggccaccgacatgttcctggccgtgatgagattcatgggcgacgcccccctgaagggccagagcgacctggacgtgctgtgcaacctgctgaagctgtgcggcgaccacgaggtgatgagagacgagtgctactgccaggtggtgaagcagatcaccgacaacaccagcagcaagcaggacagctgccagagaggctggagactgctgtacatcgtgaccgcctaccacagctgcagcgaggtgctgcacccccacctgaccagattcctgcaggacgtgagcagaacccccggcctgcccttccagggcatcgccaaggcctgcgagcagaacctgcagaagaccctgagattcggcggcagactggagctgcccagcagcatcgagctgagagccatgctggccggcagaagcagcaagagacagctgttcctgctgcccggcggcctggagagacacctgaagatcaagacctgcaccgtggccctggacgtggtggaggagatctgcgccgagatggccctgaccagacccgaggccttcaacgagtacgtgatcttcgtggtgaccaacagaggccagcacgtgtgccccctgagcagaagagcctacatcctggacgtggccagcgagatggagcaggtggacggcggctacatgctgtggttcagaagagtgctgtgggaccagcccctgaagttcgagaacgagctgtacgtgaccatgcactacaaccaggtgctgcccgactacctgaagggcctgttcagcagcgtgcccgccagcagacccagcgagcagctgctgcagcaggtgagcaagctggccagcctgcagcacagagccaaggaccacttctacctgcccagcgtgagagaggtgcaggagtacatccccgcccagctgtacagaaccaccgccggcagcacctggctgaacctggtgagccagcacagacagcagacccaggccctgagcccccaccaggccagagcccagttcctgggcctgctgagcgccctgcccatgttcggcagcagcttcttcttcatccagagctgcagcaacatcgccgtgcccgccccctgcatcctggccatcaaccacaacggcctgaacttcctgagcaccgagacccacgtgagcggcctgagcctggccctgcccagcccccccagcgtgccctggagccccacccccagcaagagacccagaccccccgccgccgaggcccagttccactgcctgccccccagctag

SEQ ID NO: 90079 - DNA, 555 bp, synthetic construct
  misc_feature 1..555: note = Description of Artificial Sequence: Synthetic coding sequence
  source 1..555: mol_type = other DNA
atgaacatgctgagcagcctgagccccaccgtggtgctgcccgactacctgaagggcctgttcagcagcgtgcccgccagcagacccagcgagcagctgctgcagcaggtgagcaagctggccagcctgcagcacagagccaaggaccacttctacctgcccagcgtgagagaggtgcaggagtacatccccgcccagctgtacagaaccaccgccggcagcacctggctgaacctggtgagccagcacagacagcagacccaggccctgagcccccaccaggccagagcccagttcctgggcctgctgagcgccctgcccatgttcggcagcagcttcttcttcatccagagctgcagcaacatcgccgtgcccgccccctgcatcctggccatcaaccacaacggcctgaacttcctgagcaccgagacccacgtgagcggcctgagcctggccctgcccagcccccccagcgtgccctggagccccacccccagcaagagacccagaccccccgccgccgaggcccagttccactgcctgccccccagctag

SEQ ID NO: 90080 - DNA, 735 bp, synthetic construct
  misc_feature 1..735: note = Description of Artificial Sequence: Synthetic coding sequence
  source 1..735: mol_type = other DNA
atgagagacgagtgctactgccaggtggtgaagcagatcaccgacaacaccagcagcaagcaggacagctgccagagaggctggagactgctgtacatcgtgaccgcctaccacagctgcagcgaggtgctgcacccccacctgaccagattcctgcaggacgtgagcagaacccccggcctgcccttccagggcatcgccaaggcctgcgagcagaacctgcagaagaccctgagattcggcggcagactggagctgcccagcagcatcgagctgagagccatgctggccggcagaagcagcaagagacagctgttcctgctgcccggcggcctggagagacacctgaagatcaagacctgcaccgtggccctggacgtggtggaggagatctgcgccgagatggccctgaccagacccgaggccttcaacgagtacgtgatcttcgtggtgaccaacagaggcggcaagagcagaagcaccagccagcccagcagcaccgtgcagagacaggccagacccggcagcacctggagcgccagcaccggcagcagacacagaagaagcgcccccaccagacccgtgcccagcttctgggccagcagcgccccctacctgtgcagcgccccccccagcagcagcagcagagccgccgccaccctgctgtgccagcccctggccagcctgcccagcaccaccatggccagcaccttcagcgcccagagactgatgtag

SEQ ID NO: 90081 - DNA, 429 bp, synthetic construct
  misc_feature 1..429: note = Description of Artificial Sequence: Synthetic coding sequence
  source 1..429: mol_type = other DNA
atggtgaagggcggccaggaggccggcggccagctgagagtgctgagagcctacagcttcgccgacatcctgttcgtgaccatgcccagccagaacatgctggagttcaacctggccagcgagaaggtgatcctgttcagcgccagagcccaccaggtgaagaccctggtggacgacttcatcctggagctgaagaaggacagcgactacgtggtggccgtgagaaacttcctgcccgaggaccccgccctgctggccttccacaagggcgacatcatccacctgcagcccctggagccccccagagtgggctacagcgccggctgcgtggtgagaagaaaggtggtgtacctggaggagctgagaagaagaggccccgacttcggcgtgtgccccagaacctggaaccccatcagaggcgccagctag

SEQ ID NO: 90082 - DNA, 6165 bp, synthetic construct
  misc_feature 1..6165: note = Description of Artificial Sequence: Synthetic coding sequence
  source 1..6165: mol_type = other DNA
atgttcaacctgatgaagaaggacaaggacaaggacggcggcagaaaggagaagaaggagaagaaggagaagaaggagagaatgagcgccgccgagctgagaagcctggaggagatgagcctgagaagaggcttcttcaacctgaacagaagcagcaagagagagagcaagaccagactggagatcagcaaccccatccccatcaaggtggccagcggcagcgacctgcacctgaccgacatcgacagcgacagcaacagaggcagcgtgatcctggacagcggccacctgagcaccgccagcagcagcgacgacctgaagggcgaggagggcagcttcagaggcagcgtgctgcagagagccgccaagttcggcagcctggccaagcagaacagccagatgatcgtgaagagattcagcttcagccagagaagcagagacgagagcgccagcgagaccagcacccccagcgagcacagcgccgcccccagcccccaggtggaggtgagaaccctggagggccagctggtgcagcaccccggccccggcatccccagacccggccacagaagcagagcccccgagctggtgaccaagaagttccccgtggacctgagactgccccccgtggtgcccctgcccccccccaccctgagagagctggagctgcagagaagacccaccggcgacttcggcttcagcctgagaagaaccaccatgctggacagaggccccgagggccaggcctgcagaagagtggtgcacttcgccgagcccggcgccggcaccaaggacctggccctgggcctggtgcccggcgacagactggtggagatcaacggccacaacgtggagagcaagagcagagacgagatcgtggagatgatcagacagagcggcgacagcgtgagactgaaggtgcagcccatccccgagctgagcgagctgagcagaagctggctgagaagcggcgagggccccagaagagagcccagcgacgccaagaccgaggagcagatcgccgccgaggaggcctggaacgagaccgagaaggtgtggctggtgcacagagacggcttcagcctggccagccagctgaagagcgaggagctgaacctgcccgagggcaaggtgagagtgaagctggaccacgacggcgccatcctggacgtggacgaggacgacgtggagaaggccaacgcccccagctgcgacagactggaggacctggccagcctggtgtacctgaacgagagcagcgtgctgcacaccctgagacagagatacggcgccagcctgctgcacacctacgccggccccagcctgctggtgctgggccccagaggcgcccccgccgtgtacagcgagaaggtgatgcacatgttcaagggctgcagaagagaggacatggccccccacatctacgccgtggcccagaccgcctacagagccatgctgatgagcagacaggaccagagcatcatcctgctgggcagcagcggcagcggcaagaccaccagctgccagcacctggtgcagtacctggccaccatcgccggcatcagcggcaacaaggtgttcagcgtggagaagtggcaggccctgtacaccctgctggaggccttcggcaacagccccaccatcatcaacggcaacgccaccagattcagccagatcctgagcctggacttcgaccaggccggccaggtggccagcgccagcatccagaccatgctgctggagaagctgagagtggccagaagacccgccagcgaggccaccttcaacgtgttctactacctgctggcctgcggcgacggcaccctgagaaccgagctgcacctgaaccacctggccgagaacaacgtgttcggcatcgtgcccctggccaagcccgaggagaagcagaaggccgcccagcagttcagcaagctgcaggccgccatgaaggtgctgggcatcagccccgacgagcagaaggcctgctggttcatcctggccgccatctaccacctgggcgccgccggcgccaccaaggtgcacagcaccgccggcagaaagcagttcgccagacacgagtgggcccagaaggccgcctacctgctgggctgcagcctggaggagctgagcagcgccatcttcaagcaccagcacaagggcggcaccctgcagagaagcaccagcttcagacagggccccgaggagagcggcctgggcgacggcaccggccccaagctgagcgccctggagtgcctggagggcatggccgccggcctgtacagcgagctgttcaccctgctggtgagcctggtgaacagagccctgaagagcagccagcacagcctgtgcagcatgatgatcgtggacacccccggcttccagaaccccgagcagggcggcagcgccagaggcgccagcttcgaggagctgtgccacaactacacccaggacagactgcagagactgttccacgagagaaccttcgtgcaggagctggagagatacaaggaggagaacatcgagctggccttcgacgacctggagccccccaccgacgacagcgtggccgccgtggaccaggccagccaccagagcctggtgagaagcctggccagaaccgacgaggccagaggcctgctgtggctgctggaggaggaggccctggtgcccggcgccagcgaggacaccctgctggagagactgttcagctactacggcccccaggagggcgacaagaagggccagagccccctgctgcacagcagcaagccccaccacttcctgctgggccacagccacggcaccaactgggtggagtacaacgtgaccggctggctgaactacaccaagcagaaccccgccacccagaacgcccccagactgctgcaggacagccagaagaagatcatcagcaacctgttcctgggcagagccggcagcgccaccgtgctgagcggcagcatcgccggcctggagggcggcagccagctggccctgagaagagccaccagcatgagaaagaccttcaccaccggcatggccgccgtgaagaagaagagcctgtgcatccagatgaagctgcaggtggacgccctgatcgacaccatcaagaagagcaagctgcacttcgtgcactgcttcctgcccgtggccgagggctgggccggcgagcccagaagcgccagcagcagaagagtgagcagcagcagcgagctggacctgcccagcggcgaccactgcgaggccggcctgctgcagctggacgtgcccctgctgagaacccagctgagaggcagcagactgctggacgccatgagaatgtacagacagggctaccccgaccacatggtgttcagcgagttcagaagaagattcgacgtgctggccccccacctgaccaagaagcacggcagaaactacatcgtggtggacgagagaagagccgtggaggagctgctggagtgcctggacctggagaagagcagctgctgcatgggcctgagcagagtgttcttcagagccggcaccctggccagactggaggagcagagagacgagcagaccagcagaaacctgaccctgttccaggccgcctgcagaggctacctggccagacagcacttcaagaagagaaagatccaggacctggccatcagatgcgtgcagaagaacatcaagaagaacaagggcgtgaaggactggccctggtggaagctgttcaccaccgtgagacccctgatcgaggtgcagctgagcgaggagcagatcagaaacaaggacgaggagatccagcagctgagaagcaagctggagaaggccgagaaggagagaaacgagctgagactgaacagcgacagactggagagcagaatcagcgagctgaccagcgagctgaccgacgagagaaacaccggcgagagcgccagccagctgctggacgccgagaccgccgagagactgagagccgagaaggagatgaaggagctgcagacccagtacgacgccctgaagaagcagatggaggtgatggagatggaggtgatggaggccagactgatcagagccgccgagatcaacggcgaggtggacgacgacgacgccggcggcgagtggagactgaagtacgagagagccgtgagagaggtggacttcaccaagaagagactgcagcaggagttcgaggacaagctggaggtggagcagcagaacaagagacagctggagagaagactgggcgacctgcaggccgacagcgaggagagccagagagccctgcagcagctgaagaagaagtgccagagactgaccgccgagctgcaggacaccaagctgcacctggagggccagcaggtgagaaaccacgagctggagaagaagcagagaagattcgacagcgagctgagccaggcccacgaggaggcccagagagagaagctgcagagagagaagctgcagagagagaaggacatgctgctggccgaggccttcagcctgaagcagcagctggaggagaaggacatggacatcgccggcttcacccagaaggtggtgagcctggaggccgagctgcaggacatcagcagccaggagagcaaggacgaggccagcctggccaaggtgaagaagcagctgagagacctggaggccaaggtgaaggaccaggaggaggagctggacgagcaggccggcaccatccagatgctggagcaggccaagctgagactggagatggagatggagagaatgagacagacccacagcaaggagatggagagcagagacgaggaggtggaggaggccagacagagctgccagaagaagctgaagcagatggaggtgcagctggaggaggagtacgaggacaagcagaaggtgctgagagagaagagagagctggagggcaagctggccaccctgagcgaccaggtgaacagaagagacttcgagagcgagaagagactgagaaaggacctgaagagaaccaaggccctgctggccgacgcccagctgatgctggaccacctgaagaacagcgcccccagcaagagagagatcgcccagctgaagaaccagctggaggagagcgagttcacctgcgccgccgccgtgaaggccagaaaggccatggaggtggagatcgaggacctgcacctgcagatcgacgacatcgccaaggccaagaccgccctggaggagcagctgagcagactgcagagagagaagaacgagatccagaacagactggaggaggaccaggaggacatgaacgagctgatgaagaagcacaaggccgccgtggcccaggccagcagagacctggcccagatcaacgacctgcaggcccagctggaggaggccaacaaggagaagcaggagctgcaggagaagctgcaggccctgcagagccaggtggagttcctggagcagagcatggtggacaagagcctggtgagcagacaggaggccaagatcagagagctggagaccagactggagttcgagagaacccaggtgaagagactggagagcctggccagcagactgaaggagaacatggagaagctgaccgaggagagagaccagagaatcgccgccgagaacagagagaaggagcagaacaagagactgcagagacagctgagagacaccaaggaggagatgggcgagctggccagaaaggaggccgaggccagcagaaagaagcacgagctggagatggacctggagagcctggaggccgccaaccagagcctgcaggccgacctgaagctggccttcaagagaatcggcgacctgcaggccgccatcgaggacgagatggagagcgacgagaacgaggacctgatcaacagcctgcaggacatggtgaccaagtaccagaagagaaagaacaagctggagggcgacagcgacgtggacagcgagctggaggacagagtggacggcgtgaagagctggctgagcaagaacaagggccccagcaaggccgccagcgacgacggcagcctgaagagcagcagccccaccagctactggaagagcctggcccccgacagaagcgacgacgagcacgaccccctggacaacaccagcagacccagatacagccacagctacctgagcgacagcgacaccgaggccaagctgaccgagaccaacgcctag

SEQ ID NO: 90083 - DNA, 6009 bp, synthetic construct
  misc_feature 1..6009: note = Description of Artificial Sequence: Synthetic coding sequence
  source 1..6009: mol_type = other DNA
atgttcaacctgatgaagaaggacaaggacaaggacggcggcagaaaggagaagaaggagaagaaggagaagaaggagagaatgagcgccgccgagctgagaagcctggaggagatgagcctgagaagaggcttcttcaacctgaacagaagcagcaagagagagagcaagaccagactggagatcagcaaccccatccccatcaaggtggccagcggcagcgacctgcacctgaccgacatcgacagcgacagcaacagaggcagcgtgatcctggacagcggccacctgagcaccgccagcagcagcgacgacctgaagggcgaggagggcagcttcagaggcagcgtgctgcagagagccgccaagttcggcagcctggccaagcagaacagccagatgatcgtgaagagattcagcttcagccagagaagcagagacgagagcgccagcgagaccagcacccccagcgagcacagcgccgcccccagcccccaggtggaggtgagaaccctggagggccagctggtgcagcaccccggccccggcatccccagacccggccacagaagcagagcccccgagctggtgaccaagaagttccccgtggacctgagactgccccccgtggtgcccctgcccccccccaccctgagagagctggagctgcagagaagacccaccggcgacttcggcttcagcctgagaagaaccaccatgctggacagaggccccgagggccaggcctgcagaagagtggtgcacttcgccgagcccggcgccggcaccaaggacctggccctgggcctggtgcccggcgacagactggtggagatcaacggccacaacgtggagagcaagagcagagacgagatcgtggagatgatcagacagagcggcgacagcgtgagactgaaggtgcagcccatccccgagctgagcgagctgagcagaagctggctgagaagcggcgagggccccagaagagagcccagcgacgccaagaccgaggagcagatcgccgccgaggaggcctggaacgagaccgagaaggtgtggctggtgcacagagacggcttcagcctggccagccagctgaagagcgaggagctgaacctgcccgagggcaaggtgagagtgaagctggaccacgacggcgccatcctggacgtggacgaggacgacgtggagaaggccaacgcccccagctgcgacagactggaggacctggccagcctggtgtacctgaacgagagcagcgtgctgcacaccctgagacagagatacggcgccagcctgctgcacacctacgccggccccagcctgctggtgctgggccccagaggcgcccccgccgtgtacagcgagaaggtgatgcacatgttcaagggctgcagaagagaggacatggccccccacatctacgccgtggcccagaccgcctacagagccatgctgatgagcagacaggaccagagcatcatcctgctgggcagcagcggcagcggcaagaccaccagctgccagcacctggtgcagtacctggccaccatcgccggcatcagcggcaacaaggtgttcagcgtggagaagtggcaggccctgtacaccctgctggaggccttcggcaacagccccaccatcatcaacggcaacgccaccagattcagccagatcctgagcctggacttcgaccaggccggccaggtggccagcgccagcatccagaccatgctgctggagaagctgagagtggccagaagacccgccagcgaggccaccttcaacgtgttctactacctgctggcctgcggcgacggcaccctgagaaccgagctgcacctgaaccacctggccgagaacaacgtgttcggcatcgtgcccctggccaagcccgaggagaagcagaaggccgcccagcagttcagcaagctgcaggccgccatgaaggtgctgggcatcagccccgacgagcagaaggcctgctggttcatcctggccgccatctaccacctgggcgccgccggcgccaccaaggtgcacagcaccgccggcagaaagcagttcgccagacacgagtgggcccagaaggccgcctacctgctgggctgcagcctggaggagctgagcagcgccatcttcaagcaccagcacaagggcggcaccctgcagagaagcaccagcttcagacagggccccgaggagagcggcctgggcgacggcaccggccccaagctgagcgccctggagtgcctggagggcatggccgccggcctgtacagcgagctgttcaccctgctggtgagcctggtgaacagagccctgaagagcagccagcacagcctgtgcagcatgatgatcgtggacacccccggcttccagaaccccgagcagggcggcagcgccagaggcgccagcttcgaggagctgtgccacaactacacccaggacagactgcagagactgttccacgagagaaccttcgtgcaggagctggagagatacaaggaggagaacatcgagctggccttcgacgacctggagccccccaccgacgacagcgtggccgccgtggaccaggccagccaccagagcctggtgagaagcctggccagaaccgacgaggccagaggcctgctgtggctgctggaggaggaggccctggtgcccggcgccagcgaggacaccctgctggagagactgttcagctactacggcccccaggagggcgacaagaagggccagagccccctgctgcacagcagcaagccccaccacttcctgctgggccacagccacggcaccaactgggtggagtacaacgtgaccggctggctgaactacaccaagcagaaccccgccacccagaacgcccccagactgctgcaggacagccagaagaagatcatcagcaacctgttcctgggcagagccggcagcgccaccgtgctgagcggcagcatcgccggcctggagggcggcagccagctggccctgagaagagccaccagcatgagaaagaccttcaccaccggcatggccgccgtgaagaagaagagcctgtgcatccagatgaagctgcaggtggacgccctgatcgacaccatcaagaagagcaagctgcacttcgtgcactgcttcctgcccgtggccgagggctgggccggcgagcccagaagcgccagcagcagaagagtgagcagcagcagcgagctggacctgcccagcggcgaccactgcgaggccggcctgctgcagctggacgtgcccctgctgagaacccagctgagaggcagcagactgctggacgccatgagaatgtacagacagggctaccccgaccacatggtgttcagcgagttcagaagaagattcgacgtgctggccccccacctgaccaagaagcacggcagaaactacatcgtggtggacgagagaagagccgtggaggagctgctggagtgcctggacctggagaagagcagctgctgcatgggcctgagcagagtgttcttcagagccggcaccctggccagactggaggagcagagagacgagcagaccagcagaaacctgaccctgttccaggccgcctgcagaggctacctggccagacagcacttcaagaagagaaagatccaggacctggccatcagatgcgtgcagaagaacatcaagaagaacaagggcgtgaaggactggccctggtggaagctgttcaccaccgtgagacccctgatcgaggtgcagctgagcgaggagcagatcagaaacaaggacgaggagatccagcagctgagaagcaagctggagaaggccgagaaggagagaaacgagctgagactgaacagcgacagactggagagcagaatcagcgagctgaccagcgagctgaccgacgagagaaacaccggcgagagcgccagccagctgctggacgccgagaccgccgagagactgagagccgagaaggagatgaaggagctgcagacccagtacgacgccctgaagaagcagatggaggtgatggagatggaggtgatggaggccagactgatcagagccgccgagatcaacggcgaggtggacgacgacgacgccggcggcgagtggagactgaagtacgagagagccgtgagagaggtggacttcaccaagaagagactgcagcaggagttcgaggacaagctggaggtggagcagcagaacaagagacagctggagagaagactgggcgacctgcaggccgacagcgaggagagccagagagccctgcagcagctgaagaagaagtgccagagactgaccgccgagctgcaggacaccaagctgcacctggagggccagcaggtgagaaaccacgagctggagaagaagcagagaagattcgacagcgagctgagccaggcccacgaggaggcccagagagagaagctgcagagagagaagctgcagagagagaaggacatgctgctggccgaggccttcagcctgaagcagcagctggaggagaaggacatggacatcgccggcttcacccagaaggtggtgagcctggaggccgagctgcaggacatcagcagccaggagagcaaggacgaggccagcctggccaaggtgaagaagcagctgagagacctggaggccaaggtgaaggaccaggaggaggagctggacgagcaggccggcaccatccagatgctggagcagctgaagcagatggaggtgcagctggaggaggagtacgaggacaagcagaaggtgctgagagagaagagagagctggagggcaagctggccaccctgagcgaccaggtgaacagaagagacttcgagagcgagaagagactgagaaaggacctgaagagaaccaaggccctgctggccgacgcccagctgatgctggaccacctgaagaacagcgcccccagcaagagagagatcgcccagctgaagaaccagctggaggagagcgagttcacctgcgccgccgccgtgaaggccagaaaggccatggaggtggagatcgaggacctgcacctgcagatcgacgacatcgccaaggccaagaccgccctggaggagcagctgagcagactgcagagagagaagaacgagatccagaacagactggaggaggaccaggaggacatgaacgagctgatgaagaagcacaaggccgccgtggcccaggccagcagagacctggcccagatcaacgacctgcaggcccagctggaggaggccaacaaggagaagcaggagctgcaggagaagctgcaggccctgcagagccaggtggagttcctggagcagagcatggtggacaagagcctggtgagcagacaggaggccaagatcagagagctggagaccagactggagttcgagagaacccaggtgaagagactggagagcctggccagcagactgaaggagaacatggagaagctgaccgaggagagagaccagagaatcgccgccgagaacagagagaaggagcagaacaagagactgcagagacagctgagagacaccaaggaggagatgggcgagctggccagaaaggaggccgaggccagcagaaagaagcacgagctggagatggacctggagagcctggaggccgccaaccagagcctgcaggccgacctgaagctggccttcaagagaatcggcgacctgcaggccgccatcgaggacgagatggagagcgacgagaacgaggacctgatcaacagcgagggcgacagcgacgtggacagcgagctggaggacagagtggacggcgtgaagagctggctgagcaagaacaagggccccagcaaggccgccagcgacgacggcagcctgaagagcagcagccccaccagctactggaagagcctggcccccgacagaagcgacgacgagcacgaccccctggacaacaccagcagacccagatacagccacagctacctgagcgacagcgacaccgaggccaagctgaccgagaccaacgcctag

SEQ ID NO: 90084 - DNA, 4929 bp, synthetic construct
  misc_feature 1..4929: note = Description of Artificial Sequence: Synthetic coding sequence
  source 1..4929: mol_type = other DNA
atggagggccccagaaccaccaagctggagggcagcagcaaggagggcagcggccccagcagaagcccccagccccccaccagccccatcccccccgagaccagccagagagccagaagccccgcccccaccctggccatgaacggccccggcgccgccaccgccgagggcctgagcgaggaggcccccgccgtgtacagcgagaaggtgatgcacatgttcaagggctgcagaagagaggacatggccccccacatctacgccgtggcccagaccgcctacagagccatgctgatgagcagacaggaccagagcatcatcctgctgggcagcagcggcagcggcaagaccaccagctgccagcacctggtgcagtacctggccaccatcgccggcatcagcggcaacaaggtgttcagcgtggagaagtggcaggccctgtacaccctgctggaggccttcggcaacagccccaccatcatcaacggcaacgccaccagattcagccagatcctgagcctggacttcgaccaggccggccaggtggccagcgccagcatccagaccatgctgctggagaagctgagagtggccagaagacccgccagcgaggccaccttcaacgtgttctactacctgctggcctgcggcgacggcaccctgagaaccgagctgcacctgaaccacctggccgagaacaacgtgttcggcatcgtgcccctggccaagcccgaggagaagcagaaggccgcccagcagttcagcaagctgcaggccgccatgaaggtgctgggcatcagccccgacgagcagaaggcctgctggttcatcctggccgccatctaccacctgggcgccgccggcgccaccaaggaggccgccgaggccggcagaaagcagttcgccagacacgagtgggcccagaaggccgcctacctgctgggctgcagcctggaggagctgagcagcgccatcttcaagcaccagcacaagggcggcaccctgcagagaagcaccagcttcagacagggccccgaggagagcggcctgggcgacggcaccggccccaagctgagcgccctggagtgcctggagggcatggccgccggcctgtacagcgagctgttcaccctgctggtgagcctggtgaacagagccctgaagagcagccagcacagcctgtgcagcatgatgatcgtggacacccccggcttccagaaccccgagcagggcggcagcgccagaggcgccagcttcgaggagctgtgccacaactacacccaggacagactgcagagactgttccacgagagaaccttcgtgcaggagctggagagatacaaggaggagaacatcgagctggccttcgacgacctggagccccccaccgacgacagcgtggccgccgtggaccaggccagccaccagagcctggtgagaagcctggccagaaccgacgaggccagaggcctgctgtggctgctggaggaggaggccctggtgcccggcgccagcgaggacaccctgctggagagactgttcagctactacggcccccaggagggcgacaagaagggccagagccccctgctgcacagcagcaagccccaccacttcctgctgggccacagccacggcaccaactgggtggagtacaacgtgaccggctggctgaactacaccaagcagaaccccgccacccagaacgcccccagactgctgcaggacagccagaagaagatcatcagcaacctgttcctgggcagagccggcagcgccaccgtgctgagcggcagcatcgccggcctggagggcggcagccagctggccctgagaagagccaccagcatgagaaagaccttcaccaccggcatggccgccgtgaagaagaagagcctgtgcatccagatgaagctgcaggtggacgccctgatcgacaccatcaagaagagcaagctgcacttcgtgcactgcttcctgcccgtggccgagggctgggccggcgagcccagaagcgccagcagcagaagagtgagcagcagcagcgagctggacctgcccagcggcgaccactgcgaggccggcctgctgcagctggacgtgcccctgctgagaacccagctgagaggcagcagactgctggacgccatgagaatgtacagacagggctaccccgaccacatggtgttcagcgagttcagaagaagattcgacgtgctggccccccacctgaccaagaagcacggcagaaactacatcgtggtggacgagagaagagccgtggaggagctgctggagtgcctggacctggagaagagcagctgctgcatgggcctgagcagagtgttcttcagagccggcaccctggccagactggaggagcagagagacgagcagaccagcagaaacctgaccctgttccaggccgcctgcagaggctacctggccagacagcacttcaagaagagaaagatccaggacctggccatcagatgcgtgcagaagaacatcaagaagaacaagggcgtgaaggactggccctggtggaagctgttcaccaccgtgagacccctgatcgaggtgcagctgagcgaggagcagatcagaaacaaggacgaggagatccagcagctgagaagcaagctggagaaggccgagaaggagagaaacgagctgagactgaacagcgacagactggagagcagaatcagcgagctgaccagcgagctgaccgacgagagaaacaccggcgagagcgccagccagctgctggacgccgagaccgccgagagactgagagccgagaaggagatgaaggagctgcagacccagtacgacgccctgaagaagcagatggaggtgatggagatggaggtgatggaggccagactgatcagagccgccgagatcaacggcgaggtggacgacgacgacgccggcggcgagtggagactgaagtacgagagagccgtgagagaggtggacttcaccaagaagagactgcagcaggagttcgaggacaagctggaggtggagcagcagaacaagagacagctggagagaagactgggcgacctgcaggccgacagcgaggagagccagagagccctgcagcagctgaagaagaagtgccagagactgaccgccgagctgcaggacaccaagctgcacctggagggccagcaggtgagaaaccacgagctggagaagaagcagagaagattcgacagcgagctgagccaggcccacgaggaggcccagagagagaagctgcagagagagaagctgcagagagagaaggacatgctgctggccgaggccttcagcctgaagcagcagctggaggagaaggacatggacatcgccggcttcacccagaaggtggtgagcctggaggccgagctgcaggacatcagcagccaggagagcaaggacgaggccagcctggccaaggtgaagaagcagctgagagacctggaggccaaggtgaaggaccaggaggaggagctggacgagcaggccaagctgagactggagatggagatggagagaatgagacagacccacagcaaggagatggagagcagagacgaggaggtggaggaggccagacagagctgccagaagaagctgaagcagatggaggtgcagctggaggaggagtacgaggacaagcagaaggtgctgagagagaagagagagctggagggcaagctggccaccctgagcgaccaggtgaacagaagagacttcgagagcgagaagagactgagaaaggacctgaagagaaccaaggccctgctggccgacgcccagctgatgctggaccacctgaagaacagcgcccccagcaagagagagatcgcccagctgaagaaccagctggaggagagcgagttcacctgcgccgccgccgtgaaggccagaaaggccatggaggtggagatcgaggacctgcacctgcagatcgacgacatcgccaaggccaagaccgccctggaggagcagctgagcagactgcagagagagaagaacgagatccagaacagactggaggaggaccaggaggacatgaacgagctgatgaagaagcacaaggccgccgtggcccaggccagcagagacctggcccagatcaacgacctgcaggcccagctggaggaggccaacaaggagaagcaggagctgcaggagaagctgcaggccctgcagagccaggtggagttcctggagcagagcatggtggacaagagcctggtgagcagacaggaggccaagatcagagagctggagaccagactggagttcgagagaacccaggtgaagagactggagagcctggccagcagactgaaggagaacatggagaagctgaccgaggagagagaccagagaatcgccgccgagaacagagagaaggagcagaacaagagactgcagagacagctgagagacaccaaggaggagatgggcgagctggccagaaaggaggccgaggccagcagaaagaagcacgagctggagatggacctggagagcctggaggccgccaaccagagcctgcaggccgacctgaagctggccttcaagagaatcggcgacctgcaggccgccatcgaggacgagatggagagcgacgagaacgaggacctgatcaacagcgagggcgacagcgacgtggacagcgagctggaggacagagtggacggcgtgaagagctggctgagcaagaacaagggccccagcaaggccgccagcgacgacggcagcctgaagagcagcagccccaccagctactggaagagcctggcccccgacagaagcgacgacgagcacgaccccctggacaacaccagcagacccagatacagccacagctacctgagcgacagcgacaccgaggccaagctgaccgagaccaacgcctag

SEQ ID NO: 90085 - DNA, 6165 bp, synthetic construct
  misc_feature 1..6165: note = Description of Artificial Sequence: Synthetic coding sequence
  source 1..6165: mol_type = other DNA
atgttcaacctgatgaagaaggacaaggacaaggacggcggcagaaaggagaagaaggagaagaaggagaagaaggagagaatgagcgccgccgagctgagaagcctggaggagatgagcctgagaagaggcttcttcaacctgaacagaagcagcaagagagagagcaagaccagactggagatcagcaaccccatccccatcaaggtggccagcggcagcgacctgcacctgaccgacatcgacagcgacagcaacagaggcagcgtgatcctggacagcggccacctgagcaccgccagcagcagcgacgacctgaagggcgaggagggcagcttcagaggcagcgtgctgcagagagccgccaagttcggcagcctggccaagcagaacagccagatgatcgtgaagagattcagcttcagccagagaagcagagacgagagcgccagcgagaccagcacccccagcgagcacagcgccgcccccagcccccaggtggaggtgagaaccctggagggccagctggtgcagcaccccggccccggcatccccagacccggccacagaagcagagcccccgagctggtgaccaagaagttccccgtggacctgagactgccccccgtggtgcccctgcccccccccaccctgagagagctggagctgcagagaagacccaccggcgacttcggcttcagcctgagaagaaccaccatgctggacagaggccccgagggccaggcctgcagaagagtggtgcacttcgccgagcccggcgccggcaccaaggacctggccctgggcctggtgcccggcgacagactggtggagatcaacggccacaacgtggagagcaagagcagagacgagatcgtggagatgatcagacagagcggcgacagcgtgagactgaaggtgcagcccatccccgagctgagcgagctgagcagaagctggctgagaagcggcgagggccccagaagagagcccagcgacgccaagaccgaggagcagatcgccgccgaggaggcctggaacgagaccgagaaggtgtggctggtgcacagagacggcttcagcctggccagccagctgaagagcgaggagctgaacctgcccgagggcaaggtgagagtgaagctggaccacgacggcgccatcctggacgtggacgaggacgacgtggagaaggccaacgcccccagctgcgacagactggaggacctggccagcctggtgtacctgaacgagagcagcgtgctgcacaccctgagacagagatacggcgccagcctgctgcacacctacgccggccccagcctgctggtgctgggccccagaggcgcccccgccgtgtacagcgagaaggtgatgcacatgttcaagggctgcagaagagaggacatggccccccacatctacgccgtggcccagaccgcctacagagccatgctgatgagcagacaggaccagagcatcatcctgctgggcagcagcggcagcggcaagaccaccagctgccagcacctggtgcagtacctggccaccatcgccggcatcagcggcaacaaggtgttcagcgtggagaagtggcaggccctgtacaccctgctggaggccttcggcaacagccccaccatcatcaacggcaacgccaccagattcagccagatcctgagcctggacttcgaccaggccggccaggtggccagcgccagcatccagaccatgctgctggagaagctgagagtggccagaagacccgccagcgaggccaccttcaacgtgttctactacctgctggcctgcggcgacggcaccctgagaaccgagctgcacctgaaccacctggccgagaacaacgtgttcggcatcgtgcccctggccaagcccgaggagaagcagaaggccgcccagcagttcagcaagctgcaggccgccatgaaggtgctgggcatcagccccgacgagcagaaggcctgctggttcatcctggccgccatctaccacctgggcgccgccggcgccaccaaggaggccgccgaggccggcagaaagcagttcgccagacacgagtgggcccagaaggccgcctacctgctgggctgcagcctggaggagctgagcagcgccatcttcaagcaccagcacaagggcggcaccctgcagagaagcaccagcttcagacagggccccgaggagagcggcctgggcgacggcaccggccccaagctgagcgccctggagtgcctggagggcatggccgccggcctgtacagcgagctgttcaccctgctggtgagcctggtgaacagagccctgaagagcagccagcacagcctgtgcagcatgatgatcgtggacacccccggcttccagaaccccgagcagggcggcagcgccagaggcgccagcttcgaggagctgtgccacaactacacccaggacagactgcagagactgttccacgagagaaccttcgtgcaggagctggagagatacaaggaggagaacatcgagctggccttcgacgacctggagccccccaccgacgacagcgtggccgccgtggaccaggccagccaccagagcctggtgagaagcctggccagaaccgacgaggccagaggcctgctgtggctgctggaggaggaggccctggtgcccggcgccagcgaggacaccctgctggagagactgttcagctactacggcccccaggagggcgacaagaagggccagagccccctgctgcacagcagcaagccccaccacttcctgctgggccacagccacggcaccaactgggtggagtacaacgtgaccggctggctgaactacaccaagcagaaccccgccacccagaacgcccccagactgctgcaggacagccagaagaagatcatcagcaacctgttcctgggcagagccggcagcgccaccgtgctgagcggcagcatcgccggcctggagggcggcagccagctggccctgagaagagccaccagcatgagaaagaccttcaccaccggcatggccgccgtgaagaagaagagcctgtgcatccagatgaagctgcaggtggacgccctgatcgacaccatcaagaagagcaagctgcacttcgtgcactgcttcctgcccgtggccgagggctgggccggcgagcccagaagcgccagcagcagaagagtgagcagcagcagcgagctggacctgcccagcggcgaccactgcgaggccggcctgctgcagctggacgtgcccctgctgagaacccagctgagaggcagcagactgctggacgccatgagaatgtacagacagggctaccccgaccacatggtgttcagcgagttcagaagaagattcgacgtgctggccccccacctgaccaagaagcacggcagaaactacatcgtggtggacgagagaagagccgtggaggagctgctggagtgcctggacctggagaagagcagctgctgcatgggcctgagcagagtgttcttcagagccggcaccctggccagactggaggagcagagagacgagcagaccagcagaaacctgaccctgttccaggccgcctgcagaggctacctggccagacagcacttcaagaagagaaagatccaggacctggccatcagatgcgtgcagaagaacatcaagaagaacaagggcgtgaaggactggccctggtggaagctgttcaccaccgtgagacccctgatcgaggtgcagctgagcgaggagcagatcagaaacaaggacgaggagatccagcagctgagaagcaagctggagaaggccgagaaggagagaaacgagctgagactgaacagcgacagactggagagcagaatcagcgagctgaccagcgagctgaccgacgagagaaacaccggcgagagcgccagccagctgctggacgccgagaccgccgagagactgagagccgagaaggagatgaaggagctgcagacccagtacgacgccctgaagaagcagatggaggtgatggagatggaggtgatggaggccagactgatcagagccgccgagatcaacggcgaggtggacgacgacgacgccggcggcgagtggagactgaagtacgagagagccgtgagagaggtggacttcaccaagaagagactgcagcaggagttcgaggacaagctggaggtggagcagcagaacaagagacagctggagagaagactgggcgacctgcaggccgacagcgaggagagccagagagccctgcagcagctgaagaagaagtgccagagactgaccgccgagctgcaggacaccaagctgcacctggagggccagcaggtgagaaaccacgagctggagaagaagcagagaagattcgacagcgagctgagccaggcccacgaggaggcccagagagagaagctgcagagagagaagctgcagagagagaaggacatgctgctggccgaggccttcagcctgaagcagcagctggaggagaaggacatggacatcgccggcttcacccagaaggtggtgagcctggaggccgagctgcaggacatcagcagccaggagagcaaggacgaggccagcctggccaaggtgaagaagcagctgagagacctggaggccaaggtgaaggaccaggaggaggagctggacgagcaggccggcaccatccagatgctggagcaggccaagctgagactggagatggagatggagagaatgagacagacccacagcaaggagatggagagcagagacgaggaggtggaggaggccagacagagctgccagaagaagctgaagcagatggaggtgcagctggaggaggagtacgaggacaagcagaaggtgctgagagagaagagagagctggagggcaagctggccaccctgagcgaccaggtgaacagaagagacttcgagagcgagaagagactgagaaaggacctgaagagaaccaaggccctgctggccgacgcccagctgatgctggaccacctgaagaacagcgcccccagcaagagagagatcgcccagctgaagaaccagctggaggagagcgagttcacctgcgccgccgccgtgaaggccagaaaggccatggaggtggagatcgaggacctgcacctgcagatcgacgacatcgccaaggccaagaccgccctggaggagcagctgagcagactgcagagagagaagaacgagatccagaacagactggaggaggaccaggaggacatgaacgagctgatgaagaagcacaaggccgccgtggcccaggccagcagagacctggcccagatcaacgacctgcaggcccagctggaggaggccaacaaggagaagcaggagctgcaggagaagctgcaggccctgcagagccaggtggagttcctggagcagagcatggtggacaagagcctggtgagcagacaggaggccaagatcagagagctggagaccagactggagttcgagagaacccaggtgaagagactggagagcctggccagcagactgaaggagaacatggagaagctgaccgaggagagagaccagagaatcgccgccgagaacagagagaaggagcagaacaagagactgcagagacagctgagagacaccaaggaggagatgggcgagctggccagaaaggaggccgaggccagcagaaagaagcacgagctggagatggacctggagagcctggaggccgccaaccagagcctgcaggccgacctgaagctggccttcaagagaatcggcgacctgcaggccgccatcgaggacgagatggagagcgacgagaacgaggacctgatcaacagcctgcaggacatggtgaccaagtaccagaagagaaagaacaagctggagggcgacagcgacgtggacagcgagctggaggacagagtggacggcgtgaagagctggctgagcaagaacaagggccccagcaaggccgccagcgacgacggcagcctgaagagcagcagccccaccagctactggaagagcctggcccccgacagaagcgacgacgagcacgaccccctggacaacaccagcagacccagatacagccacagctacctgagcgacagcgacaccgaggccaagctgaccgagaccaacgcctag

SEQ ID NO: 90086 - DNA, 2808 bp, synthetic construct
  misc_feature 1..2808: note = Description of Artificial Sequence: Synthetic coding sequence
  source 1..2808: mol_type = other DNA
atgagaatgtacagacagggctaccccgaccacatggtgttcagcgagttcagaagaagattcgacgtgctggccccccacctgaccaagaagcacggcagaaactacatcgtggtggacgagagaagagccgtggaggagctgctggagtgcctggacctggagaagagcagctgctgcatgggcctgagcagagtgttcttcagagccggcaccctggccagactggaggagcagagagacgagcagaccagcagaaacctgaccctgttccaggccgcctgcagaggctacctggccagacagcacttcaagaagagaaagatccaggacctggccatcagatgcgtgcagaagaacatcaagaagaacaagggcgtgaaggactggccctggtggaagctgttcaccaccgtgagacccctgatcgaggtgcagctgagcgaggagcagatcagaaacaaggacgaggagatccagcagctgagaagcaagctggagaaggccgagaaggagagaaacgagctgagactgaacagcgacagactggagagcagaatcagcgagctgaccagcgagctgaccgacgagagaaacaccggcgagagcgccagccagctgctggacgccgagaccgccgagagactgagagccgagaaggagatgaaggagctgcagacccagtacgacgccctgaagaagcagatggaggtgatggagatggaggtgatggaggccagactgatcagagccgccgagatcaacggcgaggtggacgacgacgacgccggcggcgagtggagactgaagtacgagagagccgtgagagaggtggacttcaccaagaagagactgcagcaggagttcgaggacaagctggaggtggagcagcagaacaagagacagctggagagaagactgggcgacctgcaggccgacagcgaggagagccagagagccctgcagcagctgaagaagaagtgccagagactgaccgccgagctgcaggacaccaagctgcacctggagggccagcaggtgagaaaccacgagctggagaagaagcagagaagattcgacagcgagctgagccaggcccacgaggaggcccagagagagaagctgcagagagagaagctgcagagagagaaggacatgctgctggccgaggccttcagcctgaagcagcagctggaggagaaggacatggacatcgccggcttcacccagaaggtggtgagcctggaggccgagctgcaggacatcagcagccaggagagcaaggacgaggccagcctggccaaggtgaagaagcagctgagagacctggaggccaaggtgaaggaccaggaggaggagctggacgagcaggccggcaccatccagatgctggagcaggccaagctgagactggagatggagatggagagaatgagacagacccacagcaaggagatggagagcagagacgaggaggtggaggaggccagacagagctgccagaagaagctgaagcagatggaggtgcagctggaggaggagtacgaggacaagcagaaggtgctgagagagaagagagagctggagggcaagctggccaccctgagcgaccaggtgaacagaagagacttcgagagcgagaagagactgagaaaggacctgaagagaaccaaggccctgctggccgacgcccagctgatgctggaccacctgaagaacagcgcccccagcaagagagagatcgcccagctgaagaaccagctggaggagagcgagttcacctgcgccgccgccgtgaaggccagaaaggccatggaggtggagatcgaggacctgcacctgcagatcgacgacatcgccaaggccaagaccgccctggaggagcagctgagcagactgcagagagagaagaacgagatccagaacagactggaggaggaccaggaggacatgaacgagctgatgaagaagcacaaggccgccgtggcccaggccagcagagacctggcccagatcaacgacctgcaggcccagctggaggaggccaacaaggagaagcaggagctgcaggagaagctgcaggccctgcagagccaggtggagttcctggagcagagcatggtggacaagagcctggtgagcagacaggaggccaagatcagagagctggagaccagactggagttcgagagaacccaggtgaagagactggagagcctggccagcagactgaaggagaacatggagaagctgaccgaggagagagaccagagaatcgccgccgagaacagagagaaggagcagaacaagagactgcagagacagctgagagacaccaaggaggagatgggcgagctggccagaaaggaggccgaggccagcagaaagaagcacgagctggagatggacctggagagcctggaggccgccaaccagagcctgcaggccgacctgaagctggccttcaagagaatcggcgacctgcaggccgccatcgaggacgagatggagagcgacgagaacgaggacctgatcaacagcgagggcgacagcgacgtggacagcgagctggaggacagagtggacggcgtgaagagctggctgagcaagaacaagggccccagcaaggccgccagcgacgacggcagcctgaagagcagcagccccaccagctactggaagagcctggcccccgacagaagcgacgacgagcacgaccccctggacaacaccagcagacccagatacagccacagctacctgagcgacagcgacaccgaggccaagctgaccgagaccaacgcctag

SEQ ID NO: 90087 - DNA, 6120 bp, synthetic construct
  misc_feature 1..6120: note = Description of Artificial Sequence: Synthetic coding sequence
  source 1..6120: mol_type = other DNA
atgttcaacctgatgaagaaggacaaggacaaggacggcggcagaaaggagaagaaggagaagaaggagaagaaggagagaatgagcgccgccgagctgagaagcctggaggagatgagcctgagaagaggcttcttcaacctgaacagaagcagcaagagagagagcaagaccagactggagatcagcaaccccatccccatcaaggtggccagcggcagcgacctgcacctgaccgacatcgacagcgacagcaacagaggcagcgtgatcctggacagcggccacctgagcaccgccagcagcagcgacgacctgaagggcgaggagggcagcttcagaggcagcgtgctgcagagagccgccaagttcggcagcctggccaagcagaacagccagatgatcgtgaagagattcagcttcagccagagaagcagagacgagagcgccagcgagaccagcacccccagcgagcacagcgccgcccccagcccccaggtggaggtgagaaccctggagggccagctggtgcagcaccccggccccggcatccccagacccggccacagaagcagagcccccgagctggtgaccaagaagttccccgtggacctgagactgccccccgtggtgcccctgcccccccccaccctgagagagctggagctgcagagaagacccaccggcgacttcggcttcagcctgagaagaaccaccatgctggacagaggccccgagggccaggcctgcagaagagtggtgcacttcgccgagcccggcgccggcaccaaggacctggccctgggcctggtgcccggcgacagactggtggagatcaacggccacaacgtggagagcaagagcagagacgagatcgtggagatgatcagacagagcggcgacagcgtgagactgaaggtgcagcccatccccgagctgagcgagctgagcagaagctggctgagaagcggcgagggccccagaagagagcccagcgacgccaagaccgaggagcagatcgccgccgaggaggcctggaacgagaccgagaaggtgtggctggtgcacagagacggcttcagcctggccagccagctgaagagcgaggagctgaacctgcccgagggcaaggtgagagtgaagctggaccacgacggcgccatcctggacgtggacgaggacgacgtggagaaggccaacgcccccagctgcgacagactggaggacctggccagcctggtgtacctgaacgagagcagcgtgctgcacaccctgagacagagatacggcgccagcctgctgcacacctacgccggccccagcctgctggtgctgggccccagaggcgcccccgccgtgtacagcgagaaggtgatgcacatgttcaagggctgcagaagagaggacatggccccccacatctacgccgtggcccagaccgcctacagagccatgctgatgagcagacaggaccagagcatcatcctgctgggcagcagcggcagcggcaagaccaccagctgccagcacctggtgcagtacctggccaccatcgccggcatcagcggcaacaaggtgttcagcgtggagaagtggcaggccctgtacaccctgctggaggccttcggcaacagccccaccatcatcaacggcaacgccaccagattcagccagatcctgagcctggacttcgaccaggccggccaggtggccagcgccagcatccagaccatgctgctggagaagctgagagtggccagaagacccgccagcgaggccaccttcaacgtgttctactacctgctggcctgcggcgacggcaccctgagaaccgagctgcacctgaaccacctggccgagaacaacgtgttcggcatcgtgcccctggccaagcccgaggagaagcagaaggccgcccagcagttcagcaagctgcaggccgccatgaaggtgctgggcatcagccccgacgagcagaaggcctgctggttcatcctggccgccatctaccacctgggcgccgccggcgccaccaaggaggccgccgaggccggcagaaagcagttcgccagacacgagtgggcccagaaggccgcctacctgctgggctgcagcctggaggagctgagcagcgccatcttcaagcaccagcacaagggcggcaccctgcagagaagcaccagcttcagacagggccccgaggagagcggcctgggcgacggcaccggccccaagctgagcgccctggagtgcctggagggcatggccgccggcctgtacagcgagctgttcaccctgctggtgagcctggtgaacagagccctgaagagcagccagcacagcctgtgcagcatgatgatcgtggacacccccggcttccagaaccccgagcagggcggcagcgccagaggcgccagcttcgaggagctgtgccacaactacacccaggacagactgcagagactgttccacgagagaaccttcgtgcaggagctggagagatacaaggaggagaacatcgagctggccttcgacgacctggagccccccaccgacgacagcgtggccgccgtggaccaggccagccaccagagcctggtgagaagcctggccagaaccgacgaggccagaggcctgctgtggctgctggaggaggaggccctggtgcccggcgccagcgaggacaccctgctggagagactgttcagctactacggcccccaggagggcgacaagaagggccagagccccctgctgcacagcagcaagccccaccacttcctgctgggccacagccacggcaccaactgggtggagtacaacgtgaccggctggctgaactacaccaagcagaaccccgccacccagaacgcccccagactgctgcaggacagccagaagaagatcatcagcaacctgttcctgggcagagccggcagcgccaccgtgctgagcggcagcatcgccggcctggagggcggcagccagctggccctgagaagagccaccagcatgagaaagaccttcaccaccggcatggccgccgtgaagaagaagagcctgtgcatccagatgaagctgcaggtggacgccctgatcgacaccatcaagaagagcaagctgcacttcgtgcactgcttcctgcccgtggccgagggctgggccggcgagcccagaagcgccagcagcagaagagtgagcagcagcagcgagctggacctgcccagcggcgaccactgcgaggccggcctgctgcagctggacgtgcccctgctgagaacccagctgagaggcagcagactgctggacgccatgagaatgtacagacagggctaccccgaccacatggtgttcagcgagttcagaagaagattcgacgtgctggccccccacctgaccaagaagcacggcagaaactacatcgtggtggacgagagaagagccgtggaggagctgctggagtgcctggacctggagaagagcagctgctgcatgggcctgagcagagtgttcttcagagccggcaccctggccagactggaggagcagagagacgagcagaccagcagaaacctgaccctgttccaggccgcctgcagaggctacctggccagacagcacttcaagaagagaaagatccaggacctggccatcagatgcgtgcagaagaacatcaagaagaacaagggcgtgaaggactggccctggtggaagctgttcaccaccgtgagacccctgatcgaggtgcagctgagcgaggagcagatcagaaacaaggacgaggagatccagcagctgagaagcaagctggagaaggccgagaaggagagaaacgagctgagactgaacagcgacagactggagagcagaatcagcgagctgaccagcgagctgaccgacgagagaaacaccggcgagagcgccagccagctgctggacgccgagaccgccgagagactgagagccgagaaggagatgaaggagctgcagacccagtacgacgccctgaagaagcagatggaggtgatggagatggaggtgatggaggccagactgatcagagccgccgagatcaacggcgaggtggacgacgacgacgccggcggcgagtggagactgaagtacgagagagccgtgagagaggtggacttcaccaagaagagactgcagcaggagttcgaggacaagctggaggtggagcagcagaacaagagacagctggagagaagactgggcgacctgcaggccgacagcgaggagagccagagagccctgcagcagctgaagaagaagtgccagagactgaccgccgagctgcaggacaccaagctgcacctggagggccagcaggtgagaaaccacgagctggagaagaagcagagaagattcgacagcgagctgagccaggcccacgaggaggcccagagagagaagctgcagagagagaagctgcagagagagaaggacatgctgctggccgaggccttcagcctgaagcagcagctggaggagaaggacatggacatcgccggcttcacccagaaggtggtgagcctggaggccgagctgcaggacatcagcagccaggagagcaaggacgaggccagcctggccaaggtgaagaagcagctgagagacctggaggccaaggtgaaggaccaggaggaggagctggacgagcaggccggcaccatccagatgctggagcaggccaagctgagactggagatggagatggagagaatgagacagacccacagcaaggagatggagagcagagacgaggaggtggaggaggccagacagagctgccagaagaagctgaagcagatggaggtgcagctggaggaggagtacgaggacaagcagaaggtgctgagagagaagagagagctggagggcaagctggccaccctgagcgaccaggtgaacagaagagacttcgagagcgagaagagactgagaaaggacctgaagagaaccaaggccctgctggccgacgcccagctgatgctggaccacctgaagaacagcgcccccagcaagagagagatcgcccagctgaagaaccagctggaggagagcgagttcacctgcgccgccgccgtgaaggccagaaaggccatggaggtggagatcgaggacctgcacctgcagatcgacgacatcgccaaggccaagaccgccctggaggagcagctgagcagactgcagagagagaagaacgagatccagaacagactggaggaggaccaggaggacatgaacgagctgatgaagaagcacaaggccgccgtggcccaggccagcagagacctggcccagatcaacgacctgcaggcccagctggaggaggccaacaaggagaagcaggagctgcaggagaagctgcaggccctgcagagccaggtggagttcctggagcagagcatggtggacaagagcctggtgagcagacaggaggccaagatcagagagctggagaccagactggagttcgagagaacccaggtgaagagactggagagcctggccagcagactgaaggagaacatggagaagctgaccgaggagagagaccagagaatcgccgccgagaacagagagaaggagcagaacaagagactgcagagacagctgagagacaccaaggaggagatgggcgagctggccagaaaggaggccgaggccagcagaaagaagcacgagctggagatggacctggagagcctggaggccgccaaccagagcctgcaggccgacctgaagctggccttcaagagaatcggcgacctgcaggccgccatcgaggacgagatggagagcgacgagaacgaggacctgatcaacagcgagggcgacagcgacgtggacagcgagctggaggacagagtggacggcgtgaagagctggctgagcaagaacaagggccccagcaaggccgccagcgacgacggcagcctgaagagcagcagccccaccagctactggaagagcctggcccccgacagaagcgacgacgagcacgaccccctggacaacaccagcagacccagatacagccacagctacctgagcgacagcgacaccgaggccaagctgaccgagaccaacgcctag

SEQ ID NO: 90088 - DNA, 6009 bp, synthetic construct
  misc_feature 1..6009: note = Description of Artificial Sequence: Synthetic coding sequence
  source 1..6009: mol_type = other DNA
atgttcaacctgatgaagaaggacaaggacaaggacggcggcagaaaggagaagaaggagaagaaggagaagaaggagagaatgagcgccgccgagctgagaagcctggaggagatgagcctgagaagaggcttcttcaacctgaacagaagcagcaagagagagagcaagaccagactggagatcagcaaccccatccccatcaaggtggccagcggcagcgacctgcacctgaccgacatcgacagcgacagcaacagaggcagcgtgatcctggacagcggccacctgagcaccgccagcagcagcgacgacctgaagggcgaggagggcagcttcagaggcagcgtgctgcagagagccgccaagttcggcagcctggccaagcagaacagccagatgatcgtgaagagattcagcttcagccagagaagcagagacgagagcgccagcgagaccagcacccccagcgagcacagcgccgcccccagcccccaggtggaggtgagaaccctggagggccagctggtgcagcaccccggccccggcatccccagacccggccacagaagcagagcccccgagctggtgaccaagaagttccccgtggacctgagactgccccccgtggtgcccctgcccccccccaccctgagagagctggagctgcagagaagacccaccggcgacttcggcttcagcctgagaagaaccaccatgctggacagaggccccgagggccaggcctgcagaagagtggtgcacttcgccgagcccggcgccggcaccaaggacctggccctgggcctggtgcccggcgacagactggtggagatcaacggccacaacgtggagagcaagagcagagacgagatcgtggagatgatcagacagagcggcgacagcgtgagactgaaggtgcagcccatccccgagctgagcgagctgagcagaagctggctgagaagcggcgagggccccagaagagagcccagcgacgccaagaccgaggagcagatcgccgccgaggaggcctggaacgagaccgagaaggtgtggctggtgcacagagacggcttcagcctggccagccagctgaagagcgaggagctgaacctgcccgagggcaaggtgagagtgaagctggaccacgacggcgccatcctggacgtggacgaggacgacgtggagaaggccaacgcccccagctgcgacagactggaggacctggccagcctggtgtacctgaacgagagcagcgtgctgcacaccctgagacagagatacggcgccagcctgctgcacacctacgccggccccagcctgctggtgctgggccccagaggcgcccccgccgtgtacagcgagaaggtgatgcacatgttcaagggctgcagaagagaggacatggccccccacatctacgccgtggcccagaccgcctacagagccatgctgatgagcagacaggaccagagcatcatcctgctgggcagcagcggcagcggcaagaccaccagctgccagcacctggtgcagtacctggccaccatcgccggcatcagcggcaacaaggtgttcagcgtggagaagtggcaggccctgtacaccctgctggaggccttcggcaacagccccaccatcatcaacggcaacgccaccagattcagccagatcctgagcctggacttcgaccaggccggccaggtggccagcgccagcatccagaccatgctgctggagaagctgagagtggccagaagacccgccagcgaggccaccttcaacgtgttctactacctgctggcctgcggcgacggcaccctgagaaccgagctgcacctgaaccacctggccgagaacaacgtgttcggcatcgtgcccctggccaagcccgaggagaagcagaaggccgcccagcagttcagcaagctgcaggccgccatgaaggtgctgggcatcagccccgacgagcagaaggcctgctggttcatcctggccgccatctaccacctgggcgccgccggcgccaccaaggaggccgccgaggccggcagaaagcagttcgccagacacgagtgggcccagaaggccgcctacctgctgggctgcagcctggaggagctgagcagcgccatcttcaagcaccagcacaagggcggcaccctgcagagaagcaccagcttcagacagggccccgaggagagcggcctgggcgacggcaccggccccaagctgagcgccctggagtgcctggagggcatggccgccggcctgtacagcgagctgttcaccctgctggtgagcctggtgaacagagccctgaagagcagccagcacagcctgtgcagcatgatgatcgtggacacccccggcttccagaaccccgagcagggcggcagcgccagaggcgccagcttcgaggagctgtgccacaactacacccaggacagactgcagagactgttccacgagagaaccttcgtgcaggagctggagagatacaaggaggagaacatcgagctggccttcgacgacctggagccccccaccgacgacagcgtggccgccgtggaccaggccagccaccagagcctggtgagaagcctggccagaaccgacgaggccagaggcctgctgtggctgctggaggaggaggccctggtgcccggcgccagcgaggacaccctgctggagagactgttcagctactacggcccccaggagggcgacaagaagggccagagccccctgctgcacagcagcaagccccaccacttcctgctgggccacagccacggcaccaactgggtggagtacaacgtgaccggctggctgaactacaccaagcagaaccccgccacccagaacgcccccagactgctgcaggacagccagaagaagatcatcagcaacctgttcctgggcagagccggcagcgccaccgtgctgagcggcagcatcgccggcctggagggcggcagccagctggccctgagaagagccaccagcatgagaaagaccttcaccaccggcatggccgccgtgaagaagaagagcctgtgcatccagatgaagctgcaggtggacgccctgatcgacaccatcaagaagagcaagctgcacttcgtgcactgcttcctgcccgtggccgagggctgggccggcgagcccagaagcgccagcagcagaagagtgagcagcagcagcgagctggacctgcccagcggcgaccactgcgaggccggcctgctgcagctggacgtgcccctgctgagaacccagctgagaggcagcagactgctggacgccatgagaatgtacagacagggctaccccgaccacatggtgttcagcgagttcagaagaagattcgacgtgctggccccccacctgaccaagaagcacggcagaaactacatcgtggtggacgagagaagagccgtggaggagctgctggagtgcctggacctggagaagagcagctgctgcatgggcctgagcagagtgttcttcagagccggcaccctggccagactggaggagcagagagacgagcagaccagcagaaacctgaccctgttccaggccgcctgcagaggctacctggccagacagcacttcaagaagagaaagatccaggacctggccatcagatgcgtgcagaagaacatcaagaagaacaagggcgtgaaggactggccctggtggaagctgttcaccaccgtgagacccctgatcgaggtgcagctgagcgaggagcagatcagaaacaaggacgaggagatccagcagctgagaagcaagctggagaaggccgagaaggagagaaacgagctgagactgaacagcgacagactggagagcagaatcagcgagctgaccagcgagctgaccgacgagagaaacaccggcgagagcgccagccagctgctggacgccgagaccgccgagagactgagagccgagaaggagatgaaggagctgcagacccagtacgacgccctgaagaagcagatggaggtgatggagatggaggtgatggaggccagactgatcagagccgccgagatcaacggcgaggtggacgacgacgacgccggcggcgagtggagactgaagtacgagagagccgtgagagaggtggacttcaccaagaagagactgcagcaggagttcgaggacaagctggaggtggagcagcagaacaagagacagctggagagaagactgggcgacctgcaggccgacagcgaggagagccagagagccctgcagcagctgaagaagaagtgccagagactgaccgccgagctgcaggacaccaagctgcacctggagggccagcaggtgagaaaccacgagctggagaagaagcagagaagattcgacagcgagctgagccaggcccacgaggaggcccagagagagaagctgcagagagagaagctgcagagagagaaggacatgctgctggccgaggccttcagcctgaagcagcagctggaggagaaggacatggacatcgccggcttcacccagaaggtggtgagcctggaggccgagctgcaggacatcagcagccaggagagcaaggacgaggccagcctggccaaggtgaagaagcagctgagagacctggaggccaaggtgaaggaccaggaggaggagctggacgagcaggccggcaccatccagatgctggagcagctgaagcagatggaggtgcagctggaggaggagtacgaggacaagcagaaggtgctgagagagaagagagagctggagggcaagctggccaccctgagcgaccaggtgaacagaagagacttcgagagcgagaagagactgagaaaggacctgaagagaaccaaggccctgctggccgacgcccagctgatgctggaccacctgaagaacagcgcccccagcaagagagagatcgcccagctgaagaaccagctggaggagagcgagttcacctgcgccgccgccgtgaaggccagaaaggccatggaggtggagatcgaggacctgcacctgcagatcgacgacatcgccaaggccaagaccgccctggaggagcagctgagcagactgcagagagagaagaacgagatccagaacagactggaggaggaccaggaggacatgaacgagctgatgaagaagcacaaggccgccgtggcccaggccagcagagacctggcccagatcaacgacctgcaggcccagctggaggaggccaacaaggagaagcaggagctgcaggagaagctgcaggccctgcagagccaggtggagttcctggagcagagcatggtggacaagagcctggtgagcagacaggaggccaagatcagagagctggagaccagactggagttcgagagaacccaggtgaagagactggagagcctggccagcagactgaaggagaacatggagaagctgaccgaggagagagaccagagaatcgccgccgagaacagagagaaggagcagaacaagagactgcagagacagctgagagacaccaaggaggagatgggcgagctggccagaaaggaggccgaggccagcagaaagaagcacgagctggagatggacctggagagcctggaggccgccaaccagagcctgcaggccgacctgaagctggccttcaagagaatcggcgacctgcaggccgccatcgaggacgagatggagagcgacgagaacgaggacctgatcaacagcgagggcgacagcgacgtggacagcgagctggaggacagagtggacggcgtgaagagctggctgagcaagaacaagggccccagcaaggccgccagcgacgacggcagcctgaagagcagcagccccaccagctactggaagagcctggcccccgacagaagcgacgacgagcacgaccccctggacaacaccagcagacccagatacagccacagctacctgagcgacagcgacaccgaggccaagctgaccgagaccaacgcctag

SEQ ID NO: 90089 - DNA, 2808 bp, synthetic construct; identical to SEQ ID NO: 90086
  misc_feature 1..2808: note = Description of Artificial Sequence: Synthetic coding sequence
  source 1..2808: mol_type = other DNA

SEQ ID NO: 90090 - DNA, 963 bp, synthetic construct
  misc_feature 1..963: note = Description of Artificial Sequence: Synthetic coding sequence
  source 1..963: mol_type = other DNA
atgaccttcgtgctgctgagcagcagccagctggaggagcagctgagcagactgcagagagagaagaacgagatccagaacagactggaggaggaccaggaggacatgaacgagctgatgaagaagcacaaggccgccgtggcccaggccagcagagacctggcccagatcaacgacctgcaggcccagctggaggaggccaacaaggagaagcaggagctgcaggagaagctgcaggccctgcagagccaggtggagttcctggagcagagcatggtggacaagagcctggtgagcagacaggaggccaagatcagagagctggagaccagactggagttcgagagaacccaggtgaagagactggagagcctggccagcagactgaaggagaacatggagaagctgaccgaggagagagaccagagaatcgccgccgagaacagagagaaggagcagaacaagagactgcagagacagctgagagacaccaaggaggagatgggcgagctggccagaaaggaggccgaggccagcagaaagaagcacgagctggagatggacctggagagcctggaggccgccaaccagagcctgcaggccgacctgaagctggccttcaagagaatcggcgacctgcaggccgccatcgaggacgagatggagagcgacgagaacgaggacctgatcaacagcgagggcgacagcgacgtggacagcgagctggaggacagagtggacggcgtgaagagctggctgagcaagaacaagggccccagcaaggccgccagcgacgacggcagcctgaagagcagcagccccaccagctactggaagagcctggcccccgacagaagcgacgacgagcacgaccccctggacaacaccagcagacccagatacagccacagctacctgagcgacagcgacaccgaggccaagctgaccgagaccaacgcctag

SEQ ID NO: 90091 - DNA, 7704 bp, synthetic construct
  misc_feature 1..7704: note = Description of Artificial Sequence: Synthetic coding sequence
  source 1..7704: mol_type = other DNA
atggccatcagcagcagactggccctgtgggagcagaagatcagagaggaggacaagagccccccccccagcagccccccccccctgttcagcgtgatccccggcggcttcatcaagcagctggtgagaggcaccgagaaggaggccaaggaggccagacagagaaagcagctggccgtggccagccccgagagagagatccccgagatcagcatcagccagcccaacagcaagagcagcagcggcaccagaagcggcagccagcagatcagccaggacgaccagagcagcagccccggcagcagcgacatcctgggcaaggagagcgagggcagcagaagccccgaccccgagcagatgaccagcatcaacggcgagaaggcccaggagctgggcagcagcgccacccccaccaagaagaccgtgcccttcaagagaggcgtgagaagaggcgacgtgctgctgatggtggccaagctggaccccgacagcgccaagcccgagaagacccacccccacgacgcccccccctgcaagaccagcccccccgccaccgacaccggcaaggagaagaagggcgagaccagcagaaccccctgcggcagccaggccagcaccgagatcctggcccccaaggccgagaagaccagaaccggcggcctgggcgaccccggccagggcaccgtggccctgaagaagggcgaggagggccagagcatcgtgggcaagggcctgggcacccccaagaccaccgagctgaaggaggccgagccccagggcaaggacagacagggcaccagaccccaggcccagggccccggcgagggcgtgagacccggcaaggccgagaaggagggcgccgagcccaccaacaccgtggagaagggcaacgtgagcaaggacgtgggcagcgagggcaagcacgtgagaccccagatccccggcagaaagtggggcggcttcctgggcagaagaagcaagtgggacggcccccagaacaagaaggacaaggagggcgtgctgctgagcaaggccgagaagaccggcgagccccagacccagatggagaagaccagccaggtgcagggcgagctgggcgacgacctgagaatgggcgagaaggccggcgagctgagaagcaccaccggcaaggccggcgagagctgggacaagaaggagaagatgggccagccccagggcaagagcggcaacgccggcgaggccagaagccagaccgagaagggctgcgaggcccccaaggaggtgagcaccatggtggagagccccgccgcccccggcaagggcggctggcccggcagcagaggccaggaggccgaggagccctgcagcagagccggcgacggcgccggcgccctggagaccgagctggagggccccagccagcccgccctggagaaggacgccgagagacccagaatcagaaaggagaaccaggacggccccgccccccaggaggagggcaagggcggccagagcagagacagcgaccaggcccccgaggacagatggtacgaggccgagaaggtgtggctggcccagaaggacggcttcaccctggccaccgtgctgaagcccgacgagggcaccgccgacctgcccgccggcagagtgagactgtggatcgacgccgacaagaccatcaccgaggtggacgaggagcacgtgcacagagccaacccccccgagctggaccaggtggaggacctggccagcctgatcagcgtgaacgagagcagcgtgctgaacaccctgctgcagagatacaaggcccagctgctgcacacctgcaccggccccgacctgatcgtgctgcagcccagaggccccagcgtgcccagcgccggcaaggtgcccaagggcagaagagacggcctgcccgcccacatcggcagcatggcccagagagcctactgggccctgctgaaccagagaagagaccagagcatcgtggccctgggctggagcggcgccggcaagaccacctgctgcgagcaggtgctggagcacctggtgggcatggccggcagcgtggacggcagagtgagcgtggagaagatcagagccaccttcaccgtgctgagagccttcggcagcgtgagcatggcccacagcagaagcgccaccagattcagcatggtgatgagcctggacttcaacgccaccggcagaatcaccgccgcccagctgcagaccatgctgctggagaagagcagagtggccagacagcccgagggcgagagcaacttcctggtgttcagccagatgctggccggcctggacctggacctgagaaccgagctgaacctgcaccagatggccgacagcagcagcttcggcatgggcgtgtggagcaagcccgaggacaagcagaaggccgccgccgccttcgcccagctgcagggcgccatggagatgctgggcatcagcgagagcgagcagagagccgtgtggagagtgctggccgccatctaccacctgggcgccgccggcgcctgcaaggtgggcagaaagcagttcatgagattcgagtgggccaactacgccgccgaggccctgggctgcgagtacgaggagctgaacaccgccaccttcaagcaccacctgagacagatcatccagcagatgaccttcggccccagcagatggggcctggaggacgaggagaccagcagcggcctgaagatgaccggcgtggactgcgtggagggcatggccagcggcctgtaccaggagctgttcgccgccgtggtgagcctgatcaacagaagcttcagcagccaccacctgagcatggccagcatcatggtggtggacagccccggcttccagaaccccagacaccagggcaaggacagagccgccaccttcgaggagctgtgccacaactacgcccacgagagactgcagctgctgttctaccagagaaccttcgtgagcaccctgcagagataccaggaggagggcgtgcccgtgcagttcgacctgcccgaccccagccccggcaccaccgtggccgtggtggaccagaaccccagccaggtgagactgcccgccggcggcggcgcccaggacgccagaggcctgttctgggtgctggacgaggaggtgcacgtggagggcagcagcgacagcgtggtgctggagagactgtgcgccgccttcgagaagaagggcgccggcaccgagggcagcagcgccctgagaacctgcgagcagcccctgcagtgcgagatcttccaccagctgggctgggaccccgtgagatacgacctgaccggctggctgcacagagccaagcccaacctgagcgccctggacgccccccaggtgctgcaccagagcaagagagaggagctgagaagcctgttccaggccagagccaagctgccccccgtgtgcagagccgtggccggcctggagggcaccagccagcaggccctgcagagaagcagaatggtgagaagaaccttcgccagcagcctggccgccgtgagaagaaaggccccctgcagccagatcaagctgcagatggacgccctgaccagcatgatcaagagaagcagactgcacttcatccactgcctggtgcccaaccccgtggtggagagcagaagcggccaggagagccccccccccccccagcccggcagagacaagcccggcgccggcggccccctggccctggacatccccgccctgagagtgcagctggccggcttccacatcctggaggccctgagactgcacagaaccggctacgccgaccacatgggcctgaccagattcagaagacagttccaggtgctggacgcccccctgctgaagaagctgatgagcaccagcgagggcatcgacgagagaaaggccgtggaggagctgctggagaccctggacctggagaagaaggccgtggccgtgggccacagccaggtgttcctgaaggccggcgtgatcagcagactggagaagcagagagagaagctggtgagccagagcatcgtgctgttccaggccgcctgcaagggcttcctgagcagacaggagttcaagaagctgaagatcagaagactggccgcccagtgcatccagaagaacgtggccgtgttcctggccgtgaaggactggccctggtggcagctgctgggcagcctgcagcccctgctgagcgccaccatcggcaccgagcagctgagagccaaggaggaggagctgaccaccctgagaagaaagctggagaagagcgagaagctgagaaacgagctgagacagaacaccgacctgctggagagcaagatcgccgacctgaccagcgacctggccgacgagagattcaagggcgacgtggcctgccaggtgctggagagcgagagagccgagagactgcaggccttcagagaggtgcaggagctgaagagcaagcacgagcaggtgcagaagaagctgggcgacgtgaacaagcagctggaggaggcccagcagaagatccagctgaacgacctggagagaaaccccaccggcggcgccgacgagtggcagatgagattcgactgcgcccagatggagaacgagttcctgagaaagagactgcagcagtgcgaggagagactggacagcgagctgaccgccagaaaggagctggagcagaagctgggcgagctgcagagcgcctacgacggcgccaagaagatggcccaccagctgaagagaaagtgccaccacctgacctgcgacctggaggacacctgcgtgctgctggagaaccagcagagcagaaaccacgagctggagaagaagcagaagaagttcgacctgcagctggcccaggccctgggcgagagcgtgttcgagaagggcctgagagagaaggtgacccaggagaacaccagcgtgagatgggagctgggccagctgcagcagcagctgaagcagaaggagcaggaggccagccagctgaagcagcaggtggagatgctgcaggaccacaagagagagctgctgggcagccccagcctgggcgagaactgcgtggccggcctgaaggagagactgtggaagctggagagcagcgccctggagcagcagaagatccagagccagcaggagaacaccatcaagcagctggagcagctgagacagagattcgagctggagatcgagagaatgaagcagatgcaccagaaggacagagaggaccaggaggaggagctggaggacgtgagacagagctgccagaagagactgcaccagctggagatgcagctggagcaggagtacgaggagaagcagatggtgctgcacgagaagcaggacctggagggcctgatcggcaccctgtgcgaccagatcggccacagagacttcgacgtggagaagagactgagaagagacctgagaagaacccacgccctgctgagcgacgtgcagctgctgctgggcaccatggaggacggcaagaccagcgtgagcaaggaggagctggagaaggtgcacagccagctggagcagagcgaggccaagtgcgaggaggccctgaagacccagaaggtgctgaccgccgacctggagagcatgcacagcgagctggagaacatgaccagaaacaagagcctggtggacgagcagctgtacagactgcagttcgagaaggccgacctgctgaagagaatcgacgaggaccaggacgacctgaacgagctgatgcagaagcacaaggacctgatcgcccagagcgccgccgacatcggccagatccaggagctgcagctgcagctggaggaggccaagaaggagaagcacaagctgcaggagcagctgcaggtggcccagatgagaatcgagtacctggagcagagcaccgtggacagagccatcgtgagcagacaggaggccgtgatctgcgacctggagaacaagaccgagttccagaaggtgcagatcaagagattcgaggtgctggtgatcagactgagagacagcctgatcaagatgggcgaggagctgagccaggccgccaccagcgagagccagcagagagagagcagccagtactaccagagaagactggaggagctgaaggccgacatggaggagctggtgcagagagaggccgaggccagcagaagatgcatggagctggagaagtacgtggaggagctggccgccgtgagacagaccctgcagaccgacctggagaccagcatcagaagaatcgccgacctgcaggccgccctggaggaggtggccagcagcgacagcgacaccgagagcgtgcagaccgccgtggactgcggcagcagcggcagaaaggagatggacaacgtgagcatcctgagcagccagcccgagggcagcctgcagagctggctgagctgcaccctgagcctggccaccgacaccatgagaacccccagcagacagagcgccaccagcagcagaatcctgagccccagaatcaacgaggaggccggcgacaccgagagaacccagagcgccctggccctgagcagagccagaagcaccaacgtgcacagcaagaccagcggcgacaagcccgtgagcccccacttcgtgagaagacagaagtactgccacttcggcgacggcgaggtgctggccgtgcagagaaagagcaccgagagactggagcccgccagcagccccctggccagcagaagcaccaacaccagccccctgagcagagagaagctgcccagccccagcgccgccctgagcgagttcgtggagggcctgagaagaaagagagcccagagaggccagggcagcaccctgggcctggaggactggcccaccctgcccatctaccagaccaccggcgccagcaccctgagaagaggcagagccggcagcgacgagggcaacctgagcctgagagtgggcgccaagagccccctggagatcgagggcgccgccggcggcctgctgagaagcaccagcctgaagtgcatcagcagcgacggcgtgggcggcaccaccctgctgcccgagaagagcaagacccagttcagcagctgcgagagcctgctggagagcagacccagcatgggcagaaagctgagcagccccaccacccccagagacatgctgctgagccccaccctgagacccagaagaagatgcctggagagcagcgtggacgacgccggctgccccgacctgggcaaggagcccctggtgttccagaacagacagttcgcccacctgatggaggagcccctgggcagcgaccccttcagctggaagctgcccagcctggactacgagagaaagaccaaggtggacttcgacgacttcctgcccgccatcagaaagccccagacccccaccagcctggccggcagcgccaagggcggccaggacggcagccagagaagcagcatccacttcgagaccgaggaggccaacagaagcttcctgagcggcatcaagaccatcctgaagaagagccccgagcccaaggaggaccccgcccacctgagcgacagcagcagcagcagcggcagcatcgtgagcttcaagagcgccgacagcatcaagagcagacccggcatccccagactggccggcgacggcggcgagagaaccagccccgagagaagagagcccggcaccggcagaaaggacgacgacgtggccagcatcatgaagaagtacctgcagaagtag

SEQ ID NO: 90092 - DNA, 7707 bp, synthetic construct
  misc_feature 1..7707: note = Description of Artificial Sequence: Synthetic coding sequence
  source 1..7707: mol_type = other DNA
atggccatcagcagcagactggccctgtgggagcagaagatcagagaggaggacaagagccccccccccagcagccccccccccctgttcagcgtgatccccggcggcttcatcaagcagctggtgagaggcaccgagaaggaggccaaggaggccagacagagaaagcagctggccgtggccagccccgagagagagatccccgagatcagcatcagccagcccaacagcaagagcagcagcggcaccagaagcggcagccagcagatcagccaggacgaccagagcagcagccccggcagcagcgacatcctgggcaaggagagcgagggcagcagaagccccgaccccgagcagatgaccagcatcaacggcgagaaggcccaggagctgggcagcagcgccacccccaccaagaagaccgtgcccttcaagagaggcgtgagaagaggcgacgtgctgctgatggtggccaagctggaccccgacagcgccaagcccgagaagacccacccccacgacgcccccccctgcaagaccagcccccccgccaccgacaccggcaaggagaagaagggcgagaccagcagaaccccctgcggcagccaggccagcaccgagatcctggcccccaaggccgagaagaccagaaccggcggcctgggcgaccccggccagggcaccgtggccctgaagaagggcgaggagggccagagcatcgtgggcaagggcctgggcacccccaagaccaccgagctgaaggaggccgagccccagggcaaggacagacagggcaccagaccccaggcccagggccccggcgagggcgtgagacccggcaaggccgagaaggagggcgccgagcccaccaacaccgtggagaagggcaacgtgagcaaggacgtgggcagcgagggcaagcacgtgagaccccagatccccggcagaaagtggggcggcttcctgggcagaagaagcaagtgggacggcccccagaacaagaaggacaaggagggcgtgctgctgagcaaggccgagaagaccggcgagccccagacccagatggagaagaccagccaggtgcagggcgagctgggcgacgacctgagaatgggcgagaaggccggcgagctgagaagcaccaccggcaaggccggcgagagctgggacaagaaggagaagatgggccagccccagggcaagagcggcaacgccggcgaggccagaagccagaccgagaagggctgcgaggcccccaaggaggtgagcaccatggtggagagccccgccgcccccggcaagggcggctggcccggcagcagaggccaggaggccgaggagccctgcagcagagccggcgacggcgccggcgccctggagaccgagctggagggccccagccagcccgccctggagaaggacgccgagagacccagaatcagaaaggagaaccaggacggccccgccccccaggaggagggcaagggcggccagagcagagacagcgaccaggcccccgaggacagatggtacgaggccgagaaggtgtggctggcccagaaggacggcttcaccctggccaccgtgctgaagcccgacgagggcaccgccgacctgcccgccggcagagtgagactgtggatcgacgccgacaagaccatcaccgaggtggacgaggagcacgtgcacagagccaacccccccgagctggaccaggtggaggacctggccagcctgatcagcgtgaacgagagcagcgtgctgaacaccctgctgcagagatacaaggcccagctgctgcacacctgcaccggccccgacctgatcgtgctgcagcccagaggccccagcgtgcccagcgccggcaaggtgcccaagggcagaagagacggcctgcccgcccacatcggcagcatggcccagagagcctactgggccctgctgaaccagagaagagaccagagcatcgtggccctgggctggagcggcgccggcaagaccacctgctgcgagcaggtgctggagcacctggtgggcatggccggcagcgtggacggcagagtgagcgtggagaagatcagagccaccttcaccgtgctgagagccttcggcagcgtgagcatggcccacagcagaagcgccaccagattcagcatggtgatgagcctggacttcaacgccaccggcagaatcaccgccgcccagctgcagaccatgctgctggagaagagcagagtggccagacagcccgagggcgagagcaacttcctggtgttcagccagatgctggccggcctggacctggacctgagaaccgagctgaacctgcaccagatggccgacagcagcagcttcggcatgggcgtgtggagcaagcccgaggacaagcagaaggccgccgccgccttcgcccagctgcagggcgccatggagatgctgggcatcagcgagagcgagcagagagccgtgtggagagtgctggccgccatctaccacctgggcgccgccggcgcctgcaaggtgggcagaaagcagttcatgagattcgagtgggccaactacgccgccgaggccctgggctgcgagtacgaggagctgaacaccgccaccttcaagcaccacctgagacagatcatccagcagatgaccttcggccccagcagatggggcctggaggacgaggagaccagcagcggcctgaagatgaccggcgtggactgcgtggagggcatggccagcggcctgtaccaggagctgttcgccgccgtggtgagcctgatcaacagaagcttcagcagccaccacctgagcatggccagcatcatggtggtggacagccccggcttccagaaccccagacaccagggcaaggacagagccgccaccttcgaggagctgtgccacaactacgcccacgagagactgcagctgctgttctaccagagaaccttcgtgagcaccctgcagagataccaggaggagggcgtgcccgtgcagttcgacctgcccgaccccagccccggcaccaccgtggccgtggtggaccagaaccccagccagcaggtgagactgcccgccggcggcggcgcccaggacgccagaggcctgttctgggtgctggacgaggaggtgcacgtggagggcagcagcgacagcgtggtgctggagagactgtgcgccgccttcgagaagaagggcgccggcaccgagggcagcagcgccctgagaacctgcgagcagcccctgcagtgcgagatcttccaccagctgggctgggaccccgtgagatacgacctgaccggctggctgcacagagccaagcccaacctgagcgccctggacgccccccaggtgctgcaccagagcaagagagaggagctgagaagcctgttccaggccagagccaagctgccccccgtgtgcagagccgtggccggcctggagggcaccagccagcaggccctgcagagaagcagaatggtgagaagaaccttcgccagcagcctggccgccgtgagaagaaaggccccctgcagccagatcaagctgcagatggacgccctgaccagcatgatcaagagaagcagactgcacttcatccactgcctggtgcccaaccccgtggtggagagcagaagcggccaggagagccccccccccccccagcccggcagagacaagcccggcgccggcggccccctggccctggacatccccgccctgagagtgcagctggccggcttccacatcctggaggccctgagactgcacagaaccggctacgccgaccacatgggcctgaccagattcagaagacagttccaggtgctggacgcccccctgctgaagaagctgatgagcaccagcgagggcatcgacgagagaaaggccgtggaggagctgctggagaccctggacctggagaagaaggccgtggccgtgggccacagccaggtgttcctgaaggccggcgtgatcagcagactggagaagcagagagagaagctggtgagccagagcatcgtgctgttccaggccgcctgcaagggcttcctgagcagacaggagttcaagaagctgaagatcagaagactggccgcccagtgcatccagaagaacgtggccgtgttcctggccgtgaaggactggccctggtggcagctgctgggcagcctgcagcccctgctgagcgccaccatcggcaccgagcagctgagagccaaggaggaggagctgaccaccctgagaagaaagctggagaagagcgagaagctgagaaacgagctgagacagaacaccgacctgctggagagcaagatcgccgacctgaccagcgacctggccgacgagagattcaagggcgacgtggcctgccaggtgctggagagcgagagagccgagagactgcaggccttcagagaggtgcaggagctgaagagcaagcacgagcaggtgcagaagaagctgggcgacgtgaacaagcagctggaggaggcccagcagaagatccagctgaacgacctggagagaaaccccaccggcggcgccgacgagtggcagatgagattcgactgcgcccagatggagaacgagttcctgagaaagagactgcagcagtgcgaggagagactggacagcgagctgaccgccagaaaggagctggagcagaagctgggcgagctgcagagcgcctacgacggcgccaagaagatggcccaccagctgaagagaaagtgccaccacctgacctgcgacctggaggacacctgcgtgctgctggagaaccagcagagcagaaaccacgagctggagaagaagcagaagaagttcgacctgcagctggcccaggccctgggcgagagcgtgttcgagaagggcctgagagagaaggtgacccaggagaacaccagcgtgagatgggagctgggccagctgcagcagcagctgaagcagaaggagcaggaggccagccagctgaagcagcaggtggagatgctgcaggaccacaagagagagctgctgggcagccccagcctgggcgagaactgcgtggccggcctgaaggagagactgtggaagctggagagcagcgccctggagcagcagaagatccagagccagcaggagaacaccatcaagcagctggagcagctgagacagagattcgagctggagatcgagagaatgaagcagatgcaccagaaggacagagaggaccaggaggaggagctggaggacgtgagacagagctgccagaagagactgcaccagctggagatgcagctggagcaggagtacgaggagaagcagatggtgctgcacgagaagcaggacctggagggcctgatcggcaccctgtgcgaccagatcggccacagagacttcgacgtggagaagagactgagaagagacctgagaagaacccacgccctgctgagcgacgtgcagctgctgctgggcaccatggaggacggcaagaccagcgtgagcaaggaggagctggagaaggtgcacagccagctggagcagagcgaggccaagtgcgaggaggccctgaagacccagaaggtgctgaccgccgacctggagagcatgcacagcgagctggagaacatgaccagaaacaagagcctggtggacgagcagctgtacagactgcagttcgagaaggccgacctgctgaagagaatcgacgaggaccaggacgacctgaacgagctgatgcagaagcacaaggacctgatcgcccagagcgccgccgacatcggccagatccaggagctgcagctgcagctggaggaggccaagaaggagaagcacaagctgcaggagcagctgcaggtggcccagatgagaatcgagtacctggagcagagcaccgtggacagagccatcgtgagcagacaggaggccgtgatctgcgacctggagaacaagaccgagttccagaaggtgcagatcaagagattcgaggtgctggtgatcagactgagagacagcctgatcaagatgggcgaggagctgagccaggccgccaccagcgagagccagcagagagagagcagccagtactaccagagaagactggaggagctgaaggccgacatggaggagctggtgcagagagaggccgaggccagcagaagatgcatggagctggagaagtacgtggaggagctggccgccgtgagacagaccctgcagaccgacctggagaccagcatcagaagaatcgccgacctgcaggccgccctggaggaggtggccagcagcgacagcgacaccgagagcgtgcagaccgccgtggactgcggcagcagcggcagaaaggagatggacaacgtgagcatcctgagcagccagcccgagggcagcctgcagagctggctgagctgcaccctgagcctggccaccgacaccatgagaacccccagcagacagagcgccaccagcagcagaatcctgagccccagaatcaacgaggaggccggcgacaccgagagaacccagagcgccctggccctgagcagagccagaagcaccaacgtgcacagcaagaccagcggcgacaagcccgtgagcccccacttcgtgagaagacagaagtactgccacttcggcgacggcgaggtgctggccgtgcagagaaagagcaccgagagactggagcccgccagcagccccctggccagcagaagcaccaacaccagccccctgagcagagagaagctgcccagccccagcgccgccctgagcgagttcgtggagggcctgagaagaaagagagcccagagaggccagggcagcaccctgggcctggaggactggcccaccctgcccatctaccagaccaccggcgccagcaccctgagaagaggcagagccggcagcgacgagggcaacctgagcctgagagtgggcgccaagagccccctggagatcgagggcgccgccggcggcctgctgagaagcaccagcctgaagtgcatcagcagcgacggcgtgggcggcaccaccctgctgcccgagaagagcaagacccagttcagcagctgcgagagcctgctggagagcagacccagcatgggcagaaagctgagcagccccaccacccccagagacatgctgctgagccccaccctgagacccagaagaagatgcctggagagcagcgtggacgacgccggctgccccgacctgggcaaggagcccctggtgttccagaacagacagttcgcccacctgatggaggagcccctgggcagcgaccccttcagctggaagctgcccagcctggactacgagagaaagaccaaggtggacttcgacgacttcctgcccgccatcagaaagccccagacccccaccagcctggccggcagcgccaagggcggccaggacggcagccagagaagcagcatccacttcgagaccgaggaggccaacagaagcttcctgagcggcatcaagaccatcctgaagaagagccccgagcccaaggaggaccccgcccacctgagcgacagcagcagcagcagcggcagcatcgtgagcttcaagagcgccgacagcatcaagagcagacccggcatccccagactggccggcgacggcggcgagagaaccagccccgagagaagagagcccggcaccggcagaaaggacgacgacgtggccagcatcatgaagaagtacctgcagaagtag

SEQ ID NO: 90093 - DNA, 7704 bp, synthetic construct; identical to SEQ ID NO: 90091
  misc_feature 1..7704: note = Description of Artificial Sequence: Synthetic coding sequence
  source 1..7704: mol_type = other DNA

SEQ ID NO: 90094 - DNA, 603 bp, synthetic construct
  misc_feature 1..603: note = Description of Artificial Sequence: Synthetic coding sequence
  source 1..603: mol_type = other DNA
atgggcaacagcaagagcggcgccctgagcaaggagatcctggaggagctgcagctgaacaccaagttcagcgaggaggagctgtgcagctggtaccagagcttcctgaaggactgccccaccggcagaatcacccagcagcagttccagagcatctacgccaagttcttccccgacaccgaccccaaggcctacgcccagcacgtgttcagaagcttcgacagcaacctggacggcaccctggacttcaaggagtacgtgatcgccctgcacatgaccaccgccggcaagaccaaccagaagctggagtgggccttcagcctgtacgacgtggacggcaacggcaccatcagcaagaacgaggtgctggagatcgtgatggccatcttcaagatgatcacccccgaggacgtgaagctgctgcccgacgacgagaacacccccgagaagagagccgagaagatctggaagtacttcggcaagaacgacgacgacaagctgaccgagaaggagttcatcgagggcaccctggccaacaaggagatcctgagactgatccagttcgagccccagaaggtgaaggagaagatgaagaacgcctag

SEQ ID NO: 90095 - DNA, 1884 bp, synthetic construct
  misc_feature 1..1884: note = Description of Artificial Sequence: Synthetic coding sequence
  source 1..1884: mol_type = other DNA
atgagcagcgacagcgagatggccatcttcggcgaggccgcccccttcctgagaaagagcgagagagagagaatcgaggcccagaacaagcccttcgacgccaagaccagcgtgttcgtggtggaccccaaggagagcttcgtgaaggccaccgtgcagagcagagagggcggcaaggtgaccgccaagaccgaggccggcgccaccgtgaccgtgaaggacgaccaggtgttccccatgaacccccccaagtacgacaagatcgaggacatggccatgatgacccacctgcacgagcccgccgtgctgtacaacctgaaggagagatacgccgcctggatgatctacacctacagcggcctgttctgcgtgaccgtgaacccctacaagtggctgcccgtgtacaacgccgaggtggtgaccgcctacagaggcaagaagagacaggaggcccccccccacatcttcagcatcagcgacaacgcctaccagttcatgctgaccgacagagagaaccagagcatcctgatcaccggcgagagcggcgccggcaagaccgtgaacaccaagagagtgatccagtacttcgccaccatcgccgtgaccggcgagaagaagaaggaggaggtgaccagcggcaagatgcagggcaccctggaggaccagatcatcagcgccaaccccctgctggaggccttcggcaacgccaagaccgtgagaaacgacaacagcagcagattcggcaagttcatcagaatccacttcggcaccaccggcaagctggccagcgccgacatcgagacctacctgctggagaagagcagagtgaccttccagctgaaggccgagagaagctaccacatcttctaccagatcatgagcaacaagaagcccgacctgatcgagatgctgctgatcaccaccaacccctacgactacgccttcgtgagccagggcgagatcaccgtgcccagcatcgacgaccaggaggagctgatggccaccgacagcgccatcgagatcctgggcttcaccagcgacgagagagtgagcatctacaagctgaccggcgccgtgatgcactacggcaacatgaagttcaagcagaagcagagagaggagcaggccgagcccgacggcaccgaggtggccgacaaggccgcctacctgcagaacctgaacagcgccgacctgctgaaggccctgtgctaccccagagtgaaggtgggcaacgagtacgtgaccaagggccagaccgtgcagcaggtgtacaacgccgtgggcgccctggccaaggccgtgtacgacaagatgttcctgtggatggtgaccagaatcaaccagcagctggacaccaagcagcccagagccaacagcgaggtggcccagtggagaaccaagtacgagaccgacgccatccagagaaccgaggagctggaggaggccaagaagaagctggcccagagactgcaggacgccgaggagcacgtggaggccgtgaacgccaagtgcgccagcctggagaagaccaagcagagactgcagaacgaggtggaggacctgatgatcgacgtggagagaaccaacgccgcctgcgccgccctggacaagaagcagagaaacttcgacaagatcctggccgagtggaagcagaagtgcgaggagacccacgccgagctggaggccagccagaaggagagcagaagcctgagcaccgagctgttcaagatcaagaacgcctacgaggagagcctggaccagctggagaccctgaagagagagaacaagaacctgcagcaggagatcagcgacctgaccgagcagatcgccgagggcggcaagagaatccacgagctggagaagatcaagaagcaggtggagtag

SEQ ID NO: 90096 - DNA, 5919 bp, synthetic construct
  misc_feature 1..5919: note = Description of Artificial Sequence: Synthetic coding sequence
  source 1..5919: mol_type = other DNA
atggcccagaagggccagctgagcgacgacgagaagttcctgttcgtggacaagaacttcatcaacagccccgtggcccaggccgactgggccgccaagagactggtgtgggtgcccagcgagaagcagggcttcgaggccgccagcatcaaggaggagaagggcgacgaggtggtggtggagctggtggagaacggcaagaaggtgaccgtgggcaaggacgacatccagaagatgaacccccccaagttcagcaaggtggaggacatggccgagctgacctgcctgaacgaggccagcgtgctgcacaacctgagagagagatacttcagcggcctgatctacacctacagcggcctgttctgcgtggtggtgaacccctacaagcacctgcccatctacagcgagaagatcgtggacatgtacaagggcaagaagagacacgagatgcccccccacatctacgccatcgccgacaccgcctacagaagcatgctgcaggacagagaggaccagagcatcctgtgcaccggcgagagcggcgccggcaagaccgagaacaccaagaaggtgatccagtacctggccgtggtggccagcagccacaagggcaagaaggacaccagcatcaccggcgagctggagaagcagctgctgcaggccaaccccatcctggaggccttcggcaacgccaagaccgtgaagaacgacaacagcagcagattcggcaagttcatcagaatcaacttcgacgtgaccggctacatcgtgggcgccaacatcgagacctacctgctggagaagagcagagccatcagacaggccagagacgagagaaccttccacatcttctactacatgatcgccggcgccaaggagaagatgagaagcgacctgctgctggagggcttcaacaactacaccttcctgagcaacggcttcgtgcccatccccgccgcccaggacgacgagatgttccaggagaccgtggaggccatggccatcatgggcttcagcgaggaggagcagctgagcatcctgaaggtggtgagcagcgtgctgcagctgggcaacatcgtgttcaagaaggagagaaacaccgaccaggccagcatgcccgacaacaccgccgcccagaaggtgtgccacctgatgggcatcaacgtgaccgacttcaccagaagcatcctgacccccagaatcaaggtgggcagagacgtggtgcagaaggcccagaccaaggagcaggccgacttcgccgtggaggccctggccaaggccacctacgagagactgttcagatggatcctgaccagagtgaacaaggccctggacaagacccacagacagggcgccagcttcctgggcatcctggacatcgccggcttcgagatcttcgaggtgaacagcttcgagcagctgtgcatcaactacaccaacgagaagctgcagcagctgttcaaccacaccatgttcatcctggagcaggaggagtaccagagagagggcatcgagtggaacttcatcgacttcggcctggacctgcagccctgcatcgagctgatcgagagacccaacaacccccccggcgtgctggccctgctggacgaggagtgctggttccccaaggccaccgacaagagcttcgtggagaagctgtgcaccgagcagggcagccaccccaagttccagaagcccaagcagctgaaggacaagaccgagttcagcatcatccactacgccggcaaggtggactacaacgccagcgcctggctgaccaagaacatggaccccctgaacgacaacgtgaccagcctgctgaacgccagcagcgacaagttcgtggccgacctgtggaaggacgtggacagaatcgtgggcctggaccagatggccaagatgaccgagagcagcctgcccagcgccagcaagaccaagaagggcatgttcagaaccgtgggccagctgtacaaggagcagctgggcaagctgatgaccaccctgagaaacaccacccccaacttcgtgagatgcatcatccccaaccacgagaagagaagcggcaagctggacgccttcctggtgctggagcagctgagatgcaacggcgtgctggagggcatcagaatctgcagacagggcttccccaacagaatcgtgttccaggagttcagacagagatacgagatcctggccgccaacgccatccccaagggcttcatggacggcaagcaggcctgcatcctgatgatcaaggccctggagctggaccccaacctgtacagaatcggccagagcaagatcttcttcagaaccggcgtgctggcccacctggaggaggagagagacctgaagatcaccgacgtgatcatggccttccaggccatgtgcagaggctacctggccagaaaggccttcgccaagagacagcagcagctgaccgccatgaaggtgatccagagaaactgcgccgcctacctgaagctgagaaactggcagtggtggagactgttcaccaaggtgaagcccctgctgcaggtgaccagacaggaggaggagatgcaggccaaggaggacgagctgcagaagaccaaggagagacagcagaaggccgagaacgagctgaaggagctggagcagaagcacagccagctgaccgaggagaagaacctgctgcaggagcagctgcaggccgagaccgagctgtacgccgaggccgaggagatgagagtgagactggccgccaagaagcaggagctggaggagatcctgcacgagatggaggccagactggaggaggaggaggacagaggccagcagctgcaggccgagagaaagaagatggcccagcagatgctggacctggaggagcagctggaggaggaggaggccgccagacagaagctgcagctggagaaggtgaccgccgaggccaagatcaagaagctggaggacgagatcctggtgatggacgaccagaacaacaagctgagcaaggagagaaagctgctggaggagagaatcagcgacctgaccaccaacctggccgaggaggaggagaaggccaagaacctgaccaagctgaagaacaagcacgagagcatgatcagcgagctggaggtgagactgaagaaggaggagaagagcagacaggagctggagaagctgaagagaaagctggagggcgacgccagcgacttccacgagcagatcgccgacctgcaggcccagatcgccgagctgaagatgcagctggccaagaaggaggaggagctgcaggccgccctggccagactggacgacgagatcgcccagaagaacaacgccctgaagaagatcagagagctggagggccacatcagcgacctgcaggaggacctggacagcgagagagccgccagaaacaaggccgagaagcagaagagagacctgggcgaggagctggaggccctgaagaccgagctggaggacaccctggacagcaccgccacccagcaggagctgagagccaagagagagcaggaggtgaccgtgctgaagaaggccctggacgaggagaccagaagccacgaggcccaggtgcaggagatgagacagaagcacgcccaggccgtggaggagctgaccgagcagctggagcagttcaagagagccaaggccaacctggacaagaacaagcagaccctggagaaggagaacgccgacctggccggcgagctgagagtgctgggccaggccaagcaggaggtggagcacaagaagaagaagctggaggcccaggtgcaggagctgcagagcaagtgcagcgacggcgagagagccagagccgagctgaacgacaaggtgcacaagctgcagaacgaggtggagagcgtgaccggcatgctgaacgaggccgagggcaaggccatcaagctggccaaggacgtggccagcctgagcagccagctgcaggacacccaggagctgctgcaggaggagaccagacagaagctgaacgtgagcaccaagctgagacagctggaggaggagagaaacagcctgcaggaccagctggacgaggagatggaggccaagcagaacctggagagacacatcagcaccctgaacatccagctgagcgacagcaagaagaagctgcaggacttcgccagcaccgtggaggccctggaggagggcaagaagagattccagaaggagatcgagaacctgacccagcagtacgaggagaaggccgccgcctacgacaagctggagaagaccaagaacagactgcagcaggagctggacgacctggtggtggacctggacaaccagagacagctggtgagcaacctggagaagaagcagagaaagttcgaccagctgctggccgaggagaagaacatcagcagcaagtacgccgacgagagagacagagccgaggccgaggccagagagaaggagaccaaggccctgagcctggccagagccctggaggaggccctggaggccaaggaggagctggagagaaccaacaagatgctgaaggccgagatggaggacctggtgagcagcaaggacgacgtgggcaagaacgtgcacgagctggagaagagcaagagagccctggagacccagatggaggagatgaagacccagctggaggagctggaggacgagctgcaggccaccgaggacgccaagctgagactggaggtgaacatgcaggccctgaagggccagttcgagagagacctgcaggccagagacgagcagaacgaggagaagagaagacagctgcagagacagctgcacgagtacgagaccgagctggaggacgagagaaagcagagagccctggccgccgccgccaagaagaagctggagggcgacctgaaggacctggagctgcaggccgacagcgccatcaagggcagagaggaggccatcaagcagctgagaaagctgcaggcccagatgaaggacttccagagagagctggaggacgccagagccagcagagacgagatcttcgccaccgccaaggagaacgagaagaaggccaagagcctggaggccgacctgatgcagctgcaggaggacctggccgccgccgagagagccagaaagcaggccgacctggagaaggaggagctggccgaggagctggccagcagcctgagcggcagaaacgccctgcaggacgagaagagaagactggaggccagaatcgcccagctggaggaggagctggaggaggagcagggcaacatggaggccatgagcgacagagtgagaaaggccacccagcaggccgagcagctgagcaacgagctggccaccgagagaagcaccgcccagaagaacgagagcgccagacagcagctggagagacagaacaaggagctgagaagcaagctgcacgagatggagggcgccgtgaagagcaagttcaagagcaccatcgccgccctggaggccaagatcgcccagctggaggagcaggtggagcaggaggccagagagaagcaggccgccaccaagagcctgaagcagaaggacaagaagctgaaggagatcctgctgcaggtggaggacgagagaaagatggccgagcagtacaaggagcaggccgagaagggcaacgccagagtgaagcagctgaagagacagctggaggaggccgaggaggagagccagagaatcaacgccaacagaagaaagctgcagagagagctggacgaggccaccgagagcaacgaggccatgggcagagaggtgaacgccctgaagagcaagctgagaagaggcaacgagaccagcttcgtgcccagcagaagaagcggcggcagaagagtgatcgagaacgccgacggcagcgaggaggagaccgacaccagagacgccgacttcaacggcaccaaggccagcgagtag

SEQ ID NO: 90097 - DNA, 5817 bp, synthetic construct
  misc_feature 1..5817: note = Description of Artificial Sequence: Synthetic coding sequence
  source 1..5817: mol_type = other DNA
atggcccagaagggccagctgagcgacgacgagaagttcctgttcgtggacaagaacttcatcaacagccccgtggcccaggccgactgggccgccaagagactggtgtgggtgcccagcgagaagcagggcttcgaggccgccagcatcaaggaggagaagggcgacgaggtggtggtggagctggtggagaacggcaagaaggtgaccgtgggcaaggacgacatccagaagatgaacccccccaagttcagcaaggtggaggacatggccgagctgacctgcctgaacgaggccagcgtgctgcacaacctgagagagagatacttcagcggcctgatctacacctacagcggcctgttctgcgtggtggtgaacccctacaagcacctgcccatctacagcgagaagatcgtggacatgtacaagggcaagaagagacacgagatgcccccccacatctacgccatcgccgacaccgcctacagaagcatgctgcaggacagagaggaccagagcatcctgtgcaccggcgagagcggcgccggcaagaccgagaacaccaagaaggtgatccagtacctggccgtggtggccagcagccacaagggcaagaaggacaccagcatcaccggcgagctggagaagcagctgctgcaggccaaccccatcctggaggccttcggcaacgccaagaccgtgaagaacgacaacagcagcagattcggcaagttcatcagaatcaacttcgacgtgaccggctacatcgtgggcgccaacatcgagacctacctgctggagaagagcagagccatcagacaggccagagacgagagaaccttccacatcttctactacatgatcgccggcgccaaggagaagatgagaagcgacctgctgctggagggcttcaacaactacaccttcctgagcaacggcttcgtgcccatccccgccgcccaggacgacgagatgttccaggagaccgtggaggccatggccatcatgggcttcagcgaggaggagcagctgagcatcctgaaggtggtgagcagcgtgctgcagctgggcaacatcgtgttcaagaaggagagaaacaccgaccaggccagcatgcccgacaacaccgccgcccagaaggtgtgccacctgatgggcatcaacgtgaccgacttcaccagaagcatcctgacccccagaatcaaggtgggcagagacgtggtgcagaaggcccagaccaaggagcaggccgacttcgccgtggaggccctggccaaggccacctacgagagactgttcagatggatcctgaccagagtgaacaaggccctggacaagacccacagacagggcgccagcttcctgggcatcctggacatcgccggcttcgagatcttcgaggtgaacagcttcgagcagctgtgcatcaactacaccaacgagaagctgcagcagctgttcaaccacaccatgttcatcctggagcaggaggagtaccagagagagggcatcgagtggaacttcatcgacttcggcctggacctgcagccctgcatcgagctgatcgagagacccaacaacccccccggcgtgctggccctgctggacgaggagtgctggttccccaaggccaccgacaagagcttcgtggagaagctgtgcaccgagcagggcagccaccccaagttccagaagcccaagcagctgaaggacaagaccgagttcagcatcatccactacgccggcaaggtggactacaacgccagcgcctggctgaccaagaacatggaccccctgaacgacaacgtgaccagcctgctgaacgccagcagcgacaagttcgtggccgacctgtggaaggacgtggacagaatcgtgggcctggaccagatggccaagatgaccgagagcagcctgcccagcgccagcaagaccaagaagggcatgttcagaaccgtgggccagctgtacaaggagcagctgggcaagctgatgaccaccctgagaaacaccacccccaacttcgtgagatgcatcatccccaaccacgagaagagaagcggcaagctggacgccttcctggtgctggagcagctgagatgcaacggcgtgctggagggcatcagaatctgcagacagggcttccccaacagaatcgtgttccaggagttcagacagagatacgagatcctggccgccaacgccatccccaagggcttcatggacggcaagcaggcctgcatcctgatgatcaaggccctggagctggaccccaacctgtacagaatcggccagagcaagatcttcttcagaaccggcgtgctggcccacctggaggaggagagagacctgaagatcaccgacgtgatcatggccttccaggccatgtgcagaggctacctggccagaaaggccttcgccaagagacagcagcagctgaccgccatgaaggtgatccagagaaactgcgccgcctacctgaagctgagaaactggcagtggtggagactgttcaccaaggtgaagcccctgctgcaggtgaccagacaggaggaggagatgcaggccaaggaggacgagctgcagaagaccaaggagagacagcagaaggccgagaacgagctgaaggagctggagcagaagcacagccagctgaccgaggagaagaacctgctgcaggagcagctgcaggccgagaccgagctgtacgccgaggccgaggagatgagagtgagactggccgccaagaagcaggagctggaggagatcctgcacgagatggaggccagactggaggaggaggaggacagaggccagcagctgcaggccgagagaaagaagatggcccagcagatgctggacctggaggagcagctggaggaggaggaggccgccagacagaagctgcagctggagaaggtgaccgccgaggccaagatcaagaagctggaggacgagatcctggtgatggacgaccagaacaacaagctgagcaaggagagaaagctgctggaggagagaatcagcgacctgaccaccaacctggccgaggaggaggagaaggccaagaacctgaccaagctgaagaacaagcacgagagcatgatcagcgagctggaggtgagactgaagaaggaggagaagagcagacaggagctggagaagctgaagagaaagctggagggcgacgccagcgacttccacgagcagatcgccgacctgcaggcccagatcgccgagctgaagatgcagctggccaagaaggaggaggagctgcaggccgccctggccagactggacgacgagatcgcccagaagaacaacgccctgaagaagatcagagagctggagggccacatcagcgacctgcaggaggacctggacagcgagagagccgccagaaacaaggccgagaagcagaagagagacctgggcgaggagctggaggccctgaagaccgagctggaggacaccctggacagcaccgccacccagcaggagctgagagccaagagagagcaggaggtgaccgtgctgaagaaggccctggacgaggagaccagaagccacgaggcccaggtgcaggagatgagacagaagcacgcccaggccgtggaggagctgaccgagcagctggagcagttcaagagagccaaggccaacctggacaagaacaagcagaccctggagaaggagaacgccgacctggccggcgagctgagagtgctgggccaggccaagcaggaggtggagcacaagaagaagaagctggaggcccaggtgcaggagctgcagagcaagtgcagcgacggcgagagagccagagccgagctgaacgacaaggtgcacaagctgcagaacgaggtggagagcgtgaccggcatgctgaacgaggccgagggcaaggccatcaagctggccaaggacgtggccagcctgagcagccagctgcaggacacccaggagctgctgcaggaggagaccagacagaagctgaacgtgagcaccaagctgagacagctggaggaggagagaaacagcctgcaggaccagctggacgaggagatggaggccaagcagaacctggagagacacatcagcaccctgaacatccagctgagcgacagcaagaagaagctgcaggacttcgccagcaccgtggaggccctggaggagggcaagaagagattccagaaggagatcgagaacctgacccagcagtacgaggagaaggccgccgcctacgacaagctggagaagaccaagaacagactgcagcaggagctggacgacctggtggtggacctggacaaccagagacagctggtgagcaacctggagaagaagcagagaaagttcgaccagctgctggccgaggagaagaacatcagcagcaagtacgccgacgagagagacagagccgaggccgaggccagagagaaggagaccaaggccctgagcctggccagagccctggaggaggccctggaggccaaggaggagctggagagaaccaacaagatgctgaaggccgagatggaggacctggtgagcagcaaggacgacgtgggcaagaacgtgcacgagctggagaagagcaagagagccctggagacccagatggaggagatgaagacccagctggaggagctggaggacgagctgcaggccaccgaggacgccaagctgagactggaggtgaacatgcaggccctgaagggccagttcgagagagacctgcaggccagagacgagcagaacgaggagaagagaagacagctgcagagacagctgcacgagtacgagaccgagctggaggacgagagaaagcagagagccctggccgccgccgccaagaagaagctggagggcgacctgaaggacctggagctgcaggccgacagcgccatcaagggcagagaggaggccatcaagcagctgagaaagctgcaggcccagatgaaggacttccagagagagctggaggacgccagagccagcagagacgagatcttcgccaccgccaaggagaacgagaagaaggccaagagcctggaggccgacctgatgcagctgcaggaggacctggccgccgccgagagagccagaaagcaggccgacctggagaaggaggagctggccgaggagctggccagcagcctgagcggcagaaacgccctgcaggacgagaagagaagactggaggccagaatcgcccagctggaggaggagctggaggaggagcagggcaacatggaggccatgagcgacagagtgagaaaggccacccagcaggccgagcagctgagcaacgagctggccaccgagagaagcaccgcccagaagaacgagagcgccagacagcagctggagagacagaacaaggagctgagaagcaagctgcacgagatggagggcgccgtgaagagcaagttcaagagcaccatcgccgccctggaggccaagatcgcccagctggaggagcaggtggagcaggaggccagagagaagcaggccgccaccaagagcctgaagcagaaggacaagaagctgaaggagatcctgctgcaggtggaggacgagagaaagatggccgagcagtacaaggagcaggccgagaagggcaacgccagagtgaagcagctgaagagacagctggaggaggccgaggaggagagccagagaatcaacgccaacagaagaaagctgcagagagagctggacgaggccaccgagagcaacgaggccatgggcagagaggtgaacgccctgaagagcaagctgagaggcccccccccccaggagaccagccagtag

SEQ ID NO: 90098 - DNA, 6090 bp, synthetic construct
  misc_feature 1..6090: note = Description of Artificial Sequence: Synthetic coding sequence
  source 1..6090: mol_type = other DNA
atggcccagaagggccagctgagcgacgacgagaagttcctgttcgtggacaagaacttcatcaacagccccgtggcccaggccgactgggccgccaagagactggtgtgggtgcccagcgagaagcagggcttcgaggccgccagcatcaaggaggagaagggcgacgaggtggtggtggagctggtggagaacggcaagaaggtgaccgtgggcaaggacgacatccagaagatgaacccccccaagttcagcaaggtggaggacatggccgagctgacctgcctgaacgaggccagcgtgctgcacaacctgagagagagatacttcagcggcctgatctacacctacagcggcctgttctgcgtggtggtgaacccctacaagcacctgcccatctacagcgagaagatcgtggacatgtacaagggcaagaagagacacgagatgcccccccacatctacgccatcgccgacaccgcctacagaagcatgctgcaggacagagaggaccagagcatcctgtgcaccggcgagagcggcgccggcaagaccgagaacaccaagaaggtgatccagtacctggccgtggtggccagcagccacaagggcaagaaggacaccagcatcaccgagggccccagcttctggagaggcgagctggagaagcagctgctgcaggccaaccccatcctggaggccttcggcaacgccaagaccgtgaagaacgacaacagcagcagattcggcaagttcatcagaatcaacttcgacgtgaccggctacatcgtgggcgccaacatcgagacctacctgctggagaagagcagagccatcagacaggccagagacgagagaaccttccacatcttctactacatgatcgccggcgccaaggagaagatgagaagcgacctgctgctggagggcttcaacaactacaccttcctgagcaacggcttcgtgcccatccccgccgcccaggacgacgagatgttccaggagaccgtggaggccatggccatcatgggcttcagcgaggaggagcagctgagcatcctgaaggtggtgagcagcgtgctgcagctgggcaacatcgtgttcaagaaggagagaaacaccgaccaggccagcatgcccgacaacaccgccgcccagaaggtgtgccacctgatgggcatcaacgtgaccgacttcaccagaagcatcctgacccccagaatcaaggtgggcagagacgtggtgcagaaggcccagaccaaggagcaggccgacttcgccgtggaggccctggccaaggccacctacgagagactgttcagatggatcctgaccagagtgaacaaggccctggacaagacccacagacagggcgccagcttcctgggcatcctggacatcgccggcttcgagatcttcgaggtgaacagcttcgagcagctgtgcatcaactacaccaacgagaagctgcagcagctgttcaaccacaccatgttcatcctggagcaggaggagtaccagagagagggcatcgagtggaacttcatcgacttcggcctggacctgcagccctgcatcgagctgatcgagagacccaacaacccccccggcgtgctggccctgctggacgaggagtgctggttccccaaggccaccgacaagagcttcgtggagaagctgtgcaccgagcagggcagccaccccaagttccagaagcccaagcagctgaaggacaagaccgagttcagcatcatccactacgccggcaaggtggactacaacgccagcgcctggctgaccaagaacatggaccccctgaacgacaacgtgaccagcctgctgaacgccagcagcgacaagttcgtggccgacctgtggaaggacgtggacagaatcgtgggcctggaccagatggccaagatgaccgagagcagcctgcccagcgccagcaagaccaagaagggcatgttcagaaccgtgggccagctgtacaaggagcagctgggcaagctgatgaccaccctgagaaacaccacccccaacttcgtgagatgcatcatccccaaccacgagaagagaagcggcaagctggacgccttcctggtgctggagcagctgagatgcaacggcgtgctggagggcatcagaatctgcagacagggcttccccaacagaatcgtgttccaggagttcagacagagatacgagatcctggccgccaacgccatccccaagggcttcatggacggcaagcaggcctgcatcctgatgatcaaggccctggagctggaccccaacctgtacagaatcggccagagcaagatcttcttcagaaccggcgtgctggcccacctggaggaggagagagacctgaagatcaccgacgtgatcatggccttccaggccatgtgcagaggctacctggccagaaaggccttcgccaagagacagcagcagctgaccgccatgaaggtgatccagagaaactgcgccgcctacctgaagctgagaaactggcagtggtggagactgttcaccaaggtgaagcccctgctgcaggtgaccagacaggaggaggagatgcaggccaaggaggacgagctgcagaagaccaaggagagacagcagaaggccgagaacgagctgaaggagctggagcagaagcacagccagctgaccgaggagaagaacctgctgcaggagcagctgcaggccgagaccgagctgtacgccgaggccgaggagatgagagtgagactggccgccaagaagcaggagctggaggagatcctgcacgagatggaggccagactggaggaggaggaggacagaggccagcagctgcaggccgagagaaagaagatggcccagcagatgctggacctggaggagcagctggaggaggaggaggccgccagacagaagctgcagctggagaaggtgaccgccgaggccaagatcaagaagctggaggacgagatcctggtgatggacgaccagaacaacaagctgagcaaggagagaaagctgctggaggagagaatcagcgacctgaccaccaacctggccgaggaggaggagaaggccaagaacctgaccaagctgaagaacaagcacgagagcatgatcagcgagctggaggtgagactgaagaaggaggagaagagcagacaggagctggagaagctgaagagaaagctggagggcgacgccagcgacttccacgagcagatcgccgacctgcaggcccagatcgccgagctgaagatgcagctggccaagaaggaggaggagctgcaggccgccctggccagactggacgacgagatcgcccagaagaacaacgccctgaagaagatcagagagctggagggccacatcagcgacctgcaggaggacctggacagcgagagagccgccagaaacaaggccgagaagcagaagagagacctgggcgaggagctggaggccctgaagaccgagctggaggacaccctggacagcaccgccacccagcaggagctgagagccaagagagagcaggaggtgaccgtgctgaagaaggccctggacgaggagaccagaagccacgaggcccaggtgcaggagatgagacagaagcacgcccaggccgtggaggagctgaccgagcagctggagcagttcaagagagccaaggccaacctggacaagaacaagcagaccctggagaaggagaacgccgacctggccggcgagctgagagtgctgggccaggccaagcaggaggtggagcacaagaagaagaagctggaggcccaggtgcaggagctgcagagcaagtgcagcgacggcgagagagccagagccgagctgaacgacaaggtgcacaagctgcagaacgaggtggagagcgtgaccggcatgctgaacgaggccgagggcaaggccatcaagctggccaaggacgtggccagcctgagcagccagctgcaggacacccaggagctgctgcaggaggagaccagacagaagctgaacgtgagcaccaagctgagacagctggaggaggagagaaacagcctgcaggaccagctggacgaggagatggaggccaagcagaacctggagagacacatcagcaccctgaacatccagctgagcgacagcaagaagaagctgcaggacttcgccagcaccgtggaggccctggaggagggcaagaagagattccagaaggagatcgagaacctgacccagcagtacgaggagaaggccgccgcctacgacaagctggagaagaccaagaacagactgcagcaggagctggacgacctggtggtggacctggacaaccagagacagctggtgagcaacctggagaagaagcagagaaagttcgaccagctgctggccgaggagaagaacatcagcagcaagtacgccgacgagagagacagagccgaggccgaggccagagagaaggagaccaaggccctgagcctggccagagccctggaggaggccctggaggccaaggaggagctggagagaaccaacaagatgctgaaggccgagatggaggacctggtgagcagcaaggacgacgtgggcaagaacgtgcacgagctggagaagagcaagagagccctggagacccagatggaggagatgaagacccagctggaggagctggaggacgagctgcaggccaccgaggacgccaagctgagactggaggtgaacatgcaggccctgaagggccagttcgagagagacctgcaggccagagacgagcagaacgaggagaagagaagacagctgcagagacagctgcacgagtacgagaccgagctggaggacgagagaaagcagagagccctggccgccgccgccaagaagaagctggagggcgacctgaaggacctggagctgcaggccgacagcgccatcaagggcagagaggaggccatcaagcagctgagaaagctgcaggcccagatgaaggacttccagagagagctggaggacgccagagccagcagagacgagatcttcgccaccgccaaggagaacgagaagaaggccaagagcctggaggccgacctgatgcagctgcaggaggacctggccgccgccgagagagccagaaagcaggccgacctggagaaggaggagctggccgaggagctggccagcagcctgagcggcagaaacgccctgcaggacgagaagagaagactggaggccagaatcgcccagctggaggaggagctggaggaggagcagggcaacatggaggccatgagcgacagagtgagaaaggccacccagcaggccgagcagctgagcaacgagctggccaccgagagaagcaccgcccagaagaacgagagcgccagacagcagctggagagacagaacaaggagctgagaagcaagctgcacgagatggagggcgccgtgaagagcaagttcaagagcaccatcgccgccctggaggccaagatcgcccagctggaggagcaggtggagcaggaggccagagagaagcaggccgccaccaagagcctgaagcagaaggacaagaagctgaaggagatcctgctgcaggtggaggacgagagaaagatggccgagcagtacaaggagcaggccgagaagggcaacgccagagtgaagcagctgaagagacagctggaggaggccgaggaggagagccagagaatcaacgccaacagaagaaagctgcagagagagctggacgaggccaccgagagcaacgaggccatgggcagagaggtgaacgccctgaagagcaagctgagaggccccccccacagaaagctgagaagcgacgcccccggcgaggagaccagacccctgagcttcctgctggagggcctggaggacgtggagctgctgaagatgcagatggtgctgagaagaaagagaaccctggagacccagaccagcatggagcccagacccgtgaacaagcagctgagcaccgtgctgcaccacggcaagaagaccaagaaccagaacaagcagaccaagaagacccagcagcagcccagaaccaagcagaaccccgccgactgcacctag

SEQ ID NO: 90099 - DNA, 5940 bp, synthetic construct
  misc_feature 1..5940: note = Description of Artificial Sequence: Synthetic coding sequence
  source 1..5940: mol_type = other DNA
atggcccagaagggccagctgagcgacgacgagaagttcctgttcgtggacaagaacttcatcaacagccccgtggcccaggccgactgggccgccaagagactggtgtgggtgcccagcgagaagcagggcttcgaggccgccagcatcaaggaggagaagggcgacgaggtggtggtggagctggtggagaacggcaagaaggtgaccgtgggcaaggacgacatccagaagatgaacccccccaagttcagcaaggtggaggacatggccgagctgacctgcctgaacgaggccagcgtgctgcacaacctgagagagagatacttcagcggcctgatctacacctacagcggcctgttctgcgtggtggtgaacccctacaagcacctgcccatctacagcgagaagatcgtggacatgtacaagggcaagaagagacacgagatgcccccccacatctacgccatcgccgacaccgcctacagaagcatgctgcaggacagagaggaccagagcatcctgtgcaccggcgagagcggcgccggcaagaccgagaacaccaagaaggtgatccagtacctggccgtggtggccagcagccacaagggcaagaaggacaccagcatcacccagggccccagcttcgcctacggcgagctggagaagcagctgctgcaggccaaccccatcctggaggccttcggcaacgccaagaccgtgaagaacgacaacagcagcagattcggcaagttcatcagaatcaacttcgacgtgaccggctacatcgtgggcgccaacatcgagacctacctgctggagaagagcagagccatcagacaggccagagacgagagaaccttccacatcttctactacatgatcgccggcgccaaggagaagatgagaagcgacctgctgctggagggcttcaacaactacaccttcctgagcaacggcttcgtgcccatccccgccgcccaggacgacgagatgttccaggagaccgtggaggccatggccatcatgggcttcagcgaggaggagcagctgagcatcctgaaggtggtgagcagcgtgctgcagctgggcaacatcgtgttcaagaaggagagaaacaccgaccaggccagcatgcccgacaacaccgccgcccagaaggtgtgccacctgatgggcatcaacgtgaccgacttcaccagaagcatcctgacccccagaatcaaggtgggcagagacgtggtgcagaaggcccagaccaaggagcaggccgacttcgccgtggaggccctggccaaggccacctacgagagactgttcagatggatcctgaccagagtgaacaaggccctggacaagacccacagacagggcgccagcttcctgggcatcctggacatcgccggcttcgagatcttcgaggtgaacagcttcgagcagctgtgcatcaactacaccaacgagaagctgcagcagctgttcaaccacaccatgttcatcctggagcaggaggagtaccagagagagggcatcgagtggaacttcatcgacttcggcctggacctgcagccctgcatcgagctgatcgagagacccaacaacccccccggcgtgctggccctgctggacgaggagtgctggttccccaaggccaccgacaagagcttcgtggagaagctgtgcaccgagcagggcagccaccccaagttccagaagcccaagcagctgaaggacaagaccgagttcagcatcatccactacgccggcaaggtggactacaacgccagcgcctggctgaccaagaacatggaccccctgaacgacaacgtgaccagcctgctgaacgccagcagcgacaagttcgtggccgacctgtggaaggacgtggacagaatcgtgggcctggaccagatggccaagatgaccgagagcagcctgcccagcgccagcaagaccaagaagggcatgttcagaaccgtgggccagctgtacaaggagcagctgggcaagctgatgaccaccctgagaaacaccacccccaacttcgtgagatgcatcatccccaaccacgagaagagaagcggcaagctggacgccttcctggtgctggagcagctgagatgcaacggcgtgctggagggcatcagaatctgcagacagggcttccccaacagaatcgtgttccaggagttcagacagagatacgagatcctggccgccaacgccatccccaagggcttcatggacggcaagcaggcctgcatcctgatgatcaaggccctggagctggaccccaacctgtacagaatcggccagagcaagatcttcttcagaaccggcgtgctggcccacctggaggaggagagagacctgaagatcaccgacgtgatcatggccttccaggccatgtgcagaggctacctggccagaaaggccttcgccaagagacagcagcagctgaccgccatgaaggtgatccagagaaactgcgccgcctacctgaagctgagaaactggcagtggtggagactgttcaccaaggtgaagcccctgctgcaggtgaccagacaggaggaggagatgcaggccaaggaggacgagctgcagaagaccaaggagagacagcagaaggccgagaacgagctgaaggagctggagcagaagcacagccagctgaccgaggagaagaacctgctgcaggagcagctgcaggccgagaccgagctgtacgccgaggccgaggagatgagagtgagactggccgccaagaagcaggagctggaggagatcctgcacgagatggaggccagactggaggaggaggaggacagaggccagcagctgcaggccgagagaaagaagatggcccagcagatgctggacctggaggagcagctggaggaggaggaggccgccagacagaagctgcagctggagaaggtgaccgccgaggccaagatcaagaagctggaggacgagatcctggtgatggacgaccagaacaacaagctgagcaaggagagaaagctgctggaggagagaatcagcgacctgaccaccaacctggccgaggaggaggagaaggccaagaacctgaccaagctgaagaacaagcacgagagcatgatcagcgagctggaggtgagactgaagaaggaggagaagagcagacaggagctggagaagctgaagagaaagctggagggcgacgccagcgacttccacgagcagatcgccgacctgcaggcccagatcgccgagctgaagatgcagctggccaagaaggaggaggagctgcaggccgccctggccagactggacgacgagatcgcccagaagaacaacgccctgaagaagatcagagagctggagggccacatcagcgacctgcaggaggacctggacagcgagagagccgccagaaacaaggccgagaagcagaagagagacctgggcgaggagctggaggccctgaagaccgagctggaggacaccctggacagcaccgccacccagcaggagctgagagccaagagagagcaggaggtgaccgtgctgaagaaggccctggacgaggagaccagaagccacgaggcccaggtgcaggagatgagacagaagcacgcccaggccgtggaggagctgaccgagcagctggagcagttcaagagagccaaggccaacctggacaagaacaagcagaccctggagaaggagaacgccgacctggccggcgagctgagagtgctgggccaggccaagcaggaggtggagcacaagaagaagaagctggaggcccaggtgcaggagctgcagagcaagtgcagcgacggcgagagagccagagccgagctgaacgacaaggtgcacaagctgcagaacgaggtggagagcgtgaccggcatgctgaacgaggccgagggcaaggccatcaagctggccaaggacgtggccagcctgagcagccagctgcaggacacccaggagctgctgcaggaggagaccagacagaagctgaacgtgagcaccaagctgagacagctggaggaggagagaaacagcctgcaggaccagctggacgaggagatggaggccaagcagaacctggagagacacatcagcaccctgaacatccagctgagcgacagcaagaagaagctgcaggacttcgccagcaccgtggaggccctggaggagggcaagaagagattccagaaggagatcgagaacctgacccagcagtacgaggagaaggccgccgcctacgacaagctggagaagaccaagaacagactgcagcaggagctggacgacctggtggtggacctggacaaccagagacagctggtgagcaacctggagaagaagcagagaaagttcgaccagctgctggccgaggagaagaacatcagcagcaagtacgccgacgagagagacagagccgaggccgaggccagagagaaggagaccaaggccctgagcctggccagagccctggaggaggccctggaggccaaggaggagctggagagaaccaacaagatgctgaaggccgagatggaggacctggtgagcagcaaggacgacgtgggcaagaacgtgcacgagctggagaagagcaagagagccctggagacccagatggaggagatgaagacccagctggaggagctggaggacgagctgcaggccaccgaggacgccaagctgagactggaggtgaacatgcaggccctgaagggccagttcgagagagacctgcaggccagagacgagcagaacgaggagaagagaagacagctgcagagacagctgcacgagtacgagaccgagctggaggacgagagaaagcagagagccctggccgccgccgccaagaagaagctggagggcgacctgaaggacctggagctgcaggccgacagcgccatcaagggcagagaggaggccatcaagcagctgagaaagctgcaggcccagatgaaggacttccagagagagctggaggacgccagagccagcagagacgagatcttcgccaccgccaaggagaacgagaagaaggccaagagcctggaggccgacctgatgcagctgcaggaggacctggccgccgccgagagagccagaaagcaggccgacctggagaaggaggagctggccgaggagctggccagcagcctgagcggcagaaacgccctgcaggacgagaagagaagactggaggccagaatcgcccagctggaggaggagctggaggaggagcagggcaacatggaggccatgagcgacagagtgagaaaggccacccagcaggccgagcagctgagcaacgagctggccaccgagagaagcaccgcccagaagaacgagagcgccagacagcagctggagagacagaacaaggagctgagaagcaagctgcacgagatggagggcgccgtgaagagcaagttcaagagcaccatcgccgccctggaggccaagatcgcccagctggaggagcaggtggagcaggaggccagagagaagcaggccgccaccaagagcctgaagcagaaggacaagaagctgaaggagatcctgctgcaggtggaggacgagagaaagatggccgagcagtacaaggagcaggccgagaagggcaacgccagagtgaagcagctgaagagacagctggaggaggccgaggaggagagccagagaatcaacgccaacagaagaaagctgcagagagagctggacgaggccaccgagagcaacgaggccatgggcagagaggtgaacgccctgaagagcaagctgagaagaggcaacgagaccagcttcgtgcccagcagaagaagcggcggcagaagagtgatcgagaacgccgacggcagcgaggaggagaccgacaccagagacgccgacttcaacggcaccaaggccagcgagtag

SEQ ID NO: 90100 - DNA, 5838 bp, synthetic construct
  misc_feature 1..5838: note = Description of Artificial Sequence: Synthetic coding sequence
  source 1..5838: mol_type = other DNA
atggcccagaagggccagctgagcgacgacgagaagttcctgttcgtggacaagaacttcatcaacagccccgtggcccaggccgactgggccgccaagagactggtgtgggtgcccagcgagaagcagggcttcgaggccgccagcatcaaggaggagaagggcgacgaggtggtggtggagctggtggagaacggcaagaaggtgaccgtgggcaaggacgacatccagaagatgaacccccccaagttcagcaaggtggaggacatggccgagctgacctgcctgaacgaggccagcgtgctgcacaacctgagagagagatacttcagcggcctgatctacacctacagcggcctgttctgcgtggtggtgaacccctacaagcacctgcccatctacagcgagaagatcgtggacatgtacaagggcaagaagagacacgagatgcccccccacatctacgccatcgccgacaccgcctacagaagcatgctgcaggacagagaggaccagagcatcctgtgcaccggcgagagcggcgccggcaagaccgagaacaccaagaaggtgatccagtacctggccgtggtggccagcagccacaagggcaagaaggacaccagcatcacccagggccccagcttcgcctacggcgagctggagaagcagctgctgcaggccaaccccatcctggaggccttcggcaacgccaagaccgtgaagaacgacaacagcagcagattcggcaagttcatcagaatcaacttcgacgtgaccggctacatcgtgggcgccaacatcgagacctacctgctggagaagagcagagccatcagacaggccagagacgagagaaccttccacatcttctactacatgatcgccggcgccaaggagaagatgagaagcgacctgctgctggagggcttcaacaactacaccttcctgagcaacggcttcgtgcccatccccgccgcccaggacgacgagatgttccaggagaccgtggaggccatggccatcatgggcttcagcgaggaggagcagctgagcatcctgaaggtggtgagcagcgtgctgcagctgggcaacatcgtgttcaagaaggagagaaacaccgaccaggccagcatgcccgacaacaccgccgcccagaaggtgtgccacctgatgggcatcaacgtgaccgacttcaccagaagcatcctgacccccagaatcaaggtgggcagagacgtggtgcagaaggcccagaccaaggagcaggccgacttcgccgtggaggccctggccaaggccacctacgagagactgttcagatggatcctgaccagagtgaacaaggccctggacaagacccacagacagggcgccagcttcctgggcatcctggacatcgccggcttcgagatcttcgaggtgaacagcttcgagcagctgtgcatcaactacaccaacgagaagctgcagcagctgttcaaccacaccatgttcatcctggagcaggaggagtaccagagagagggcatcgagtggaacttcatcgacttcggcctggacctgcagccctgcatcgagctgatcgagagacccaacaacccccccggcgtgctggccctgctggacgaggagtgctggttccccaaggccaccgacaagagcttcgtggagaagctgtgcaccgagcagggcagccaccccaagttccagaagcccaagcagctgaaggacaagaccgagttcagcatcatccactacgccggcaaggtggactacaacgccagcgcctggctgaccaagaacatggaccccctgaacgacaacgtgaccagcctgctgaacgccagcagcgacaagttcgtggccgacctgtggaaggacgtggacagaatcgtgggcctggaccagatggccaagatgaccgagagcagcctgcccagcgccagcaagaccaagaagggcatgttcagaaccgtgggccagctgtacaaggagcagctgggcaagctgatgaccaccctgagaaacaccacccccaacttcgtgagatgcatcatccccaaccacgagaagagaagcggcaagctggacgccttcctggtgctggagcagctgagatgcaacggcgtgctggagggcatcagaatctgcagacagggcttccccaacagaatcgtgttccaggagttcagacagagatacgagatcctggccgccaacgccatccccaagggcttcatggacggcaagcaggcctgcatcctgatgatcaaggccctggagctggaccccaacctgtacagaatcggccagagcaagatcttcttcagaaccggcgtgctggcccacctggaggaggagagagacctgaagatcaccgacgtgatcatggccttccaggccatgtgcagaggctacctggccagaaaggccttcgccaagagacagcagcagctgaccgccatgaaggtgatccagagaaactgcgccgcctacctgaagctgagaaactggcagtggtggagactgttcaccaaggtgaagcccctgctgcaggtgaccagacaggaggaggagatgcaggccaaggaggacgagctgcagaagaccaaggagagacagcagaaggccgagaacgagctgaaggagctggagcagaagcacagccagctgaccgaggagaagaacctgctgcaggagcagctgcaggccgagaccgagctgtacgccgaggccgaggagatgagagtgagactggccgccaagaagcaggagctggaggagatcctgcacgagatggaggccagactggaggaggaggaggacagaggccagcagctgcaggccgagagaaagaagatggcccagcagatgctggacctggaggagcagctggaggaggaggaggccgccagacagaagctgcagctggagaaggtgaccgccgaggccaagatcaagaagctggaggacgagatcctggtgatggacgaccagaacaacaagctgagcaaggagagaaagctgctggaggagagaatcagcgacctgaccaccaacctggccgaggaggaggagaaggccaagaacctgaccaagctgaagaacaagcacgagagcatgatcagcgagctggaggtgagactgaagaaggaggagaagagcagacaggagctggagaagctgaagagaaagctggagggcgacgccagcgacttccacgagcagatcgccgacctgcaggcccagatcgccgagctgaagatgcagctggccaagaaggaggaggagctgcaggccgccctggccagactggacgacgagatcgcccagaagaacaacgccctgaagaagatcagagagctggagggccacatcagcgacctgcaggaggacctggacagcgagagagccgccagaaacaaggccgagaagcagaagagagacctgggcgaggagctggaggccctgaagaccgagctggaggacaccctggacagcaccgccacccagcaggagctgagagccaagagagagcaggaggtgaccgtgctgaagaaggccctggacgaggagaccagaagccacgaggcccaggtgcaggagatgagacagaagcacgcccaggccgtggaggagctgaccgagcagctggagcagttcaagagagccaaggccaacctggacaagaacaagcagaccctggagaaggagaacgccgacctggccggcgagctgagagtgctgggccaggccaagcaggaggtggagcacaagaagaagaagctggaggcccaggtgcaggagctgcagagcaagtgcagcgacggcgagagagccagagccgagctgaacgacaaggtgcacaagctgcagaacgaggtggagagcgtgaccggcatgctgaacgaggccgagggcaaggccatcaagctggccaaggacgtggccagcctgagcagccagctgcaggacacccaggagctgctgcaggaggagaccagacagaagctgaacgtgagcaccaagctgagacagctggaggaggagagaaacagcctgcaggaccagctggacgaggagatggaggccaagcagaacctggagagacacatcagcaccctgaacatccagctgagcgacagcaagaagaagctgcaggacttcgccagcaccgtggaggccctggaggagggcaagaagagattccagaaggagatcgagaacctgacccagcagtacgaggagaaggccgccgcctacgacaagctggagaagaccaagaacagactgcagcaggagctggacgacctggtggtggacctggacaaccagagacagctggtgagcaacctggagaagaagcagagaaagttcgaccagctgctggccgaggagaagaacatcagcagcaagtacgccgacgagagagacagagccgaggccgaggccagagagaaggagaccaaggccctgagcctggccagagccctggaggaggccctggaggccaaggaggagctggagagaaccaacaagatgctgaaggccgagatggaggacctggtgagcagcaaggacgacgtgggcaagaacgtgcacgagctggagaagagcaagagagccctggagacccagatggaggagatgaagacccagctggaggagctggaggacgagctgcaggccaccgaggacgccaagctgagactggaggtgaacatgcaggccctgaagggccagttcgagagagacctgcaggccagagacgagcagaacgaggagaagagaagacagctgcagagacagctgcacgagtacgagaccgagctggaggacgagagaaagcagagagccctggccgccgccgccaagaagaagctggagggcgacctgaaggacctggagctgcaggccgacagcgccatcaagggcagagaggaggccatcaagcagctgagaaagctgcaggcccagatgaaggacttccagagagagctggaggacgccagagccagcagagacgagatcttcgccaccgccaaggagaacgagaagaaggccaagagcctggaggccgacctgatgcagctgcaggaggacctggccgccgccgagagagccagaaagcaggccgacctggagaaggaggagctggccgaggagctggccagcagcctgagcggcagaaacgccctgcaggacgagaagagaagactggaggccagaatcgcccagctggaggaggagctggaggaggagcagggcaacatggaggccatgagcgacagagtgagaaaggccacccagcaggccgagcagctgagcaacgagctggccaccgagagaagcaccgcccagaagaacgagagcgccagacagcagctggagagacagaacaaggagctgagaagcaagctgcacgagatggagggcgccgtgaagagcaagttcaagagcaccatcgccgccctggaggccaagatcgcccagctggaggagcaggtggagcaggaggccagagagaagcaggccgccaccaagagcctgaagcagaaggacaagaagctgaaggagatcctgctgcaggtggaggacgagagaaagatggccgagcagtacaaggagcaggccgagaagggcaacgccagagtgaagcagctgaagagacagctggaggaggccgaggaggagagccagagaatcaacgccaacagaagaaagctgcagagagagctggacgaggccaccgagagcaacgaggccatgggcagagaggtgaacgccctgaagagcaagctgagaggcccccccccccaggagaccagccagtag

SEQ ID NO: 90101 - DNA, 5817 bp, synthetic construct; identical to SEQ ID NO: 89972
  misc_feature 1..5817: note = Description of Artificial Sequence: Synthetic coding sequence
  source 1..5817: mol_type = other DNA

SEQ ID NO: 90102 - DNA, 2001 bp, synthetic construct
  misc_feature 1..2001: note = Description of Artificial Sequence: Synthetic coding sequence
  source 1..2001: mol_type = other DNA
atgctgagccacatgctgtacaagaaggagaacgccatcgacatcctgggcttcagcagcgaggagaaggtgggcatctacaagctgaccggcgccgtgatgcactacggcaacatgaagttcaagcagaagcagagagaggagcaggccgagcccgacggcaccgaggtggccgacaaggccggctacctgatgggcctgaacagcgccgagatgctgaagggcctgtgctgccccagagtgaaggtgggcaacgagtacgtgaccaagggccagaacgtgcagcaggtgaccaacagcgtgggcgccctggccaaggccgtgtacgagaagatgttcctgtggatggtgaccagaatcaaccagcagctggacaccaagcagcccagacagtacttcatcggcgtgctggacatcgccggcttcgagatcttcgacttcaacagcctggagcagctgtgcatcaacttcaccaacgagaagctgcagcagttcttcaaccaccacatgttcgtgctggagcaggaggagtacaagaaggagggcatcgagtgggagttcatcgacttcggcatggacctggccgcctgcatcgagctgatcgagaagcccatgggcatcttcagcatcctggaggaggagtgcatgttccccaaggccaccgacaccagcttcaagaacaagctgtacgaccagcacctgggcaagagcaacaacttccagaagcccaagcccgccaagggcaaggccgaggcccacttcagcctggtgcactacgccggcaccgtggactacaacatcgccggctggctggacaagaacaaggaccccctgaacgagaccgtggtgggcctgtaccagaagagcagcctgaagctgctgagcttcctgttcagcaactacgccggcgccgagaccggcgacagcggcggcagcaagaagggcggcaagaagaagggcagcagcttccagaccgtgagcgccgtgttcagagagaacctgaacaagctgatgaccaacctgagaagcacccacccccacttcgtgagatgcctgatccccaacgagaccaagacccccggcgtgatggaccactacctggtgatgcaccagctgagatgcaacggcgtgctggagggcatcagaatctgcagaaagggcttccccagcagaatcctgtacgccgacttcaagcagagatacagaatcctgaacgccagcgccatccccgagggccagttcatcgacagcaagaacgccagcgagaagctgctgaacagcatcgacgtggacagagagcagttcagattcggcaacaccaaggtgttcttcaaggccggcctgctgggcctgctggaggagatgagagacgagaagctggtgaccctgatgaccagcacccaggccgtgtgcagaggctacctgatgagagtggagttcaagaagatgatggagagaagagacagcatcttctgcatccagtacaacatcagaagcttcatgaacgtgaagcactggccctggatgaacctgttcttcaagatcaagcccctgctgaagagcgccgaggccgagaaggagatggccaccatgaaggaggacttcgagagaaccaaggaggagctggccagaagcgaggccagaagaaaggagctgaccgagagactggaggaggaggaggagatgaacagcgagctggtggccaagaagagaaacctggaggacaagtgcagcagcctgaagagagacatcgacgacctggagctgaccctgaccaaggtggagaaggagaagcacgccaccgagaacaaggtgaagaacctgagcgaggagatgaccgccctggaggagaacatcagcaagctgaccaaggagaagaagagcctgcaggaggcccaccagcagaccctggacgacctgcaggtggaggaggacaaggtgaacggcctgatcaagatcaacgccaagctggagcagcagaccgacgacgagggcgtgtag

SEQ ID NO: 90103 - DNA, 6111 bp, synthetic construct; identical to SEQ ID NO: 89973
  misc_feature 1..6111: note = Description of Artificial Sequence: Synthetic coding sequence
  source 1..6111: mol_type = other DNA

SEQ ID NO: 90104 - DNA, 4437 bp, synthetic construct
  misc_feature 1..4437: note = Description of Artificial Sequence: Synthetic coding sequence
  source 1..4437: mol_type = other DNA
atggccgccgtgaccatgagcgtgcccggcagaaaggccccccccagacccggccccgtgcccgaggccgcccagcccttcctgttcacccccagaggccccagcgccggcggcggccccggcagcggcaccagcccccaggtggagtggaccgccagaagactggtgtgggtgcccagcgagctgcacggcttcgaggccgccgccctgagagacgagggcgaggaggaggccgaggtggagctggccgagagcggcagaagactgagactgcccagagaccagatccagagaatgaacccccccaagttcagcaaggccgaggacatggccgagctgacctgcctgaacgaggccagcgtgctgcacaacctgagagagagatactacagcggcctgatctacacctacagcggcctgttctgcgtggtgatcaacccctacaagcagctgcccatctacaccgaggccatcgtggagatgtacagaggcaagaagagacacgaggtgcccccccacgtgtacgccgtgaccgagggcgcctacagaagcatgctgcaggacagagaggaccagagcatcctgtgcaccggcgagagcggcgccggcaagaccgagaacaccaagaaggtgatccagtacctggcccacgtggccagcagccccaagggcagaaaggagcccggcgtgcccggcgagctggagagacagctgctgcaggccaaccccatcctggaggccttcggcaacgccaagaccgtgaagaacgacaacagcagcagattcggcaagttcatcagaatcaacttcgacgtggccggctacatcgtgggcgccaacatcgagacctacctgctggagaagagcagagccatcagacaggccaaggacgagtgcagcttccacatcttctaccagctgctgggcggcgccggcgagcagctgaaggccgacctgctgctggagccctgcagccactacagattcctgaccaacggccccagcagcagccccggccaggagagagagctgttccaggagaccctggagagcctgagagtgctgggcttcagccacgaggagatcatcagcatgctgagaatggtgagcgccgtgctgcagttcggcaacatcgccctgaagagagagagaaacaccgaccaggccaccatgcccgacaacaccgccgcccagaagctgtgcagactgctgggcctgggcgtgaccgacttcagcagagccctgctgacccccagaatcaaggtgggcagagactacgtgcagaaggcccagaccaaggagcaggccgacttcgccctggaggccctggccaaggccacctacgagagactgttcagatggctggtgctgagactgaacagagccctggacagaagccccagacagggcgccagcttcctgggcatcctggacatcgccggcttcgagatcttccagctgaacagcttcgagcagctgtgcatcaactacaccaacgagaagctgcagcagctgttcaaccacaccatgttcgtgctggagcaggaggagtaccagagagagggcatcccctggaccttcctggacttcggcctggacctgcagccctgcatcgacctgatcgagagacccgccaacccccccggcctgctggccctgctggacgaggagtgctggttccccaaggccaccgacaagagcttcgtggagaaggtggcccaggagcagggcggccaccccaagttccagagacccagacacctgagagaccaggccgacttcagcgtgctgcactacgccggcaaggtggactacaaggccaacgagtggctgatgaagaacatggaccccctgaacgacaacgtggccgccctgctgcaccagagcaccgacagactgaccgccgagatctggaaggacgtggagggcatcgtgggcctggagcaggtgagcagcctgggcgacggcccccccggcggcagacccagaagaggcatgttcagaaccgtgggccagctgtacaaggagagcctgagcagactgatggccaccctgagcaacaccaaccccagcttcgtgagatgcatcgtgcccaaccacgagaagagagccggcaagctggagcccagactggtgctggaccagctgagatgcaacggcgtgctggagggcatcagaatctgcagacagggcttccccaacagaatcctgttccaggagttcagacagagatacgagatcctgacccccaacgccatccccaagggcttcatggacggcaagcaggcctgcgagaagatgatccaggccctggagctggaccccaacctgtacagagtgggccagagcaagatcttcttcagagccggcgtgctggcccagctggaggaggagagagacctgaaggtgaccgacatcatcgtgagcttccaggccgccgccagaggctacctggccagaagagccttccagaagagacagcagcagcagagcgccctgagagtgatgcagagaaactgcgccgcctacctgaagctgagacactggcagtggtggagactgttcaccaaggtgaagcccctgctgcaggtgaccagacaggacgaggtgctgcaggccagagcccaggagctgcagaaggtgcaggagctgcagcagcagagcgccagagaggtgggcgagctgcagggcagagtggcccagctggaggaggagagagccagactggccgagcagctgagagccgaggccgagctgtgcgccgaggccgaggagaccagaggcagactggccgccagaaagcaggagctggagctggtggtgagcgagctggaggccagagtgggcgaggaggaggagtgcagcagacagatgcagaccgagaagaagagactgcagcagcacatccaggagctggaggcccacctggaggccgaggagggcgccagacagaagctgcagctggagaaggtgaccaccgaggccaagatgaagaagttcgaggaggacctgctgctgctggaggaccagaacagcaagctgagcaagagcggcagctgctggaagatcgtgtggcccagcagccaccccagacagctgagaagaagaagaagaagcagagccagcatcagctacggcagcaacatgagaccccagagccagacctggagagacagactgagaaaggaggagaagggcagacaggagctggagaagctgaagagaagactggacggcgagagcagcgagctgcaggagcagatggtggagcagcagcagagagccgaggagctgagagcccagctgggcagaaaggaggaggagctgcaggccgccctggccagagccgaggacgagggcggcgccagagcccagctgctgaagagcctgagagaggcccaggccgccctggccgaggcccaggaggacctggagagcgagagagtggccagaaccaaggccgagaagcagagaagagacctgggcgaggagctggaggccctgagaggcgagctggaggacaccctggacagcaccaacgcccagcaggagctgagaagcaagagagagcaggaggtgaccgagctgaagaagaccctggaggaggagaccagaatccacgaggccgccgtgcaggagctgagacagagacacggccaggccctgggcgagctggccgagcagctggagcaggccagaagaggcaagggcgcctgggagaagaccagactggccctggaggccgaggtgagcgagctgagagccgagctgagcagcctgcagaccgccagacaggagggcgagcagagaagaagaagactggagctgcagctgcaggaggtgcagggcagagccggcgacggcgagagagccagagccgaggccgccgagaagctgcagagagcccaggccgagctggagaacgtgagcggcgccctgaacgaggccgagagcaagaccatcagactgagcaaggagctgagcagcaccgaggcccagctgcacgacgcccaggagctgctgcaggaggagaccagagccaagctggccctgggcagcagagtgagagccatggaggccgaggccgccggcctgagagagcagctggaggaggaggccgccgccagagagagagccggcagagagctgcagaccgcccaggcccagctgagcgagtggagaagaagacaggaggaggaggccggcgccctggaggccggcgaggaggccagaagaagagccgccagagaggccgaggccctgacccagagactggccgagaagaccgagaccgtggacagactggagagaggcagaagaagactgcagcaggagctggacgacgccaccctgagccccgacgccctgaccgacggcgcccagccccccagcagcctggaccccaccggcccctgccccagaaaccccgccctgtag

SEQ ID NO: 90105 - DNA, 5340 bp, synthetic construct
  misc_feature 1..5340: note = Description of Artificial Sequence: Synthetic coding sequence
  source 1..5340: mol_type = other DNA
atggccgccgtgaccatgagcgtgcccggcagaaaggccccccccagacccggccccgtgcccgaggccgcccagcccttcctgttcacccccagaggccccagcgccggcggcggccccggcagcggcaccagcccccaggtggagtggaccgccagaagactggtgtgggtgcccagcgagctgcacggcttcgaggccgccgccctgagagacgagggcgaggaggaggccgaggtggagctggccgagagcggcagaagactgagactgcccagagaccagatccagagaatgaacccccccaagttcagcaaggccgaggacatggccgagctgacctgcctgaacgaggccagcgtgctgcacaacctgagagagagatactacagcggcctgatctacacctacagcggcctgttctgcgtggtgatcaacccctacaagcagctgcccatctacaccgaggccatcgtggagatgtacagaggcaagaagagacacgaggtgcccccccacgtgtacgccgtgaccgagggcgcctacagaagcatgctgcaggacagagaggaccagagcatcctgtgcaccggcgagagcggcgccggcaagaccgagaacaccaagaaggtgatccagtacctggcccacgtggccagcagccccaagggcagaaaggagcccggcgtgcccggcgagctggagagacagctgctgcaggccaaccccatcctggaggccttcggcaacgccaagaccgtgaagaacgacaacagcagcagattcggcaagttcatcagaatcaacttcgacgtggccggctacatcgtgggcgccaacatcgagacctacctgctggagaagagcagagccatcagacaggccaaggacgagtgcagcttccacatcttctaccagctgctgggcggcgccggcgagcagctgaaggccgacctgctgctggagccctgcagccactacagattcctgaccaacggccccagcagcagccccggccaggagagagagctgttccaggagaccctggagagcctgagagtgctgggcttcagccacgaggagatcatcagcatgctgagaatggtgagcgccgtgctgcagttcggcaacatcgccctgaagagagagagaaacaccgaccaggccaccatgcccgacaacaccgccgcccagaagctgtgcagactgctgggcctgggcgtgaccgacttcagcagagccctgctgacccccagaatcaaggtgggcagagactacgtgcagaaggcccagaccaaggagcaggccgacttcgccctggaggccctggccaaggccacctacgagagactgttcagatggctggtgctgagactgaacagagccctggacagaagccccagacagggcgccagcttcctgggcatcctggacatcgccggcttcgagatcttccagctgaacagcttcgagcagctgtgcatcaactacaccaacgagaagctgcagcagctgttcaaccacaccatgttcgtgctggagcaggaggagtaccagagagagggcatcccctggaccttcctggacttcggcctggacctgcagccctgcatcgacctgatcgagagacccgccaacccccccggcctgctggccctgctggacgaggagtgctggttccccaaggccaccgacaagagcttcgtggagaaggtggcccaggagcagggcggccaccccaagttccagagacccagacacctgagagaccaggccgacttcagcgtgctgcactacgccggcaaggtggactacaaggccaacgagtggctgatgaagaacatggaccccctgaacgacaacgtggccgccctgctgcaccagagcaccgacagactgaccgccgagatctggaaggacgtggagggcatcgtgggcctggagcaggtgagcagcctgggcgacggcccccccggcggcagacccagaagaggcatgttcagaaccgtgggccagctgtacaaggagagcctgagcagactgatggccaccctgagcaacaccaaccccagcttcgtgagatgcatcgtgcccaaccacgagaagagagccggcaagctggagcccagactggtgctggaccagctgagatgcaacggcgtgctggagggcatcagaatctgcagacagggcttccccaacagaatcctgttccaggagttcagacagagatacgagatcctgacccccaacgccatccccaagggcttcatggacggcaagcaggcctgcgagaagatgatccaggccctggagctggaccccaacctgtacagagtgggccagagcaagatcttcttcagagccggcgtgctggcccagctggaggaggagagagacctgaaggtgaccgacatcatcgtgagcttccaggccgccgccagaggctacctggccagaagagccttccagaagagacagcagcagcagagcgccctgagagtgatgcagagaaactgcgccgcctacctgaagctgagacactggcagtggtggagactgttcaccaaggtgaagcccctgctgcaggtgaccagacaggacgaggtgctgcaggccagagcccaggagctgcagaaggtgcaggagctgcagcagcagagcgccagagaggtgggcgagctgcagggcagagtggcccagctggaggaggagagagccagactggccgagcagctgagagccgaggccgagctgtgcgccgaggccgaggagaccagaggcagactggccgccagaaagcaggagctggagctggtggtgagcgagctggaggccagagtgggcgaggaggaggagtgcagcagacagatgcagaccgagaagaagagactgcagcagcacatccaggagctggaggcccacctggaggccgaggagggcgccagacagaagctgcagctggagaaggtgaccaccgaggccaagatgaagaagttcgaggaggacctgctgctgctggaggaccagaacagcaagctgagcaagagcggcagctgctggaagatcgtgtggcccagcagccaccccagacagctgagaagaagaagaagaagcagagccagcatcagctacggcagcaacatgagaccccagagccagacctggagagacagactgagaaaggaggagaagggcagacaggagctggagaagctgaagagaagactggacggcgagagcagcgagctgcaggagcagatggtggagcagcagcagagagccgaggagctgagagcccagctgggcagaaaggaggaggagctgcaggccgccctggccagagccgaggacgagggcggcgccagagcccagctgctgaagagcctgagagaggcccaggccgccctggccgaggcccaggaggacctggagagcgagagagtggccagaaccaaggccgagaagcagagaagagacctgggcgaggagctggaggccctgagaggcgagctggaggacaccctggacagcaccaacgcccagcaggagctgagaagcaagagagagcaggaggtgaccgagctgaagaagaccctggaggaggagaccagaatccacgaggccgccgtgcaggagctgagacagagacacggccaggccctgggcgagctggccgagcagctggagcaggccagaagaggcaagggcgcctgggagaagaccagactggccctggaggccgaggtgagcgagctgagagccgagctgagcagcctgcagaccgccagacaggagggcgagcagagaagaagaagactggagctgcagctgcaggaggtgcagggcagagccggcgacggcgagagagccagagccgaggccgccgagaagctgcagagagcccaggccgagctggagaacgtgagcggcgccctgaacgaggccctgctgagcagcaaggacgacgtgggcaagagcgtgcacgagctggagagagcctgcagagtggccgagcaggccgccaacgacctgagagcccaggtgaccgagctggaggacgagctgaccgccgccgaggacgccaagctgagactggaggtgaccgtgcaggccctgaagacccagcacgagagagacctgcagggcagagacgaggccggcgaggagagaagaagacagctggccaagcagctgagagacgccgaggtggagagagacgaggagagaaagcagagaaccctggccgtggccgccagaaagaagctggagggcgagctggaggagctgaaggcccagatggccagcgccggccagggcaaggaggaggccgtgaagcagctgagaaagatgcaggcccagatgaaggagctgtggagagaggtggaggagaccagaaccagcagagaggagatcttcagccagaacagagagagcgagaagagactgaagggcctggaggccgaggtgctgagactgcaggaggagctggccgccagcgacagagccagaagacaggcccagcaggacagagacgagatggccgacgaggtggccaacggcaacctgagcaaggccgccatcctggaggagaagagacagctggagggcagactgggccagctggaggaggagctggaggaggagcagagcaacagcgagctgctgaacgacagatacagaaagctgctgctgcaggtggagagcctgaccaccgagctgagcgccgagagaagcttcagcgccaaggccgagagcggcagacagcagctggagagacagatccaggagctgagaggcagactgggcgaggaggacgccggcgccagagccagacacaagatgaccatcgccgccctggagagcaagctggcccaggccgaggagcagctggagcaggagaccagagagagaatcctgagcggcaagctggtgagaagagccgagaagagactgaaggaggtggtgctgcaggtggaggaggagagaagagtggccgaccagctgagagaccagctggagaagggcaacctgagagtgaagcagctgaagagacagctggaggaggccgaggaggaggccagcagagcccaggccggcagaagaagactgcagagagagctggaggacgtgaccgagagcgccgagagcatgaacagagaggtgaccaccctgagaaacagactgagaagaggccccctgaccttcaccaccagaaccgtgagacaggtgttcagactggaggagggcgtggccagcgacgaggaggccgaggaggcccagcccggcagcggccccagccccgagcccgagggcagcccccccgcccacccccagtag

SEQ ID NO: 90106 - DNA, 6087 bp, synthetic construct
  misc_feature 1..6087: note = Description of Artificial Sequence: Synthetic coding sequence
  source 1..6087: mol_type = other DNA
atggccgccgtgaccatgagcgtgcccggcagaaaggccccccccagacccggccccgtgcccgaggccgcccagcccttcctgttcacccccagaggccccagcgccggcggcggccccggcagcggcaccagcccccaggtggagtggaccgccagaagactggtgtgggtgcccagcgagctgcacggcttcgaggccgccgccctgagagacgagggcgaggaggaggccgaggtggagctggccgagagcggcagaagactgagactgcccagagaccagatccagagaatgaacccccccaagttcagcaaggccgaggacatggccgagctgacctgcctgaacgaggccagcgtgctgcacaacctgagagagagatactacagcggcctgatctacacctacagcggcctgttctgcgtggtgatcaacccctacaagcagctgcccatctacaccgaggccatcgtggagatgtacagaggcaagaagagacacgaggtgcccccccacgtgtacgccgtgaccgagggcgcctacagaagcatgctgcaggacagagaggaccagagcatcctgtgcaccggcgagagcggcgccggcaagaccgagaacaccaagaaggtgatccagtacctggcccacgtggccagcagccccaagggcagaaaggagcccggcgtgcccggcgagctggagagacagctgctgcaggccaaccccatcctggaggccttcggcaacgccaagaccgtgaagaacgacaacagcagcagattcggcaagttcatcagaatcaacttcgacgtggccggctacatcgtgggcgccaacatcgagacctacctgctggagaagagcagagccatcagacaggccaaggacgagtgcagcttccacatcttctaccagctgctgggcggcgccggcgagcagctgaaggccgacctgctgctggagccctgcagccactacagattcctgaccaacggccccagcagcagccccggccaggagagagagctgttccaggagaccctggagagcctgagagtgctgggcttcagccacgaggagatcatcagcatgctgagaatggtgagcgccgtgctgcagttcggcaacatcgccctgaagagagagagaaacaccgaccaggccaccatgcccgacaacaccgccgcccagaagctgtgcagactgctgggcctgggcgtgaccgacttcagcagagccctgctgacccccagaatcaaggtgggcagagactacgtgcagaaggcccagaccaaggagcaggccgacttcgccctggaggccctggccaaggccacctacgagagactgttcagatggctggtgctgagactgaacagagccctggacagaagccccagacagggcgccagcttcctgggcatcctggacatcgccggcttcgagatcttccagctgaacagcttcgagcagctgtgcatcaactacaccaacgagaagctgcagcagctgttcaaccacaccatgttcgtgctggagcaggaggagtaccagagagagggcatcccctggaccttcctggacttcggcctggacctgcagccctgcatcgacctgatcgagagacccgccaacccccccggcctgctggccctgctggacgaggagtgctggttccccaaggccaccgacaagagcttcgtggagaaggtggcccaggagcagggcggccaccccaagttccagagacccagacacctgagagaccaggccgacttcagcgtgctgcactacgccggcaaggtggactacaaggccaacgagtggctgatgaagaacatggaccccctgaacgacaacgtggccgccctgctgcaccagagcaccgacagactgaccgccgagatctggaaggacgagcacggcggcttccagcagttcagcttcctgggcagcttcccccccagcccccccggcagcgccgagagatgcagcagcgccatcagcccccccggcgtggagggcatcgtgggcctggagcaggtgagcagcctgggcgacggcccccccggcggcagacccagaagaggcatgttcagaaccgtgggccagctgtacaaggagagcctgagcagactgatggccaccctgagcaacaccaaccccagcttcgtgagatgcatcgtgcccaaccacgagaagagagccggcaagctggagcccagactggtgctggaccagctgagatgcaacggcgtgctggagggcatcagaatctgcagacagggcttccccaacagaatcctgttccaggagttcagacagagatacgagatcctgacccccaacgccatccccaagggcttcatggacggcaagcaggcctgcgagaagatgatccaggccctggagctggaccccaacctgtacagagtgggccagagcaagatcttcttcagagccggcgtgctggcccagctggaggaggagagagacctgaaggtgaccgacatcatcgtgagcttccaggccgccgccagaggctacctggccagaagagccttccagaagagacagcagcagcagagcgccctgagagtgatgcagagaaactgcgccgcctacctgaagctgagacactggcagtggtggagactgttcaccaaggtgaagcccctgctgcaggtgaccagacaggacgaggtgctgcaggccagagcccaggagctgcagaaggtgcaggagctgcagcagcagagcgccagagaggtgggcgagctgcagggcagagtggcccagctggaggaggagagagccagactggccgagcagctgagagccgaggccgagctgtgcgccgaggccgaggagaccagaggcagactggccgccagaaagcaggagctggagctggtggtgagcgagctggaggccagagtgggcgaggaggaggagtgcagcagacagatgcagaccgagaagaagagactgcagcagcacatccaggagctggaggcccacctggaggccgaggagggcgccagacagaagctgcagctggagaaggtgaccaccgaggccaagatgaagaagttcgaggaggacctgctgctgctggaggaccagaacagcaagctgagcaaggagagaaagctgctggaggacagactggccgagttcagcagccaggccgccgaggaggaggagaaggtgaagagcctgaacaagctgagactgaagtacgaggccaccatcgccgacatggaggacagactgagaaaggaggagaagggcagacaggagctggagaagctgaagagaagactggacggcgagagcagcgagctgcaggagcagatggtggagcagcagcagagagccgaggagctgagagcccagctgggcagaaaggaggaggagctgcaggccgccctggccagagccgaggacgagggcggcgccagagcccagctgctgaagagcctgagagaggcccaggccgccctggccgaggcccaggaggacctggagagcgagagagtggccagaaccaaggccgagaagcagagaagagacctgggcgaggagctggaggccctgagaggcgagctggaggacaccctggacagcaccaacgcccagcaggagctgagaagcaagagagagcaggaggtgaccgagctgaagaagaccctggaggaggagaccagaatccacgaggccgccgtgcaggagctgagacagagacacggccaggccctgggcgagctggccgagcagctggagcaggccagaagaggcaagggcgcctgggagaagaccagactggccctggaggccgaggtgagcgagctgagagccgagctgagcagcctgcagaccgccagacaggagggcgagcagagaagaagaagactggagctgcagctgcaggaggtgcagggcagagccggcgacggcgagagagccagagccgaggccgccgagaagctgcagagagcccaggccgagctggagaacgtgagcggcgccctgaacgaggccgagagcaagaccatcagactgagcaaggagctgagcagcaccgaggcccagctgcacgacgcccaggagctgctgcaggaggagaccagagccaagctggccctgggcagcagagtgagagccatggaggccgaggccgccggcctgagagagcagctggaggaggaggccgccgccagagagagagccggcagagagctgcagaccgcccaggcccagctgagcgagtggagaagaagacaggaggaggaggccggcgccctggaggccggcgaggaggccagaagaagagccgccagagaggccgaggccctgacccagagactggccgagaagaccgagaccgtggacagactggagagaggcagaagaagactgcagcaggagctggacgacgccaccatggacctggagcagcagagacagctggtgagcaccctggagaagaagcagagaaagttcgaccagctgctggccgaggagaaggccgccgtgctgagagccgtggaggagagagagagagccgaggccgagggcagagagagagaggccagagccctgagcctgaccagagccctggaggaggagcaggaggccagagaggagctggagagacagaacagagccctgagagccgagctggaggccctgctgagcagcaaggacgacgtgggcaagagcgtgcacgagctggagagagcctgcagagtggccgagcaggccgccaacgacctgagagcccaggtgaccgagctggaggacgagctgaccgccgccgaggacgccaagctgagactggaggtgaccgtgcaggccctgaagacccagcacgagagagacctgcagggcagagacgaggccggcgaggagagaagaagacagctggccaagcagctgagagacgccgaggtggagagagacgaggagagaaagcagagaaccctggccgtggccgccagaaagaagctggagggcgagctggaggagctgaaggcccagatggccagcgccggccagggcaaggaggaggccgtgaagcagctgagaaagatgcaggcccagatgaaggagctgtggagagaggtggaggagaccagaaccagcagagaggagatcttcagccagaacagagagagcgagaagagactgaagggcctggaggccgaggtgctgagactgcaggaggagctggccgccagcgacagagccagaagacaggcccagcaggacagagacgagatggccgacgaggtggccaacggcaacctgagcaaggccgccatcctggaggagaagagacagctggagggcagactgggccagctggaggaggagctggaggaggagcagagcaacagcgagctgctgaacgacagatacagaaagctgctgctgcaggtggagagcctgaccaccgagctgagcgccgagagaagcttcagcgccaaggccgagagcggcagacagcagctggagagacagatccaggagctgagaggcagactgggcgaggaggacgccggcgccagagccagacacaagatgaccatcgccgccctggagagcaagctggcccaggccgaggagcagctggagcaggagaccagagagagaatcctgagcggcaagctggtgagaagagccgagaagagactgaaggaggtggtgctgcaggtggaggaggagagaagagtggccgaccagctgagagaccagctggagaagggcaacctgagagtgaagcagctgaagagacagctggaggaggccgaggaggaggccagcagagcccaggccggcagaagaagactgcagagagagctggaggacgtgaccgagagcgccgagagcatgaacagagaggtgaccaccctgagaaacagactgagaagaggccccctgaccttcaccaccagaaccgtgagacaggtgttcagactggaggagggcgtggccagcgacgaggaggccgaggaggcccagcccggcagcggccccagccccgagcccgagggcagcccccccgcccacccccagtag

SEQ ID NO: 90107 - DNA, 6012 bp, synthetic construct
  misc_feature 1..6012: note = Description of Artificial Sequence: Synthetic coding sequence
  source 1..6012: mol_type = other DNA
atggccgccgtgaccatgagcgtgcccggcagaaaggccccccccagacccggccccgtgcccgaggccgcccagcccttcctgttcacccccagaggccccagcgccggcggcggccccggcagcggcaccagcccccaggtggagtggaccgccagaagactggtgtgggtgcccagcgagctgcacggcttcgaggccgccgccctgagagacgagggcgaggaggaggccgaggtggagctggccgagagcggcagaagactgagactgcccagagaccagatccagagaatgaacccccccaagttcagcaaggccgaggacatggccgagctgacctgcctgaacgaggccagcgtgctgcacaacctgagagagagatactacagcggcctgatctacacctacagcggcctgttctgcgtggtgatcaacccctacaagcagctgcccatctacaccgaggccatcgtggagatgtacagaggcaagaagagacacgaggtgcccccccacgtgtacgccgtgaccgagggcgcctacagaagcatgctgcaggacagagaggaccagagcatcctgtgcaccggcgagagcggcgccggcaagaccgagaacaccaagaaggtgatccagtacctggcccacgtggccagcagccccaagggcagaaaggagcccggcgtgcccgccagcgtgagcaccgtgagctacggcgagctggagagacagctgctgcaggccaaccccatcctggaggccttcggcaacgccaagaccgtgaagaacgacaacagcagcagattcggcaagttcatcagaatcaacttcgacgtggccggctacatcgtgggcgccaacatcgagacctacctgctggagaagagcagagccatcagacaggccaaggacgagtgcagcttccacatcttctaccagctgctgggcggcgccggcgagcagctgaaggccgacctgctgctggagccctgcagccactacagattcctgaccaacggccccagcagcagccccggccaggagagagagctgttccaggagaccctggagagcctgagagtgctgggcttcagccacgaggagatcatcagcatgctgagaatggtgagcgccgtgctgcagttcggcaacatcgccctgaagagagagagaaacaccgaccaggccaccatgcccgacaacaccgccgcccagaagctgtgcagactgctgggcctgggcgtgaccgacttcagcagagccctgctgacccccagaatcaaggtgggcagagactacgtgcagaaggcccagaccaaggagcaggccgacttcgccctggaggccctggccaaggccacctacgagagactgttcagatggctggtgctgagactgaacagagccctggacagaagccccagacagggcgccagcttcctgggcatcctggacatcgccggcttcgagatcttccagctgaacagcttcgagcagctgtgcatcaactacaccaacgagaagctgcagcagctgttcaaccacaccatgttcgtgctggagcaggaggagtaccagagagagggcatcccctggaccttcctggacttcggcctggacctgcagccctgcatcgacctgatcgagagacccgccaacccccccggcctgctggccctgctggacgaggagtgctggttccccaaggccaccgacaagagcttcgtggagaaggtggcccaggagcagggcggccaccccaagttccagagacccagacacctgagagaccaggccgacttcagcgtgctgcactacgccggcaaggtggactacaaggccaacgagtggctgatgaagaacatggaccccctgaacgacaacgtggccgccctgctgcaccagagcaccgacagactgaccgccgagatctggaaggacgtggagggcatcgtgggcctggagcaggtgagcagcctgggcgacggcccccccggcggcagacccagaagaggcatgttcagaaccgtgggccagctgtacaaggagagcctgagcagactgatggccaccctgagcaacaccaaccccagcttcgtgagatgcatcgtgcccaaccacgagaagagagccggcaagctggagcccagactggtgctggaccagctgagatgcaacggcgtgctggagggcatcagaatctgcagacagggcttccccaacagaatcctgttccaggagttcagacagagatacgagatcctgacccccaacgccatccccaagggcttcatggacggcaagcaggcctgcgagaagatgatccaggccctggagctggaccccaacctgtacagagtgggccagagcaagatcttcttcagagccggcgtgctggcccagctggaggaggagagagacctgaaggtgaccgacatcatcgtgagcttccaggccgccgccagaggctacctggccagaagagccttccagaagagacagcagcagcagagcgccctgagagtgatgcagagaaactgcgccgcctacctgaagctgagacactggcagtggtggagactgttcaccaaggtgaagcccctgctgcaggtgaccagacaggacgaggtgctgcaggccagagcccaggagctgcagaaggtgcaggagctgcagcagcagagcgccagagaggtgggcgagctgcagggcagagtggcccagctggaggaggagagagccagactggccgagcagctgagagccgaggccgagctgtgcgccgaggccgaggagaccagaggcagactggccgccagaaagcaggagctggagctggtggtgagcgagctggaggccagagtgggcgaggaggaggagtgcagcagacagatgcagaccgagaagaagagactgcagcagcacatccaggagctggaggcccacctggaggccgaggagggcgccagacagaagctgcagctggagaaggtgaccaccgaggccaagatgaagaagttcgaggaggacctgctgctgctggaggaccagaacagcaagctgagcaaggagagaaagctgctggaggacagactggccgagttcagcagccaggccgccgaggaggaggagaaggtgaagagcctgaacaagctgagactgaagtacgaggccaccatcgccgacatggaggacagactgagaaaggaggagaagggcagacaggagctggagaagctgaagagaagactggacggcgagagcagcgagctgcaggagcagatggtggagcagcagcagagagccgaggagctgagagcccagctgggcagaaaggaggaggagctgcaggccgccctggccagagccgaggacgagggcggcgccagagcccagctgctgaagagcctgagagaggcccaggccgccctggccgaggcccaggaggacctggagagcgagagagtggccagaaccaaggccgagaagcagagaagagacctgggcgaggagctggaggccctgagaggcgagctggaggacaccctggacagcaccaacgcccagcaggagctgagaagcaagagagagcaggaggtgaccgagctgaagaagaccctggaggaggagaccagaatccacgaggccgccgtgcaggagctgagacagagacacggccaggccctgggcgagctggccgagcagctggagcaggccagaagaggcaagggcgcctgggagaagaccagactggccctggaggccgaggtgagcgagctgagagccgagctgagcagcctgcagaccgccagacaggagggcgagcagagaagaagaagactggagctgcagctgcaggaggtgcagggcagagccggcgacggcgagagagccagagccgaggccgccgagaagctgcagagagcccaggccgagctggagaacgtgagcggcgccctgaacgaggccgagagcaagaccatcagactgagcaaggagctgagcagcaccgaggcccagctgcacgacgcccaggagctgctgcaggaggagaccagagccaagctggccctgggcagcagagtgagagccatggaggccgaggccgccggcctgagagagcagctggaggaggaggccgccgccagagagagagccggcagagagctgcagaccgcccaggcccagctgagcgagtggagaagaagacaggaggaggaggccggcgccctggaggccggcgaggaggccagaagaagagccgccagagaggccgaggccctgacccagagactggccgagaagaccgagaccgtggacagactggagagaggcagaagaagactgcagcaggagctggacgacgccaccatggacctggagcagcagagacagctggtgagcaccctggagaagaagcagagaaagttcgaccagctgctggccgaggagaaggccgccgtgctgagagccgtggaggagagagagagagccgaggccgagggcagagagagagaggccagagccctgagcctgaccagagccctggaggaggagcaggaggccagagaggagctggagagacagaacagagccctgagagccgagctggaggccctgctgagcagcaaggacgacgtgggcaagagcgtgcacgagctggagagagcctgcagagtggccgagcaggccgccaacgacctgagagcccaggtgaccgagctggaggacgagctgaccgccgccgaggacgccaagctgagactggaggtgaccgtgcaggccctgaagacccagcacgagagagacctgcagggcagagacgaggccggcgaggagagaagaagacagctggccaagcagctgagagacgccgaggtggagagagacgaggagagaaagcagagaaccctggccgtggccgccagaaagaagctggagggcgagctggaggagctgaaggcccagatggccagcgccggccagggcaaggaggaggccgtgaagcagctgagaaagatgcaggcccagatgaaggagctgtggagagaggtggaggagaccagaaccagcagagaggagatcttcagccagaacagagagagcgagaagagactgaagggcctggaggccgaggtgctgagactgcaggaggagctggccgccagcgacagagccagaagacaggcccagcaggacagagacgagatggccgacgaggtggccaacggcaacctgagcaaggccgccatcctggaggagaagagacagctggagggcagactgggccagctggaggaggagctggaggaggagcagagcaacagcgagctgctgaacgacagatacagaaagctgctgctgcaggtggagagcctgaccaccgagctgagcgccgagagaagcttcagcgccaaggccgagagcggcagacagcagctggagagacagatccaggagctgagaggcagactgggcgaggaggacgccggcgccagagccagacacaagatgaccatcgccgccctggagagcaagctggcccaggccgaggagcagctggagcaggagaccagagagagaatcctgagcggcaagctggtgagaagagccgagaagagactgaaggaggtggtgctgcaggtggaggaggagagaagagtggccgaccagctgagagaccagctggagaagggcaacctgagagtgaagcagctgaagagacagctggaggaggccgaggaggaggccagcagagcccaggccggcagaagaagactgcagagagagctggaggacgtgaccgagagcgccgagagcatgaacagagaggtgaccaccctgagaaacagactgagaagaggccccctgaccttcaccaccagaaccgtgagacaggtgttcagactggaggagggcgtggccagcgacgaggaggccgaggaggcccagcccggcagcggccccagccccgagcccgagggcagcccccccgcccacccccagtag

SEQ ID NO: 90108 - DNA, 6111 bp, synthetic construct
  misc_feature 1..6111: note = Description of Artificial Sequence: Synthetic coding sequence
  source 1..6111: mol_type = other DNA
atggccgccgtgaccatgagcgtgcccggcagaaaggccccccccagacccggccccgtgcccgaggccgcccagcccttcctgttcacccccagaggccccagcgccggcggcggccccggcagcggcaccagcccccaggtggagtggaccgccagaagactggtgtgggtgcccagcgagctgcacggcttcgaggccgccgccctgagagacgagggcgaggaggaggccgaggtggagctggccgagagcggcagaagactgagactgcccagagaccagatccagagaatgaacccccccaagttcagcaaggccgaggacatggccgagctgacctgcctgaacgaggccagcgtgctgcacaacctgagagagagatactacagcggcctgatctacacctacagcggcctgttctgcgtggtgatcaacccctacaagcagctgcccatctacaccgaggccatcgtggagatgtacagaggcaagaagagacacgaggtgcccccccacgtgtacgccgtgaccgagggcgcctacagaagcatgctgcaggacagagaggaccagagcatcctgtgcaccggcgagagcggcgccggcaagaccgagaacaccaagaaggtgatccagtacctggcccacgtggccagcagccccaagggcagaaaggagcccggcgtgcccgtgagcaaccccgccctgggctggggcgagctggagagacagctgctgcaggccaaccccatcctggaggccttcggcaacgccaagaccgtgaagaacgacaacagcagcagattcggcaagttcatcagaatcaacttcgacgtggccggctacatcgtgggcgccaacatcgagacctacctgctggagaagagcagagccatcagacaggccaaggacgagtgcagcttccacatcttctaccagctgctgggcggcgccggcgagcagctgaaggccgacctgctgctggagccctgcagccactacagattcctgaccaacggccccagcagcagccccggccaggagagagagctgttccaggagaccctggagagcctgagagtgctgggcttcagccacgaggagatcatcagcatgctgagaatggtgagcgccgtgctgcagttcggcaacatcgccctgaagagagagagaaacaccgaccaggccaccatgcccgacaacaccgccgcccagaagctgtgcagactgctgggcctgggcgtgaccgacttcagcagagccctgctgacccccagaatcaaggtgggcagagactacgtgcagaaggcccagaccaaggagcaggccgacttcgccctggaggccctggccaaggccacctacgagagactgttcagatggctggtgctgagactgaacagagccctggacagaagccccagacagggcgccagcttcctgggcatcctggacatcgccggcttcgagatcttccagctgaacagcttcgagcagctgtgcatcaactacaccaacgagaagctgcagcagctgttcaaccacaccatgttcgtgctggagcaggaggagtaccagagagagggcatcccctggaccttcctggacttcggcctggacctgcagccctgcatcgacctgatcgagagacccgccaacccccccggcctgctggccctgctggacgaggagtgctggttccccaaggccaccgacaagagcttcgtggagaaggtggcccaggagcagggcggccaccccaagttccagagacccagacacctgagagaccaggccgacttcagcgtgctgcactacgccggcaaggtggactacaaggccaacgagtggctgatgaagaacatggaccccctgaacgacaacgtggccgccctgctgcaccagagcaccgacagactgaccgccgagatctggaaggacgagcacggcggcttccagcagttcagcttcctgggcagcttcccccccagcccccccggcagcgccgagagatgcagcagcgccatcagcccccccggcgtggagggcatcgtgggcctggagcaggtgagcagcctgggcgacggcccccccggcggcagacccagaagaggcatgttcagaaccgtgggccagctgtacaaggagagcctgagcagactgatggccaccctgagcaacaccaaccccagcttcgtgagatgcatcgtgcccaaccacgagaagagagccggcaagctggagcccagactggtgctggaccagctgagatgcaacggcgtgctggagggcatcagaatctgcagacagggcttccccaacagaatcctgttccaggagttcagacagagatacgagatcctgacccccaacgccatccccaagggcttcatggacggcaagcaggcctgcgagaagatgatccaggccctggagctggaccccaacctgtacagagtgggccagagcaagatcttcttcagagccggcgtgctggcccagctggaggaggagagagacctgaaggtgaccgacatcatcgtgagcttccaggccgccgccagaggctacctggccagaagagccttccagaagagacagcagcagcagagcgccctgagagtgatgcagagaaactgcgccgcctacctgaagctgagacactggcagtggtggagactgttcaccaaggtgaagcccctgctgcaggtgaccagacaggacgaggtgctgcaggccagagcccaggagctgcagaaggtgcaggagctgcagcagcagagcgccagagaggtgggcgagctgcagggcagagtggcccagctggaggaggagagagccagactggccgagcagctgagagccgaggccgagctgtgcgccgaggccgaggagaccagaggcagactggccgccagaaagcaggagctggagctggtggtgagcgagctggaggccagagtgggcgaggaggaggagtgcagcagacagatgcagaccgagaagaagagactgcagcagcacatccaggagctggaggcccacctggaggccgaggagggcgccagacagaagctgcagctggagaaggtgaccaccgaggccaagatgaagaagttcgaggaggacctgctgctgctggaggaccagaacagcaagctgagcaaggagagaaagctgctggaggacagactggccgagttcagcagccaggccgccgaggaggaggagaaggtgaagagcctgaacaagctgagactgaagtacgaggccaccatcgccgacatggaggacagactgagaaaggaggagaagggcagacaggagctggagaagctgaagagaagactggacggcgagagcagcgagctgcaggagcagatggtggagcagcagcagagagccgaggagctgagagcccagctgggcagaaaggaggaggagctgcaggccgccctggccagagccgaggacgagggcggcgccagagcccagctgctgaagagcctgagagaggcccaggccgccctggccgaggcccaggaggacctggagagcgagagagtggccagaaccaaggccgagaagcagagaagagacctgggcgaggagctggaggccctgagaggcgagctggaggacaccctggacagcaccaacgcccagcaggagctgagaagcaagagagagcaggaggtgaccgagctgaagaagaccctggaggaggagaccagaatccacgaggccgccgtgcaggagctgagacagagacacggccaggccctgggcgagctggccgagcagctggagcaggccagaagaggcaagggcgcctgggagaagaccagactggccctggaggccgaggtgagcgagctgagagccgagctgagcagcctgcagaccgccagacaggagggcgagcagagaagaagaagactggagctgcagctgcaggaggtgcagggcagagccggcgacggcgagagagccagagccgaggccgccgagaagctgcagagagcccaggccgagctggagaacgtgagcggcgccctgaacgaggccgagagcaagaccatcagactgagcaaggagctgagcagcaccgaggcccagctgcacgacgcccaggagctgctgcaggaggagaccagagccaagctggccctgggcagcagagtgagagccatggaggccgaggccgccggcctgagagagcagctggaggaggaggccgccgccagagagagagccggcagagagctgcagaccgcccaggcccagctgagcgagtggagaagaagacaggaggaggaggccggcgccctggaggccggcgaggaggccagaagaagagccgccagagaggccgaggccctgacccagagactggccgagaagaccgagaccgtggacagactggagagaggcagaagaagactgcagcaggagctggacgacgccaccatggacctggagcagcagagacagctggtgagcaccctggagaagaagcagagaaagttcgaccagctgctggccgaggagaaggccgccgtgctgagagccgtggaggagagagagagagccgaggccgagggcagagagagagaggccagagccctgagcctgaccagagccctggaggaggagcaggaggccagagaggagctggagagacagaacagagccctgagagccgagctggaggccctgctgagcagcaaggacgacgtgggcaagagcgtgcacgagctggagagagcctgcagagtggccgagcaggccgccaacgacctgagagcccaggtgaccgagctggaggacgagctgaccgccgccgaggacgccaagctgagactggaggtgaccgtgcaggccctgaagacccagcacgagagagacctgcagggcagagacgaggccggcgaggagagaagaagacagctggccaagcagctgagagacgccgaggtggagagagacgaggagagaaagcagagaaccctggccgtggccgccagaaagaagctggagggcgagctggaggagctgaaggcccagatggccagcgccggccagggcaaggaggaggccgtgaagcagctgagaaagatgcaggcccagatgaaggagctgtggagagaggtggaggagaccagaaccagcagagaggagatcttcagccagaacagagagagcgagaagagactgaagggcctggaggccgaggtgctgagactgcaggaggagctggccgccagcgacagagccagaagacaggcccagcaggacagagacgagatggccgacgaggtggccaacggcaacctgagcaaggccgccatcctggaggagaagagacagctggagggcagactgggccagctggaggaggagctggaggaggagcagagcaacagcgagctgctgaacgacagatacagaaagctgctgctgcaggtggagagcctgaccaccgagctgagcgccgagagaagcttcagcgccaaggccgagagcggcagacagcagctggagagacagatccaggagctgagaggcagactgggcgaggaggacgccggcgccagagccagacacaagatgaccatcgccgccctggagagcaagctggcccaggccgaggagcagctggagcaggagaccagagagagaatcctgagcggcaagctggtgagaagagccgagaagagactgaaggaggtggtgctgcaggtggaggaggagagaagagtggccgaccagctgagagaccagctggagaagggcaacctgagagtgaagcagctgaagagacagctggaggaggccgaggaggaggccagcagagcccaggccggcagaagaagactgcagagagagctggaggacgtgaccgagagcgccgagagcatgaacagagaggtgaccaccctgagaaacagactgagaagaggccccctgaccttcaccaccagaaccgtgagacaggtgttcagactggaggagggcgtggccagcgacgaggaggccgaggaggcccagcccggcagcggccccagccccgagcccgagggcagcccccccgcccacccccagtag

SEQ ID NO: 90109 - DNA, 5841 bp, synthetic construct
  misc_feature 1..5841: note = Description of Artificial Sequence: Synthetic coding sequence
  source 1..5841: mol_type = other DNA
atggtggagagctgcctgctgaccttcagagccttcttctggtggatcgccctgatcaagatggacctgagcgacctgggcgaggccgccgccttcctgagaagaagcgaggccgagctgctgctgctgcaggccaccgccctggacggcaagaagaagtgctggatccccgacggcgagaacgcctacatcgaggccgaggtgaagggcagcgaggacgacggcaccgtgatcgtggagaccgccgacggcgagagcctgagcatcaaggaggacaagatccagcagatgaacccccccgagttcgagatgatcgaggacatggccatgctgacccacctgaacgaggccagcgtgctgcacaccctgaagagaagatacggccagtggatgatctacacctacagcggcctgttctgcgtgaccatcaacccctacaagtggctgcccgtgtaccagaaggaggtgatggccgcctacaagggcaagagaagaagcgaggcccccccccacatcttcgccgtggccaacaacgccttccaggacatgctgcacaacagagagaaccagagcatcctgttcaccggcgagagcggcgccggcaagaccgtgaacagcaagcacatcatccagtacttcgccaccatcgccgccatgatcgagagcagaaagaagcagggcgccctggaggaccagatcatgcaggccaacaccatcctggaggccttcggcaacgccaagaccctgagaaacgacaacagcagcagattcggcaagttcatcagaatgcacttcggcgccagaggcatgctgagcagcgtggacatcgacatctacctgctggagaagagcagagtgatcttccagcaggccggcgagagaaactaccacatcttctaccagatcctgagcggccagaaggagctgcacgacctgctgctggtgagcgccaaccccagcgacttccacttctgcagctgcggcgccgtgaccgtggagagcctggacgacgccgaggagctgctggccaccgagcaggccatggacatcctgggcttcctgcccgacgagaagtacggctgctacaagctgaccggcgccatcatgcacttcggcaacatgaagttcaagcagaagcccagagaggagcagctggaggccgacggcaccgagaacgccgacaaggccgccttcctgatgggcatcaacagcagcgagctggtgaagtgcctgatccaccccagaatcaaggtgggcaacgagtacgtgaccagaggccagaccatcgagcaggtgacctgcgccgtgggcgccctgagcaagagcatgtacgagagaatgttcaagtggctggtggccagaatcaacagagccctggacgccaagctgagcagacagttcttcatcggcatcctggacatcaccggcttcgagatcctggagtacaacagcctggagcagctgtgcatcaacttcaccaacgagaagctgcagcagttcttcaactggcacatgttcgtgctggagcaggaggagtacaagaaggagagcatcgagtgggtgagcatcggcttcggcctggacctgcaggcctgcatcgacctgatcgagaagcccatgggcatcctgagcatcctggaggaggagtgcatgttccccaaggccaccgacctgaccttcaagaccaagctgttcgacaaccacttcggcaagagcgtgcacctgcagaagcccaagcccgacaagaagaagttcgaggcccacttcgagctggtgcactacgccggcgtggtgccctacaacatcagcggctggctggagaagaacaaggacctgctgaacgagaccgtggtggccgtgttccagaagagcagcaacagactgctggccagcctgttcgagaactacatgagcaccgacagcgccatccccttcggcgagaagaagagaaagaagggcgccagcttccagaccgtggccagcctgcacaaggagaacctgaacaagctgatgaccaacctgaagagcaccgccccccacttcgtgagatgcatcaaccccaacgtgaacaagatccccggcatcctggacccctacctggtgctgcagcagctgagatgcaacggcgtgctggagggcaccagaatctgcagagagggcttccccaacagactgcagtacgccgacttcaagcagagatactgcatcctgaaccccagaaccttccccaagagcaagttcgtgagcagcagaaaggccgccgaggagctgctgggcagcctggagatcgaccacacccagtacagattcggcatcaccaaggtgttcttcaaggccggcttcctgggccagctggaggccatcagagacgagagactgagcaaggtgttcaccctgttccaggccagagcccagggcaagctgatgagaatcaagttccagaagatcctggaggagagagacgccctgatcctgatccagtggaacatcagagccttcatggccgtgaagaactggccctggatgagactgttcttcaagatcaagcccctggtgaagagcagcgaggtgggcgaggaggtggccggcctgaaggaggagtgcgcccagctgcagaaggccctggagaagagcgagttccagagagaggagctgaaggccaagcaggtgagcctgacccaggagaagaacgacctgatcctgcagctgcaggccgagcaggagaccctggccaacgtggaggagcagtgcgagtggctgatcaagagcaagatccagctggaggccagagtgaaggagctgagcgagagagtggaggaggaggaggagatcaacagcgagctgaccgccagaggcagaaagctggaggacgagtgcttcgagctgaagaaggagatcgacgacctggagaccatgctggtgaagagcgagaaggagaagagaaccaccgagcacaaggtgaagaacctgaccgaggaggtggagttcctgaacgaggacatcagcaagctgaacagagccgccaaggtggtgcaggaggcccaccagcagaccctggacgacctgcacatggaggaggagaagctgagcagcctgagcaaggccaacctgaagctggagcagcaggtggacgagctggagggcgccctggagcaggagagaaaggccagaatgaactgcgagagagagctgcacaagctggagggcaacctgaagctgaacagagagagcatggagaacctggagagcagccagagacacctggccgaggagctgagaaagaaggagctggagctgagccagatgaacagcaaggtggagaacgagaagggcctggtggcccagctgcagaagaccgtgaaggagctgcagacccagatcaaggacctgaaggagaagctggaggccgagagaaccaccagagccaagatggagagagagagagccgacctgacccaggacctggccgacctgaacgagagactggaggaggtgggcggcagcagcctggcccagctggagatcaccaagaagcaggagaccaagttccagaagctgcacagagacatggaggaggccaccctgcacttcgagaccaccagcgccagcctgaagaagagacacgccgacagcctggccgagctggagggccaggtggagaacctgcagcaggtgaagcagaagctggagaaggacaagagcgacctgcagctggaggtggacgacctgctgaccagagtggagcagatgaccagagccaaggccaacgccgagaagctgtgcaccctgtacgaggagagactgcacgaggccaccgccaagctggacaaggtgacccagctggccaacgacctggccgcccagaagaccaagctgtggagcgagagcggcgagttcctgagaagactggaggagaaggaggccctgatcaaccagctgagcagagagaagagcaacttcaccagacagatcgaggacctgagaggccagctggagaaggagaccaagagccagagcgccctggcccacgccctgcagaaggcccagagagactgcgacctgctgagagagcagtacgaggaggagcaggaggtgaaggccgagctgcacagaaccctgagcaaggtgaacgccgagatggtgcagtggagaatgaagtacgagaacaacgtgatccagagaaccgaggacctggaggacgccaagaaggagctggccatcagactgcaggaggccgccgaggccatgggcgtggccaacgccagaaacgccagcctggagagagccagacaccagctgcagctggagctgggcgacgccctgagcgacctgggcaaggtgagaagcgccgccgccagactggaccagaagcagctgcagagcggcaaggccctggccgactggaagcagaagcacgaggagagccaggccctgctggacgccagccagaaggaggtgcaggccctgagcaccgagctgctgaagctgaagaacacctacgaggagagcatcgtgggccaggagaccctgagaagagagaacaagaacctgcaggaggagatcagcaacctgaccaaccaggtgagagagggcaccaagaacctgaccgagatggagaaggtgaagaagctgatcgaggaggagaagaccgaggtgcaggtgaccctggaggagaccgagggcgccctggagagaaacgagagcaagatcctgcacttccagctggagctgctggaggccaaggccgagctggagagaaagctgagcgagaaggacgaggagatcgagaacttcagaagaaagcagcagtgcaccatcgacagcctgcagagcagcctggacagcgaggccaagagcagaatcgaggtgaccagactgaagaagaagatggaggaggacctgaacgagatggagctgcagctgagctgcgccaacagacaggtgagcgaggccaccaagagcctgggccagctgcagatccagatcaaggacctgcagatgcagctggacgacagcacccagctgaacagcgacctgaaggagcaggtggccgtggccgagagaagaaacagcctgctgcagagcgagctggaggacctgagaagcctgcaggagcagaccgagagaggcagaagactgagcgaggaggagctgctggaggccaccgagagaatcaacctgttctacacccagaacaccagcctgctgagccagaagaagaagctggaggccgacgtggccagaatgcagaaggaggccgaggaggtggtgcaggagtgccagaacgccgaggagaaggccaagaaggccgccatcgaggccgccaacctgagcgaggagctgaagaagaagcaggacaccatcgcccacctggagagaaccagagagaacatggagcagaccatcaccgacctgcagaagagactggccgaggccgagcagatggccctgatgggcagcagaaagcagatccagaagctggagagcagagtgagagagctggagggcgagctggagggcgagatcagaagaagcgccgaggcccagagaggcgccagaagactggagagatgcatcaaggagctgacctaccaggccgaggaggacaagaagaacctgagcagaatgcagacccagatggacaagctgcagctgaaggtgcagaactacaagcagcaggtggaggtggccgagacccaggccaaccagtacctgagcaagtacaagaagcagcagcacgagctgaacgaggtgaaggagagagccgaggtggccgagagccaggtgaacaagctgaagatcaaggccagagagttcggcaagaaggtgcaggaggagtag

SEQ ID NO: 90110 - DNA, 5826 bp, synthetic construct
  misc_feature 1..5826: note = Description of Artificial Sequence: Synthetic coding sequence
  source 1..5826: mol_type = other DNA
atgagcagcgacagcgagctggccgtgttcggcgaggccgcccccttcctgagaaagagcgagagagagagaatcgaggcccagaacagacccttcgacgccaagaccagcgtgttcgtggccgagcccaaggagagcttcgtgaagggcaccatccagagcagagagggcggcaaggtgaccgtgaagaccgagggcggcgccaccctgaccgtgaaggacgaccaggtgttccccatgaacccccccaagtacgacaagatcgaggacatggccatgatgacccacctgcacgagcccgccgtgctgtacaacctgaaggagagatacgccgcctggatgatctacacctacagcggcctgttctgcgtgaccgtgaacccctacaagtggctgcccgtgtacaagcccgaggtggtgaccgcctacagaggcaagaagagacaggaggcccccccccacatcttcagcatcagcgacaacgcctaccagttcatgctgaccgacagagagaaccagagcatcctgatcaccggcgagagcggcgccggcaagaccgtgaacaccaagagagtgatccagtacttcgccaccatcgccgtgaccggcgagaagaagaaggaggagatcaccagcggcaagatccagggcaccctggaggaccagatcatcagcgccaaccccctgctggaggccttcggcaacgccaagaccgtgagaaacgacaacagcagcagattcggcaagttcatcagaatccacttcggcaccaccggcaagctggccagcgccgacatcgagacctacctgctggagaagagcagagtggtgttccagctgaaggccgagagaagctaccacatcttctaccagatcaccagcaacaagaagcccgagctgatcgagatgctgctgatcaccaccaacccctacgactaccccttcgtgagccagggcgagatcagcgtggccagcatcgacgaccaggaggagctgatggccaccgacagcgccatcgacatcctgggcttcaccaacgaggagaaggtgagcatctacaagctgaccggcgccgtgatgcactacggcaacctgaagttcaagcagaagcagagagaggagcaggccgagcccgacggcaccgaggtggccgacaaggccgcctacctgcagagcctgaacagcgccgacctgctgaaggccctgtgctaccccagagtgaaggtgggcaacgagtacgtgaccaagggccagaccgtggagcaggtgagcaacgccgtgggcgccctggccaaggccgtgtacgagaagatgttcctgtggatggtggccagaatcaaccagcagctggacaccaagcagcccagacagtacttcatcggcgtgctggacatcgccggcttcgagatcttcgacttcaacagcctggagcagctgtgcatcaacttcaccaacgagaagctgcagcagttcttcaaccaccacatgttcgtgctggagcaggaggagtacaagaaggagggcatcgagtggaccttcatcgacttcggcatggacctggccgcctgcatcgagctgatcgagaagcccatgggcatcttcagcatcctggaggaggagtgcatgttccccaaggccaccgacaccagcttcaagaacaagctgtacgaccagcacctgggcaagagcgccaacttccagaagcccaaggtggtgaagggcaaggccgaggcccacttcgccctgatccactacgccggcgtggtggactacaacatcaccggctggctggagaagaacaaggaccccctgaacgagaccgtggtgggcctgtaccagaagagcgccatgaagaccctggcccagctgttcagcggcgcccagaccgccgagggcgagggcgccggcggcggcgccaagaagggcggcaagaagaagggcagcagcttccagaccgtgagcgccctgttcagagagaacctgaacaagctgatgaccaacctgagaagcacccacccccacttcgtgagatgcatcatccccaacgagaccaagacccccggcgccatggagcacgagctggtgctgcaccagctgagatgcaacggcgtgctggagggcatcagaatctgcagaaagggcttccccagcagaatcctgtacgccgacttcaagcagagatacaaggtgctgaacgccagcgccatccccgagggccagttcatcgacagcaagaaggccagcgagaagctgctggccagcatcgacatcgaccacacccagtacaagttcggccacaccaaggtgttcttcaaggccggcctgctgggcctgctggaggagatgagagacgacaagctggcccagctgatcaccagaacccaggccagatgcagaggcttcctggccagagtggagtaccagagaatggtggagagaagagaggccatcttctgcatccagtacaacatcagaagcttcatgaacgtgaagcactggccctggatgaagctgttcttcaagatcaagcccctgctgaagagcgccgagaccgagaaggagatggccaccatgaaggaggagttccagaagatcaaggacgagctggccaagagcgaggccaagagaaaggagctggaggagaagatggtgaccctgctgaaggagaagaacgacctgcagctgcaggtgcaggccgaggccgagggcctggccgacgccgaggagagatgcgaccagctgatcaagaccaagatccagctggaggccaagatcaaggaggtgaccgagagagccgaggacgaggaggagatcaacgccgagctgaccgccaagaagagaaagctggaggacgagtgcagcgagctgaagaaggacatcgacgacctggagctgaccctggccaaggtggagaaggagaagcacgccaccgagaacaaggtgaagaacctgaccgaggagatggccggcctggacgagaccatcgccaagctgaccaaggagaagaaggccctgcaggaggcccaccagcagaccctggacgacctgcaggccgaggaggacaaggtgaacaccctgaccaaggccaagatcaagctggagcagcaggtggacgacctggagggcagcctggagcaggagaagaagctgagaatggacctggagagagccaagagaaagctggagggcgacctgaagctggcccaggagagcatcatggacatcgagaacgagaagcagcagctggacgagaagctgaagaagaaggagttcgagatcagcaacctgcagagcaagatcgaggacgagcaggccctgggcatccagctgcagaagaagatcaaggagctgcaggccagaatcgaggagctggaggaggagatcgaggccgagagagccagcagagccaaggccgagaagcagagaagcgacctgagcagagagctggaggagatcagcgagagactggaggaggccggcggcgccaccagcgcccagatcgagatgaacaagaagagagaggccgagttccagaagatgagaagagacctggaggaggccaccctgcagcacgaggccaccgccgccaccctgagaaagaagcacgccgacagcgtggccgagctgggcgagcagatcgacaacctgcagagagtgaagcagaagctggagaaggagaagagcgagatgaagatggagatcgacgacctggccagcaacgtggagaccgtgagcaaggccaagggcaacctggagaagatgtgcagaaccctggaggaccagctgagcgagctgaagagcaaggaggaggagcagcagagactgatcaacgacctgaccgcccagagaggcagactgcagaccgagagcggcgagttcagcagacagctggacgagaaggaggccctggtgagccagctgagcagaggcaagcaggccttcacccagcagatcgaggagctgaagagacagctggaggaggagatcaaggccaagaacgccctggcccacgccctgcagagcagcagacacgactgcgacctgctgagagagcagtacgaggaggagcaggagagcaaggccgagctgcagagagccctgagcaaggccaacaccgaggtggcccagtggagaaccaagtacgagaccgacgccatccagagaaccgaggagctggaggaggccaagaagaagctggcccagagactgcaggccgccgaggagcacgtggaggccgtgaacgccaagtgcgccagcctggagaagaccaagcagagactgcagaacgaggtggaggacctgatgctggacgtggagagaaccaacgccgcctgcgccgccctggacaagaagcagagaaacttcgacaagatcctggccgagtggaagcagaagtgcgaggagacccacgccgagctggaggccagccagaaggaggccagaagcctgggcaccgagctgttcaagatcaagaacgcctacgaggagagcctggaccagctggagaccctgaagagagagaacaagaacctgcagcaggagatcagcgacctgaccgagcagatcgccgagggcggcaagagaatccacgagctggagaagatcaagaagcaggtggagcaggagaagtgcgagctgcaggccgccctggaggaggccgaggccagcctggagcacgaggagggcaagatcctgagaatccagctggagctgaaccaggtgaagagcgaggtggacagaaagatcgccgagaaggacgaggagatcgaccagctgaagagaaaccacatcagaatcgtggagagcatgcagagcaccctggacgccgagatcagaagcagaaacgacgccatcagactgaagaagaagatggagggcgacctgaacgagatggagatccagctgaaccacgccaacagaatggccgccgaggccctgagaaactacagaaacacccagggcatcctgaaggacacccagatccacctggacgacgccctgagaagccaggaggacctgaaggagcagctggccatggtggagagaagagccaacctgctgcaggccgagatcgaggagctgagagccaccctggagcagaccgagagaagcagaaagatcgccgagcaggagctgctggacgccagcgagagagtgcagctgctgcacacccagaacaccagcctgatcaacaccaagaagaagctggagaccgacatcagccagatgcagggcgagatggaggacatcctgcaggaggccagaaacgccgaggagaaggccaagaaggccatcaccgacgccgccatgatggccgaggagctgaagaaggagcaggacaccagcgcccacctggagagaatgaagaagaacatggagcagaccgtgaaggacctgcagctgagactggacgaggccgagcagctggccctgaagggcggcaagaagcagatccagaagctggaggccagagtgagagagctggagggcgaggtggagagcgagcagaagagaaacgccgaggccgtgaagggcctgagaaagcacgagagaagagtgaaggagctgacctaccagaccgaggaggacagaaagaacatcctgagactgcaggacctggtggacaagctgcaggccaaggtgaagagctacaagagacaggccgaggaggccgaggagcagagcaacaccaacctggccaagttcagaaagctgcagcacgagctggaggaggccgaggagagagccgacatcgccgagagccaggtgaacaagctgagagtgaagagcagagaggtgcacaccaaggtgatcagcgaggagtag

SEQ ID NO: 90111 - DNA, 5826 bp, synthetic construct; identical to SEQ ID NO: 90110
  misc_feature 1..5826: note = Description of Artificial Sequence: Synthetic coding sequence
  source 1..5826: mol_type = other DNA

SEQ ID NO: 90112 - DNA, 549 bp, synthetic construct
  misc_feature 1..549: note = Description of Artificial Sequence: Synthetic coding sequence
  source 1..549: mol_type = other DNA
atgagcagcgacagcgagctggccgtgttcggcgaggccgcccccttcctgagaaagagcgagagagagagaatcgaggcccagaacagacccttcgacgccaagaccagcgtgttcgtggccgagcccaaggagagcttcgtgaagggcaccatccagagcagagagggcggcaaggtgaccgtgaagaccgagggcggcgccaccctgaccgtgaaggacgaccaggtgttccccatgaacccccccaagtacgacaagatcgaggacatggccatgatgacccacctgcacgagcccgccgtgctgtacaacctgaaggagagatacgccgcctggatgatctacacctacagcggcctgttctgcgtgaccgtgaacccctacaagtggctgcccgtgtacaagcccgaggtggtgaccgcctacagaggcaagaagagacaggaggcccccccccacatcttcagcatcagcgacaacgcctaccagttcatgctgaccgacagagagaaccagagcatcctgatcaccggcgagagcggctag

SEQ ID NO: 90113 - DNA, 405 bp, synthetic construct
  misc_feature 1..405: note = Description of Artificial Sequence: Synthetic coding sequence
  source 1..405: mol_type = other DNA
atgagcagcgacagcgagctggccgtgttcggcgaggccgcccccttcctgagaaagagcgagagagagagaatcgaggcccagaacagacccttcgacgccaagaccagcgtgttcgtggccgagcccaaggagagcttcgtgaagggcaccatccagagcagagagggcggcaaggtgaccgtgaagaccgagggcggcgccaccctgaccgtgaaggacgaccaggtgttccccatgaacccccccaagtacgacaagatcgaggacatggccatgatgacccacctgcacgagcccgccgtgctgtacaacctgaaggagagatacgccgcctggatgatctacacctacagcggcctgttctgcgtgaccgtgaacccctacaagtggctgcccgtgtag

SEQ ID NO: 90114 - DNA, 2127 bp, synthetic construct
  misc_feature 1..2127: note = Description of Artificial Sequence: Synthetic coding sequence
  source 1..2127: mol_type = other DNA
atgagcagcgacagcgagctggccgtgttcggcgaggccgcccccttcctgagaaagagcgagagagagagaatcgaggcccagaacagacccttcgacgccaagaccagcgtgttcgtggccgagcccaaggagagcttcgtgaagggcaccatccagagcagagagggcggcaaggtgaccgtgaagaccgagggcggcgccaccctgaccgtgaaggacgaccaggtgttccccatgaacccccccaagtacgacaagatcgaggacatggccatgatgacccacctgcacgagcccgccgtgctgtacaacctgaaggagagatacgccgcctggatgatctacacctacagcggcctgttctgcgtgaccgtgaacccctacaagtggctgcccgtgtacaagcccgaggtggtgaccgcctacagaggcaagaagagacaggaggcccccccccacatcttcagcatcagcgacaacgcctaccagttcatgctgaccgacagagagaaccagagcatcctgatcaccggcgagagcggcgccggcaagaccgtgaacaccaagagagtgatccagtacttcgccaccatcgccgtgaccggcgagaagaagaaggaggagatcaccagcggcaagatccagggcaccctggaggaccagatcatcagcgccaaccccctgctggaggccttcggcaacgccaagaccgtgagaaacgacaacagcagcagattcggcaagttcatcagaatccacttcggcaccaccggcaagctggccagcgccgacatcgagacctacctgctggagaagagcagagtggtgttccagctgaaggccgagagaagctaccacatcttctaccagatcaccagcaacaagaagcccgagctgatcgagatgctgctgatcaccaccaacccctacgactaccccttcgtgagccagggcgagatcagcgtggccagcatcgacgaccaggaggagctgatggccaccgacagcgccatcgacatcctgggcttcaccaacgaggagaaggtgagcatctacaagctgaccggcgccgtgatgcactacggcaacctgaagttcaagcagaagcagagagaggagcaggccgagcccgacggcaccgaggtggccgacaaggccgcctacctgcagagcctgaacagcgccgacctgctgaaggccctgtgctaccccagagtgaaggtgggcaacgagtacgtgaccaagggccagaccgtggagcaggtgagcaacgccgtgggcgccctggccaaggccgtgtacgagaagatgttcctgtggatggtggccagaatcaaccagcagctggacaccaagcagcccagacagtacttcatcggcgtgctggacatcgccggcttcgagatcttcgacttcaacagcctggagcagctgtgcatcaacttcaccaacgagaagctgcagcagttcttcaaccaccacatgttcgtgctggagcaggaggagtacaagaaggagggcatcgagtggaccttcatcgacttcggcatggacctggccgcctgcatcgagctgatcgagaagcccatgggcatcttcagcatcctggaggaggagtgcatgttccccaaggccaccgacaccagcttcaagaacaagctgtacgaccagcacctgggcaagagcgccaacttccagaagcccaaggtggtgaagggcaaggccgaggcccacttcgccctgatccactacgccggcgtggtggactacaacatcaccggctggctggagaagaacaaggaccccctgaacgagaccgtggtgggcctgtaccagaagagcgccatgaagaccctggcccagctgttcagcggcgcccagaccgccgagggcgagggcgccggcggcggcgccaagaagggcggcaagaagaagggcagcagcttccagaccgtgagcgccctgttcagagaggagcagagcaacaccaacctggccaagttcagaaagctgcagcacgagctggaggaggccgaggagagagccgacatcgccgagagccaggtgaacaagctgagagtgaagagcagagaggtgcacaccaaggtgatcagcgaggagtag

SEQ ID NO: 90115 - DNA, 5820 bp, synthetic construct
  misc_feature 1..5820: note = Description of Artificial Sequence: Synthetic coding sequence
  source 1..5820: mol_type = other DNA
atgagcagcgacagcgagatggccatcttcggcgaggccgcccccttcctgagaaagagcgagagagagagaatcgaggcccagaacaagcccttcgacgccaagaccagcgtgttcgtggtggaccccaaggagagcttcgtgaaggccaccgtgcagagcagagagggcggcaaggtgaccgccaagaccgaggccggcgccaccgtgaccgtgaaggacgaccaggtgttccccatgaacccccccaagtacgacaagatcgaggacatggccatgatgacccacctgcacgagcccgccgtgctgtacaacctgaaggagagatacgccgcctggatgatctacacctacagcggcctgttctgcgtgaccgtgaacccctacaagtggctgcccgtgtacaacgccgaggtggtgaccgcctacagaggcaagaagagacaggaggcccccccccacatcttcagcatcagcgacaacgcctaccagttcatgctgaccgacagagagaaccagagcatcctgatcaccggcgagagcggcgccggcaagaccgtgaacaccaagagagtgatccagtacttcgccaccatcgccgtgaccggcgagaagaagaaggaggaggtgaccagcggcaagatgcagggcaccctggaggaccagatcatcagcgccaaccccctgctggaggccttcggcaacgccaagaccgtgagaaacgacaacagcagcagattcggcaagttcatcagaatccacttcggcaccaccggcaagctggccagcgccgacatcgagacctacctgctggagaagagcagagtgaccttccagctgaaggccgagagaagctaccacatcttctaccagatcatgagcaacaagaagcccgacctgatcgagatgctgctgatcaccaccaacccctacgactacgccttcgtgagccagggcgagatcaccgtgcccagcatcgacgaccaggaggagctgatggccaccgacagcgccatcgagatcctgggcttcaccagcgacgagagagtgagcatctacaagctgaccggcgccgtgatgcactacggcaacatgaagttcaagcagaagcagagagaggagcaggccgagcccgacggcaccgaggtggccgacaaggccgcctacctgcagaacctgaacagcgccgacctgctgaaggccctgtgctaccccagagtgaaggtgggcaacgagtacgtgaccaagggccagaccgtgcagcaggtgtacaacgccgtgggcgccctggccaaggccgtgtacgacaagatgttcctgtggatggtgaccagaatcaaccagcagctggacaccaagcagcccagacagtacttcatcggcgtgctggacatcgccggcttcgagatcttcgacttcaacagcctggagcagctgtgcatcaacttcaccaacgagaagctgcagcagttcttcaaccaccacatgttcgtgctggagcaggaggagtacaagaaggagggcatcgagtggaccttcatcgacttcggcatggacctggccgcctgcatcgagctgatcgagaagcccatgggcatcttcagcatcctggaggaggagtgcatgttccccaaggccaccgacaccagcttcaagaacaagctgtacgagcagcacctgggcaagagcaacaacttccagaagcccaagcccgccaagggcaagcccgaggcccacttcagcctgatccactacgccggcaccgtggactacaacatcgccggctggctggacaagaacaaggaccccctgaacgagaccgtggtgggcctgtaccagaagagcgccatgaagaccctggccctgctgttcgtgggcgccaccggcgccgaggccgaggccggcggcggcaagaagggcggcaagaagaagggcagcagcttccagaccgtgagcgccctgttcagagagaacctgaacaagctgatgaccaacctgagaagcacccacccccacttcgtgagatgcatcatccccaacgagaccaagacccccggcgccatggagcacgagctggtgctgcaccagctgagatgcaacggcgtgctggagggcatcagaatctgcagaaagggcttccccagcagaatcctgtacgccgacttcaagcagagatacaaggtgctgaacgccagcgccatccccgagggccagttcatcgacagcaagaaggccagcgagaagctgctgggcagcatcgacatcgaccacacccagtacaagttcggccacaccaaggtgttcttcaaggccggcctgctgggcctgctggaggagatgagagacgagaagctggcccagctgatcaccagaacccaggccatgtgcagaggcttcctggccagagtggagtaccagaagatggtggagagaagagagagcatcttctgcatccagtacaacgtgagagccttcatgaacgtgaagcactggccctggatgaagctgtacttcaagatcaagcccctgctgaagagcgccgagaccgagaaggagatggccaacatgaaggaggagttcgagaagaccaaggaggagctggccaagaccgaggccaagagaaaggagctggaggagaagatggtgaccctgatgcaggagaagaacgacctgcagctgcaggtgcaggccgaggccgacagcctggccgacgccgaggagagatgcgaccagctgatcaagaccaagatccagctggaggccaagatcaaggaggtgaccgagagagccgaggacgaggaggagatcaacgccgagctgaccgccaagaagagaaagctggaggacgagtgcagcgagctgaagaaggacatcgacgacctggagctgaccctggccaaggtggagaaggagaagcacgccaccgagaacaaggtgaagaacctgaccgaggagatggccggcctggacgagaccatcgccaagctgaccaaggagaagaaggccctgcaggaggcccaccagcagaccctggacgacctgcaggccgaggaggacaaggtgaacaccctgaccaaggccaagatcaagctggagcagcaggtggacgacctggagggcagcctggagcaggagaagaagatcagaatggacctggagagagccaagagaaagctggagggcgacctgaagctggcccaggagagcaccatggacatcgagaacgacaagcagcagctggacgagaagctgaagaagaaggagttcgagatgagcggcctgcagagcaagatcgaggacgagcaggccctgggcatgcagctgcagaagaagatcaaggagctgcaggccagaatcgaggagctggaggaggagatcgaggccgagagagccagcagagccaaggccgagaagcagagaagcgacctgagcagagagctggaggagatcagcgagagactggaggaggccggcggcgccaccagcgcccagatcgagatgaacaagaagagagaggccgagttccagaagatgagaagagacctggaggaggccaccctgcagcacgaggccaccgccgccaccctgagaaagaagcacgccgacagcgtggccgagctgggcgagcagatcgacaacctgcagagagtgaagcagaagctggagaaggagaagagcgagatgaagatggagatcgacgacctggccagcaacatggagaccgtgagcaaggccaagggcaacctggagaagatgtgcagagccctggaggaccagctgagcgagatcaagaccaaggaggaggagcagcagagactgatcaacgacctgaccgcccagagagccagactgcagaccgagagcggcgagtacagcagacagctggacgagaaggacaccctggtgagccagctgagcagaggcaagcaggccttcacccagcagatcgaggagctgaagagacagctggaggaggagatcaaggccaagagcgccctggcccacgccctgcagagcagcagacacgactgcgacctgctgagagagcagtacgaggaggagcaggaggccaaggccgagctgcagagagccatgagcaaggccaacagcgaggtggcccagtggagaaccaagtacgagaccgacgccatccagagaaccgaggagctggaggaggccaagaagaagctggcccagagactgcaggacgccgaggagcacgtggaggccgtgaacgccaagtgcgccagcctggagaagaccaagcagagactgcagaacgaggtggaggacctgatgatcgacgtggagagaaccaacgccgcctgcgccgccctggacaagaagcagagaaacttcgacaagatcctggccgagtggaagcagaagtgcgaggagacccacgccgagctggaggccagccagaaggagagcagaagcctgagcaccgagctgttcaagatcaagaacgcctacgaggagagcctggaccagctggagaccctgaagagagagaacaagaacctgcagcaggagatcagcgacctgaccgagcagatcgccgagggcggcaagagaatccacgagctggagaagatcaagaagcaggtggagcaggagaagagcgagctgcaggccgccctggaggaggccgaggccagcctggagcacgaggagggcaagatcctgagaatccagctggagctgaaccaggtgaagagcgaggtggacagaaagatcgccgagaaggacgaggagatcgaccagatgaagagaaaccacatcagaatcgtggagagcatgcagagcaccctggacgccgagatcagaagcagaaacgacgccatcagactgaagaagaagatggagggcgacctgaacgagatggagatccagctgaaccacgccaacagaatggccgccgaggccctgagaaactacagaaacacccaggccatcctgaaggacacccagctgcacctggacgacgccctgagaagccaggaggacctgaaggagcagctggccatggtggagagaagagccaacctgctgcaggccgagatcgaggagctgagagccaccctggagcagaccgagagaagcagaaagatcgccgagcaggagctgctggacgccagcgagagagtgcagctgctgcacacccagaacaccagcctgatcaacaccaagaagaagctggagaccgacatcagccagatccagggcgagatggaggacatcatccaggaggccagaaacgccgaggagaaggccaagaaggccatcaccgacgccgccatgatggccgaggagctgaagaaggagcaggacaccagcgcccacctggagagaatgaagaagaacctggagcagaccgtgaaggacctgcagcacagactggacgaggccgagcagctggccctgaagggcggcaagaagcagatccagaagctggaggccagagtgagagagctggagggcgaggtggagagcgagcagaagagaaacgtggaggccgtgaagggcctgagaaagcacgagagaaaggtgaaggagctgacctaccagaccgaggaggacagaaagaacatcctgagactgcaggacctggtggacaagctgcaggccaaggtgaagagctacaagagacaggccgaggaggccgaggagcagagcaacgtgaacctgagcaagttcagaagaatccagcacgagctggaggaggccgaggagagagccgacatcgccgagagccaggtgaacaagctgagagtgaagagcagagaggtgcacaccaagatcatcagcgaggagtag

SEQ ID NO: 90116 - DNA, 5820 bp, synthetic construct
  misc_feature 1..5820: note = Description of Artificial Sequence: Synthetic coding sequence
  source 1..5820: mol_type = other DNA
atgagcagcgacagcgagatggccatcttcggcgaggccgcccccttcctgagaaagagcgagaaggagagaatcgaggcccagaacaagcccttcgacgccaagaccagcgtgttcgtggtggaccccaaggagagctacgtgaaggccatcgtgcagagcagagagggcggcaaggtgaccgccaagaccgaggccggcgccaccgtgaccgtgaaggaggaccaggtgttcagcatgaacccccccaagtacgacaagatcgaggacatggccatgatgacccacctgcacgagcccgccgtgctgtacaacctgaaggagagatacgccgcctggatgatctacacctacagcggcctgttctgcgtgaccgtgaacccctacaagtggctgcccgtgtacaaccccgaggtggtgaccgcctacagaggcaagaagagacaggaggcccccccccacatcttcagcatcagcgacaacgcctaccagttcatgctgaccgacagagagaaccagagcatcctgatcaccggcgagagcggcgccggcaagaccgtgaacaccaagagagtgatccagtacttcgccaccatcgccgtgaccggcgagaagaagaaggaggagcccgccagcggcaagatgcagggcaccctggaggaccagatcatcagcgccaaccccctgctggaggccttcggcaacgccaagaccgtgagaaacgacaacagcagcagattcggcaagttcatcagaatccacttcggcgccaccggcaagctggccagcgccgacatcgagacctacctgctggagaagagcagagtgaccttccagctgaaggccgagagaagctaccacatcttctaccagatcctgagcaacaagaagcccgagctgatcgagatgctgctgatcaccaccaacccctacgacttcgccttcgtgagccagggcgagatcaccgtgcccagcatcgacgaccaggaggagctgatggccaccgacagcgccgtggacatcctgggcttcaccgccgacgagaaggtggccatctacaagctgaccggcgccgtgatgcactacggcaacatgaagttcaagcagaagcagagagaggagcaggccgagcccgacggcaccgaggtggccgacaaggccgcctacctgaccagcctgaacagcgccgacctgctgaagagcctgtgctaccccagagtgaaggtgggcaacgagttcgtgaccaagggccagaccgtgcagcaggtgtacaacgccgtgggcgccctggccaaggccatctacgagaagatgttcctgtggatggtgaccagaatcaaccagcagctggacaccaagcagcccagacagtacttcatcggcgtgctggacatcgccggcttcgagatcttcgacttcaacagcctggagcagctgtgcatcaacttcaccaacgagaagctgcagcagttcttcaaccaccacatgttcgtgctggagcaggaggagtacaagaaggagggcatcgagtgggagttcatcgacttcggcatggacctggccgcctgcatcgagctgatcgagaagcccatgggcatcttcagcatcctggaggaggagtgcatgttccccaaggccaccgacaccagcttcaagaacaagctgtacgagcagcacctgggcaagagcaacaacttccagaagcccaagcccgccaagggcaagcccgaggcccacttcagcctggtgcactacgccggcaccgtggactacaacatcgccggctggctggacaagaacaaggaccccctgaacgagaccgtggtgggcctgtaccagaagagcgccatgaagaccctggccttcctgttcagcggcgcccagaccgccgaggccgagggcggcggcggcaagaagggcggcaagaagaagggcagcagcttccagaccgtgagcgccctgttcagagagaacctgaacaagctgatgaccaacctgagaagcacccacccccacttcgtgagatgcatcatccccaacgagaccaagacccccggcgccatggagcacgagctggtgctgcaccagctgagatgcaacggcgtgctggagggcatcagaatctgcagaaagggcttccccagcagaatcctgtacgccgacttcaagcagagatacaaggtgctgaacgccagcgccatccccgagggccagttcatcgacagcaagaaggccagcgagaagctgctgggcagcatcgagatcgaccacacccagtacaagttcggccacaccaaggtgttcttcaaggccggcctgctgggcaccctggaggagatgagagacgagaagctggcccagctgatcaccagaacccaggccatctgcagaggcttcctgatgagagtggagttcagaaagatgatggagagaagagagagcatcttctgcatccagtacaacatcagagccttcatgaacgtgaagcactggccctggatgaagctgtacttcaagatcaagcccctgctgaagagcgccgagaccgagaaggagatggccaacatgaaggaggagttcgagaagaccaaggaggagctggccaagaccgaggccaagagaaaggagctggaggagaagatggtgaccctgatgcaggagaagaacgacctgcagctgcaggtgcaggccgaggccgacgccctggccgacgccgaggagagatgcgaccagctgatcaagaccaagatccagctggaggccaagatcaaggaggtgaccgagagagccgaggacgaggaggagatcaacgccgagctgaccgccaagaagagaaagctggaggacgagtgcagcgagctgaagaaggacatcgacgacctggagctgaccctggccaaggtggagaaggagaagcacgccaccgagaacaaggtgaagaacctgaccgaggagatggccggcctggacgagaccatcgccaagctgaccaaggagaagaaggccctgcaggaggcccaccagcagaccctggacgacctgcagatggaggaggacaaggtgaacaccctgaccaaggccaagaccaagctggagcagcaggtggacgacctggagggcagcctggagcaggagaagaagctgtgcatggacctggagagagccaagagaaagctggagggcgacctgaagctggcccaggagagcaccatggacaccgagaacgacaagcagcagctgaacgagaagctgaagaagaaggagttcgagatgagcaacctgcagggcaagatcgaggacgagcaggccctggccatccagctgcagaagaagatcaaggagctgcaggccagaatcgaggagctggaggaggagatcgaggccgagagagccagcagagccaaggccgagaagcagagaagcgacctgagcagagagctggaggagatcagcgagagactggaggaggccggcggcgccaccagcgcccagatcgagatgaacaagaagagagaggccgagttccagaagatgagaagagacctggaggagagcaccctgcagcacgaggccaccgccgccgccctgagaaagaagcacgccgacagcgtggccgagctgggcgagcagatcgacagcctgcagagagtgaagcagaagctggagaaggagaagagcgagctgaagatggagatcaacgacctggccagcaacatggagaccgtgagcaaggccaaggccaacttcgagaagatgtgcagaaccctggaggaccagctgagcgagatcaagaccaaggaggaggagcagcagagactgatcaacgagctgagcgcccagaaggccagactgcacaccgagagcggcgagttcagcagacagctggacgagaaggacgccatggtgagccagctgagcagaggcaagcaggccttcacccagcagatcgaggagctgaagagacagctggaggaggagaccaaggccaagagcaccctggcccacgccctgcagagcgccagacacgactgcgacctgctgagagagcagtacgaggaggagcaggaggccaaggccgagctgcagagaggcatgagcaaggccaacagcgaggtggcccagtggagaaccaagtacgagaccgacgccatccagagaaccgaggagctggaggaggccaagaagaagctggcccagagactgcaggacgccgaggagcacgtggaggccgtgaacagcaagtgcgccagcctggagaagaccaagcagagactgcagaacgaggtggaggacctgatgatcgacgtggagagaagcaacgccgcctgcatcgccctggacaagaagcagagaaacttcgacaaggtgctggccgagtggaagcagaagtacgaggagacccaggccgagctggaggccagccagaaggagagcagaagcctgagcaccgagctgttcaaggtgaagaacgcctacgaggagagcctggaccacctggagaccctgaagagagagaacaagaacctgcagcaggagatcagcgacctgaccgagcagatcgccgagggcggcaagcacatccacgagctggagaaggtgaagaagcagctggaccacgagaagagcgagctgcagaccagcctggaggaggccgaggccagcctggagcacgaggagggcaagatcctgagaatccagctggagctgaaccaggtgaagagcgagatcgacagaaagatcgccgagaaggacgaggagctggaccagctgaagagaaaccacctgagagtggtggagagcatgcagagcaccctggacgccgagatcagaagcagaaacgacgccctgagaatcaagaagaagatggagggcgacctgaacgagatggagatccagctgaaccacgccaacagacaggccgccgaggccctgagaaacctgagaaacacccagggcatcctgaaggacacccagctgcacctggacgacgccatcagaggccaggacgacctgaaggagcagctggccatggtggagagaagagccaacctgatgcaggccgaggtggaggagctgagagccagcctggagagaaccgagagaggcagaaagatggccgagcaggagctgctggacgccagcgagagagtgcagctgctgcacacccagaacaccagcctgatcaacaccaagaagaagctggagaccgacatcagccagatccagggcgagatggaggacatcgtgcaggaggccagaaacgccgaggagaaggccaagaaggccatcaccgacgccgccatgatggccgaggagctgaagaaggagcaggacaccagcgcccacctggagagaatgaagaagaacatggagcagaccgtgaaggacctgcagctgagactggacgaggccgagcagctggccctgaagggcggcaagaagcagatccagaagctggaggccagagtgagagagctggagagcgaggtggagagcgagcagaagcacaacgtggaggccgtgaagggcctgagaaagcacgagagaagagtgaaggagctgacctaccagaccgaggaggacagaaagaacatcctgagactgcaggacctggtggacaagctgcagaccaaggtgaaggcctacaagagacaggccgaggaggccgaggagcagagcaacgtgaacctggccaagttcagaaagctgcagcacgagctggaggaggccaaggagagagccgacatcgccgagagccaggtgaacaagctgagagtgaagagcagagaggtgcacaccaaggtgatcagcgaggagtag

SEQ ID NO: 90117 - DNA, 5820 bp, synthetic construct
  misc_feature 1..5820: note = Description of Artificial Sequence: Synthetic coding sequence
  source 1..5820: mol_type = other DNA
atgaccgacgcccagatggccgacttcggcgccgccgcccagtacctgagaaagagcgagaaggagagactggaggcccagaccagacccttcgacatcagaaccgagtgcttcgtgcccgacgacaaggaggagttcgtgaaggccaagatcctgagcagagagggcggcaaggtgatcgccgagaccgagaacggcaagaccgtgaccgtgaaggaggaccaggtgctgcagcagaacccccccaagttcgacaagatcgaggacatggccatgctgaccttcctgcacgagcccgccgtgctgttcaacctgaaggagagatacgccgcctggatgatctacacctacagcggcctgttctgcgtgaccgtgaacccctacaagtggctgcccgtgtacaacgccgaggtggtggccgcctacagaggcaagaagagaagcgaggcccccccccacatcttcagcatcagcgacaacgcctaccagtacatgctgaccgacagagagaaccagagcatcctgatcaccggcgagagcggcgccggcaagaccgtgaacaccaagagagtgatccagtacttcgccagcatcgccgccatcggcgacagaggcaagaaggacaacgccaacgccaacaagggcaccctggaggaccagatcatccaggccaaccccgccctggaggccttcggcaacgccaagaccgtgagaaacgacaacagcagcagattcggcaagttcatcagaatccacttcggcgccaccggcaagctggccagcgccgacatcgagacctacctgctggagaagagcagagtgatcttccagctgaaggccgagagaaactaccacatcttctaccagatcctgagcaacaagaagcccgagctgctggacatgctgctggtgaccaacaacccctacgactacgccttcgtgagccagggcgaggtgagcgtggccagcatcgacgacagcgaggagctgatggccaccgacagcgccttcgacgtgctgggcttcaccagcgaggagaaggccggcgtgtacaagctgaccggcgccatcatgcactacggcaacatgaagttcaagcagaagcagagagaggagcaggccgagcccgacggcaccgaggacgccgacaagagcgcctacctgatgggcctgaacagcgccgacctgctgaagggcctgtgccaccccagagtgaaggtgggcaacgagtacgtgaccaagggccagagcgtgcagcaggtgtactacagcatcggcgccctggccaaggccgtgtacgagaagatgttcaactggatggtgaccagaatcaacgccaccctggagaccaagcagcccagacagtacttcatcggcgtgctggacatcgccggcttcgagatcttcgacttcaacagcttcgagcagctgtgcatcaacttcaccaacgagaagctgcagcagttcttcaaccaccacatgttcgtgctggagcaggaggagtacaagaaggagggcatcgagtggaccttcatcgacttcggcatggacctgcaggcctgcatcgacctgatcgagaagcccatgggcatcatgagcatcctggaggaggagtgcatgttccccaaggccaccgacatgaccttcaaggccaagctgtacgacaaccacctgggcaagagcaacaacttccagaagcccagaaacatcaagggcaagcaggaggcccacttcagcctgatccactacgccggcaccgtggactacaacatcctgggctggctggagaagaacaaggaccccctgaacgagaccgtggtggccctgtaccagaagagcagcctgaagctgatggccaccctgttcagcagctacgccaccgccgacaccggcgacagcggcaagagcaagggcggcaagaagaagggcagcagcttccagaccgtgagcgccctgcacagagagaacctgaacaagctgatgaccaacctgagaaccacccacccccacttcgtgagatgcatcatccccaacgagagaaaggcccccggcgtgatggacaaccccctggtgatgcaccagctgagatgcaacggcgtgctggagggcatcagaatctgcagaaagggcttccccaacagaatcctgtacggcgacttcagacagagatacagaatcctgaaccccgtggccatccccgagggccagttcatcgacagcagaaagggcaccgagaagctgctgagcagcctggacatcgaccacaaccagtacaagttcggccacaccaaggtgttcttcaaggccggcctgctgggcctgctggaggagatgagagacgagagactgagcagaatcatcaccagaatgcaggcccaggccagaggccagctgatgagaatcgagttcaagaagatcgtggagagaagagacgccctgctggtgatccagtggaacatcagagccttcatgggcgtgaagaactggccctggatgaagctgtacttcaagatcaagcccctgctgaagagcgccgagaccgagaaggagatggccaccatgaaggaggagttcggcagaatcaaggagaccctggagaagagcgaggccagaagaaaggagctggaggagaagatggtgagcctgctgcaggagaagaacgacctgcagctgcaggtgcaggccgagcaggacaacctgaacgacgccgaggagagatgcgaccagctgatcaagaacaagatccagctggaggccaaggtgaaggagatgaacgagagactggaggacgaggaggagatgaacgccgagctgaccgccaagaagagaaagctggaggacgagtgcagcgagctgaagaaggacatcgacgacctggagctgaccctggccaaggtggagaaggagaagcacgccaccgagaacaaggtgaagaacctgaccgaggagatggccggcctggacgagatcatcgccaagctgaccaaggagaagaaggccctgcaggaggcccaccagcaggccctggacgacctgcaggtggaggaggacaaggtgaacagcctgagcaagagcaaggtgaagctggagcagcaggtggacgacctggagggcagcctggagcaggagaagaaggtgagaatggacctggagagagccaagagaaagctggagggcgacctgaagctgacccaggagagcatcatggacctggagaacgacaagctgcagctggaggagaagctgaagaagaaggagttcgacatcaaccagcagaacagcaagatcgaggacgagcaggtgctggccctgcagctgcagaagaagctgaaggagaaccaggccagaatcgaggagctggaggaggagctggaggccgagagaaccgccagagccaaggtggagaagctgagaagcgacctgagcagagagctggaggagatcagcgagagactggaggaggccggcggcgccaccagcgtgcagatcgagatgaacaagaagagagaggccgagttccagaagatgagaagagacctggaggaggccaccctgcagcacgaggccaccgccgccgccctgagaaagaagcacgccgacagcgtggccgagctgggcgagcagatcgacaacctgcagagagtgaagcagaagctggagaaggagaagagcgagttcaagctggagctggacgacgtgaccagcaacatggagcagatcatcaaggccaaggccaacctggagaaggtgagcagaaccctggaggaccaggccaacgagtacagagtgaagctggaggaggcccagagaagcctgaacgacttcaccacccagagagccaagctgcagaccgagaacggcgagctggccagacagctggaggagaaggaggccctgatcagccagctgaccagaggcaagctgagctacacccagcagatggaggacctgaagagacagctggaggaggagggcaaggccaagaacgccctggcccacgccctgcagagcgccagacacgactgcgacctgctgagagagcagtacgaggaggagaccgaggccaaggccgagctgcagagagtgctgagcaaggccaacagcgaggtggcccagtggagaaccaagtacgagaccgacgccatccagagaaccgaggagctggaggaggccaagaagaagctggcccagagactgcaggacgccgaggaggccgtggaggccgtgaacgccaagtgcagcagcctggagaagaccaagcacagactgcagaacgagatcgaggacctgatggtggacgtggagagaagcaacgccgccgccgccgccctggacaagaagcagagaaacttcgacaagatcctggccgagtggaagcagaagtacgaggagagccagagcgagctggagagcagccagaaggaggccagaagcctgagcaccgagctgttcaagctgaagaacgcctacgaggagagcctggagcacctggagaccttcaagagagagaacaagaacctgcaggaggagatcagcgacctgaccgagcagctgggcgagggcggcaagaacgtgcacgagctggagaaggtgagaaagcagctggaggtggagaagctggagctgcagagcgccctggaggaggccgaggccagcctggagcacgaggagggcaagatcctgagagcccagctggagttcaaccagatcaaggccgagatcgagagaaagctggccgagaaggacgaggagatggagcaggccaagagaaaccaccagagagtggtggacagcctgcagaccagcctggacgccgagaccagaagcagaaacgaggtgctgagagtgaagaagaagatggagggcgacctgaacgagatggagatccagctgagccacgccaacagaatggccgccgaggcccagaagcaggtgaagagcctgcagagcctgctgaaggacacccagatccagctggacgacgccgtgagagccaacgacgacctgaaggagaacatcgccatcgtggagagaagaaacaacctgctgcaggccgagctggaggagctgagagccgtggtggagcagaccgagagaagcagaaagctggccgagcaggagctgatcgagaccagcgagagagtgcagctgctgcacagccagaacaccagcctgatcaaccagaagaagaagatggagagcgacctgacccagctgcagagcgaggtggaggaggccgtgcaggagtgcagaaacgccgaggagaaggccaagaaggccatcaccgacgccgccatgatggccgaggagctgaagaaggagcaggacaccagcgcccacctggagagaatgaagaagaacatggagcagaccatcaaggacctgcagcacagactggacgaggccgagcagatcgccctgaagggcggcaagaagcagctgcagaagctggaggccagagtgagagagctggagggcgagctggaggccgagcagaagagaaacgccgagagcgtgaagggcatgagaaagagcgagagaagaatcaaggagctgacctaccagaccgaggaggacaagaagaacctgctgagactgcaggacctggtggacaagctgcagctgaaggtgaaggcctacaagagacaggccgaggaggccgaggagcaggccaacaccaacctgagcaagttcagaaaggtgcagcacgagctggacgaggccgaggagagagccgacatcgccgagagccaggtgaacaagctgagagccaagagcagagacatcggcgccaagcagaagatgcacgacgaggagtag

SEQ ID NO: 90118 - DNA, 5820 bp, synthetic construct; identical to SEQ ID NO: 90117
  misc_feature 1..5820: note = Description of Artificial Sequence: Synthetic coding sequence
  source 1..5820: mol_type = other DNA

SEQ ID NO: 90119 - DNA, 5808 bp, synthetic construct
  misc_feature 1..5808: note = Description of Artificial Sequence: Synthetic coding sequence
  source 1..5808: mol_type = other DNA
atgggcgacagcgagatggccgtgttcggcgccgccgccccctacctgagaaagagcgagaaggagagactggaggcccagaccagacccttcgacctgaagaaggacgtgttcgtgcccgacgacaagcaggagttcgtgaaggccaagatcgtgagcagagagggcggcaaggtgaccgccgagaccgagtacggcaagaccgtgaccgtgaaggaggaccaggtgatgcagcagaacccccccaagttcgacaagatcgaggacatggccatgctgaccttcctgcacgagcccgccgtgctgtacaacctgaaggacagatacggcagctggatgatctacacctacagcggcctgttctgcgtgaccgtgaacccctacaagtggctgcccgtgtacacccccgaggtggtggccgcctacagaggcaagaagagaagcgaggcccccccccacatcttcagcatcagcgacaacgcctaccagtacatgctgaccgacagagagaaccagagcatcctgatcaccggcgagagcggcgccggcaagaccgtgaacaccaagagagtgatccagtacttcgccgtgatcgccgccatcggcgacagaagcaagaaggaccagagccccggcaagggcaccctggaggaccagatcatccaggccaaccccgccctggaggccttcggcaacgccaagaccgtgagaaacgacaacagcagcagattcggcaagttcatcagaatccacttcggcgccaccggcaagctggccagcgccgacatcgagacctacctgctggagaagagcagagtgatcttccagctgaaggccgagagagactaccacatcttctaccagatcctgagcaacaagaagcccgagctgctggacatgctgctgatcaccaacaacccctacgactacgccttcatcagccagggcgagaccaccgtggccagcatcgacgacgccgaggagctgatggccaccgacaacgccttcgacgtgctgggcttcaccagcgaggagaagaacagcatgtacaagctgaccggcgccatcatgcacttcggcaacatgaagttcaagctgaagcagagagaggagcaggccgagcccgacggcaccgaggaggccgacaagagcgcctacctgatgggcctgaacagcgccgacctgctgaagggcctgtgccaccccagagtgaaggtgggcaacgagtacgtgaccaagggccagaacgtgcagcaggtgatctacgccaccggcgccctggccaaggccgtgtacgagagaatgttcaactggatggtgaccagaatcaacgccaccctggagaccaagcagcccagacagtacttcatcggcgtgctggacatcgccggcttcgagatcttcgacttcaacagcttcgagcagctgtgcatcaacttcaccaacgagaagctgcagcagttcttcaaccaccacatgttcgtgctggagcaggaggagtacaagaaggagggcatcgagtggaccttcatcgacttcggcatggacctgcaggcctgcatcgacctgatcgagaagcccatgggcatcatgagcatcctggaggaggagtgcatgttccccaaggccaccgacatgaccttcaaggccaagctgttcgacaaccacctgggcaagagcgccaacttccagaagcccagaaacatcaagggcaagcccgaggcccacttcagcctgatccactacgccggcatcgtggactacaacatcatcggctggctgcagaagaacaaggaccccctgaacgagaccgtggtgggcctgtaccagaagagcagcctgaagctgctgagcaccctgttcgccaactacgccggcgccgacgcccccatcgagaagggcaagggcaaggccaagaagggcagcagcttccagaccgtgagcgccctgcacagagagaacctgaacaagctgatgaccaacctgagaagcacccacccccacttcgtgagatgcatcatccccaacgagaccaagagccccggcgtgatggacaaccccctggtgatgcaccagctgagatgcaacggcgtgctggagggcatcagaatctgcagaaagggcttccccaacagaatcctgtacggcgacttcagacagagatacagaatcctgaaccccgccgccatccccgagggccagttcatcgacagcagaaagggcgccgagaagctgctgagcagcctggacatcgaccacaaccagtacaagttcggccacaccaaggtgttcttcaaggccggcctgctgggcctgctggaggagatgagagacgagagactgagcagaatcatcaccagaatccaggcccagagcagaggcgtgctggccagaatggagtacaagaagctgctggagagaagagacagcctgctggtgatccagtggaacatcagagccttcatgggcgtgaagaactggccctggatgaagctgtacttcaagatcaagcccctgctgaagagcgccgagagagagaaggagatggccagcatgaaggaggagttcaccagactgaaggaggccctggagaagagcgaggccagaagaaaggagctggaggagaagatggtgagcctgctgcaggagaagaacgacctgcagctgcaggtgcaggccgagcaggacaacctggccgacgccgaggagagatgcgaccagctgatcaagaacaagatccagctggaggccaaggtgaaggagatgaacgagagactggaggacgaggaggagatgaacgccgagctgaccgccaagaagagaaagctggaggacgagtgcagcgagctgaagagagacatcgacgacctggagctgaccctggccaaggtggagaaggagaagcacgccaccgagaacaaggtgaagaacctgaccgaggagatggccggcctggacgagatcatcgccaagctgaccaaggagaagaaggccctgcaggaggcccaccagcaggccctggacgacctgcaggccgaggaggacaaggtgaacaccctgaccaaggccaaggtgaagctggagcagcaggtggacgacctggagggcagcctggagcaggagaagaaggtgagaatggacctggagagagccaagagaaagctggagggcgacctgaagctgacccaggagagcatcatggacctggagaacgacaagcagcagctggacgagagactgaagaagaaggacttcgagctgaacgccctgaacgccagaatcgaggacgagcaggccctgggcagccagctgcagaagaagctgaaggagctgcaggccagaatcgaggagctggaggaggagctggaggccgagagaaccgccagagccaaggtggagaagctgagaagcgacctgagcagagagctggaggagatcagcgagagactggaggaggccggcggcgccaccagcgtgcagatcgagatgaacaagaagagagaggccgagttccagaagatgagaagagacctggaggaggccaccctgcagcacgaggccaccgccgccgccctgagaaagaagcacgccgacagcgtggccgagctgggcgagcagatcgacaacctgcagagagtgaagcagaagctggagaaggagaagagcgagttcaagctggagctggacgacgtgaccagcaacatggagcagatcatcaaggccaaggccaacctggagaagatgtgcagaaccctggaggaccagatgaacgagcacagaagcaaggccgaggagacccagagaagcgtgaacgacctgaccagccagagagccaagctgcagaccgagaacggcgagctgagcagacagctggacgagaaggaggccctgatcagccagctgaccagaggcaagctgacctacacccagcagctggaggacctgaagagacagctggaggaggaggtgaaggccaagaacgccctggcccacgccctgcagagcgccagacacgactgcgacctgctgagagagcagtacgaggaggagaccgaggccaaggccgagctgcagagagtgctgagcaaggccaacagcgaggtggcccagtggagaaccaagtacgagaccgacgccatccagagaaccgaggagctggaggaggccaagaagaagctggcccagagactgcaggaggccgaggaggccgtggaggccgtgaacgccaagtgcagcagcctggagaagaccaagcacagactgcagaacgagatcgaggacctgatggtggacgtggagagaagcaacgccgccgccgccgccctggacaagaagcagagaaacttcgacaagatcctggccgagtggaagcagaagtacgaggagagccagagcgagctggagagcagccagaaggaggccagaagcctgagcaccgagctgttcaagctgaagaacgcctacgaggagagcctggagcacctggagaccttcaagagagagaacaagaacctgcaggaggagatcagcgacctgaccgagcagctgggcagcagcggcaagaccatccacgagctggagaaggtgagaaagcagctggaggccgagaagatggagctgcagagcgccctggaggaggccgaggccagcctggagcacgaggagggcaagatcctgagagcccagctggagttcaaccagatcaaggccgagatcgagagaaagctggccgagaaggacgaggagatggagcaggccaagagaaaccacctgagagtggtggacagcctgcagaccagcctggacgccgagaccagaagcagaaacgaggccctgagagtgaagaagaagatggagggcgacctgaacgagatggagatccagctgagccacgccaacagaatggccgccgaggcccagaagcaggtgaagagcctgcagagcctgctgaaggacacccagatccagctggacgacgccgtgagagccaacgacgacctgaaggagaacatcgccatcgtggagagaagaaacaacctgctgcaggccgagctggaggagctgagagccgtggtggagcagaccgagagaagcagaaagctggccgagcaggagctgatcgagaccagcgagagagtgcagctgctgcacagccagaacaccagcctgatcaaccagaagaagaagatggacgccgacctgagccagctgcagaccgaggtggaggaggccgtgcaggagtgcagaaacgccgaggagaaggccaagaaggccatcaccgacgccgccatgatggccgaggagctgaagaaggagcaggacaccagcgcccacctggagagaatgaagaagaacatggagcagaccatcaaggacctgcagcacagactggacgaggccgagcagatcgccctgaagggcggcaagaagcagctgcagaagctggaggccagagtgagagagctggagaacgagctggaggccgagcagaagagaaacgccgagagcgtgaagggcatgagaaagagcgagagaagaatcaaggagctgacctaccagaccgaggaggacagaaagaacctgctgagactgcaggacctggtggacaagctgcagctgaaggtgaaggcctacaagagacaggccgaggaggccgaggagcaggccaacaccaacctgagcaagttcagaaaggtgcagcacgagctggacgaggccgaggagagagccgacatcgccgagagccaggtgaacaagctgagagccaagagcagagacatcggcaccaagggcctgaacgaggagtag

SEQ ID NO: 90120 - DNA, 5823 bp, synthetic construct
  misc_feature 1..5823: note = Description of Artificial Sequence: Synthetic coding sequence
  source 1..5823: mol_type = other DNA
atgggcgacagcgagatggccgtgttcggcgccgccgccccctacctgagaaagagcgagaaggagagactggaggcccagaccagacccttcgacctgaagaaggacgtgttcgtgcccgacgacaagcaggagttcgtgaaggccaagatcgtgagcagagagggcggcaaggtgaccgccgagaccgagtacggcaagaccgtgaccgtgaaggaggaccaggtgatgcagcagaacccccccaagttcgacaagatcgaggacatggccatgctgaccttcctgcacgagcccgccgtgctgtacaacctgaaggacagatacggcagctggatgatctacacctacagcggcctgttctgcgtgaccgtgaacccctacaagtggctgcccgtgtacacccccgaggtggtggccgcctacagaggcaagaagagaagcgaggcccccccccacatcttcagcatcagcgacaacgcctaccagtacatgctgaccgacagagagaaccagagcatcctgatcaccggcgagagcggcgccggcaagaccgtgaacaccaagagagtgatccagtacttcgccgtgatcgccgccatcggcgacagaagcaagaaggaccagagccccggcaagggcaccctggaggaccagatcatccaggccaaccccgccctggaggccttcggcaacgccaagaccgtgagaaacgacaacagcagcagattcggcaagttcatcagaatccacttcggcgccaccggcaagctggccagcgccgacatcgagacctacctgctggagaagagcagagtgatcttccagctgaaggccgagagagactaccacatcttctaccagatcctgagcaacaagaagcccgagctgctggacatgctgctgatcaccaacaacccctacgactacgccttcatcagccagggcgagaccaccgtggccagcatcgacgacgccgaggagctgatggccaccgacaacgccttcgacgtgctgggcttcaccagcgaggagaagaacagcatgtacaagctgaccggcgccatcatgcacttcggcaacatgaagttcaagctgaagcagagagaggagcaggccgagcccgacggcaccgaggaggccgacaagagcgcctacctgatgggcctgaacagcgccgacctgctgaagggcctgtgccaccccagagtgaaggtgggcaacgagtacgtgaccaagggccagaacgtgcagcaggtgatctacgccaccggcgccctggccaaggccgtgtacgagagaatgttcaactggatggtgaccagaatcaacgccaccctggagaccaagcagcccagacagtacttcatcggcgtgctggacatcgccggcttcgagatcttcgacttcaacagcttcgagcagctgtgcatcaacttcaccaacgagaagctgcagcagttcttcaaccaccacatgttcgtgctggagcaggaggagtacaagaaggagggcatcgagtggaccttcatcgacttcggcatggacctgcaggcctgcatcgacctgatcgagaagcccatgggcatcatgagcatcctggaggaggagtgcatgttccccaaggccaccgacatgaccttcaaggccaagctgttcgacaaccacctgggcaagagcgccaacttccagaagcccagaaacatcaagggcaagcccgaggcccacttcagcctgatccactacgccggcatcgtggactacaacatcatcggctggctgcagaagaacaaggaccccctgaacgagaccgtggtgggcctgtaccagaagagcagcctgaagctgctgagcaccctgttcgccaactacgccggcgccgacgcccccatcgagaagggcaagggcaaggccaagaagggcagcagcttccagaccgtgagcgccctgcacagagagaacctgaacaagctgatgaccaacctgagaagcacccacccccacttcgtgagatgcatcatccccaacgagaccaagagccccggcgtgatggacaaccccctggtgatgcaccagctgagatgcaacggcgtgctggagggcatcagaatctgcagaaagggcttccccaacagaatcctgtacggcgacttcagacagagatacagaatcctgaaccccgccgccatccccgagggccagttcatcgacagcagaaagggcgccgagaagctgctgagcagcctggacatcgaccacaaccagtacaagttcggccacaccaaggtgttcttcaaggccggcctgctgggcctgctggaggagatgagagacgagagactgagcagaatcatcaccagaatccaggcccagagcagaggcgtgctggccagaatggagtacaagaagctgctggagagaagagacagcctgctggtgatccagtggaacatcagagccttcatgggcgtgaagaactggccctggatgaagctgtacttcaagatcaagcccctgctgaagagcgccgagagagagaaggagatggccagcatgaaggaggagttcaccagactgaaggaggccctggagaagagcgaggccagaagaaaggagctggaggagaagatggtgagcctgctgcaggagaagaacgacctgcagctgcaggtgcaggccgagcaggacaacctggccgacgccgaggagagatgcgaccagctgatcaagaacaagatccagctggaggccaaggtgaaggagatgaacgagagactggaggacgaggaggagatgaacgccgagctgaccgccaagaagagaaagctggaggacgagtgcagcgagctgaagagagacatcgacgacctggagctgaccctggccaaggtggagaaggagaagcacgccaccgagaacaaggtgaagaacctgaccgaggagatggccggcctggacgagatcatcgccaagctgaccaaggagaagaaggccctgcaggaggcccaccagcaggccctggacgacctgcaggccgaggaggacaaggtgaacaccctgaccaaggccaaggtgaagctggagcagcaggtggacgacctggagggcagcctggagcaggagaagaaggtgagaatggacctggagagagccaagagaaagctggagggcgacctgaagctgacccaggagagcatcatggacctggagaacgacaagcagcagctggacgagagactgaagaagaaggacttcgagctgaacgccctgaacgccagaatcgaggacgagcaggccctgggcagccagctgcagaagaagctgaaggagctgcaggccagaatcgaggagctggaggaggagctggaggccgagagaaccgccagagccaaggtggagaagctgagaagcgacctgagcagagagctggaggagatcagcgagagactggaggaggccggcggcgccaccagcgtgcagatcgagatgaacaagaagagagaggccgagttccagaagatgagaagagacctggaggaggccaccctgcagcacgaggccaccgccgccgccctgagaaagaagcacgccgacagcgtggccgagctgggcgagcagatcgacaacctgcagagagtgaagcagaagctggagaaggagaagagcgagttcaagctggagctggacgacgccctgctgggcctgcccagcagcaacttcctgctgcccccccccctgagcgccaacctggagaagatgtgcagaaccctggaggaccagatgaacgagcacagaagcaaggccgaggagacccagagaagcgtgaacgacctgaccagccagagagccaagctgcagaccgagaacggcgagctgagcagacagctggacgagaaggaggccctgatcagccagctgaccagaggcaagctgacctacacccagcagctggaggacctgaagagacagctggaggaggaggtgaaggccaagaacgccctggcccacgccctgcagagcgccagacacgactgcgacctgctgagagagcagtacgaggaggagaccgaggccaaggccgagctgcagagagtgctgagcaaggccaacagcgaggtggcccagtggagaaccaagtacgagaccgacgccatccagagaaccgaggagctggaggaggccaagaagaagctggcccagagactgcaggaggccgaggaggccgtggaggccgtgaacgccaagtgcagcagcctggagaagaccaagcacagactgcagaacgagatcgaggacctgatggtggacgtggagagaagcaacgccgccgccgccgccctggacaagaagcagagaaacttcgacaagatcctggccgagtggaagcagaagtacgaggagagccagagcgagctggagagcagccagaaggaggccagaagcctgagcaccgagctgttcaagctgaagaacgcctacgaggagagcctggagcacctggagaccttcaagagagagaacaagaacctgcaggaggagatcagcgacctgaccgagcagctgggcagcagcggcaagaccatccacgagctggagaaggtgagaaagcagctggaggccgagaagatggagctgcagagcgccctggaggaggccgaggccagcctggagcacgaggagggcaagatcctgagagcccagctggagttcaaccagatcaaggccgagatcgagagaaagctggccgagaaggacgaggagatggagcaggccaagagaaaccacctgagagtggtggacagcctgcagaccagcctggacgccgagaccagaagcagaaacgaggccctgagagtgaagaagaagatggagggcgacctgaacgagatggagatccagctgagccacgccaacagaatggccgccgaggcccagaagcaggtgaagagcctgcagagcctgctgaaggacacccagatccagctggacgacgccgtgagagccaacgacgacctgaaggagaacatcgccatcgtggagagaagaaacaacctgctgcaggccgagctggaggagctgagagccgtggtggagcagaccgagagaagcagaaagctggccgagcaggagctgatcgagaccagcgagagagtgcagctgctgcacagccagaacaccagcctgatcaaccagaagaagaagatggacgccgacctgagccagctgcagaccgaggtggaggaggccgtgcaggagtgcagaaacgccgaggagaaggccaagaaggccatcaccgacgccgccatgatggccgaggagctgaagaaggagcaggacaccagcgcccacctggagagaatgaagaagaacatggagcagaccatcaaggacctgcagcacagactggacgaggccgagcagatcgccctgaagggcggcaagaagcagctgcagaagctggaggccagagtgagagagctggagaacgagctggaggccgagcagaagagaaacgccgagagcgtgaagggcatgagaaagagcgagagaagaatcaaggagctgacctaccagaccgaggaggacagaaagaacctgctgagactgcaggacctggtggacaagctgcagctgaaggtgaaggcctacaagagacaggccgaggaggccgaggagcaggccaacaccaacctgagcaagttcagaaaggtgcagcacgagctggacgaggccgaggagagagccgacatcgccgagagccaggtgaacaagctgagagccaagagcagagacatcggcaccaagggcctgaacgaggagtag

SEQ ID NO: 90121 - DNA, 5814 bp, synthetic construct
  misc_feature 1..5814: note = Description of Artificial Sequence: Synthetic coding sequence
  source 1..5814: mol_type = other DNA
atgagcgccagcagcgacgccgagatggccgtgttcggcgaggccgccccctacctgagaaagagcgagaaggagagaatcgaggcccagaacaagcccttcgacgccaagaccagcgtgttcgtggccgagcccaaggagagctacgtgaagagcaccatccagagcaaggagggcggcaaggtgaccgtgaagaccgagggcggcgccaccctgaccgtgagagaggaccaggtgttccccatgaacccccccaagtacgacaagatcgaggacatggccatgatgacccacctgcacgagcccggcgtgctgtacaacctgaaggagagatacgccgcctggatgatctacacctacagcggcctgttctgcgtgaccgtgaacccctacaagtggctgcccgtgtacaagcccgaggtggtggccgcctacagaggcaagaagagacaggaggcccccccccacatcttcagcatcagcgacaacgcctaccagttcatgctgaccgacagagagaaccagagcatcctgatcaccggcgagagcggcgccggcaagaccgtgaacaccaagagagtgatccagtacttcgccaccatcgccgtgaccggcgagaagaagaaggacgagagcggcaagatgcagggcaccctggaggaccagatcatcagcgccaaccccctgctggaggccttcggcaacgccaagaccgtgagaaacgacaacagcagcagattcggcaagttcatcagaatccacttcggcaccaccggcaagctggccagcgccgacatcgagacctacctgctggagaagagcagagtgaccttccagctgaaggccgagagaagctaccacatcttctaccagatcaccagcaacaagaagcccgacctgatcgagatgctgctgatcaccaccaacccctacgactacgccttcgtgagccagggcgagatcaccgtgcccagcatcgacgaccaggaggagctgatggccaccgacagcgccatcgacatcctgggcttcacccccgaggagaaggtgagcatctacaagctgaccggcgccgtgatgcactacggcaacatgaagttcaagcagaagcagagagaggagcaggccgagcccgacggcaccgaggtggccgacaaggccgcctacctgcagagcctgaacagcgccgacctgctgaaggccctgtgctaccccagagtgaaggtgggcaacgagtacgtgaccaagggccagaccgtgcagcaggtgtacaacgccgtgggcgccctggccaaggccgtgtacgagaagatgttcctgtggatggtgaccagaatcaaccagcagctggacaccaagcagcccagacagtacttcatcggcgtgctggacatcgccggcttcgagatcttcgacttcaacagcctggagcagctgtgcatcaacttcaccaacgagaagctgcagcagttcttcaaccaccacatgttcgtgctggagcaggaggagtacaagaaggagggcatcgagtggaccttcatcgacttcggcatggacctggccgcctgcatcgagctgatcgagaagcccctgggcatcttcagcatcctggaggaggagtgcatgttccccaaggccaccgacaccagcttcaagaacaagctgtacgaccagcacctgggcaagagcgccaacttccagaagcccaaggtggtgaagggcaaggccgaggcccacttcagcctgatccactacgccggcaccgtggactacaacatcaccggctggctggacaagaacaaggaccccctgaacgacaccgtggtgggcctgtaccagaagagcgccatgaagaccctggccagcctgttcagcacctacgccagcgccgaggccgacagcagcgccaagaagggcgccaagaagaagggcagcagcttccagaccgtgagcgccctgttcagagagaacctgaacaagctgatgaccaacctgagaagcacccacccccacttcgtgagatgcatcatccccaacgagaccaagacccccggcgccatggagcacgagctggtgctgcaccagctgagatgcaacggcgtgctggagggcatcagaatctgcagaaagggcttccccagcagaatcctgtacggcgacttcaagcagagatacaaggtgctgaacgccagcgccatccccgagggccagttcatcgacagcaagaaggccagcgagaagctgctggccagcatcgacatcgaccacacccagtacaagttcggccacaccaaggtgttcttcaaggccggcctgctgggcctgctggaggagatgagagacgagaagctggcccagatcatcaccagaacccaggccgtgtgcagaggcttcctgatgagagtggagtaccagaagatgctgcagagaagagaggccctgttctgcatccagtacaacgtgagagccttcatgaacgtgaagcactggccctggatgaagctgttcttcaagatcaagcccctgctgaagagcgccgagaccgagaaggagatggccaccatgaaggaggagttccagaagaccaaggacgagctggccaagagcgaggccaagagaaaggagctggaggagaagatggtgaccctgctgaaggagaagaacgacctgcagctgcaggtgcagagcgaggccgacagcctggccgacgccgaggagagatgcgagcagctgatcaagaacaagatccagctggaggccaagatcaaggaggtgaccgagagagccgaggaggaggaggagatcaacgccgagctgaccgccaagaagagaaagctggaggacgagtgcagcgagctgaagaaggacatcgacgacctggagctgaccctggccaaggtggagaaggagaagcacgccaccgagaacaaggtgaagaacctgaccgaggagatggccggcctggacgagaccatcgccaagctgagcaaggagaagaaggccctgcaggagacccaccagcagaccctggacgacctgcaggccgaggaggacaaggtgaacatcctgaccaaggccaagaccaagctggagcagcaggtggacgacctggagggcagcctggagcaggagaagaagctgagaatggacctggagagagccaagagaaagctggagggcgacctgaagctggcccaggagagcaccatggacatggagaacgacaagcagcagctggacgagaagctggagaagaaggagttcgagatcagcaacctgatcagcaagatcgaggacgagcaggccgtggagatccagctgcagaagaagatcaaggagctgcaggccagaatcgaggagctgggcgaggagatcgaggccgagagagccagcagagccaaggccgagaagcagagaagcgacctgagcagagagctggaggagatcagcgagagactggaggaggccggcggcgccaccagcgcccaggtggagctgaacaagaagagagaggccgagttccagaagctgagaagagacctggaggaggccaccctgcagcacgaggccatggtggccgccctgagaaagaagcacgccgacagcatggccgagctgggcgagcagatcgacaacctgcagagagtgaagcagaagctggagaaggagaagagcgagctgaagatggagaccgacgacctgagcagcaacgccgaggccatcagcaaggccaagggcaacctggagaagatgtgcagaagcctggaggaccaggtgagcgagctgaagaccaaggaggaggagcagcagagactgatcaacgacctgaccgcccagagagccagactgcagaccgaggccggcgagtacagcagacagctggacgagaaggacgccctggtgagccagctgagcagaagcaagcaggccagcacccagcagatcgaggagctgaagcaccagctggaggaggagaccaaggccaagaacgccctggcccacgccctgcagagcagcagacacgactgcgacctgctgagagagcagtacgaggaggagcaggagggcaaggccgagctgcagagagccctgagcaaggccaacagcgaggtggcccagtggagaaccaagtacgagaccgacgccatccagagaaccgaggagctggaggaggccaagaagaagctggcccagagactgcaggaggccgaggagcacgtggaggccgtgaacgccaagtgcgccagcctggagaagaccaagcagagactgcagaacgaggtggaggacctgatgctggacgtggagagaagcaacgccgcctgcgccgccctggacaagaagcagagaaacttcgacaaggtgctgagcgagtggaagcagaagtacgaggagacccaggccgagctggaggccagccagaaggagagcagaagcctgagcaccgagctgttcaaggtgaagaacgtgtacgaggagagcctggaccagctggagaccctgagaagagagaacaagaacctgcagcaggagatcagcgacctgaccgagcagatcgccgagggcggcaagcagatccacgagctggagaagatcaagaagcaggtggagcaggagaagtgcgagatccaggccgccctggaggaggccgaggccagcctggagcacgaggagggcaagatcctgagaatccagctggagctgaaccaggtgaagagcgaggtggacagaaagatcgccgagaaggacgaggagatcgaccagctgaagagaaaccacaccagagtggtggagaccatgcagagcaccctggacgccgagatcagaagcagaaacgacgccctgagagtgaagaagaagatggagggcgacctgaacgagatggagatccagctgaaccacgccaacagactggccgccgagagcctgagaaactacagaaacacccagggcatcctgaaggagacccagctgcacctggacgacgccctgagaggccaggaggacctgaaggagcagctggccatcgtggagagaagagccaacctgctgcaggccgagatcgaggagctgtgggccaccctggagcagaccgagagaagcagaaagatcgccgagcaggagctgctggacgccagcgagagagtgcagctgctgcacacccagaacaccagcctgatcaacaccaagaagaagctggagaacgacgtgagccagctgcagagcgaggtggaggaggtgatccaggagagcagaaacgccgaggagaaggccaagaaggccatcaccgacgccgccatgatggccgaggagctgaagaaggagcaggacaccagcgcccacctggagagaatgaagaagaacctggagcagaccgtgaaggacctgcagcacagactggacgaggccgagcagctggccctgaagggcggcaagaagcagatccagaagctggaggccagagtgagagagctggagggcgaggtggagaacgagcagaagagaaacgccgaggccgtgaagggcctgagaaagcacgagagaagagtgaaggagctgacctaccagaccgaggaggacagaaagaacgtgctgagactgcaggacctggtggacaagctgcaggccaaggtgaagagctacaagagacaggccgaggaggccgaggagcagagcaacgccaacctgagcaagttcagaaagctgcagcacgagctggaggaggccgaggagagagccgacatcgccgagagccaggtgaacaagctgagagtgaagagcagagaggtgcacaccaagatcagcgccgagtag

SEQ ID NO: 90122 - DNA, 5814 bp, synthetic construct; identical to SEQ ID NO: 90121
  misc_feature 1..5814: note = Description of Artificial Sequence: Synthetic coding sequence
  source 1..5814: mol_type = other DNA

SEQ ID NO: 90123 - DNA, 453 bp, synthetic construct
  misc_feature 1..453: note = Description of Artificial Sequence: Synthetic coding sequence
  source 1..453: mol_type = other DNA
atgagcttcagcgccgaccagatcgccgagttcaaggaggccttcctgctgttcgacagaaccggcgacagcaagatcaccctgagccaggtgggcgacgtgctgagagccctgggcaccaaccccaccaacgccgaggtgagaaaggtgctgggcaaccccagcaacgaggagctgaacgccaagaagatcgagttcgagcagttcctgcccatgatgcaggccatcagcaacaacaaggaccaggccacctacgaggacttcgtggagggcctgagagtgttcgacaaggagggcaacggcaccgtgatgggcgccgagctgagacacgtgctggccaccctgggcgagaagatgaaggaggaggaggtggaggccctgatggccggccaggaggacagcaacggctgcatcaactacgaggccttcgtgaagcacatcatgagcatctag

SEQ ID NO: 90124 - DNA, 585 bp, synthetic construct
  misc_feature 1..585: note = Description of Artificial Sequence: Synthetic coding sequence
  source 1..585: mol_type = other DNA
atggcccccaagaaggacgtgaagaagcccgtggccgccgccgccgccgcccccgcccccgcccccgcccccgcccccgcccccgcccccgccaagcccaaggaggagaagatcgacctgagcgccatcaagatcgagttcagcaaggagcagcaggacgagttcaaggaggccttcctgctgttcgacagaaccggcgacagcaagatcaccctgagccaggtgggcgacgtgctgagagccctgggcaccaaccccaccaacgccgaggtgagaaaggtgctgggcaaccccagcaacgaggagctgaacgccaagaagatcgagttcgagcagttcctgcccatgatgcaggccatcagcaacaacaaggaccaggccacctacgaggacttcgtggagggcctgagagtgttcgacaaggagggcaacggcaccgtgatgggcgccgagctgagacacgtgctggccaccctgggcgagaagatgaaggaggaggaggtggaggccctgatggccggccaggaggacagcaacggctgcatcaactacgaggccttcgtgaagcacatcatgagcatctag

SEQ ID NO: 90125 - DNA, 519 bp, synthetic construct; identical to SEQ ID NO: 90017
  misc_feature 1..519: note = Description of Artificial Sequence: Synthetic coding sequence
  source 1..519: mol_type = other DNA

SEQ ID NO: 90126 - DNA, 519 bp, synthetic construct; identical to SEQ ID NO: 90017
  misc_feature 1..519: note = Description of Artificial Sequence: Synthetic coding sequence
  source 1..519: mol_type = other DNA

SEQ ID NO: 90127 - DNA, 519 bp, synthetic construct; identical to SEQ ID NO: 90017
  misc_feature 1..519: note = Description of Artificial Sequence: Synthetic coding sequence
  source 1..519: mol_type = other DNA

SEQ ID NO: 90128 - DNA, 519 bp, synthetic construct; identical to SEQ ID NO: 90017
  misc_feature 1..519: note = Description of Artificial Sequence: Synthetic coding sequence
  source 1..519: mol_type = other DNA

SEQ ID NO: 90129 - DNA, 627 bp, synthetic construct
  misc_feature 1..627: note = Description of Artificial Sequence: Synthetic coding sequence
  source 1..627: mol_type = other DNA
atggccctgggccagaagctgttcatcaccatgagcagaggcgccggcagactgcagggcaccctgtgggccctggtgttcctgggcatcctggtgggcatggtggtgcccagccccgccggcaccagagccaacaacaccctgctggacagcagaggctggggcaccctgctgagcagaagcagagccggcctggccggcgagatcgccggcgtgaactgggagagcggctacctggtgggcatcaagagacagagaagactgtactgcaacgtgggcatcggcttccacctgcaggtgctgcccgacggcagaatcagcggcacccacgaggagaacccctacagcctgctggagatcagcaccgtggagagaggcgtggtgagcctgttcggcgtgagaagcgccctgttcgtggccatgaacagcaagggcagactgtacgccacccccagcttccaggaggagtgcaagttcagagagaccctgctgcccaacaactacaacgcctacgagagcgacctgtaccagggcacctacatcgccctgagcaagtacggcagagtgaagagaggcagcaaggtgagccccatcatgaccgtgacccacttcctgcccagaatctag

SEQ ID NO: 90130 - DNA, 588 bp, synthetic construct
  misc_feature 1..588: note = Description of Artificial Sequence: Synthetic coding sequence
  source 1..588: mol_type = other DNA
atggcccccaagaagcccgagcccaagaaggacgacgccaaggccgcccccaaggccgcccccgcccccgcccccccccccgagcccgagagacccaaggaggtggagttcgacgccagcaagatcaagatcgagttcacccccgagcagatcgaggagttcaaggaggccttcatgctgttcgacagaacccccaagtgcgagatgaagatcacctacggccagtgcggcgacgtgctgagagccctgggccagaaccccacccaggccgaggtgctgagagtgctgggcaagcccagacaggaggagctgaacaccaagatgatggacttcgagaccttcctgcccatgctgcagcacatcagcaagaacaaggacaccggcacctacgaggacttcgtggagggcctgagagtgttcgacaaggagggcaacggcaccgtgatgggcgccgagctgagacacgtgctggccaccctgggcgagagactgaccgaggacgaggtggagaagctgatggccggccaggaggacagcaacggctgcatcaactacgaggccttcgtgaagcacatcatgagcagctag

SEQ ID NO: 90131 - DNA, 588 bp, synthetic construct; identical to SEQ ID NO: 90130
  misc_feature 1..588: note = Description of Artificial Sequence: Synthetic coding sequence
  source 1..588: mol_type = other DNA

SEQ ID NO: 90132 - DNA, 141 bp, synthetic construct
  misc_feature 1..141: note = Description of Artificial Sequence: Synthetic coding sequence
  source 1..141: mol_type = other DNA
atggcccccaagaagcccgagcccaagaaggacgacgccaaggccgcccccaaggccgcccccgcccccgcccccccccccgagcccgagagacccaaggaggtggagttcgacgccagcaagatcaagatcgagttctag

SEQ ID NO: 90133 - DNA, 594 bp, synthetic construct
  misc_feature 1..594: note = Description of Artificial Sequence: Synthetic coding sequence
  source 1..594: mol_type = other DNA
atggcccccaagaagcccgagcccaagaaggaggccgccaagcccgcccccgcccccgcccccgcccccgcccccgcccccgcccccgcccccgaggcccccaaggagcccgccttcgaccccaagagcgtgaagatcgacttcaccgccgaccagatcgaggagttcaaggaggccttcagcctgttcgacagaacccccaccggcgagatgaagatcacctacggccagtgcggcgacgtgctgagagccctgggccagaaccccaccaacgccgaggtgctgagagtgctgggcaagcccaagcccgaggagatgaacgtgaagatgctggacttcgagaccttcctgcccatcctgcagcacatcagcagaaacaaggagcagggcacctacgaggacttcgtggagggcctgagagtgttcgacaaggagagcaacggcaccgtgatgggcgccgagctgagacacgtgctggccaccctgggcgagaagatgaccgaggccgaggtggagcagctgctggccggccaggaggacgccaacggctgcatcaactacgaggccttcgtgaagcacatcatgagcggctag

SEQ ID NO: 90134 - DNA, 594 bp, synthetic construct; identical to SEQ ID NO: 90133
  misc_feature 1..594: note = Description of Artificial Sequence: Synthetic coding sequence
  source 1..594: mol_type = other DNA

SEQ ID NO: 90135 - DNA, 264 bp, synthetic construct
  misc_feature 1..264: note = Description of Artificial Sequence: Synthetic coding sequence
  source 1..264: mol_type = other DNA
cccgaggcccccaaggagcccgccttcgaccccaagagcgtgaaggtgatcggctgcccctgccccagaagccagagccacggcgccgtgatcgacttcaccgccgaccagatcgaggagttcaaggaggccttcatgggcgccgagctgagacacgtgctggccaccctggtgatcaagagcgcccccccccccaagcccaccgccggcgagaagatgaccgaggccgaggtggagcagctgctggccggccaggaggactag

SEQ ID NO: 90136 - DNA, 522 bp, synthetic construct
  misc_feature 1..522: note = Description of Artificial Sequence: Synthetic coding sequence
  source 1..522: mol_type = other DNA
atggccagcagaaagaccaagaagaaggagggcggcgccctgagagcccagagagccagcagcaacgtgttcagcaacttcgagcagacccagatccaggagttcaaggaggccttcaccctgatggaccagaacagagacggcttcatcgacaaggaggacctgaaggacacctacgccagcctgggcaagaccaacgtgaaggacgacgagctggacgccatgctgaaggaggccagcggccccatcaacttcaccatgttcctgaacctgttcggcgagaagctgagcggcaccgacgccgaggagaccatcctgaacgccttcaagatgctggaccccgacggcaagggcaagatcaacaaggagtacatcaagagactgctgatgagccaggccgacaagatgaccgccgaggaggtggaccagatgttccagttcgccagcatcgacgtggccggcaacctggactacaaggccctgagctacgtgatcacccacggcgaggagaaggaggagtag

SEQ ID NO: 90137 - DNA, 399 bp, synthetic construct
  misc_feature 1..399: note = Description of Artificial Sequence: Synthetic coding sequence
  source 1..399: mol_type = other DNA
atggaccagaacagagacggcttcatcgacaaggaggacctgaaggacacctacgccagcctgggcaagaccaacgtgaaggacgacgagctggacgccatgctgaaggaggccagcggccccatcaacttcaccatgttcctgaacctgttcggcgagaagctgagcggcaccgacgccgaggagaccatcctgaacgccttcaagatgctggaccccgacggcaagggcaagatcaacaaggagtacatcaagagactgctgatgagccaggccgacaagatgaccgccgaggaggtggaccagatgttccagttcgccagcatcgacgtggccggcaacctggactacaaggccctgagctacgtgatcacccacggcgaggagaaggaggagtag

SEQ ID NO: 90138 - DNA, 399 bp, synthetic construct; identical to SEQ ID NO: 90137
  misc_feature 1..399: note = Description of Artificial Sequence: Synthetic coding sequence
  source 1..399: mol_type = other DNA

SEQ ID NO: 90139 - DNA, 399 bp, synthetic construct; identical to SEQ ID NO: 90137
  misc_feature 1..399: note = Description of Artificial Sequence: Synthetic coding sequence
  source 1..399: mol_type = other DNA

SEQ ID NO: 90140 - DNA, 456 bp, synthetic construct
  misc_feature 1..456: note = Description of Artificial Sequence: Synthetic coding sequence
  source 1..456: mol_type = other DNA
atgtgcgacttcaccgaggaccagaccgccgagttcaaggaggccttccagctgttcgacagaaccggcgacggcaagatcctgtacagccagtgcggcgacgtgatgagagccctgggccagaaccccaccaacgccgaggtgctgaaggtgctgggcaaccccaagagcgacgagatgaacgtgaaggtgctggacttcgagcacttcctgcccatgctgcagaccgtggccaagaacaaggaccagggcacctacgaggactacgtggagggcctgagagtgttcgacaaggagggcaacggcaccgtgatgggcgccgagatcagacacgtgctggtgaccctgggcgagaagatgaccgaggaggaggtggagatgctggtggccggccacgaggacagcaacggctgcatcaactacgaggagctggtgagaatggtgctgaacggctag

SEQ ID NO: 90141 - DNA, 456 bp, synthetic construct
  misc_feature 1..456: note = Description of Artificial Sequence: Synthetic coding sequence
  source 1..456: mol_type = other DNA
atgtgcgacttcaccgaggaccagaccgccgagttcaaggaggccttccagctgttcgacagaaccggcgacggcaagatcctgtacagccagtgcggcgacgtgatgagagccctgggccagaaccccaccaacgccgaggtgctgaaggtgctgggcaaccccaagagcgacgagatgaacgtgaaggtgctggacttcgagcacttcctgcccatgctgcagaccgtggccaagaacaaggaccagggcacctacgaggactacgtggagggcctgagagtgttcgacaaggagggcaacggcaccgtgatgggcgccgagatcagacacgtgctggtgaccctgggcgagaagatgaccgaggaggaggtggagatgctggtggccggccacgaggacagcaacggctgcatcaactacgaggccttcgtgagacacatcctgagcggctag

SEQ ID NO: 90142 - DNA, 456 bp, synthetic construct; identical to SEQ ID NO: 90141
  misc_feature 1..456: note = Description of Artificial Sequence: Synthetic coding sequence
  source 1..456: mol_type = other DNA

SEQ ID NO: 90143 - DNA, 1491 bp, synthetic construct
  misc_feature 1..1491: note = Description of Artificial Sequence: Synthetic coding sequence
  source 1..1491: mol_type = other DNA
atgagcagcatggaggagatccaggtggagctgcagtgcgccgacctgtggaagagattccacgacatcggcaccgagatgatcatcaccaaggccggcagaagaatgttccccgccatgagagtgaagatcaccggcctggacccccaccagcagtactacatcgccatggacatcgtgcccgtggacaacaagagatacagatacgtgtaccacagcagcaagtggatggtggccggcaacgccgacagccccgtgccccccagagtgtacatccaccccgacagcctggccagcggcgacacctggatgagacaggtggtgagcttcgacaagctgaagctgaccaacaacgagctggacgaccagggccacatcatcctgcacagcatgcacaagtaccagcccagagtgcacgtgatcagaaaggacttcagcagcgacctgagccccaccaagcccgtgcccgtgggcgacggcgtgaagaccttcaacttccccgagaccgtgttcaccaccgtgaccgcctaccagaaccagcagatcaccagactgaagatcgacagaaaccccttcgccaagggcttcagagacagcggcagaaacagaaccggcctggaggccatcatggagacctacgccttctggagaccccccgtgagaaccctgaccttcgaggacttcaccaccatgcagaagcagcagggcggcagcaccggcaccagccccaccaccagcagcaccggcacccccagccccagcgccagcagccacctgctgagccccagctgcagcccccccaccttccacctggcccccaacaccttcaacgtgggctgcagagagagccagctgtgcaacctgaacctgagcgactaccccccctgcgccagaagcaacatggccgccctgcagagctaccccggcctgagcgacagcggctacaacagactgcagagcggcaccaccagcgccacccagcccagcgagaccttcatgccccagagaacccccagcctgatcagcggcatccccaccccccccagcctgcccggcaacagcaagatggaggcctacggcggccagctgggcagcttccccaccagccagttccagtacgtgatgcaggccggcaacgccgccagcagcagcagcagcccccacatgttcggcggcagccacatgcagcagagcagctacaacgccttcagcctgcacaacccctacaacctgtacggctacaacttccccaccagccccagactggccgccagccccgagaagctgagcgccagccagagcaccctgctgtgcagcagccccagcaacggcgccttcggcgagagacagtacctgcccagcggcatggagcacagcatgcacatgatcagccccagccccaacaaccagcaggccaccaacacctgcgacggcagacagtacggcgccgtgcccggcagcagcagccagatgagcgtgcacatggtgtag

SEQ ID NO: 90144 - DNA, 627 bp, synthetic construct
  misc_feature 1..627: note = Description of Artificial Sequence: Synthetic coding sequence
  source 1..627: mol_type = other DNA
atgccccccaagaaggacgtgcccgtgaagaagcccgccggccccagcatcagcaagcccgccgccaagcccgccgccgccggcgccccccccgccaagaccaaggccgagcccgccgtgccccaggccccccagaagacccaggagccccccgtggacctgagcaaggtggtgatcgagttcaacaaggaccagctggaggagttcaaggaggccttcgagctgttcgacagagtgggcgacggcaagatcctgtacagccagtgcggcgacgtgatgagagccctgggccagaaccccaccaacgccgaggtgctgaaggtgctgggcaaccccaagagcgacgagctgaagagcagaagagtggacttcgagaccttcctgcccatgctgcaggccgtggccaagaacagaggccagggcacctacgaggactacctggagggcttcagagtgttcgacaaggagggcaacggcaaggtgatgggcgccgagctgagacacgtgctgaccaccctgggcgagaagatgaccgaggaggaggtggagaccgtgctggccggccacgaggacagcaacggctgcatcaactacgaggccttcctgaagcacatcctgagcgtgtag

SEQ ID NO: 90145 - DNA, 90 bp, synthetic construct
  misc_feature 1..90: note = Description of Artificial Sequence: Synthetic coding sequence
  source 1..90: mol_type = other DNA
atgccccccaagaaggacgtgcccgtgaagaagcccgccggccccagcatcagcaagcccgccgccaagcccgccgccgccggcgcctag

SEQ ID NO: 90146 - DNA, 627 bp, synthetic construct; identical to SEQ ID NO: 90144
  misc_feature 1..627: note = Description of Artificial Sequence: Synthetic coding sequence
  source 1..627: mol_type = other DNA

SEQ ID NO: 90147 - DNA, 3477 bp, synthetic construct
  misc_feature 1..3477: note = Description of Artificial Sequence: Synthetic coding sequence
  source 1..3477: mol_type = other DNA
atggccgccgtgagaggcgcccccctgctgagctgcctgctggccctgctggccctgtgccccggcggcagaccccagaccgtgctgaccgacgacgagatcgaggagttcctggagggcttcctgagcgagctggagcccgagcccagagaggacgacgtggaggccccccccccccccgagcccacccccagagtgagaaaggcccaggccggcggcaagcccggcaagagacccggcaccgccgccgaggtgccccccgagaagaccaaggacaagggcaagaagggcaagaaggacaagggccccaaggtgcccaaggagagcctggagggcagccccagaccccccaagaagggcaaggagaagccccccaaggccaccaagaagcccaaggagaagccccccaaggccaccaagaagcccaaggagaagccccccaaggccaccaagaagcccaaggagaagccccccaaggccaccaagaagccccccagcggcaagagaccccccatcctggcccccagcgagaccctggagtggcccctgccccccccccccagccccggccccgaggagctgccccaggagggcggcgcccccctgagcaacaactggcagaaccccggcgaggagacccacgtggaggccagagagcaccagcccgagcccgaggaggagaccgagcagcccaccctggactacaacgaccagatcgagagagaggactacgaggacttcgagtacatcagaagacagaagcagcccagacccccccccagcagaagaagaagacccgagagagtgtggcccgagccccccgaggagaaggcccccgcccccgcccccgaggagagaatcgagccccccgtgaagcccctgctgccccccctgccccccgactacggcgacggctacgtgatccccaactacgacgacatggactactacttcggccccccccccccccagaagcccgacgccgagagacagaccgacgaggagaaggaggagctgaagaagcccaagaaggaggacagcagccccaaggaggagaccgacaagtgggccgtggagaagggcaaggaccacaaggagcccagaaagggcgaggagctggaggaggagtggacccccaccgagaaggtgaagtgcccccccatcggcatggagagccacagaatcgaggacaaccagatcagagccagcagcatgctgagacacggcctgggcgcccagagaggcagactgaacatgcagaccggcgccaccgaggacgactactacgacggcgcctggtgcgccgaggacgacgccagaacccagtggatcgaggtggacaccagaagaaccaccagattcaccggcgtgatcacccagggcagagacagcagcatccacgacgacttcgtgaccaccttcttcgtgggcttcagcaacgacagccagacctgggtgatgtacaccaacggctacgaggagatgaccttccacggcaacgtggacaaggacacccccgtgctgagcgagctgcccgagcccgtggtggccagattcatcagaatctaccccctgacctggaacggcagcctgtgcatgagactggaggtgctgggctgcagcgtggcccccgtgtacagctactacgcccagaacgaggtggtggccaccgacgacctggacttcagacaccacagctacaaggacatgagacagctgatgaaggtggtgaacgaggagtgccccaccatcaccagaacctacagcctgggcaagagcagcagaggcctgaagatctacgccatggagatcagcgacaaccccggcgagcacgagctgggcgagcccgagttcagatacaccgccggcatccacggcaacgaggtgctgggcagagagctgctgctgctgctgatgcagtacctgtgcagagagtacagagacggcaaccccagagtgagaagcctggtgcaggacaccagaatccacctggtgcccagcctgaaccccgacggctacgaggtggccgcccagatgggcagcgagttcggcaactgggccctgggcctgtggaccgaggagggcttcgacatcttcgaggacttccccgacctgaacagcgtgctgtggggcgccgaggagagaaagtgggtgccctacagagtgcccaacaacaacctgcccatccccgagagatacctgagccccgacgccaccgtgagcaccgaggtgagagccatcatcgcctggatggagaagaaccccttcgtgctgggcgccaacctgaacggcggcgagagactggtgagctacccctacgacatggccagaacccccacccaggagcagctgctggccgccgccatggccgccgccagaggcgaggacgaggacgaggtgagcgaggcccaggagacccccgaccacgccatcttcagatggctggccatcagcttcgccagcgcccacctgaccctgaccgagccctacagaggcggctgccaggcccaggactacaccggcggcatgggcatcgtgaacggcgccaagtggaaccccagaaccggcaccatcaacgacttcagctacctgcacaccaactgcctggagctgagcttctacctgggctgcgacaagttcccccacgagagcgagctgcccagagagtgggagaacaacaaggaggccctgctgaccttcatggagcaggtgcacagaggcatcaagggcgtggtgaccgacgagcagggcatccccatcgccaacgccaccatcagcgtgagcggcatcaaccacggcgtgaagaccgccagcggcggcgactactggagaatcctgaaccccggcgagtacagagtgaccgcccacgccgagggctacacccccagcgccaagacctgcaacgtggactacgacatcggcgccacccagtgcaacttcatcctggccagaagcaactggaagagaatcagagagatcatggccatgaacggcaacagacccatcccccacatcgaccccagcagacccatgaccccccagcagagaagactgcagcagagaagactgcagcacagactgagactgagagcccagatgagactgagaagactgaacgccaccaccaccctgggcccccacaccgtgccccccaccctgccccccgcccccgccaccaccctgagcaccaccatcgagccctggggcctgatcccccccaccaccgccggctgggaggagagcgagaccgagacctacaccgaggtggtgaccgagttcggcaccgaggtggagcccgagttcggcaccaaggtggagcccgagttcgagacccagctggagcccgagttcgagacccagctggagcccgagttcgaggaggaggaggaggaggagaaggaggaggagatcgccaccggccaggccttccccttcaccaccgtggagacctacaccgtgaacttcggcgacttctag

SEQ ID NO: 90148 - DNA, 447 bp, synthetic construct
  misc_feature 1..447: note = Description of Artificial Sequence: Synthetic coding sequence
  source 1..447: mol_type = other DNA
atgttcgagcaggcccagatccaggagttcaaggaggccttcagctgcatcgaccagaacagagacggcatcatctgcaaggccgacctgagagagacctacagccagctgggcaaggtgagcgtgcccgaggaggagctggacgccatgctgcaggagggcaagggccccatcaacttcaccgtgttcctgaccctgttcggcgagaagctgaacggcaccgaccccgaggaggccatcctgagcgccttcagaatgttcgaccccagcggcaagggcgtggtgaacaaggacgagttcaagcagctgctgctgacccaggccgacaagttcagccccgccgaggtggagcagatgttcgccctgacccccatggacctggccggcaacatcgactacaagagcctgtgctacatcatcacccacggcgacgagaaggaggagtag

SEQ ID NO: 90149 - DNA, 1128 bp, synthetic construct
  misc_feature 1..1128: note = Description of Artificial Sequence: Synthetic coding sequence
  source 1..1128: mol_type = other DNA
atgcagaagctgcagctgtgcgtgtacatctacctgttcatgctgatcgtggccggccccgtggacctgaacgagaacagcgagcagaaggagaacgtggagaaggagggcctgtgcaacgcctgcacctggagacagaacaccaagagcagcagaatcgaggccatcaagatccagatcctgagcaagctgagactggagaccgcccccaacatcagcaaggacgtgatcagacagctgctgcccaaggccccccccctgagagagctgatcgaccagtacgacgtgcagagagacgacagcagcgacggcagcctggaggacgacgactaccacgccaccaccgagaccatcatcaccatgcccaccgagagcgacttcctgatgcaggtggacggcaagcccaagtgctgcttcttcaagttcagcagcaagatccagtacaacaaggtggtgaaggcccagctgtggatctacctgagacccgtggagacccccaccaccgtgttcgtgcagatcctgagactgatcaagcccatgaaggacggcaccagatacaccggcatcagaagcctgaagctggacatgaaccccggcaccggcatctggcagagcatcgacgtgaagaccgtgctgcagaactggctgaagcagcccgagagcaacctgggcatcgagatcaaggccctggacgagaacggccacgacctggccgtgaccttccccggccccggcgaggacggcctgaaccccttcctggaggtgaaggtgaccgacacccccaagagaagcagaagagacttcggcctggactgcgacgagcacagcaccgagagcagatgctgcagataccccctgaccgtggacttcgaggccttcggctgggactggatcatcgcccccaagagatacaaggccaactactgcagcggcgagtgcgagttcgtgttcctgcagaagtacccccacacccacctggtgcaccaggccaaccccagaggcagcgccggcccctgctgcacccccaccaagatgagccccatcaacatgctgtacttcaacggcaaggagcagatcatctacggcaagatccccgccatggtggtggacagatgcggctgcagctag

SEQ ID NO: 90150 - DNA, 1497 bp, synthetic construct
  misc_feature 1..1497: note = Description of Artificial Sequence: Synthetic coding sequence
  source 1..1497: mol_type = other DNA
atgttcaactacgagagacccaagcacttcatccagagccagaacccctgcggcagcagactgcagccccccggccccgagaccagcagcttcagcagccagaccaagcagagcagcatcatcatccagcccagacagtgcaccgagcagagattcagcgccagcagcaccctgagcagccacatcaccatgagcagcagcgccttccccgccagccccaagcagcacgccggcagcaaccccggccagagagtgaccaccacctacaaccagagccccgccagcttcctgagcagcatcctgcccagccagcccgactacaacagcagcaagatccccagcgccatggacagcaactaccagcagagcagcgccggccagcccatcaacgccaagcccagccagaccgccaacgccaagcccatccccagaacccccgaccacgagatccagggcagcaaggaggccctgatccaggacctggagagaaagctgaagtgcaaggacaccctgctgcacaacggcaaccagagactgacctacgaggagaagatggccagaagactgctgggcccccagaacgccgccgccgtgttccaggcccaggacgacagcggcgcccaggacagccagcagcacaacagcgagcacgccagactgcaggtgcccaccagccaggtgagaagcagaagcaccagcagaggcgacgtgaacgaccaggacgccatccaggagaagttctacccccccagattcatccaggtgcccgagaacatgagcatcgacgagggcagattctgcagaatggacttcaaggtgagcggcctgcccgcccccgacgtgagctggtacctgaacggcagaaccgtgcagagcgacgacctgcacaagatgatcgtgagcgagaagggcctgcacagcctgatcttcgaggtggtgagagccagcgacgccggcgcctacgcctgcgtggccaagaacagagccggcgaggccaccttcaccgtgcagctggacgtgctggccaaggagcacaagagagcccccatgttcatctacaagccccagagcaagaaggtgctggagggcgacagcgtgaagctggagtgccagatcagcgccatccccccccccaagctgttctggaagagaaacaacgagatggtgcagttcaacaccgacagaatcagcctgtaccaggacaacaccggcagagtgaccctgctgatcaaggacgtgaacaagaaggacgccggctggtacaccgtgagcgccgtgaacgaggccggcgtgaccacctgcaacaccagactggacgtgaccgccagacccaaccagaccctgcccgcccccaagcagctgagagtgagacccaccttcagcaagtacctggccctgaacggcaagggcctgaacgtgaagcaggccttcaaccccgagggcgagttccagagactggccgcccagagcggcctgtacgagagcgaggagctgtag

SEQ ID NO: 90151 - DNA, 945 bp, synthetic construct
  misc_feature 1..945: note = Description of Artificial Sequence: Synthetic coding sequence
  source 1..945: mol_type = other DNA
atggccagaagactgctgggcccccagaacgccgccgccgtgttccaggcccaggacgacagcggcgcccaggacagccagcagcacaacagcgagcacgccagactgcaggtgcccaccagccaggtgagaagcagaagcaccagcagaggcgacgtgaacgaccaggacgccatccaggagaagttctacccccccagattcatccaggtgcccgagaacatgagcatcgacgagggcagattctgcagaatggacttcaaggtgagcggcctgcccgcccccgacgtgagctggtacctgaacggcagaaccgtgcagagcgacgacctgcacaagatgatcgtgagcgagaagggcctgcacagcctgatcttcgaggtggtgagagccagcgacgccggcgcctacgcctgcgtggccaagaacagagccggcgaggccaccttcaccgtgcagctggacgtgctggccaaggagcacaagagagcccccatgttcatctacaagccccagagcaagaaggtgctggagggcgacagcgtgaagctggagtgccagatcagcgccatccccccccccaagctgttctggaagagaaacaacgagatggtgcagttcaacaccgacagaatcagcctgtaccaggacaacaccggcagagtgaccctgctgatcaaggacgtgaacaagaaggacgccggctggtacaccgtgagcgccgtgaacgaggccggcgtgaccacctgcaacaccagactggacgtgaccgccagacccaaccagaccctgcccgcccccaagcagctgagagtgagacccaccttcagcaagtacctggccctgaacggcaagggcctgaacgtgaagcaggccttcaaccccgagggcgagttccagagactggccgcccagagcggcctgtacgagagcgaggagctgtag

SEQ ID NO: 90152 - DNA, 357 bp, synthetic construct
  misc_feature 1..357: note = Description of Artificial Sequence: Synthetic coding sequence
  source 1..357: mol_type = other DNA
atgtgcgacaaggagttcatgtgggccctgaagaacggcgacctggacgaggtgaaggactacgtggccaagggcgaggacgtgaacagaaccctggagggcggcagaaagcccctgcactacgccgccgactgcggccagctggagatcctggagttcctgctgctgaagggcgccgacatcaacgcccccgacaagcaccacatcacccccctgctgagcgccgtgtacgagggccacgtgagctgcgtgaagctgctgctgagcaagggcgccgacaagaccgtgaagggccccgacggcctgaccgccttcgaggccaccgacaaccaggccatcaaggccctgctgcagtag

SEQ ID NO: 90153 - DNA, 1812 bp, synthetic construct
  misc_feature 1..1812: note = Description of Artificial Sequence: Synthetic coding sequence
  source 1..1812: mol_type = other DNA
atggccagcgccagcaccagcaagtacaacagccacagcctggagaacgagagcatcaagagaaccagcagagacggcgtgaacagagacctgaccgaggccgtgcccagactgcccggcgagaccctgatcaccgacaaggaggtgatctacatctgccccttcaacggccccatcaagggcagagtgtacatcaccaactacagactgtacctgagaagcctggagaccgacagcagcctgatcctggacgtgcccctgggcgtgatcagcagaatcgagaagatgggcggcgccaccagcagaggcgagaacagctacggcctggacatcacctgcaaggacatgagaaacctgagattcgccctgaagcaggagggccacagcagaagagacatgttcgagatcctgaccagatacgccttccccctggcccacagcctgcccctgttcgccttcctgaacgaggagaagttcaacgtggacggctggaccgtgtacaaccccgtggaggagtacagaagacagggcctgcccaaccaccactggagaatcaccttcatcaacaagtgctacgagctgtgcgacacctaccccgccctgctggtggtgccctacagagccagcgacgacgacctgagaagagtggccaccttcagaagcagaaacagaatccccgtgctgagctggatccaccccgagaacaagaccgtgatcgtgagatgcagccagcccctggtgggcatgagcggcaagagaaacaaggacgacgagaagtacctggacgtgatcagagagaccaacaagcagatcagcaagctgaccatctacgacgccagacccagcgtgaacgccgtggccaacaaggccaccggcggcggctacgagagcgacgacgcctaccacaacgccgagctgttcttcctggacatccacaacatccacgtgatgagagagagcctgaagaaggtgaaggacatcgtgtaccccaacgtggaggagagccactggctgagcagcctggagagcacccactggctggagcacatcaagctggtgctgaccggcgccatccaggtggccgacaaggtgagcagcggcaagagcagcgtgctggtgcactgcagcgacggctgggacagaaccgcccagctgaccagcctggccatgctgatgctggacagcttctacagaagcatcgagggcttcgagatcctggtgcagaaggagtggatcagcttcggccacaagttcgccagcagaatcggccacggcgacaagaaccacaccgacgccgacagaagccccatcttcctgcagttcatcgactgcgtgtggcagatgagcaagcagttccccaccgccttcgagttcaacgagcagttcctgatcatcatcctggaccacctgtacagctgcagattcggcaccttcctgttcaactgcgagagcgccagagagagacagaaggtgaccgagagaaccgtgagcctgtggagcctgatcaacagcaacaaggagaagttcaagaaccccttctacaccaaggagatcaacagagtgctgtaccccgtggccagcatgagacacctggagctgtgggtgaactactacatcagatggaaccccagaatcaagcagcagcagcccaaccccgtggagcagagatacatggagctgctggccctgagagacgagtacatcaagagactggaggagctgcagctggccaacagcgccaagctgagcgacccccccaccagccccagcagccccagccagatgatgccccacgtgcagacccacttctag

SEQ ID NO: 90154 - DNA, 1701 bp, synthetic construct
  misc_feature 1..1701: note = Description of Artificial Sequence: Synthetic coding sequence
  source 1..1701: mol_type = other DNA
atggccagcgccagcaccagcaagtacaacagccacagcctggagaacgagagcatcaagagaaccagcagagacggcgtgaacagagacctgaccgaggccgtgcccagactgcccggcgagaccctgatcaccgacaaggaggtgatctacatctgccccttcaacggccccatcaagggcagagtgtacatcaccaactacagactgtacctgagaagcctggagaccgacatgagaaacctgagattcgccctgaagcaggagggccacagcagaagagacatgttcgagatcctgaccagatacgccttccccctggcccacagcctgcccctgttcgccttcctgaacgaggagaagttcaacgtggacggctggaccgtgtacaaccccgtggaggagtacagaagacagggcctgcccaaccaccactggagaatcaccttcatcaacaagtgctacgagctgtgcgacacctaccccgccctgctggtggtgccctacagagccagcgacgacgacctgagaagagtggccaccttcagaagcagaaacagaatccccgtgctgagctggatccaccccgagaacaagaccgtgatcgtgagatgcagccagcccctggtgggcatgagcggcaagagaaacaaggacgacgagaagtacctggacgtgatcagagagaccaacaagcagatcagcaagctgaccatctacgacgccagacccagcgtgaacgccgtggccaacaaggccaccggcggcggctacgagagcgacgacgcctaccacaacgccgagctgttcttcctggacatccacaacatccacgtgatgagagagagcctgaagaaggtgaaggacatcgtgtaccccaacgtggaggagagccactggctgagcagcctggagagcacccactggctggagcacatcaagctggtgctgaccggcgccatccaggtggccgacaaggtgagcagcggcaagagcagcgtgctggtgcactgcagcgacggctgggacagaaccgcccagctgaccagcctggccatgctgatgctggacagcttctacagaagcatcgagggcttcgagatcctggtgcagaaggagtggatcagcttcggccacaagttcgccagcagaatcggccacggcgacaagaaccacaccgacgccgacagaagccccatcttcctgcagttcatcgactgcgtgtggcagatgagcaagcagttccccaccgccttcgagttcaacgagcagttcctgatcatcatcctggaccacctgtacagctgcagattcggcaccttcctgttcaactgcgagagcgccagagagagacagaaggtgaccgagagaaccgtgagcctgtggagcctgatcaacagcaacaaggagaagttcaagaaccccttctacaccaaggagatcaacagagtgctgtaccccgtggccagcatgagacacctggagctgtgggtgaactactacatcagatggaaccccagaatcaagcagcagcagcccaaccccgtggagcagagatacatggagctgctggccctgagagacgagtacatcaagagactggaggagctgcagctggccaacagcgccaagctgagcgacccccccaccagccccagcagccccagccagatgatgccccacgtgcagacccacttctag

SEQ ID NO: 90155 - DNA, 1251 bp, synthetic construct
  misc_feature 1..1251: note = Description of Artificial Sequence: Synthetic coding sequence
  source 1..1251: mol_type = other DNA
atgggcggcgccaccagcagaggcgagaacagctacggcctggacatcacctgcaaggacatgagaaacctgagattcgccctgaagcaggagggccacagcagaagagacatgttcgagatcctgaccagatacgccttccccctggcccacagcctgcccctgttcgccttcctgaacgaggagaagttcaacgtggacggctggaccgtgtacaaccccgtggaggagtacagaagacagggcctgcccaaccaccactggagaatcaccttcatcaacaagtgctacgagctgtgcgacacctaccccgccctgctggtggtgccctacagagccagcgacgacgacctgagaagagtggccaccttcagaagcagaaacagaatccccgtgctgagctggatccaccccgagaacaagaccgtgatcgtgagatgcagccagcccctggtgggcatgagcggcaagagaaacaaggacgacgagaagtacctggacgtgatcagagagaccaacaagcagatcagcaagctgaccatctacgacgccagacccagcgtgaacgccgtggccaacaaggccaccggcggcggctacgagagcgacgacgcctaccacaacgccgagctgttcttcctggacatccacaacatccacgtgatgagagagagcctgaagaaggtgaaggacatcgtgtaccccaacgtggaggagagccactggctgagcagcctggagagcacccactggctggagcacatcaagctggtgctgaccggcgccatccaggtggccgacaaggtgagcagcggcaagagcagcgtgctggtgcactgcagcgacggctgggacagaaccgcccagctgaccagcctggccatgctgatgctggacagcttctacagaagcatcgagggcttcgagatcctggtgcagaaggagtggatcagcttcggccacaagttcgccagcagaatcggccacggcgacaagaaccacaccgacgccgacagaagccccatcttcctgcagttcatcgactgcgtgtggcagatgagcaagcagttccccaccgccttcgagttcaacgagcagttcctgatcatcatcctggaccacctgtacagctgcagattcggcaccttcctgttcaactgcgagagcgccagagagagacaggccctgcacttcctgagcctgagcctgtgcagaagactgcagaagggcctgttcctgtacggccactag

SEQ ID NO: 90156 - DNA, 1467 bp, synthetic construct
  misc_feature 1..1467: note = Description of Artificial Sequence: Synthetic coding sequence
  source 1..1467: mol_type = other DNA
atgagaaacctgagattcgccctgaagcaggagggccacagcagaagagacatgttcgagatcctgaccagatacgccttccccctggcccacagcctgcccctgttcgccttcctgaacgaggagaagttcaacgtggacggctggaccgtgtacaaccccgtggaggagtacagaagacagggcctgcccaaccaccactggagaatcaccttcatcaacaagtgctacgagctgtgcgacacctaccccgccctgctggtggtgccctacagagccagcgacgacgacctgagaagagtggccaccttcagaagcagaaacagaatccccgtgctgagctggatccaccccgagaacaagaccgtgatcgtgagatgcagccagcccctggtgggcatgagcggcaagagaaacaaggacgacgagaagtacctggacgtgatcagagagaccaacaagcagatcagcaagctgaccatctacgacgccagacccagcgtgaacgccgtggccaacaaggccaccggcggcggctacgagagcgacgacgcctaccacaacgccgagctgttcttcctggacatccacaacatccacgtgatgagagagagcctgaagaaggtgaaggacatcgtgtaccccaacgtggaggagagccactggctgagcagcctggagagcacccactggctggagcacatcaagctggtgctgaccggcgccatccaggtggccgacaaggtgagcagcggcaagagcagcgtgctggtgcactgcagcgacggctgggacagaaccgcccagctgaccagcctggccatgctgatgctggacagcttctacagaagcatcgagggcttcgagatcctggtgcagaaggagtggatcagcttcggccacaagttcgccagcagaatcggccacggcgacaagaaccacaccgacgccgacagaagccccatcttcctgcagttcatcgactgcgtgtggcagatgagcaagcagttccccaccgccttcgagttcaacgagcagttcctgatcatcatcctggaccacctgtacagctgcagattcggcaccttcctgttcaactgcgagagcgccagagagagacagaaggtgaccgagagaaccgtgagcctgtggagcctgatcaacagcaacaaggagaagttcaagaaccccttctacaccaaggagatcaacagagtgctgtaccccgtggccagcatgagacacctggagctgtgggtgaactactacatcagatggaaccccagaatcaagcagcagcagcccaaccccgtggagcagagatacatggagctgctggccctgagagacgagtacatcaagagactggaggagctgcagctggccaacagcgccaagctgagcgacccccccaccagccccagcagccccagccagatgatgccccacgtgcagacccacttctag

SEQ ID NO: 90157 - DNA, 1998 bp, synthetic construct
  misc_feature 1..1998: note = Description of Artificial Sequence: Synthetic coding sequence
  source 1..1998: mol_type = other DNA
atggacagacccgccgccgccgccgccgccggctgcgagggcggcggcggccccaaccccggccccgccggcggcagaagaccccccagagccgccggcggcgccaccgccggcagcagacagcccagcgtggagaccctggacagccccaccggcagccacgtggagtggtgcaagcagctgatcgccgccaccatcagcagccagatcagcggcagcgtgaccagcgagaacgtgagcagagactacaaggccctgagagacggcaacaagctggcccagatggaggaggcccccctgttccccggcgagagcatcaaggccatcgtgaaggacgtgatgtacatctgccccttcatgggcgccgtgagcggcaccctgaccgtgaccgacttcaagctgtacttcaagaacgtggagagagacccccacttcatcctggacgtgcccctgggcgtgatcagcagagtggagaagatcggcgcccagagccacggcgacaacagctgcggcatcgagatcgtgtgcaaggacatgagaaacctgagactggcctacaagcaggaggagcagagcaagctgggcatcttcgagaacctgaacaagcacgccttccccctgagcaacggccaggccctgttcgccttcagctacaaggagaagttccccatcaacggctggaaggtgtacgaccccgtgagcgagtacaagagacagggcctgcccaacgagagctggaagatcagcaagatcaacagcaactacgagttctgcgacacctaccccgccatcatcgtggtgcccaccagcgtgaaggacgacgacctgagcaaggtggccgccttcagagccaagggcagagtgcccgtgctgagctggatccaccccgagagccaggccaccatcaccagatgcagccagcccctggtgggccccaacgacaagagatgcaaggaggacgagaagtacctgcagaccatcatggacgccaacgcccagagccacaagctgatcatcttcgacgccagacagaacagcgtggccgacaccaacaagaccaagggcggcggctacgagagcgagagcgcctaccccaacgccgagctggtgttcctggagatccacaacatccacgtgatgagagagagcctgagaaagctgaaggagatcgtgtaccccagcatcgacgaggccagatggctgagcaacgtggacggcacccactggctggagtacatcagaatgctgctggccggcgccgtgagaatcgccgacaagatcgagagcggcaagaccagcgtggtggtgcactgcagcgacggctgggacagaaccgcccagctgaccagcctggccatgctgatgctggacagctactacagaaccatcaagggcttcgagaccctggtggagaaggagtggatcagcttcggccacagattcgccctgagagtgggccacggcaacgacaaccacgccgacgccgacagaagccccatcttcctgcagttcgtggactgcgtgtggcagatgaccagacagttccccagcgccttcgagttcaacgagctgttcctgatcaccatcctggaccacctgtacagctgcctgttcggcaccttcctgtgcaactgcgagcagcagagattcaaggaggacgtgtacaccaagaccatcagcctgtggagctacatcaacagccagctggacgagttcagcaaccccttcttcgtgaactacgagaaccacgtgctgtaccccgtggccagcctgagccacctggagctgtgggtgaactactacgtgagatggaaccccagaatgagaccccagatgcccatccaccagaacctgaaggagctgctggccgtgagagccgagctgcagaagagagtggagggcctgcagagagaggtggccaccagagccgtgagcagcagcagcgagagaggcagcagccccagccacagcgccaccagcgtgcacaccagcgtgtag

SEQ ID NO: 90158 - DNA, 264 bp, synthetic construct
  misc_feature 1..264: note = Description of Artificial Sequence: Synthetic coding sequence
  source 1..264: mol_type = other DNA
atggaggaggcccccctgttccccggcgagagcatcaaggccatcgtgaaggacgtgatgtacatctgccccttcatgggcgccgtgagcggcaccctgaccgtgaccgacttcaagctgtacttcaagaacgtggagagagacccccacttcatcctggacgtgcccctgggcgtgatcagcagagtggagaagatcggcgcccagagccacggcgacaacagctgcggcatcgagatcgtgtgcaaggacatgagaaactag

SEQ ID NO: 90159 - DNA, 264 bp, synthetic construct; identical to SEQ ID NO: 90158
  misc_feature 1..264: note = Description of Artificial Sequence: Synthetic coding sequence
  source 1..264: mol_type = other DNA

SEQ ID NO: 90160 - DNA, 273 bp, synthetic construct
  misc_feature 1..273: note = Description of Artificial Sequence: Synthetic coding sequence
  source 1..273: mol_type = other DNA
atggaggaggcccccctgttccccggcgagagcatcaaggccatcgtgaaggacgtgatgtacatctgccccttcatgggcgccgtgagcggcaccctgaccgtgaccgacttcaagctgtacttcaagaacgtggagagagacccccacttcatcctggacgtgcccctgggcgtgatcagcagagtggagaagatcggcgcccagagccacggcgacaacagctgcggcatcgagatcgtgtgcaaggacatgagaaacctgagactgtag

SEQ ID NO: 90161 - DNA, 2022 bp, synthetic construct
  misc_feature 1..2022: note = Description of Artificial Sequence: Synthetic coding sequence
  source 1..2022: mol_type = other DNA
atggacagacccgccgccgccgccgccgccggctgcgagggcggcggcggccccaaccccggccccgccggcggcagaagaccccccagagccgccggcggcgccaccgccggcagcagacagcccagcgtggagaccctggacagccccaccggcagccacgtggagtggtgcaagcagctgatcgccgccaccatcagcagccagatcagcggcagcgtgaccagcgagaacgtgagcagagactacaaggtgttcagaagacccgacctgagagccctgagagacggcaacaagctggcccagatggaggaggcccccctgttccccggcgagagcatcaaggccatcgtgaaggacgtgatgtacatctgccccttcatgggcgccgtgagcggcaccctgaccgtgaccgacttcaagctgtacttcaagaacgtggagagagacccccacttcatcctggacgtgcccctgggcgtgatcagcagagtggagaagatcggcgcccagagccacggcgacaacagctgcggcatcgagatcgtgtgcaaggacatgagaaacctgagactggcctacaagcaggaggagcagagcaagctgggcatcttcgagaacctgaacaagcacgccttccccctgagcaacggccaggccctgttcgccttcagctacaaggagaagttccccatcaacggctggaaggtgtacgaccccgtgagcgagtacaagagacagggcctgcccaacgagagctggaagatcagcaagatcaacagcaactacgagttctgcgacacctaccccgccatcatcgtggtgcccaccagcgtgaaggacgacgacctgagcaaggtggccgccttcagagccaagggcagagtgcccgtgctgagctggatccaccccgagagccaggccaccatcaccagatgcagccagcccctggtgggccccaacgacaagagatgcaaggaggacgagaagtacctgcagaccatcatggacgccaacgcccagagccacaagctgatcatcttcgacgccagacagaacagcgtggccgacaccaacaagaccaagggcggcggctacgagagcgagagcgcctaccccaacgccgagctggtgttcctggagatccacaacatccacgtgatgagagagagcctgagaaagctgaaggagatcgtgtaccccagcatcgacgaggccagatggctgagcaacgtggacggcacccactggctggagtacatcagaatgctgctggccggcgccgtgagaatcgccgacaagatcgagagcggcaagaccagcgtggtggtgcactgcagcgacggctgggacagaaccgcccagctgaccagcctggccatgctgatgctggacagctactacagaaccatcaagggcttcgagaccctggtggagaaggagtggatcagcttcggccacagattcgccctgagagtgggccacggcaacgacaaccacgccgacgccgacagaagccccatcttcctgcagttcgtggactgcgtgtggcagatgaccagacagttccccagcgccttcgagttcaacgagctgttcctgatcaccatcctggaccacctgtacagctgcctgttcggcaccttcctgtgcaactgcgagcagcagagattcaaggaggacgtgtacaccaagaccatcagcctgtggagctacatcaacagccagctggacgagttcagcaaccccttcttcgtgaactacgagaaccacgtgctgtaccccgtggccagcctgagccacctggagctgtgggtgaactactacgtgagatggaaccccagaatgagaccccagatgcccatccaccagaacctgaaggagctgctggccgtgagagccgagctgcagaagagagtggagggcctgcagagagaggtggccaccagagccgtgagcagcagcagcgagagaggcagcagccccagccacagcgccaccagcgtgcacaccagcgtgtag

SEQ ID NO: 90162 - DNA, 1707 bp, synthetic construct
  misc_feature 1..1707: note = Description of Artificial Sequence: Synthetic coding sequence
  source 1..1707: mol_type = other DNA
atggacagacccgccgccgccgccgccgccggctgcgagggcggcggcggccccaaccccggccccgccggcggcagaagaccccccagagccgccggcggcgccaccgccggcagcagacagcccagcgtggagaccctggacagccccaccggcagccacgtggagtggtgcaagcagctgatcgccgccaccatcagcagccagatcagcggcagcgtgaccagcgagaacgtgagcagagactacaaggccctgagagacggcaacaagctggcccagatggaggaggcccccctgttccccggcgagagcatcaaggccatcgtgaaggacgtgatgtacatctgccccttcatgggcgccgtgagcggcaccctgaccgtgaccgacttcaagctgtacttcaagaacgtggagagagacccccacttcatcctggacgtgcccctgggcgtgatcagcagagtggagaagatcggcgcccagagccacggcgacaacagctgcggcatcgagatcgtgtgcaaggacatgagaaacctgagactggcctacaagcaggaggagcagagcaagctgggcatcttcgagaacctgaacaagcacgccttccccctgagcaacggccaggccctgttcgccttcagctacaaggagaagttccccatcaacggctggaaggtgtacgaccccgtgagcgagtacaagagacagggcctgcccaacgagagctggaagatcagcaagatcaacagcaactacgagttctgcgacacctaccccgccatcatcgtggtgcccaccagcgtgaaggacgacgacctgagcaaggtggccgccttcagagccaagggcagagtgcccgtgctgagctggatccaccccgagagccaggccaccatcaccagatgcagccagcccctggtgggccccaacgacaagagatgcaaggaggacgagaagtacctgcagaccatcatggacgccaacgcccagagccacaagctgatcatcttcgacgccagacagaacagcgtggccgacaccaacaagaccaagggcggcggctacgagagcgagagcgcctaccccaacgccgagctggtgttcctggagatccacaacatccacgtgatgagagagagcctgagaaagctgaaggagatcgtgtaccccagcatcgacgaggccagatggctgagcaacgtggacggcacccactggctggagtacatcagaatgctgctggccggcgccgtgagaatcgccgacaagatcgagagcggcaagaccagcgtggtggtgcactgcagcgacggctgggacagaaccgcccagctgaccagcctggccatgctgatgctggacagctactacagaaccatcaagggcttcgagaccctggtggagaaggagtggatcagcttcggccacagattcgccctgagagtgggccacggcaacgacaaccacgccgacgccgacagaagccccatcttcctgcagttcgtggactgcgtgtggcagatgaccagacagttccccagcgccttcgagttcaacgagctgttcctgatcaccatcctggaccacctgtacagctgcctgttcggcaccttcctgtgcaactgcgagcagcagagattcaaggaggcctggggcgccggcacccagagagccagaggcagcctgagaagcagatag

SEQ ID NO: 90163 - DNA, 444 bp, synthetic construct
  misc_feature 1..444: note = Description of Artificial Sequence: Synthetic coding sequence
  source 1..444: mol_type = other DNA
atggaggaggcccccctgttccccggcgagagcatcaaggccatcgtgaaggacgtgatgtacatctgccccttcatgggcgccgtgagcggcaccctgaccgtgaccgacttcaagctgtacttcaagaacgtggagagagacccccacttcatcctggacgtgcccctgggcgtgatcagcagagtggagaagatcggcgcccagagccacggcgacaacagctgcggcatcgagatcgtgtgcaaggacatgagaaacctgagactggcctacaagcaggaggagcagagcaagctgggcatcttcgagaacctgaacaagcacgccttccccctgagcaacggccaggccctgttcgccttcagctacaaggagaagttccccatcaacggctggaaggtgtacgaccccgtgagcgagtacaagagacagggcctgtag

SEQ ID NO: 90164 - DNA, 1182 bp, synthetic construct
  misc_feature 1..1182: note = Description of Artificial Sequence: Synthetic coding sequence
  source 1..1182: mol_type = other DNA
atgtacatctgccccttcatgggcgccgtgagcggcaccctgaccgtgaccgacttcaagctgtacttcaagaacgtggagagagacccccacttcatcctggacgtgcccctgggcgtgatcagcagagtggagaagatcggcgcccagagccacggcgacaacagctgcggcatcgagatcgtgtgcaaggacatgagaaacctgagactggcctacaagcaggaggagcagagcaagctgggcatcttcgagaacctgaacaagcacgccttccccctgagcaacggccaggccctgttcgccttcagctacaaggagaagttccccatcaacggctggaaggtgtacgaccccgtgagcgagtacaagagacagggcctgcccaacgagagctggaagatcagcaagatcaacagcaactacgagttctgcgacacctaccccgccatcatcgtggtgcccaccagcgtgaaggacgacgacctgagcaaggtggccgccttcagagccaagggcagagtgcccgtgctgagctggatccaccccgagagccaggccaccatcaccagatgcagccagcccctggtgggccccaacgacaagagatgcaaggaggacgagaagtacctgcagaccatcatggacgccaacgcccagagccacaagctgatcatcttcgacgccagacagaacagcgtggccgacaccaacaagatgctgctggccggcgccgtgagaatcgccgacaagatcgagagcggcaagaccagcgtggtggtgcactgcagcgacggctgggacagaaccgcccagctgaccagcctggccatgctgatgctggacagctactacagaaccatcaagggcttcgagaccctggtggagaaggagtggatcagcttcggccacagattcgccctgagagtgggccacggcaacgacaaccacgccgacgccgacagaagccccatcttcctgcagttcgtggactgcgtgtggcagatgaccagacagttccccagcgccttcgagttcaacgagctgttcctgatcaccatcctggaccacctgtacagctgcctgttcggcaccttcctgtgcaactgcgagcagcagagattcaaggaggcctggggcgccggcacccagagagccagaggcagcctgagaagcagatag

SEQ ID NO: 90165 - DNA, 1716 bp, synthetic construct
  misc_feature 1..1716: note = Description of Artificial Sequence: Synthetic coding sequence
  source 1..1716: mol_type = other DNA
atggaggaggcccccctgttccccggcgagagcatcaaggccatcgtgaaggacgtgatgtacatctgccccttcatgggcgccgtgagcggcaccctgaccgtgaccgacttcaagctgtacttcaagaacgtggagagagacccccacttcatcctggacgtgcccctgggcgtgatcagcagagtggagaagatcggcgcccagagccacggcgacaacagctgcggcatcgagatcgtgtgcaaggacatgagaaacctgagactggcctacaagcaggaggagcagagcaagctgggcatcttcgagaacctgaacaagcacgccttccccctgagcaacggccaggccctgttcgccttcagctacaaggagaagttccccatcaacggctggaaggtgtacgaccccgtgagcgagtacaagagacagggcctgcccaacgagagctggaagatcagcaagatcaacagcaactacgagttctgcgacacctaccccgccatcatcgtggtgcccaccagcgtgaaggacgacgacctgagcaaggtggccgccttcagagccaagggcagagtgcccgtgctgagctggatccaccccgagagccaggccaccatcaccagatgcagccagcccctggtgggccccaacgacaagagatgcaaggaggacgagaagtacctgcagaccatcatggacgccaacgcccagagccacaagctgatcatcttcgacgccagacagaacagcgtggccgacaccaacaagaccaagggcggcggctacgagagcgagagcgcctaccccaacgccgagctggtgttcctggagatccacaacatccacgtgatgagagagagcctgagaaagctgaaggagatcgtgtaccccagcatcgacgaggccagatggctgagcaacgtggacggcacccactggctggagtacatcagaatgctgctggccggcgccgtgagaatcgccgacaagatcgagagcggcaagaccagcgtggtggtgcactgcagcgacggctgggacagaaccgcccagctgaccagcctggccatgctgatgctggacagctactacagaaccatcaagggcttcgagaccctggtggagaaggagtggatcagcttcggccacagattcgccctgagagtgggccacggcaacgacaaccacgccgacgccgacagaagccccatcttcctgcagttcgtggactgcgtgtggcagatgaccagacagttccccagcgccttcgagttcaacgagctgttcctgatcaccatcctggaccacctgtacagctgcctgttcggcaccttcctgtgcaactgcgagcagcagagattcaaggaggacgtgtacaccaagaccatcagcctgtggagctacatcaacagccagctggacgagttcagcaaccccttcttcgtgaactacgagaaccacgtgctgtaccccgtggccagcctgagccacctggagctgtgggtgaactactacgtgagatggaaccccagaatgagaccccagatgcccatccaccagaacctgaaggagctgctggccgtgagagccgagctgcagaagagagtggagggcctgcagagagaggtggccaccagagccgtgagcagcagcagcgagagaggcagcagccccagccacagcgccaccagcgtgcacaccagcgtgtag

SEQ ID NO: 90166 - DNA, 1092 bp, synthetic construct
  misc_feature 1..1092: note = Description of Artificial Sequence: Synthetic coding sequence
  source 1..1092: mol_type = other DNA
atggacagacccgccgccgccgccgccgccggctgcgagggcggcggcggccccaaccccggccccgccggcggcagaagaccccccagagccgccggcggcgccaccgccggcagcagacagcccagcgtggagaccctggacagccccaccggcagccacgtggagtggtgcaagcagctgatcgccgccaccatcagcagccagatcagcggcagcgtgaccagcgagaacgtgagcagagactacaaggccctgagagacggcaacaagctggcccagatggaggaggcccccctgttccccggcgagagcatcaaggccatcgtgaaggacgtgatgtacatctgccccttcatgggcgccgtgagcggcaccctgaccgtgaccgacttcaagctgtacttcaagaacgtggagagagacccccacttcatcctggacgtgcccctgggcgtgatcagcagagtggagaagatcggcgcccagagccacggcgacaacagctgcggcatcgagatcgtgtgcaaggacatgagaaacctgagactggcctacaagcaggaggagcagagcaagctgggcatcttcgagaacctgaacaagcacgccttccccctgagcaacggccaggccctgttcgccttcagctacaaggagaagttccccatcaacggctggaaggtgtacgaccccgtgagcgagtacaagagacagggcctgcccaacgagagctggaagatcagcaagatcaacagcaactacgagttctgcgacacctaccccgccatcatcgtggtgcccaccagcgtgaaggacgacgacctgagcaaggtggccgccttcagagccaagggcagagtgcccgtgctgagctggatccaccccgagagccaggccaccatcaccagatgcagccagcccctggtgggccccaacgacaagagatgcaaggaggacgagaagtacctgcagaccatcatggacgccaacgcccagagccacaagctgatcatcttcgacgccagacagaacagcgtggccgacaccaacaagctgtggtaccaggacaccgccagcctgatggagtag

SEQ ID NO: 90167 - DNA, 1998 bp, synthetic construct; identical to SEQ ID NO: 90157
  misc_feature 1..1998: note = Description of Artificial Sequence: Synthetic coding sequence
  source 1..1998: mol_type = other DNA

SEQ ID NO: 90168 - DNA, 1914 bp, synthetic construct
  misc_feature 1..1914: note = Description of Artificial Sequence: Synthetic coding sequence
  source 1..1914: mol_type = other DNA
atgctgggcaagggcgtggtgggcggcggcggcggcaccaaggcccccaagcccagcttcgtgagctacgtgagacccgaggagatccacaccaacgagaaggaggtgaccgagaaggaggtgaccctgcacctgctgcccggcgagcagctgctgtgcgaggccagcaccgtgctgaagtacgtgcaggaggacagctgccagcacggcgtgtacggcagactggtgtgcaccgacttcaagatcgccttcctgggcgacgacgagagcgccctggacaacgacgagacccagttcaagaacaaggtgatcggcgagaacgacatcaccctgcactgcgtggaccagatctacggcgtgttcgacgagaagaagaagaccctgttcggccagctgaagaagtaccccgagaagctgatcatccactgcaaggacctgagagtgttccagttctgcctgagatacaccaaggaggaggaggtgaagagaatcgtgagcggcatcatccaccacacccaggcccccaagctgctgaagagactgttcctgttcagctacgccaccgccgcccagaacaacaccgtgaccgaccccaagaaccacaccgtgatgttcgacaccctgaaggactggtgctgggagctggagagaaccaagggcaacatgaagtacaaggccgtgagcgtgaacgagggctacaaggtgtgcgagagactgcccgcctacttcgtggtgcccacccccctgcccgaggagaacgtgcagagattccagggccacggcatccccatctggtgctggagctgccacaacggcagcgccctgctgaagatgagcgccctgcccaaggagcaggacgacggcatcctgcagatccagaagagcttcctggacggcatctacaagaccatccacagacccccctacgagatcgtgaagaccgaggacctgagcagcaacttcctgagcctgcaggagatccagaccgcctacagcaagttcaagcagctgttcctgatcgacaacagcaccgagttctgggacaccgacatcaagtggttcagcctgctggagagcagcagctggctggacatcatcagaagatgcctgaagaaggccatcgagatcaccgagtgcatggaggcccagaacatgaacgtgctgctgctggaggagaacgccagcgacctgtgctgcctgatcagcagcctggtgcagctgatgatggacccccactgcagaaccagaatcggcttccagagcctgatccagaaggagtgggtgatgggcggccactgcttcctggacagatgcaaccacctgagacagaacgacaaggaggagcaccagagacagctgagcctgcccctgacccagagcaagagcagccccaagagaggcttcttcagagaggagaccgaccacctgatcaagaacctgctgggcaagagaatcagcaagctgatcaacagcagcgacgagctgcaggacaacttcagagagttctacgacagctggcacagcaagagcaccgactaccacggcctgctgctgccccacatcgagggccccgagatcaaggtgtgggcccagagatacctgagatggatccccgaggcccagatcctgggcggcggccaggtggccaccctgagcaagctgctggagatgatggaggaggtgcagagcctgcaggagaagatcgacgagagacaccacagccagcaggccccccaggccgaggccccctgcctgctgagaaacagcgccagactgagcagcctgttccccttcgccctgctgcagagacacagcagcaagcccgtgctgcccaccagcggctggaaggccctgggcgacgaggacgacctggccaagagagaggacgagttcgtggacctgggcgacgtgtag

SEQ ID NO: 90169 - DNA, 2082 bp, synthetic construct
  misc_feature 1..2082: note = Description of Artificial Sequence: Synthetic coding sequence
  source 1..2082: mol_type = other DNA
atgctgggcaagggcgtggtgggcggcggcggcggcaccaaggcccccaagcccagcttcgtgagctacgtgagacccgaggagatccacaccaacgagaaggaggtgaccgagaaggaggtgaccctgcacctgctgcccggcgagcagctgctgtgcgaggccagcaccgtgctgaagtacgtgcaggaggacagctgccagcacggcgtgtacggcagactggtgtgcaccgacttcaagatcgccttcctgggcgacgacgagagcgccctggacaacgacgagacccagttcaagaacaaggtgatcggcgagaacgacatcaccctgcactgcgtggaccagatctacggcgtgttcgacgagaagaagaagaccctgttcggccagctgaagaagtaccccgagaagctgatcatccactgcaaggacctgagagtgttccagttctgcctgagatacaccaaggaggaggaggtgaagagaatcgtgagcggcatcatccaccacacccaggcccccaagctgctgaagagactgttcctgttcagctacgccaccgccgcccagaacaacaccgtgaccgaccccaagaaccacaccgtgatgttcgacaccctgaaggactggtgctgggagctggagagaaccaagggcaacatgaagtacaaggccgtgagcgtgaacgagggctacaaggtgtgcgagagactgcccgcctacttcgtggtgcccacccccctgcccgaggagaacgtgcagagattccagggccacggcatccccatctggtgctggagctgccacaacggcagcgccctgctgaagatgagcgccctgcccaaggagcaggacgacggcatcctgcagatccagaagagcttcctggacggcatctacaagaccatccacagacccccctacgagatcgtgaagaccgaggacctgagcagcaacttcctgagcctgcaggagatccagaccgcctacagcaagttcaagcagctgttcctgatcgacaacagcaccgagttctgggacaccgacatcaagtggttcagcctgctggagagcagcagctggctggacatcatcagaagatgcctgaagaaggccatcgagatcaccgagtgcatggaggcccagaacatgaacgtgctgctgctggaggagaacgccagcgacctgtgctgcctgatcagcagcctggtgcagctgatgatggacccccactgcagaaccagaatcggcttccagagcctgatccagaaggagtgggtgatgggcggccactgcttcctggacagatgcaaccacctgagacagaacgacaaggaggaggtgcccgtgttcctgctgttcctggactgcgtgtggcagctggtgcaccagcacccccccgccttcgagttcaccgagacctacctgaccgtgctgagcgacagcctgtacatccccatcttcagcaccttcttcttcaacagcccccaccagaaggacaccaacatgcaccagagacagctgagcctgcccctgacccagagcaagagcagccccaagagaggcttcttcagagaggagaccgaccacctgatcaagaacctgctgggcaagagaatcagcaagctgatcaacagcagcgacgagctgcaggacaacttcagagagttctacgacagctggcacagcaagagcaccgactaccacggcctgctgctgccccacatcgagggccccgagatcaaggtgtgggcccagagatacctgagatggatccccgaggcccagatcctgggcggcggccaggtggccaccctgagcaagctgctggagatgatggaggaggtgcagagcctgcaggagaagatcgacgagagacaccacagccagcaggccccccaggccgaggccccctgcctgctgagaaacagcgccagactgagcagcctgttccccttcgccctgctgcagagacacagcagcaagcccgtgctgcccaccagcggctggaaggccctgggcgacgaggacgacctggccaagagagaggacgagttcgtggacctgggcgacgtgtag

SEQ ID NO: 90170 - DNA, 2244 bp, synthetic construct
  misc_feature 1..2244: note = Description of Artificial Sequence: Synthetic coding sequence
  source 1..2244: mol_type = other DNA
atgctgggcaagggcgtggtgggcggcggcggcggcaccaaggcccccaagcccagcttcgtgagctacgtgagacccgaggagatccacaccaacgagaaggaggtgaccgagaaggaggtgaccctgcacctgctgcccggcgagcagctgctgtgcgaggccagcaccgtgctgaagtacgtgcaggaggacagctgccagcacggcgtgtacggcagactggtgtgcaccgacttcaagatcgccttcctgggcgacgacgagagcgccctggacaacgacgagacccagttcaagaacaaggtgatcggcgagaacgacatcaccctgcactgcgtggaccagatctacggcgtgttcgacgagaagaagaagaccctgttcggccagctgaagaagtaccccgagaagctgatcatccactgcaaggacctgagagtgttccagttctgcctgagatacaccaaggaggaggaggtgaagagaatcgtgagcggcatcatccaccacacccaggcccccaagctgctgaagagactgttcctgttcagctacgccaccgccgcccagaacaacaccgtgaccgaccccaagaaccacaccgtgatgttcgacaccctgaaggactggtgctgggagctggagagaaccaagggcaacatgaagtacaaggccgtgagcgtgaacgagggctacaaggtgtgcgagagactgcccgcctacttcgtggtgcccacccccctgcccgaggagaacgtgcagagattccagggccacggcatccccatctggtgctggagctgccacaacggcagcgccctgctgaagatgagcgccctgcccaaggagcaggacgacggcatcctgcagatccagaagagcttcctggacggcatctacaagaccatccacagacccccctacgagatcgtgaagaccgaggacctgagcagcaacttcctgagcctgcaggagatccagaccgcctacagcaagttcaagcagctgttcctgatcgacaacagcaccgagttctgggacaccgacatcaagtggttcagcctgctggagagcagcagctggctggacatcatcagaagatgcctgaagaaggccatcgagatcaccgagtgcatggaggcccagaacatgaacgtgctgctgctggaggagaacgccagcgacctgtgctgcctgatcagcagcctggtgcagctgatgatggacccccactgcagaaccagaatcggcttccagagcctgatccagaaggagtgggtgatgggcggccactgcttcctggacagatgcaaccacctgagacagaacgacaaggaggaggtgcccgtgttcctgctgttcctggactgcgtgtggcagctggtgcaccagcacccccccgccttcgagttcaccgagacctacctgaccgtgctgagcgacagcctgtacatccccatcttcagcaccttcttcttcaacagcccccaccagaaggacaccaacatgggcagagagggccaggacacccagagcaagcccctgaacctgctgaccgtgtgggactggagcgtgcagttcgagcccaaggcccagaccctgctgaagaaccccctgtacgtggagaagcccaagctggacaagggccagagaaagggcatgagattcaagcaccagagacagctgagcctgcccctgacccagagcaagagcagccccaagagaggcttcttcagagaggagaccgaccacctgatcaagaacctgctgggcaagagaatcagcaagctgatcaacagcagcgacgagctgcaggacaacttcagagagttctacgacagctggcacagcaagagcaccgactaccacggcctgctgctgccccacatcgagggccccgagatcaaggtgtgggcccagagatacctgagatggatccccgaggcccagatcctgggcggcggccaggtggccaccctgagcaagctgctggagatgatggaggaggtgcagagcctgcaggagaagatcgacgagagacaccacagccagcaggccccccaggccgaggccccctgcctgctgagaaacagcgccagactgagcagcctgttccccttcgccctgctgcagagacacagcagcaagcccgtgctgcccaccagcggctggaaggccctgggcgacgaggacgacctggccaagagagaggacgagttcgtggacctgggcgacgtgtag

SEQ ID NO: 90171 - DNA, 1953 bp, synthetic construct
  misc_feature 1..1953: note = Description of Artificial Sequence: Synthetic coding sequence
  source 1..1953: mol_type = other DNA
atggccggcgccagagccgccgccgccgccgccagcgccggcagcagcgccagcagcggcaaccagcccccccaggagctgggcctgggcgagctgctggaggagttcagcagaacccagtacagagccaaggacggcagcggcaccggcggcagcaaggtggagagaatcgagaagagatgcctggagctgttcggcagagactactgcttcagcgtgatccccaacaccaacggcgacatctgcggccactaccccagacacatcgtgttcctggagtacgagagcagcgagaaggagaaggacaccttcgagagcaccgtgcaggtgagcaagctgcaggacctgatccacagaagcaagatggccagatgcagaggcagattcgtgtgccccgtgatcctgttcaagggcaagcacatctgcagaagcgccaccctggccggctggggcgagctgtacggcagaagcggctacaactacttcttcagcggcggcgccgacgacgcctgggccgacgtggaggacgtgaccgaggaggactgcgccctgagaagcggcgacacccacctgttcgacaaggtgagaggctacgacatcaagctgctgagatacctgagcgtgaagtacatctgcgacctgatggtggagaacaagaaggtgaagttcggcatgaacgtgaccagcagcgagaaggtggacaaggcccagagatacgccgacttcaccctgctgagcatcccctaccccggctgcgagttcttcaaggagtacaaggacagagactacatggccgagggcctgatcttcaactggaagcaggactacgtggacgcccccctgagcatccccgacttcctgacccacagcctgaacatcgactggagccagtaccagtgctgggacctggtgcagcagacccagaactacctgaagctgctgctgagcctggtgaacagcgacgacgacagcggcctgctggtgcactgcatcagcggctgggacagaacccccctgttcatcagcctgctgagactgagcctgtgggccgacggcctgatccacaccagcctgaagcccaccgagatcctgtacctgaccgtggcctacgactggttcctgttcggccacatgctggtggacagactgagcaagggcgaggagatcttcttcttctgcttcaacttcctgaagcacatcaccagcgaggagttcagcgccctgaagacccagagaagaaagagcctgcccgccagagacggcggcttcaccctggaggacatctgcatgctgagaagaaaggacagaggcagcaccaccagcctgggcagcgacttcagcctggtgatggagagcagccccggcgccaccggcagcttcacctacgaggccgtggagctggtgcccgccggcgcccccacccaggccgcctggagaaagagccacagcagcagcccccagagcgtgctgtggaacagaccccagcccagcgaggacagactgcccagccagcagggcctggccgaggccagaagcagcagcagcagcagcagcaaccacagcgacaacttcttcagaatgggcagcagccccctggaggtgcccaagcccagaagcgtggaccaccccctgcccggcagcagcctgagcaccgactacggcagctggcagatggtgaccggctgcggcagcatccaggagagagccgtgctgcacaccgacagcagcctgcccttcagcttccccgacgagctgcccaacagctgcctgctggccgccctgagcgacagagagaccagactgcaggaggtgagaagcgccttcctggccgcctacagcagcaccgtgggcctgagagccgtggcccccagccccagcggcgccatcggcggcctgctggagcagttcgccagaggcgtgggcctgagaagcatcagcagcaacgccctgtag

SEQ ID NO: 90172 - DNA, 1617 bp, synthetic construct
  misc_feature 1..1617: note = Description of Artificial Sequence: Synthetic coding sequence
  source 1..1617: mol_type = other DNA
atggccggcgccagagccgccgccgccgccgccagcgccggcagcagcgccagcagcggcaaccagcccccccaggagctgggcctgggcgagctgctggaggagttcagcagaacccagtacagagccaaggacggcagcggcaccggcggcagcaaggtggagagaatcgagaagagatgcctggagctgttcggcagagactactgcttcagcgtgatccccaacaccaacggcgacatctgcggccactaccccagacacatcgtgttcctggagtacgagagcagcgagaaggagaaggacaccttcgagagcaccgtgcaggtgagcaagctgcaggacctgatccacagaagcaagatggccagatgcagaggcagattcgtgtgccccgtgatcctgttcaagggcaagcacatctgcagaagcgccaccctggccggctggggcgagctgtacggcagaagcggctacaactacttcttcagcggcggcgccgacgacgcctgggccgacgtggaggacgtgaccgaggaggactgcgccctgagaagcggcgacacccacctgttcgacaaggtgagaggctacgacatcaagctgctgagatacctgagcgtgaagtacatctgcgacctgatggtggagaacaagaaggtgaagttcggcatgaacgtgaccagcagcgagaaggtggacaaggcccagagatacgccgacttcaccctgctgagcatcccctaccccggctgcgagttcttcaaggagtacaaggacagagactacatggccgagggcctgatcttcaactggaagcaggactacgtggacgcccccctgagcatccccgacttcctgacccacagcctgaacatcgactggagccagtaccagtgctgggacctggtgcagcagacccagaactacctgaagctgctgctgagcctggtgaacagcgacgacgacagcggcctgctggtgcactgcatcagcggctgggacagaacccccctgttcatcagcctgctgagactgagcctgtgggccgacggcctgatccacaccagcctgaagcccaccgagatcctgtacctgaccgtggcctacgactggttcctgttcggccacatgctggtggacagactgagcaagggcgaggagatcttcttcttctgcttcaacttcctgaagcacatcaccagcgaggagttcagcgccctgaagacccagagaagaaagagcctgcccgccagagacggcggcttcaccctggaggacatctgcatgctgagaagaaaggacagaggcagcaccaccagcctgggcagcgacttcagcctggtgatggagagcagccccggcgccaccggcagcttcacctacgaggccgtggagctggtgcccgccggcgcccccacccaggccgcctggctggccgccctgagcgacagagagaccagactgcaggaggtgagaagcgccttcctggccgcctacagcagcaccgtgggcctgagagccgtggcccccagccccagcggcgccatcggcggcctgctggagcagttcgccagaggcgtgggcctgagaagcatcagcagcaacgccctgtag

SEQ ID NO: 90173 - DNA, 1797 bp, synthetic construct
  misc_feature 1..1797: note = Description of Artificial Sequence: Synthetic coding sequence
  source 1..1797: mol_type = other DNA
atggccggcgccagagccgccgccgccgccgccagcgccggcagcagcgccagcagcggcaaccagcccccccaggagctgggcctgggcgagctgctggaggagttcagcagaacccagtacagagccaaggacggcagcggcaccggcggcagcaaggtggagagaatcgagaagagatgcctggagctgttcggcagagactactgcttcagcgtgatccccaacaccaacggcgacatctgcggccactaccccagacacatcgtgttcctggagtacgagagcagcgagaaggagaaggacaccttcgagagcaccgtgcaggtgagcaagctgcaggacctgatccacagaagcaagatggccagatgcagaggcagattcgtgtgccccgtgatcctgttcaagggcaagcacatctgcagaagcgccaccctggccggctggggcgagctgtacggcagaagcggctacaactacttcttcagcggcggcgccgacgacgcctgggccgacgtggaggacgtgaccgaggaggactgcgccctgagaagcggcgacacccacctgttcgacaaggtgagaggctacgacatcaagctgctgagatacctgagcgtgaagtacatctgcgacctgatggtggagaacaagaaggtgaagttcggcatgaacgtgaccagcagcgagaaggtggacaaggcccagagatacgccgacttcaccctgctgagcatcccctaccccggctgcgagttcttcaaggagtacaaggacagagactacatggccgagggcctgatcttcaactggaagcaggactacgtggacgcccccctgagcatccccgacttcctgacccacagcctgaacatcgactggagccagtaccagtgctgggacctggtgcagcagacccagaactacctgaagctgctgctgagcctggtgaacagcgacgacgacagcggcctgctggtgcactgcatcagcggctgggacagaacccccctgttcatcagcctgctgagactgagcctgtgggccgacggcctgatccacaccagcctgaagcccaccgagatcctgtacctgaccgtggcctacgactggttcctgttcggccacatgctggtggacagactgagcaagggcgaggagatcttcttcttctgcttcaacttcctgaagcacatcaccagcgaggagttcagcgccctgaagacccagagaagaaagagcctgcccgccagagacggcggcttcaccctggaggacatctgcatgctgagaagaaaggacagaggcagcaccaccagcctgggcagcgacttcagcctggtgatggagagcagccccggcgccaccggcagcttcacctacgaggccgtggagctggtgcccgccggcgcccccacccaggccgcctggagaaagagccacagcagcagcccccagagcgtgctgtggaacagaccccagcccagcgaggacagactgcccagccagcagggcctggccgaggccagaagcagcagcagcagcagcagcaaccacagcgacaacttcttcagaatgggcagcagccccctggaggtgcccaagcccagactggccgccctgagcgacagagagaccagactgcaggaggtgagaagcgccttcctggccgcctacagcagcaccgtgggcctgagagccgtggcccccagccccagcggcgccatcggcggcctgctggagcagttcgccagaggcgtgggcctgagaagcatcagcagcaacgccctgtag

SEQ ID NO: 90174 - DNA, 1563 bp, synthetic construct
  misc_feature 1..1563: note = Description of Artificial Sequence: Synthetic coding sequence
  source 1..1563: mol_type = other DNA
atggccggcgccagagccgccgccgccgccgccagcgccggcagcagcgccagcagcggcaaccagcccccccaggagctgggcctgggcgagctgctggaggagttcagcagaacccagtacagagccaaggacggcagcggcaccggcggcagcaaggtggagagaatcgagaagagatgcctggagctgttcggcagagactactgcttcagcgtgatccccaacaccaacggcgacatctgcggccactaccccagacacatcgtgttcctggagtacgagagcagcgagaaggagaaggacaccttcgagagcaccgtgcaggtgagcaagctgcaggacctgatccacagaagcaagatggccagatgcagaggcagattcgtgtgccccgtgatcctgttcaagggcaagcacatctgcagaagcgccaccctggccggctggggcgagctgtacggcagaagcggctacaactacttcttcagcggcggcgccgacgacgcctgggccgacgtggaggacgtgaccgaggaggactgcgccctgagaagcggcgacacccacctgttcgacaaggtgagaggctacgacatcaagctgctgagatacctgagcgtgaagtacatctgcgacctgatggtggagaacaagaaggtgaagttcggcatgaacgtgaccagcagcgagaaggtggacaaggcccagagatacgccgacttcaccctgctgagcatcccctaccccggctgcgagttcttcaaggagtacaaggacagagactacatggccgagggcctgatcttcaactggaagcaggactacgtggacgcccccctgagcatccccgacttcctgacccacagcctgaacatcgactggagccagtaccagtgctgggacctggtgcagcagacccagaactacctgaagctgctgctgagcctggtgaacagcgacgacgacagcggcctgctggtgcactgcatcagcggctgggacagaacccccctgttcatcagcctgctgagactgagcctgtgggccgacggcctgatccacaccagcctgaagcccaccgagatcctgtacctgaccgtggcctacgactggttcctgttcggccacatgctggtggacagactgagcaagggcgaggagatcttcttcttctgcttcaacttcctgaagcacatcaccagcgaggagttcagcgccctgaagacccagagaagaaagagcctgcccgccagagacggcggcttcaccctggaggacatctgcatgctgagaagaaaggacagaggcagcaccaccagcctgggcagcgacttcagcctggtgatggagagcagccccggcgccaccggcagcttcacctacgagagaggcgccggccccagcagaagcgccaacagcggcagcctggaggaggagcccctgatcctgagcaccgagtgccccctggagcccgccaccaccctgagaggccccctggccttccccgccggcgccggcggcagccaggtgttccagctgctgttcctgaagcccttctag

SEQ ID NO: 90175 - DNA, 1932 bp, synthetic construct
  misc_feature 1..1932: note = Description of Artificial Sequence: Synthetic coding sequence
  source 1..1932: mol_type = other DNA
atggagaagagcagcagctgcgagagcctgggcagccagcccgccgccgccagaccccccagcgtggacagcctgagcagcgccagcaccagccacagcgagaacagcgtgcacaccaagagcgccagcgtggtgagcagcgacagcatcagcaccagcgccgacaacttcagccccgacctgagagtgctgagagagagcaacaagctggccgagatggaggagccccccctgctgcccggcgagaacatcaaggacatggccaaggacgtgacctacatctgccccttcaccggcgccgtgagaggcaccctgaccgtgaccaactacagactgtacttcaagagcatggagagagacccccccttcgtgctggacgccagcctgggcgtgatcaacagagtggagaagatcggcggcgccagcagcagaggcgagaacagctacggcctggagaccgtgtgcaaggacatcagaaacctgagattcgcccacaagcccgagggcagaaccagaagaagcatcttcgagaacctgatgaagtacgccttccccgtgagcaacaacctgcccctgttcgccttcgagtacaaggaggtgttccccgagaacggctggaagctgtacgaccccctgctggagtacagaagacagggcatccccaacgagagctggagaatcaccaagatcaacgagagatacgagctgtgcgacacctaccccgccctgctggtggtgcccgccaacatccccgacgaggagctgaagagagtggccagcttcagaagcagaggcagaatccccgtgctgagctggatccaccccgagagccaggccaccatcaccagatgcagccagcccatggtgggcgtgagcggcaagagaagcaaggaggacgagaagtacctgcaggccatcatggacagcaacgcccagagccacaagatcttcatcttcgacgccagacccagcgtgaacgccgtggccaacaaggccaagggcggcggctacgagagcgaggacgcctaccagaacgccgagctggtgttcctggacatccacaacatccacgtgatgagagagagcctgagaaagctgaaggagatcgtgtaccccaacatcgaggagacccactggctgagcaacctggagagcacccactggctggagcacatcaagctgatcctggccggcgccctgagaatcgccgacaaggtggagagcggcaagaccagcgtggtggtgcactgcagcgacggctgggacagaaccgcccagctgaccagcctggccatgctgatgctggacggctactacagaaccatcagaggcttcgaggtgctggtggagaaggagtggctgagcttcggccacagattccagctgagagtgggccacggcgacaagaaccacgccgacgccgacagaagccccgtgttcctgcagttcatcgactgcgtgtggcagatgaccagacagttccccaccgccttcgagttcaacgagtacttcctgatcaccatcctggaccacctgtacagctgcctgttcggcaccttcctgtgcaacagcgagcagcagagaggcaaggagaacctgcccaagagaaccgtgagcctgtggagctacatcaacagccagctggaggacttcaccaaccccctgtacggcagctacagcaaccacgtgctgtaccccgtggccagcatgagacacctggagctgtgggtgggctactacatcagatggaaccccagaatgaagccccaggagcccatccacaacagatacaaggagctgctggccaagagagccgagctgcagaagaaggtggaggagctgcagagagagatcagcaacagaagcaccagcagcagcgagagagccagcagccccgcccagtgcgtgacccccgtgcagaccgtggtgtag

SEQ ID NO: 90176 - DNA, 1716 bp, synthetic construct
  misc_feature 1..1716: note = Description of Artificial Sequence: Synthetic coding sequence
  source 1..1716: mol_type = other DNA
atggaggagccccccctgctgcccggcgagaacatcaaggacatggccaaggacgtgacctacatctgccccttcaccggcgccgtgagaggcaccctgaccgtgaccaactacagactgtacttcaagagcatggagagagacccccccttcgtgctggacgccagcctgggcgtgatcaacagagtggagaagatcggcggcgccagcagcagaggcgagaacagctacggcctggagaccgtgtgcaaggacatcagaaacctgagattcgcccacaagcccgagggcagaaccagaagaagcatcttcgagaacctgatgaagtacgccttccccgtgagcaacaacctgcccctgttcgccttcgagtacaaggaggtgttccccgagaacggctggaagctgtacgaccccctgctggagtacagaagacagggcatccccaacgagagctggagaatcaccaagatcaacgagagatacgagctgtgcgacacctaccccgccctgctggtggtgcccgccaacatccccgacgaggagctgaagagagtggccagcttcagaagcagaggcagaatccccgtgctgagctggatccaccccgagagccaggccaccatcaccagatgcagccagcccatggtgggcgtgagcggcaagagaagcaaggaggacgagaagtacctgcaggccatcatggacagcaacgcccagagccacaagatcttcatcttcgacgccagacccagcgtgaacgccgtggccaacaaggccaagggcggcggctacgagagcgaggacgcctaccagaacgccgagctggtgttcctggacatccacaacatccacgtgatgagagagagcctgagaaagctgaaggagatcgtgtaccccaacatcgaggagacccactggctgagcaacctggagagcacccactggctggagcacatcaagctgatcctggccggcgccctgagaatcgccgacaaggtggagagcggcaagaccagcgtggtggtgcactgcagcgacggctgggacagaaccgcccagctgaccagcctggccatgctgatgctggacggctactacagaaccatcagaggcttcgaggtgctggtggagaaggagtggctgagcttcggccacagattccagctgagagtgggccacggcgacaagaaccacgccgacgccgacagaagccccgtgttcctgcagttcatcgactgcgtgtggcagatgaccagacagttccccaccgccttcgagttcaacgagtacttcctgatcaccatcctggaccacctgtacagctgcctgttcggcaccttcctgtgcaacagcgagcagcagagaggcaaggagaacctgcccaagagaaccgtgagcctgtggagctacatcaacagccagctggaggacttcaccaaccccctgtacggcagctacagcaaccacgtgctgtaccccgtggccagcatgagacacctggagctgtgggtgggctactacatcagatggaaccccagaatgaagccccaggagcccatccacaacagatacaaggagctgctggccaagagagccgagctgcagaagaaggtggaggagctgcagagagagatcagcaacagaagcaccagcagcagcgagagagccagcagccccgcccagtgcgtgacccccgtgcagaccgtggtgtag

SEQ ID NO: 90177 - DNA, 1716 bp, synthetic construct; identical to SEQ ID NO: 90176
  misc_feature 1..1716: note = Description of Artificial Sequence: Synthetic coding sequence
  source 1..1716: mol_type = other DNA

SEQ ID NO: 90178 - DNA, 1716 bp, synthetic construct; identical to SEQ ID NO: 90176
  misc_feature 1..1716: note = Description of Artificial Sequence: Synthetic coding sequence
  source 1..1716: mol_type = other DNA

SEQ ID NO: 90179 - DNA, 981 bp, synthetic construct
  misc_feature 1..981: note = Description of Artificial Sequence: Synthetic coding sequence
  source 1..981: mol_type = other DNA
atgctggccgtggccctgaccatcctgagcgccagcaccagccacagcgagaacagcgtgcacaccaagagcgccagcgtggtgagcagcgacagcatcagcaccagcgccgacaacttcagccccgacctgagagtgctgagagagagcaacaagctggccgagatggaggagccccccctgctgcccggcgagaacatcaaggacatggccaaggacgtgacctacatctgccccttcaccggcgccgtgagaggcaccctgaccgtgaccaactacagactgtacttcaagagcatggagagagacccccccttcgtgctggacgccagcctgggcgtgatcaacagagtggagaagatcggcggcgccagcagcagaggcgagaacagctacggcctggagaccgtgtgcaaggacatcagaaacctgagattcgcccacaagcccgagggcagaaccagaagaagcatcttcgagaacctgatgaagtacgccttccccgtgagcaacaacctgcccctgttcgccttcgagtacaaggaggtgttccccgagaacggctggaagctgtacgaccccctgctggagtacagaagacagggcatccccaacgagagctggagaatcaccaagatcaacgagagatacgagctgtgcgacacctaccccgccctgctggtggtgcccgccaacatccccgacgaggagctgaagagagtggccagcttcagaagcagaggcagaatccccgtgctgagctggatccaccccgagagccaggccaccatcaccagatgcagccagcccatggtgggcgtgagcggcaagagaagcaaggaggacgagaagtacctgcaggccatcatggacagcaacgcccagagccacaagatcttcatcttcgacgccagacccagcgtgaacgccgtggccaacaaggccaagggcggcggctacgagagcgaggacgcctactag

SEQ ID NO: 90180 - DNA, 3513 bp, synthetic construct
  misc_feature 1..3513: note = Description of Artificial Sequence: Synthetic coding sequence
  source 1..3513: mol_type = other DNA
atggacgaggagaccagacacagcctggagtgcatccaggccaaccagatcttccccagaaagcagctgatcagagaggacgagaacctgcaggtgcccttcctggagctgcacggcgagagcaccgagttcgtgggcagagccgaggacgccatcatcgccctgagcaactacagactgcacatcaagttcaaggagagcctggtgaacgtgcccctgcagctgatcgagagcgtggagtgcagagacatcttccagctgcacctgacctgcaaggactgcaaggtgatcagatgccagttcagcaccttcgagcagtgccaggagtggctgaagagactgaacaacgccatcagaccccccgccaagatcgaggacctgttcagcttcgcctaccacgcctggtgcatggaggtgtacgccagcgagaaggagcagcacggcgacctgtgcagacccggcgagcacgtgaccagcagattcaagaacgaggtggagagaatgggcttcgacatgaacaacgcctggagaatcagcaacatcaacgagaagtacaagctgtgcggcagctacccccaggagctgatcgtgcccgcctggatcaccgacaaggagctggagagcgtgagcagcttcagaagctggaagagaatccccgccgtgatctacagacaccagagcaacggcgccgtgatcgccagatgcggccagcccgaggtgagctggtggggctggagaaacgccgacgacgagcacctggtgcagagcgtggccaaggcctgcgccagcgacagcagaagcagcggcagcaagctgagcaccagaaacaccagcagagacttccccaacggcggcgacctgagcgacgtggagttcgacagcagcctgagcaacgccagcggcgccgagagcctggccatccagccccagaagctgctgatcctggacgccagaagctacgccgccgccgtggccaacagagccaagggcggcggctgcgagtgccccgagtactaccccaactgcgaggtggtgttcatgggcatggccaacatccacagcatcagaagaagcttccagagcctgagactgctgtgcacccagatgcccgaccccggcaactggctgagcgccctggagagcaccaagtggctgcaccacctgagcgtgctgctgaagagcgccctgctggtggtgcacgccgtggaccaggaccagagacccgtgctggtgcactgcagcgacggctgggacagaaccccccagatcgtggccctggccaagctgctgctggacccctactacagaaccatcgagggcttccaggtgctggtggagatggagtggctggacttcggccacaagttcgccgacagatgcggccacggcgagaacagcgacgacctgaacgagagatgccccgtgttcctgcagtggctggactgcgtgcaccagctgcagagacagttcccctgcagcttcgagttcaacgaggccttcctggtgaagctggtgcagcacacctacagctgcctgttcggcaccttcctgtgcaacaacgccaaggagagaggcgagaagcacacccaggagagaacctgcagcgtgtggagcctgctgagagccggcaacaaggccttcaagaacctgctgtacagcagccagagcgaggccgtgctgtaccccgtgtgccacgtgagaaacctgatgctgtggagcgccgtgtacctgccctgccccagccccaccacccccgtggacgacagctgcgccccctaccccgcccccggcaccagccccgacgacccccccctgagcagactgcccaagaccagaagctacgacaacctgaccaccgcctgcgacaacaccgtgcccctggccagcagaagatgcagcgaccccagcctgaacgagaagtggcaggagcacagaagaagcctggagctgagcagcctggccggccccggcgaggaccccctgagcgccgacagcctgggcaagcccaccagagtgcccggcggcgccgagctgagcgtggccgccggcgtggccgagggccagatggagaacatcctgcaggaggccaccaaggaggagagcggcgtggaggagcccgcccacagagccggcatcgagatccaggagggcaaggaggaccccctgctggagaaggagagcagaagaaagacccccgaggccagcgccatcggcctgcaccaggaccccgagctgggcgacgccgccctgagaagccacctggacatgagctggcccctgttcagccagggcatcagcgagcagcagagcggcctgagcgtgctgctgagcagcctgcaggtgccccccagaggcgaggacagcctggaggtgcccgtggagcagttcagaatcgaggagatcgccgagggcagagaggaggccgtgctgcccatccccgtggacgccaaggtgggctacggcaccagccagagctgcagcctgctgcccagccaggtgcccttcgagaccagaggccccaacgtggacagcagcaccgacatgctggtggaggacaaggtgaagagcgtgagcggcccccagggccaccacagaagctgcctggtgaacagcggcaaggacagactgccccagaccatggagcccagccccagcgagaccagcctggtggagagaccccaggtgggcagcgtggtgcacagaaccagcctgggcagcaccctgagcctgaccagaagcccctgcgccctgcccctggccgagtgcaaggagggcctggtgtgcaacggcgcccccgagaccgagaacagagccagcgagcagccccccggcctgagcaccctgcagatgtaccccacccccaacggccactgcgccaacggcgaggccggcagaagcaaggacagcctgagcagacagctgagcgccatgagctgcagcagcgcccacctgcacagcagaaacctgcaccacaagtggctgcacagccacagcggcagacccagcgccaccagcagccccgaccagcccagcagaagccacctggacgacgacggcatgagcgtgtacaccgacaccatccagcagagactgagacagatcgagagcggccaccagcaggaggtggagaccctgaagaagcaggtgcaggagctgaagagcagactggagagccagtacctgaccagcagcctgcacttcaacggcgacttcggcgacgaggtgatgaccagatggctgcccgaccacctggccgcccactgctacgcctgcgacagcgccttctggctggccagcagaaagcaccactgcagagacaccgacagagtggaccagacctggaactgcggcaacgtgttctgcagcagctgctgcaaccagaaggtgcccgtgcccagccagcagctgttcgagcccagcagagtgtgcaagagctgctacagcagcctgcaccccaccagcagcagcatcgacctggagctggacaagcccatcgccgccaccagcaactag

SEQ ID NO: 90181 - DNA, 3486 bp, synthetic construct
  misc_feature 1..3486: note = Description of Artificial Sequence: Synthetic coding sequence
  source 1..3486: mol_type = other DNA
atggacgaggagaccagacacagcctggagtgcatccaggccaaccagatcttccccagaaagcagctgatcagagaggacgagaacctgcaggtgcccttcctggagctgcacggcgagagcaccgagttcgtgggcagagccgaggacgccatcatcgccctgagcaactacagactgcacatcaagttcaaggagagcctggtgaacgtgcccctgcagctgatcgagagcgtggagtgcagagacatcttccagctgcacctgacctgcaaggactgcaaggtgatcagatgccagttcagcaccttcgagcagtgccaggagtggctgaagagactgaacaacgccatcagaccccccgccaagatcgaggacctgttcagcttcgcctaccacgcctggtgcatggaggtgtacgccagcgagaaggagcagcacggcgacctgtgcagacccggcgagcacgtgaccagcagattcaagaacgaggtggagagaatgggcttcgacatgaacaacgcctggagaatcagcaacatcaacgagaagtacaagctgtgcggcagctacccccaggagctgatcgtgcccgcctggatcaccgacaaggagctggagagcgtgagcagcttcagaagctggaagagaatccccgccgtgatctacagacaccagagcaacggcgccgtgatcgccagatgcggccagcccgaggtgagctggtggggctggagaaacgccgacgacgagcacctggtgcagagcgtggccaaggcctgcgccagcgacagcagaagcagcggcagcaagctgagcaccagaaacaccagcagagacttccccaacggcggcgacctgagcgacgtggagttcgacagcagcctgagcaacgccagcggcgccgagagcctggccatccagccccagaagctgctgatcctggacgccagaagctacgccgccgccgtggccaacagagccaagggcggcggctgcgagtgccccgagtactaccccaactgcgaggtggtgttcatgggcatggccaacatccacagcatcagaagaagcttccagagcctgagactgctgtgcacccagatgcccgaccccggcaactggctgagcgccctggagagcaccaagtggctgcaccacctgagcgtgctgctgaagagcgccctgctggtggtgcacgccgtggaccaggaccagagacccgtgctggtgcactgcagcgacggctgggacagaaccccccagatcgtggccctggccaagctgctgctggacccctactacagaaccatcgagggcttccaggtgctggtggagatggagtggctggacttcggccacaagttcgccgacagatgcggccacggcgagaacagcgacgacctgaacgagagatgccccgtgttcctgcagtggctggactgcgtgcaccagctgcagagacagttcccctgcagcttcgagttcaacgaggccttcctggtgaagctggtgcagcacacctacagctgcctgttcggcaccttcctgtgcaacaacgccaaggagagaggcgagaagcacacccaggagagaacctgcagcgtgtggagcctgctgagagccggcaacaaggccttcaagaacctgctgtacagcagccagagcgaggccgtgctgtaccccgtgtgccacgtgagaaacctgatgctgtggagcgccgtgtacctgccctgccccagccccaccacccccgtggacgacagctgcgccccctaccccgcccccggcaccagccccgacgacccccccctgagcagactgcccaagaccagaagctacgacaacctgaccaccgcctgcgacaacaccgtgcccctggccagcagaagatgcagcgaccccagcctgaacgagaagtggcaggagcacagaagaagcctggagctgagcagcctggccggccccggcgaggaccccctgagcgccgacagcctgggcaagcccaccagagtgcccggcggcgccgagctgagcgtggccgccggcgtggccgagggccagatggagaacatcctgcaggaggccaccaaggaggagagcggcgtggaggagcccgcccacagagccggcatcgagatccaggagggcaaggaggaccccctgctggagaaggagagcagaagaaagacccccgaggccagcgccatcggcctgcaccaggaccccgagctgggcgacgccgccctgagaagccacctggacatgagctggcccctgttcagccagggcatcagcgagcagcagagcggcctgagcgtgctgctgagcagcctgcaggtgccccccagaggcgaggacagcctggaggtgcccgtggagcagttcagaatcgaggagatcgccgagggcagagaggaggccgtgctgcccatccccgtggacgccaaggtgggctacggcaccagccagagctgcagcctgctgcccagccaggtgcccttcgagaccagaggccccaacgtggacagcagcaccgacatgctggtggaggacaaggtgaagagcgtgagcggcccccagggccaccacagaagctgcctggtgaacagcggcaaggacagactgccccagaccatggagcccagccccagcgagaccagcctggtggagagaccccaggtgggcagcgtggtgcacagaaccagcctgggcagcaccctgagcctgaccagaagcccctgcgccctgcccctggccgagtgcaaggagggcctggtgtgcaacggcgcccccgagaccgagaacagagccagcgagcagccccccggcctgagcaccctgcagatgtaccccacccccaacggccactgcgccaacggcgaggccggcagaagcaaggacagcctgagcagacagctgagcgccatgagctgcagcagcgcccacctgcacagcagaaacctgcaccacaagtggctgcacagccacagcggcagacccagcgccaccagcagccccgaccagcccagcagaagccacctggacgacgacggcatgagcgtgtacaccgacaccatccagcagagactgagacagatcgagagcggccaccagcaggaggtggagaccctgaagaagcaggtgcaggagctgaagagcagactggagagccagtacctgaccagcagcctgcacttcaacggcgacttcggcgacgaggtgatgaccagatggctgcccgaccacctggccgcccactgctacgcctgcgacagcgccttctggctggccagcagaaagcaccactgcagaaactgcggcaacgtgttctgcagcagctgctgcaaccagaaggtgcccgtgcccagccagcagctgttcgagcccagcagagtgtgcaagagctgctacagcagcctgcaccccaccagcagcagcatcgacctggagctggacaagcccatcgccgccaccagcaactag

SEQ ID NO: 90182 - DNA, 3597 bp, synthetic construct
  misc_feature 1..3597: note = Description of Artificial Sequence: Synthetic coding sequence
  source 1..3597: mol_type = other DNA
atggacgaggagaccagacacagcctggagtgcatccaggccaaccagatcttccccagaaagcagctgatcagagaggacgagaacctgcaggtgcccttcctggagctgcacggcgagagcaccgagttcgtgggcagagccgaggacgccatcatcgccctgagcaactacagactgcacatcaagttcaaggagagcctggtgaacgtgcccctgcagctgatcgagagcgtggagtgcagagacatcttccagctgcacctgacctgcaaggactgcaaggtgatcagatgccagttcagcaccttcgagcagtgccaggagtggctgaagagactgaacaacgccatcagaccccccgccaagatcgaggacctgttcagcttcgcctaccacgcctggtgcatggaggtgtacgccagcgagaaggagcagcacggcgacctgtgcagacccggcgagcacgtgaccagcagattcaagaacgaggtggagagaatgggcttcgacatgaacaacgcctggagaatcagcaacatcaacgagaagtacaagctgtgcggcagctacccccaggagctgatcgtgcccgcctggatcaccgacaaggagctggagagcgtgagcagcttcagaagctggaagagaatccccgccgtgatctacagacaccagagcaacggcgccgtgatcgccagatgcggccagcccgaggtgagctggtggggctggagaaacgccgacgacgagcacctggtgcagagcgtggccaaggcctgcgccagcgacagcagaagcagcggcagcaagctgagcaccagaaacaccagcagagacttccccaacggcggcgacctgagcgacgtggagttcgacagcagcctgagcaacgccagcggcgccgagagcctggccatccagccccagaagctgctgatcctggacgccagaagctacgccgccgccgtggccaacagagccaagggcggcggctgcgagtgccccgagtactaccccaactgcgaggtggtgttcatgggcatggccaacatccacagcatcagaagaagcttccagagcctgagactgctgtgcacccagatgcccgaccccggcaactggctgagcgccctggagagcaccaagtggctgcaccacctgagcgtgctgctgaagagcgccctgctggtggtgcacgccgtggaccaggaccagagacccgtgctggtgcactgcagcgacggctgggacagaaccccccagatcgtggccctggccaagctgctgctggacccctactacagaaccatcgagggcttccaggtgctggtggagatggagtggctggacttcggccacaagttcgccgacagatgcggccacggcgagaacagcgacgacctgaacgagagatgccccgtgttcctgcagtggctggactgcgtgcaccagctgcagagacagttcccctgcagcttcgagttcaacgaggccttcctggtgaagctggtgcagcacacctacagctgcctgttcggcaccttcctgtgcaacaacgccaaggagagaggcgagaagcacacccaggagagaacctgcagcgtgtggagcctgctgagagccggcaacaaggccttcaagaacctgctgtacagcagccagagcgaggccgtgctgtaccccgtgtgccacgtgagaaacctgatgctgtggagcgccgtgtacctgccctgccccagccccaccacccccgtggacgacagctgcgccccctaccccgcccccggcaccagccccgacgacccccccctgagcagactgcccaagaccagaagctacgacaacctgaccaccgcctgcgacaacaccgtgcccctggccagcagaagatgcagcgaccccagcctgaacgagaagtggcaggagcacagaagaagcctggagctgagcagcctggccggccccggcgaggaccccctgagcgccgacagcctgggcaagcccaccagagtgcccggcggcgccgagctgagcgtggccgccggcgtggccgagggccagatggagaacatcctgcaggaggccaccaaggaggagagcggcgtggaggagcccgcccacagagccggcatcgagatccaggagggcaaggaggaccccctgctggagaaggagagcagaagaaagacccccgaggccagcgccatcggcctgcaccaggaccccgagctgggcgacgccgccctgagaagccacctggacatgagctggcccctgttcagccagggcatcagcgagcagcagagcggcctgagcgtgctgctgagcagcctgcaggtgccccccagaggcgaggacagcctggaggtgcccgtggagcagttcagaatcgaggagatcgccgagggcagagaggaggccgtgctgcccatccccgtggacgccaaggtgggctacggcaccagccagagctgcagcctgctgcccagccaggtgcccttcgagaccagaggccccaacgtggacagcagcaccgacatgctggtggaggacaaggtgaagagcgtgagcggcccccagggccaccacagaagctgcctggtgaacagcggcaaggacagactgccccagaccatggagcccagccccagcgagaccagcctggtggagagaccccaggtgggcagcgtggtgcacagaaccagcctgggcagcaccctgagcctgaccagaagcccctgcgccctgcccctggccgagtgcaaggagggcctggtgtgcaacggcgcccccgagaccgagaacagagccagcgagcagccccccggcctgagcaccctgcagatgtaccccacccccaacggccactgcgccaacggcgaggccggcagaagcaaggacagcctgagcagacagctgagcgccatgagctgcagcagcgcccacctgcacagcagaaacctgcaccacaagtggctgcacagccacagcggcagacccagcgccaccagcagccccgaccagcccagcagaagccacctggacgacgacggcatgagcgtgtacaccgacaccatccagcagagactgagacagatcgagagcggccaccagcaggaggtggagaccctgaagaagcaggtgcaggagctgaagagcagactggagagccagtacctgaccagcagcctgcacttcaacggcgacttcggcgacgaggtgaccagcatccccgacagcgagagcaacctggaccagaactgcctgagcagatgcagcaccgagatcttcagcgaggccagctgggagcaggtggacaagcaggacaccgagatgaccagatggctgcccgaccacctggccgcccactgctacgcctgcgacagcgccttctggctggccagcagaaagcaccactgcagaaactgcggcaacgtgttctgcagcagctgctgcaaccagaaggtgcccgtgcccagccagcagctgttcgagcccagcagagtgtgcaagagctgctacagcagcctgcaccccaccagcagcagcatcgacctggagctggacaagcccatcgccgccaccagcaactag

SEQ ID NO: 90183 - DNA, 3513 bp, synthetic construct; identical to SEQ ID NO: 90180
  misc_feature 1..3513: note = Description of Artificial Sequence: Synthetic coding sequence
  source 1..3513: mol_type = other DNA

SEQ ID NO: 90184 - DNA, 420 bp, synthetic construct
  misc_feature 1..420: note = Description of Artificial Sequence: Synthetic coding sequence
  source 1..420: mol_type = other DNA
atggacgaggagaccagacacagcctggagtgcatccaggccaaccagatcttccccagaaagcagctgatcagagaggacgagaacctgcaggtgcccttcctggagctgcacggcgagagcaccgagttcgtgggcagagccgaggacgccatcatcgccctgagcaactacagactgcacatcaagttcaaggagagcctggtgaacgtgcccctgcagctgatcgagagcgtggagtgcagagacatcttccagctgcacctgacctgcaaggactgcaaggtgatcagatgccagttcagcaccttcgagcagtgccaggagtggctgaagagactgaacaacgccatcagaccccccgccaagatcgaggacctgttcagcttcgcctaccacgcctggtgcatggaggtgtag

SEQ ID NO: 90185 - DNA, 3588 bp, synthetic construct
  misc_feature 1..3588: note = Description of Artificial Sequence: Synthetic coding sequence
  source 1..3588: mol_type = other DNA
atgggcgaggagggcccccccagcctggagtacatccaggccaaggacctgttcccccccaaggagctggtgaaggaggaggagaacctgcaggtgcccttcaccgtgctgcagggcgagggcgtggagttcctgggcagagccgccgacgccctgatcgccatcagcaactacagactgcacatcaagttcaaggacagcgtgatcaacgtgcccctgagaatgatcgacagcgtggagagcagagacatgttccagctgcacatcagctgcaaggacagcaaggtggtgagatgccacttcagcaccttcaagcagtgccaggagtggctgagcagactgagcagagccaccgccagacccgccaagcccgaggacctgttcgccttcgcctaccacgcctggtgcctgggcctgaccgaggaggaccagcacacccacctgtgccagcccggcgagcacatcagatgcagacaggaggccgagctggccagaatgggcttcgacctgcagaacgtgtggagagtgagccacatcaacagcaactacaagctgtgccccagctacccccagaagctgctggtgcccgtgtggatcaccgacaaggagctggagaacgtggccagcttcagaagctggaagagaatccccgtggtggtgtacagacacctgagaaacggcgccgccatcgccagatgcagccagcccgagatcagctggtggggctggagaaacgccgacgacgagtacctggtgaccagcatcgccaaggcctgcgccctggaccccggcaccagagccaccggcggcagcctgagcaccggcaacaacgacaccagcgaggcctgcgacgccgacttcgacagcagcctgaccgcctgcagcggcgtggagagcaccgccgccccccagaagctgctgatcctggacgccagaagctacaccgccgccgtggccaacagagccaagggcggcggctgcgagtgcgaggagtactaccccaactgcgaggtggtgttcatgggcatggccaacatccacgccatcagaaacagcttccagtacctgagagccgtgtgcagccagatgcccgaccccagcaactggctgagcgccctggagagcaccaagtggctgcagcacctgagcgtgatgctgaaggccgccgtgctggtggccaacaccgtggacagagagggcagacccgtgctggtgcactgcagcgacggctgggacagaaccccccagatcgtggccctggccaagatcctgctggacccctactacagaaccctggagggcttccaggtgctggtggagagcgactggctggacttcggccacaagttcggcgacagatgcggccaccaggagaacgtggaggaccagaacgagcagtgccccgtgttcctgcagtggctggacagcgtgcaccagctgctgaagcagttcccctgcctgttcgagttcaacgaggccttcctggtgaagctggtgcagcacacctacagctgcctgtacggcaccttcctggccaacaacccctgcgagagagagaagagaaacatctacaagagaacctgcagcgtgtgggccctgctgagagccggcaacaagaacttccacaacttcctgtacacccccagcagcgacatggtgctgcaccccgtgtgccacgtgagagccctgcacctgtggaccgccgtgtacctgcccgccagcagcccctgcaccctgggcgaggagaacatggacctgtacctgagccccgtggcccagagccaggagttcagcggcagaagcctggacagactgcccaagaccagaagcatggacgacctgctgagcgcctgcgacaccagcagccccctgaccagaaccagcagcgaccccaacctgaacaaccactgccaggaggtgagagtgggcctggagccctggcacagcaaccccgagggcagcgagaccagcttcgtggacagcggcgtgggcggcccccagcagaccgtgggcgaggtgggcctgcccccccccctgcccagcagccagaaggactacctgagcaacaagcccttcaagagccacaagagctgcagccccagctacaagctgctgaacaccgccgtgcccagagagatgaagagcaacaccagcgaccccgagatcaaggtgctggaggagaccaagggccccgcccccgaccccagcgcccaggacgagctgggcagaaccctggacggcatcggcgagccccccgagcactgccccgagaccgaggccgtgagcgccctgagcaaggtgatcagcaacaagtgcgacggcgtgtgcaacttccccgagagcagccagaacagccccaccggcaccccccagcaggcccagcccgacagcatgctgggcgtgcccagcaagtgcgtgctggaccacagcctgagcaccgtgtgcaacccccccagcgccgcctgccagacccccctggaccccagcaccgacttcctgaaccaggaccccagcggcagcgtggccagcatcagccaccaggagcagctgagcagcgtgcccgacctgacccacggcgaggaggacatcggcaagagaggcaacaacagaaacggccagctgctggagaaccccagattcggcaagatgcccctggagctggtgagaaagcccatcagccagagccagatcagcgagttcagcttcctgggcagcaactgggacagcttccagggcatggtgaccagcttccccagcggcgaggccacccccagaagactgctgagctacggctgctgcagcaagagacccaacagcaagcagatgagagccaccggcccctgcttcggcggccagtgggcccagagagagggcgtgaagagccccgtgtgcagcagccacagcaacggccactgcaccggccccggcggcaagaaccagatgtggctgagcagccaccccaagcaggtgagcagcaccaagcccgtgcccctgaactgccccagccccgtgccccccctgtacctggacgacgacggcctgcccttccccaccgacgtgatccagcacagactgagacagatcgaggccggctacaagcaggaggtggagcagctgagaagacaggtgagagagctgcagatgagactggacatcagacactgctgcgccccccccgccgagccccccatggactacgaggacgacttcacctgcctgaaggagagcgacggcagcgacaccgaggacttcggcagcgaccacagcgaggactgcctgagcgaggccagctgggagcccgtggacaagaaggagaccgaggtgaccagatgggtgcccgaccacatggccagccactgctacaactgcgactgcgagttctggctggccaagagaagacaccactgcagaaactgcggcaacgtgttctgcgccggctgctgccacctgaagctgcccatccccgaccagcagctgtacgaccccgtgctggtgtgcaacagctgctacgagcacatccaggtgagcagagccagagagctgatgagccagcagctgaagaagcccatcgccaccgccagcagctag

SEQ ID NO: 90186 - DNA, 570 bp, synthetic construct
  misc_feature 1..570: note = Description of Artificial Sequence: Synthetic coding sequence
  source 1..570: mol_type = other DNA
atgcccgtgtggaagctgccctggaagctgagcgagggcaagagaagagcccaggtggagggcgaggacctgttccccgtggccatcagcttcggcagacccaaggaggtgctgcccctgtacagcagcgagagccacagattcaccgtgctggagcccaacaccgtgagcttcaacttcaagttctggagaaacatgtaccaccagttcgacagaaccctgcaccccagacagagcgtgttcaacatcatcatgaacatgaacgagcagaacaagcagctggagaaggacatcaaggacctggagagcaagatcaagcagagaaagaacaagcagaccgacggcatcctgaccaaggagctgctgcacagcgtgcaccccgagagccccaacctgaagaccagcctgtgcttcaaggagcagaccctgctgcccgtgaacgacgccctgagaaccatcgagggcagcagccccgccgacaacagatacagcgagtacgccgaggagttcagcaagagcgagcccgccgtggtgagcctggagtacggcgtggccagaatgacctgctag

SEQ ID NO: 90187 - DNA, 1866 bp, synthetic construct
  misc_feature 1..1866: note = Description of Artificial Sequence: Synthetic coding sequence
  source 1..1866: mol_type = other DNA
atggagcacatcagaaccaccaaggtggagcaggtgaagctgctggacagattcagcaccagcaacaagagcctgaccggcaccctgtacctgaccgccacccacctgctgttcatcgacagccaccagaaggagacctggatcctgcaccaccacatcgccagcgtggagaagctggccctgaccaccagcggctgccccctggtgatccagtgcaagaacttcagaaccgtgcacttcatcgtgcccagagagagagactgccacgacatctacaacagcctgctgcagctgagcaagcaggccaagtacgaggacctgtacgccttcagctacaaccccaagcagaacgacagcgagagactgcagggctggcagctgatcgacctggccgaggagtacaagagaatgggcgtgcccaacagccactggcagctgagcgacgccaacagagactacaagatctgcgagacctaccccagagagctgtacgtgcccagaatcgccagcaagcccatcatcgtgggcagcagcaagttcagaagcaagggcagattccccgtgctgagctactaccaccaggacaaggaggccgccatctgcagatgcagccagcccctgagcggcttcagcgccagatgcctggaggacgagcacctgctgcaggccatcagcaaggccaaccccgtgaacagatacatgtacgtgatggacaccagacccaagctgaacgccatggccaacagagccgccggcaagggctacgagaacgaggacaactacagcaacatcagattccagttcgtgggcatcgagaacatccacgtgatgagaagcagcctgcagaagctgctggaggtgaacggcaccaagggcctgagcgtgaacgacttctacagcggcctggagagcagcggctggctgagacacatcaaggccgtgatggacgccgccatcttcctggccaaggccatcaccgtggagaacgccagcgtgctggtgcactgcagcgacggctgggacagaaccagccaggtgtgcagcctgggcagcctgctgctggacagctactacagaaccatcaagggcttcatggtgctgatcgagaaggactggatcagcttcggccacaagttcagcgagagatgcggccagctggacggcgaccccaaggaggtgagccccgtgttcacccagttcctggagtgcgtgtggcacctgaccgagcagttcccccaggccttcgagttcagcgaggccttcctgctgcagatccacgagcacatccacagctgccagttcggcaacttcctgggcaactgccagaaggagagagaggagctgaagctgaaggagaagacctacagcctgtggcccttcctgctggaggaccagaagaagtacctgaaccccctgtacagcagcgagagccacagattcaccgtgctggagcccaacaccgtgagcttcaacttcaagttctggagaaacatgtaccaccagttcgacagaaccctgcaccccagacagagcgtgttcaacatcatcatgaacatgaacgagcagaacaagcagctggagaaggacatcaaggacctggagagcaagatcaagcagagaaagaacaagcagaccgacggcatcctgaccaaggagctgctgcacagcgtgcaccccgagagccccaacctgaagaccagcctgtgcttcaaggagcagaccctgctgcccgtgaacgacgccctgagaaccatcgagggcagcagccccgccgacaacagatacagcgagtacgccgaggagttcagcaagagcgagcccgccgtggtgagcctggagtacggcgtggccagaatgacctgctag

SEQ ID NO: 90188 - DNA, 1647 bp, synthetic construct
  misc_feature 1..1647: note = Description of Artificial Sequence: Synthetic coding sequence
  source 1..1647: mol_type = other DNA
atggagcacatcagaaccaccaaggtggagcaggtgaagctgctggacagattcagcaccagcaacaagagcctgaccggcaccctgtacctgaccgccacccacctgctgttcatcgacagccaccagaaggagacctggatcctgcaccaccacatcgccagcgtggagaagctggccctgaccaccagcggctgccccctggtgatccagtgcaagaacttcagaaccgtgcacttcatcgtgcccagagagagagactgccacgacatctacaacagcctgctgcagctgagcaagcaggccaagtacgaggacctgtacgccttcagctacaaccccaagcagaacgacagcgagagactgcagggctggcagctgatcgacctggccgaggagtacaagagaatgggcgtgcccaacagccactggcagctgagcgacgccaacagagactacaagatctgcgagacctaccccagagagctgtacgtgcccagaatcgccagcaagcccatcatcgtgggcagcagcaagttcagaagcaagggcagattccccgtgctgagctactaccaccaggacaaggaggccgccatctgcagatgcagccagcccctgagcggcttcagcgccagatgcctggaggacgagcacctgctgcaggccatcagcaaggccaaccccgtgaacagatacatgtacgtgatggacaccagacccaagctgaacgccatggccaacagagccgccggcaagggctacgagaacgaggacaactacagcaacatcagattccagttcgtgggcatcgagaacatccacgtgatgagaagcagcctgcagaagctgctggaggtgaacggcaccaagggcctgagcgtgaacgacttctacagcggcctggagagcagcggctggctgagacacatcaaggccgtgatggacgccgccatcttcctggccaaggccatcaccgtggagaacgccagcgtgctggtgcactgcagcgacggctgggacagaaccagccaggtgtgcagcctgggcagcctgctgctggacagctactacagaaccatcaagggcttcatggtgctgatcgagaaggactggatcagcttcggccacaagttcagcgagagatgcggccagctggacggcgaccccaaggaggtgagccccgtgttcacccagttcctggagtgcgtgtggcacctgaccgagcagttcccccaggccttcgagttcagcgaggccttcctgctgcagatccacgagcacatccacagctgccagttcggcaacttcctgggcaactgccagaaggagagagaggagctgaagctgaaggagaagacctacagcctgtggcccttcctgctggaggaccagaagaagtacctgaaccccctgtacagcagcgagagccacagattcaccgtgctggagcccaacaccgtgagcttcaacttcaagttctggagaaacatgtaccaccagttcgacagaaccctgcaccccagacagagcgtgttcaacatcatcatgaacatgaacgagcagaacaagcagctggagaaggacatcaaggacctggagagcctgaccagctacagcagcttcaagatcatcgtgggccagtag

SEQ ID NO: 90189 - DNA, 1647 bp, synthetic construct
  misc_feature 1..1647: note = Description of Artificial Sequence: Synthetic coding sequence
  source 1..1647: mol_type = other DNA
atggagcacatcagaaccaccaaggtggagcaggtgaagctgctggacagattcagcaccagcaacaagagcctgaccggcaccctgtacctgaccgccacccacctgctgttcatcgacagccaccagaaggagacctggatcctgcaccaccacatcgccagcgtggagaagctggccctgaccaccagcggctgccccctggtgatccagtgcaagaacttcagaaccgtgcacttcatcgtgcccagagagagagactgccacgacatctacaacagcctgctgcagctgagcaagcaggccaagtacgaggacctgtacgccttcagctacaaccccaagcagaacgacagcgagagactgcagggctggcagctgatcgacctggccgaggagtacaagagaatgggcgtgcccaacagccactggcagctgagcgacgccaacagagactacaagatctgcgagacctaccccagagagctgtacgtgcccagaatcgccagcaagcccatcatcgtgggcagcagcaagttcagaagcaagggcagattccccgtgctgagctactaccaccaggacaaggaggccgccatctgcagatgcagccagcccctgagcggcttcagcgccagatgcctggaggacgagcacctgctgcaggccatcagcaaggccaaccccgtgaacagatacatgtacgtgatggacaccagacccaagctgaacgccatggccaacagagccgccggcaagggctacgagaacgaggacaactacagcaacatcagattccagttcgtgggcatcgagaacatccacgtgatgagaagcagcctgcagaagctgctggaggtgaacggcaccaagggcctgagcgtgaacgacttctacagcggcctggagagcagcggctggctgagacacatcaaggccgtgatggacgccgccatcttcctggccaaggccatcaccgtggagaacgccagcgtgctggtgcactgcagcgacggctgggacagaaccagccaggtgtgcagcctgggcagcctgctgctggacagctactacagaaccatcaagggcttcatggtgctgatcgagaaggactggatcagcttcggccacaagttcagcgagagatgcggccagctggacggcgaccccaaggaggtgagccccgtgttcacccagttcctggagtgcgtgtggcacctgaccgagcagttcccccaggccttcgagttcagcgaggccttcctgctgcagatccacgagcacatccacagctgccagttcggcaacttcctgggcaactgccagaaggagagagaggagctgaagctgaaggagaagacctacagcctgtggcccttcctgctggaggaccagaagaagtacctgaaccccctgtacagcagcgagagccacagattcaccgtgctggagcccaacaccgtgagcttcaacttcaagttctggagaaacatgtaccaccagttcgacagaaccctgcaccccagacagagcgtgttcaacatcatcatgaacatgaacgagcagaacaagcagctggagaaggacatcaaggacctggagagcttcaccagcttcgccgccgccagagtgatccagggccagtag

SEQ ID NO: 90190 - DNA, 1983 bp, synthetic construct
  misc_feature 1..1983: note = Description of Artificial Sequence: Synthetic coding sequence
  source 1..1983: mol_type = other DNA
atggagcacatcagaacccccaaggtggagaacgtgagactggtggacagagtgagccccaagaaggccgccctgggcaccctgtacctgaccgccacccacgtgatcttcgtggagaacagccccgaccccagaaaggagacctggatcctgcacagccagatcagcaccatcgagaagcaggccaccaccgccaccggctgccccctgctgatcagatgcaagaacttccagatcatccagctgatcatcccccaggagagagactgccacgacgtgtacatcagcctgatcagactggccagacccgtgaagtacgaggagctgtactgcttcagcttcaaccccatgctggacaaggaggagagagagcagggctgggtgctgatcgacctgagcgaggagtacaccagaatgggcctgcccaaccactactggcagctgagcgacgtgaacagagactacagagtgtgcgacagctaccccaccgagctgtacgtgcccaagagcgccaccgcccacatcatcgtgggcagcagcaagttcagaagcagaagaagattccccgtgctgagctactactacaaggacaaccacgccagcatctgcagaagcagccagcccctgagcggcttcagcgccagatgcctggaggacgagcagatgctgcaggccatcagaaaggccaaccccggcagcgacttcgtgtacgtggtggacaccagacccaagctgaacgccatggccaacagagccgccggcaagggctacgagaacgaggacaactacagcaacatcaagttccagttcatcggcatcgagaacatccacgtgatgagaaacagcctgcagaagatgctggaggtgtgcgagctgaagagccccagcatgagcgacttcctgtggggcctggagaacagcggctggctgagacacatcaaggccatcatggacgccggcatcttcatcgccaaggccgtgagcgaggagggcgccagcgtgctggtgcactgcagcgacggctgggacagaaccgcccaggtgtgcagcgtggccagcctgctgctggacccccactacagaaccctgaagggcttcatggtgctgatcgagaaggactggatcagcttcggccacaagttcaaccacagatacggcaacctggacggcgaccccaaggagatcagccccgtgatcgaccagttcatcgagtgcgtgtggcagctgatggagcagttcccctgcgccttcgagttcaacgagagattcctgatccacatccagcaccacatctacagctgccagttcggcaacttcctgtgcaacagccagaaggagagaagagagctgaagatccaggagagaacctacagcctgtgggcccacctgtggaagaacagagccgactacctgaaccccctgttcagagccgaccacagccagacccagggcaccctgcacctgcccaccaccccctgcaacttcatgtacaagttctggagcggcatgtacaacagattcgagaagggcatgcagcccagacagagcgtgaccgactacctgatggccgtgaaggaggagacccagcagctggaggaggagctggaggccctggaggagagactggagaagatccagaaggtgcagctgaactgcaccaaggtgaagagcaagcagagcgagcccagcaagcacagcggcttcagcaccagcgacaacagcatcgccaacaccccccaggactacagcggcaacatgaagagcttccccagcagaagccccagccagggcgacgaggacagcgccctgatcctgacccaggacaacctgaagagcagcgaccccgacctgagcgccaacagcgaccaggagagcggcgtggaggacctgagctgcagaagccccagcggcggcgagcacgcccccagcgaggacagcggcaaggacagagacagcgacgaggccgtgttcctgaccgcctag

SEQ ID NO: 90191 - DNA, 756 bp, synthetic construct
  misc_feature 1..756: note = Description of Artificial Sequence: Synthetic coding sequence
  source 1..756: mol_type = other DNA
atggagcagttcccctgcgccttcgagttcaacgagagattcctgatccacatccagcaccacatctacagctgccagttcggcaacttcctgtgcaacagccagaaggagagaagagagctgaagatccaggagagaacctacagcctgtgggcccacctgtggaagaacagagccgactacctgaaccccctgttcagagccgaccacagccagacccagggcaccctgcacctgcccaccaccccctgcaacttcatgtacaagttctggagcggcatgtacaacagattcgagaagggcatgcagcccagacagagcgtgaccgactacctgatggccgtgaaggaggagacccagcagctggaggaggagctggaggccctggaggagagactggagaagatccagaaggtgcagctgaactgcaccaaggtgaagagcaagcagagcgagcccagcaagcacagcggcttcagcaccagcgacaacagcatcgccaacaccccccaggactacagcggcaacatgaagagcttccccagcagaagccccagccagggcgacgaggacagcgccctgatcctgacccaggacaacctgaagagcagcgaccccgacctgagcgccaacagcgaccaggagagcggcgtggaggacctgagctgcagaagccccagcggcggcgagcacgcccccagcgaggacagcggcaaggacagagacagcgacgaggccgtgttcctgaccgcctag

SEQ ID NO: 90192 - DNA, 1668 bp, synthetic construct
  misc_feature 1..1668: note = Description of Artificial Sequence: Synthetic coding sequence
  source 1..1668: mol_type = other DNA
atggagcacatcagaacccccaaggtggagaacgtgagactggtggacagagtgagccccaagaaggccgccctgggcaccctgtacctgaccgccacccacgtgatcttcgtggagaacagccccgaccccagaaaggagacctggatcctgcacagccagatcagcaccatcgagaagcaggccaccaccgccaccggctgccccctgctgatcagatgcaagaacttccagatcatccagctgatcatcccccaggagagagactgccacgacgtgtacatcagcctgatcagactggccagacccgtgaagtacgaggagctgtactgcttcagcttcaaccccatgctggacaaggaggagagagagcagggctgggtgctgatcgacctgagcgaggagtacaccagaatgggcctgcccaaccactactggcagctgagcgacgtgaacagagactacagagtgtgcgacagctaccccaccgagctgtacgtgcccaagagcgccaccgcccacatcatcgtgggcagcagcaagttcagaagcagaagaagattccccgtgctgagctactactacaaggacaaccacgccagcatctgcagaagcagccagcccctgagcggcttcagcgccagatgcctggaggacgagcagatgctgcaggccatcagaaaggccaaccccggcagcgacttcgtgtacgtggtggacaccagacccaagctgaacgccatggccaacagagccgccggcaagggctacgagaacgaggacaactacagcaacatcaagttccagttcatcggcatcgagaacatccacgtgatgagaaacagcctgcagaagatgctggaggtgtgcgagctgaagagccccagcatgagcgacttcctgtggggcctggagaacagcggctggctgagacacatcaaggccatcatggacgccggcatcttcatcgccaaggccgtgagcgaggagggcgccagcgtgctggtgcactgcagcgacggctgggacagaaccgcccaggtgtgcagcgtggccagcctgctgctggacccccactacagaaccctgaagggcttcatggtgctgatcgagaaggactggatcagcttcggccacaagttcaaccacagatacggcaacctggacggcgaccccaaggagatcagccccgtgatcgaccagttcatcgagtgcgtgtggcagctgatggagcagttcccctgcgccttcgagttcaacgagagattcctgatccacatccagcaccacatctacagctgccagttcggcaacttcctgtgcaacagccagaaggagagaagagagctgaagatccaggagagaacctacagcctgtgggcccacctgtggaagaacagagccgactacctgaaccccctgttcagagccgaccacagccagacccagggcaccctgcacctgcccaccaccccctgcaacttcatgtacaagttctggagcggcatgtacaacagattcgagaagggcatgcagcccagacagagcgtgaccgactacctgatggccgtgaaggaggagacccagcagctggaggaggagctggaggccctggaggaggtgagacacacctgcttcgtgaacctgttcagcgtgctgatcagctag

SEQ ID NO: 90193 - DNA, 1773 bp, synthetic construct
  misc_feature 1..1773: note = Description of Artificial Sequence: Synthetic coding sequence
  source 1..1773: mol_type = other DNA
ctggacctgctggtgcccaaggtggagaacgtgaagctggtggacagatacgtgagcaagaagcccgccaacggcatcctgtacctgaccgccacccacctgatctacgtggaggccagcggcgccgccagaaaggagacctggatcgccctgcaccacatcgccaccgtggagaagctgcccatcaccagcctgggctgccccctgaccctgagatgcaagaacttcagagtggcccacttcgtgctggacagcgacctggtgtgccacgaggtgtacatcagcctgctgaagctgagccagcccgccctgcccgaggacctgtacgccttcagctacaaccccaagagcagcaaggagatgagagagagcggctggaagctgatcgaccccatcagcgacttcggcagaatgggcatccccaacagaaactggaccatcaccgacgccaacatcagattcagattcatgggcatcgagaacatccacgtgatgagaagcagcctgcagaagctgctggaggtgtgcgagctgaagacccccaccatgagcgagttcctgagcggcctggagagcagcggctggctgagacacatcaaggccatcatggacgccggcatcttcatcaccaaggccgtgaaggtggagaaggccagcgtgctggtgcactgcagcgacggctgggacagaaccgcccaggtgtgcagcgtggccagcatcctgctggaccccttctacagaaccttcaagggcctgatgatcctgatcgagaaggagtggatcagcatgggccacaagttcagccagagatgcggccacctggacggcgacagcaaggaggtgagccccatcttcacccagttcctggactgcatctggcagctgatggagcagttcccctgcgccttcgagttcaacgagaacttcctgctggagatccacgaccacgtgttcagctgccagttcggcaacttcctgggcaactgccagaaggacagagaggacctgagagtgtacgagaagacccacagcgtgtggcccttcctggtgcagagaaagcccgacttcagaaaccccctgtacaagggcttcaccatgtacggcgtgctgaaccccagcaccgtgccctacaacatccagttctggtgcggcatgtacaacagattcgacaagggcctgcagcccaagcagagcatgctggagagcctgctggagatcaagaagcagagagccatgctggagaccgacgtgcacgagctggagaagaagctgaaggtgagagacgagccccccgaggagatctgcacctgcagccagctgggcaacatcctgagccagcacctgggcagccccctgaccaaccccctgggcttcatgggcatcaacggcgacctgaacaccctgatggagaacggcaccctgagcagagagggcggcctgagagcccagatggaccaggtgaagagccagggcgccgacctgcaccacaactgctgcgagatcgtgggcagcctgagagccatcaacatcagcggcgacgtgggcatcagcgaggccatgggcatcagcggcgacatgtgcaccttcgaggccaccggcttcagcaaggacctgggcatctgcggcgccatggacatcagcgaggccaccggcatcagcggcaacctgggcatcagcgaggccagaggcttcagcggcgacatgggcatcctgggcgacaccggcatcagcaaggccagcaccaaggaggccgactacagcaagcaccagtag

SEQ ID NO: 90194 - DNA, 2115 bp, synthetic construct
  misc_feature 1..2115: note = Description of Artificial Sequence: Synthetic coding sequence
  source 1..2115: mol_type = other DNA
atggaccacatcaccgtgcccaaggtggagaacgtgaagctggtggacagatacgtgagcaagaagcccgccaacggcatcctgtacctgaccgccacccacctgatctacgtggaggccagcggcgccgccagaaaggagacctggatcgccctgcaccacatcgccaccgtggagaagctgcccatcaccagcctgggctgccccctgaccctgagatgcaagaacttcagagtggcccacttcgtgctggacagcgacctggtgtgccacgaggtgtacatcagcctgctgaagctgagccagcccgccctgcccgaggacctgtacgccttcagctacaaccccaagagcagcaaggagatgagagagagcggctggaagctgatcgaccccatcagcgacttcggcagaatgggcatccccaacagaaactggaccatcaccgacgccaacagaaactacgagatctgcagcacctacccccccgagatcgtggtgcccaagagcgtgaccctgggcaccgtggtgggcagcagcaagttcagaagcaaggagagagtgcccgtgctgagctacctgtacaaggagaacaacgccgccatctgcagatgcagccagcccctgagcggcttctacaccagatgcgtggacgacgagctgctgctggaggccatcagccagaccaaccccggcagccagttcatgtacgtggtggacaccagacccaagctgaacgccatggccaacagagccgccggcaagggctacgagaacgaggacaactacgccaacatcagattcagattcatgggcatcgagaacatccacgtgatgagaagcagcctgcagaagctgctggaggtgtgcgagctgaagacccccaccatgagcgagttcctgagcggcctggagagcagcggctggctgagacacatcaaggccatcatggacgccggcatcttcatcaccaaggccgtgaaggtggagaaggccagcgtgctggtgcactgcagcgacggctgggacagaaccgcccaggtgtgcagcgtggccagcatcctgctggaccccttctacagaaccttcaagggcctgatgatcctgatcgagaaggagtggatcagcatgggccacaagttcagccagagatgcggccacctggacggcgacagcaaggaggtgagccccatcttcacccagttcctggactgcatctggcagctgatggagcagttcccctgcgccttcgagttcaacgagaacttcctgctggagatccacgaccacgtgttcagctgccagttcggcaacttcctgggcaactgccagaaggacagagaggacctgagagtgtacgagaagacccacagcgtgtggcccttcctggtgcagagaaagcccgacttcagaaaccccctgtacaagggcttcaccatgtacggcgtgctgaaccccagcaccgtgccctacaacatccagttctggtgcggcatgtacaacagattcgacaagggcctgcagcccaagcagagcatgctggagagcctgctggagatcaagaagcagagagccatgctggagaccgacgtgcacgagctggagaagaagctgaaggtgagagacgagccccccgaggagatctgcacctgcagccagctgggcaacatcctgagccagcacctgggcagccccctgaccaaccccctgggcttcatgggcatcaacggcgacctgaacaccctgatggagaacggcaccctgagcagagagggcggcctgagagcccagatggaccaggtgaagagccagggcgccgacctgcaccacaactgctgcgagatcgtgggcagcctgagagccatcaacatcagcggcgacgtgggcatcagcgaggccatgggcatcagcggcgacatgtgcaccttcgaggccaccggcttcagcaaggacctgggcatctgcggcgccatggacatcagcgaggccaccggcatcagcggcaacctgggcatcagcgaggccagaggcttcagcggcgacatgggcatcctgggcgacaccggcatcagcaaggccagcaccaaggaggccgactacagcaagcaccagtag

SEQ ID NO: 90195 - DNA, 1527 bp, synthetic construct
  misc_feature 1..1527: note = Description of Artificial Sequence: Synthetic coding sequence
  source 1..1527: mol_type = other DNA
tgagacagcgacctggtgtgccacgaggtgtacatcagcctgctgaagctgagccagcccgccctgcccgaggacctgtacgccttcagctacaaccccaagagcagcaaggagatgagagagagcggctggaagctgatcgaccccatcagcgacttcggcagaatgggcatccccaacagaaactggaccatcaccgacgccaacatcagattcagattcatgggcatcgagaacatccacgtgatgagaagcagcctgcagaagctgctggaggtgtgcgagctgaagacccccaccatgagcgagttcctgagcggcctggagagcagcggctggctgagacacatcaaggccatcatggacgccggcatcttcatcaccaaggccgtgaaggtggagaaggccagcgtgctggtgcactgcagcgacggctgggacagaaccgcccaggtgtgcagcgtggccagcatcctgctggaccccttctacagaaccttcaagggcctgatgatcctgatcgagaaggagtggatcagcatgggccacaagttcagccagagatgcggccacctggacggcgacagcaaggaggtgagccccatcttcacccagttcctggactgcatctggcagctgatggagcagttcccctgcgccttcgagttcaacgagaacttcctgctggagatccacgaccacgtgttcagctgccagttcggcaacttcctgggcaactgccagaaggacagagaggacctgagagtgtacgagaagacccacagcgtgtggcccttcctggtgcagagaaagcccgacttcagaaaccccctgtacaagggcttcaccatgtacggcgtgctgaaccccagcaccgtgccctacaacatccagttctggtgcggcatgtacaacagattcgacaagggcctgcagcccaagcagagcatgctggagagcctgctggagatcaagaagcagagagccatgctggagaccgacgtgcacgagctggagaagaagctgaaggtgagagacgagccccccgaggagatctgcacctgcagccagctgggcaacatcctgagccagcacctgggcagccccctgaccaaccccctgggcttcatgggcatcaacggcgacctgaacaccctgatggagaacggcaccctgagcagagagggcggcctgagagcccagatggaccaggtgaagagccagggcgccgacctgcaccacaactgctgcgagatcgtgggcagcctgagagccatcaacatcagcggcgacgtgggcatcagcgaggccatgggcatcagcggcgacatgtgcaccttcgaggccaccggcttcagcaaggacctgggcatctgcggcgccatggacatcagcgaggccaccggcatcagcggcaacctgggcatcagcgaggccagaggcttcagcggcgacatgggcatcctgggcgacaccggcatcagcaaggccagcaccaaggaggccgactacagcaagcaccagtag

SEQ ID NO: 90196 - DNA, 2082 bp, synthetic construct
  misc_feature 1..2082: note = Description of Artificial Sequence: Synthetic coding sequence
  source 1..2082: mol_type = other DNA
atggaccacatcaccgtgcccaaggtggagaacgtgaagctggtggacagatacgtgagcaagaagcccgccaacggcatcctgtacctgaccgccacccacctgatctacgtggaggccagcggcgccgccagaaaggagacctggatcgccctgcaccacatcgccaccgtggagaagctgcccatcaccagcctgggctgccccctgaccctgagatgcaagaacttcagagtggcccacttcgtgctggacagcgacctggtgtgccacgaggtgtacatcagcctgctgaagctgagccagcccgccctgcccgaggacctgtacgccttcagctacaaccccaagagcagcaaggagatgagagagagcggctggaagctgatcgaccccatcagcgacttcggcagaatgggcatccccaacagaaactggaccatcaccgacgccaacagaaactacgagatctgcagcacctacccccccgagatcgtggtgcccaagagcgtgaccctgggcaccgtggtgggcagcagcaagttcagaagcaaggagagagtgcccgtgctgagctacctgtacaaggagaacaacgccgccatctgcagatgcagccagcccctgagcggcttctacaccagatgcgtggacgacgagctgctgctggaggccatcagccagaccaaccccggcagccagttcatgtacgtggtggacaccagacccaagctgaacgccatggccaacagagccgccggcaagggctacgagaacgaggacaactacgccaacatcagattcagattcatgggcatcgagaacatccacgtgatgagaagcagcctgcagaagctgctggaggtgtgcgagctgaagacccccaccatgagcgagttcctgagcggcctggagagcagcggctggctgagacacatcaaggccatcatggacgccggcatcttcatcaccaaggccgtgaaggtggagaaggccagcgtgctggtgcactgcagcgacggctgggacagaaccgcccaggtgtgcagcgtggccagcatcctgctggaccccttctacagaaccttcaagggcctgatgatctggcacttcctggtgctgatcatgagaatcgtgctgcagctggccaagatgaacctgatggacatcaccaagatcttcagcctgctgcagcccgacaaggaggaggaggacaccgacaccgaggagaagcaggccctgaaccaggccgtgtacgacaacgacagctacaccctggaccagctgctgagacaggagagatacaagagattcatcaacagcagaagcggctggggcgtgcccggcacccccctgagactggccgccagctacggccacctgagctgcctgcaggtgctgctggcccacggcgccgacgtggacagcctggacgtgaaggcccagacccccctgttcaccgccgtgagccacggccacctggactgcgtgagagtgctgctggaggccggcgccagccccggcggcagcatctacaacaactgcagccccgtgctgaccgccgccagagacggcgccgtggccatcctgcaggagctgctggaccacggcgccgaggccaacgtgaaggccaagctgcccgtgtgggccagcaacatcgccagctgcagcggccccctgtacctggccgccgtgtacggccacctggactgcttcagactgctgctgctgcacggcgccgaccccgactacaactgcaccgaccagggcctgctggccagagtgcccagacccagaaccctgctggagatctgcctgcaccacaactgcgagcccgagtacatccagctgctgatcgacttcggcgccaacatctacctgcccagcctgagcctggacctgaccagccaggacgacaagggcatcgccctgctgctgcaggccagagccacccccagaagcctgctgagccaggtgagactggtggtgagaagagccctgtgccaggccggccagccccaggccatcaaccagctggacatcccccccatgctgatcagctacctgaagcaccagctgtag

SEQ ID NO: 90197 - DNA, 861 bp, synthetic construct
  misc_feature 1..861: note = Description of Artificial Sequence: Synthetic coding sequence
  source 1..861: mol_type = other DNA
atgggcggcgagagaagcggcgtgagaggcaacaagatggccgccgccgagcccagccccagaagagtgggcttcgtgggcgccggcagaatggccggcgccatcgcccagggcctgatcagagccggcaaggtggaggcccagcacatcctggccagcgcccccaccgacagaaacctgtgccacttccaggccctgggctgcagaaccacccacagcaaccaggaggtgctgcagagctgcctgctggtgatcttcgccaccaagccccacgtgctgcccgccgtgctggccgaggtggcccccgtggtgaccaccgagcacatcctggtgagcgtggccgccggcgtgagcctgagcaccctggaggagctgctgccccccaacaccagagtgctgagagtgctgcccaacctgccctgcgtggtgcaggagggcgccatcgtgatggccagaggcagacacgtgggcagcagcgagaccaagctgctgcagcacctgctggaggcctgcggcagatgcgaggaggtgcccgaggcctacgtggacatccacaccggcctgagcggcagcggcgtggccttcgtgtgcgccttcagcgaggccctggccgagggcgccgtgaagatgggcatgcccagcagcctggcccacagaatcgccgcccagaccctgctgggcaccgccaagatgctgctgcacgagggccagcaccccgcccagctgagaagcgacgtgtgcacccccggcggcaccaccatctacggcctgcacgccctggagcagggcggcctgagagccgccaccatgagcgccgtggaggccgccacctgcagagccaaggagctgagcagaaagtag

SEQ ID NO: 90198 - DNA, 900 bp, synthetic construct
  misc_feature 1..900: note = Description of Artificial Sequence: Synthetic coding sequence
  source 1..900: mol_type = other DNA
atgcccctgagcggcacccccgcccccaacaagaagagaaagagcagcaagctgatcatggagctgaccggcggcggccaggagagcagcggcctgaacctgggcaagaagatcagcgtgcccagagacgtgatgctggaggagctgagcctgctgaccaacagaggcagcaagatgttcaagctgagacagatgagagtggagaagttcatctacgagaaccaccccgacgtgttcagcgacagcagcatggaccacttccagaagttcctgcccaccgtgggcggccagctgggcaccgccggccagggcttcagctacagcaagagcaacggcagaggcggcagccaggccggcggcagcggcagcgccggccagtacggcagcgaccagcagcaccacctgggcagcggcagcggcgccggcggcaccggcggccccgccggccaggccggcagaggcggcgccgccggcaccgccggcgtgggcgagaccggcagcggcgaccaggccggcggcgagggcaagcacatcaccgtgttcaagacctacatcagcccctgggagagagccatgggcgtggacccccagcagaagatggagctgggcatcgacctgctggcctacggcgccaaggccgagctgcccaagtacaagagcttcaacagaaccgccatgccctacggcggctacgagaaggccagcaagagaatgaccttccagatgcccaagttcgacctgggccccctgctgagcgagcccctggtgctgtacaaccagaacctgagcaacagacccagcttcaacagaacccccatcccctggctgagcagcggcgagcccgtggactacaacgtggacatcggcatccccctggacggcgagaccgaggagctgtag

SEQ ID NO: 90199 - DNA, 795 bp, synthetic construct
  misc_feature 1..795: note = Description of Artificial Sequence: Synthetic coding sequence
  source 1..795: mol_type = other DNA
atgctgagccacaacaccatgatgaagcagagaaagcagcaggccaccgccatcatgaaggaggtgcacggcaacgacgtggacggcatggacctgggcaagaaggtgagcatccccagagacatcatgctggaggagctgagccacctgagcaacagaggcgccagactgttcaagatgagacagagaagaagcgacaagtacaccttcgagaacttccagtaccagagcagagcccagatcaaccacagcatcgccatgcagaacggcaaggtggacggcagcaacctggagggcggcagccagcaggcccccctgaccccccccaacacccccgaccccagaagcccccccaaccccgacaacatcgcccccggctacagcggccccctgaaggagatcccccccgagaagttcaacaccaccgccgtgcccaagtactaccagagcccctgggagcaggccatcagcaacgaccccgagctgctggaggccctgtaccccaagctgttcaagcccgagggcaaggccgagctgcccgactacagaagcttcaacagagtggccacccccttcggcggcttcgagaaggccagcagaatggtgaagttcaaggtgcccgacttcgagctgctgctgctgaccgaccccagattcatgagcttcgtgaaccccctgagcggcagaagaagcttcaacagaacccccaagggctggatcagcgagaacatccccatcgtgatcaccaccgagcccaccgacgacaccaccgtgcccgagagcgaggacctgtag

SEQ ID NO: 90200 - DNA, 756 bp, synthetic construct
  misc_feature 1..756: note = Description of Artificial Sequence: Synthetic coding sequence
  source 1..756: mol_type = other DNA
atgatccccaaggagcagaagggccccgtgatggccgccatgggcgacctgaccgagcccgtgcccaccctggacctgggcaagaagctgagcgtgccccaggacctgatgatggaggagctgagcctgagaaacaacagaggcagcctgctgttccagaagagacagagaagagtgcagaagttcaccttcgagctggccgccagccagagagccatgctggccggcagcgccagaagaaaggtgaccggcaccgccgagagcggcaccgtggccaacgccaacggccccgagggccccaactacagaagcgagctgcacatcttccccgccagccccggcgccagcctgggcggccccgagggcgcccaccccgccgccgcccccgccggctgcgtgcccagccccagcgccctggcccccggctacgccgagcccctgaagggcgtgccccccgagaagttcaaccacaccgccatcagcaagggctacagatgcccctggcaggagttcgtgagctacagagactaccagagcgacggcagaagccacacccccagccccaacgactacagaaacttcaacaagacccccgtgcccttcggcggccccctggtgggcggcaccttccccagacccggcacccccttcatccccgagcccctgagcggcctggagctgctgagactgagacccagcttcaacagagtggcccagggctgggtgagaaacctgcccgagagcgaggagctgtag

SEQ ID NO: 90201 - DNA, 756 bp, synthetic construct; identical to SEQ ID NO: 90200
  misc_feature 1..756: note = Description of Artificial Sequence: Synthetic coding sequence
  source 1..756: mol_type = other DNA

SEQ ID NO: 90202 - DNA, 1989 bp, synthetic construct
  misc_feature 1..1989: note = Description of Artificial Sequence: Synthetic coding sequence
  source 1..1989: mol_type = other DNA
atggtggtgagcgaggtggacatcgccaaggccgaccccgccgccgccagccaccccctgctgctgaacggcgacgccaccgtggcccagaagaaccccggcagcgtggccgagaacaacctgtgcagccagtacgaggagaaggtgagaccctgcatcgacctgatcgacagcctgagagccctgggcgtggagcaggacctggccctgcccgccatcgccgtgatcggcgaccagagcagcggcaagagcagcgtgctggaggccctgagcggcgtggccctgcccagaggcagcggcatcgtgaccagatgccccctggtgctgaagctgaagaagctggtgaacgaggacaagtggagaggcaaggtgagctaccaggactacgagatcgagatcagcgacgccagcgaggtggagaaggagatcaacaaggcccagaacgccatcgccggcgagggcatgggcatcagccacgagctgatcaccctggagatcagcagcagagacgtgcccgacctgaccctgatcgacctgcccggcatcaccagagtggccgtgggcaaccagcccgccgacatcggctacaagatcaagaccctgatcaagaagtacatccagagacaggagaccatcagcctggtggtggtgcccagcaacgtggacatcgccaccaccgaggccctgagcatggcccaggaggtggaccccgagggcgacagaaccatcggcatcctgaccaagcccgacctggtggacaagggcaccgaggacaaggtggtggacgtggtgagaaacctggtgttccacctgaagaagggctacatgatcgtgaagtgcagaggccagcaggagatccaggaccagctgagcctgagcgaggccctgcagagagagaagatcttcttcgagaaccacccctacttcagagacctgctggaggagggcaaggccaccgtgccctgcctggccgagaagctgaccagcgagctgatcacccacatctgcaagagcctgcccctgctggagaaccagatcaaggagacccaccagagaatcaccgaggagctgcagaagtacggcgtggacatccccgaggacgagaacgagaagatgttcttcctgatcgacaaggtgaacgccttcaaccaggacatcaccgccctgatgcagggcgaggagaccgtgggcgaggaggacatcagactgttcaccagactgagacacgagttccacaagtggagcaccatcatcgagaacaacttccaggagggccacaagatcctgagcagaaagatccagaagttcgagaaccagtacagaggcagagagctgcccggcttcgtgaactacagaaccttcgagaccatcgtgaagcagcagatcaaggccctggaggagcccgccgtggacatgctgcacaccgtgaccgacatggtgagactggccttcaccgacgtgagcatcaagaacttcgaggagttcttcaacctgcacagaaccgccaagagcaagatcgaggacatcagagccgagcaggagagagagggcgagaagctgatcagactgcacttccagatggagcagatcgtgtactgccaggaccaggtgtacagaggcgccctgcagaaggtgagagagaaggagctggaggaggagaagaagaagaagagctgggacttcggcgccttccagagcagcagcgccaccgacagcagcatggaggagatcttccagcacctgatggcctaccaccaggaggccagcaagagaatcagcagccacatccccctgatcatccagttcttcatgctgcagacctacggccagcagctgcagaaggccatgctgcagctgctgcaggacaaggacacctacagctggctgctgaaggagagaagcgacaccagcgacaagagaaagttcctgaaggagagactggccagactgacccaggccagaagaagactggcccagttccccggctag

SEQ ID NO: 90203 - DNA, 1989 bp, synthetic construct; identical to SEQ ID NO: 90202
  misc_feature 1..1989: note = Description of Artificial Sequence: Synthetic coding sequence
  source 1..1989: mol_type = other DNA

SEQ ID NO: 90204 - DNA, 207 bp, synthetic construct
  misc_feature 1..207: note = Description of Artificial Sequence: Synthetic coding sequence
  source 1..207: mol_type = other DNA
atggtggtgagcgaggtggacatcgccaaggccgaccccgccgccgccagccaccccctgctgctgaacggcgacgccaccgtggcccagaagaaccccggcagcgtggccgagaacaacctgtgcagccagtacgaggagaaggtgagaccctgcatcgacctgatcgacagcctgagagccctgggcgtggagcaggacctgtag

SEQ ID NO: 90205 - DNA, 606 bp, synthetic construct
  misc_feature 1..606: note = Description of Artificial Sequence: Synthetic coding sequence
  source 1..606: mol_type = other DNA
atggtggtgagcgaggtggacatcgccaaggccgaccccgccgccgccagccaccccctgctgctgaacggcgacgccaccgtggcccagaagaaccccggcagcgtggccgagaacaacctgtgcagccagtacgaggagaaggtgagaccctgcatcgacctgatcgacagcctgagagccctgggcgtggagcaggacctggccctgcccgccatcgccgtgatcggcgaccagagcagcggcaagagcagcgtgctggaggccctgagcggcgtggccctgcccagaggcagcggcatcgtgaccagatgccccctggtgctgaagctgaagaagctggtgaacgaggacaagtggagaggcaaggtgagctaccaggactacgagatcgagatcagcgacgccagcgaggtggagaaggagatcaacaaggcccagaacgccatcgccggcgagggcatgggcatcagccacgagctgatcaccctggagatcagcagcagagacgtgcccgacctgaccctgatcgacctgcccggcatcaccagagtggccgtgggcaaccagcccgccgacatcggctacaagatcaagaccctgtag

SEQ ID NO: 90206 - DNA, 81 bp, synthetic construct
  misc_feature 1..81: note = Description of Artificial Sequence: Synthetic coding sequence
  source 1..81: mol_type = other DNA
atggtggtgagcgaggtggacatcgccaaggccgaccccgccgccgccagccaccccctgctgctgaacggcgacgcctag

SEQ ID NO: 90207 - DNA, 594 bp, synthetic construct
  misc_feature 1..594: note = Description of Artificial Sequence: Synthetic coding sequence
  source 1..594: mol_type = other DNA
atggtggtgagcgaggtggacatcgccaaggccgaccccgccgccgccagccaccccctgctgctgaacggcgacgccaccgtggcccagaagaaccccggcagcgtggccgagaacaacctgtgcagccagtacgaggagaaggtgagaccctgcatcgacctgatcgacagcctgagagccctgggcgtggagcaggacctggccctgcccgccatcgccgtgatcggcgaccagagcagcggcaagagcagcgtgctggaggccctgagcggcgtggccctgcccagaggcagcggcatcgtgaccagatgccccctggtgctgaagctgaagaagctggtgaacgaggacaagtggagaggcaaggtgagctaccaggactacgagatcgagatcagcgacgccagcgaggtggagaaggagatcaacaaggcccagaacgccatcgccggcgagggcatgggcatcagccacgagctgatcaccctggagatcagcagcagagacgtgcccgacctgaccctgatcgacctgcccggcatcaccagagtggccgtgggcaaccagcccgccgacatcggctacaagtag

SEQ ID NO: 90208 - DNA, 108 bp, synthetic construct
  misc_feature 1..108: note = Description of Artificial Sequence: Synthetic coding sequence
  source 1..108: mol_type = other DNA
atggtggtgagcgaggtggacatcgccaaggccgaccccgccgccgccagccaccccctgctgctgaacggcgacgccaccgtggcccagaagaaccccggcagctag

SEQ ID NO: 90209 - DNA, 234 bp, synthetic construct
  misc_feature 1..234: note = Description of Artificial Sequence: Synthetic coding sequence
  source 1..234: mol_type = other DNA
atggtggtgagcgaggtggacatcgccaaggccgaccccgccgccgccagccaccccctgctgctgaacggcgacgccaccgtggcccagaagaaccccggcagcgtggccgagaacaacctgtgcagccagtacgaggagaaggtgagaccctgcatcgacctgatcgacagcctgagagccctgggcgtggagcaggacctggccctgcccgccatcgccgtgatcggctag

SEQ ID NO: 90210 - DNA, 1989 bp, synthetic construct; identical to SEQ ID NO: 90202
  misc_feature 1..1989: note = Description of Artificial Sequence: Synthetic coding sequence
  source 1..1989: mol_type = other DNA

SEQ ID NO: 90211 - DNA, 2148 bp, synthetic construct
  misc_feature 1..2148: note = Description of Artificial Sequence: Synthetic coding sequence
  source 1..2148: mol_type = other DNA
atgagcaaggcccacaagccctggccctacagaagaagaagccagttcagcagcagaaagtacctgaagaaggagatgaacagcttccagcagcagcccccccccttcggcaccgtgcccccccagatgatgttcccccccaactggcagggcgccgagaaggacgccgccttcctggccaaggacttcaacttcctgaccctgaacaaccagcccccccccggcaacagaagccagcccagagccatgggccccgagaacaacctgtacagccagtacgagcagaaggtgagaccctgcatcgacctgatcgacagcctgagagccctgggcgtggagcaggacctggccctgcccgccatcgccgtgatcggcgaccagagcagcggcaagagcagcgtgctggaggccctgagcggcgtggccctgcccagaggcagcggcatcgtgaccagatgccccctggtgctgaagctgaagaagcagccctgcgaggcctgggccggcagaatcagctacagaaacaccgagctggagctgcaggaccccggccaggtggagaaggagatccacaaggcccagaacgtgatggccggcaacggcagaggcatcagccacgagctgatcagcctggagatcaccagccccgaggtgcccgacctgaccatcatcgacctgcccggcatcaccagagtggccgtggacaaccagcccagagacatcggcctgcagatcaaggccctgatcaagaagtacatccagagacagcagaccatcaacctggtggtggtgccctgcaacgtggacatcgccaccaccgaggccctgagcatggcccacgaggtggaccccgagggcgacagaaccatcggcatcctgaccaagcccgacctgatggacagaggcaccgagaagagcgtgatgaacgtggtgagaaacctgacctaccccctgaagaagggctacatgatcgtgaagtgcagaggccagcaggagatcaccaacagactgagcctggccgaggccaccaagaaggagatcaccttcttccagacccacccctacttcagagtgctgctggaggagggcagcgccaccgtgcccagactggccgagagactgaccaccgagctgatcatgcacatccagaagagcctgcccctgctggagggccagatcagagagagccaccagaaggccaccgaggagctgagaagatgcggcgccgacatccccagccaggaggccgacaagatgttcttcctgatcgagaagatcaagatgttcaaccaggacatcgagaagctggtggagggcgaggaggtggtgagagagaacgagaccagactgtacaacaagatcagagaggacttcaagaactgggtgggcatcctggccaccaacacccagaaggtgaagaacatcatccacgaggaggtggagaagtacgagaagcagtacagaggcaaggagctgctgggcttcgtgaactacaagaccttcgagatcatcgtgcaccagtacatccagcagctggtggagcccgccctgagcatgctgcagaaggccatggagatcatccagcaggccttcatcaacgtggccaagaagcacttcggcgagttcttcaacctgaaccagaccgtgcagagcaccatcgaggacatcaaggtgaagcacaccgccaaggccgagaacatgatccagctgcagttcagaatggagcagatggtgttctgccaggaccagatctacagcgtggtgctgaagaaggtgagagaggagatcttcaaccccctgggcacccccagccagaacatgaagctgaacagccacttccccagcaacgagagcagcgtgagcagcttcaccgagatcggcatccacctgaacgcctacttcctggagaccagcaagagactggccaaccagatccccttcatcatccagtacttcatgctgagagagaacggcgacagcctgcagaaggccatgatgcagatcctgcaggagaagaacagatacagctggctgctgcaggagcagagcgagaccgccaccaagagaagaatcctgaaggagagaatctacagactgacccaggccagacacgccctgtgccagttcagcagcaaggagatccactag

SEQ ID NO: 90212 - DNA, 45 bp, synthetic construct
  misc_feature 1..45: note = Description of Artificial Sequence: Synthetic coding sequence
  source 1..45: mol_type = other DNA
atgagcaaggcccacaagccctggccctacagaagaagaagctag

SEQ ID NO: 90213 - DNA, 405 bp, synthetic construct
  misc_feature 1..405: note = Description of Artificial Sequence: Synthetic coding sequence
  source 1..405: mol_type = other DNA
atgagcaaggcccacaagccctggccctacagaagaagaagccagttcagcagcagaaagtacctgaagaaggagatgaacagcttccagcagcagcccccccccttcggcaccgtgcccccccagatgatgttcccccccaactggcagggcgccgagaaggacgccgccttcctggccaaggacttcaacttcctgaccctgaacaaccagcccccccccggcaacagaagccagcccagagccatgggccccgagaacaacctgtacagccagtacgagcagaaggtgagaccctgcatcgacctgatcgacagcctgagagccctgggcgtggagcaggacctggccctgcccgccatcgccgtgatcggcgaccagagcagcggcaagagcagcgtgtag

SEQ ID NO: 90214 - DNA, 378 bp, synthetic construct
  misc_feature 1..378: note = Description of Artificial Sequence: Synthetic coding sequence
  source 1..378: mol_type = other DNA
atgagcaaggcccacaagccctggccctacagaagaagaagccagttcagcagcagaaagtacctgaagaaggagatgaacagcttccagcagcagcccccccccttcggcaccgtgcccccccagatgatgttcccccccaactggcagggcgccgagaaggacgccgccttcctggccaaggacttcaacttcctgaccctgaacaaccagcccccccccggcaacagaagccagcccagagccatgggccccgagaacaacctgtacagccagtacgagcagaaggtgagaccctgcatcgacctgatcgacagcctgagagccctgggcgtggagcaggacctggccctgcccgccatcgccgtgatcggctag

SEQ ID NO: 90215 - DNA, 390 bp, synthetic construct
  misc_feature 1..390: note = Description of Artificial Sequence: Synthetic coding sequence
  source 1..390: mol_type = other DNA
atgagcaaggcccacaagccctggccctacagaagaagaagccagttcagcagcagaaagtacctgaagaaggagatgaacagcttccagcagcagcccccccccttcggcaccgtgcccccccagatgatgttcccccccaactggcagggcgccgagaaggacgccgccttcctggccaaggacttcaacttcctgaccctgaacaaccagcccccccccggcaacagaagccagcccagagccatgggccccgagaacaacctgtacagccagtacgagcagaaggtgagaccctgcatcgacctgatcgacagcctgagagccctgggcgtggagcaggacctggccctgcccgccatcgccgtgatcggcgaccagagcagctag

SEQ ID NO: 90216 - DNA, 606 bp, synthetic construct
  misc_feature 1..606: note = Description of Artificial Sequence: Synthetic coding sequence
  source 1..606: mol_type = other DNA
atgagcaaggcccacaagccctggccctacagaagaagaagccagttcagcagcagaaagtacctgaagaaggagatgaacagcttccagcagcagcccccccccttcggcaccgtgcccccccagatgatgttcccccccaactggcagggcgccgagaaggacgccgccttcctggccaaggacttcaacttcctgaccctgaacaaccagcccccccccggcaacagaagccagcccagagccatgggccccgagaacaacctgtacagccagtacgagcagaaggtgagaccctgcatcgacctgatcgacagcctgagagccctgggcgtggagcaggacctggccctgcccgccatcgccgtgatcggcgaccagagcagcggcaagagcagcgtgctggaggccctgagcggcgtggccctgcccagaggcagcgcccagaacgtgatggccggcaacggcagaggcatcagccacgagctgatcagcctggagatcaccagccccgaggtgcccgacctgaccatcatcgacctgcccggcatcaccagagtggccgtggacaaccagcccagagacatcggcctgcaggtgagctag

SEQ ID NO: 90217 - DNA, 663 bp, synthetic construct
  misc_feature 1..663: note = Description of Artificial Sequence: Synthetic coding sequence
  source 1..663: mol_type = other DNA
atgaacatcagaaacgccagacccgaggacctgatgaacatgcagcactgcaacctgctgtgcctgcccgagaactaccagatgaagtactacttctaccacggcctgagctggccccagctgagctacatcgccgaggacgagaacggcaagatcgtgggctacgtgctggccaagatggaggaggaccccgacgacgtgccccacggccacatcaccagcctggccgtgaagagaagccacagaagactgggcctggcccagaagctgatggaccaggccagcagagccatgatcgagaacttcaacgccaagtacgtgagcctgcacgtgagaaagagaatcagcgaggtggagcccaagtactacgccgacggcgaggacgcctacgccatgaagagagacctgacccagatggccgacgagctgagaagacacctggagctgaaggagaagggcagacacgtggtgctgggcgccatcgagaacaaggtggagagcaagggcaacagcccccccagcagcggcgaggcctgcagagaggagaagggcctggccgccgaggacagcggcggcgacagcaaggacctgagcgaggtgagcgagaccaccgagagcaccgacgtgaaggacagcagcgaggccagcgacagcgccagctag

SEQ ID NO: 90218 - DNA, 708 bp, synthetic construct
  misc_feature 1..708: note = Description of Artificial Sequence: Synthetic coding sequence
  source 1..708: mol_type = other DNA
atgaacatcagaaacgccagacccgaggacctgatgaacatgcagcactgcaacctgctgtgcctgcccgagaactaccagatgaagtactacttctaccacggcctgagctggccccagctgagctacatcgccgaggacgagaacggcaagatcgtgggctacgtgctggccaagatggaggaggaccccgacgacgtgccccacggccacatcaccagcctggccgtgaagagaagccacagaagactgggcctggcccagaagctgatggaccaggccagcagagccatgatcgagaacttcaacgccaagtacgtgagcctgcacgtgagaaagagcaacagagccgccctgcacctgtacagcaacaccctgaacttccagatcagcgaggtggagcccaagtactacgccgacggcgaggacgcctacgccatgaagagagacctgacccagatggccgacgagctgagaagacacctggagctgaaggagaagggcagacacgtggtgctgggcgccatcgagaacaaggtggagagcaagggcaacagcccccccagcagcggcgaggcctgcagagaggagaagggcctggccgccgaggacagcggcggcgacagcaaggacctgagcgaggtgagcgagaccaccgagagcaccgacgtgaaggacagcagcgaggccagcgacagcgccagctag

SEQ ID NO: 90219 - DNA, 396 bp, synthetic construct
  misc_feature 1..396: note = Description of Artificial Sequence: Synthetic coding sequence
  source 1..396: mol_type = other DNA
atgaacatcagaaacgccagacccgaggacctgatgaacatgcagcactgcaacctgctgtgcctgcccgagaactaccagatgaagtactacttctaccacggcctgagctggccccagctgagctacatcgccgaggacgagaacggcaagatcgtgggctacgtgctggccaagatggaggaggaccccgacgacgtgccccacggccacatcaccagcctggccgtgaagagaagccacagaagactgggcctggcccagaagctgatggaccaggccagcagagccatgatcgagaacttcaacgccaagtacgtgagcctgcacgtgagaaagagaagcgtgaagtggagccccaacaccatgcagatgggcagaacccccatgccctag

SEQ ID NO: 90220 - DNA, 534 bp, synthetic construct
  misc_feature 1..534: note = Description of Artificial Sequence: Synthetic coding sequence
  source 1..534: mol_type = other DNA
atgatcgtggccgagatcaagaacagaaccaagatccacaaggaggacggcgacatcctggccagcaacttcagcgtggacacccaggtggcctacatcctgagcctgggcgtggtgaaggagttcagaaagcacggcatcggcagcctgctgctggagagcctgaaggaccacatcagcaccaccgcccaggaccactgcaaggccatctacctgcacgtgctgaccaccaacaacaccgccatcaacttctacgagaacagagacttcaagcagcaccactacctgccctactactacagcatcagaggcgtgctgaaggacggcttcacctacgtgctgtacatcaacggcggccaccccccctggaccatcctggactacatccagcacctgggcagcgccctggccagcctgagcccctgcagcatcccccacagagtgtacagacaggcccacagcctgctgtgcagcttcctgccctggagcggcatcagcagcaagagcggcatcgagtacagcagaaccatgtag

SEQ ID NO: 90221 - DNA, 729 bp, synthetic construct
  misc_feature 1..729: note = Description of Artificial Sequence: Synthetic coding sequence
  source 1..729: mol_type = other DNA
atgaccgaggtggtgcccagcagcgccctgagcgaggtgagcctgagactgctgtgccacgacgacatcgacaccgtgaagcacctgtgcggcgactggttccccatcgagtaccccgacagctggtacagagacatcaccagcaacaagaagttcttcagcctggccgccacctacagaggcgccatcgtgggcatgatcgtggccgagatcaagaacagaaccaagatccacaaggaggacggcgacatcctggccagcaacttcagcgtggacacccaggtggcctacatcctgagcctgggcgtggtgaaggagttcagaaagcacggcatcggcagcctgctgctggagagcctgaaggaccacatcagcaccaccgcccaggaccactgcaaggccatctacctgcacgtgctgaccaccaacaacaccgccatcaacttctacgagaacagagacttcaagcagcaccactacctgccctactactacagcatcagaggcgtgctgaaggacggcttcacctacgtgctgtacatcaacggcggccaccccccctggaccatcctggactacatccagcacctgggcagcgccctggccagcctgagcccctgcagcatcccccacagagtgtacagacaggcccacagcctgctgtgcagcttcctgccctggagcggcatcagcagcaagagcggcatcgagtacagcagaaccatgtag

SEQ ID NO: 90222 - DNA, 729 bp, synthetic construct; identical to SEQ ID NO: 90221
  misc_feature 1..729: note = Description of Artificial Sequence: Synthetic coding sequence
  source 1..729: mol_type = other DNA

SEQ ID NO: 90223 - DNA, 573 bp, synthetic construct
  misc_feature 1..573: note = Description of Artificial Sequence: Synthetic coding sequence
  source 1..573: mol_type = other DNA
atgaccgaggtggtgcccagcagcgccctgagcgaggtgagcctgagactgctgtgccacgacgacatcgacaccgtgaagcacctgtgcggcgactggttccccatcgagtaccccgacagctggtacagagacatcaccagcaacaagaagttcttcagcctggccgccacctacagaggcgccatcgtgggcatgatcgtggccgagatcaagaacagaaccaagatccacaaggaggacggcgacatcctggccagcaacttcagcgtggacacccaggtggcctacatcctgagcctgggcgtggtgaaggagttcagaaagcacggcatcgagccccacggcctgcaccccgcccccggcctgtgcaccagccagcccgagcccctgctgcacagcgcccagagcctgccccccggcccccagcccgccctgcagctgcccgccatggtgggccacctgttccaggagtggcacagagtgcagcccgaccacgtgatgagcgccggccagcccccccccggccccaccctgagaccccccgccgagcccgccttcctgagcatctag

SEQ ID NO: 90224 - DNA, 750 bp, synthetic construct
  misc_feature 1..750: note = Description of Artificial Sequence: Synthetic coding sequence
  source 1..750: mol_type = other DNA
atgttccccagaagaagaaccgagagaagactgggcgacaccggcaccagaaagaagatcgcctacagaaaggccgtgcccggcggcagaaagtgcggcgccagcctgagctgggagaagagcagcagagagtaccccgacagctggtacagagacatcaccagcaacaagaagttcttcagcctggccgccacctacagaggcgccatcgtgggcatgatcgtggccgagatcaagaacagaaccaagatccacaaggaggacggcgacatcctggccagcaacttcagcgtggacacccaggtggcctacatcctgagcctgggcgtggtgaaggagttcagaaagcacggcatcggcagcctgctgctggagagcctgaaggaccacatcagcaccaccgcccaggaccactgcaaggccatctacctgcacgtgctgaccaccaacaacaccgccatcaacttctacgagaacagagacttcaagcagcaccactacctgccctactactacagcatcagaggcgtgctgaaggacggcttcacctacgtgctgtacatcaacggcggccaccccccctggaccatcctggactacatccagcacctgggcagcgccctggccagcctgagcccctgcagcatcccccacagagtgtacagacaggcccacagcctgctgtgcagcttcctgccctggagcggcatcagcagcaagagcggcatcgagtacagcagaaccatgtag

SEQ ID NO: 90225 - DNA, 492 bp, synthetic construct
  misc_feature 1..492: note = Description of Artificial Sequence: Synthetic coding sequence
  source 1..492: mol_type = other DNA
atggccgtgatcctgggcatcttcggcaccgtgcagtacagaagcagatacctgatcctgtacgccgcctggctggtgctgtgggtgggctggaacgccttcatcatctgcttctacctggaggtgggccagctgagccaggacagagacttcatcatgaccttcaacaccagcctgcacagaagctggtggatggagaacggccccggctgcctggtgacccccgtgctgaacagcagactggccctggaggaccaccacgtgatcagcgtgaccggctgcctgctggactacccctacatcgaggccctgagcagcgccctgcagatcttcctggccctgttcggcttcgtgttcgcctgctacgtgagcaaggtgttcctggaggaggaggacagcttcgacttcatcggcggcttcgacagctacggctaccaggccccccagaagaccagccacctgcagctgcagcccctgtacaccagcggctag

SEQ ID NO: 90226 - DNA, 624 bp, synthetic construct
  misc_feature 1..624: note = Description of Artificial Sequence: Synthetic coding sequence
  source 1..624: mol_type = other DNA
atgggcaagtgcagcggcagatgcaccctggtggccttctgctgcctgcagctggtggccgccctggagagacagatcttcgacttcctgggctaccagtgggcccccatcctggccaacttcctgcacatcatggccgtgatcctgggcatcttcggcaccgtgcagtacagaagcagatacctgatcctgtacgccgcctggctggtgctgtgggtgggctggaacgccttcatcatctgcttctacctggaggtgggccagctgagccaggacagagacttcatcatgaccttcaacaccagcctgcacagaagctggtggatggagaacggccccggctgcctggtgacccccgtgctgaacagcagactggccctggaggaccaccacgtgatcagcgtgaccggctgcctgctggactacccctacatcgaggccctgagcagcgccctgcagatcttcctggccctgttcggcttcgtgttcgcctgctacgtgagcaaggtgttcctggaggaggaggacagcttcgacttcatcggcggcttcgacagctacggctaccaggccccccagaagaccagccacctgcagctgcagcccctgtacaccagcggctag

SEQ ID NO: 90227 - DNA, 411 bp, synthetic construct
  misc_feature 1..411: note = Description of Artificial Sequence: Synthetic coding sequence
  source 1..411: mol_type = other DNA
atggccgtgatcctgggcatcttcggcaccgtgcagtacagaagcagatacctgatcctggacagagacttcatcatgaccttcaacaccagcctgcacagaagctggtggatggagaacggccccggctgcctggtgacccccgtgctgaacagcagactggccctggaggaccaccacgtgatcagcgtgaccggctgcctgctggactacccctacatcgaggccctgagcagcgccctgcagatcttcctggccctgttcggcttcgtgttcgcctgctacgtgagcaaggtgttcctggaggaggaggacagcttcgacttcatcggcggcttcgacagctacggctaccaggccccccagaagaccagccacctgcagctgcagcccctgtacaccagcggctag

SEQ ID NO: 90228 - DNA, 567 bp, synthetic construct
  misc_feature 1..567: note = Description of Artificial Sequence: Synthetic coding sequence
  source 1..567: mol_type = other DNA
atgggctactgcagcggcagatgcaccctgatcttcatctgcggcatgcagctggtgtgcgtgctggagagacagatcttcgacttcctgggctaccagtgggcccccatcctggccaacttcgtgcacatcatcatcgtgatcctgggcctgttcggcaccatccagtacagacccagatacatcaccggctacgccgtgtggctggtgctgtgggtgacctggaacgtgttcgtgatctgcttctacctggaggccggcgacctgagcaaggagaccgacctgatcctgaccttcaacatcagcatgcacagaagctggtggatggagaacggccccggctgcaccgtgaccagcgtgacccccgcccccgactgggcccccgaggaccacagatacatcaccgtgagcggctgcctgctggagtaccagtacatcgaggtggcccacagcagcctgcagatcgtgctggccgtgagcgtgggcagccagcccctgctgctggtgcccctgggcctgttctacttctgcgccaacagcgtgcacaccaacggcatctgcggctag

SEQ ID NO: 90229 - DNA, 627 bp, synthetic construct
  misc_feature 1..627: note = Description of Artificial Sequence: Synthetic coding sequence
  source 1..627: mol_type = other DNA
atgggctactgcagcggcagatgcaccctgatcttcatctgcggcatgcagctggtgtgcgtgctggagagacagatcttcgacttcctgggctaccagtgggcccccatcctggccaacttcgtgcacatcatcatcgtgatcctgggcctgttcggcaccatccagtacagacccagatacatcaccggctacgccgtgtggctggtgctgtgggtgacctggaacgtgttcgtgatctgcttctacctggaggccggcgacctgagcaaggagaccgacctgatcctgaccttcaacatcagcatgcacagaagctggtggatggagaacggccccggctgcaccgtgaccagcgtgacccccgcccccgactgggcccccgaggaccacagatacatcaccgtgagcggctgcctgctggagtaccagtacatcgaggtggcccacagcagcctgcagatcgtgctggccctggccggcttcatctacgcctgctacgtggtgaagtgcatcaccgaggaggaggacagcttcgacttcatcggcggcttcgacagctacggctaccagggcccccagaagaccagccacctgcagctgcagcccatgtacatgagcaagtag

SEQ ID NO: 90230 - DNA, 624 bp, synthetic construct
  misc_feature 1..624: note = Description of Artificial Sequence: Synthetic coding sequence
  source 1..624: mol_type = other DNA
atgggcatcatcagattcctgctgctgtactgccccaccaacatcctgaccgtgtgcgtgctggagagacagatcttcgacttcctgggctaccagtgggcccccatcctggccaacttcgtgcacatcatcatcgtgatcctgggcctgttcggcaccatccagtacagacccagatacatcaccggctacgccgtgtggctggtgctgtgggtgacctggaacgtgttcgtgatctgcttctacctggaggccggcgacctgagcaaggagaccgacctgatcctgaccttcaacatcagcatgcacagaagctggtggatggagaacggccccggctgcaccgtgaccagcgtgacccccgcccccgactgggcccccgaggaccacagatacatcaccgtgagcggctgcctgctggagtaccagtacatcgaggtggcccacagcagcctgcagatcgtgctggccctggccggcttcatctacgcctgctacgtggtgaagtgcatcaccgaggaggaggacagcttcgacttcatcggcggcttcgacagctacggctaccagggcccccagaagaccagccacctgcagctgcagcccatgtacatgagcaagtag

SEQ ID NO: 90231 - DNA, 576 bp, synthetic construct
  misc_feature 1..576: note = Description of Artificial Sequence: Synthetic coding sequence
  source 1..576: mol_type = other DNA
atgaagatcgtgtgcgtgctggagagacagatcttcgacttcctgggctaccagtgggcccccatcctggccaacttcgtgcacatcatcatcgtgatcctgggcctgttcggcaccatccagtacagacccagatacatcaccggctacgccgtgtggctggtgctgtgggtgacctggaacgtgttcgtgatctgcttctacctggaggccggcgacctgagcaaggagaccgacctgatcctgaccttcaacatcagcatgcacagaagctggtggatggagaacggccccggctgcaccgtgaccagcgtgacccccgcccccgactgggcccccgaggaccacagatacatcaccgtgagcggctgcctgctggagtaccagtacatcgaggtggcccacagcagcctgcagatcgtgctggccctggccggcttcatctacgcctgctacgtggtgaagtgcatcaccgaggaggaggacagcttcgacttcatcggcggcttcgacagctacggctaccagggcccccagaagaccagccacctgcagctgcagcccatgtacatgtag

SEQ ID NO: 90232 - DNA, 420 bp, synthetic construct
  misc_feature 1..420: note = Description of Artificial Sequence: Synthetic coding sequence
  source 1..420: mol_type = other DNA
atgggctactgcagcggcagatgcaccctgatcttcatctgcggcatgcagctggtgtgcgtgctggagagacagatcttcgacttcctgggctaccagtgggcccccatcctggccaacttcgtgcacatcatcatcgtgatcctgggcctgttcggcaccatccagtacagacccagatacatcaccggctacgccgtgtggctggtgctgtgggtgacctggaacgtgttcgtgatctgcttctacctggaggccggcgacctgagcaagctggccggcttcatctacgcctgctacgtggtgaagtgcatcaccgaggaggaggacagcttcgacttcatcggcggcttcgacagctacggctaccagggcccccagaagaccagccacctgcagctgcagcccatgtacatgtag

SEQ ID NO: 90233 - DNA, 594 bp, synthetic construct
  misc_feature 1..594: note = Description of Artificial Sequence: Synthetic coding sequence
  source 1..594: mol_type = other DNA
atgggctgctgcaccggcagatgcagcctgatctgcctgtgcgccctgcagctggtgagcgccctggagagacagatcttcgacttcctgggcttccagtgggcccccatcctgggcaacttcctgcacatcatcgtggtgatcctgggcctgttcggcaccatccagtacagacccagatacatcatggtgtacaccgtgtggaccgccctgtgggtgacctggaacgtgttcatcatctgcttctacctggaggtgggcggcctgagcaaggacaccgacctgatgaccttcaacatcagcgtgcacagaagctggtggagagagcacggccccggctgcgtgagaagagtgctgccccccagcgcccacggcatgatggacgactacacctacgtgagcgtgaccggctgcatcgtggacttccagtacctggaggtgatccacagcgccgtgcagatcctgctgagcctggtgggcttcgtgtacgcctgctacgtgatcagcatcagcatggaggaggaggacacctacagctgcgacctgcaggtgtgcaagcacctgttcatccagatgctgcagatcatcgagtag

SEQ ID NO: 90234 - DNA, 594 bp, synthetic construct; identical to SEQ ID NO: 90233
  misc_feature 1..594: note = Description of Artificial Sequence: Synthetic coding sequence
  source 1..594: mol_type = other DNA

SEQ ID NO: 90235 - DNA, 486 bp, synthetic construct
  misc_feature 1..486: note = Description of Artificial Sequence: Synthetic coding sequence
  source 1..486: mol_type = other DNA
atgggctgctgcaccggcagatgcagcctgatctgcctgtgcgccctgcagctggtgagctgggtgttcgacagacagatcttcctgctgagcttccagtgggcccccatcctgggcaacttcctgcacatcatcgtggtgatcctgggcctgttcggcaccatccagtacagacccagatacatcatggtgtacaccgtgtggaccgccctgtgggtgacctggaacgtgttcatcatctgcttctacctggaggtgggcggcctgagcaaggacaccgacctgatgaccttcaacatcagcgtgcacagaagctggtggagagagcacggccccggctgcgtgagaagagtgctgccccccagcgcccacggcatgatggacgactacacctacgtgagcgtgaccggctgcatcgtggacttccagtacctggaggtgatccacagcgccgtgcagatcctgctgagcatcttcttcctgtag

SEQ ID NO: 90236 - DNA, 627 bp, synthetic construct
  misc_feature 1..627: note = Description of Artificial Sequence: Synthetic coding sequence
  source 1..627: mol_type = other DNA
atgggcagctgcagcggcagatgcgccctggtggtgctgtgcgccttccagctggtggccgccctggagagacaggtgttcgacttcctgggctaccagtgggcccccatcctggccaacttcgtgcacatcatcatcgtgatcctgggcctgttcggcaccatccagtacagactgagatacgtgatggtgtacaccctgtgggccgccgtgtgggtgacctggaacgtgttcatcatctgcttctacctggaggtgggcggcctgctgaaggacagcgagctgctgaccttcagcctgagcagacacagaagctggtggagagagagatggcccggctgcctgcacgaggaggtgcccgccgtgggcctgggcgccccccacggccaggccctggtgagcggcgccggctgcgccctggagcccagctacgtggaggccctgcacagctgcctgcagatcctgatcgccctgctgggcttcgtgtgcggctgccaggtggtgagcgtgttcaccgaggaggaggacagcttcgacttcatcggcggcttcgaccccttccccctgtaccacgtgaacgagaagcccagcagcctgctgagcaagcaggtgtacctgcccgcctag

SEQ ID NO: 90237 - DNA, 267 bp, synthetic construct
  misc_feature 1..267: note = Description of Artificial Sequence: Synthetic coding sequence
  source 1..267: mol_type = other DNA
atggccgagagcagaggcagactgtacctgtggatgtgcctggccgccgccctggccagcttcctgatgggcttcatggtgggctggttcatcaagcccctgaaggagaccaccaccagcgtgagataccaccagagcatcagatggaagctggtgagcgagatgaaggccgagaacatcaagagcttcctgagaagcttcaccaagctgccccacctggccggcaccgagcagaacttcctgctggccaagaagatccagacctag

SEQ ID NO: 90238 - DNA, 2223 bp, synthetic construct
  misc_feature 1..2223: note = Description of Artificial Sequence: Synthetic coding sequence
  source 1..2223: mol_type = other DNA
atggccgagagcagaggcagactgtacctgtggatgtgcctggccgccgccctggccagcttcctgatgggcttcatggtgggctggttcatcaagcccctgaaggagaccaccaccagcgtgagataccaccagagcatcagatggaagctggtgagcgagatgaaggccgagaacatcaagagcttcctgagaagcttcaccaagctgccccacctggccggcaccgagcagaacttcctgctggccaagaagatccagacccagtggaagaagttcggcctggacagcgccaagctggtgcactacgacgtgctgctgagctaccccaacgagaccaacgccaactacatcagcatcgtggacgagcacgagaccgagatcttcaagaccagctacctggagcccccccccgacggctacgagaacgtgaccaacatcgtgcccccctacaacgccttcagcgcccagggcatgcccgagggcgacctggtgtacgtgaactacgccagaaccgaggacttcttcaagctggagagagagatgggcatcaactgcaccggcaagatcgtgatcgccagatacggcaagatcttcagaggcaacaaggtgaagaacgccatgctggccggcgccatcggcatcatcctgtacagcgaccccgccgactacttcgcccccgaggtgcagccctaccccaagggctggaacctgcccggcaccgccgcccagagaggcaacgtgctgaacctgaacggcgccggcgaccccctgacccccggctaccccgccaaggagtacaccttcagactggacgtggaggagggcgtgggcatccccagaatccccgtgcaccccatcggctacaacgacgccgagatcctgctgagatacctgggcggcatcgccccccccgacaagagctggaagggcgccctgaacgtgagctacagcatcggccccggcttcaccggcagcgacagcttcagaaaggtgagaatgcacgtgtacaacatcaacaagatcaccagaatctacaacgtggtgggcaccatcagaggcagcgtggagcccgacagatacgtgatcctgggcggccacagagacagctgggtgttcggcgccatcgaccccaccagcggcgtggccgtgctgcaggagatcgccagaagcttcggcaagctgatgagcaagggctggagacccagaagaaccatcatcttcgccagctgggacgccgaggagttcggcctgctgggcagcaccgagtgggccgaggagaacgtgaagatcctgcaggagagaagcatcgcctacatcaacagcgacagcagcatcgagggcaactacaccctgagagtggactgcacccccctgctgtaccagctggtgtacaagctgaccaaggagatccccagccccgacgacggcttcgagagcaagagcctgtacgagagctggctggagaaggaccccagccccgagaacaagaacctgcccagaatcaacaagctgggcagcggcagcgacttcgaggcctacttccagagactgggcatcgccagcggcagagccagatacaccaagaacaagaagaccgacaagtacagcagctaccccgtgtaccacaccatctacgagaccttcgagctggtggagaagttctacgaccccaccttcaagaagcagctgagcgtggcccagctgagaggcgccctggtgtacgagctggtggacagcaagatcatccccttcaacatccaggactacgccgaggccctgaagaactacgccgccagcatctacaacctgagcaagaagcacgaccagcagctgaccgaccacggcgtgagcttcgacagcctgttcagcgccgtgaagaacttcagcgaggccgccagcgacttccacaagagactgatccaggtggacctgaacaaccccatcgccgtgagaatgatgaacgaccagctgatgctgctggagagagccttcatcgaccccctgggcctgcccggcaagctgttctacagacacatcatcttcgcccccagcagccacaacaagtacgccggcgagagcttccccggcatctacgacgccatcttcgacatcgagaacaaggccaacagcagactggcctggaaggaggtgaagaagcacatcagcatcgccgccttcaccatccaggccgccgccggcaccctgaaggaggtgctgtag

SEQ ID NO: 90239 - DNA, 1635 bp, synthetic construct
  misc_feature 1..1635: note = Description of Artificial Sequence: Synthetic coding sequence
  source 1..1635: mol_type = other DNA
atgcagtggaccaaggtgctgggcctgggcctgggcgccgccgccctgctgggcctgggcatcatcctgggccacttcgccatccccaagaaggccaacagcctggccccccaggacctggacctggagatcctggagaccgtgatgggccagctggacgcccacagaatcagagagaacctgagagagctgagcagagagccccacctggccagcagccccagagacgaggacctggtgcagctgctgctgcagagatggaaggaccccgagagcggcctggacagcgccgaggccagcacctacgaggtgctgctgagcttccccagccaggagcagcccaacgtggtggacatcgtgggccccaccggcggcatcatccacagctgccacagaaccgaggagaacgtgaccggcgagcagggcggccccgacgtggtgcagccctacgccgcctacgcccccagcggcaccccccagggcctgctggtgtacgccaacagaggcgccgaggaggacttcaaggagctgcagacccagggcatcaagctggagggcaccatcgccctgaccagatacggcggcgtgggcagaggcgccaaggccgtgaacgccgccaagcacggcgtggccggcgtgctggtgtacaccgaccccgccgacatcaacgacggcctgagcagccccgacgagaccttccccaacagctggtacctgccccccagcggcgtggagagaggcagctactacgagtacttcggcgaccccctgaccccctacctgcccgccgtgcccagcagcttcagagtggacctggccaacgtgagcggcttcccccccatccccacccagcccatcggcttccaggacgccagagacctgctgtgcaacctgaacggcaccctggcccccgccacctggcagggcgccctgggctgccactacagactgggccccggcttcagacccgacggcgacttccccgccgacagccaggtgaacgtgagcgtgtacaacagactggagctgagaaacagcagcaacgtgctgggcatcatcagaggcgccgtggagcccgacagatacgtgctgtacggcaaccacagagacagctgggtgcacggcgccgtggaccccagcagcggcaccgccgtgctgctggagctgagcagagtgctgggcaccctgctgaagaagggcacctggagacccagaagaagcatcgtgttcgccagctggggcgccgaggagttcggcctgatcggcagcaccgagttcaccgaggagttcttcaacaagctgcaggagagaaccgtggcctacatcaacgtggacatcagcgtgttcgccaacgccaccctgagagtgcagggcaccccccccgtgcagagcgtggtgttcagcgccaccaaggagatcagaagccccggccccggcgacctgagcatctacgacaactggatcagatacttcaacagaagcagccccgtgtacggcctggtgcccagagccagactgcagcccggcagcaccccccccaccacccagcccctgacccccctgaccatgtggaccagcttctggaccagagccagcgccgccatcagactgtggcccggccagagaggcgtgtag

SEQ ID NO: 90240 - DNA, 1569 bp, synthetic construct
  misc_feature 1..1569: note = Description of Artificial Sequence: Synthetic coding sequence
  source 1..1569: mol_type = other DNA
atgcagtggaccaaggtgctgggcctgggcctgggcgccgccgccctgctgggcctgggcatcatcctgggccacttcgccatccccaagaaggccaacagcctggccccccaggacctggacctggagatcctggagaccgtgatgggccagctggacgcccacagaatcagagagaacctgagagagctgagcagagagccccacctggccagcagccccagagacgaggacctggtgcagctgctgctgcagagatggaaggaccccgagagcggcctggacagcgccgaggccagcacctacgaggtgctgctgagcttccccagccaggagcagcccaacgtggtggacatcgtgggccccaccggcggcatcatccacagctgccacagaaccgaggagaacgtgaccggcgagcagggcggccccgacgtggtgcagccctacgccgcctacgcccccagcggcaccccccagggcctgctggtgtacgccaacagaggcgccgaggaggacttcaaggagctgcagacccagggcatcaagctggagggcaccatcgccctgaccagatacggcggcgtgggcagaggcgccaaggccgtgaacgccgccaagcacggcgtggccggcgtgctggtgtacaccgaccccgccgacatcaacgacggcctgagcagccccgacgagaccttccccaacagctggtacctgccccccagcggcgtggagagaggcagctactacgagtacttcggcgaccccctgaccccctacctgcccgccgtgcccagcagcttcagagtggacctggccaacgtgagcggcttcccccccatccccacccagcccatcggcttccaggacgccagagacctgctgtgcaacctgaacggcaccctggcccccgccacctggcagggcgccctgggctgccactacagactgggccccggcttcagacccgacggcgacttccccgccgacagccaggtgaacgtgagcgtgtacaacagactggagctgagaaacagcagcaacgtgctgggcatcatcagaggcgccgtggagcccgacagatacgtgctgtacggcaaccacagagacagctgggtgcacggcgccgtggaccccagcagcggcaccgccgtgctgctggagctgagcagagtgctgggcaccctgctgaagaagggcacctggagacccagaagaagcatcgtgttcgccagctggggcgccgaggagttcggcctgatcggcagcaccgagttcaccgaggagttcttcaacaagctgcaggagagaaccgtggcctacatcaacgtggacatcagcgtgttcgccaacgccaccctgagagtgcagggcaccccccccgtgcagagcgtggtgttcagcgccaccaaggagatcagaagccccggccccggcgacctgagcatctacgacaactggatcagatacttcaacagaagcagccccgtgtacggcctggtgcccagactgcagcagcccagcggctgcggccccgacagcggcgagtgcgacagccccgcccagtag

SEQ ID NO: 90241 - DNA, 2223 bp, synthetic construct
  misc_feature 1..2223: note = Description of Artificial Sequence: Synthetic coding sequence
  source 1..2223: mol_type = other DNA
atgcagtggaccaaggtgctgggcctgggcctgggcgccgccgccctgctgggcctgggcatcatcctgggccacttcgccatccccaagaaggccaacagcctggccccccaggacctggacctggagatcctggagaccgtgatgggccagctggacgcccacagaatcagagagaacctgagagagctgagcagagagccccacctggccagcagccccagagacgaggacctggtgcagctgctgctgcagagatggaaggaccccgagagcggcctggacagcgccgaggccagcacctacgaggtgctgctgagcttccccagccaggagcagcccaacgtggtggacatcgtgggccccaccggcggcatcatccacagctgccacagaaccgaggagaacgtgaccggcgagcagggcggccccgacgtggtgcagccctacgccgcctacgcccccagcggcaccccccagggcctgctggtgtacgccaacagaggcgccgaggaggacttcaaggagctgcagacccagggcatcaagctggagggcaccatcgccctgaccagatacggcggcgtgggcagaggcgccaaggccgtgaacgccgccaagcacggcgtggccggcgtgctggtgtacaccgaccccgccgacatcaacgacggcctgagcagccccgacgagaccttccccaacagctggtacctgccccccagcggcgtggagagaggcagctactacgagtacttcggcgaccccctgaccccctacctgcccgccgtgcccagcagcttcagagtggacctggccaacgtgagcggcttcccccccatccccacccagcccatcggcttccaggacgccagagacctgctgtgcaacctgaacggcaccctggcccccgccacctggcagggcgccctgggctgccactacagactgggccccggcttcagacccgacggcgacttccccgccgacagccaggtgaacgtgagcgtgtacaacagactggagctgagaaacagcagcaacgtgctgggcatcatcagaggcgccgtggagcccgacagatacgtgctgtacggcaaccacagagacagctgggtgcacggcgccgtggaccccagcagcggcaccgccgtgctgctggagctgagcagagtgctgggcaccctgctgaagaagggcacctggagacccagaagaagcatcgtgttcgccagctggggcgccgaggagttcggcctgatcggcagcaccgagttcaccgaggagttcttcaacaagctgcaggagagaaccgtggcctacatcaacgtggacatcagcgtgttcgccaacgccaccctgagagtgcagggcaccccccccgtgcagagcgtggtgttcagcgccaccaaggagatcagaagccccggccccggcgacctgagcatctacgacaactggatcagatacttcaacagaagcagccccgtgtacggcctggtgcccagcctgggcagcctgggcgccggcagcgactacgcccccttcgtgcacttcctgggcatcagcagcatggacatcgcctacacctacgacagaagcaagaccagcgccagaatctaccccacctaccacaccgccttcgacaccttcgactacgtggacaagttcctggaccccggcttcagcagccaccaggccgtggccagaaccgccggcagcgtgatcctgagactgagcgacagcttcttcctgcccctgaaggtgagcgactacagcgagaccctgagaagcttcctgcaggccgcccagcaggacctgggcgccctgctggagcagcacagcatcagcctgggccccctggtgaccgccgtggagaagttcgaggccgaggccgccgccctgggccagagaatcagcaccctgcagaagggcagccccgaccccctgcaggtgagaatgctgaacgaccagctgatgctgctggagagaaccttcctgaaccccagagccttccccgaggagagatactacagccacgtgctgtgggcccccagaaccggcagcgtggtgaccttccccggcctgagcaacgcctgcagcagagccagagacaccgccagcggcagcgaggcctgggccgaggtgcagagacagctgagcatcgtggtgaccgccctggagggcgccgccgccaccctgagacccgtggccgacctgtag

SEQ ID NO: 90242 - DNA, 2220 bp, synthetic construct
  misc_feature 1..2220: note = Description of Artificial Sequence: Synthetic coding sequence
  source 1..2220: mol_type = other DNA
atgcagtggaccaaggtgctgggcctgggcctgggcgccgccgccctgctgggcctgggcatcatcctgggccacttcgccatccccaagaaggccaacagcctggccccccaggacctggacctggagatcctggagaccgtgatgggccagctggacgcccacagaatcagagagaacctgagagagctgagcagagagccccacctggccagcagccccagagacgaggacctggtgcagctgctgctgcagagatggaaggaccccgagagcggcctggacagcgccgaggccagcacctacgaggtgctgctgagcttccccagccaggagcagcccaacgtggtggacatcgtgggccccaccggcggcatcatccacagctgccacagaaccgaggagaacgtgaccggcgagcagggcggccccgacgtggtgcagccctacgccgcctacgcccccagcggcaccccccagggcctgctggtgtacgccaacagaggcgccgaggaggacttcaaggagctgcagacccagggcatcaagctggagggcaccatcgccctgaccagatacggcggcgtgggcagaggcgccaaggccgtgaacgccgccaagcacggcgtggccggcgtgctggtgtacaccgaccccgccgacatcaacgacggcctgagcagccccgacgagaccttccccaacagctggtacctgccccccagcggcgtggagagaggcagctactacgagtacttcggcgaccccctgaccccctacctgcccgccgtgcccagcagcttcagagtggacctggccaacgtgagcggcttcccccccatccccacccagcccatcggcttccaggacgccagagacctgctgtgcaacctgaacggcaccctggcccccgccacctggcagggcgccctgggctgccactacagactgggccccggcttcagacccgacggcgacttccccgccgacagccaggtgaacgtgagcgtgtacaacagactggagctgagaaacagcagcaacgtgctgggcatcatcagaggcgccgtggagcccgacagatacgtgctgtacggcaaccacagagacagctgggtgcacggcgccgtggaccccagcagcggcaccgccgtgctgctggagctgagcagagtgctgggcaccctgctgaagaagggcacctggagacccagaagaagcatcgtgttcgccagctggggcgccgaggagttcggcctgatcggcagcaccgagttcaccgaggagttcttcaacaagctgcaggagagaaccgtggcctacatcaacgtggacatcagcgtgttcgccaacgccaccctgagagtgcagggcaccccccccgtgcagagcgtggtgttcagcgccaccaaggagatcagaagccccggccccggcgacctgagcatctacgacaactggatcagatacttcaacagaagcagccccgtgtacggcctggtgcccagcctgggcagcctgggcgccggcagcgactacgcccccttcgtgcacttcctgggcatcagcagcatggacatcgcctacacctacgacagaagcaagaccagcgccagaatctaccccacctaccacaccgccttcgacaccttcgactacgtggacaagttcctggaccccggcttcagcagccaccaggccgtggccagaaccgccggcagcgtgatcctgagactgagcgacagcttcttcctgcccctgaaggtgagcgactacagcgagaccctgagaagcttcctgcaggccgcccagcaggacctgggcgccctgctggagcagcacagcatcagcctgggccccctggtgaccgccgtggagaagttcgaggccgaggccgccgccctgggccagagaatcagcaccctgcagaagggcagccccgaccccctgcaggtgagaatgctgaacgaccagctgatgctgctggagagaaccttcctgaaccccagagccttccccgaggagagatactacagccacgtgctgtgggcccccagaggcctgagaagccacatccccggcctgagcaacgcctgcagcagagccagagacaccgccagcggcagcgaggcctgggccgaggtgcagagacagctgagcatcgtggtgaccgccctggagggcgccgccgccaccctgagacccgtggccgacctgtag

SEQ ID NO: 90243 - DNA, 405 bp, synthetic construct
  misc_feature 1..405: note = Description of Artificial Sequence: Synthetic coding sequence
  source 1..405: mol_type = other DNA
atggagatcagcaagaagatcaagacccagtggaccagcctgggcctggaggacgtgcagttcgtgaactacagcgtgctgctggacctgcccggccccagccccagcaccgtgaccctgagcagcagcggccagtgcttccaccccaacggccagccctgcagcgaggaggccagaaaggacagcagccaggacctgctgtacagctacgccgcctacagcgccaagggcaccctgaaggccgaggtgatcgacgtgagctacggcatggccgacgacctgaagagaatcagaaagatcaagaacgtgaccaaccagatcgccctgctgaagctgggcaagctgcccctgctgtacaagatgaaggtgctggacaaggccgaccagaccagccccctgtactag

SEQ ID NO: 90244 - DNA, 2388 bp, synthetic construct
  misc_feature 1..2388: note = Description of Artificial Sequence: Synthetic coding sequence
  source 1..2388: mol_type = other DNA
atgggcgagaacgaggccagcctgcccaacaccagcctgcagggcaagaagatggcctaccagaaggtgcacgccgaccagagagcccccggccacagccagtacctggacaacgacgacctgcaggccaccgccctggacctggagtgggacatggagaaggagctggaggagagcggcttcgaccagttccagctggacggcgccgagaaccagaacctgggccacagcgagaccatcgacctgaacctggacagcatccagcccgccaccagccccaagggcagattccagagactgcaggaggagagcgactacatcacccactacaccagaagcgcccccaagagcaacagatgcaacttctgccacgtgctgaagatcctgtgcaccgccaccatcctgttcatcttcggcatcctgatcggctactacgtgcacaccaactgccccagcgacgcccccagcagcggcaccgtggacccccagctgtaccaggagatcctgaagaccatccaggccgaggacatcaagaagagcttcagaaacctggtgcagctgtacaagaacgaggacgacatggagatcagcaagaagatcaagacccagtggaccagcctgggcctggaggacgtgcagttcgtgaactacagcgtgctgctggacctgcccggccccagccccagcaccgtgaccctgagcagcagcggccagtgcttccaccccaacggccagccctgcagcgaggaggccagaaaggacagcagccaggacctgctgtacagctacgccgcctacagcgccaagggcaccctgaaggccgaggtgatcgacgtgagctacggcatggccgacgacctgaagagaatcagaaagatcaagaacgtgaccaaccagatcgccctgctgaagctgggcaagctgcccctgctgtacaagctgagcagcctggagaaggccggcttcggcggcgtgctgctgtacatcgacccctgcgacctgcccaagaccgtgaaccccagccacgacaccttcatggtgagcctgaaccccggcggcgaccccagcacccccggctaccccagcgtggacgagagcttcagacagagcagaagcaacctgaccagcctgctggtgcagcccatcagcgcccccctggtggccaagctgatcagcagccccaaggccagaaccaagaacgaggcctgcagcagcctggagctgcccaacaacgagatcagagtggtgagcatgcaggtgcagaccgtgaccaagctgaagaccgtgaccaacgtggtgggcttcgtgatgggcctgaccagccccgacagatacatcatcgtgggcagccaccaccacaccgcccacagctacaacggccaggagtgggccagcagcaccgccatcatcaccgccttcatcagagccctgatgagcaaggtgaagagaggctggagacccgacagaaccatcgtgttctgcagctggggcggcaccgccttcggcaacatcggcagctacgagtggggcgaggacttcaagaaggtgctgcagaagaacgtggtggcctacatcagcctgcacagccccatcagaggcaacagcagcctgtaccccgtggccagccccagcctgcagcagctggtggtggagaagaacaacttcaactgcaccagaagagcccagtgccccgagaccaacatcagcagcatccagatccagggcgacgccgactacttcatcaaccacctgggcgtgcccatcgtgcagttcgcctacgaggacatcaagaccctggagggccccagcttcctgagcgaggccagattcagcaccagagccaccaagatcgaggagatggaccccagcttcaacctgcacgagaccatcaccaagctgagcggcgaggtgatcctgcagatcgccaacgagcccgtgctgcccttcaacgccctggacatcgccctggaggtgcagaacaacctgaagggcgaccagcccaacacccaccagctgctggccatggccctgagactgagagagagcgccgagctgttccagagcgacgagatgagacccgccaacgaccccaaggagagagcccccatcagaatcagaatgctgaacgacatcctgcaggacatggagaagagcttcctggtgaagcaggccccccccggcttctacagaaacatcctgtaccacctggacgagaagaccagcagattcagcatcctgatcgaggcctgggagcactgcaagcccctggccagcaacgagaccctgcaggaggccctgagcgaggtgctgaacagcatcaacagcgcccaggtgtacttcaaggccggcctggacgtgttcaagagcgtgctggacggcaagaactag

SEQ ID NO: 90245 - DNA, 1236 bp, synthetic construct
  misc_feature 1..1236: note = Description of Artificial Sequence: Synthetic coding sequence
  source 1..1236: mol_type = other DNA
atgctgctgaagaccgtgctgctgctgggccacgtggcccaggtgctgatgctggacaacggcctgctgcagaccccccccatgggctggctggcctgggagagattcagatgcaacatcaactgcgacgaggaccccaagaactgcatcagcgagcagctgttcatggagatggccgacagaatggcccaggacggctggagagacatgggctacacctacctgaacatcgacgactgctggatcggcggcagagacgccagcggcagactgatgcccgaccccaagagattcccccacggcatccccttcctggccgactacgtgcacagcctgggcctgaagctgggcatctacgccgacatgggcaacttcacctgcatgggctaccccggcaccaccctggacaaggtggtgcaggacgcccagaccttcgccgagtggaaggtggacatgctgaagctggacggctgcttcagcacccccgaggagagagcccagggctaccccaagatggccgccgccctgaacgccaccggcagacccatcgccttcagctgcagctggcccgcctacgagggcggcctgccccccagagtgaactacagcctgctggccgacatctgcaacctgtggagaaactacgacgacatccaggacagctggtggagcgtgctgagcatcctgaactggttcgtggagcaccaggacatcctgcagcccgtggccggccccggccactggaacgaccccgacatgctgctgatcggcaacttcggcctgagcctggagcagagcagagcccagatggccctgtggaccgtgctggccgcccccctgctgatgagcaccgacctgagaaccatcagcgcccagaacatggacatcctgcagaaccccctgatgatcaagatcaaccaggaccccctgggcatccagggcagaagaatccacaaggagaagagcctgatcgaggtgtacatgagacccctgagcaacaaggccagcgccctggtgttcttcagctgcagaaccgacatgccctacagataccacagcagcctgggccagctgaacttcaccggcagcgtgatctacgaggcccaggacgtgtacagcggcgacatcatcagcggcctgagagacgagaccaacttcaccgtgatcatcaaccccagcggcgtggtgatgtggtacctgtaccccatcaagaacctggagatgagccagcagtag

SEQ ID NO: 90246 - DNA, 1236 bp, synthetic construct; identical to SEQ ID NO: 90245
  misc_feature 1..1236: note = Description of Artificial Sequence: Synthetic coding sequence
  source 1..1236: mol_type = other DNA

SEQ ID NO: 90247 - DNA, 1236 bp, synthetic construct; identical to SEQ ID NO: 90245
  misc_feature 1..1236: note = Description of Artificial Sequence: Synthetic coding sequence
  source 1..1236: mol_type = other DNA

SEQ ID NO: 90248 - DNA, 1035 bp, synthetic construct
  misc_feature 1..1035: note = Description of Artificial Sequence: Synthetic coding sequence
  source 1..1035: mol_type = other DNA
atggccgccatctacggcggcgtggagggcggcggcaccagaagcgaggtgctgctggtgagcgaggacggcaagatcctggccgaggccgacggcctgagcaccaaccactggctgatcggcaccgacaagtgcgtggagagaatcaacgagatggtgaacagagccaagagaaaggccggcgtggaccccctggtgcccctgagaagcctgggcctgagcctgagcggcggcgaccaggaggacgccggcagaatcctgatcgaggagctgagagacagattcccctacctgagcgagagctacctgatcaccaccgacgccgccggcagcatcgccaccgccacccccgacggcggcgtggtgctgatcagcggcaccggcagcaactgcagactgatcaaccccgacggcagcgagagcggctgcggcggctggggccacatgatgggcgacgagggcagcgcctactggatcgcccaccaggccgtgaagatcgtgttcgacagcatcgacaacctggaggccgccccccacgacatcggctacgtgaagcaggccatgttccactacttccaggtgcccgacagactgggcatcctgacccacctgtacagagacttcgacaagtgcagattcgccggcttctgcagaaagatcgccgagggcgcccagcagggcgaccccctgagcagatacatcttcagaaaggccggcgagatgctgggcagacacatcgtggccgtgctgcccgagatcgaccccgtgctgttccagggcaagatcggcctgcccatcctgtgcgtgggcagcgtgtggaagagctgggagctgctgaaggagggcttcctgctggccctgacccagggcagagagatccaggcccagaacttcttcagcagcttcaccctgatgaagctgagacacagcagcgccctgggcggcgccagcctgggcgccagacacatcggccacctgctgcccatggactacagcgccaacgccatcgccttctacagctacaccttcagctag

SEQ ID NO: 90249 - DNA, 1173 bp, synthetic construct
  misc_feature 1..1173: note = Description of Artificial Sequence: Synthetic coding sequence
  source 1..1173: mol_type = other DNA
atgagaaccagaaccggcagccagctggccgccagagaggtgaccggcagcggcgccgtgcccagacagctggagggcagaagatgccaggccggcagagacgccaacggcggcaccagcagcgacggcagcagcagcatggccgccatctacggcggcgtggagggcggcggcaccagaagcgaggtgctgctggtgagcgaggacggcaagatcctggccgaggccgacggcctgagcaccaaccactggctgatcggcaccgacaagtgcgtggagagaatcaacgagatggtgaacagagccaagagaaaggccggcgtggaccccctggtgcccctgagaagcctgggcctgagcctgagcggcggcgaccaggaggacgccggcagaatcctgatcgaggagctgagagacagattcccctacctgagcgagagctacctgatcaccaccgacgccgccggcagcatcgccaccgccacccccgacggcggcgtggtgctgatcagcggcaccggcagcaactgcagactgatcaaccccgacggcagcgagagcggctgcggcggctggggccacatgatgggcgacgagggcagcgcctactggatcgcccaccaggccgtgaagatcgtgttcgacagcatcgacaacctggaggccgccccccacgacatcggctacgtgaagcaggccatgttccactacttccaggtgcccgacagactgggcatcctgacccacctgtacagagacttcgacaagtgcagattcgccggcttctgcagaaagatcgccgagggcgcccagcagggcgaccccctgagcagatacatcttcagaaaggccggcgagatgctgggcagacacatcgtggccgtgctgcccgagatcgaccccgtgctgttccagggcaagatcggcctgcccatcctgtgcgtgggcagcgtgtggaagagctgggagctgctgaaggagggcttcctgctggccctgacccagggcagagagatccaggcccagaacttcttcagcagcttcaccctgatgaagctgagacacagcagcgccctgggcggcgccagcctgggcgccagacacatcggccacctgctgcccatggactacagcgccaacgccatcgccttctacagctacaccttcagctag

SEQ ID NO: 90250 - DNA, 1548 bp, synthetic construct
  misc_feature 1..1548: note = Description of Artificial Sequence: Synthetic coding sequence
  source 1..1548: mol_type = other DNA
atggccaccagcaccggcagatggctgctgctgagactggccctgttcggcttcctgtgggaggccagcggcggcctggacagcggcgccagcagagacgacgacctgctgctgccctaccccagagccagagccagactgcccagagactgcaccagagtgagagccggcaacagagagcacgagagctggccccccccccccgccacccccggcgccggcggcctggccgtgagaaccttcgtgagccacttcagagacagagccgtggccggccacctgaccagagccgtggagcccctgagaaccttcagcgtgctggagcccggcggccccggcggctgcgccgccagaagaagagccaccgtggaggagaccgccagagccgccgactgcagagtggcccagaacggcggcttcttcagaatgaacagcggcgagtgcctgggcaacgtggtgagcgacgagagaagagtgagcagcagcggcggcctgcagaacgcccagttcggcatcagaagagacggcaccctggtgaccggctacctgagcgaggaggaggtgctggacaccgagaaccccttcgtgcagctgctgagcggcgtggtgtggctgatcagaaacggcagcatctacatcaacgagagccaggccaccgagtgcgacgagacccaggagaccggcagcttcagcaagttcgtgaacgtgatcagcgccagaaccgccatcggccacgacagaaagggccagctggtgctgttccacgccgacggccagaccgagcagagaggcatcaacctgtgggagatggccgagttcctgctgaagcaggacgtggtgaacgccatcaacctggacggcggcggcagcgccaccttcgtgctgaacggcaccctggccagctaccccagcgaccactgccaggacaacatgtggagatgccccagacaggtgagcaccgtggtgtgcgtgcacgagcccagatgccagccccccgactgccacggccacggcacctgcgtggacggccactgccagtgcaccggccacttctggagaggccccggctgcgacgagctggactgcggccccagcaactgcagccagcacggcctgtgcaccgagaccggctgcagatgcgacgccggctggaccggcagcaactgcagcgaggagtgccccctgggctggcacggccccggctgccagagaccctgcaagtgcgagcaccactgcccctgcgaccccaagaccggcaactgcagcgtgagcagagtgaagcagtgcctgcagccccccgaggccaccctgagagccggcgagctgagcttcttcaccagaaccgcctggctggccctgaccctggccctggccttcctgctgctgatcagcaccgccgccaacctgagcctgctgctgagcagagccgagagaaacagaagactgcacggcgactacgcctaccaccccctgcaggagatgaacggcgagcccctggccgccgagaaggagcagcccggcggcgcccacaaccccttcaaggactag

SEQ ID NO: 90251 - DNA, 1446 bp, synthetic construct
  misc_feature 1..1446: note = Description of Artificial Sequence: Synthetic coding sequence
  source 1..1446: mol_type = other DNA
atggccaccagcaccggcagatggctgctgctgagactggccctgttcggcttcctgtgggaggccagcggcggcctggacagcggcgccagcagagacgacgacctgctgctgccctaccccagagccagagccagactgcccagagactgcaccagagtgagagccggcaacagagagcacgagagctggccccccccccccgccacccccggcgccggcggcctggccgtgagaaccttcgtgagccacttcagagacagagccgtggccggccacctgaccagagccgtggagcccctgagaaccttcagcgtgctggagcccggcggccccggcggctgcgccgccagaagaagagccaccgtggaggagaccgccagagccgccgactgcagagtggcccagaacggcggcttcttcagaatgaacagcggcgagtgcctgggcaacgtggtgagcgacgagagaagagtgagcagcagcggcggcctgcagaacgcccagttcggcatcagaagagacggcaccctggtgaccggctacctgagcgaggaggaggtgctggacaccgagaaccccttcgtgcagctgctgagcggcgtggtgtggctgatcagaaacggcagcatctacatcaacgagagccaggccaccgagtgcgacgagacccaggagaccggcagcttcagcaagttcgtgaacgtgatcagcgccagaaccgccatcggccacgacagaaagggccagctggtgctgttccacgccgacggccagaccgagcagagaggcatcaacctgtgggagatggccgagttcctgctgaagcaggacgtggtgaacgccatcaacctggacggcggcggcagcgccaccttcgtgctgaacggcaccctggccagctaccccagcgaccactgccaggacaacatgtggagatgccccagacaggtgagcaccgtggtgtgcgtgcacgagcccagatgccagccccccgactgccacggccacggcacctgcgtggacggccactgccagtgcaccggccacttctggagaggccccggctgcgacgagctggactgcggccccagcaactgcagccagcacggcctgtgcaccgagaccggctgcagatgcgacgccggctggaccggcagcaactgcagcgaggtgaagcagtgcctgcagccccccgaggccaccctgagagccggcgagctgagcttcttcaccagaaccgcctggctggccctgaccctggccctggccttcctgctgctgatcagcaccgccgccaacctgagcctgctgctgagcagagccgagagaaacagaagactgcacggcgactacgcctaccaccccctgcaggagatgaacggcgagcccctggccgccgagaaggagcagcccggcggcgcccacaaccccttcaaggactag

SEQ ID NO: 90252 - DNA, 2514 bp, synthetic construct
  misc_feature 1..2514: note = Description of Artificial Sequence: Synthetic coding sequence
  source 1..2514: mol_type = other DNA
atggccgagcccagccaggcccccacccccgcccccgccgcccagcccagacccctgcagagccccgcccccgcccccacccccacccccgcccccagccccgccagcgcccccatccccacccccacccccgcccccgcccccgcccccgccgccgcccccgccggcagcaccggcaccggcggccccggcgtgggcagcggcggcgccggcagcggcggcgaccccgccagacccggcctgagccagcagcagagagccagccagagaaaggcccaggtgagaggcctgcccagagccaagaagctggagaagctgggcgtgttcagcgcctgcaaggccaacgagacctgcaagtgcaacggctggaagaaccccaagccccccaccgcccccagaatggacctgcagcagcccgccgccaacctgagcgagctgtgcagaagctgcgagcaccccctggccgaccacgtgagccacctggagaacgtgagcgaggacgagatcaacagactgctgggcatggtggtggacgtggagaacctgttcatgagcgtgcacaaggaggaggacaccgacaccaagcaggtgtacttctacctgttcaagctgctgagaaagtgcatcctgcagatgaccagacccgtggtggagggcagcctgggcagcccccccttcgagaagcccaacatcgagcagggcgtgctgaacttcgtgcagtacaagttcagccacctggcccccagagagagacagaccatgttcgagctgagcaagatgttcctgctgtgcctgaactactggaagctggagacccccgcccagttcagacagagaagccaggccgaggacgtggccacctacaaggtgaactacaccagatggctgtgctactgccacgtgccccagagctgcgacagcctgcccagatacgagaccacccacgtgttcggcagaagcctgctgagaagcatcttcaccgtgaccagaagacagctgctggagaagttcagagtggagaaggacaagctggtgcccgagaagagaaccctgatcctgacccacttccccaagttcctgagcatgctggaggaggagatctacggcgccaacagccccatctgggagagcggcttcaccatgccccccagcgagggcacccagctggtgcccagacccgccagcgtgagcgccgccgtggtgcccagcacccccatcttcagccccagcatgggcggcggcagcaacagcagcctgagcctggacagcgccggcgccgagcccatgcccggcgagaagagaaccctgcccgagaacctgaccctggaggacgccaagagactgagagtgatgggcgacatccccatggagctggtgaacgaggtgatgctgaccatcaccgaccccgccgccatgctgggccccgagaccagcctgctgagcgccaacgccgccagagacgagaccgccagactggaggagagaagaggcatcatcgagttccacgtgatcggcaacagcctgacccccaaggccaacagaagagtgctgctgtggctggtgggcctgcagaacgtgttcagccaccagctgcccagaatgcccaaggagtacatcgccagactggtgttcgaccccaagcacaagaccctggccctgatcaaggacggcagagtgatcggcggcatctgcttcagaatgttccccacccagggcttcaccgagatcgtgttctgcgccgtgaccagcaacgagcaggtgaagggctacggcacccacctgatgaaccacctgaaggagtaccacatcaagcacaacatcctgtacttcctgacctacgccgacgagtacgccatcggctacttcaagaagcagggcttcagcaaggacatcaaggtgcccaagagcagatacctgggctacatcaaggactacgagggcgccaccctgatggagtgcgagctgaaccccagaatcccctacaccgagctgagccacatcatcaagaagcagaaggagatcatcaagaagctgatcgagagaaagcaggcccagatcagaaaggtgtaccccggcctgagctgcttcaaggagggcgtgagacagatccccgtggagagcgtgcccggcatcagagagaccggctggaagcccctgggcaaggagaagggcaaggagctgaaggaccccgaccagctgtacaccaccctgaagaacctgctggcccagatcaagagccaccccagcgcctggcccttcatggagcccgtgaagaagagcgaggcccccgactactacgaggtgatcagattccccatcgacctgaagaccatgaccgagagactgagaagcagatactacgtgaccagaaagctgttcgtggccgacctgcagagagtgatcgccaactgcagagagtacaacccccccgacagcgagtactgcagatgcgccagcgccctggagaagttcttctacttcaagctgaaggagggcggcctgatcgacaagtag

SEQ ID NO: 90253 - DNA, 1260 bp, synthetic construct
  misc_feature 1..1260: note = Description of Artificial Sequence: Synthetic coding sequence
  source 1..1260: mol_type = other DNA
ccccagtgctgcctgcacagcagaggcatgttccccagactgagccccgtggacaccgaggccgtgtggctgctgcagggctggctgttccagcaccagccccagttctggggccccgcccagatcagagccgtgctgggcgccgtgcccagaggcagactgctggtgctggacctgttcgccgagagccagcccgtgtacaccagaaccgccagcttccagggccagcccttcatctggtgcatgctgcacaacttcggcggcaaccacggcctgttcggcgccctggaggccgtgaacggcggccccgaggccgccagactgttccccaacagcaccatggtgggcaccggcatggcccccgagggcatcagccagaacgaggtggtgtacagcctgatggccgagctgggctggagaaaggaccccgtgcccgacctggccgcctgggtgaccagcttcgccgccagaagatacggcgtgagccaccccgacgccggcgccgcctggagactgctgctgagaagcgtgtacaactgcagcggcgaggcctgcagaggccacaacagaagccccctggtgagaagacccagcctgcagatgaacaccagcatctggtacaacagaagcgacgtgttcgaggcctggagactgctgctgaccagcgcccccagcctggccaccagccccgccttcagatacgacctgctggacctgaccagacaggccgtgcaggagctggtgagcctgtactacgaggaggccagaagcgcctacctgagcaaggagctggccagcctgctgagagccggcggcgtgctggcctacgagctgctgcccgccctggacgaggtgctggccagcgacagcagattcctgctgggcagctggctggagcaggccagagccgccgccgtgagcgaggccgaggccgacttctacgagcagaacagcagataccagctgaccctgtggggccccgagggcaacatcctggactacgccaacaagcagctggccggcctggtggccaactactacacccccagatggagactgttcctggaggccctggtggacagcgtggcccagggcatccccttccagcagcaccagttcgacaagaacgtgttccagctggagcaggccttcgtgctgagcaagcagagataccccagccagcccagaggcgacaccgtggacctggccaagaagatcttcctgaagtactaccccagatgggtggccggcagctggtag

SEQ ID NO: 90254 - DNA, 963 bp, synthetic construct
  misc_feature 1..963: note = Description of Artificial Sequence: Synthetic coding sequence
  source 1..963: mol_type = other DNA
atggccttccccaagaagaagctgcagggcctggtggccgccaccatcacccccatgaccgagaacggcgagatcaacttcagcgtgatcggccagtacgtggactacctggtgaaggagcagggcgtgaagaacatcttcgtgaacggcaccaccggcgagggcctgagcctgagcgtgagcgagagaagacaggtggccgaggagtgggtgaccaagggcaaggacaagctggaccaggtgatcatccacgtgggcgccctgagcctgaaggagagccaggagctggcccagcacgccgccgagatcggcgccgacggcatcgccgtgatcgcccccttcttcctgaagccctggaccaaggacatcctgatcaacttcctgaaggaggtggccgccgccgcccccgccctgcccttctactactaccacatccccgccctgaccggcgtgaagatcagagccgaggagctgctggacggcatcctggacaagatccccaccttccagggcctgaagttcagcgacaccgacctgctggacttcggccagtgcgtggaccagaacagacagcagcagttcgccttcctgttcggcgtggacgagcagctgctgagcgccctggtgatgggcgccaccggcgccgtgggcagcacctacaactacctgggcaagaagaccaaccagatgctggaggccttcgagcagaaggacttcagcctggccctgaactaccagttctgcatccagagattcatcaacttcgtggtgaagctgggcttcggcgtgagccagaccaaggccatcatgaccctggtgagcggcatccccatgggcccccccagactgcccctgcagaaggccagcagagagttcaccgacagcgccgaggccaagctgaagagcctggacttcctgagcttcaccgacctgaaggacggcaacctggaggccggcagctag

SEQ ID NO: 90255 - DNA, 330 bp, synthetic construct
  misc_feature 1..330: note = Description of Artificial Sequence: Synthetic coding sequence
  source 1..330: mol_type = other DNA
atggccttccccaagaagaagctgcagggcctggtggccgccaccatcacccccatgaccgagaacggcgagatcaacttcagcgtgatcggccagtacgtggactacctggtgaaggagcagggcgtgaagaacatcttcgtgaacggcaccaccggcgagggcctgagcctgagcgtgagcgagagaagacaggtggccgaggagtgggtgaccaagggcaaggacaagagcaaccaccacaagctgggcaccatcagaaccacccagagcagaagaagcagcttcagaagacagctgaaggcctggcacagcggcagccacctgtag

SEQ ID NO: 90256 - DNA, 558 bp, synthetic construct
  misc_feature 1..558: note = Description of Artificial Sequence: Synthetic coding sequence
  source 1..558: mol_type = other DNA
atgagcagagcccccggcatcctggccagctggagaagagcccccagcctgagcgtgcagaagggcagccagaccgccagacacacctgccaccccgaggtgcccctgggcaactgcttcctgcccgtgtacaaggccagccccctgaccgtgaccagactgtgggccgagagactggaccaggtgatcatccacgtgggcgccctgagcctgaaggagagccaggagctggcccagcacgccgccgagatcggcgccgacggcatcgccgtgatcgcccccttcttcctgaagccctggaccaaggacatcctgatcaacttcctgaaggaggtggccgccgccgcccccgccctgcccttctactactaccacatccccgccctgaccggcgtgaagatcagagccgaggagctgctggacggcatcctggacaagatccccaccttccagggcctgaagttcagcgacaccgacctgctggacttcggccagtgcgtggaccagaacagacagcagcagttcgccttcctgttcggcgtggacgagcacctgtag

SEQ ID NO: 90257 - DNA, 723 bp, synthetic construct
  misc_feature 1..723: note = Description of Artificial Sequence: Synthetic coding sequence
  source 1..723: mol_type = other DNA
atggccttccccaagaagaagctgcagggcctggtggccgccaccatcacccccatgaccgagaacggcgagatcaacttcagcgtgatcggccagtacgtggactacctggtgaaggagcagggcgtgaagaacatcttcgtgaacggcaccaccggcgagggcctgagcctgagcgtgagcgagagaagacaggtggccgaggagtgggtgaccaagggcaaggacaagctggaccaggtgatcatccacgtgggcgccctgagcctgaaggagagccaggagctggcccagcacgccgccgagatcggcgccgacggcatcgccgtgatcgcccccttcttcctgaagccctggaccaaggacatcctgatcaacttcctgaaggaggtggccgccgccgcccccgccctgcccttctactactaccacatccccgccctgaccggcgtgaagatcagagccgaggagctgctggacggcatcctggacaagatccccaccttccagggcctgaagttcagcgacaccgacctgctggacttcggccagtgcgtggaccagaacagacagcagcagttcgccttcctgttcggcgtggacgagttctgcatccagagattcatcaacttcgtggtgaagctggagaacagcaagctgaaggtgagcaagaaccagagaaccctgcccctgggcaccaccaacttccccttcctgcactag

SEQ ID NO: 90258 - DNA, 963 bp, synthetic construct; identical to SEQ ID NO: 90254
  misc_feature 1..963: note = Description of Artificial Sequence: Synthetic coding sequence
  source 1..963: mol_type = other DNA

SEQ ID NO: 90259 - DNA, 906 bp, synthetic construct
  misc_feature 1..906: note = Description of Artificial Sequence: Synthetic coding sequence
  source 1..906: mol_type = other DNA
atgagcagagcccccggcatcctggccagctggagaagagcccccagcctgagcgtgcagaagggcagccagaccgccagacacacctgccaccccgaggtgcccctgggcaactgcttcctgcccgtgtacaaggccagccccctgaccgtgaccagactgtgggccgagagactggaccaggtgatcatccacgtgggcgccctgagcctgaaggagagccaggagctggcccagcacgccgccgagatcggcgccgacggcatcgccgtgatcgcccccttcttcctgaagccctggaccaaggacatcctgatcaacttcctgaaggaggtggccgccgccgcccccgccctgcccttctactactaccacatccccgccctgaccggcgtgaagatcagagccgaggagctgctggacggcatcctggacaagatccccaccttccagggcctgaagttcagcgacaccgacctgctggacttcggccagtgcgtggaccagaacagacagcagcagttcgccttcctgttcggcgtggacgagcagctgctgagcgccctggtgatgggcgccaccggcgccgtgggcagcacctacaactacctgggcaagaagaccaaccagatgctggaggccttcgagcagaaggacttcagcctggccctgaactaccagttctgcatccagagattcatcaacttcgtggtgaagctgggcttcggcgtgagccagaccaaggccatcatgaccctggtgagcggcatccccatgggcccccccagactgcccctgcagaaggccagcagagagttcaccgacagcgccgaggccaagctgaagagcctggacttcctgagcttcaccgacctgaaggacggcaacctggaggccggcagctag

SEQ ID NO: 90260 - DNA, 723 bp, synthetic construct; identical to SEQ ID NO: 90257
  misc_feature 1..723: note = Description of Artificial Sequence: Synthetic coding sequence
  source 1..723: mol_type = other DNA

SEQ ID NO: 90261 - DNA, 624 bp, synthetic construct
  misc_feature 1..624: note = Description of Artificial Sequence: Synthetic coding sequence
  source 1..624: mol_type = other DNA
agagagggccagaagggcagccagaccgccagacacacctgccaccccgaggtgcccctgggcaactgcttcctgcccgtgtacaaggccagccccctgaccgtgaccagactgtgggccgagagactggaccaggtgatcatccacgtgggcgccctgagcctgaaggagagccaggagctggcccagcacgccgccgagatcggcgccgacggcatcgccgtgatcgcccccttcttcctgaagccctggaccaaggacatcctgatcaacttcctgaaggaggtggccgccgccgcccccgccctgcccttctactactaccacatccccgccctgaccggcgtgaagaccaccgtggagtgcagcggcgacggcagcaactggagcagcggccagttctgcatccagagattcatcaacttcgtggtgaagctgggcttcggcgtgagccagaccaaggccatcatgaccctggtgagcggcatccccatgggcccccccagactgcccctgcagaaggccagcagagagttcaccgacagcgccgaggccaagctgaagagcctggacttcctgagcttcaccgacctgaaggacggcaacctggaggccggcagctag

SEQ ID NO: 90262 - DNA, 747 bp, synthetic construct
  misc_feature 1..747: note = Description of Artificial Sequence: Synthetic coding sequence
  source 1..747: mol_type = other DNA
atgggcctgagcagagtgagagccgtgttcttcgacctggacaacaccctgatcgacaccgccggcgccagcagaagaggcatgctggaggtgatcaagctgctgcagagcaagtaccactacaaggaggaggccgagatcatctgcgacaaggtgcaggtgaagctgagcaaggagtgcttccacccctacaacacctgcatcaccgacctgagaaccagccactgggaggaggccatccaggagaccaagggcggcgccgccaacagaaagctggccgaggagtgctacttcctgtggaagagcaccagactgcagcacatgaccctggccgaggacgtgaaggccatgctgaccgagctgagaaaggaggtgagactgctgctgctgaccaacggcgacagacagacccagagagagaagatcgaggcctgcgcctgccagagctacttcgacgccgtggtggtgggcggcgagcagagagaggagaagcccgcccccagcatcttctactactgctgcaacctgctgggcgtgcagcccggcgactgcgtgatggtgggcgacaccctggagaccgacatccagggcggcctgaacgccggcctgaaggccaccgtgtggatcaacaagaacggcatcgtgcccctgaagagcagccccgtgccccactacatggtgagcagcgtgctggagctgcccgccctgctgcagagcatcgactgcaaggtgagcatgagcacctag

SEQ ID NO: 90263 - DNA, 1515 bp, synthetic construct
  misc_feature 1..1515: note = Description of Artificial Sequence: Synthetic coding sequence
  source 1..1515: mol_type = other DNA
atggccgcccaggccctggccctgctgagagaggtggccagactggaggcccccctggaggagctgagagccctgcacagcgtgctgcaggccgtgcccctgaacgagctgagacagcaggccgccgagctgagactgggccccctgttcagcctgctgaacgagaaccacagagagaagaccaccctgtgcgtgagcatcctggagagactgctgcaggccatggagcccgtgcacgtggccagaaacctgagagtggacctgcagagaggcctgatccaccccgacgacagcgtgaagatcctgaccctgagccagatcggcagaatcgtggagaacagcgacgccgtgaccgagatcctgaacaacgccgagctgctgaagcagatcgtgtactgcatcggcggcgagaacctgagcgtggccaaggccgccatcaagagcctgagcagaatcagcctgacccaggccggcctggaggccctgttcgagagcaacctgctggacgacctgaagagcgtgatgaagaccaacgacatcgtgagatacagagtgtacgagctgatcatcgagatcagcagcgtgagccccgagagcctgaactactgcaccaccagcggcctggtgacccagctgctgagagagctgaccggcgaggacgtgctggtgagagccacctgcatcgagatggtgaccagcctggcctacacccaccacggcagacagtacctggcccaggagggcgtgatcgaccagatcagcaacatcatcgtgggcgccgacagcgaccccttcagcagcttctacctgcccggcttcgtgaagttcttcggcaacctggccgtgatggacagcccccagcagatctgcgagagataccccatcttcgtggagaaggtgttcgagatgatcgagagccaggaccccaccatgatcggcgtggccgtggacaccgtgggcatcctgggcagcaacgtggagggcaagcaggtgctgcagaagaccggcaccagattcgagagactgctgatgagaatcggccaccagagcaagaacgcccccgtggagctgaagatcagatgcctggacgccatcagcagcctgctgtacctgccccccgagcagcagaccgacgacctgctgagaatgaccgagagctggttcagcagcctgagcagagaccccctggagctgttcagaggcatcagcagccagcccttccccgagctgcactgcgccgccctgaaggtgttcaccgccatcgccaaccagccctgggcccagaagctgatgttcaacagccccggcttcgtggagtacgtggtggacagaagcgtggagcacgacaaggccagcaaggacgccaagtacgagctggtgaaggccctggccaacagcaagaccatcgccgagatcttcggcaaccccaactacctgagactgagaacctacctgagcgagggcccctactacgtgaagcccgtgagcaccaccgccgtggagggcgccgagtag

SEQ ID NO: 90264 - DNA, 423 bp, synthetic construct
  misc_feature 1..423: note = Description of Artificial Sequence: Synthetic coding sequence
  source 1..423: mol_type = other DNA
atggtgctggtgctggactacagcggcagacccatggtgatcagcagcggcatgcagagcatggacaccatgaagcaggtgtaccagatcgtgaagcccctgaaccccaacttctgcttcctgcagtgcaccagcgcctaccccctgcagcccgaggacgtgaacctgagagtgatcagcgagtaccagaagctgttccccgacatccccatcggctacagcggccacgagaccggcatcgccatcagcgtggccgccgtggccctgggcgccaaggtgctggagagacacatcaccctggacaagacctggaagggcagcgaccacagcgccagcctggagcccggcgagctggccgagctggtgagaagcgtgagactggtggagagagccctgggcagccccaccaagcagctgctgtag

SEQ ID NO: 90265 - DNA, 348 bp, synthetic construct
  misc_feature 1..348: note = Description of Artificial Sequence: Synthetic coding sequence
  source 1..348: mol_type = other DNA
gaggacgtgaacctgagagtgatcagcgagtaccagaagctgttccccgacatccccatcggctacagcggccacgagaccggcatcgccatcagcgtggccgccgtggccctgggcgccaaggtgctggagagacacatcaccctggacaagacctggaagggcagcgaccacagcgccagcctggagcccggcgagctggccgagctggtgagaagcgtgagactggtggagagagccctgggcagccccaccaagcagctgctgccctgcgagatggcctgcaacgagaaggtgtgccccgccggcctgtacagcgtgctgctgccctgcgtggagaagggctag

SEQ ID NO: 90266 - DNA, 873 bp, synthetic construct
  misc_feature 1..873: note = Description of Artificial Sequence: Synthetic coding sequence
  source 1..873: mol_type = other DNA
atggacatcgaggcctacctggagagaatcggctacaagaagagcagaaacaagctggacctggagaccctgaccgacatcctgcagcaccagatcagagccgtgcccttcgagaacctgaacatccactgcggcgacgccatggacctgggcctggaggccatcttcgaccaggtggtgagaagaaacagaggcggctggtgcctgcaggtgaaccacctgctgtactgggccctgaccaccatcggcttcgagaccaccatgctgggcggctacgtgtacagcacccccgccaagaagtacagcaccggcatgatccacctgctgctgcaggtgaccatcgacggcagaaactacatcgtggacgccggcttcggcagaagctaccagatgtggcagcccctggagctgatcagcggcaaggaccagccccaggtgccctgcgtgttcagactgaccgaggagaacggcttctggtacctggaccagatcagaagagagcagtacatccccaacgaggagttcctgcacagcgacctgctggaggacagcaagtacagaaagatctacagcttcaccctgaagcccagaaccatcgaggacttcgagagcatgaacacctacctgcagaccagccccagcagcgtgttcaccagcaagagcttctgcagcctgcagacccccgacggcgtgcactgcctggtgggcttcaccctgacccacagaagattcaactacaaggacaacaccgacctgatcgagttcaagaccctgagcgaggaggagatcgagaaggtgctgaagaacatcttcaacatcagcctgcagagaaagctggtgcccaagcacggcgacagattcttcaccatctag

SEQ ID NO: 90267 - DNA, 873 bp, synthetic construct; identical to SEQ ID NO: 90266
  misc_feature 1..873: note = Description of Artificial Sequence: Synthetic coding sequence
  source 1..873: mol_type = other DNA

SEQ ID NO: 90268 - DNA, 873 bp, synthetic construct; identical to SEQ ID NO: 90266
  misc_feature 1..873: note = Description of Artificial Sequence: Synthetic coding sequence
  source 1..873: mol_type = other DNA

SEQ ID NO: 90269 - DNA, 873 bp, synthetic construct; identical to SEQ ID NO: 90266
  misc_feature 1..873: note = Description of Artificial Sequence: Synthetic coding sequence
  source 1..873: mol_type = other DNA

SEQ ID NO: 90270 - DNA, 873 bp, synthetic construct; identical to SEQ ID NO: 90266
  misc_feature 1..873: note = Description of Artificial Sequence: Synthetic coding sequence
  source 1..873: mol_type = other DNA

SEQ ID NO: 90271 - DNA, 873 bp, synthetic construct; identical to SEQ ID NO: 90266
  misc_feature 1..873: note = Description of Artificial Sequence: Synthetic coding sequence
  source 1..873: mol_type = other DNA

SEQ ID NO: 90272 - DNA, 873 bp, synthetic construct; identical to SEQ ID NO: 90266
  misc_feature 1..873: note = Description of Artificial Sequence: Synthetic coding sequence
  source 1..873: mol_type = other DNA

SEQ ID NO: 90273 - DNA, 1059 bp, synthetic construct
  misc_feature 1..1059: note = Description of Artificial Sequence: Synthetic coding sequence
  source 1..1059: mol_type = other DNA
atgctgctgctgctgctgcacaaggaggccgccctggagccccagggccccgccgtgggctacaacagcctgcccgtgagcgacgaccaccacgtgagcggcatccaggccagaaagaagcagcagagcgtgttctggatcaagaccgaggaccagcccaccttcaacctgctgagaaagggcatcatggacatcgaggcctacctggagagaatcggctacaagaagagcagaaacaagctggacctggagaccctgaccgacatcctgcagcaccagatcagagccgtgcccttcgagaacctgaacatccactgcggcgacgccatggacctgggcctggaggccatcttcgaccaggtggtgagaagaaacagaggcggctggtgcctgcaggtgaaccacctgctgtactgggccctgaccaccatcggcttcgagaccaccatgctgggcggctacgtgtacagcacccccgccaagaagtacagcaccggcatgatccacctgctgctgcaggtgaccatcgacggcagaaactacatcgtggacgccggcttcggcagaagctaccagatgtggcagcccctggagctgatcagcggcaaggaccagccccaggtgccctgcgtgttcagactgaccgaggagaacggcttctggtacctggaccagatcagaagagagcagtacatccccaacgaggagttcctgcacagcgacctgctggaggacagcaagtacagaaagatctacagcttcaccctgaagcccagaaccatcgaggacttcgagagcatgaacacctacctgcagaccagccccagcagcgtgttcaccagcaagagcttctgcagcctgcagacccccgacggcgtgcactgcctggtgggcttcaccctgacccacagaagattcaactacaaggacaacaccgacctgatcgagttcaagaccctgagcgaggaggagatcgagaaggtgctgaagaacatcttcaacatcagcctgcagagaaagctggtgcccaagcacggcgacagattcttcaccatctag

SEQ ID NO: 90274 - DNA, 873 bp, synthetic construct
  misc_feature 1..873: note = Description of Artificial Sequence: Synthetic coding sequence
  source 1..873: mol_type = other DNA
atggacatcgaggcctacttcgagagaatcggctacaagaacagcagaaacaagctggacctggagaccctgaccgacatcctggagcaccagatcagagccgtgcccttcgagaacctgaacatgcactgcggccaggccatggagctgggcctggaggccatcttcgaccacatcgtgagaagaaacagaggcggctggtgcctgcaggtgaaccagctgctgtactgggccctgaccaccatcggcttccagaccaccatgctgggcggctacttctacatcccccccgtgaacaagtacagcaccggcatggtgcacctgctgctgcaggtgaccatcgacggcagaaactacatcgtggacgccggcagcggcagcagcagccagatgtggcagcccctggagctgatcagcggcaaggaccagccccaggtgccctgcatcttctgcctgaccgaggagagaggcatctggtacctggaccagatcagaagagagcagtacatcaccaacaaggagttcctgaacagccacctgctgcccaagaagaagcaccagaagatctacctgttcaccctggagcccagaaccatcgaggacttcgagagcatgaacacctacctgcagaccagccccaccagcagcttcatcaccaccagcttctgcagcctgcagacccccgagggcgtgtactgcctggtgggcttcatcctgacctacagaaagttcaactacaaggacaacaccgacctggtggagttcaagaccctgaccgaggaggaggtggaggaggtgctgagaaacatcttcaagatcagcctgggcagaaacctggtgcccaagcccggcgacggcagcctgaccatctag

SEQ ID NO: 90275 - DNA, 684 bp, synthetic construct
  misc_feature 1..684: note = Description of Artificial Sequence: Synthetic coding sequence
  source 1..684: mol_type = other DNA
atggccccctgccacatcagaaagtaccaggagagcgacagacagtgggtggtgggcctgctgagcagaggcatggccgagcacgcccccgccaccttcagacagctgctgaagctgcccagaaccctgatcctgctgctgggcggccccctggccctgctgctggtgagcggcagctggctgctggccctggtgttcagcatcagcctgttccccgccctgtggttcctggccaagaagccctggaccgagtacgtggacatgaccctgtgcaccgacatgagcgacatcaccaagagctacctgagcgagagaggcagctgcttctgggtggccgagagcgaggagaaggtggtgggcatggtgggcgccctgcccgtggacgaccccaccctgagagagaagagactgcagctgttccacctgttcgtggacagcgagcacagaagacagggcatcgccaaggccctggtgagaaccgtgctgcagttcgccagagaccagggctacagcgaggtgatcctggacaccggcaccatccagctgagcgccatggccctgtaccagagcatgggcttcaagaagaccggccagagcttcttctgcgtgtgggccagactggtggccctgcacaccgtgcacttcatctaccacctgcccagcagcaaggtgggcagcctgtag

SEQ ID NO: 90276 - DNA, 405 bp, synthetic construct
  misc_feature 1..405: note = Description of Artificial Sequence: Synthetic coding sequence
  source 1..405: mol_type = other DNA
atggccgacatcgagcagtactacatgaagccccccggcagctgcttctgggtggccgtgctggacggcaacgtggtgggcatcgtggccgccagagcccacgaggaggacaacaccgtggagctgctgagaatgagcgtggacagcagattcagaggcaagggcatcgccaaggccctgggcagaaaggtgctggagttcgccgtggtgcacaactacagcgccgtggtgctgggcaccaccgccgtgaaggtggccgcccacaagctgtacgagagcctgggcttcagacacatgggcgccagcgaccactacgtgctgcccggcatgaccctgagcctggccgagagactgttcttccaggtgagataccacagatacagactgcagctgagagaggagtag

SEQ ID NO: 90277 - DNA, 909 bp, synthetic construct
  misc_feature 1..909: note = Description of Artificial Sequence: Synthetic coding sequence
  source 1..909: mol_type = other DNA
atgcactgcggcccccccgacatggtgtgcgagaccaagatcgtggccgccgaggaccacgaggccctgcccggcgccaagaaggacgccctgctggccgccgccggcgccatgtggccccccctgcccgccgcccccggccccgccgccgccccccccgcccccccccccgcccccgtggcccagccccacggcggcgccggcggcgccggcccccccggcggcagaggcgtgtgcatcagagagttcagagccgccgagcaggaggccgccagaagaatcttctacgacggcatcatggagagaatccccaacaccgccttcagaggcctgagacagcaccccagagcccagctgctgtacgccctgctggccgccctgtgcttcgccgtgagcagaagcctgctgctgacctgcctggtgcccgccgccctgctgggcctgagatactactacagcagaaaggtgatcagagcctacctggagtgcgccctgcacaccgacatggccgacatcgagcagtactacatgaagccccccggcagctgcttctgggtggccgtgctggacggcaacgtggtgggcatcgtggccgccagagcccacgaggaggacaacaccgtggagctgctgagaatgagcgtggacagcagattcagaggcaagggcatcgccaaggccctgggcagaaaggtgctggagttcgccgtggtgcacaactacagcgccgtggtgctgggcaccaccgccgtgaaggtggccgcccacaagctgtacgagagcctgggcttcagacacatgggcgccagcgaccactacgtgctgcccggcatgaccctgagcctggccgagagactgttcttccaggtgagataccacagatacagactgcagctgagagaggagtag

SEQ ID NO: 90278 - DNA, 1182 bp, synthetic construct
  misc_feature 1..1182: note = Description of Artificial Sequence: Synthetic coding sequence
  source 1..1182: mol_type = other DNA
atggacgagaacgagagcaaccagagcctgatgaccagcagccagtaccccaaggaggccgtgagaaagagacagaacagcgccagaaacagcggcgccagcgacagcagcagattcagcagaaagagcttcaagctggactacagactggaggaggacgtgaccaagagcaagaagggcaaggacggcagattcgtgaacccctggcccacctggaagaaccccagcatccccaacgtgctgagatggctgatcatggagaaggaccacagcagcgtgcccagcagcaaggaggagctggacaaggagctgcccgtgctgaagccctacttcatcaccaaccccgaggaggccggcgtgagagaggccggcctgagagtgacctggctgggccacgccaccgtgatggtggagatggacgagctgatcttcctgaccgaccccatcttcagcagcagagccagccccagccagtacatgggccccaagagattcagaagaagcccctgcaccatcagcgagctgccccccatcgacgccgtgctgatcagccacaaccactacgaccacctggactacaacagcgtgatcgccctgaacgagagattcggcaacgagctgagatggttcgtgcccctgggcctgctggactggatgcagaagtgcggctgcgagaacgtgatcgagctggactggtgggaggagaactgcgtgcccggccacgacaaggtgaccttcgtgttcacccccagccagcactggtgcaagagaaccctgatggacgacaacaaggtgctgtggggcagctggagcgtgctgggcccctggaacagattcttcttcgccggcgacaccggctactgccccgccttcgaggagatcggcaagagattcggccccttcgacctggccgccatccccatcggcgcctacgagcccagatggttcatgaagtaccagcacgtggaccccgaggaggccgtgagaatccacaccgacgtgcagaccaagaagagcatggccatccactggggcaccttcgccctggccaacgagcactacctggagccccccgtgaagctgaacgaggccctggagagatacggcctgaacgccgaggacttcttcgtgctgaagcacggcgagagcagatacctgaacaacgacgacgagaacttctag

SEQ ID NO: 90279 - DNA, 375 bp, synthetic construct
  misc_feature 1..375: note = Description of Artificial Sequence: Synthetic coding sequence
  source 1..375: mol_type = other DNA
atggacgagaacgagagcaaccagagcctgatgaccagcagccagtaccccaaggaggccgtgagaaagagacagaacagcgccagaaacagcggcgccagcgacagcagcagattcagcagaaagagcttcaagctggactacagactggaggaggacgtgaccaagagcaagaagggcaaggacggcagattcgtgaacccctggcccacctggaagaaccccagcatccccaacgtgctgagatggctgatcatggagaaggaccacagcagcgtgcccagcagcaaggaggagctggacaaggagctgcccgtgctgaagccctacttcatcaccaaccccgaggaggccggcgtgagagaggccggctag

SEQ ID NO: 90280 - DNA, 1182 bp, synthetic construct; identical to SEQ ID NO: 90278
  misc_feature 1..1182: note = Description of Artificial Sequence: Synthetic coding sequence
  source 1..1182: mol_type = other DNA

SEQ ID NO: 90281 - DNA, 18 bp, synthetic construct
  misc_feature 1..18: note = Description of Artificial Sequence: Synthetic coding sequence
  source 1..18: mol_type = other DNA
atggacgagaacgagtag

SEQ ID NO: 90282 - DNA, 1182 bp, synthetic construct; identical to SEQ ID NO: 90278
  misc_feature 1..1182: note = Description of Artificial Sequence: Synthetic coding sequence
  source 1..1182: mol_type = other DNA

SEQ ID NO: 90283 - DNA, 1401 bp, synthetic construct
  misc_feature 1..1401: note = Description of Artificial Sequence: Synthetic coding sequence
  source 1..1401: mol_type = other DNA
atggccagaagaagagagctgaagagatgcctgcagctgctggccagcagcgccgagcccgccagaagagccagagtgagaaagaaccccagcgcctgcagaggcagacccagcagatacgccgccgccctgtgcgccggcaccctgtggcccgaggccgccgagctgagaagaagagccctgcccgccacccccagcgccagcagcagccccaaggacatggacgagaacgagagcaaccagagcctgatgaccagcagccagtaccccaaggaggccgtgagaaagagacagaacagcgccagaaacagcggcgccagcgacagcagcagattcagcagaaagagcttcaagctggactacagactggaggaggacgtgaccaagagcaagaagggcaaggacggcagattcgtgaacccctggcccacctggaagaaccccagcatccccaacgtgctgagatggctgatcatggagaaggaccacagcagcgtgcccagcagcaaggaggagctggacaaggagctgcccgtgctgaagccctacttcatcaccaaccccgaggaggccggcgtgagagaggccggcctgagagtgacctggctgggccacgccaccgtgatggtggagatggacgagctgatcttcctgaccgaccccatcttcagcagcagagccagccccagccagtacatgggccccaagagattcagaagaagcccctgcaccatcagcgagctgccccccatcgacgccgtgctgatcagccacaaccactacgaccacctggactacaacagcgtgatcgccctgaacgagagattcggcaacgagctgagatggttcgtgcccctgggcctgctggactggatgcagaagtgcggctgcgagaacgtgatcgagctggactggtgggaggagaactgcgtgcccggccacgacaaggtgaccttcgtgttcacccccagccagcactggtgcaagagaaccctgatggacgacaacaaggtgctgtggggcagctggagcgtgctgggcccctggaacagattcttcttcgccggcgacaccggctactgccccgccttcgaggagatcggcaagagattcggccccttcgacctggccgccatccccatcggcgcctacgagcccagatggttcatgaagtaccagcacgtggaccccgaggaggccgtgagaatccacaccgacgtgcagaccaagaagagcatggccatccactggggcaccttcgccctggccaacgagcactacctggagccccccgtgaagctgaacgaggccctggagagatacggcctgaacgccgaggacttcttcgtgctgaagcacggcgagagcagatacctgaacaacgacgacgagaacttctag

SEQ ID NO: 90284 - DNA, 1182 bp, synthetic construct; identical to SEQ ID NO: 90278
  misc_feature 1..1182: note = Description of Artificial Sequence: Synthetic coding sequence
  source 1..1182: mol_type = other DNA

SEQ ID NO: 90285 - DNA, 2199 bp, synthetic construct
  misc_feature 1..2199: note = Description of Artificial Sequence: Synthetic coding sequence
  source 1..2199: mol_type = other DNA
atggagagacaggtgctgctgagcgagcccgaggaggccgccgccctgtacagaggcctgagcagacagcccgccctgagcgccgcctgcctgggccccgaggtgaccacccagtacggcggccagtacagaaccgtgcacaccgagtggacccagagagacctggagagaatggagaacatcagattctgcagacagtacctggtgttccacgacggcgacagcgtggtgttcgccggccccgccggcaacagcgtggagaccagaggcgagctgctgagcagagagagccccagcggcaccatgaaggccgtgctgagaaaggccggcggcaccggccccggcgaggagaagcagttcctggaggtgtgggagaagaacagaaagctgaagagcttcaacctgagcgccctggagaagcacggccccgtgtacgaggacgactgcttcggctgcctgagctggagccacagcgagacccacctgctgtacgtggccgagaagaagagacccaaggccgagagcttcttccagaccaaggccctggacgtgagcgccagcgacgacgagatcgccagactgaagaagcccgaccaggccatcaagggcgaccagttcgtgttctacgaggactggggcgagaacatggtgagcaagagcatccccgtgctgtgcgtgctggacgtggagagcggcaacatcagcgtgctggagggcgtgcccgagaacgtgagccccggccaggccttctgggcccccggcgacgccggcgtggtgttcgtgggctggtggcacgagcccttcagactgggcatcagattctgcaccaacagaagaagcgccctgtactacgtggacctgatcggcggcaagtgcgagctgctgagcgacgacagcctggccgtgagcagccccagactgagccccgaccagtgcagaatcgtgtacctgcagtaccccagcctgatcccccaccaccagtgcagccagctgtgcctgtacgactggtacaccaaggtgaccagcgtggtggtggacgtggtgcccagacagctgggcgagaacttcagcggcatctactgcagcctgctgcccctgggctgctggagcgccgacagccagagagtggtgttcgacagcgcccagagaagcagacaggacctgttcgccgtggacacccaggtgggcaccgtgaccagcctgaccgccggcggcagcggcggcagctggaagctgctgaccatcgaccaggacctgatggtggcccagttcagcacccccagcctgccccccaccctgaaggtgggcttcctgcccagcgccggcaaggagcagagcgtgctgtgggtgagcctggaggaggccgagcccatccccgacatccactggggcatcagagtgctgcagcccccccccgagcaggagaacgtgcagtacgccggcctggacttcgaggccatcctgctgcagcccggcagcccccccgacaagacccaggtgcccatggtggtgatgccccacggcggcccccacagcagcttcgtgaccgcctggatgctgttccccgccatgctgtgcaagatgggcttcgccgtgctgctggtgaactacagaggcagcaccggcttcggccaggacagcatcctgagcctgcccggcaacgtgggccaccaggacgtgaaggacgtgcagttcgccgtggagcaggtgctgcaggaggagcacttcgacgccagccacgtggccctgatgggcggcagccacggcggcttcatcagctgccacctgatcggccagtaccccgagacctacagagcctgcgtggccagaaaccccgtgatcaacatcgccagcatgctgggcagcaccgacatccccgactggtgcgtggtggaggccggcttccccttcagcagcgactgcctgcccgacctgagcgtgtgggccgagatgctggacaagagccccatcagatacatcccccaggtgaagacccccctgctgctgatgctgggccaggaggacagaagagtgcccttcaagcagggcatggagtactacagagccctgaagaccagaaacgtgcccgtgagactgctgctgtaccccaagagcacccacgccctgagcgaggtggaggtggagagcgacagcttcatgaacgccgtgctgtggctgagaacccacctgggcagctag

SEQ ID NO: 90286 - DNA, 1833 bp, synthetic construct
  misc_feature 1..1833: note = Description of Artificial Sequence: Synthetic coding sequence
  source 1..1833: mol_type = other DNA
gtgctgaacagactgcagagcaagtacggcagcctgtacagaagagacaacgtgatcctgagcggcacccacacccacagcggccccgccggctacttccagtacaccgtgttcgtgatcgccagcgagggcttcagcaaccagaccttccagcacatggtgaccggcatcctgaagagcatcgacatcgcccacaccaacatgaagcccggcaagatcttcatcaacaagggcaacgtggacggcgtgcagatcaacagaagcccctacagctacctgcagaacccccagagcgagagagccagatacagcagcaacaccgacaaggagatgatcgtgctgaagatggtggacctgaacggcgacgacctgggcctgatcagctggttcgccatccaccccgtgagcatgaacaacagcaaccacctggtgaacagcgacaacgtgggctacgccagctacctgctggagcaggagaagaacaagggctacctgcccggccagggccccttcgtggccgccttcagcagcagcaacctgggcgacgtgagccccaacatcctgggccccagatgcatcaacaccggcgagagctgcgacaacgccaacagcacctgccccatcggcggccccagcatgtgcatcgccaagggccccggccaggacatgttcgacagcacccagatcatcggcagagccatgtaccagagagccaaggagctgtacgccagcgccagccaggaggtgaccggccccctggccagcgcccaccagtgggtggacatgaccgacgtgaccgtgtggctgaacagcacccacgccagcaagacctgcaagcccgccctgggctacagcttcgccgccggcaccatcgacggcgtgggcggcctgaacttcacccagggcaagaccgagggcgaccccttctgggacaccatcagagaccagatcctgggcaagcccagcgaggagatcaaggagtgccacaagcccaagcccatcctgctgcacaccggcgagctgagcaagccccacccctggcaccccgacatcgtggacgtgcagatcatcaccctgggcagcctggccatcaccgccatccccggcgagttcaccaccatgagcggcagaagactgagagaggccgtgcaggccgagttcgccagccacggcatgcagaacatgaccgtggtgatcagcggcctgtgcaacgtgtacacccactacatcaccacctacgaggagtaccaggcccagagatacgaggccgccagcaccatctacggcccccacaccctgagcgcctacatccagctgttcagaaacctggccaaggccatcgccaccgacaccgtggccaacctgagcagaggccccgagccccccttcttcaagcagctgatcgtgcccctgatccccagcatcgtggacagagcccccaagggcagaaccttcggcgacgtgctgcagcccgccaagcccgagtacagagtgggcgaggtggccgaggtgatcttcgtgggcgccaaccccaagaacagcgtgcagaaccagaaccaccagaccttcctgaccgtggagaagtacgaggccaccagcaccagctggcagatcgtgtgcaacgacgccagctgggagaccagattctactggcacaagggcctgctgggcctgagcaacgccaccgtggagtggcacatccccgacaccgcccagcccggcatctacagaatcagatacttcggccacaacagaaagcaggacatcctgaagcccgccgtgatcctgagcttcgagggcaccagccccgccttcgaggtggtgaccatctag

SEQ ID NO: 90287 - DNA, 1869 bp, synthetic construct
  misc_feature 1..1869: note = Description of Artificial Sequence: Synthetic coding sequence
  source 1..1869: mol_type = other DNA
atggacagcgagaagagcagcgagtggagaagcgacgtgctgaacagactgcagagcaagtacggcagcctgtacagaagagacaacgtgatcctgagcggcacccacacccacagcggccccgccggctacttccagtacaccgtgttcgtgatcgccagcgagggcttcagcaaccagaccttccagcacatggtgaccggcatcctgaagagcatcgacatcgcccacaccaacatgaagcccggcaagatcttcatcaacaagggcaacgtggacggcgtgcagatcaacagaagcccctacagctacctgcagaacccccagagcgagagagccagatacagcagcaacaccgacaaggagatgatcgtgctgaagatggtggacctgaacggcgacgacctgggcctgatcagctggttcgccatccaccccgtgagcatgaacaacagcaaccacctggtgaacagcgacaacgtgggctacgccagctacctgctggagcaggagaagaacaagggctacctgcccggccagggccccttcgtggccgccttcagcagcagcaacctgggcgacgtgagccccaacatcctgggccccagatgcatcaacaccggcgagagctgcgacaacgccaacagcacctgccccatcggcggccccagcatgtgcatcgccaagggccccggccaggacatgttcgacagcacccagatcatcggcagagccatgtaccagagagccaaggagctgtacgccagcgccagccaggaggtgaccggccccctggccagcgcccaccagtgggtggacatgaccgacgtgaccgtgtggctgaacagcacccacgccagcaagacctgcaagcccgccctgggctacagcttcgccgccggcaccatcgacggcgtgggcggcctgaacttcacccagggcaagaccgagggcgaccccttctgggacaccatcagagaccagatcctgggcaagcccagcgaggagatcaaggagtgccacaagcccaagcccatcctgctgcacaccggcgagctgagcaagccccacccctggcaccccgacatcgtggacgtgcagatcatcaccctgggcagcctggccatcaccgccatccccggcgagttcaccaccatgagcggcagaagactgagagaggccgtgcaggccgagttcgccagccacggcatgcagaacatgaccgtggtgatcagcggcctgtgcaacgtgtacacccactacatcaccacctacgaggagtaccaggcccagagatacgaggccgccagcaccatctacggcccccacaccctgagcgcctacatccagctgttcagaaacctggccaaggccatcgccaccgacaccgtggccaacctgagcagaggccccgagccccccttcttcaagcagctgatcgtgcccctgatccccagcatcgtggacagagcccccaagggcagaaccttcggcgacgtgctgcagcccgccaagcccgagtacagagtgggcgaggtggccgaggtgatcttcgtgggcgccaaccccaagaacagcgtgcagaaccagaaccaccagaccttcctgaccgtggagaagtacgaggccaccagcaccagctggcagatcgtgtgcaacgacgccagctgggagaccagattctactggcacaagggcctgctgggcctgagcaacgccaccgtggagtggcacatccccgacaccgcccagcccggcatctacagaatcagatacttcggccacaacagaaagcaggacatcctgaagcccgccgtgatcctgagcttcgagggcaccagccccgccttcgaggtggtgaccatctag

SEQ ID NO: 90288 - DNA, 1341 bp, synthetic construct
  misc_feature 1..1341: note = Description of Artificial Sequence: Synthetic coding sequence
  source 1..1341: mol_type = other DNA
atggagatggagcaggagaagatgaccatgaacaaggagctgagccccgacgccgccgcctactgctgcagcgcctgccacggcgacgagacctggagctacaaccaccccatcagaggcagagccaagagcagaagcctgagcgccagccccgccctgggcagcaccaaggagttcagaagaaccagaagcctgcacggcccctgccccgtgaccaccttcggccccaaggcctgcgtgctgcagaacccccagaccatcatgcacatccaggaccccgccagccagagactgacctggaacaagagccccaagagcgtgctggtgatcaagaagatgagagacgccagcctgctgcagcccttcaaggagctgtgcacccacctgatggaggagaacatgatcgtgtacgtggagaagaaggtgctggaggaccccgccatcgccagcgacgagagcttcggcgccgtgaagaagaagttctgcaccttcagagaggactacgacgacatcagcaaccagatcgacttcatcatctgcctgggcggcgacggcaccctgctgtacgccagcagcctgttccagggcagcgtgccccccgtgatggccttccacctgggcagcctgggcttcctgacccccttcagcttcgagaacttccagagccaggtgacccaggtgatcgagggcaacgccgccgtggtgctgagaagcagactgaaggtgagagtggtgaaggagctgagaggcaagaagaccgccgtgcacaacggcctgggcgagaacggcagccaggccgccggcctggacatggacgtgggcaagcaggccatgcagtaccaggtgctgaacgaggtggtgatcgacagaggccccagcagctacctgagcaacgtggacgtgtacctggacggccacctgatcaccaccgtgcagggcgacggcgtgatcgtgagcacccccaccggcagcaccgcctacgccgccgccgccggcgccagcatgatccaccccaacgtgcccgccatcatgatcacccccatctgcccccacagcctgagcttcagacccatcgtggtgcccgccggcgtggagctgaagatcatgctgagccccgaggccagaaacaccgcctgggtgagcttcgacggcagaaagagacaggagatcagacacggcgacagcatcagcatcaccaccagctgctaccccctgcccagcatctgcgtgagagaccccgtgagcgactggttcgagagcctggcccagtgcctgcactggaacgtgagaaagaagcaggcccacttcgaggaggaggaggaggaggaggaggagggctag

SEQ ID NO: 90289 - DNA, 1341 bp, synthetic construct; identical to SEQ ID NO: 90288
  misc_feature 1..1341: note = Description of Artificial Sequence: Synthetic coding sequence
  source 1..1341: mol_type = other DNA

SEQ ID NO: 90290 - DNA, 1245 bp, synthetic construct
  misc_feature 1..1245: note = Description of Artificial Sequence: Synthetic coding sequence
  source 1..1245: mol_type = other DNA
atgggcagacccagagtgagacaggcctggcccggctgctgcggccacaccggcagactgcccgccggcagaggctacctggccagccacatgtgcgaccccgccggcgccgagctgatcggcgacggcatgagcgaccccaccccccccagcaacgcctgcaccggccacatccaggaccccgccagccagagactgacctggaacaagagccccaagagcgtgctggtgatcaagaagatgagagacgccagcctgctgcagcccttcaaggagctgtgcacccacctgatggaggagaacatgatcgtgtacgtggagaagaaggtgctggaggaccccgccatcgccagcgacgagagcttcggcgccgtgaagaagaagttctgcaccttcagagaggactacgacgacatcagcaaccagatcgacttcatcatctgcctgggcggcgacggcaccctgctgtacgccagcagcctgttccagggcagcgtgccccccgtgatggccttccacctgggcagcctgggcttcctgacccccttcagcttcgagaacttccagagccaggtgacccaggtgatcgagggcaacgccgccgtggtgctgagaagcagactgaaggtgagagtggtgaaggagctgagaggcaagaagaccgccgtgcacaacggcctgggcgagaacggcagccaggccgccggcctggacatggacgtgggcaagcaggccatgcagtaccaggtgctgaacgaggtggtgatcgacagaggccccagcagctacctgagcaacgtggacgtgtacctggacggccacctgatcaccaccgtgcagggcgacggcgtgatcgtgagcacccccaccggcagcaccgcctacgccgccgccgccggcgccagcatgatccaccccaacgtgcccgccatcatgatcacccccatctgcccccacagcctgagcttcagacccatcgtggtgcccgccggcgtggagctgaagatcatgctgagccccgaggccagaaacaccgcctgggtgagcttcgacggcagaaagagacaggagatcagacacggcgacagcatcagcatcaccaccagctgctaccccctgcccagcatctgcgtgagagaccccgtgagcgactggttcgagagcctggcccagtgcctgcactggaacgtgagaaagaagcaggcccacttcgaggaggaggaggaggaggaggaggagggctag

SEQ ID NO: 90291 - DNA, 1776 bp, synthetic construct
  misc_feature 1..1776: note = Description of Artificial Sequence: Synthetic coding sequence
  source 1..1776: mol_type = other DNA
atggagatggagcaggagaagatgaccatgaacaaggagctgagccccgacgccgccgcctactgctgcagcgcctgccacggcgacgagacctggagctacaaccaccccatcagaggcagagccaagagcagaagcctgagcgccagccccgccctgggcagcaccaaggagttcagaagaaccagaagcctgcacggcccctgccccgtgaccaccttcggccccaaggcctgcgtgctgcagaacccccagaccatcatcgccacccccctgagcctggccagccagctgctgcccagccccgccgtgagccacagcggccagggcggcgtgaccggccaggtgcacgtgctgccccagcccagcgaccagggcgtgctgagcggccccagagccgccagaggccagaccgccccccaggaggaggccgtgacccaggaggaggtggaggccctggtgtgcggccacacccagagatgggtgcccggccccgtgtacgacgccgccgccggcggcagcggctgggcccagctgagcctgagagccggcatgggcgtgggccaggccaccggccacatccaggaccccgccagccagagactgacctggaacaagagccccaagagcgtgctggtgatcaagaagatgagagacgccagcctgctgcagcccttcaaggagctgtgcacccacctgatggaggccagaggcgccggcggcaagggcgcctggggcgcccacggcgtgggcggcgccagcatccacatcaccgcccccagagtgggcagcgccggcggcatgagcagactggccctgtgcttccaggagaacatgatcgtgtacgtggagaagaaggtgctggaggaccccgccatcgccagcgacgagagcttcggcgccgtgaagaagaagttctgcaccttcagagaggactacgacgacatcagcaaccagatcgacttcatcatctgcctgggcggcgacggcaccctgctgtacgccagcagcctgttccagggcagcgtgccccccgtgatggccttccacctgggcagcctgggcttcctgacccccttcagcttcgagaacttccagagccaggtgacccaggtgatcgagggcaacgccgccgtggtgctgagaagcagactgaaggtgagagtggtgaaggagctgagaggcaagaagaccgccgtgcacaacggcctgggcgagaacggcagccaggccgccggcctggacatggacgtgggcaagcaggccatgcagtaccaggtgctgaacgaggtggtgatcgacagaggccccagcagctacctgagcaacgtggacgtgtacctggacggccacctgatcaccaccgtgcagggcgacggcgtgatcgtgagcacccccaccggcagcaccgcctacgccgccgccgccggcgccagcatgatccaccccaacgtgcccgccatcatgatcacccccatctgcccccacagcctgagcttcagacccatcgtggtgcccgccggcgtggagctgaagatcatgctgagccccgaggccagaaacaccgcctgggtgagcttcgacggcagaaagagacaggagatcagacacggcgacagcatcagcatcaccaccagctgctaccccctgcccagcatctgcgtgagagaccccgtgagcgactggttcgagagcctggcccagtgcctgcactggaacgtgagaaagaagcaggcccacttcgaggaggaggaggaggaggaggaggagggctag

SEQ ID NO: 90292 - DNA, 1776 bp, synthetic construct; identical to SEQ ID NO: 90291
  misc_feature 1..1776: note = Description of Artificial Sequence: Synthetic coding sequence
  source 1..1776: mol_type = other DNA

SEQ ID NO: 90293 - DNA, 621 bp, synthetic construct
  misc_feature 1..621: note = Description of Artificial Sequence: Synthetic coding sequence
  source 1..621: mol_type = other DNA
atgggcagacccagagtgagacaggcctggcccggctgctgcggccacaccggcagactgcccgccggcagaggctacctggccagccacatgtgcgaccccgccggcgccgagctgatcggcgacggcatgagcgaccccaccccccccagcaacgcctgcaccggccacatccaggaccccgccagccagagactgacctggaacaagagccccaagagcgtgctggtgatcaagaagatgagagacgccagcctgctgcagcccttcaaggagctgtgcacccacctgatggaggagaacatgatcgtgtacgtggagaagaaggtgctggaggaccccgccatcgccagcgacgagagcttcggcgccgtgaagaagaagttctgcaccttcagagaggactacgacgacatcagcaaccagatcgacttcatcatctgcctgggcggcgacggcaccctgctgtacgccagcagcctgttccagggcagcgtgccccccgtgatggccttccacctgggcagcctgggcttcctgacccccttcagcttcgagaacttccagagccaggtgacccaggtgatcgagggcaacgccgccgtggtgctgagaagctag

SEQ ID NO: 90294 - DNA, 2121 bp, synthetic construct
  misc_feature 1..2121: note = Description of Artificial Sequence: Synthetic coding sequence
  source 1..2121: mol_type = other DNA
atgggcagaaaggtgaccgtggccacctgcgccctgaaccagtgggccctggacttcgagggcaacctgcagagaatcctgaagagcatcgagatcgccaagaacagaggcgccagatacagactgggccccgagctggagatctgcggctacggctgctgggaccactactacgagagcgacaccctgctgcacagcttccaggtgctggccgccctggtggagagccccgtgacccaggacatcatctgcgacgtgggcatgcccgtgatgcacagaaacgtgagatacaactgcagagtgatcttcctgaacagaaagatcctgctgatcagacccaagatggccctggccaacgagggcaactacagagagctgagatggttcaccccctggagcagaagcagacacaccgaggagtacttcctgcccagaatgatccaggacctgaccaagcaggagaccgtgcccttcggcgacgccgtgctggtgacctgggacacctgcatcggcagcgagatctgcgaggagctgtggaccccccacagcccccacatcgacatgggcctggacggcgtggagatcatcaccaacgccagcggcagccaccaggtgctgagaaaggccaacaccagagtggacctggtgaccatggtgaccagcaagaacggcggcatctacctgctggccaaccagaagggctgcgacggcgacagactgtactacgacggctgcgccatgatcgccatgaacggcagcgtgttcgcccagggcagccagttcagcctggacgacgtggaggtgctgaccgccaccctggacctggaggacgtgagaagctacagagccgagatcagcagcagaaacctggccgccagcagagccagcccctaccccagagtgaaggtggacttcgccctgagctgccacgaggacctgctggcccccatcagcgagcccatcgagtggaagtaccacagccccgaggaggagatcagcctgggccccgcctgctggctgtgggacttcctgagaagaagccagcaggccggcttcctgctgcccctgagcggcggcgtggacagcgccgccaccgcctgcctgatctacagcatgtgctgccaggtgtgcgaggccgtgagaagcggcaacgaggaggtgctggccgacgtgagaaccatcgtgaaccagatcagctacaccccccaggaccccagagacctgtgcggcagaatcctgaccacctgctacatggccagcaagaacagcagccaggagacctgcaccagagccagagagctggcccagcagatcggcagccaccacatcagcctgaacatcgaccccgccgtgaaggccgtgatgggcatcttcagcctggtgaccggcaagagccccctgttcgccgcccacggcggcagcagcagagagaacctggccctgcagaacgtgcaggccagaatcagaatggtgctggcctacctgttcgcccagctgagcctgtggagcagaggcgtgcacggcggcctgctggtgctgggcagcgccaacgtggacgagagcctgctgggctacctgaccaagtacgactgcagcagcgccgacatcaaccccatcggcggcatcagcaagaccgacctgagagccttcgtgcagttctgcatccagagattccagctgcccgccctgcagagcatcctgctggcccccgccaccgccgagctggagcccctggccgacggccaggtgagccagaccgacgaggaggacatgggcatgacctacgccgagctgagcgtgtacggcaagctgagaaaggtggccaagatgggcccctacagcatgttctgcaagctgctgggcatgtggagacacatctgcacccccagacaggtggccgacaaggtgaagagattcttcagcaagtacagcatgaacagacacaagatgaccaccctgacccccgcctaccacgccgagaactacagccccgaggacaacagattcgacctgagacccttcctgtacaacaccagctggccctggcagttcagatgcatcgagaaccaggtgctgcagctggagagagccgagccccagagcctggacggcgtggactag

SEQ ID NO: 90295 - DNA, 1341 bp, synthetic construct
  misc_feature 1..1341: note = Description of Artificial Sequence: Synthetic coding sequence
  source 1..1341: mol_type = other DNA
atgggcatcagcggccaggaggtgctgaccgccaccctggacctggaggacgtgagaagctacagagccgagatcagcagcagaaacctggccgccagcagagccagcccctaccccagagtgaaggtggacttcgccctgagctgccacgaggacctgctggcccccatcagcgagcccatcgagtggaagtaccacagccccgaggaggagatcagcctgggccccgcctgctggctgtgggacttcctgagaagaagccagcaggccggcttcctgctgcccctgagcggcggcgtggacagcgccgccaccgcctgcctgatctacagcatgtgctgccaggtgtgcgaggccgtgagaagcggcaacgaggaggtgctggccgacgtgagaaccatcgtgaaccagatcagctacaccccccaggaccccagagacctgtgcggcagaatcctgaccacctgctacatggccagcaagaacagcagccaggagacctgcaccagagccagagagctggcccagcagatcggcagccaccacatcagcctgaacatcgaccccgccgtgaaggccgtgatgggcatcttcagcctggtgaccggcaagagccccctgttcgccgcccacggcggcagcagcagagagaacctggccctgcagaacgtgcaggccagaatcagaatggtgctggcctacctgttcgcccagctgagcctgtggagcagaggcgtgcacggcggcctgctggtgctgggcagcgccaacgtggacgagagcctgctgggctacctgaccaagtacgactgcagcagcgccgacatcaaccccatcggcggcatcagcaagaccgacctgagagccttcgtgcagttctgcatccagagattccagctgcccgccctgcagagcatcctgctggcccccgccaccgccgagctggagcccctggccgacggccaggtgagccagaccgacgaggaggacatgggcatgacctacgccgagctgagcgtgtacggcaagctgagaaaggtggccaagatgggcccctacagcatgttctgcaagctgctgggcatgtggagacacatctgcacccccagacaggtggccgacaaggtgaagagattcttcagcaagtacagcatgaacagacacaagatgaccaccctgacccccgcctaccacgccgagaactacagccccgaggacaacagattcgacctgagacccttcctgtacaacaccagctggccctggcagttcagatgcatcgagaaccaggtgctgcagctggagagagccgagccccagagcctggacggcgtggactag

SEQ ID NO: 90296 - DNA, 1122 bp, synthetic construct
  misc_feature 1..1122: note = Description of Artificial Sequence: Synthetic coding sequence
  source 1..1122: mol_type = other DNA
atggagcccgccgtgagcgagcccatgagagaccaggtggccagaacccacctgaccgaggacacccccaaggtgaacgccgacatcgagaaggtgaaccagaaccaggccaagagatgcaccgtgatcggcggcagcggcttcctgggccagcacatggtggagcagctgctggccagaggctacgccgtgaacgtgttcgacatccagcagggcttcgacaacccccaggtgagattcttcctgggcgacctgtgcagcagacaggacctgtaccccgccctgaagggcgtgaacaccgtgttccactgcgccagccccccccccagcagcaacaacaaggagctgttctacagagtgaactacatcggcaccaagaacgtgatcgagacctgcaaggaggccggcgtgcagaagctgatcctgaccagcagcgccagcgtgatcttcgagggcgtggacatcaagaacggcaccgaggacctgccctacgccatgaagcccatcgactactacaccgagaccaagatcctgcaggagagagccgtgctgggcgccaacgaccccgagaagaacttcctgaccaccgccatcagaccccacggcatcttcggccccagagacccccagctggtgcccatcctgatcgaggccgccagaaacggcaagatgaagttcgtgatcggcaacggcaagaacctggtggacttcaccttcgtggagaacgtggtgcacggccacatcctggccgccgagcagctgagcagagacagcaccctgggcggcaaggccttccacatcaccaacgacgagcccatccccttctggaccttcctgagcagaatcctgaccggcctgaactacgaggcccccaagtaccacatcccctactgggtggcctactacctggccctgctgctgagcctgctggtgatggtgatcagccccgtgatccagctgcagcccaccttcacccccatgagagtggccctggccggcaccttccactactacagctgcgagagagccaagaaggccatgggctaccagcccctggtgaccatggacgacgccatggagagaaccgtgcagagcttcagacacctgagaagagtgaagtag

SEQ ID NO: 90297 - DNA, 765 bp, synthetic construct
  misc_feature 1..765: note = Description of Artificial Sequence: Synthetic coding sequence
  source 1..765: mol_type = other DNA
atggagcccgccgtgagcgagcccatgagagaccaggtggccagaacccacctgaccgaggacacccccaaggtgaacgccgacatcgagaaggtgaaccagaaccaggccaagagatgcaccgtgatcggcggcagcggcttcctgggccagcacatggtggagcagctgctggccagaggctacgccgtgaacgtgttcgacatccagcagggcttcgacaacccccaggtgagattcttcctgggcgacctgtgcagcagacaggacctgtaccccgccctgaagggcgtgaacaccgtgttccactgcgccagccccccccccagcagcaacaacaaggagctgttctacagagtgaactacatcggcaccaagaacgtgatcgagacctgcaaggaggccggcgtgcagaagctgatcctgaccagcagcgccagcgtgatcttcgagggcgtggacatcaagaacggcaccgaggacctgccctacgccatgaagcccatcgactactacaccgagaccaagatcctgcaggagagagccgtgctgggcgccaacgaccccgagaagaacttcctgaccaccgccatcagaccccacggcatcttcggccccagagacccccagctggtgcccatcctgatcgaggccgccagaaacggcaagatgaagttcgtgatcggcaacggcaagaacctggtggacttcaccttcgtggagaacgtggtgcacggccacatcctggccgccgagcagctgtag

SEQ ID NO: 90298 - DNA, 1122 bp, synthetic construct; identical to SEQ ID NO: 90296
  misc_feature 1..1122: note = Description of Artificial Sequence: Synthetic coding sequence
  source 1..1122: mol_type = other DNA

SEQ ID NO: 90299 - DNA, 825 bp, synthetic construct
  misc_feature 1..825: note = Description of Artificial Sequence: Synthetic coding sequence
  source 1..825: mol_type = other DNA
atggtgggcagaagagccctgatcgtgctggcccacagcgagagaaccagcttcaactacgccatgaaggaggccgccgccgccgccctgaagaagaagggctgggaggtggtggagagcgacctgtacgccatgaacttcaaccccatcatcagcagaaaggacatcaccggcaagctgaaggaccccgccaacttccagtaccccgccgagagcgtgctggcctacaaggagggccacctgagccccgacatcgtggccgagcagaagaagctggaggccgccgacctggtgatcttccagttccccctgcagtggttcggcgtgcccgccatcctgaagggctggttcgagagagtgttcatcggcgagttcgcctacacctacgccgccatgtacgacaagggccccttcagaagcaagaaggccgtgctgagcatcaccaccggcggcagcggcagcatgtacagcctgcagggcatccacggcgacatgaacgtgatcctgtggcccatccagagcggcatcctgcacttctgcggcttccaggtgctggagccccagctgacctacagcatcggccacacccccgccgacgccagaatccagatcctggagggctggaagaagagactggagaacatctgggacgagacccccctgtacttcgcccccagcagcctgttcgacctgaacttccaggccggcttcctgatgaagaaggaggtgcaggacgaggagaagaacaagaagttcggcctgagcgtgggccaccacctgggcaagagcatccccaccgacaaccagatcaaggccagaaagtag

SEQ ID NO: 90300 - DNA, 711 bp, synthetic construct
  misc_feature 1..711: note = Description of Artificial Sequence: Synthetic coding sequence
  source 1..711: mol_type = other DNA
atggtgggcagaagagccctgatcgtgctggcccacagcgagagaaccagcttcaactacgccatgaaggaggccgccgccgccgccctgaagaagaagggctgggaggtggtggagagcgacctgtacgccatgaacttcaaccccatcatcagcagaaaggacatcaccggcaagctgaaggaccccgccaacttccagtaccccgccgagagcgtgctggcctacaaggagggccacctgagccccgacatcgtggccgagcagaagaagctggaggccgccgacctggtgatcttccagagcaagaaggccgtgctgagcatcaccaccggcggcagcggcagcatgtacagcctgcagggcatccacggcgacatgaacgtgatcctgtggcccatccagagcggcatcctgcacttctgcggcttccaggtgctggagccccagctgacctacagcatcggccacacccccgccgacgccagaatccagatcctggagggctggaagaagagactggagaacatctgggacgagacccccctgtacttcgcccccagcagcctgttcgacctgaacttccaggccggcttcctgatgaagaaggaggtgcaggacgaggagaagaacaagaagttcggcctgagcgtgggccaccacctgggcaagagcatccccaccgacaaccagatcaaggccagaaagtag

SEQ ID NO: 90301 - DNA, 723 bp, synthetic construct
  misc_feature 1..723: note = Description of Artificial Sequence: Synthetic coding sequence
  source 1..723: mol_type = other DNA
atggtgggcagaagagccctgatcgtgctggcccacagcgagagaaccagcttcaactacgccatgaaggaggccgccgccgccgccctgaagaagaagggctgggaggtggtggagagcgacctgtacgccatgaacttcaaccccatcatcagcagaaaggacatcaccggcaagctgaaggaccccgccaacttccagtaccccgccgagagcgtgctggcctacaaggagggccacctgagccccgacatcgtggccgagcagaagaagctggaggccgccgacctggtgatcttccagttccccctgcagtggttcggcgtgcccgccatcctgaagggctggttcgagagagtgttcatcggcgagttcgcctacacctacgccgccatgtacgacaagggccccttcagaagcggcatcctgcacttctgcggcttccaggtgctggagccccagctgacctacagcatcggccacacccccgccgacgccagaatccagatcctggagggctggaagaagagactggagaacatctgggacgagacccccctgtacttcgcccccagcagcctgttcgacctgaacttccaggccggcttcctgatgaagaaggaggtgcaggacgaggagaagaacaagaagttcggcctgagcgtgggccaccacctgggcaagagcatccccaccgacaaccagatcaaggccagaaagtag

SEQ ID NO: 90302 - DNA, 609 bp, synthetic construct
  misc_feature 1..609: note = Description of Artificial Sequence: Synthetic coding sequence
  source 1..609: mol_type = other DNA
atggtgggcagaagagccctgatcgtgctggcccacagcgagagaaccagcttcaactacgccatgaaggaggccgccgccgccgccctgaagaagaagggctgggaggtggtggagagcgacctgtacgccatgaacttcaaccccatcatcagcagaaaggacatcaccggcaagctgaaggaccccgccaacttccagtaccccgccgagagcgtgctggcctacaaggagggccacctgagccccgacatcgtggccgagcagaagaagctggaggccgccgacctggtgatcttccagagcggcatcctgcacttctgcggcttccaggtgctggagccccagctgacctacagcatcggccacacccccgccgacgccagaatccagatcctggagggctggaagaagagactggagaacatctgggacgagacccccctgtacttcgcccccagcagcctgttcgacctgaacttccaggccggcttcctgatgaagaaggaggtgcaggacgaggagaagaacaagaagttcggcctgagcgtgggccaccacctgggcaagagcatccccaccgacaaccagatcaaggccagaaagtag

SEQ ID NO: 90303 - DNA, 696 bp, synthetic construct
  misc_feature 1..696: note = Description of Artificial Sequence: Synthetic coding sequence
  source 1..696: mol_type = other DNA
atggccggcaagaaggtgctgatcgtgtacgcccaccaggagcccaagagcttcaacggcagcctgaagaacgtggccgtggacgagctgagcagacagggctgcaccgtgaccgtgagcgacctgtacgccatgaacctggagcccagagccaccgacaaggacatcaccggcaccctgagcaaccccgaggtgttcaactacggcgtggagacccacgaggcctacaagcagagaagcctggccagcgacatcaccgacgagcagaagaaggtgagagaggccgacctggtgatcttccagttccccctgtactggttcagcgtgcccgccatcctgaagggctggatggacagagtgctgtgccagggcttcgccttcgacatccccggcttctacgacagcggcctgctgcagggcaagctggccctgctgagcgtgaccaccggcggcaccgccgagatgtacaccaagaccggcgtgaacggcgacagcagatacttcctgtggcccctgcagcacggcaccctgcacttctgcggcttcaaggtgctggccccccagatcagcttcgcccccgagatcgccagcgaggaggagagaaagggcatggtggccgcctggagccagagactgcagaccatctggaaggaggagcccatcccctgcaccgcccactggcacttcggccagtag

SEQ ID NO: 90304 - DNA, 696 bp, synthetic construct; identical to SEQ ID NO: 90303
  misc_feature 1..696: note = Description of Artificial Sequence: Synthetic coding sequence
  source 1..696: mol_type = other DNA

SEQ ID NO: 90305 - DNA, 582 bp, synthetic construct
  misc_feature 1..582: note = Description of Artificial Sequence: Synthetic coding sequence
  source 1..582: mol_type = other DNA
atggccggcaagaaggtgctgatcgtgtacgcccaccaggagcccaagagcttcaacggcagcctgaagaacgtggccgtggacgagctgagcagacagggctgcaccgtgaccgtgagcgacctgtacgccatgaacctggagcccagagccaccgacaaggacatcaccggcaccctgagcaaccccgaggtgttcaactacggcgtggagacccacgaggcctacaagcagagaagcctggccagcgacatcaccgacgagcagaagaaggtgagagaggccgacctggtgatcttccagggcaagctggccctgctgagcgtgaccaccggcggcaccgccgagatgtacaccaagaccggcgtgaacggcgacagcagatacttcctgtggcccctgcagcacggcaccctgcacttctgcggcttcaaggtgctggccccccagatcagcttcgcccccgagatcgccagcgaggaggagagaaagggcatggtggccgcctggagccagagactgcagaccatctggaaggaggagcccatcccctgcaccgcccactggcacttcggccagtag

SEQ ID NO: 90306 - DNA, 582 bp, synthetic construct; identical to SEQ ID NO: 90305
  misc_feature 1..582: note = Description of Artificial Sequence: Synthetic coding sequence
  source 1..582: mol_type = other DNA

SEQ ID NO: 90307 - DNA, 696 bp, synthetic construct; identical to SEQ ID NO: 90303
  misc_feature 1..696: note = Description of Artificial Sequence: Synthetic coding sequence
  source 1..696: mol_type = other DNA

SEQ ID NO: 90308 - DNA, 420 bp, synthetic construct
  misc_feature 1..420: note = Description of Artificial Sequence: Synthetic coding sequence
  source 1..420: mol_type = other DNA
atggccggcaagaaggtgctgatcgtgtacgcccaccaggagcccaagagcttcaacggcagcctgaagaacgtggccgtggacgagctgagcagacagggctgcaccgtgaccgtgagcgacctgtacgccatgaacctggagcccagagccaccgacaaggacatcaccggcaccctgagcaaccccgaggtgttcaactacggcgtggagacccacgaggcctacaagcagagaagcctggccagcgacatcaccgacgagcagaagaaggtgagagaggccgacctggtgatcttccagttccccctgtactggttcagcgtgcccgccatcctgaagggctggatggacagagtgctgtgccagggcttcgccttcgacatccccggcttctacgacagcggcctgctgcagtag

SEQ ID NO: 90309 - DNA, 420 bp, synthetic construct; identical to SEQ ID NO: 90308
  misc_feature 1..420: note = Description of Artificial Sequence: Synthetic coding sequence
  source 1..420: mol_type = other DNA

SEQ ID NO: 90310 - DNA, 192 bp, synthetic construct
  misc_feature 1..192: note = Description of Artificial Sequence: Synthetic coding sequence
  source 1..192: mol_type = other DNA
atggccggcaagaaggtgctgatcgtgtacgcccaccaggagcccaagagcttcaacggcagcctgaagaacgtggccgtggacgagctgagcagacagggctgcaccgtgaccgtgagcgacctgtacgccatgaacctggagcccagagccaccgacaaggacatcaccggcaccctgagcaacccctag

SEQ ID NO: 90311 - DNA, 483 bp, synthetic construct
  misc_feature 1..483: note = Description of Artificial Sequence: Synthetic coding sequence
  source 1..483: mol_type = other DNA
acccccggcctgaagcagagcagccacctgagcctgtggagcagctgggactacagactgctggacagcctgaagagagactacgccggcaagccccagccccccatcaagagcgagagaagaaacccccccagctacgccatggccggcaagaaggtgctgatcgtgtacgcccaccaggagcccaagagcttcaacggcagcctgaagaacgtggccgtggacgagctgagcagacagggctgcaccgtgaccgtgagcgacctgtacgccatgaacctggagcccagagccaccgacaaggacatcaccggcaccctgagcaaccccgaggtgttcaactacggcgtggagacccacgaggcctacaagcagagaagcctggccagcgacatcaccgacgagcagaagaaggtgagagaggccgacctggtgatcttccagatgctgagcaccgagctgagcctgaccagcagatgctag

SEQ ID NO: 90312 - DNA, 231 bp, synthetic construct
  misc_feature 1..231: note = Description of Artificial Sequence: Synthetic coding sequence
  source 1..231: mol_type = other DNA
atggccgccgccgccgccagcagaggcgtgggcgccaagctgggcctgagagagatcagaatccacctgtgccagagaagccccggcagccagggcgtgagagacttcatcgagaagagatacgtggagctgaagaaggccaaccccgacctgcccatcctgatcagagagtgcagcgacgtgcagcccaagctgtgggccagatacgccagcagagtgcagaacagctag

SEQ ID NO: 90313 - DNA, 213 bp, synthetic construct
  misc_feature 1..213: note = Description of Artificial Sequence: Synthetic coding sequence
  source 1..213: mol_type = other DNA
atgtggttcgagatcctgcccggcctgagcgtgatgggcgtgtgcctgctgatccccggcctggccaccgcctacatccacagattcaccaacggcggcaaggagaagagagtggcccacttcggctaccactggagcctgatggagagagacagaagaatcagcggcgtggacagatactacgtgagcaagggcctggagaacatcgactag

SEQ ID NO: 90314 - DNA, 1068 bp, synthetic construct
  misc_feature 1..1068: note = Description of Artificial Sequence: Synthetic coding sequence
  source 1..1068: mol_type = other DNA
atggccctgagactgctgaagctggccgccaccagcgccagcgccagagtggtggccgccggcgcccagagagtgagaggcatccacagcagcgtgcagtgcaagctgagatacggcatgtggcacttcctgctgggcgacaaggccagcaagagactgaccgagagaagcagagtgatcaccgtggacggcaacatctgcaccggcaagggcaagctggccaaggagatcgccgagaagctgggcttcaagcacttccccgaggccggcatccactaccccgacagcaccaccggcgacggcaagcccctggccaccgactacaacggcaactgcagcctggagaagttctacgacgaccccagaagcaacgacggcaacagctacagactgcagagctggctgtacagcagcagactgctgcagtacagcgacgccctggagcacctgctgaccaccggccagggcgtggtgctggagagaagcatcttcagcgacttcgtgttcctggaggccatgtacaaccagggcttcatcagaaagcagtgcgtggaccactacaacgaggtgaagagcgtgaccatctgcgactacctgcccccccacctggtgatctacatcgacgtgcccgtgcccgaggtgcagagaagaatccagaagaagggcgacccccacgagatgaagatcaccagcgcctacctgcaggacatcgagaacgcctacaagaagaccttcctgcccgagatgagcgagaagtgcgaggtgctgcagtacagcgccagagaggcccaggacagcaagaaggtggtggaggacatcgagtacctgaagttcgacaagggcccctggctgaagcaggacaacagaaccctgtaccacctgagactgctggtgcaggacaagttcgaggtgctgaactacaccagcatccccatcttcctgcccgaggtgaccatcggcgcccaccagaccgacagagtgctgcaccagttcagagagctgcccggcagaaagtacagccccggctacaacaccgaggtgggcgacaagtggatctggctgaagtag

SEQ ID NO: 90315 - DNA, 1068 bp, synthetic construct
  misc_feature 1..1068: note = Description of Artificial Sequence: Synthetic coding sequence
  source 1..1068: mol_type = other DNA
atggccctgagactgctgaagctggccgccaccagcgccagcgccagagtggtggccagagcccccagcgcctggagaggcatccacagcagcgtgcagtgcaagctgagatacggcatgtggcacttcctgctgggcgacaaggccagcaagagactgaccgagagaagcagagtgatcaccgtggacggcaacatctgcaccggcaagggcaagctggccaaggagatcgccgagaagctgggcttcaagcacttccccgaggccggcatccactaccccgacagcaccaccggcgacggcaagcccctggccaccgactacaacggcaactgcagcctggagaagttctacgacgaccccagaagcaacgacggcaacagctacagactgcagagctggctgtacagcagcagactgctgcagtacagcgacgccctggagcacctgctgaccaccggccagggcgtggtgctggagagaagcatcttcagcgacttcgtgttcctggaggccatgtacaaccagggcttcatcagaaagcagtgcgtggaccactacaacgaggtgaagagcgtgaccatctgcgactacctgcccccccacctggtgatctacatcgacgtgcccgtgcccgaggtgcagagaagaatccagaagaagggcgacccccacgagatgaagatcaccagcgcctacctgcaggacatcgagaacgcctacaagaagaccttcctgcccgagatgagcgagaagtgcgaggtgctgcagtacagcgccagagaggcccaggacagcaagaaggtggtggaggacatcgagtacctgaagttcgacaagggcccctggctgaagcaggacaacagaaccctgtaccacctgagactgctggtgcaggacaagttcgaggtgctgaactacaccagcatccccatcttcctgcccgaggtgaccatcggcgcccaccagaccgacagagtgctgcaccagttcagagagctgcccggcagaaagtacagccccggctacaacaccgaggtgggcgacaagtggatctggctgaagtag

SEQ ID NO: 90316 - DNA, 426 bp, synthetic construct
  misc_feature 1..426: note = Description of Artificial Sequence: Synthetic coding sequence
  source 1..426: mol_type = other DNA
atggcccccaaggtgttcagacagtactgggacatccccgacggcaccgactgccacagaaaggcctacagcaccaccagcatcgccagcgtggccggcctgaccgccgccgcctacagagtgaccctgaacccccccggcaccttcctggagggcgtggccaaggtgggccagtacaccttcaccgccgccgccgtgggcgccgtgttcggcctgaccacctgcatcagcgcccacgtgagagagaagcccgacgaccccctgaactacttcctgggcggctgcgccggcggcctgaccctgggcgccagaacccacaactacggcatcggcgccgccgcctgcgtgtacttcggcatcgccgccagcctggtgaagatgggcagactggagggctgggaggtgttcgccaagcccaaggtgtag

SEQ ID NO: 90317 - DNA, 687 bp, synthetic construct
  misc_feature 1..687: note = Description of Artificial Sequence: Synthetic coding sequence
  source 1..687: mol_type = other DNA
atggcccccaaggtgttcagacagtactgggacatccccgacggcaccgactgccacagaaaggcctacagcaccaccagcatcgccagcgtggccggcctgaccgccgccgcctacagagtgaccctgaacccccccggcaccttcctggagggcgtggccaaggtgggccagtacaccttcaccgccgccgccgtgggcgccgtgttcggcctgaccacctgcatcagcgcccacgtgagagagaagcccgacgaccccctgaactacttcctgggcggctgcgccggcggcctgaccctgggcgccagaaagaccggcagccactgcgtggtgcaggccggcctgaagctgctggccagcagcagcccccacaccagcgccagccagagcgccggcatcatcggcatgagccactgcgtgcagagattctgggtgcccagcagcagcgcctgcctggaggtgctgagcggcgagagcaccgacgtgcacgcctgcagcagcaccagaggcgcctgcaacagcagcggcagcagacccctgcccgagctgggcgccagagccagcggcagcctgagaaagggcggccacacccaccccgcccccagaggcgccggcgccctgacccccgtgcaggccctgatcgagagcctgctgaacaccctgggcagcaaccccagaacctag

SEQ ID NO: 90318 - DNA, 684 bp, synthetic construct
  misc_feature 1..684: note = Description of Artificial Sequence: Synthetic coding sequence
  source 1..684: mol_type = other DNA
atgcaggagcccagaagagtgaccccctgcctgggcaagagaggcgtgaagaccccccagctgcagcccggcagcgccttcctgcccagagtgagaagacagagcttccccgccagaagcgacagctacaccaccgtgagagacttcctggccgtgcccagaaccatcagcagcgccagcgccaccctgatcatggccgtggccgtgagccacttcagacccggccccgaggtgtgggacaccgccagcatggccgccagcaaggtgaagcaggacatgcccccccccggcggctacggccccatcgactacaagagaaacctgcccagaagaggcctgagcggctacagcatgctggccatcggcatcggcaccctgatctacggccactggagcatcatgaagtggaacagagagagaagaagactgcagatcgaggacttcgaggccagaatcgccctgctgcccctgctgcaggccgagaccgacagaagaaccctgcagatgctgagagagaacctggaggaggaggccatcatcatgaaggacgtgcccgactggaaggtgggcgagagcgtgttccacaccaccagatgggtgccccccctgatcggcgagctgtacggcctgagaaccaccgaggaggccctgcacgccagccacggcttcatgtggtacacctag

SEQ ID NO: 90319 - DNA, 435 bp, synthetic construct
  misc_feature 1..435: note = Description of Artificial Sequence: Synthetic coding sequence
  source 1..435: mol_type = other DNA
atggccgccagcaaggtgaagcaggacatgcccccccccggcggctacggccccatcgactacaagagaaacctgcccagaagaggcctgagcggctacagcatgctggccatcggcatcggcaccctgatctacggccactggagcatcatgaagtggaacagagagagaagaagactgcagatcgaggacttcgaggccagaatcgccctgctgcccctgctgcaggccgagaccgacagaagaaccctgcagatgctgagagagaacctggaggaggaggccatcatcatgaaggacgtgcccgactggaaggtgggcgagagcgtgttccacaccaccagatgggtgccccccctgatcggcgagctgtacggcctgagaaccaccgaggaggccctgcacgccagccacggcttcatgtggtacacctag

SEQ ID NO: 90320 - DNA, 300 bp, synthetic construct
  misc_feature 1..300: note = Description of Artificial Sequence: Synthetic coding sequence
  source 1..300: mol_type = other DNA
atggccgccgccgccgccagcagaggcgtgggcgccaagctgggcctgagagagatcagaatccacctgtgccagagaagccccggcagccagggcgtgagagacttcatcgagaagagatacgtggagctgaagaaggccaaccccgacctgcccatcctgatcagagagtgcagcgacgtgcagcccaagctgtgggccagatacgccttcggccaggagaccaacgtgcccctgaacaacttcagcgccgaccaggtgaccagagccctggagaacgtgctgagcggcaaggcctag

SEQ ID NO: 90321 - DNA, 720 bp, synthetic construct
  misc_feature 1..720: note = Description of Artificial Sequence: Synthetic coding sequence
  source 1..720: mol_type = other DNA
atggccggcgtgctgaagaagaccaccggcctggtgggcctggccgtgtgcaacaccccccacgaggtgtgcaccttcgtgctgagcagcttcctgaacagccagggcagactgaacagctgccacttcgcctactgcagagtgaacggcatccagatgttccaggccctgaactacaagcccagagagctgctgagacacggcagatgcccccccaccagcctgatcagatgccacatcttcatctacttctgccacgacctgttcatcaagcccgtgttcctgctgaccttcagcctgaccttcagctggctgcacctgtgcctgctgctgagcgcccccagccagatctacatcagcgtgttccacctgttcagcctgccctacagattctgcctgggcgccctggactacatctacctgggcctgctgaaggtgctgccccccttccccagcgtgagaagcttccccagcgtgttcaccaacgtgttcatcaagaagacccacaagttcttcatcctgctggtgcccagcatcatcacccccttcctgtgcttcaccctgcagatcacccagaagagctacctgtacttcctgcagttcctgagctacagccccctgaacgccctgagccacccctggagattcagcagcagccccatcatcagcatgctgcccaaccccatggtgagcagctacttcagccccagcctgacctag

SEQ ID NO: 90322 - DNA, 351 bp, synthetic construct
  misc_feature 1..351: note = Description of Artificial Sequence: Synthetic coding sequence
  source 1..351: mol_type = other DNA
atggccggcgtgctgaagaagaccaccggcctggtgggcctggccgtgtgcaacaccccccacgagagactgagaatcctgtacaccaagatcctggacgtgctggaggagatccccaagaacgccgcctacagaaagtacaccgagcagatcaccaacgagaagctggccatggtgaaggccgagcccgacgtgaagaagctggaggaccagctgcagggcggccagctggaggaggtgatcctgcaggccgagcacgagctgaacctggccagaaagatgagagagtggaagctgtgggagcccctggtggaggagccccccgccgaccagtggaagtggcccatctag

SEQ ID NO: 90323 - DNA, 351 bp, synthetic construct
  misc_feature 1..351: note = Description of Artificial Sequence: Synthetic coding sequence
  source 1..351: mol_type = other DNA
atgccctacagagtgggccagaccaccggcctggtgggcctggccgtgtgcaacaccccccacgagagactgagaatcctgtacaccaagatcctggacgtgctggaggagatccccaagaacgccgcctacagaaagtacaccgagcagatcaccaacgagaagctggccatggtgaaggccgagcccgacgtgaagaagctggaggaccagctgcagggcggccagctggaggaggtgatcctgcaggccgagcacgagctgaacctggccagaaagatgagagagtggaagctgtgggagcccctggtggaggagccccccgccgaccagtggaagtggcccatctag

SEQ ID NO: 90324 - DNA, 465 bp, synthetic construct
  misc_feature 1..465: note = Description of Artificial Sequence: Synthetic coding sequence
  source 1..465: mol_type = other DNA
atgggcaaggacatcagacccagaagcgccagagccgcctgcaagggcgtgggcctgtggagcggctgcttcggcaagatggccggcagcggcgtgagacaggccaccagcaccgccagcaccttcgtgaagcccatcttcagcagagacatgaacgaggccaagagaagagtgagagagctgtacagagcctggtacagagaggtgcccaacaccgtgcaccagttccagctggacatcaccgtgaagatgggcagagacaaggtgagagagatgttcatgaagaacgcccacgtgaccgaccccagagtggtggacctgctggtgatcaagggcaagatcgagctggaggagaccatcaaggtgtggaagcagagaacccacgtgatgagattcttccacgagaccgaggcccccagacccaaggacttcctgagcaagttctacgtgggccacgacccctag

SEQ ID NO: 90325 - DNA, 342 bp, synthetic construct
  misc_feature 1..342: note = Description of Artificial Sequence: Synthetic coding sequence
  source 1..342: mol_type = other DNA
atggccagcgccaccagactgatccagagactgagaaactgggccagcggccacgacctgcagggcaagctgcagctgagataccaggagatcagcaagagaacccagcccccccccaagctgcccgtgggccccagccacaagctgagcaacaactactactgcaccagagacggcagaagagagagcgtgccccccagcatcatcatgagcagccagaaggccctggtgagcggcaagcccgccgagagcagcgccgtggccgccaccgagaagaaggccgtgacccccgccccccccatcaagagatgggagctgagcagcgaccagccctacctgtag

SEQ ID NO: 90326 - DNA, 519 bp, synthetic construct
  misc_feature 1..519: note = Description of Artificial Sequence: Synthetic coding sequence
  source 1..519: mol_type = other DNA
atgcccggcatcgtggagctgcccaccctggaggagctgaaggtggacgaggtgaagatcagcagcgccgtgctgaaggccgccgcccaccactacggcgcccagtgcgacaagcccaacaaggagttcatgctgtgcagatgggaggagaaggaccccagaagatgcctggaggagggcaagctggtgaacaagtgcgccctggacttcttcagacagatcaagagacactgcgccgagcccttcaccgagtactggacctgcatcgactacaccggccagcagctgttcagacactgcagaaagcagcaggccaagttcgacgagtgcgtgctggacaagctgggctgggtgagacccgacctgggcgagctgagcaaggtgaccaaggtgaagaccgacagacccctgcccgagaacccctaccacagcagacccagacccgaccccagccccgagatcgagggcgacctgcagcccgccacccacggcagcagattctacttctggaccaagtag

SEQ ID NO: 90327 - DNA, 387 bp, synthetic construct
  misc_feature 1..387: note = Description of Artificial Sequence: Synthetic coding sequence
  source 1..387: mol_type = other DNA
atgcccggcatcgtggagctgcccaccctggaggagctgaaggtggacgaggtgaagatcagcagcgccgtgctgaaggccgccgcccaccactacggcgcccagtgcgacaagcccaacaaggagttcatgctgtgcagatgggaggagaaggaccccagaagatgcctggaggagggcaagctggtgaacaagtgcgccctggacttcttcagacagatcaagagacactgcgccgagcccttcaccgagtactggacctgcatcgactacaccggccagcagctgttcagacactgcagaaagcagcaggccaagttcgacgagtgcgtgctggacaagctgggctgggtgagacccgacctgggcgagctgagcaagggctag

SEQ ID NO: 90328 - DNA, 1134 bp, synthetic construct
  misc_feature 1..1134: note = Description of Artificial Sequence: Synthetic coding sequence
  source 1..1134: mol_type = other DNA
atggccgccgccgcccagagcagagtggtgagagtgctgagcatgagcagaagcgccatcaccgccatcgccaccagcgtgtgccacggccccccctgcagacagctgcaccacgccctgatgccccacggcaagggcggcagaagcagcgtgagcggcatcgtggccaccgtgttcggcgccaccggcttcctgggcagatacgtggtgaaccacctgggcagaatgggcagccaggtgatcatcccctacagatgcgacaagtacgacatcatgcacctgagacccatgggcgacctgggccagctgctgttcctggagtgggacgccagagacaaggacagcatcagaagagtggtgcagcacagcaacgtggtgatcaacctgatcggcagagactgggagaccaagaacttcgacttcgaggacgtgttcgtgaagatcccccaggccatcgcccagctgagcaaggaggccggcgtggagaagttcatccacgtgagccacctgaacgccaacatcaagagcagcagcagatacctgagaaacaaggccgtgggcgagaaggtggtgagagacgccttccccgaggccatcatcgtgaagcccagcgacatcttcggcagagaggacagattcctgaacagcttcgccagcatgcacagattcggccccatccccctgggcagcctgggctggaagaccgtgaagcagcccgtgtacgtggtggacgtgagcaagggcatcgtgaacgccgtgaaggaccccgacgccaacggcaagagcttcgccttcgtgggccccagcagatacctgctgttccacctggtgaagtacatcttcgccgtggcccacagactgttcctgcccttccccctgcccctgttcgcctacagatgggtggccagagtgttcgagatcagccccttcgagccctggatcaccagagacaaggtggagagaatgcacatcaccgacatgaagctgccccacctgcccggcctggaggacctgggcatccaggccacccccctggagctgaaggccatcgaggtgctgagaagacacagaacctacagatggctgagcgccgagatcgaggacgtgaagcccgccaagaccgtgaacatctag

SEQ ID NO: 90329 - DNA, 984 bp, synthetic construct
  misc_feature 1..984: note = Description of Artificial Sequence: Synthetic coding sequence
  source 1..984: mol_type = other DNA
atggccctggtgcacaagctgctgagaggcacctacttcctgagaaagttcagcaagcccaccagcgccctgtaccccttcctgggcatcagattcgccgagtacagcagcagcctgcagaagcccgtggccagccccggcaaggccagcagccagagaaagaccgagggcgacctgcagggcgaccaccagaaggaggtggccctggacatcaccagcagcgaggagaagcccgacgtgagcttcgacaaggccatcagagacgaggccatctaccacttcagactgctgaaggacgagatcgtggaccactggagaggccccgagggccaccccctgcacgaggtgctgctggagcaggccaaggtggtgtggcagttcagaggcaaggaggacctggacaagtggaccgtgaccagcgacaagaccatcggcggcagaagcgaggtgttcctgaagatgggcaagaacaaccagagcgccctgctgtacggcaccctgagcagcgaggccccccaggacggcgagagcaccagaagcggctactgcgccatgatcagcagaatccccagaggcgccttcgagagaaagatgagctacgactggagccagttcaacaccctgtacctgagagtgagaggcgacggcagaccctggatggtgaacatcaaggaggacaccgacttcttccagagaaccaaccagatgtacagctacttcatgttcaccagaggcggcccctactggcaggaggtgaagatccccttcagcaagttcttcttcagcaacagaggcagaatcagagacgtgcagcacgagctgcccctggacaagatcagcagcatcggcttcaccctggccgacaaggtggacggccccttcttcctggagatcgacttcatcggcgtgttcaccgaccccgcccacaccgaggagttcgcctacgagaacagccccgagctgaaccccagactgttcaagtag

SEQ ID NO: 90330 - DNA, 576 bp, synthetic construct
  misc_feature 1..576: note = Description of Artificial Sequence: Synthetic coding sequence
  source 1..576: mol_type = other DNA
atggccctggtgcacaagctgctgagaggcacctacttcctgagaaagttcagcaagcccaccagcgccctgtaccccttcctgggcatcagattcgccgagtacagcagcagcctgcagaagcccgtggccagccccggcaaggccagcagccagagaaagaccgagggcgacctgcagggcgaccaccagaaggaggtggccctggacatcaccagcagcgaggagaagcccgacgtgagcttcgacaaggccatcagagacgaggccatctaccacttcagactgctgaaggacgagatcgtggaccactggagaggccccgagggccaccccctgcacgaggtgctgctggagcaggccaaggtggtgtggcagttcagaggcaaggaggacctggacaagtggaccgtgaccagcgacaagaccatcggcggcagaagcgaggtgttcctgaagatgggcaagaacaaccagagcgccctgctgtacggcaccctgagcagcgaggccccccaggacggcgagagcaccagaagcggctactgcgccatgatcagcagaatccccagatag

SEQ ID NO: 90331 - DNA, 630 bp, synthetic construct
  misc_feature 1..630: note = Description of Artificial Sequence: Synthetic coding sequence
  source 1..630: mol_type = other DNA
atggccctggtgcacaagctgctgagaggcacctacttcctgagaaagttcagcaagcccaccagcgccctgtaccccttcctgggcatcagattcgccgagtacagcagcagcctgcagaagcccgtggccagccccggcaaggccagcagccagagaaagaccgagggcgacctgcagggcgaccaccagaaggaggtggccctggacatcaccagcagcgaggagaagcccgacgtgagcttcgacaaggccatcagagacgaggccatctaccacttcagactgctgaaggacgagatcgtggaccactggagaggccccgagggccaccccctgcacgaggtgctgctggagcaggccaaggtggtgtggcagttcagaggcaaggaggacctggacaagtggaccgtgaccagcgacaagaccatcggcggcagaagcgaggtgttcctgaagatgggcaagaacaaccagagcgccctgctgtacggcaccctgagcagcgaggccccccaggacggcgagagcaccagaagcggctactgcgccatgatcagcagaatccccagaggcgccttcgagagaaagatgagctacgactggagccagttcaacaccctgtactag

SEQ ID NO: 90332 - DNA, 510 bp, synthetic construct
  misc_feature 1..510: note = Description of Artificial Sequence: Synthetic coding sequence
  source 1..510: mol_type = other DNA
atgggctggagccaggacctgttcagagccctgtggagaagcctgagcagagaggtgaaggagcacgtgggcaccgaccagttcggcaacaagtactactacatcccccagtacaagaactggagaggccagaccatcagagagaagagaatcgtggaggccgccaacaagaaggaggtggactacgaggccggcgacatccccaccgagtgggaggcctggatcagaagaaccagaaagaccccccccaccatggaggagatcctgaagaacgagaagcacagagaggagatcaagatcaagagccaggacttctacgagaaggagaagctgctgagcaaggagaccagcgaggagctgctgcccccccccgtgcagacccagatcaagggccacgccagcgccccctacttcggcaaggaggagcccagcgtggcccccagcagcaccggcaagaccttccagcccggcagctggatgcccagagacggcaagagccacaaccagtag

SEQ ID NO: 90333 - DNA, 384 bp, synthetic construct
  misc_feature 1..384: note = Description of Artificial Sequence: Synthetic coding sequence
  source 1..384: mol_type = other DNA
atgtacatcgacagctacaacagcagaggcttcatgatcaacggcaacagagtgctgggcccctgcgccctgctgccccacagcgtggtgcagtggaacgtgggcagccaccaggacatcaccgaggacagcttcagcctgttctggctgctggagcccagaatcgagatcgtggtggtgggcaccggcgacagaaccgagagactgcagagccaggtgctgcaggccatgagacagagaggcatcgccgtggaggtgcaggacacccccaacgcctgcgccaccttcaacttcctgtgccacgagggcagagtgaccggcgccgccctgatccccccccccggcggcaccagcctgaccagcctgggccaggccgcccagtag

SEQ ID NO: 90334 - DNA, 555 bp, synthetic construct
  misc_feature 1..555: note = Description of Artificial Sequence: Synthetic coding sequence
  source 1..555: mol_type = other DNA
atggccaccgccctggccctgagaagcctgtacagagccagacccagcctgagatgcccccccgtggagctgccctgggcccccagaagaggccacagactgagccccgccgacgacgagctgtaccagagaaccagaatcagcctgctgcagagagaggccgcccaggccatgtacatcgacagctacaacagcagaggcttcatgatcaacggcaacagagtgctgggcccctgcgccctgctgccccacagcgtggtgcagtggaacgtgggcagccaccaggacatcaccgaggacagcttcagcctgttctggctgctggagcccagaatcgagatcgtggtggtgggcaccggcgacagaaccgagagactgcagagccaggtgctgcaggccatgagacagagaggcatcgccgtggaggtgcaggacacccccaacgcctgcgccaccttcaacttcctgtgccacgagggcagagtgaccggcgccgccctgatccccccccccggcggcaccagcctgaccagcctgggccaggccgcccagtag

SEQ ID NO: 90335 - DNA, 384 bp, synthetic construct; identical to SEQ ID NO: 90333
  misc_feature 1..384: note = Description of Artificial Sequence: Synthetic coding sequence
  source 1..384: mol_type = other DNA

SEQ ID NO: 90336 - DNA, 384 bp, synthetic construct; identical to SEQ ID NO: 90333
  misc_feature 1..384: note = Description of Artificial Sequence: Synthetic coding sequence
  source 1..384: mol_type = other DNA

SEQ ID NO: 90337 - DNA, 528 bp, synthetic construct
  misc_feature 1..528: note = Description of Artificial Sequence: Synthetic coding sequence
  source 1..528: mol_type = other DNA
atgggcgccctggtgatcagaggcatcagaaacttcaacctggagaacagagccgagagagagatcagcaagatgaagcccagcgtggcccccagacaccccagcaccaacagcctgctgagagagcagatcagcctgtaccccgaggtgaagggcgagatcgccagaaaggacgagaagctgctgagcttcctgaaggacgtgtacgtggacagcaaggaccccgtgagcagcctgcaggtgaaggccgccgagacctgccaggagcccaaggagttcagactgcccaaggaccaccacttcgacatgatcaacatcaagagcatccccaagggcaagatcagcatcgtggaggccctgaccctgctgaacaaccacaagctgttccccgagacctggaccgccgagaagatcatgcaggagtaccagctggagcagaaggacgtgaacagcctgctgaagtacttcgtgaccttcgaggtggagatcttcccccccgaggacaagaaggccatcagaagcaagtag

SEQ ID NO: 90338 - DNA, 519 bp, synthetic construct
  misc_feature 1..519: note = Description of Artificial Sequence: Synthetic coding sequence
  source 1..519: mol_type = other DNA
atgcccgacagctgggacaaggacgtgtaccccgagccccccagaagaacccccgtgcagcccaaccccatcgtgtacatgatgaaggccttcgacctgatcgtggacagacccgtgaccctggtgagagagttcatcgagagacagcacgccaagaacagatactactactaccacagacagtacagaagagtgcccgacatcaccgagtgcaaggaggaggacatcatgtgcatgtacgaggccgagatgcagtggaagagagactacaaggtggaccaggagatcatcaacatcatgcaggacagactgaaggcctgccagcagagagagggccagaactaccagcagaactgcatcaaggaggtggagcagttcacccaggtggccaaggcctaccaggacagataccaggacctgggcgcctacagcagcgccagaaagtgcctggccaagcagagacagagaatgctgcaggagagaaaggccgccaaggaggccgccgccgccaccagctag

SEQ ID NO: 90339 - DNA, 507 bp, synthetic construct
  misc_feature 1..507: note = Description of Artificial Sequence: Synthetic coding sequence
  source 1..507: mol_type = other DNA
atgcccgacagctgggacaaggacgtgtaccccgagccccccagaagaacccccgtgcagcccaaccccatcgtgtacatgatgaaggccttcgacctgatcgtggacagacccgtgaccctggtgagagagttcatcgagagacagcacgccaagaacagatactactactaccacagacagtacagaagagtgcccgacatcaccgagtgcaaggaggaggacatcatgtgcatgtacgaggccgagatgcagtggaagagagactacaaggtggaccaggagatcatcaacatcatgcaggacagactgaaggcctgccagcagagagagggccagaactaccagcagaactgcatcaaggaggtggagcagttcacccaggtggccaaggcctaccaggacagatgcgcctgccccacccacccccagccccccaccatcctgctgagacccggcggccagaaccactgcaagagcagcctgcccagcctggtgctgacctag

SEQ ID NO: 90340 - DNA, 492 bp, synthetic construct
  misc_feature 1..492: note = Description of Artificial Sequence: Synthetic coding sequence
  source 1..492: mol_type = other DNA
atggccgccggcctgttcggcctgagcgccagaagactgctggccgccgccgccaccagaggcctgcccgccgccagagtgagatgggagagcagcttcagcagaaccgtggtggcccccagcgccgtggccggcaagagaccccccgagcccaccaccccctggcaggaggaccccgagcccgaggacgagaacctgtacgagaagaaccccgacagccacggctacgacaaggaccccgtgctggacgtgtggaacatgagactggtgttcttcttcggcgtgagcatcatcctggtgctgggcagcaccttcgtggcctacctgcccgactacagatgcaccggctgccccagagcctgggacggcatgaaggagtggagcagaagagaggccgagagactggtgaagtacagagaggccaacggcctgcccatcatggagagcaactgcttcgaccccagcaagatccagctgcccgaggacgagtag

SEQ ID NO: 90341 - DNA, 462 bp, synthetic construct
  misc_feature 1..462: note = Description of Artificial Sequence: Synthetic coding sequence
  source 1..462: mol_type = other DNA
atggccgccggcctgttcggcctgagcgccagaagactgctggccgccgccgccaccagaggcctgcccgccgccagagtgagatgggagagcagcttcagcagaaccgtggtggcccccagcgccgtggccggcaagagaccccccgagcccaccaccccctggcaggaggaccccgagcccgaggacgagaacctgtacgagaagaaccccgacagccacggctacgacaaggaccccgtgctggacgtgtggaacatgagactggtgttcttcttcggcgtgagcatcatcctggtgctgggcagcaccttcgtggcctacctgcccgactacagaatgaaggagtggagcagaagagaggccgagagactggtgaagtacagagaggccaacggcctgcccatcatggagagcaactgcttcgaccccagcaagatccagctgcccgaggacgagtag

SEQ ID NO: 90342 - DNA, 474 bp, synthetic construct
  misc_feature 1..474: note = Description of Artificial Sequence: Synthetic coding sequence
  source 1..474: mol_type = other DNA
gccgcccccagcgtgatggccgccggcctgttcggcctgagcgccagaagactgctggccgccagaagaagaggcctgcccgccgccagagtgagatgggagagcagcttcagcagaaccgtggtggcccccagcgccgtggccggcaagagaccccccgagcccaccaccccctggcaggaggaccccgagcccgaggacgagaacctgtacgagaagaaccccgacagccacggctacgacaaggaccccgtgctggacgtgtggaacatgagactggtgttcttcttcggcgtgagcatcatcctggtgctgggcagcaccttcgtggcctacctgcccgactacagaatgaaggagtggagcagaagagaggccgagagactggtgaagtacagagaggccaacggcctgcccatcatggagagcaactgcttcgaccccagcaagatccagctgcccgaggacgagtag

SEQ ID NO: 90343 - DNA, 297 bp, synthetic construct
  misc_feature 1..297: note = Description of Artificial Sequence: Synthetic coding sequence
  source 1..297: mol_type = other DNA
atggcccacgagcacggccacgagcacggccaccacaagatggagctgcccgactacagacagtggaagatcgagggcacccccctggagaccatccagaagaagctggccgccaagggcctgagagacccctggggcagaaacgaggcctggagatacatgggcggcttcgccaagagcgtgagcttcagcgacgtgttcttcaagggcttcaagtggggcttcgccgccttcgtggtggccgtgggcgccgagtactacctggagagcctgaacaaggacaagaagcaccactag

SEQ ID NO: 90344 - DNA, 297 bp, synthetic construct; identical to SEQ ID NO: 90343
  misc_feature 1..297: note = Description of Artificial Sequence: Synthetic coding sequence
  source 1..297: mol_type = other DNA

SEQ ID NO: 90345 - DNA, 198 bp, synthetic construct
  misc_feature 1..198: note = Description of Artificial Sequence: Synthetic coding sequence
  source 1..198: mol_type = other DNA
atggcccacgagcacggccacgagcacggccaccacaagatggagctgcccgactacagacagtggaagatcgagggcacccccctggagaccatccagaagaagctggccgccaagggcctgagagacccctggggcagaaacgaggcctggagatacatgggcggcttcgccaagagcgtgagcttcagcgactag

SEQ ID NO: 90346 - DNA, 297 bp, synthetic construct; identical to SEQ ID NO: 90343
  misc_feature 1..297: note = Description of Artificial Sequence: Synthetic coding sequence
  source 1..297: mol_type = other DNA

SEQ ID NO: 90347 - DNA, 741 bp, synthetic construct; identical to SEQ ID NO: 88596
  misc_feature 1..741: note = Description of Artificial Sequence: Synthetic coding sequence
  source 1..741: mol_type = other DNA

SEQ ID NO: 90348 - DNA, 561 bp, synthetic construct
  misc_feature 1..561: note = Description of Artificial Sequence: Synthetic coding sequence
  source 1..561: mol_type = other DNA
atggccgtggccagagccggcgtgctgggcgtgcagtggctgcagagagccagcagaaacgtgatgcccctgggcgccagaaccgccagccacatgaccaaggacatgttccccggcccctaccccagaacccccgaggagagagccgccgccgccaagaagtacaacatgagagtggaggactacgagccctaccccgacgacggcatgggctacggcgactaccccaagctgcccgacagaagccagcacgagagagacccctggtacagctgggaccagcccggcctgagactgaactggggcgagcccatgcactggcacctggacatgtacaacagaaacagagtggacaccagccccacccccgtgagctggcacgtgatgtgcatgcagctgttcggcttcctggccttcatgatcttcatgtgctgggtgggcgacgtgtaccccgtgtaccagcccgtgggccccaagcagtacccctacaacaacctgtacctggagagaggcggcgaccccagcaaggagcccgagagagtggtgcactacgagatctag

SEQ ID NO: 90349 - DNA, 519 bp, synthetic construct
  misc_feature 1..519: note = Description of Artificial Sequence: Synthetic coding sequence
  source 1..519: mol_type = other DNA
atggccgtggccagagccggcgtgctgggcgtgcagtggctgcagagagccagcagaaacgtgatgcccctgggcgccagaaccgccagccacatgaccaaggacatgttccccggcccctaccccagaacccccgaggagagagccgccgccgccaagaagtacaacatgagagtggaggactacgagccctaccccgacgacggcatgggctacggcgactaccccaagctgcccgacagaagccagcacgagagagacccctggtacagctgggaccagcccggcctgagactgaactggggcgagcccatgcactggcacctggacatgtacaacagaaacagagtggacaccagccccacccccgtgagctggcacgtgatgtgcatgcagctgttcggcttcctggccttcatgatcttcatgtgctgggtgggcgacgtgtaccccgtgtaccagcccgtgtgcagacaccacttcagctacaacctgggcttcctgagcgccctgggctag

SEQ ID NO: 90350 - DNA, 468 bp, synthetic construct
  misc_feature 1..468: note = Description of Artificial Sequence: Synthetic coding sequence
  source 1..468: mol_type = other DNA
atgaccaaggacatgttccccggcccctaccccagaacccccgaggagagagccgccgccgccaagaagtacaacatgagagtggaggactacgagccctaccccgacgacggcatgggctacggcgactaccccaagctgcccgacagaagccagcacgagagagacccctggtacagctgggaccagcccggcctgagactgaactggggcgagcccatgcactggcacctggacatgtacaacagaaacagagtggacaccagccccacccccgtgagctggcacgtgatgtgcatgcagctgttcggcttcctggccttcatgatcttcatgtgctgggtgggcgacgtgtaccccgtgtaccagcccgtgggccccaagcagtacccctacaacaacctgtacctggagagaggcggcgaccccagcaaggagcccgagagagtggtgcactacgagatctag

SEQ ID NO: 90351 - DNA, 519 bp, synthetic construct; identical to SEQ ID NO: 90349
  misc_feature 1..519: note = Description of Artificial Sequence: Synthetic coding sequence
  source 1..519: mol_type = other DNA

SEQ ID NO: 90352 - DNA, 540 bp, synthetic construct
  misc_feature 1..540: note = Description of Artificial Sequence: Synthetic coding sequence
  source 1..540: mol_type = other DNA
atggccttcctggccagcggcccctacctgacccaccagcagaaggtgctgagactgtacaagagagccctgagacacctggagagctggtgcgtgcagagagacaagtacagatacttcgcctgcctgatgagagccagattcgaggagcacaagaacgagaaggacatggccaaggccacccagctgctgaaggaggccgaggaggagttctggtacagacagcacccccagccctacatcttccccgacagccccggcggcaccagctacgagagatacgactgctacaaggtgcccgagtggtgcctggacgactggcaccccagcgagaaggccatgtaccccgactacttcgccaagagagagcagtggaagaagctgagaagagagagctgggagagagaggtgaagcagctgcaggaggagaccccccccggcggccccctgaccgaggccctgccccccgccagaaaggagggcgacctgccccccctgtggtggtacatcgtgaccagacccagagagagacccatgtag

SEQ ID NO: 90353 - DNA, 471 bp, synthetic construct
  misc_feature 1..471: note = Description of Artificial Sequence: Synthetic coding sequence
  source 1..471: mol_type = other DNA
atggccagcagagtgctgagcgcctacgtgagcagactgcccgccgccttcgcccccctgcccagagtgagaatgctggccgtggccagacccctgagcaccgccctgtgcagcgccggcacccagaccagactgggcaccctgcagcccgccctggtgctggcccaggtgcccggcagagtgacccagctgtgcagacagtacagcgacatgccccccctgaccctggagggcatccaggacagagtgctgtacgtgctgaagctgtacgacaagatcgaccccgagaagctgagcgtgaacagccacttcatgaaggacctgggcctggacagcctggaccaggtggagatcatcatggccatggaggacgagttcggcttcgagatccccgacatcgacgccgagaagctgatgtgcccccaggagatcgtggactacatcgccgacaagaaggacgtgtacgagtag

SEQ ID NO: 90354 - DNA, 231 bp, synthetic construct
  misc_feature 1..231: note = Description of Artificial Sequence: Synthetic coding sequence
  source 1..231: mol_type = other DNA
atggcccccagcgccctgctgagacccctgagcagactgctggcccccgccagactgcccagcggccccagcgtgagaagcaagttctacgtgagagagccccccaacgccaagcccgactggctgaaggtgggcttcaccctgggcaccaccgtgttcctgtggatctacctgatcaagcagcacaacgaggacatcctggagtacaagagaagaaacggcctggagtag

SEQ ID NO: 90355 - DNA, 231 bp, synthetic construct; identical to SEQ ID NO: 90354
  misc_feature 1..231: note = Description of Artificial Sequence: Synthetic coding sequence
  source 1..231: mol_type = other DNA

SEQ ID NO: 90356 - DNA, 231 bp, synthetic construct; identical to SEQ ID NO: 90354
  misc_feature 1..231: note = Description of Artificial Sequence: Synthetic coding sequence
  source 1..231: mol_type = other DNA

SEQ ID NO: 90357 - DNA, 231 bp, synthetic construct; identical to SEQ ID NO: 90354
  misc_feature 1..231: note = Description of Artificial Sequence: Synthetic coding sequence
  source 1..231: mol_type = other DNA

SEQ ID NO: 90358 - DNA, 231 bp, synthetic construct; identical to SEQ ID NO: 90354
  misc_feature 1..231: note = Description of Artificial Sequence: Synthetic coding sequence
  source 1..231: mol_type = other DNA

SEQ ID NO: 90359 - DNA, 231 bp, synthetic construct; identical to SEQ ID NO: 90354
  misc_feature 1..231: note = Description of Artificial Sequence: Synthetic coding sequence
  source 1..231: mol_type = other DNA

SEQ ID NO: 90360 - DNA, 231 bp, synthetic construct; identical to SEQ ID NO: 90354
  misc_feature 1..231: note = Description of Artificial Sequence: Synthetic coding sequence
  source 1..231: mol_type = other DNA

SEQ ID NO: 90361 - DNA, 231 bp, synthetic construct; identical to SEQ ID NO: 90354
  misc_feature 1..231: note = Description of Artificial Sequence: Synthetic coding sequence
  source 1..231: mol_type = other DNA

SEQ ID NO: 90362 - DNA, 915 bp, synthetic construct
  misc_feature 1..915: note = Description of Artificial Sequence: Synthetic coding sequence
  source 1..915: mol_type = other DNA
atgatctacaccatgaagaaggtgcacgccctgtgggccagcgtgtgcctgctgctgaacctggcccccgcccccctgaacgccgacagcgaggaggacgaggagcacaccatcatcaccgacaccgagctgccccccctgaagctgatgcacagcttctgcgccttcaaggccgacgacggcccctgcaaggccatcatgaagagattcttcttcaacatcttcaccagacagtgcgaggagttcatctacggcggctgcgagggcaaccagaacagattcgagagcctggaggagtgcaagaagatgtgcaccagagacaacgccaacagaatcatcaagaccaccctgcagcaggagaagcccgacttctgcttcctggaggaggaccccggcatctgcagaggctacatcaccagatacttctacaacaaccagaccaagcagtgcgagagattcaagtacggcggctgcctgggcaacatgaacaacttcgagaccctggaggagtgcaagaacatctgcgaggacggccccaacggcttccaggtggacaactacggcacccagctgaacgccgtgaacaacagcctgaccccccagagcaccaaggtgcccagcctgttcgagttccacggccccagctggtgcctgacccccgccgacagaggcctgtgcagagccaacgagaacagattctactacaacagcgtgatcggcaagtgcagacccttcaagtacagcggctgcggcggcaacgagaacaacttcaccagcaagcaggagtgcctgagagcctgcaagaagggcttcatccagagaatcagcaagggcggcctgatcaagaccaagagaaagagaaagaagcagagagtgaagatcgcctacgaggagatcttcgtgaagaacatgtag

SEQ ID NO: 90363 - DNA, 2013 bp, synthetic construct
  misc_feature 1..2013: note = Description of Artificial Sequence: Synthetic coding sequence
  source 1..2013: mol_type = other DNA
atgcagatccccagattctgctaccacgagagactgagcgtggccggcaactgcagaatgtgcctggtggagatcgagaaggcccccaaggtggtggccgcctgcgccatgcccgtgatgaagggctggaacatcctgaccaacagcgagaagagcaagaaggccagagagggcgtgatggagttcctgctggccaaccaccccctggactgccccatctgcgaccagggcggcgagtgcgacctgcaggaccagagcatgatgttcggcaacgacagaagcagattcctggagggcaagagagccgtggaggacaagaacatcggccccctggtgaagaccatcatgaccagatgcatccagtgcaccagatgcatcagattcgccagcgagatcgccggcgtggacgacctgggcaccaccggcagaggcaacgacatgcaggtgggcacctacatcgagaagatgttcatgagcgagctgagcggcaacatcatcgacatctgccccgtgggcgccctgaccagcaagccctacgccttcaccgccagaccctgggagaccagaaagaccgagagcatcgacgtgatggacgccgtgggcagcaacatcgtggtgagcaccagaaccggcgaggtgatgagaatcctgcccagaatgcacgaggacatcaacgaggagtggatcagcgacaagaccagattcgcctacgacggcctgaagagacagagactgaccgagcccatggtgagaaacgagaagggcctgctgacctacaccagctgggaggacgccctgagcagagtggccggcatgctgcagagcttccagggcaaggacgtggccgccatcgccggcggcctggtggacgccgaggccctggtggccctgaaggacctgctgaacagagtggacagcgacaccctgtgcaccgaggaggtgttccccaccgccggcgccggcaccgacctgagaagcaactacctgctgaacaccaccatcgccggcgtggaggaggccgacgtggtgctgctggtgggcaccaaccccagattcgaggcccccctgttcaacgccagaatcagaaagagctggctgcacaacgacctgaaggtggccctgatcggcagccccgtggacctgacctacacctacgaccacctgggcgacagccccaagatcctgcaggacatcgccagcggcagccaccccttcagccaggtgctgaaggaggccaagaagcccatggtggtgctgggcagcagcgccctgcagagaaacgacggcgccgccatcctggccgccgtgagcagcatcgcccagaagatcagaatgaccagcggcgtgaccggcgactggaaggtgatgaacatcctgcacagaatcgccagccaggtggccgccctggacctgggctacaagcccggcgtggaggccatcagaaagaacccccccaaggtgctgttcctgctgggcgccgacggcggctgcatcaccagacaggacctgcccaaggactgcttcatcatctaccagggccaccacggcgacgtgggcgcccccatcgccgacgtgatcctgcccggcgccgcctacaccgagaagagcgccacctacgtgaacaccgagggcagagcccagcagaccaaggtggccgtgaccccccccggcctggccagagaggactggaagatcatcagagccctgagcgagatcgccggcatgaccctgccctacgacaccctggaccaggtgagaaacagactggaggaggtgagccccaacctggtgagatacgacgacatcgagggcgccaactacttccagcaggccaacgagctgagcaagctggtgaaccagcagctgctggccgaccccctggtgcccccccagctgaccatcaaggacttctacatgaccgacagcatcagcagagccagccagaccatggccaagtgcgtgaaggccgtgaccgagggcgcccaggccgtggaggagcccagcatctgctag

SEQ ID NO: 90364 - DNA, 1851 bp, synthetic construct
  misc_feature 1..1851: note = Description of Artificial Sequence: Synthetic coding sequence
  source 1..1851: mol_type = other DNA
atgtgggagggcgtgatggagttcctgctggccaaccaccccctggactgccccatctgcgaccagggcggcgagtgcgacctgcaggaccagagcatgatgttcggcaacgacagaagcagattcctggagggcaagagagccgtggaggacaagaacatcggccccctggtgaagaccatcatgaccagatgcatccagtgcaccagatgcatcagattcgccagcgagatcgccggcgtggacgacctgggcaccaccggcagaggcaacgacatgcaggtgggcacctacatcgagaagatgttcatgagcgagctgagcggcaacatcatcgacatctgccccgtgggcgccctgaccagcaagccctacgccttcaccgccagaccctgggagaccagaaagaccgagagcatcgacgtgatggacgccgtgggcagcaacatcgtggtgagcaccagaaccggcgaggtgatgagaatcctgcccagaatgcacgaggacatcaacgaggagtggatcagcgacaagaccagattcgcctacgacggcctgaagagacagagactgaccgagcccatggtgagaaacgagaagggcctgctgacctacaccagctgggaggacgccctgagcagagtggccggcatgctgcagagcttccagggcaaggacgtggccgccatcgccggcggcctggtggacgccgaggccctggtggccctgaaggacctgctgaacagagtggacagcgacaccctgtgcaccgaggaggtgttccccaccgccggcgccggcaccgacctgagaagcaactacctgctgaacaccaccatcgccggcgtggaggaggccgacgtggtgctgctggtgggcaccaaccccagattcgaggcccccctgttcaacgccagaatcagaaagagctggctgcacaacgacctgaaggtggccctgatcggcagccccgtggacctgacctacacctacgaccacctgggcgacagccccaagatcctgcaggacatcgccagcggcagccaccccttcagccaggtgctgaaggaggccaagaagcccatggtggtgctgggcagcagcgccctgcagagaaacgacggcgccgccatcctggccgccgtgagcagcatcgcccagaagatcagaatgaccagcggcgtgaccggcgactggaaggtgatgaacatcctgcacagaatcgccagccaggtggccgccctggacctgggctacaagcccggcgtggaggccatcagaaagaacccccccaaggtgctgttcctgctgggcgccgacggcggctgcatcaccagacaggacctgcccaaggactgcttcatcatctaccagggccaccacggcgacgtgggcgcccccatcgccgacgtgatcctgcccggcgccgcctacaccgagaagagcgccacctacgtgaacaccgagggcagagcccagcagaccaaggtggccgtgaccccccccggcctggccagagaggactggaagatcatcagagccctgagcgagatcgccggcatgaccctgccctacgacaccctggaccaggtgagaaacagactggaggaggtgagccccaacctggtgagatacgacgacatcgagggcgccaactacttccagcaggccaacgagctgagcaagctggtgaaccagcagctgctggccgaccccctggtgcccccccagctgaccatcaaggacttctacatgaccgacagcatcagcagagccagccagaccatggccaagtgcgtgaaggccgtgaccgagggcgcccaggccgtggaggagcccagcatctgctag

SEQ ID NO: 90365 - DNA, 2076 bp, synthetic construct
  misc_feature 1..2076: note = Description of Artificial Sequence: Synthetic coding sequence
  source 1..2076: mol_type = other DNA
atgctgagaatccccgtgagaaaggccctggtgggcctgagcaagagccccaagggctgcgtgagaaccaccgccaccgccgccagcaacctgatcgaggtgttcgtggacggccagagcgtgatggtggagcccggcaccaccgtgctgcaggtggtggccgcctgcgccatgcccgtgatgaagggctggaacatcctgaccaacagcgagaagagcaagaaggccagagagggcgtgatggagttcctgctggccaaccaccccctggactgccccatctgcgaccagggcggcgagtgcgacctgcaggaccagagcatgatgttcggcaacgacagaagcagattcctggagggcaagagagccgtggaggacaagaacatcggccccctggtgaagaccatcatgaccagatgcatccagtgcaccagatgcatcagattcgccagcgagatcgccggcgtggacgacctgggcaccaccggcagaggcaacgacatgcaggtgggcacctacatcgagaagatgttcatgagcgagctgagcggcaacatcatcgacatctgccccgtgggcgccctgaccagcaagccctacgccttcaccgccagaccctgggagaccagaaagaccgagagcatcgacgtgatggacgccgtgggcagcaacatcgtggtgagcaccagaaccggcgaggtgatgagaatcctgcccagaatgcacgaggacatcaacgaggagtggatcagcgacaagaccagattcgcctacgacggcctgaagagacagagactgaccgagcccatggtgagaaacgagaagggcctgctgacctacaccagctgggaggacgccctgagcagagtggccggcatgctgcagagcttccagggcaaggacgtggccgccatcgccggcggcctggtggacgccgaggccctggtggccctgaaggacctgctgaacagagtggacagcgacaccctgtgcaccgaggaggtgttccccaccgccggcgccggcaccgacctgagaagcaactacctgctgaacaccaccatcgccggcgtggaggaggccgacgtggtgctgctggtgggcaccaaccccagattcgaggcccccctgttcaacgccagaatcagaaagagctggctgcacaacgacctgaaggtggccctgatcggcagccccgtggacctgacctacacctacgaccacctgggcgacagccccaagatcctgcaggacatcgccagcggcagccaccccttcagccaggtgctgaaggaggccaagaagcccatggtggtgctgggcagcagcgccctgcagagaaacgacggcgccgccatcctggccgccgtgagcagcatcgcccagaagatcagaatgaccagcggcgtgaccggcgactggaaggtgatgaacatcctgcacagaatcgccagccaggtggccgccctggacctgggctacaagcccggcgtggaggccatcagaaagaacccccccaaggtgctgttcctgctgggcgccgacggcggctgcatcaccagacaggacctgcccaaggactgcttcatcatctaccagggccaccacggcgacgtgggcgcccccatcgccgacgtgatcctgcccggcgccgcctacaccgagaagagcgccacctacgtgaacaccgagggcagagcccagcagaccaaggtggccgtgaccccccccggcctggccagagaggactggaagatcatcagagccctgagcgagatcgccggcatgaccctgccctacgacaccctggaccaggtgagaaacagactggaggaggtgagccccaacctggtgagatacgacgacatcgagggcgccaactacttccagcaggccaacgagctgagcaagctggtgaaccagcagctgctggccgaccccctggtgcccccccagctgaccatcaaggacttctacatgaccgacagcatcagcagagccagccagaccatggccaagtgcgtgaaggccgtgaccgagggcgcccaggccgtggaggagcccagcatctgctag

SEQ ID NO: 90366 - DNA, 2184 bp, synthetic construct
  misc_feature 1..2184: note = Description of Artificial Sequence: Synthetic coding sequence
  source 1..2184: mol_type = other DNA
atgctgagaatccccgtgagaaaggccctggtgggcctgagcaagagccccaagggctgcgtgagaaccaccgccaccgccgccagcaacctgatcgaggtgttcgtggacggccagagcgtgatggtggagcccggcaccaccgtgctgcaggcctgcgagaaggtgggcatgcagatccccagattctgctaccacgagagactgagcgtggccggcaactgcagaatgtgcctggtggagatcgagaaggcccccaaggtggtggccgcctgcgccatgcccgtgatgaagggctggaacatcctgaccaacagcgagaagagcaagaaggccagagagggcgtgatggagttcctgctggccaaccaccccctggactgccccatctgcgaccagggcggcgagtgcgacctgcaggaccagagcatgatgttcggcaacgacagaagcagattcctggagggcaagagagccgtggaggacaagaacatcggccccctggtgaagaccatcatgaccagatgcatccagtgcaccagatgcatcagattcgccagcgagatcgccggcgtggacgacctgggcaccaccggcagaggcaacgacatgcaggtgggcacctacatcgagaagatgttcatgagcgagctgagcggcaacatcatcgacatctgccccgtgggcgccctgaccagcaagccctacgccttcaccgccagaccctgggagaccagaaagaccgagagcatcgacgtgatggacgccgtgggcagcaacatcgtggtgagcaccagaaccggcgaggtgatgagaatcctgcccagaatgcacgaggacatcaacgaggagtggatcagcgacaagaccagattcgcctacgacggcctgaagagacagagactgaccgagcccatggtgagaaacgagaagggcctgctgacctacaccagctgggaggacgccctgagcagagtggccggcatgctgcagagcttccagggcaaggacgtggccgccatcgccggcggcctggtggacgccgaggccctggtggccctgaaggacctgctgaacagagtggacagcgacaccctgtgcaccgaggaggtgttccccaccgccggcgccggcaccgacctgagaagcaactacctgctgaacaccaccatcgccggcgtggaggaggccgacgtggtgctgctggtgggcaccaaccccagattcgaggcccccctgttcaacgccagaatcagaaagagctggctgcacaacgacctgaaggtggccctgatcggcagccccgtggacctgacctacacctacgaccacctgggcgacagccccaagatcctgcaggacatcgccagcggcagccaccccttcagccaggtgctgaaggaggccaagaagcccatggtggtgctgggcagcagcgccctgcagagaaacgacggcgccgccatcctggccgccgtgagcagcatcgcccagaagatcagaatgaccagcggcgtgaccggcgactggaaggtgatgaacatcctgcacagaatcgccagccaggtggccgccctggacctgggctacaagcccggcgtggaggccatcagaaagaacccccccaaggtgctgttcctgctgggcgccgacggcggctgcatcaccagacaggacctgcccaaggactgcttcatcatctaccagggccaccacggcgacgtgggcgcccccatcgccgacgtgatcctgcccggcgccgcctacaccgagaagagcgccacctacgtgaacaccgagggcagagcccagcagaccaaggtggccgtgaccccccccggcctggccagagaggactggaagatcatcagagccctgagcgagatcgccggcatgaccctgccctacgacaccctggaccaggtgagaaacagactggaggaggtgagccccaacctggtgagatacgacgacatcgagggcgccaactacttccagcaggccaacgagctgagcaagctggtgaaccagcagctgctggccgaccccctggtgcccccccagctgaccatcaaggacttctacatgaccgacagcatcagcagagccagccagaccatggccaagtgcgtgaaggccgtgaccgagggcgcccaggccgtggaggagcccagcatctgctag

SEQ ID NO: 90367 - DNA, 393 bp, synthetic construct
  misc_feature 1..393: note = Description of Artificial Sequence: Synthetic coding sequence
  source 1..393: mol_type = other DNA
atgctgagaatccccgtgagaaaggccctggtgggcctgagcaagagccccaagggctgcgtgagaaccaccgccaccgccgccagcaacctgatcgaggtgttcgtggacggccagagcgtgatggtggagcccggcaccaccgtgctgcaggcctgcgagaaggtgggcatgcagatccccagattctgctaccacgagagactgagcgtggccggcaactgcagaatgtgcctggtggagatcgagaaggcccccaaggtggtggccgcctgcgccatgcccgtgatgaagggctggaacatcctgaccaacagcgagaagagcaagaaggccagagagggcgtgatggagttcctgctggccaaccaccccctggactgccccatctag

SEQ ID NO: 90368 - DNA, 2226 bp, synthetic construct
  misc_feature 1..2226: note = Description of Artificial Sequence: Synthetic coding sequence
  source 1..2226: mol_type = other DNA
atgagaatcagaggcagcagcggcaccctgagcagaatcaacatgctgagaatccccgtgagaaaggccctggtgggcctgagcaagagccccaagggctgcgtgagaaccaccgccaccgccgccagcaacctgatcgaggtgttcgtggacggccagagcgtgatggtggagcccggcaccaccgtgctgcaggcctgcgagaaggtgggcatgcagatccccagattctgctaccacgagagactgagcgtggccggcaactgcagaatgtgcctggtggagatcgagaaggcccccaaggtggtggccgcctgcgccatgcccgtgatgaagggctggaacatcctgaccaacagcgagaagagcaagaaggccagagagggcgtgatggagttcctgctggccaaccaccccctggactgccccatctgcgaccagggcggcgagtgcgacctgcaggaccagagcatgatgttcggcaacgacagaagcagattcctggagggcaagagagccgtggaggacaagaacatcggccccctggtgaagaccatcatgaccagatgcatccagtgcaccagatgcatcagattcgccagcgagatcgccggcgtggacgacctgggcaccaccggcagaggcaacgacatgcaggtgggcacctacatcgagaagatgttcatgagcgagctgagcggcaacatcatcgacatctgccccgtgggcgccctgaccagcaagccctacgccttcaccgccagaccctgggagaccagaaagaccgagagcatcgacgtgatggacgccgtgggcagcaacatcgtggtgagcaccagaaccggcgaggtgatgagaatcctgcccagaatgcacgaggacatcaacgaggagtggatcagcgacaagaccagattcgcctacgacggcctgaagagacagagactgaccgagcccatggtgagaaacgagaagggcctgctgacctacaccagctgggaggacgccctgagcagagtggccggcatgctgcagagcttccagggcaaggacgtggccgccatcgccggcggcctggtggacgccgaggccctggtggccctgaaggacctgctgaacagagtggacagcgacaccctgtgcaccgaggaggtgttccccaccgccggcgccggcaccgacctgagaagcaactacctgctgaacaccaccatcgccggcgtggaggaggccgacgtggtgctgctggtgggcaccaaccccagattcgaggcccccctgttcaacgccagaatcagaaagagctggctgcacaacgacctgaaggtggccctgatcggcagccccgtggacctgacctacacctacgaccacctgggcgacagccccaagatcctgcaggacatcgccagcggcagccaccccttcagccaggtgctgaaggaggccaagaagcccatggtggtgctgggcagcagcgccctgcagagaaacgacggcgccgccatcctggccgccgtgagcagcatcgcccagaagatcagaatgaccagcggcgtgaccggcgactggaaggtgatgaacatcctgcacagaatcgccagccaggtggccgccctggacctgggctacaagcccggcgtggaggccatcagaaagaacccccccaaggtgctgttcctgctgggcgccgacggcggctgcatcaccagacaggacctgcccaaggactgcttcatcatctaccagggccaccacggcgacgtgggcgcccccatcgccgacgtgatcctgcccggcgccgcctacaccgagaagagcgccacctacgtgaacaccgagggcagagcccagcagaccaaggtggccgtgaccccccccggcctggccagagaggactggaagatcatcagagccctgagcgagatcgccggcatgaccctgccctacgacaccctggaccaggtgagaaacagactggaggaggtgagccccaacctggtgagatacgacgacatcgagggcgccaactacttccagcaggccaacgagctgagcaagctggtgaaccagcagctgctggccgaccccctggtgcccccccagctgaccatcaaggacttctacatgaccgacagcatcagcagagccagccagaccatggccaagtgcgtgaaggccgtgaccgagggcgcccaggccgtggaggagcccagcatctgctag

SEQ ID NO: 90369 - DNA, 1836 bp, synthetic construct
  misc_feature 1..1836: note = Description of Artificial Sequence: Synthetic coding sequence
  source 1..1836: mol_type = other DNA
atggagttcctgctggccaaccaccccctggactgccccatctgcgaccagggcggcgagtgcgacctgcaggaccagagcatgatgttcggcaacgacagaagcagattcctggagggcaagagagccgtggaggacaagaacatcggccccctggtgaagaccatcatgaccagatgcatccagtgcaccagatgcatcagattcgccagcgagatcgccggcgtggacgacctgggcaccaccggcagaggcaacgacatgcaggtgggcacctacatcgagaagatgttcatgagcgagctgagcggcaacatcatcgacatctgccccgtgggcgccctgaccagcaagccctacgccttcaccgccagaccctgggagaccagaaagaccgagagcatcgacgtgatggacgccgtgggcagcaacatcgtggtgagcaccagaaccggcgaggtgatgagaatcctgcccagaatgcacgaggacatcaacgaggagtggatcagcgacaagaccagattcgcctacgacggcctgaagagacagagactgaccgagcccatggtgagaaacgagaagggcctgctgacctacaccagctgggaggacgccctgagcagagtggccggcatgctgcagagcttccagggcaaggacgtggccgccatcgccggcggcctggtggacgccgaggccctggtggccctgaaggacctgctgaacagagtggacagcgacaccctgtgcaccgaggaggtgttccccaccgccggcgccggcaccgacctgagaagcaactacctgctgaacaccaccatcgccggcgtggaggaggccgacgtggtgctgctggtgggcaccaaccccagattcgaggcccccctgttcaacgccagaatcagaaagagctggctgcacaacgacctgaaggtggccctgatcggcagccccgtggacctgacctacacctacgaccacctgggcgacagccccaagatcctgcaggacatcgccagcggcagccaccccttcagccaggtgctgaaggaggccaagaagcccatggtggtgctgggcagcagcgccctgcagagaaacgacggcgccgccatcctggccgccgtgagcagcatcgcccagaagatcagaatgaccagcggcgtgaccggcgactggaaggtgatgaacatcctgcacagaatcgccagccaggtggccgccctggacctgggctacaagcccggcgtggaggccatcagaaagaacccccccaaggtgctgttcctgctgggcgccgacggcggctgcatcaccagacaggacctgcccaaggactgcttcatcatctaccagggccaccacggcgacgtgggcgcccccatcgccgacgtgatcctgcccggcgccgcctacaccgagaagagcgccacctacgtgaacaccgagggcagagcccagcagaccaaggtggccgtgaccccccccggcctggccagagaggactggaagatcatcagagccctgagcgagatcgccggcatgaccctgccctacgacaccctggaccaggtgagaaacagactggaggaggtgagccccaacctggtgagatacgacgacatcgagggcgccaactacttccagcaggccaacgagctgagcaagctggtgaaccagcagctgctggccgaccccctggtgcccccccagctgaccatcaaggacttctacatgaccgacagcatcagcagagccagccagaccatggccaagtgcgtgaaggccgtgaccgagggcgcccaggccgtggaggagcccagcatctgctag

SEQ ID NO: 90370 - DNA, 1392 bp, synthetic construct
  misc_feature 1..1392: note = Description of Artificial Sequence: Synthetic coding sequence
  source 1..1392: mol_type = other DNA
atggccgccctgagagccctgtgcggcttcagaggcgtggccgcccaggtgctgagacccggcgccggcgtgagactgcccatccagcccagcagaggcgtgagacagtggcagcccgacgtggagtgggcccagcagttcggcggcgccgtgatgtaccccagcaaggagaccgcccactggaagccccccccctggaacgacgtggacccccccaaggacaccatcgtgaagaacatcaccctgaacttcggcccccagcaccccgccgcccacggcgtgctgagactggtgatggagctgagcggcgagatggtgagaaagtgcgacccccacatcggcctgctgcacagaggcaccgagaagctgatcgagtacaagacctacctgcaggccctgccctacttcgacagactggactacgtgagcatgatgtgcaacgagcaggcctacagcctggccgtggagaagctgctgaacatcagacccccccccagagcccagtggatcagagtgctgttcggcgagatcaccagactgctgaaccacatcatggccgtgaccacccacgccctggacctgggcgccatgacccccttcttctggctgttcgaggagagagagaagatgttcgagttctacgagagagtgagcggcgccagaatgcacgccgcctacatcagacccggcggcgtgcaccaggacctgcccctgggcctgatggacgacatctaccagttcagcaagaacttcagcctgagactggacgagctggaggagctgctgaccaacaacagaatctggagaaacagaaccatcgacatcggcgtggtgaccgccgaggaggccctgaactacggcttcagcggcgtgatgctgagaggcagcggcatccagtgggacctgagaaagacccagccctacgacgtgtacgaccaggtggagttcgacgtgcccgtgggcagcagaggcgactgctacgacagatacctgtgcagagtggaggagatgagacagagcctgagaatcatcgcccagtgcctgaacaagatgccccccggcgagatcaaggtggacgacgccaaggtgagcccccccaagagagccgagatgaagaccagcatggagagcctgatccaccacttcaagctgtacaccgagggctaccaggtgccccccggcgccacctacaccgccatcgaggcccccaagggcgagttcggcgtgtacctggtgagcgacggcagcagcagaccctacagatgcaagatcaaggcccccggcttcgcccacctggccggcctggacaagatgagcaagggccacatgctggccgacgtggtggccatcatcggcacccaggacatcgtgttcggcgaggtggacagatag

SEQ ID NO: 90371 - DNA, 1374 bp, synthetic construct
  misc_feature 1..1374: note = Description of Artificial Sequence: Synthetic coding sequence
  source 1..1374: mol_type = other DNA
atggccgccctgagagccctgtgcggcttcagaggcgtggccgcccaggtgctgagacccggcgccggcgtgagactgcccatccagcccagcagaggcgtgagacagtggcagcccgacgtggagtgggcccagcagttcggcggcgccgtgatgtaccccagcaaggagaccgcccactggaagccccccccctggaacgacgtggacccccccaaggacaccatcgtgaagaacatcaccctgaacttcggcccccagcaccccgccgcccacggcgtgctgagactggtgatggagctgagcggcgagatggtgagaaagtgcgacccccacatcggcctgctgcacagaggcaccgagaagctgatcgagtacaagacctacctgcaggccctgccctacttcgacagactggactacgtgagcatgatgtgcaacgagcaggcctacagcctggccgtggagaagctgctgaacatcagacccccccccagagcccagtggatcagagtgctgttcggcgagatcaccagactgctgaaccacatcatggccgtgaccacccacgccctggacctgggcgccatgacccccttcttctggctgttcgaggagagagagaagatgttcgagttctacgagagagtgagcggcgccagaatgcacgccgcctacatcagacccggcggcgtgcaccaggacctgcccctgggcctgatggacgacatctaccagttcagcaagaacttcagcctgagactggacgagctggaggagctgctgaccaacaacagaatctggagaaacagaaccatcgacatcggcgtggtgaccgccgaggaggccctgaactacggcttcagcggcgtgatgctgagaggcagcggcatccagtgggacctgagaaagacccagccctacgacgtgtacgaccaggtggagttcgacgtgcccgtgggcagcagaggcgactgctacgacagatacctgtgcagagtggaggagatgagacagagcctgagaatcatcgcccagtgcctgaacaagatgccccccggcgagatcaaggtggacgacgccaaggtgagcccccccaagagagccgagatgaagaccagcatggagagcctgatccaccacttcaagctgtacaccgagggctaccaggtgccccccggcgccacctacaccgccatcgaggcccccaagggcgagttcggcgtgtacctggtgagcgacggcagcagcagaccctacagatgcaagatcaaggcccccggcttcgcccacctggccggcctggacaagatgagcaagggccacatgctggccgacgtggtggccatcatcggcaccagacccatcgtgtag

SEQ ID NO: 90372 - DNA, 696 bp, synthetic construct
  misc_feature 1..696: note = Description of Artificial Sequence: Synthetic coding sequence
  source 1..696: mol_type = other DNA
atggagctgagcggcgagatggtgagaaagtgcgacccccacatcggcctgctgcacagaggcaccgagaagctgatcgagtacaagacctacctgcaggccctgccctacttcgacagactggactacgtgagcatgatgtgcaacgagcaggcctacagcctggccgtggagaagctgctgaacatcagacccccccccagagcccagtggatcagagtgctgttcggcgagatcaccagactgctgaaccacatcatggccgtgaccacccacgccctggacctgggcgccatgacccccttcttctggctgttcgaggagagagagaagatgttcgagttctacgagagagtgagcggcgccagaatgcacgccgcctacatcagacccggcggcgtgcaccaggacctgcccctgggcctgatggacgacatctaccagttcagcaagaacttcagcctgagactggacgagctggaggagctgctgaccaacaacagaatctggagaaacagaaccatcgacatcggcgtggtgaccgccgaggaggccctgaactacggcttcagcggcgtgatgctgagaggcagcggcatccagtgggacctgagaaagacccagccctacgacgtgtacgaccaggtggagttcgacgtgcccgtgggcagcagaggcgactgctacgacagatag

SEQ ID NO: 90373 - DNA, 162 bp, synthetic construct
  misc_feature 1..162: note = Description of Artificial Sequence: Synthetic coding sequence
  source 1..162: mol_type = other DNA
atgttcgagttctacgagagagtgagcggcgccagaatgcacgccgcctacatcagacccggcggcgtgcaccaggacctgcccctgggcctgatggacgacatctaccagttcagcaagaacttcagcctgagactggacgagctggaggaggtgagctag

SEQ ID NO: 90374 - DNA, 795 bp, synthetic construct
  misc_feature 1..795: note = Description of Artificial Sequence: Synthetic coding sequence
  source 1..795: mol_type = other DNA
atggccgccgccgccgtggccagactgtggtggagaggcatcctgggcgccagcgccctgaccagaggcaccggcagacccagcgtgctgctgctgcccgtgagaagagagagcgccggcgccgacaccagacccaccgtgagacccagaaacgacgtggcccacaagcagctgagcgccttcggcgagtacgtggccgagatcctgcccaagtacgtgcagcaggtgcaggtgagctgcttcaacgagctggaggtgtgcatccaccccgacggcgtgatccccgtgctgaccttcctgagagaccacaccaacgcccagttcaagagcctggtggacctgaccgccgtggacgtgcccaccagacagaacagattcgagatcgtgtacaacctgctgagcctgagattcaacagcagaatcagagtgaagacctacaccgacgagctgacccccatcgagagcgccgtgagcgtgttcaaggccgccaactggtacgagagagagatctgggacatgttcggcgtgttcttcgccaaccaccccgacctgagaagaatcctgaccgactacggcttcgagggccaccccttcagaaaggacttccccctgagcggctacgtggagctgagatacgacgacgaggtgaagagagtggtggccgagcccgtggagctggcccaggagttcagaaagttcgacctgaacagcccctgggaggccttccccgtgtacagacagccccccgagagcctgaagctggaggccggcgacaagaagcccgacgccaagtag

SEQ ID NO: 90375 - DNA, 528 bp, synthetic construct
  misc_feature 1..528: note = Description of Artificial Sequence: Synthetic coding sequence
  source 1..528: mol_type = other DNA
atggccgccgtgagcatgagcgtggtgctgagacagaccctgtggagaagaagagccgtggccgtggccgccctgagcgtgagcagagtgcccaccagaagcctgagaaccagcacctggagactggcccaggaccagacccaggacacccagctgatcaccgtggacgagaagctggacatcaccaccctgaccggcgtgcccgaggagcacatcaagaccagaaaggtgagaatcttcgtgcccgccagaaacaacatgcagagcggcgtgaacaacaccaagaagtggaagatggagttcgacaccagagagagatgggagaaccccctgatgggctgggccagcaccgccgaccccctgagcaacatggtgctgaccttcagcaccaaggaggacgccgtgagcttcgccgagaagaacggctggagctacgacatcgaggagagaaaggtgcccaagcccaagagcaagagctacggcgccaacttcagctggaacaagagaaccagagtgagcaccaagtag

SEQ ID NO: 90376 - DNA, 321 bp, synthetic construct
  misc_feature 1..321: note = Description of Artificial Sequence: Synthetic coding sequence
  source 1..321: mol_type = other DNA
atgcccttcctggacatccagaagagattcggcctgaacatcgacagatggctgaccatccagagcggcgagcagccctacaagatggccggcagatgccacgccttcgagaaggagtggatcgagtgcgcccacggcatcggctacaccagagccgagaaggagtgcaagatcgagtacgacgacttcgtggagtgcctgctgagacagaagaccatgagaagagccggcaccatcagaaagcagagagacaagctgatcaaggagggcaagtacaccccccccccccaccacatcggcaagggcgagcccagaccctag

SEQ ID NO: 90377 - DNA, 321 bp, synthetic construct; identical to SEQ ID NO: 90376
  misc_feature 1..321: note = Description of Artificial Sequence: Synthetic coding sequence
  source 1..321: mol_type = other DNA

SEQ ID NO: 90378 - DNA, 375 bp, synthetic construct
  misc_feature 1..375: note = Description of Artificial Sequence: Synthetic coding sequence
  source 1..375: mol_type = other DNA
atggccgccgccatgaccttctgcagactgctgaacagatgcggcgaggccgccagaagcctgcccctgggcgccagatgcttcggcgtgagagtgagccccaccggcgagaaggtgacccacaccggccaggtgtacgacgacaaggactacagaagaatcagattcgtgggcagacagaaggaggtgaacgagaacttcgccatcgacctgatcgccgagcagcccgtgagcgaggtggagaccagagtgatcgcctgcgacggcggcggcggcgccctgggccaccccaaggtgtacatcaacctggacaaggagaccaagaccggcacctgcggctactgcggcctgcagttcagacagcaccaccactag

SEQ ID NO: 90379 - DNA, 1560 bp, synthetic construct
  misc_feature 1..1560: note = Description of Artificial Sequence: Synthetic coding sequence
  source 1..1560: mol_type = other DNA
atggcccccatccccaagaccgtgggcagaatcaagctggactgcagcctgagacccagctgccccctggaggtggccgccgcccccaagctgtgcaaggagttcggccccgaggactacggcgaggaggacatcgtggacttcctgagaagactggtggagagcgacccccagggcctgcacagaatccacgtggacggcagcagcggcagactgcagctgtggcaccacgactacctgctgggccacctggacgacgagggcaagagcaccggccagagcgacagaggcaagggcgccgagggcctgggcacctactgcggcctgagaaagagcttcctgtaccccccccaggagagcgagccctgcccccagagccccagcgccagcgccaccttccccagcgtgagcgacagcctgctgcaggtggccatgccccagaagctgctggtgaccgaggaggaggccaacagactggccgaggagctggtggccgaggaggagagaatgaagcagaaggccgagaagaagagactgaagaagaagagacagaaggagagaaagagacaggagagactggagcagtactgcggcgagcccaaggccagcaccaccagcgacggcgacgagagcccccccagcagccccggcaaccccgtgcagggccagtgcggcgaggaggaggacagcctggacctgagcagcaccttcgtgagcctggccctgagaaaggtgggcgactggcccctgagcgccagaagagagaagggcctgaaccaggagccccagggcagaggcctggccctgcagaagatgggccaggaggaggagagcccccccagagaggagagaccccagcagagccccaaggtgcaggccagccccggcctgctggccgccgccctgcagcagagccaggagctggccaagctgggcaccagcttcgcccagaacggcttctaccacgaggccgtggtgctgttcacccaggccctgaagctgaacccccaggaccacagactgttcggcaacagaagcttctgccacgagagactgggccagcccgcctgggccctggccgacgcccaggtggccctgaccctgagacccggctggcccagaggcctgttcagactgggcaaggccctgatgggcctgcagagattcagagaggccgccgccgtgttccaggagaccctgagaggcggcagccagcccgacgccgccagagagctgagaagctgcctgctgcacctgaccctgcagggccagagaggcggcatctgcgccccccccctgagccccggcgccctgcagcccctgccccacgccgagctggcccccagcggcctgcccagcctgagatgccccagaagcaccgccctgagaagccccggcctgagccccctgctgcactaccccagctgccacagaagccaccccaaccagcccctgagccagacccagagcagaagaccccaccccctgaagccccaggaccccagcaagggctgggacatcctgggcctgggcctgcagcacctgagccaggccagatag

SEQ ID NO: 90380 - DNA, 621 bp, synthetic construct
  misc_feature 1..621: note = Description of Artificial Sequence: Synthetic coding sequence
  source 1..621: mol_type = other DNA
atggccgtgctgagcgcccccggcctgagaggcttcagaatcctgggcctgagaagcagcgtgggccccgccgtgcaggccagaggcgtgcaccagagcgtggccaccgacggccccagcagcacccagcccgccctgcccaaggccagagccgtggcccccaagcccagcagcagaggcgagtacgtggtggccaagctggacgacctggtgaactgggccagaagaagcagcctgtggcccatgaccttcggcctggcctgctgcgccgtggagatgatgcacatggccgcccccagatacgacatggacagattcggcgtggtgttcagagccagccccagacagagcgacgtgatgatcgtggccggcaccctgaccaacaagatggcccccgccctgagaaaggtgtacgaccagatgcccgagcccagatacgtggtgagcatgggcagctgcgccaacggcggcggctactaccactacagctacagcgtggtgagaggctgcgacagaatcgtgcccgtggacatctacatccccggcagagccggcaccgccccccccaccagagagctggagaccggccccgccccccacggcgccagaagacccctgtag

SEQ ID NO: 90381 - DNA, 885 bp, synthetic construct
  misc_feature 1..885: note = Description of Artificial Sequence: Synthetic coding sequence
  source 1..885: mol_type = other DNA
atggccgtgctgagcgcccccggcctgagaggcttcagaatcctgggcctgagaagcagcgtgggccccgccgtgcaggccagaggcgtgcaccagagcgtggccaccgacggccccagcagcacccagcccgccctgcccaaggccagagccgtggcccccaagcccagcagcagaggcgagtacgtggtggccaagctggacgacctggtgaactgggccagaagagtgagcaccatgagctgcagacccagcagcagcgccagagccagcctgcacacccacagacacacccacacccacaccaacgtgcagaccagaacccacaccacccacgcctgcaccctgacctgcgcccacgtgcacgccagcagccacgtgtggaccgacgtgtacaccgaccacacccacacccacgcccacaacgcccacatgcacaccagaacccacgcccacctgcacacccacgcccacaccagcacctgcgcccacaccctggcccacatccacacctgcaccctggccctgatgcacacccacgcccacatctacacctgcaccagaaccctggcccacacctgcacctacatgcacagccacgcccacacctgcaccctgacccacatgcacaccagaccctgcgtggacacctgcatgtgcgcctgctggcacgcctgcacccaggcccacagcctgatgcacacccacccctgcggcagaggcgccggcagaaccctgcccgaggcccccgtgctggcctggtggcccgtggtgcccagcgaggacagcgaccccgccggcgacgaccccagcgtgagcgtgatcctgttcctggccagcgtgtgcagcagctgcttcagcttcaaggtgaaggccgtgttctag

SEQ ID NO: 90382 - DNA, 645 bp, synthetic construct
  misc_feature 1..645: note = Description of Artificial Sequence: Synthetic coding sequence
  source 1..645: mol_type = other DNA
atggccgtgctgagcgcccccggcctgagaggcttcagaatcctgggcctgagaagcagcgtgggccccgccgtgcaggccagaggcgtgcaccagagcgtggccaccgacggccccagcagcacccagcccgccctgcccaaggccagagccgtggcccccaagcccagcagcagaggcgagtacgtggtggccaagctggacgacctggtgaactgggccagaagaagcagcctgtggcccatgaccttcggcctggcctgctgcgccgtggagatgatgcacatggccgcccccagatacgacatggacagattcggcgtggtgttcagagccagccccagacagagcgacgtgatgatcgtggccggcaccctgaccaacaagatggcccccgccctgagaaagagcagcctgagacccgacgccggcgccgccctgagaggcctgcacggcgagctgagacagagaagaagactgctgcccctgttcctgctgggcggcgagggcctgagaccccacagagccagaggccacctgcaccccagactgcccaccaccgccgaggccctgctgtacggcatcctgcagctgcagagaaagatcaagagagagagaagactgcagatctggtacagaagatag

SEQ ID NO: 90383 - DNA, 621 bp, synthetic construct; identical to SEQ ID NO: 90380
  misc_feature 1..621: note = Description of Artificial Sequence: Synthetic coding sequence
  source 1..621: mol_type = other DNA

SEQ ID NO: 90384 - DNA, 633 bp, synthetic construct
  misc_feature 1..633: note = Description of Artificial Sequence: Synthetic coding sequence
  source 1..633: mol_type = other DNA
atgagatgcctgaccacccccatgctgctgagagccctggcccaggccgccagagccggcccccccggcggcagaagcctgcacagcagcgccgtggccgccacctacaagtacgtgaacatgcaggaccccgagatggacatgaagagcgtgaccgacagagccgccagaaccctgctgtggaccgagctgttcagaggcctgggcatgaccctgagctacctgttcagagagcccgccaccatcaactaccccttcgagaagggccccctgagccccagattcagaggcgagcacgccctgagaagataccccagcggcgaggagagatgcatcgcctgcaagctgtgcgaggccatctgccccgcccaggccatcaccatcgaggccgagcccagagccgacggcagcagaagaaccaccagatacgacatcgacatgaccaagtgcatctactgcggcttctgccaggaggcctgccccgtggacgccatcgtggagggccccaacttcgagttcagcaccgagacccacgaggagctgctgtacaacaaggagaagctgctgaacaacggcgacaagtgggaggccgagatcgccgccaacatccaggccgactacctgtacagatag

SEQ ID NO: 90385 - DNA, 375 bp, synthetic construct
  misc_feature 1..375: note = Description of Artificial Sequence: Synthetic coding sequence
  source 1..375: mol_type = other DNA
atgagatgcctgaccacccccatgctgctgagagccctggcccaggccgccagagccggcccccccggcggcagaagcctgcacagcagcgccgtggccgccacctacaagtacgtgaacatgcaggaccccgagatggacatgaagagcgtgaccgacagagccgccagaaccctgctgtggaccgagctgttcagaggcctgggcatgaccctgagctacctgttcagagagcccgccaccatcaactaccccttcgagaagggccccctgagccccagattcagaggcgagcacgccctgagaagataccccagcggcgaggagagatgcatcgcctgcaagctgtgcgaggccatctgccccgcccagtag

SEQ ID NO: 90386 - DNA, 333 bp, synthetic construct
  misc_feature 1..333: note = Description of Artificial Sequence: Synthetic coding sequence
  source 1..333: mol_type = other DNA
atgagatgcctgaccacccccatgctgctgagagccctggcccaggccgccagagccggcccccccggcggcagaagcctgcacagcagcgccgtggccgccacctacaagtacgtgaacatgcaggaccccgagatggacatgaagagcgtgaccgacagagccgccagaaccctgctgtggaccgagctgttcagaggcctgggcatgaccctgagctacctgttcagagagcccgccaccatcaactaccccttcgagaagggccccctgagccccagattcagaggcgagcacgccctgagaagataccccagcggcgaggagagatag

SEQ ID NO: 90387 - DNA, 555 bp, synthetic construct
  misc_feature 1..555: note = Description of Artificial Sequence: Synthetic coding sequence
  source 1..555: mol_type = other DNA
atgagatgcctgaccacccccatgctgctgagagccctggcccaggccgccagagccggcccccccggcggcagaagcctgcacagcagcgccgtggccgccacctacaagtacgtgaacatgcaggaccccgagatggacatgaagagcgtgaccgacagagccgccagaaccctgctgtggaccgagctgttcagaggcctgggcatgaccctgagctacctgttcagagagcccgccaccatcaactaccccttcgagaagggccccctgagccccagattcagaggcgagcacgccctgagaagataccccagcggcgaggagagatgcatcgcctgcaagctgtgcgaggccatctgccccgcccaggccatcaccatcgaggccgagcccagagccgacggcagcagaagaaccaccagatacgacatcgacatgaccaagtgcatctactgcggcttctgccaggaggcctgccccgtggacgccatcgtggagggccccaacttcgagttcagcaccgagacccacgaggagctgctgtacaactag

SEQ ID NO: 90388 - DNA, 195 bp, synthetic construct
  misc_feature 1..195: note = Description of Artificial Sequence: Synthetic coding sequence
  source 1..195: mol_type = other DNA
atgaccaagtgcatctactgcggcttctgccaggaggcctgccccgtggacgccatcgtggagggccccaacttcgagttcagcaccgagacccacgaggagctgctgtacaacaaggagaagctgctgaacaacggcgacaagtgggaggccgagatcgccgccaacatccaggccgactacctgtacagatag

SEQ ID NO: 90389 - DNA, 1395 bp, synthetic construct
  misc_feature 1..1395: note = Description of Artificial Sequence: Synthetic coding sequence
  source 1..1395: mol_type = other DNA
atgctggccaccagaagactgctgggctggagcctgcccgccagagtgagcgtgagattcagcggcgacaccaccgcccccaagaagaccagcttcggcagcctgaaggacgaggacagaatcttcaccaacctgtacggcagacacgactggagactgaagggcagcctgagcagaggcgactggtacaagaccaaggagatcctgctgaagggccccgactggatcctgggcgagatcaagaccagcggcctgagaggcagaggcggcgccggcttccccaccggcctgaagtggagcttcatgaacaagcccagcgacggcagacccaagtacctggtggtgaacgccgacgagggcgagcccggcacctgcaaggacagagagatcctgagacacgacccccacaagctgctggagggctgcctggtgggcggcagagccatgggcgccagagccgcctacatctacatcagaggcgagttctacaacgaggccagcaacctgcaggtggccatcagagaggcctacgaggccggcctgatcggcaagaacgcctgcggcagcggctacgacttcgacgtgttcgtggtgagaggcgccggcgcctacatctgcggcgaggagaccgccctgatcgagagcatcgagggcaagcagggcaagcccagactgaagccccccttccccgccgacgtgggcgtgttcggctgccccaccaccgtggccaacgtggagaccgtggccgtgagccccaccatctgcagaagaggcggcacctggttcgccggcttcggcagagagagaaacagcggcaccaagctgttcaacatcagcggccacgtgaaccacccctgcaccgtggaggaggagatgagcgtgcccctgaaggagctgatcgagaagcacgccggcggcgtgaccggcggctgggacaacctgctggccgtgatccccggcggcagcagcacccccctgatccccaagagcgtgtgcgagaccgtgctgatggacttcgacgccctggtgcaggcccagaccggcctgggcaccgccgccgtgatcgtgatggacagaagcaccgacatcgtgaaggccatcgccagactgatcgagttctacaagcacgagagctgcggccagtgcaccccctgcagagagggcgtggactggatgaacaaggtgatggccagattcgtgagaggcgacgccagacccgccgagatcgacagcctgtgggagatcagcaagcagatcgagggccacaccatctgcgccctgggcgacggcgccgcctggcccgtgcagggcctgatcagacacttcagacccgagctggaggagagaatgcagagattcgcccagcagcaccaggccagacaggccgccagctag

SEQ ID NO: 90390 - DNA, 1374 bp, synthetic construct
  misc_feature 1..1374: note = Description of Artificial Sequence: Synthetic coding sequence
  source 1..1374: mol_type = other DNA
atgctggccaccagaagactgctgggctggagcctgcccgccagagtgagcaccgcccccaagaagaccagcttcggcagcctgaaggacgaggacagaatcttcaccaacctgtacggcagacacgactggagactgaagggcagcctgagcagaggcgactggtacaagaccaaggagatcctgctgaagggccccgactggatcctgggcgagatcaagaccagcggcctgagaggcagaggcggcgccggcttccccaccggcctgaagtggagcttcatgaacaagcccagcgacggcagacccaagtacctggtggtgaacgccgacgagggcgagcccggcacctgcaaggacagagagatcctgagacacgacccccacaagctgctggagggctgcctggtgggcggcagagccatgggcgccagagccgcctacatctacatcagaggcgagttctacaacgaggccagcaacctgcaggtggccatcagagaggcctacgaggccggcctgatcggcaagaacgcctgcggcagcggctacgacttcgacgtgttcgtggtgagaggcgccggcgcctacatctgcggcgaggagaccgccctgatcgagagcatcgagggcaagcagggcaagcccagactgaagccccccttccccgccgacgtgggcgtgttcggctgccccaccaccgtggccaacgtggagaccgtggccgtgagccccaccatctgcagaagaggcggcacctggttcgccggcttcggcagagagagaaacagcggcaccaagctgttcaacatcagcggccacgtgaaccacccctgcaccgtggaggaggagatgagcgtgcccctgaaggagctgatcgagaagcacgccggcggcgtgaccggcggctgggacaacctgctggccgtgatccccggcggcagcagcacccccctgatccccaagagcgtgtgcgagaccgtgctgatggacttcgacgccctggtgcaggcccagaccggcctgggcaccgccgccgtgatcgtgatggacagaagcaccgacatcgtgaaggccatcgccagactgatcgagttctacaagcacgagagctgcggccagtgcaccccctgcagagagggcgtggactggatgaacaaggtgatggccagattcgtgagaggcgacgccagacccgccgagatcgacagcctgtgggagatcagcaagcagatcgagggccacaccatctgcgccctgggcgacggcgccgcctggcccgtgcagggcctgatcagacacttcagacccgagctggaggagagaatgcagagattcgcccagcagcaccaggccagacaggccgccagctag

SEQ ID NO: 90391 - DNA, 1008 bp, synthetic construct
  misc_feature 1..1008: note = Description of Artificial Sequence: Synthetic coding sequence
  source 1..1008: mol_type = other DNA
atgctggccaccagaagactgctgggctggagcctgcccgccagagtgagcgtgagattcagcggcgacaccaccgcccccaagaagaccagcttcggcagcctgaaggacgaggacagaatcttcaccaacctgtacggcagacacgactggagactgaagggcagcctgagcagaggcgactggtacaagaccaaggagatcctgctgaagggccccgactggatcctgggcgagatcaagaccagcggcctgagaggcagaggcggcgccggcttccccaccggcctgaagtggagcttcatgaacaagcccagcgacggcagccccaccaccgtggccaacgtggagaccgtggccgtgagccccaccatctgcagaagaggcggcacctggttcgccggcttcggcagagagagaaacagcggcaccaagctgttcaacatcagcggccacgtgaaccacccctgcaccgtggaggaggagatgagcgtgcccctgaaggagctgatcgagaagcacgccggcggcgtgaccggcggctgggacaacctgctggccgtgatccccggcggcagcagcacccccctgatccccaagagcgtgtgcgagaccgtgctgatggacttcgacgccctggtgcaggcccagaccggcctgggcaccgccgccgtgatcgtgatggacagaagcaccgacatcgtgaaggccatcgccagactgatcgagttctacaagcacgagagctgcggccagtgcaccccctgcagagagggcgtggactggatgaacaaggtgatggccagattcgtgagaggcgacgccagacccgccgagatcgacagcctgtgggagatcagcaagcagatcgagggccacaccatctgcgccctgggcgacggcgccgcctggcccgtgcagggcctgatcagacacttcagacccgagctggaggagagaatgcagagattcgcccagcagcaccaggccagacaggccgccagctag

SEQ ID NO: 90392 - DNA, 1368 bp, synthetic construct
  misc_feature 1..1368: note = Description of Artificial Sequence: Synthetic coding sequence
  source 1..1368: mol_type = other DNA
atgctggccaccagaagactgctgggctggagcctgcccgccagaaccgcccccaagaagaccagcttcggcagcctgaaggacgaggacagaatcttcaccaacctgtacggcagacacgactggagactgaagggcagcctgagcagaggcgactggtacaagaccaaggagatcctgctgaagggccccgactggatcctgggcgagatcaagaccagcggcctgagaggcagaggcggcgccggcttccccaccggcctgaagtggagcttcatgaacaagcccagcgacggcagacccaagtacctggtggtgaacgccgacgagggcgagcccggcacctgcaaggacagagagatcctgagacacgacccccacaagctgctggagggctgcctggtgggcggcagagccatgggcgccagagccgcctacatctacatcagaggcgagttctacaacgaggccagcaacctgcaggtggccatcagagaggcctacgaggccggcctgatcggcaagaacgcctgcggcagcggctacgacttcgacgtgttcgtggtgagaggcgccggcgcctacatctgcggcgaggagaccgccctgatcgagagcatcgagggcaagcagggcaagcccagactgaagccccccttccccgccgacgtgggcgtgttcggctgccccaccaccgtggccaacgtggagaccgtggccgtgagccccaccatctgcagaagaggcggcacctggttcgccggcttcggcagagagagaaacagcggcaccaagctgttcaacatcagcggccacgtgaaccacccctgcaccgtggaggaggagatgagcgtgcccctgaaggagctgatcgagaagcacgccggcggcgtgaccggcggctgggacaacctgctggccgtgatccccggcggcagcagcacccccctgatccccaagagcgtgtgcgagaccgtgctgatggacttcgacgccctggtgcaggcccagaccggcctgggcaccgccgccgtgatcgtgatggacagaagcaccgacatcgtgaaggccatcgccagactgatcgagttctacaagcacgagagctgcggccagtgcaccccctgcagagagggcgtggactggatgaacaaggtgatggccagattcgtgagaggcgacgccagacccgccgagatcgacagcctgtgggagatcagcaagcagatcgagggccacaccatctgcgccctgggcgacggcgccgcctggcccgtgcagggcctgatcagacacttcagacccgagctggaggagagaatgcagagattcgcccagcagcaccaggccagacaggccgccagctag

SEQ ID NO: 90393 - DNA, 1092 bp, synthetic construct
  misc_feature 1..1092: note = Description of Artificial Sequence: Synthetic coding sequence
  source 1..1092: mol_type = other DNA
atgaacaagcccagcgacggcagacccaagtacctggtggtgaacgccgacgagggcgagcccggcacctgcaaggacagagagatcctgagacacgacccccacaagctgctggagggctgcctggtgggcggcagagccatgggcgccagagccgcctacatctacatcagaggcgagttctacaacgaggccagcaacctgcaggtggccatcagagaggcctacgaggccggcctgatcggcaagaacgcctgcggcagcggctacgacttcgacgtgttcgtggtgagaggcgccggcgcctacatctgcggcgaggagaccgccctgatcgagagcatcgagggcaagcagggcaagcccagactgaagccccccttccccgccgacgtgggcgtgttcggctgccccaccaccgtggccaacgtggagaccgtggccgtgagccccaccatctgcagaagaggcggcacctggttcgccggcttcggcagagagagaaacagcggcaccaagctgttcaacatcagcggccacgtgaaccacccctgcaccgtggaggaggagatgagcgtgcccctgaaggagctgatcgagaagcacgccggcggcgtgaccggcggctgggacaacctgctggccgtgatccccggcggcagcagcacccccctgatccccaagagcgtgtgcgagaccgtgctgatggacttcgacgccctggtgcaggcccagaccggcctgggcaccgccgccgtgatcgtgatggacagaagcaccgacatcgtgaaggccatcgccagactgatcgagttctacaagcacgagagctgcggccagtgcaccccctgcagagagggcgtggactggatgaacaaggtgatggccagattcgtgagaggcgacgccagacccgccgagatcgacagcctgtgggagatcagcaagcagatcgagggccacaccatctgcgccctgggcgacggcgccgcctggcccgtgcagggcctgatcagacacttcagacccgagctggaggagagaatgcagagattcgcccagcagcaccaggccagacaggccgccagctag

SEQ ID NO: 90394 - DNA, 750 bp, synthetic construct
  misc_feature 1..750: note = Description of Artificial Sequence: Synthetic coding sequence
  source 1..750: mol_type = other DNA
atgttcttcagcgccgccctgagagccagagccgccggcctgaccgcccactggggcagacacgtgagaaacctgcacaagaccgtgatgcagaacggcgccggcggcgccctgttcgtgcacagagacacccccgagaacaaccccgacacccccttcgacttcacccccgagaactacaagagaatcgaggccatcgtgaagaactaccccgagggccacaaggccgccgccgtgctgcccgtgctggacctggcccagagacagaacggctggctgcccatcagcgccatgaacaaggtggccgaggtgctgcaggtgccccccatgagagtgtacgaggtggccaccttctacaccatgtacaacagaaagcccgtgggcaagtaccacatccaggtgtgcaccaccaccccctgcatgctgagaaacagcgacagcatcctggaggccatccagaagaagctgggcatcaaggtgggcgagaccacccccgacaagctgttcaccctgatcgaggtggagtgcctgggcgcctgcgtgaacgcccccatggtgcagatcaacgacaactactacgaggacctgaccgccaaggacatcgaggagatcatcgacgagctgaaggccggcaagatccccaagcccggccccagaagcggcagattcagctgcgagcccgccggcggcctgaccagcctgaccgagccccccaagggccccggcttcggcgtgcaggccggcctgtag

SEQ ID NO: 90395 - DNA, 327 bp, synthetic construct
  misc_feature 1..327: note = Description of Artificial Sequence: Synthetic coding sequence
  source 1..327: mol_type = other DNA
atggccgccccctgcctgctgagacagggcagagccggcgccctgaagaccatgctgcaggaggcccaggtgttcagaggcctggccagcaccgtgagcctgagcgccgagagcggcaagagcgagaagggccagccccagaacagcaagaagcagagcccccccaagaagcccgcccccgtgcccgccgagcccttcgacaacaccacctacaagaacctgcagcaccacgactacagcacctacaccttcctggacctgaacctggagctgagcaagttcagaatgccccagcccagcagcggcagagagagccccagacactag

SEQ ID NO: 90396 - DNA, 1422 bp, synthetic construct
  misc_feature 1..1422: note = Description of Artificial Sequence: Synthetic coding sequence
  source 1..1422: mol_type = other DNA
atggccgccccctgcctgctgagacagggcagagccggcgccctgaagaccatgctgcaggaggcccaggtgttcagaggcctggccagcaccgtgagcctgagcgccgagagcggcaagagcgagaagggccagccccagaacagcaagaagcagagcccccccaagaacgtggtggagcccaaggagagaggcaagctgctggccacccagaccgccgccgagctgagcaagaacctgagcagccccagcagctacccccccgccgtgaacaagggcagaaaggtggccagccccagccccagcggcagcgtgctgttcaccgacgagggcgtgcccaagttcctgagcagaaagaccctggtggagttcccccagaaggtgctgagccccttcagaaagcagggcagcgacagcgaggccagacaggtgggcagaaaggtgaccagccccagcagcagcagcagcagcagcagcagcgacagcgagagcgacgacgaggccgacgtgagcgaggtgacccccagagtggtgagcaagggcagaggcggcctgagaaagcccgaggccagccacagcttcgagaacagagcccccagagtgaccgtgagcgccaaggagaagaccctgctgcagaagccccacgtggacatcaccgaccccgagaagccccaccagcccaagaagaagggcagccccgccaagcccagcgagggcagagagaacgccagacccaagaccaccatgcccagaagccaggtggacgaggagttcctgaagcagagcctgaaggagaagcagctgcagaagaccttcagactgaacgagatcgacaaggagagccagaagcccttcgaggtgaagggccccctgcccgtgcacaccaagagcggcctgagcgccccccccaagggcagccccgcccccgccgtgctggccgaggaggccagagccgagggccagctgcaggccagcccccccggcgccgccgagggccacctggagaagcccgtgcccgagccccagagaaaggccgccccccccctgcccagaaaggagaccagcggcacccagggcatcgagggccacctgaagggcggccaggccatcgtggaggaccagatcccccccagcaacctggagaccgtgcccgtggagaacaaccacggcttccacgagaagaccgccgccctgaagctggaggccgagggcgaggccatggaggacgccgccgcccccggcgacgacagaggcggcacccaggagcccgcccccgtgcccgccgagcccttcgacaacaccacctacaagaacctgcagcaccacgactacagcacctacaccttcctggacctgaacctggagctgagcaagttcagaatgccccagcccagcagcggcagagagagccccagacactag

SEQ ID NO: 90397 - DNA, 339 bp, synthetic construct
  misc_feature 1..339: note = Description of Artificial Sequence: Synthetic coding sequence
  source 1..339: mol_type = other DNA
atgctgcaggaggcccaggtgttcagaggcctggccagcaccgtgagcctgagcgccgagagcggcaagagcgagaagggccagccccagaacagcaagaagcagagcccccccaagagcgtgcccaccccccacagaagatacagcccctgcggcgactggaaggacgccagcagcctgaagcccgcccccgtgcccgccgagcccttcgacaacaccacctacaagaacctgcagcaccacgactacagcacctacaccttcctggacctgaacctggagctgagcaagttcagaatgccccagcccagcagcggcagagagagccccagacactag

SEQ ID NO: 90398 - DNA, 2223 bp, synthetic construct
  misc_feature 1..2223: note = Description of Artificial Sequence: Synthetic coding sequence
  source 1..2223: mol_type = other DNA
atggagaagctgggcgtggagcccgaggaggagggcggcggcgacgacgacgaggaggacgccgaggcctgggccatggagctggccgacgtgggcgccgccgccagcagccagggcgtgcacgaccaggtgctgcccacccccaacgccagcagcagagtgatcgtgcacgtggacctggactgcttctacgcccaggtggagatgatcagcaaccccgagctgaaggacaagcccctgggcgtgcagcagaagtacctggtggtgacctgcaactacgaggccagaaagctgggcgtgaagaagctgatgaacgtgagagacgccaaggagaagtgcccccagctggtgctggtgaacggcgaggacctgaccagatacagagagatgagctacaaggtgaccgagctgctggaggagttcagccccgtggtggagagactgggcttcgacgagaacttcgtggacctgaccgagatggtggagaagagactgcagcagctgcagagcgacgagctgagcgccgtgaccgtgagcggccacgtgtacaacaaccagagcatcaacctgctggacgtgctgcacatcagactgctggtgggcagccagatcgccgccgagatgagagaggccatgtacaaccagctgggcctgaccggctgcgccggcgtggccagcaacaagctgctggccaagctggtgagcggcgtgttcaagcccaaccagcagaccgtgctgctgcccgagagctgccagcacctgatccacagcctgaaccacatcaaggagatccccggcatcggctacaagaccgccaagtgcctggaggccctgggcatcaacagcgtgagagacctgcagaccttcagccccaagatcctggagaaggagctgggcatcagcgtggcccagagaatccagaagctgagcttcggcgaggacaacagccccgtgatcctgagcggccccccccagagcttcagcgaggaggacagcttcaagaagtgcagcagcgaggtggaggccaagaacaagatcgaggagctgctggccagcctgctgaacagagtgtgccaggacggcagaaagccccacaccgtgagactgatcatcagaagatacagcagcgagaagcactacggcagagagagcagacagtgccccatccccagccacgtgatccagaagctgggcaccggcaactacgacgtgatgacccccatggtggacatcctgatgaagctgttcagaaacatggtgaacgtgaagatgcccttccacctgaccctgctgagcgtgtgcttctgcaacctgaaggccctgaacaccgccaagaagggcctgatcgactactacctgatgcccagcctgagcaccaccagcagaagcggcaagcacagcttcaagatgaaggacacccacatggaggacttccccaaggacaaggagaccaacagagacttcctgcccagcggcagaatcgagagcaccagaaccagagagagccccctggacaccaccaacttcagcaaggagaaggacatcaacgagttccccctgtgcagcctgcccgagggcgtggaccaggaggtgttcaagcagctgcccgtggacatccaggaggagatcctgagcggcaagagcagagagaagttccagggcaagggcagcgtgagctgccccctgcacgccagcagaggcgtgctgagcttcttcagcaagaagcagatgcaggacatccccatcaaccccagagaccacctgagcagcagcaagcaggtgagcagcgtgagcccctgcgagcccggcaccagcggcttcaacagcagcagcagcagctacatgagcagccagaaggactacagctactacctggacaacagactgaaggacgagagaatcagccagggccccaaggagccccagggcttccacttcaccaacagcaaccccgccgtgagcgccttccacagcttccccaacctgcagagcgagcagctgttcagcagaaaccacaccaccgacagccacaagcagaccgtggccaccgacagccacgagggcctgaccgagaacagagagcccgacagcgtggacgagaagatcaccttccccagcgacatcgacccccaggtgttctacgagctgcccgaggccgtgcagaaggagctgctggccgagtggaagagagccggcagcgacttccacatcggccacaagtag

SEQ ID NO: 90399 - DNA, 540 bp, synthetic construct
  misc_feature 1..540: note = Description of Artificial Sequence: Synthetic coding sequence
  source 1..540: mol_type = other DNA
atgaacaagagaggcttcagcatggaggtgggccagtacatcttcgtgaactgccccagcatcagcctgctggagtggcaccccttcaccctgaccagcgcccccgaggaggacttcttcagcatccacatcagagccgccggcgactggaccgagaacctgatcagagccttcgagcagcagtacagccccatccccagaatcgaggtggacggccccttcggcaccgccagcgaggacgtgttccagtacgaggtggccgtgctggtgggcgccggcatcggcgtgacccccttcgccagcatcctgaagagcatctggtacaagttccagtgcgccgaccacaacctgaagaccaagaagatctacttctactggatctgcagagagaccggcgccttcagctggttcaacaacctgctgaccagcctggagcaggagatggaggagctgggcaagagcctgagaaagtgctgccacagatacagcagcctggaccccagaaaggtgcagttctacttcaacaaggagaacttctag

SEQ ID NO: 90400 - DNA, 1584 bp, synthetic construct
  misc_feature 1..1584: note = Description of Artificial Sequence: Synthetic coding sequence
  source 1..1584: mol_type = other DNA
atgggcaactgggtggtgaaccactggttcagcgtgctgttcctggtggtgtggctgggcctgaacgtgttcctgttcgtggacgccttcctgaagtacgagaaggccgacaagtactactacaccagaaagatcctgggcttctgcagcagaaccctgagaaagcagctggaccacaacctgaccttccacaagctggtggcctacatgatctgcctgcacaccgccatccacatcatcgcccacctgttcaacttcgactgctacagcagaagcagacaggccaccgacggcagcctggccagcatcctgagcagcctgagccacgacgagaagaagggcggcagctggctgaaccccatccagagcagaaacaccaccgtggagtacgtgaccttcaccagcatcgccggcctgaccggcgtgatcatgaccatcgccctgatcctgatggtgaccagcgccaccgagttcatcagaagaagctacttcgaggtgttctggtacacccaccacctgttcatcttctacatcctgggcctgggcatccacggcatcggcggcatcgtgagaggccagaccgaggagagcatgaacgagagccaccccagaaagtgcgccgagagcttcgagatgtgggacgacagagacagccactgcagaagacccaagttcgagggccacccccccgagagctggaagtggatcctggcccccgtgatcctgtacatctgcgagagaatcctgagattctacagaagccagcagaaggtggtgatcaccaaggtggtgatgcaccccagcaaggtgctggagctgcagatgaacaagagaggcttcagcatggaggtgggccagtacatcttcgtgaactgccccagcatcagcctgctggagtggcaccccttcaccctgaccagcgcccccgaggaggacttcttcagcatccacatcagagccgccggcgactggaccgagaacctgatcagagccttcgagcagcagtacagccccatccccagaatcgaggtggacggccccttcggcaccgccagcgaggacgtgttccagtacgaggtggccgtgctggtgggcgccggcatcggcgtgacccccttcgccagcatcctgaagagcatctggtacaagttccagtgcgccgaccacaacctgaagaccaagaagatctacttctactggatctgcagagagaccggcgccttcagctggttcaacaacctgctgaccagcctggagcaggagatggaggagctgggcaaggtgggcttcctgaactacagactgttcctgaccggctgggacagcaacatcgtgggccacgccgccctgaacttcgacaaggccaccgacatcgtgaccggcctgaagcagaagaccagcttcggcagacccatgtgggacaacgagttcagcaccatcgccaccagccaccccaagagcgtggtgggcgtgttcctgtgcggccccagaaccctggccaagagcctgagaaagtgctgccacagatacagcagcctggaccccagaaaggtgcagttctacttcaacaaggagaacttctag

SEQ ID NO: 90401 - DNA, 579 bp, synthetic construct
  misc_feature 1..579: note = Description of Artificial Sequence: Synthetic coding sequence
  source 1..579: mol_type = other DNA
atgggcaactgggtggtgaaccactggttcagcgtgctgttcctggtggtgtggctgggcctgaacgtgttcctgttcgtggacgccttcctgaagtacgagaaggccgacaagtactactacaccagaaagatcctgggcagcaccctggcctgcgccagagccagcgccctgtgcctgaacttcaacagcaccctgatcctgctgcccgtgtgcagaaacctgctgagcttcctgagaggcacctgcagcttctgcagcagaaccctgagaaagcagctggaccacaacctgaccttccacaagctggtggcctacatgatctgcctgcacaccgccatccacatcatcgcccacctgttcaacttcgactgctacagcagaagcagacaggccaccgacggcagcctggccagcatcctgagcagcctgagccacgacgagaagaagggcggcagctggctgaaccccatccacccccacatcacccccaccgtgtacatgttcaccgtgaccttcgacatggtgctgagcagcgtgaacagcaacctgttcctgttcctgctgatcaagaagtag

SEQ ID NO: 90402 - DNA, 579 bp, synthetic construct; identical to SEQ ID NO: 90401
  misc_feature 1..579: note = Description of Artificial Sequence: Synthetic coding sequence
  source 1..579: mol_type = other DNA

SEQ ID NO: 90403 - DNA, 1695 bp, synthetic construct
  misc_feature 1..1695: note = Description of Artificial Sequence: Synthetic coding sequence
  source 1..1695: mol_type = other DNA
atgggcaactgggtggtgaaccactggttcagcgtgctgttcctggtggtgtggctgggcctgaacgtgttcctgttcgtggacgccttcctgaagtacgagaaggccgacaagtactactacaccagaaagatcctgggcagcaccctggcctgcgccagagccagcgccctgtgcctgaacttcaacagcaccctgatcctgctgcccgtgtgcagaaacctgctgagcttcctgagaggcacctgcagcttctgcagcagaaccctgagaaagcagctggaccacaacctgaccttccacaagctggtggcctacatgatctgcctgcacaccgccatccacatcatcgcccacctgttcaacttcgactgctacagcagaagcagacaggccaccgacggcagcctggccagcatcctgagcagcctgagccacgacgagaagaagggcggcagctggctgaaccccatccagagcagaaacaccaccgtggagtacgtgaccttcaccagcatcgccggcctgaccggcgtgatcatgaccatcgccctgatcctgatggtgaccagcgccaccgagttcatcagaagaagctacttcgaggtgttctggtacacccaccacctgttcatcttctacatcctgggcctgggcatccacggcatcggcggcatcgtgagaggccagaccgaggagagcatgaacgagagccaccccagaaagtgcgccgagagcttcgagatgtgggacgacagagacagccactgcagaagacccaagttcgagggccacccccccgagagctggaagtggatcctggcccccgtgatcctgtacatctgcgagagaatcctgagattctacagaagccagcagaaggtggtgatcaccaaggtggtgatgcaccccagcaaggtgctggagctgcagatgaacaagagaggcttcagcatggaggtgggccagtacatcttcgtgaactgccccagcatcagcctgctggagtggcaccccttcaccctgaccagcgcccccgaggaggacttcttcagcatccacatcagagccgccggcgactggaccgagaacctgatcagagccttcgagcagcagtacagccccatccccagaatcgaggtggacggccccttcggcaccgccagcgaggacgtgttccagtacgaggtggccgtgctggtgggcgccggcatcggcgtgacccccttcgccagcatcctgaagagcatctggtacaagttccagtgcgccgaccacaacctgaagaccaagaagatctacttctactggatctgcagagagaccggcgccttcagctggttcaacaacctgctgaccagcctggagcaggagatggaggagctgggcaaggtgggcttcctgaactacagactgttcctgaccggctgggacagcaacatcgtgggccacgccgccctgaacttcgacaaggccaccgacatcgtgaccggcctgaagcagaagaccagcttcggcagacccatgtgggacaacgagttcagcaccatcgccaccagccaccccaagagcgtggtgggcgtgttcctgtgcggccccagaaccctggccaagagcctgagaaagtgctgccacagatacagcagcctggaccccagaaaggtgcagttctacttcaacaaggagaacttctag

SEQ ID NO: 90404 - DNA, 528 bp, synthetic construct
  misc_feature 1..528: note = Description of Artificial Sequence: Synthetic coding sequence
  source 1..528: mol_type = other DNA
tgattcagcatggaggtgggccagtacatcttcgtgaactgccccagcatcagcctgctggagtggcaccccttcaccctgaccagcgcccccgaggaggacttcttcagcatccacatcagagccgccggcgactggaccgagaacctgatcagagccttcgagcagcagtacagccccatccccagaatcgaggtggacggccccttcggcaccgccagcgaggacgtgttccagtacgaggtggccgtgctggtgggcgccggcatcggcgtgacccccttcgccagcatcctgaagagcatctggtacaagttccagtgcgccgaccacaacctgaagaccaagaagatctacttctactggatctgcagagagaccggcgccttcagctggttcaacaacctgctgaccagcctggagcaggagatggaggagctgggcaagagcctgagaaagtgctgccacagatacagcagcctggaccccagaaaggtgcagttctacttcaacaaggagaacttctag

SEQ ID NO: 90405 - DNA, 1707 bp, synthetic construct
  misc_feature 1..1707: note = Description of Artificial Sequence: Synthetic coding sequence
  source 1..1707: mol_type = other DNA
atgatgggctgctggatcctgaacgagggcctgagcaccatcctggtgctgagctggctgggcatcaacttctacctgttcatcgacaccttctactggtacgaggaggaggagagcttccactacaccagagtgatcctgggcagcaccctggcctgggccagagccagcgccctgtgcctgaacttcaactgcatgctgatcctgatccccgtgagcagaaacctgatcagcttcatcagaggcaccagcatctgctgcagaggcccctggagaagacagctggacaagaacctgagattccacaagctggtggcctacggcatcgccgtgaacgccaccatccacatcgtggcccacttcttcaacctggagagataccactggagccagagcgaggaggcccagggcctgctggccgccctgagcaagctgggcaacacccccaacgagagctacctgaaccccgtgagaaccttccccaccaacaccaccaccgagctgctgagaaccatcgccggcgtgaccggcctggtgatcagcctggccctggtgctgatcatgaccagcagcaccgagttcatcagacaggccagctacgagctgttctggtacacccaccacgtgttcatcgtgttcttcctgagcctggccatccacggcaccggcagaatcgtgagaggccagacccaggacagcctgagcctgcacaacatcaccttctgcagagacagatacgccgagtggcagaccgtggcccagtgccccgtgccccagttcagcggcaaggagcccagcgcctggaagtggatcctgggccccgtggtgctgtacgcctgcgagagaatcatcagattctggagattccagcaggaggtggtgatcaccaaggtggtgagccaccccagcggcgtgctggagctgcacatgaagaagagaggcttcaagatggcccccggccagtacatcctggtgcagtgccccgccatcagcagcctggagtggcaccccttcaccctgaccagcgccccccaggaggacttcttcagcgtgcacatcagagccgccggcgactggaccgccgccctgctggaggccttcggcgccgagggccaggccctgcaggagccctggagcctgcccagactggccgtggacggccccttcggcaccgccctgaccgacgtgttccactaccccgtgtgcgtgtgcgtggccgccggcatcggcgtgacccccttcgccgccctgctgaagagcatctggtacaagtgcagcgaggcccagacccccctgaagctgagcaaggtgtacttctactggatctgcagagacgccagagccttcgagtggttcgccgacctgctgctgagcctggagaccagaatgagcgagcagggcaagacccacttcctgagctaccacatcttcctgaccggctgggacgagaaccaggccctgcacatcgccctgcactgggacgagaacaccgacgtgatcaccggcctgaagcagaagaccttctacggcagacccaactggaacaacgagttcaagcagatcgcctacaaccaccccagcagcagcatcggcgtgttcttctgcggccccaaggccctgagcagaaccctgcagaagatgtgccacctgtacagcagcgccgaccccagaggcgtgcacttctactacaacaaggagagcttctag

SEQ ID NO: 90406 - DNA, 1737 bp, synthetic construct
  misc_feature 1..1737: note = Description of Artificial Sequence: Synthetic coding sequence
  source 1..1737: mol_type = other DNA
atggccgtgagctggagaagctggctggccaacgagggcgtgaagcacctgtgcctgttcatctggctgagcatgaacgtgctgctgttctggaagaccttcctgctgtacaaccagggccccgagtaccactacctgcaccagatgctgggcctgggcctgtgcctgagcagagccagcgccagcgtgctgaacctgaactgcagcctgatcctgctgcccatgtgcagaaccctgctggcctacctgagaggcagccagaaggtgcccagcagaagaaccagaagactgctggacaagagcagaaccttccacatcacctgcggcgtgaccatctgcatcttcagcggcgtgcacgtggccgcccacctggtgaacgccctgaacttcagcgtgaactacagcgaggacttcgtggagctgaacgccgccagatacagagacgaggaccccagaaagctgctgttcaccaccgtgcccggcctgaccggcgtgtgcatggtggtggtgctgttcctgatgatcaccgccagcacctacgccatcagagtgagcaactacgacatcttctggtacacccacaacctgttcttcgtgttctacatgctgctgaccctgcacgtgagcggcggcctgctgaagtaccagaccaacctggacacccacccccccggctgcatcagcctgaacagaaccagcagccagaacatcagcctgcccgagtacttcagcgagcacttccacgagcccttccccgagggcttcagcaagcccgccgagttcacccagcacaagttcgtgaagatctgcatggaggagcccagattccaggccaacttcccccagacctggctgtggatcagcggccccctgtgcctgtactgcgccgagagactgtacagatacatcagaagcaacaagcccgtgaccatcatcagcgtgatgagccaccccagcgacgtgatggagatcagaatggtgaaggagaacttcaaggccagacccggccagtacatcaccctgcactgccccagcgtgagcgccctggagaaccaccccttcaccctgaccatgtgccccaccgagaccaaggccaccttcggcgtgcacctgaagatcgtgggcgactggaccgagagattcagagacctgctgctgccccccagcagccaggacagcgagatcctgcccttcatccagagcagaaactaccccaagctgtacatcgacggccccttcggcagccccttcgaggagagcctgaactacgaggtgagcctgtgcgtggccggcggcatcggcgtgacccccttcgccagcatcctgaacaccctgctggacgactggaagccctacaagctgagaagactgtacttcatctgggtgtgcagagacatccagagcttcagatggttcgccgacctgctgtgcatgctgcacaacaagttctggcaggagaacagacccgactacgtgaacatccagctgtacctgagccagaccgacggcatccagaagatcatcggcgagaagtaccacgccctgaacagcagactgttcatcggcagacccagatggaagctgctgttcgacgagatcgccaagtacaacagaggcaagaccgtgggcgtgttctgctgcggccccaacagcctgagcaagaccctgcacaagctgagcaaccagaacaacagctacggcaccagattcgagtacaacaaggagagcttcagctag

SEQ ID NO: 90407 - DNA, 1665 bp, synthetic construct
  misc_feature 1..1665: note = Description of Artificial Sequence: Synthetic coding sequence
  source 1..1665: mol_type = other DNA
atgaacgtgctgctgttctggaagaccttcctgctgtacaaccagggccccgagtaccactacctgcaccagatgctgggcctgggcctgtgcctgagcagagccagcgccagcgtgctgaacctgaactgcagcctgatcctgctgcccatgtgcagaaccctgctggcctacctgagaggcagccagaaggtgcccagcagaagaaccagaagactgctggacaagagcagaaccttccacatcacctgcggcgtgaccatctgcatcttcagcggcgtgcacgtggccgcccacctggtgaacgccctgaacttcagcgtgaactacagcgaggacttcgtggagctgaacgccgccagatacagagacgaggaccccagaaagctgctgttcaccaccgtgcccggcctgaccggcgtgtgcatggtggtggtgctgttcctgatgatcaccgccagcacctacgccatcagagtgagcaactacgacatcttctggtacacccacaacctgttcttcgtgttctacatgctgctgaccctgcacgtgagcggcggcctgctgaagtaccagaccaacctggacacccacccccccggctgcatcagcctgaacagaaccagcagccagaacatcagcctgcccgagtacttcagcgagcacttccacgagcccttccccgagggcttcagcaagcccgccgagttcacccagcacaagttcgtgaagatctgcatggaggagcccagattccaggccaacttcccccagacctggctgtggatcagcggccccctgtgcctgtactgcgccgagagactgtacagatacatcagaagcaacaagcccgtgaccatcatcagcgtgatgagccaccccagcgacgtgatggagatcagaatggtgaaggagaacttcaaggccagacccggccagtacatcaccctgcactgccccagcgtgagcgccctggagaaccaccccttcaccctgaccatgtgccccaccgagaccaaggccaccttcggcgtgcacctgaagatcgtgggcgactggaccgagagattcagagacctgctgctgccccccagcagccaggacagcgagatcctgcccttcatccagagcagaaactaccccaagctgtacatcgacggccccttcggcagccccttcgaggagagcctgaactacgaggtgagcctgtgcgtggccggcggcatcggcgtgacccccttcgccagcatcctgaacaccctgctggacgactggaagccctacaagctgagaagactgtacttcatctgggtgtgcagagacatccagagcttcagatggttcgccgacctgctgtgcatgctgcacaacaagttctggcaggagaacagacccgactacgtgaacatccagctgtacctgagccagaccgacggcatccagaagatcatcggcgagaagtaccacgccctgaacagcagactgttcatcggcagacccagatggaagctgctgttcgacgagatcgccaagtacaacagaggcaagaccgtgggcgtgttctgctgcggccccaacagcctgagcaagaccctgcacaagctgagcaaccagaacaacagctacggcaccagattcgagtacaacaaggagagcttcagctag

SEQ ID NO: 90408 - DNA, 816 bp, synthetic construct
  misc_feature 1..816: note = Description of Artificial Sequence: Synthetic coding sequence
  source 1..816: mol_type = other DNA
atggccgtgagctggagaagctggctggccaacgagggcgtgaagcacctgtgcctgttcatctggctgagcatgaacgtgctgctgttctggaagaccttcctgctgtacaaccagggccccgagtaccactacctgcaccagatgctgggctgccccaccgagaccaaggccaccttcggcgtgcacctgaagatcgtgggcgactggaccgagagattcagagacctgctgctgccccccagcagccaggacagcgagatcctgcccttcatccagagcagaaactaccccaagctgtacatcgacggccccttcggcagccccttcgaggagagcctgaactacgaggtgagcctgtgcgtggccggcggcatcggcgtgacccccttcgccagcatcctgaacaccctgctggacgactggaagccctacaagctgagaagactgtacttcatctgggtgtgcagagacatccagagcttcagatggttcgccgacctgctgtgcatgctgcacaacaagttctggcaggagaacagacccgactacgtgaacatccagctgtacctgagccagaccgacggcatccagaagatcatcggcgagaagtaccacgccctgaacagcagactgttcatcggcagacccagatggaagctgctgttcgacgagatcgccaagtacaacagaggcaagaccgtgggcgtgttctgctgcggccccaacagcctgagcaagaccctgcacaagctgagcaaccagaacaacagctacggcaccagattcgagtacaacaaggagagcttcagctag

SEQ ID NO: 90409 - DNA, 165 bp, synthetic construct
  misc_feature 1..165: note = Description of Artificial Sequence: Synthetic coding sequence
  source 1..165: mol_type = other DNA
atggccgtgagctggagaagctggctggccaacgagggcgtgaagcacctgtgcctgttcatctggctgagcatgaacgtgctgctgttctggaagaccttcctgctgtacaaccagggccccgagtaccactacctgcaccagatgctgggcgagctgagctag

SEQ ID NO: 90410 - DNA, 1800 bp, synthetic construct
  misc_feature 1..1800: note = Description of Artificial Sequence: Synthetic coding sequence
  source 1..1800: mol_type = other DNA
atgggcgagatgtggagaaagagagaggaggtgatcttcagagagtacagcttcagcttctaccccctgaacatcttcgcccccttcgtgctgttccccgactacttctgcctgctgggcttcatctggctgagcatgaacgtgctgctgttctggaagaccttcctgctgtacaaccagggccccgagtaccactacctgcaccagatgctgggcctgggcctgtgcctgagcagagccagcgccagcgtgctgaacctgaactgcagcctgatcctgctgcccatgtgcagaaccctgctggcctacctgagaggcagccagaaggtgcccagcagaagaaccagaagactgctggacaagagcagaaccttccacatcacctgcggcgtgaccatctgcatcttcagcggcgtgcacgtggccgcccacctggtgaacgccctgaacttcagcgtgaactacagcgaggacttcgtggagctgaacgccgccagatacagagacgaggaccccagaaagctgctgttcaccaccgtgcccggcctgaccggcgtgtgcatggtggtggtgctgttcctgatgatcaccgccagcacctacgccatcagagtgagcaactacgacatcttctggtacacccacaacctgttcttcgtgttctacatgctgctgaccctgcacgtgagcggcggcctgctgaagtaccagaccaacctggacacccacccccccggctgcatcagcctgaacagaaccagcagccagaacatcagcctgcccgagtacttcagcgagcacttccacgagcccttccccgagggcttcagcaagcccgccgagttcacccagcacaagttcgtgaagatctgcatggaggagcccagattccaggccaacttcccccagacctggctgtggatcagcggccccctgtgcctgtactgcgccgagagactgtacagatacatcagaagcaacaagcccgtgaccatcatcagcgtgatgagccaccccagcgacgtgatggagatcagaatggtgaaggagaacttcaaggccagacccggccagtacatcaccctgcactgccccagcgtgagcgccctggagaaccaccccttcaccctgaccatgtgccccaccgagaccaaggccaccttcggcgtgcacctgaagatcgtgggcgactggaccgagagattcagagacctgctgctgccccccagcagccaggacagcgagatcctgcccttcatccagagcagaaactaccccaagctgtacatcgacggccccttcggcagccccttcgaggagagcctgaactacgaggtgagcctgtgcgtggccggcggcatcggcgtgacccccttcgccagcatcctgaacaccctgctggacgactggaagccctacaagctgagaagactgtacttcatctgggtgtgcagagacatccagagcttcagatggttcgccgacctgctgtgcatgctgcacaacaagttctggcaggagaacagacccgactacgtgaacatccagctgtacctgagccagaccgacggcatccagaagatcatcggcgagaagtaccacgccctgaacagcagactgttcatcggcagacccagatggaagctgctgttcgacgagatcgccaagtacaacagaggcaagaccgtgggcgtgttctgctgcggccccaacagcctgagcaagaccctgcacaagctgagcaaccagaacaacagctacggcaccagattcgagtacaacaaggagagcttcagctag

SEQ ID NO: 90411 - DNA, 1665 bp, synthetic construct; identical to SEQ ID NO: 90407
  misc_feature 1..1665: note = Description of Artificial Sequence: Synthetic coding sequence
  source 1..1665: mol_type = other DNA

SEQ ID NO: 90412 - DNA, 1665 bp, synthetic construct; identical to SEQ ID NO: 90407
  misc_feature 1..1665: note = Description of Artificial Sequence: Synthetic coding sequence
  source 1..1665: mol_type = other DNA

SEQ ID NO: 90413 - DNA, 696 bp, synthetic construct
  misc_feature 1..696: note = Description of Artificial Sequence: Synthetic coding sequence
  source 1..696: mol_type = other DNA
atggccgtgagctggagaagctggctggccaacgagggcgtgaagcacctgtgcctgttcatctggctgagcatgaacgtgctgctgttctggaagaccttcctgctgtacaaccagggccccgagtaccactacctgcaccagatgctgggctgccccaccgagaccaaggccaccttcggcgtgcacctgaagatcgtgggcgactggaccgagagattcagagacctgctgctgccccccagcagccaggacagcgagatcctgcccttcatccagagcagaaactaccccaaggacgactggaagccctacaagctgagaagactgtacttcatctgggtgtgcagagacatccagagcttcagatggttcgccgacctgctgtgcatgctgcacaacaagttctggcaggagaacagacccgactacgtgaacatccagctgtacctgagccagaccgacggcatccagaagatcatcggcgagaagtaccacgccctgaacagcagactgttcatcggcagacccagatggaagctgctgttcgacgagatcgccaagtacaacagaggcaagaccgtgggcgtgttctgctgcggccccaacagcctgagcaagaccctgcacaagctgagcaaccagaacaacagctacggcaccagattcgagtacaacaaggagagcttcagctag

SEQ ID NO: 90414 - DNA, 1617 bp, synthetic construct
  misc_feature 1..1617: note = Description of Artificial Sequence: Synthetic coding sequence
  source 1..1617: mol_type = other DNA
atggccgtgagctggagaagctggctggccaacgagggcgtgaagcacctgtgcctgttcatctggctgagcatgaacgtgctgctgttctggaagaccttcctgctgtacaaccagggccccgagtaccactacctgcaccagatgctgggcctgggcctgtgcctgagcagagccagcgccagcgtgctgaacctgaactgcagcctgatcctgctgcccatgtgcagaaccctgctggcctacctgagaggcagccagaaggtgcccagcagaagaaccagaagactgctggacaagagcagaaccttccacatcacctgcggcgtgaccatctgcatcttcagcggcgtgcacgtggccgcccacctggtgaacgccctgaacttcagcgtgaactacagcgaggacttcgtggagctgaacgccgccagatacagagacgaggaccccagaaagctgctgttcaccaccgtgcccggcctgaccggcgtgtgcatggtggtggtgctgttcctgatgatcaccgccagcacctacgccatcagagtgagcaactacgacatcttctggtacacccacaacctgttcttcgtgttctacatgctgctgaccctgcacgtgagcggcggcctgctgaagtaccagaccaacctggacacccacccccccggctgcatcagcctgaacagaaccagcagccagaacatcagcctgcccgagtacttcagcgagcacttccacgagcccttccccgagggcttcagcaagcccgccgagttcacccagcacaagttcgtgaagatctgcatggaggagcccagattccaggccaacttcccccagacctggctgtggatcagcggccccctgtgcctgtactgcgccgagagactgtacagatacatcagaagcaacaagcccgtgaccatcatcagcgtgatgagccaccccagcgacgtgatggagatcagaatggtgaaggagaacttcaaggccagacccggccagtacatcaccctgcactgccccagcgtgagcgccctggagaaccaccccttcaccctgaccatgtgccccaccgagaccaaggccaccttcggcgtgcacctgaagatcgtgggcgactggaccgagagattcagagacctgctgctgccccccagcagccaggacagcgagatcctgcccttcatccagagcagaaactaccccaaggacgactggaagccctacaagctgagaagactgtacttcatctgggtgtgcagagacatccagagcttcagatggttcgccgacctgctgtgcatgctgcacaacaagttctggcaggagaacagacccgactacgtgaacatccagctgtacctgagccagaccgacggcatccagaagatcatcggcgagaagtaccacgccctgaacagcagactgttcatcggcagacccagatggaagctgctgttcgacgagatcgccaagtacaacagaggcaagaccgtgggcgtgttctgctgcggccccaacagcctgagcaagaccctgcacaagctgagcaaccagaacaacagctacggcaccagattcgagtacaacaaggagagcttcagctag

SEQ ID NO: 90415 - DNA, 1665 bp, synthetic construct; identical to SEQ ID NO: 90407
  misc_feature 1..1665: note = Description of Artificial Sequence: Synthetic coding sequence
  source 1..1665: mol_type = other DNA

SEQ ID NO: 90416 - DNA, 1665 bp, synthetic construct; identical to SEQ ID NO: 90407
  misc_feature 1..1665: note = Description of Artificial Sequence: Synthetic coding sequence
  source 1..1665: mol_type = other DNA

SEQ ID NO: 90417 - DNA, 2193 bp, synthetic construct
  misc_feature 1..2193: note = Description of Artificial Sequence: Synthetic coding sequence
  source 1..2193: mol_type = other DNA
atggccttcgtgtgcgccggcctgagcgacaccatgagcgccgaggaggacgccagatggctgagatgggtgacccagcagttcaagaccatcgccggcgaggacggcgagatcagcctgcaggagttcaaggccgccctgcacgtgaaggagagcttcttcgccgagagattcttcgccctgttcgacagcgacagaagcggcaccatcaccctgcaggagctgcaggaggccctgaccctgctgatccacggcagccccatggacaagctgaagttcctgttccaggtgtacgacatcgacggcagcggcagcatcgaccccgacgagctgagaaccgtgctgcagagctgcctgagagagagcgccatcagcctgcccgacgagaagctggaccagctgaccctggccctgttcgagagcgccgacgccgacggcaacggcgccatcaccttcgaggagctgagagacgagctgcagagattccccggcgtgatggagaacctgaccatcagcgccgcccactggctgaccgcccccgcccccagacccagacccagaagacccagacagctgaccagagcctactggcacaaccacagaagccagctgttctgcctggccacctacgccggcctgcacgtgctgctgttcggcctggccgccagcgcccacagagacctgggcgccagcgtgatggtggccaagggctgcggccagtgcctgaacttcgactgcagcttcatcgccgtgctgatgctgagaagatgcctgacctggctgagagccacctggctggcccaggtgctgcccctggaccagaacatccagttccaccagctgatgggctacgtggtggtgggcctgagcctggtgcacaccgtggcccacaccgtgaacttcgtgctgcaggcccaggccgaggccagccccttccagttctgggagctgctgctgaccaccagacccggcatcggctgggtgcacggcagcgccagccccaccggcgtggccctgctgctgctgctgctgctgatgttcatctgcagcagcagctgcatcagaagaagcggccacttcgaggtgttctactggacccacctgagctacctgctggtgtggctgctgctgatcttccacggccccaacttctggaagtggctgctggtgcccggcatcctgttcttcctggagaaggccatcggcctggccgtgagcagaatggccgccgtgtgcatcatggaggtgaacctgctgcccagcaaggtgacccacctgctgatcaagagaccccccttcttccactacagacccggcgactacctgtacctgaacatccccaccatcgccagatacgagtggcaccccttcaccatcagcagcgcccccgagcagaaggacaccatctggctgcacatcagaagccagggccagtggaccaacagactgtacgagagcttcaaggccagcgaccccctgggcagaggcagcaagagactgagcagaagcgtgaccatgagaaagagccagagaagcagcaagggcagcgagatcctgctggagaagcacaagttctgcaacatcaagtgctacatcgacggcccctacggcacccccaccagaagaatcttcgccagcgagcacgccgtgctgatcggcgccggcatcggcatcacccccttcgccagcatcctgcagagcatcatgtacagacaccagaagagaaagcacacctgccccagctgccagcacagctggatcgagggcgtgcaggacaacatgaagctgcacaaggtggacttcatctggatcaacagagaccagagaagcttcgagtggttcgtgagcctgctgaccaagctggagatggaccaggccgaggaggcccagtacggcagattcctggagctgcacatgtacatgaccagcgccctgggcaagaacgacatgaaggccatcggcctgcagatggccctggacctgctggccaacaaggagaagaaggacagcatcaccggcctgcagaccagaacccagcccggcagacccgactggagcaaggtgttccagaaggtggccgccgagaagaagggcaaggtgcaggtgttcttctgcggcagccccgccctggccaaggtgctgaagggccactgcgagaagttcggcttcagattcttccaggagaacttctag

SEQ ID NO: 90418 - DNA, 2298 bp, synthetic construct
  misc_feature 1..2298: note = Description of Artificial Sequence: Synthetic coding sequence
  source 1..2298: mol_type = other DNA
atgaacaccagcggcgaccccgcccagaccggccccgagggctgcagaggcaccatgagcgccgaggaggacgccagatggctgagatgggtgacccagcagttcaagaccatcgccggcgaggacggcgagatcagcctgcaggagttcaaggccgccctgcacgtgaaggagagcttcttcgccgagagattcttcgccctgttcgacagcgacagaagcggcaccatcaccctgcaggagctgcaggaggccctgaccctgctgatccacggcagccccatggacaagctgaagttcctgttccaggtgtacgacatcgacgtgtgcgccagacagggcgccagcgccggcaccgagtggggcgccggcgccggcccccactgggccagcagccccctgggcaccggcagcggcagcatcgaccccgacgagctgagaaccgtgctgcagagctgcctgagagagagcgccatcagcctgcccgacgagaagctggaccagctgaccctggccctgttcgagagcgccgacgccgacggcaacggcgccatcaccttcgaggagctgagagacgagctgcagagattccccggcgtgatggagaacctgaccatcagcgccgcccactggctgaccgcccccgcccccagacccagacccagaagacccagacagctgaccagagcctactggcacaaccacagaagccagctgttctgcctggccacctacgccggcctgcacgtgctgctgttcggcctggccgccagcgcccacagagacctgggcgccagcgtgatggtggccaagggctgcggccagtgcctgaacttcgactgcagcttcatcgccgtgctgatgctgagaagatgcctgacctggctgagagccacctggctggcccaggtgctgcccctggaccagaacatccagttccaccagctgatgggctacgtggtggtgggcctgagcctggtgcacaccgtggcccacaccgtgaacttcgtgctgcaggcccaggccgaggccagccccttccagttctgggagctgctgctgaccaccagacccggcatcggctgggtgcacggcagcgccagccccaccggcgtggccctgctgctgctgctgctgctgatgttcatctgcagcagcagctgcatcagaagaagcggccacttcgaggtgttctactggacccacctgagctacctgctggtgtggctgctgctgatcttccacggccccaacttctggaagtggctgctggtgcccggcatcctgttcttcctggagaaggccatcggcctggccgtgagcagaatggccgccgtgtgcatcatggaggtgaacctgctgcccagcaaggtgacccacctgctgatcaagagaccccccttcttccactacagacccggcgactacctgtacctgaacatccccaccatcgccagatacgagtggcaccccttcaccatcagcagcgcccccgagcagaaggacaccatctggctgcacatcagaagccagggccagtggaccaacagactgtacgagagcttcaaggccagcgaccccctgggcagaggcagcaagagactgagcagaagcgtgaccatgagaaagagccagagaagcagcaagggcagcgagatcctgctggagaagcacaagttctgcaacatcaagtgctacatcgacggcccctacggcacccccaccagaagaatcttcgccagcgagcacgccgtgctgatcggcgccggcatcggcatcacccccttcgccagcatcctgcagagcatcatgtacagacaccagaagagaaagcacacctgccccagctgccagcacagctggatcgagggcgtgcaggacaacatgaagctgcacaaggtggacttcatctggatcaacagagaccagagaagcttcgagtggttcgtgagcctgctgaccaagctggagatggaccaggccgaggaggcccagtacggcagattcctggagctgcacatgtacatgaccagcgccctgggcaagaacgacatgaaggccatcggcctgcagatggccctggacctgctggccaacaaggagaagaaggacagcatcaccggcctgcagaccagaacccagcccggcagacccgactggagcaaggtgttccagaaggtggccgccgagaagaagggcaaggtgcaggtgttcttctgcggcagccccgccctggccaaggtgctgaagggccactgcgagaagttcggcttcagattcttccaggagaacttctag

SEQ ID NO: 90419 - DNA, 2214 bp, synthetic construct
  misc_feature 1..2214: note = Description of Artificial Sequence: Synthetic coding sequence
  source 1..2214: mol_type = other DNA
atgaacaccagcggcgaccccgcccagaccggccccgagggctgcagaggcaccatgagcgccgaggaggacgccagatggctgagatgggtgacccagcagttcaagaccatcgccggcgaggacggcgagatcagcctgcaggagttcaaggccgccctgcacgtgaaggagagcttcttcgccgagagattcttcgccctgttcgacagcgacagaagcggcaccatcaccctgcaggagctgcaggaggccctgaccctgctgatccacggcagccccatggacaagctgaagttcctgttccaggtgtacgacatcgacggcagcggcagcatcgaccccgacgagctgagaaccgtgctgcagagctgcctgagagagagcgccatcagcctgcccgacgagaagctggaccagctgaccctggccctgttcgagagcgccgacgccgacggcaacggcgccatcaccttcgaggagctgagagacgagctgcagagattccccggcgtgatggagaacctgaccatcagcgccgcccactggctgaccgcccccgcccccagacccagacccagaagacccagacagctgaccagagcctactggcacaaccacagaagccagctgttctgcctggccacctacgccggcctgcacgtgctgctgttcggcctggccgccagcgcccacagagacctgggcgccagcgtgatggtggccaagggctgcggccagtgcctgaacttcgactgcagcttcatcgccgtgctgatgctgagaagatgcctgacctggctgagagccacctggctggcccaggtgctgcccctggaccagaacatccagttccaccagctgatgggctacgtggtggtgggcctgagcctggtgcacaccgtggcccacaccgtgaacttcgtgctgcaggcccaggccgaggccagccccttccagttctgggagctgctgctgaccaccagacccggcatcggctgggtgcacggcagcgccagccccaccggcgtggccctgctgctgctgctgctgctgatgttcatctgcagcagcagctgcatcagaagaagcggccacttcgaggtgttctactggacccacctgagctacctgctggtgtggctgctgctgatcttccacggccccaacttctggaagtggctgctggtgcccggcatcctgttcttcctggagaaggccatcggcctggccgtgagcagaatggccgccgtgtgcatcatggaggtgaacctgctgcccagcaaggtgacccacctgctgatcaagagaccccccttcttccactacagacccggcgactacctgtacctgaacatccccaccatcgccagatacgagtggcaccccttcaccatcagcagcgcccccgagcagaaggacaccatctggctgcacatcagaagccagggccagtggaccaacagactgtacgagagcttcaaggccagcgaccccctgggcagaggcagcaagagactgagcagaagcgtgaccatgagaaagagccagagaagcagcaagggcagcgagatcctgctggagaagcacaagttctgcaacatcaagtgctacatcgacggcccctacggcacccccaccagaagaatcttcgccagcgagcacgccgtgctgatcggcgccggcatcggcatcacccccttcgccagcatcctgcagagcatcatgtacagacaccagaagagaaagcacacctgccccagctgccagcacagctggatcgagggcgtgcaggacaacatgaagctgcacaaggtggacttcatctggatcaacagagaccagagaagcttcgagtggttcgtgagcctgctgaccaagctggagatggaccaggccgaggaggcccagtacggcagattcctggagctgcacatgtacatgaccagcgccctgggcaagaacgacatgaaggccatcggcctgcagatggccctggacctgctggccaacaaggagaagaaggacagcatcaccggcctgcagaccagaacccagcccggcagacccgactggagcaaggtgttccagaaggtggccgccgagaagaagggcaaggtgcaggtgttcttctgcggcagccccgccctggccaaggtgctgaagggccactgcgagaagttcggcttcagattcttccaggagaacttctag

SEQ ID NO: 90420 - DNA, 4419 bp, synthetic construct
  misc_feature 1..4419: note = Description of Artificial Sequence: Synthetic coding sequence
  source 1..4419: mol_type = other DNA
atggacaacgccctgttctgcctggccgccgtgagcaacctggacatcgagagcaagctgagcgtgtactacagagccccctggcaccagcagagaaacatcttcctgcccgccaccagacccccctgcgtggaggagctgcacagacacgccagacagagcctgcaggccctgagaagagagcacagaagcagaagcgacagaagagagcagagagccgccgcccccctgagcatcgccgccccccccctgcccgcctacccccccgcccacagccagagaagaagagagttcaaggacagacacttcctgaccttcaacagcaccagaagccccagccccaccgagtgctgccacatgaccccctggagcagaaagagccacccccccgaggacgaggacaccgacgtgatgctgggccagagacccaagaaccccatccacaacatccccagcaccctggacaagcagaccaactggagcaaggccctgcccctgcccacccccgaggagaagatgaagcaggacgcccaggtgatcagcagctgcatcatccccatcaacgtgaccggcgtgggcttcgacagagaggccagcatcagatgcagcctggtgcacagccagagcgtgctgcagagaagaagaaagctgagaagaagaaagaccatcagcggcatccccagaagagtgcagcaggagatcgacagcgacgagagccccgtggccagagagagaaacgtgatcgtgcacaccaaccccgaccccagcaacaccgtgaacagaatcagcggcaccagagacagcgagtgccagaccgaggacatcctgatcgccgcccccagcagaagaagaatcagagcccagagaggccagagcatcgccgccagcctgagccacagcgccggcaacatcagcgccctggccgacaagggcgacaccatgttcacccccgccgtgagcagcagaaccagaagcagaagcctgcccagagagggcaacagaggcggcgacgccgagcccaaggtgggcgccaagcccagcgcctacgaggagggcgagagcttcgtgggcgaccacgagagaacccccaacgacttcagcgaggcccccagcagccccagcgcccaggaccaccagcccaccctgggcctggcctgcagccagcacctgcacagcccccagcacaagctgagcgagagaggcagaagcagactgagcagaatggccgccgacagcggcagctgcgacatcagcagcaacagcgacaccttcggcagccccatccactgcatcagcaccgccggcgtgctgctgagcagccacatggaccagaaggacgaccaccagagcagcagcggcaactggagcggcagcagcagcacctgccccagccagaccagcgagaccatcccccccgccgccagcccccccctgaccggcagcagccactgcgacagcgagctgagcctgaacaccgccccccacgccaacgaggacgccagcgtgttcgtgaccgagcagtacaacgaccacctggacaaggtgagaggccacagagccaacagcttcaccagcaccgtggccgacctgctggacgaccccaacaacagcaacaccagcgacagcgagtggaactacctgcaccaccaccacgacgccagctgcagacaggacttcagccccgagagacccaaggccgacagcctgggctgccccagcttcaccagcatggccacctacgacagcttcctggagaagagccccagcgacaaggccgacaccagcagccacttcagcgtggacaccgagggctactacaccagcatgcacttcgactgcggcctgaagggcaacaagagctacgtgtgccactacgccgccctgggccccgagaacggccagggcgtgggcgccagccccggcctgcccgactgcgcctggcaggactacctggaccacaagagacagggcagacccagcatcagcttcagaaagcccaaggccaagcccaccccccccaagagaagcagcagcctgagaaagagcgacggcaacgccgacatcagcgagaagaaggagcccaagatcagcagcggccagcacctgccccacagcagcagagagatgaagctgcccctggacttcgccaacacccccagcagaatggagaacgccaacctgcccaccaagcaggagcccagctggatcaaccagagcgagcagggcatcaaggagccccagctggacgccagcgacatcccccccttcaaggacgaggtggccgagagcacccactacgccgacctgtggctgctgaacgacctgaagaccaacgacccctacagaagcctgagcaacagcagcaccgccaccggcaccaccgtgatcgagtgcatcaagagccccgagagcagcgagagccagaccagccagagcgagagcagagccaccacccccagcctgcccagcgtggacaacgagttcaagctggccagccccgagaagctggccggcctggccagccccagcagcggctacagcagccagagcgagacccccaccagcagcttccccaccgccttcttcagcggccccctgagccccggcggcagcaagagaaagcccaaggtgcccgagagaaagagcagcctgcagcagcccagcctgaaggacggcaccatcagcctgagcaaggacctggagctgcccatcatcccccccacccacctggacctgagcgccctgcacaacgtgctgaacaagcccttccaccacagacaccccctgcacgtgttcacccacaacaagcagaacaccgtgggcgagaccctgagaagcaaccccccccccagcctggccatcacccccaccatcctgaagagcgtgaacctgagaagcatcaacaagagcgaggaggtgaagcagaaggaggagaacaacaccgacctgccctacctggaggagagcaccctgaccaccgccgccctgagccccagcaagatcagaccccacaccgccaacaagagcgtgagcagacagtacagcaccgaggacaccatcctgagcttcctggacagcagcgccgtggagatgggccccgacaagctgcacctggagaagaacagcaccttcgacgtgaagaacagatgcgaccccgagaccatcaccagcgccggcagcagcctgctggacagcaacgtgaccaaggaccaggtgagaaccgagaccgagcccatccccgagaacacccccaccaagaactgcgccttccccaccgagggcttccagagagtgagcgccgccagacccaacgacctggacggcaagatcatccagtacggccccggccccgacgagaccctggagcaggtgcagaaggcccccagcgccggcctggaggaggtggcccagcccgagagcgtggacgtgatcaccagccagagcgacagccccaccagagccaccgacgtgagcaaccagttcaagcaccagttcgtgatgagcagacaccacgacaaggtgcccggcaccatcagctacgagagcgagatcaccagcgtgaacagcttccccgagaagtgcagcaagcaggagaacatcgccagcggcatcagcgccaagagcgccagcgacaacagcaaggccgaggagacccagggcaacgtggacgaggccagcctgaaggagagcagccccagcgacgacagcatcatcagccccctgagcgaggacagccaggccgaggccgagggcgtgttcgtgagccccaacaagcccagaaccaccgaggacctgttcgccgtgatccacagaagcaagagaaaggtgctgggcagaaaggacagcggcgacatgagcgtgagaagcaagagcagagcccccctgagcagcagcagcagcagcgccagcagcatcaccagccccagcagcaacgtgaccacccccaacagccagagaagccccggcctgatctacagaaacgccaagaagagcaacaccagcaacgaggagttcaagctgctgctgctgaagaagggcagcagaagcgacagcagctacagaatgagcgccaccgagatcctgaagagccccatcctgcccaagccccccggcgagctgaccgccgagagcccccagagcaccgacgacgcccaccagggcagccagggcgccgaggccctgagccccctgagcccctgcagccccagagtgaacgccgagggcttcagcagcaagagcttcgccaccagcgccagcgccagagtgggcagaagcagagccccccccgccgccagcagcagcagatacagcgtgagatgcagactgtacaacacccccatgcaggccatcagcgagggcgagaccgagaacagcgacggcagcccccacgacgacagaagcagccagagcagcacctag

SEQ ID NO: 90421 - DNA, 4893 bp, synthetic construct
  misc_feature 1..4893: note = Description of Artificial Sequence: Synthetic coding sequence
  source 1..4893: mol_type = other DNA
atgcccttcgccaagagaatcgtggagccccagtggctgtgcagacagagaagacccgcccccggccccgccgtggacgccagcggcggcagcgccgagccccccccccccctgcagccccccggcagaagagacctggacgaggtggaggcccccggccccgaggagcccgccagagccgtgcccgcccccagcggcctgccccccccccccccccccctgcccgcccccgccgaccagacccagcccccccacggcgaggccagcgtggccggcgaggagagcaccgccggcatccccgaggccgcccccgccgccggcgaggccagcagcgccgccgccgccgccgccgtgctgctgatgctggacctgtgcgccgtgagcaacgccgccctggccagagtgctgagacagctgagcgacgtggccagacacgcctgcagcctgttccaggagctggagagcgacatccagctgacccacagaagagtgtgggccctgcagggcaagctgggcggcgtgcagagagtgctgagcaccctggaccccaagcaggaggccgtgcccgtgagcaacctggacatcgagagcaagctgagcgtgtactacagagccccctggcaccagcagagaaacatcttcctgcccgccaccagacccccctgcgtggaggagctgcacagacacgccagacagagcctgcaggccctgagaagagagcacagaagcagaagcgacagaagagagcagagagccgccgcccccctgagcatcgccgccccccccctgcccgcctacccccccgcccacagccagagaagaagagagttcaaggacagacacttcctgaccagccacccccccgaggacgaggacaccgacgtgatgctgggccagagacccaagaaccccatccacaacatccccagcaccctggacaagcagaccaactggagcaaggccctgcccctgcccacccccgaggagaagatgaagcaggacgcccaggtgatcagcagctgcatcatccccatcaacgtgaccggcgtgggcttcgacagagaggccagcatcagatgcagcctggtgcacagccagagcgtgctgcagagaagaagaaagctgagaagaagaaagaccatcagcggcatccccagaagagtgcagcaggagatcgacagcgacgagagccccgtggccagagagagaaacgtgatcgtgcacaccaaccccgaccccagcaacaccgtgaacagaatcagcggcaccagagacagcgagtgccagaccgaggacatcctgatcgccgcccccagcagaagaagaatcagagcccagagaggccagagcatcgccgccagcctgagccacagcgccggcaacatcagcgccctggccgacaagggcgacaccatgttcacccccgccgtgagcagcagaaccagaagcagaagcctgcccagagagggcaacagaggcggcgacgccgagcccaaggtgggcgccaagcccagcgcctacgaggagggcgagagcttcgtgggcgaccacgagagaacccccaacgacttcagcgaggcccccagcagccccagcgcccaggaccaccagcccaccctgggcctggcctgcagccagcacctgcacagcccccagcacaagctgagcgagagaggcagaagcagactgagcagaatggccgccgacagcggcagctgcgacatcagcagcaacagcgacaccttcggcagccccatccactgcatcagcaccgccggcgtgctgctgagcagccacatggaccagaaggacgaccaccagagcagcagcggcaactggagcggcagcagcagcacctgccccagccagaccagcgagaccatcccccccgccgccagcccccccctgaccggcagcagccactgcgacagcgagctgagcctgaacaccgccccccacgccaacgaggacgccagcgtgttcgtgaccgagcagtacaacgaccacctggacaaggtgagaggccacagagccaacagcttcaccagcaccgtggccgacctgctggacgaccccaacaacagcaacaccagcgacagcgagtggaactacctgcaccaccaccacgacgccagctgcagacaggacttcagccccgagagacccaaggccgacagcctgggctgccccagcttcaccagcatggccacctacgacagcttcctggagaagagccccagcgacaaggccgacaccagcagccacttcagcgtggacaccgagggctactacaccagcatgcacttcgactgcggcctgaagggcaacaagagctacgtgtgccactacgccgccctgggccccgagaacggccagggcgtgggcgccagccccggcctgcccgactgcgcctggcaggactacctggaccacaagagacagggcagacccagcatcagcttcagaaagcccaaggccaagcccaccccccccaagagaagcagcagcctgagaaagagcgacggcaacgccgacatcagcgagaagaaggagcccaagatcagcagcggccagcacctgccccacagcagcagagagatgaagctgcccctggacttcgccaacacccccagcagaatggagaacgccaacctgcccaccaagcaggagcccagctggatcaaccagagcgagcagggcatcaaggagccccagctggacgccagcgacatcccccccttcaaggacgaggtggccgagagcacccactacgccgacctgtggctgctgaacgacctgaagaccaacgacccctacagaagcctgagcaacagcagcaccgccaccggcaccaccgtgatcgagtgcatcaagagccccgagagcagcgagagccagaccagccagagcgagagcagagccaccacccccagcctgcccagcgtggacaacgagttcaagctggccagccccgagaagctggccggcctggccagccccagcagcggctacagcagccagagcgagacccccaccagcagcttccccaccgccttcttcagcggccccctgagccccggcggcagcaagagaaagcccaaggtgcccgagagaaagagcagcctgcagcagcccagcctgaaggacggcaccatcagcctgagcaaggacctggagctgcccatcatcccccccacccacctggacctgagcgccctgcacaacgtgctgaacaagcccttccaccacagacaccccctgcacgtgttcacccacaacaagcagaacaccgtgggcgagaccctgagaagcaaccccccccccagcctggccatcacccccaccatcctgaagagcgtgaacctgagaagcatcaacaagagcgaggaggtgaagcagaaggaggagaacaacaccgacctgccctacctggaggagagcaccctgaccaccgccgccctgagccccagcaagatcagaccccacaccgccaacaagagcgtgagcagacagtacagcaccgaggacaccatcctgagcttcctggacagcagcgccgtggagatgggccccgacaagctgcacctggagaagaacagcaccttcgacgtgaagaacagatgcgaccccgagaccatcaccagcgccggcagcagcctgctggacagcaacgtgaccaaggaccaggtgagaaccgagaccgagcccatccccgagaacacccccaccaagaactgcgccttccccaccgagggcttccagagagtgagcgccgccagacccaacgacctggacggcaagatcatccagtacggccccggccccgacgagaccctggagcaggtgcagaaggcccccagcgccggcctggaggaggtggcccagcccgagagcgtggacgtgatcaccagccagagcgacagccccaccagagccaccgacgtgagcaaccagttcaagcaccagttcgtgatgagcagacaccacgacaaggtgcccggcaccatcagctacgagagcgagatcaccagcgtgaacagcttccccgagaagtgcagcaagcaggagaacatcgccagcggcatcagcgccaagagcgccagcgacaacagcaaggccgaggagacccagggcaacgtggacgaggccagcctgaaggagagcagccccagcgacgacagcatcatcagccccctgagcgaggacagccaggccgaggccgagggcgtgttcgtgagccccaacaagcccagaaccaccgaggacctgttcgccgtgatccacagaagcaagagaaaggtgctgggcagaaaggacagcggcgacatgagcgtgagaagcaagagcagagcccccctgagcagcagcagcagcagcgccagcagcatcaccagccccagcagcaacgtgaccacccccaacagccagagaagccccggcctgatctacagaaacgccaagaagagcaacaccagcaacgaggagttcaagctgctgctgctgaagaagggcagcagaagcgacagcagctacagaatgagcgccaccgagatcctgaagagccccatcctgcccaagccccccggcgagctgaccgccgagagcccccagagcaccgacgacgcccaccagggcagccagggcgccgaggccctgagccccctgagcccctgcagccccagagtgaacgccgagggcttcagcagcaagagcttcgccaccagcgccagcgccagagtgggcagaagcagagccccccccgccgccagcagcagcagatacagcgtgagatgcagactgtacaacacccccatgcaggccatcagcgagggcgagaccgagaacagcgacggcagcccccacgacgacagaagcagccagagcagcacctag

SEQ ID NO: 90422 - DNA, 4425 bp, synthetic construct
  misc_feature 1..4425: note = Description of Artificial Sequence: Synthetic coding sequence
  source 1..4425: mol_type = other DNA
atggccctggcctgctgcatgcccaagaacgccgccgtgagcaacctggacatcgagagcaagctgagcgtgtactacagagccccctggcaccagcagagaaacatcttcctgcccgccaccagacccccctgcgtggaggagctgcacagacacgccagacagagcctgcaggccctgagaagagagcacagaagcagaagcgacagaagagagcagagagccgccgcccccctgagcatcgccgccccccccctgcccgcctacccccccgcccacagccagagaagaagagagttcaaggacagacacttcctgaccttcaacagcaccagaagccccagccccaccgagtgctgccacatgaccccctggagcagaaagagccacccccccgaggacgaggacaccgacgtgatgctgggccagagacccaagaaccccatccacaacatccccagcaccctggacaagcagaccaactggagcaaggccctgcccctgcccacccccgaggagaagatgaagcaggacgcccaggtgatcagcagctgcatcatccccatcaacgtgaccggcgtgggcttcgacagagaggccagcatcagatgcagcctggtgcacagccagagcgtgctgcagagaagaagaaagctgagaagaagaaagaccatcagcggcatccccagaagagtgcagcaggagatcgacagcgacgagagccccgtggccagagagagaaacgtgatcgtgcacaccaaccccgaccccagcaacaccgtgaacagaatcagcggcaccagagacagcgagtgccagaccgaggacatcctgatcgccgcccccagcagaagaagaatcagagcccagagaggccagagcatcgccgccagcctgagccacagcgccggcaacatcagcgccctggccgacaagggcgacaccatgttcacccccgccgtgagcagcagaaccagaagcagaagcctgcccagagagggcaacagaggcggcgacgccgagcccaaggtgggcgccaagcccagcgcctacgaggagggcgagagcttcgtgggcgaccacgagagaacccccaacgacttcagcgaggcccccagcagccccagcgcccaggaccaccagcccaccctgggcctggcctgcagccagcacctgcacagcccccagcacaagctgagcgagagaggcagaagcagactgagcagaatggccgccgacagcggcagctgcgacatcagcagcaacagcgacaccttcggcagccccatccactgcatcagcaccgccggcgtgctgctgagcagccacatggaccagaaggacgaccaccagagcagcagcggcaactggagcggcagcagcagcacctgccccagccagaccagcgagaccatcccccccgccgccagcccccccctgaccggcagcagccactgcgacagcgagctgagcctgaacaccgccccccacgccaacgaggacgccagcgtgttcgtgaccgagcagtacaacgaccacctggacaaggtgagaggccacagagccaacagcttcaccagcaccgtggccgacctgctggacgaccccaacaacagcaacaccagcgacagcgagtggaactacctgcaccaccaccacgacgccagctgcagacaggacttcagccccgagagacccaaggccgacagcctgggctgccccagcttcaccagcatggccacctacgacagcttcctggagaagagccccagcgacaaggccgacaccagcagccacttcagcgtggacaccgagggctactacaccagcatgcacttcgactgcggcctgaagggcaacaagagctacgtgtgccactacgccgccctgggccccgagaacggccagggcgtgggcgccagccccggcctgcccgactgcgcctggcaggactacctggaccacaagagacagggcagacccagcatcagcttcagaaagcccaaggccaagcccaccccccccaagagaagcagcagcctgagaaagagcgacggcaacgccgacatcagcgagaagaaggagcccaagatcagcagcggccagcacctgccccacagcagcagagagatgaagctgcccctggacttcgccaacacccccagcagaatggagaacgccaacctgcccaccaagcaggagcccagctggatcaaccagagcgagcagggcatcaaggagccccagctggacgccagcgacatcccccccttcaaggacgaggtggccgagagcacccactacgccgacctgtggctgctgaacgacctgaagaccaacgacccctacagaagcctgagcaacagcagcaccgccaccggcaccaccgtgatcgagtgcatcaagagccccgagagcagcgagagccagaccagccagagcgagagcagagccaccacccccagcctgcccagcgtggacaacgagttcaagctggccagccccgagaagctggccggcctggccagccccagcagcggctacagcagccagagcgagacccccaccagcagcttccccaccgccttcttcagcggccccctgagccccggcggcagcaagagaaagcccaaggtgcccgagagaaagagcagcctgcagcagcccagcctgaaggacggcaccatcagcctgagcaaggacctggagctgcccatcatcccccccacccacctggacctgagcgccctgcacaacgtgctgaacaagcccttccaccacagacaccccctgcacgtgttcacccacaacaagcagaacaccgtgggcgagaccctgagaagcaaccccccccccagcctggccatcacccccaccatcctgaagagcgtgaacctgagaagcatcaacaagagcgaggaggtgaagcagaaggaggagaacaacaccgacctgccctacctggaggagagcaccctgaccaccgccgccctgagccccagcaagatcagaccccacaccgccaacaagagcgtgagcagacagtacagcaccgaggacaccatcctgagcttcctggacagcagcgccgtggagatgggccccgacaagctgcacctggagaagaacagcaccttcgacgtgaagaacagatgcgaccccgagaccatcaccagcgccggcagcagcctgctggacagcaacgtgaccaaggaccaggtgagaaccgagaccgagcccatccccgagaacacccccaccaagaactgcgccttccccaccgagggcttccagagagtgagcgccgccagacccaacgacctggacggcaagatcatccagtacggccccggccccgacgagaccctggagcaggtgcagaaggcccccagcgccggcctggaggaggtggcccagcccgagagcgtggacgtgatcaccagccagagcgacagccccaccagagccaccgacgtgagcaaccagttcaagcaccagttcgtgatgagcagacaccacgacaaggtgcccggcaccatcagctacgagagcgagatcaccagcgtgaacagcttccccgagaagtgcagcaagcaggagaacatcgccagcggcatcagcgccaagagcgccagcgacaacagcaaggccgaggagacccagggcaacgtggacgaggccagcctgaaggagagcagccccagcgacgacagcatcatcagccccctgagcgaggacagccaggccgaggccgagggcgtgttcgtgagccccaacaagcccagaaccaccgaggacctgttcgccgtgatccacagaagcaagagaaaggtgctgggcagaaaggacagcggcgacatgagcgtgagaagcaagagcagagcccccctgagcagcagcagcagcagcgccagcagcatcaccagccccagcagcaacgtgaccacccccaacagccagagaagccccggcctgatctacagaaacgccaagaagagcaacaccagcaacgaggagttcaagctgctgctgctgaagaagggcagcagaagcgacagcagctacagaatgagcgccaccgagatcctgaagagccccatcctgcccaagccccccggcgagctgaccgccgagagcccccagagcaccgacgacgcccaccagggcagccagggcgccgaggccctgagccccctgagcccctgcagccccagagtgaacgccgagggcttcagcagcaagagcttcgccaccagcgccagcgccagagtgggcagaagcagagccccccccgccgccagcagcagcagatacagcgtgagatgcagactgtacaacacccccatgcaggccatcagcgagggcgagaccgagaacagcgacggcagcccccacgacgacagaagcagccagagcagcacctag

SEQ ID NO: 90423 - DNA, 255 bp, synthetic construct
  misc_feature 1..255: note = Description of Artificial Sequence: Synthetic coding sequence
  source 1..255: mol_type = other DNA
cccgagctgcaggtgtgcgtgttctgcagaaacaacaaggaggccatggccctgtacaccacccacatcctgaagggccccgacggcagagtgctgtgccccgtgctgagaagatacacctgccccctgtgcggcgccagcggcgacaacgcccacaccatcaagtactgccccctgagcaaggtgccccccccccccgccagacccccccccagaagcgccagagacggcccccccggcaagaagctgagatag

SEQ ID NO: 90424 - DNA, 879 bp, synthetic construct
  misc_feature 1..879: note = Description of Artificial Sequence: Synthetic coding sequence
  source 1..879: mol_type = other DNA
atggaggccttcccctgggcccccagaagccccagaagaggcagagcccccccccccatggccctggtgcccagcgccagatacgtgagcgcccccggccccgcccacccccagcccttcagcagctggaacgactacctgggcctggccaccctgatcaccaaggccgtggacggcgagcccagattcggctgcgccagaggcggcaacggcggcggcggcagcccccccagcagcagcagcagcagctgctgcagcccccacaccggcgccggccccggcgccctgggccccgccctgggcccccccgactacgacgaggacgacgacgacgacagcgacgagcccggcagcagaggcagatacctgggcagcgccctggagctgagagccctggagctgtgcgccggccccgccgaggccggcctgctggaggagagattcgccgagctgagccccttcgccggcagagccgccgccgtgctgctgggctgcgcccccgccgccgccgccgccgccaccaccaccagcgaggccacccccagagaggagagagcccccgcctgggccgccgagcccagactgcacgccgccagcggcgccgccgccgccagactgctgaagcccgagctgcaggtgtgcgtgttctgcagaaacaacaaggaggccatggccctgtacaccacccacatcctgaagggccccgacggcagagtgctgtgccccgtgctgagaagatacacctgccccctgtgcggcgccagcggcgacaacgcccacaccatcaagtactgccccctgagcaaggtgccccccccccccgccagacccccccccagaagcgccagagacggcccccccggcaagaagctgagatag

SEQ ID NO: 90425 - DNA, 3456 bp, synthetic construct
  misc_feature 1..3456: note = Description of Artificial Sequence: Synthetic coding sequence
  source 1..3456: mol_type = other DNA
atgctgagaagagtgaccgtggccgccgtgtgcgccaccagaagaaagctgtgcgaggccggcagagagctggccgccctgtggggcatcgagaccagaggcagatgcgaggacagcgccgccgccagacccttccccatcctggccatgcccggcagaaacaaggccaagagcacctgcagctgccccgacctgcagcccaacggccaggacctgggcgagaacagcagagtggccagactgggcgccgacgagagcgaggaggagggcagaagaggcagcctgagcaacgccggcgaccccgagatcgtgaagagccccagcgaccccaagcagtacagatacatcaagctgcagaacggcctgcaggccctgctgatcagcgacctgagcaacatggagggcaagaccggcaacaccaccgacgacgaggaggaggaggaggtggaggaggaggaggaggacgacgacgaggacagcggcgccgagatcgaggacgacgacgaggagggcttcgacgacgaggacgagttcgacgacgagcacgacgacgacctggacaccgaggacaacgagctggaggagctggaggagagagccgaggccagaaagaagaccaccgagaagcagagcgccgccgccctgtgcgtgggcgtgggcagcttcgccgaccccgacgacctgcccggcctggcccacttcctggagcacatggtgttcatgggcagcctgaagtaccccgacgagaacggcttcgacgccttcctgaagaagcacggcggcagcgacaacgccagcaccgactgcgagagaaccgtgttccagttcgacgtgcagagaaagtacttcaaggaggccctggacagatgggcccagttcttcatccaccccctgatgatcagagacgccatcgacagagaggtggaggccgtggacagcgagtaccagctggccagacccagcgacgccaacagaaaggagatgctgttcggcagcctggccagacccggccaccccatgggcaagttcttctggggcaacgccgagaccctgaagcacgagcccagaaagaacaacatcgacacccacgccagactgagagagttctggatgagatactacagcagccactacatgaccctggtggtgcagagcaaggagaccctggacaccctggagaagtgggtgaccgagatcttcagccagatccccaacaacggcctgcccagacccaacttcggccacctgaccgaccccttcgacacccccgccttcaacaagctgtacagagtggtgcccatcagaaagatccacgccctgaccatcacctgggccctgcccccccagcagcagcactacagagtgaagcccctgcactacatcagctggctggtgggccacgagggcaagggcagcatcctgagcttcctgagaaagaagtgctgggccctggccctgttcggcggcaacggcgagaccggcttcgagcagaacagcacctacagcgtgttcagcatcagcatcaccctgaccgacgagggctacgagcacttctacgaggtggcctacaccgtgttccagtacctgaagatgctgcagaagctgggccccgagaagagaatcttcgaggagatcagaaagatcgaggacaacgagttccactaccaggagcagaccgaccccgtggagtacgtggagaacatgtgcgagaacatgcagctgtaccccctgcaggacatcctgaccggcgaccagctgctgttcgagtacaagcccgaggtgatcggcgaggccctgaaccagctggtgccccagaaggccaacctggtgctgctgagcggcgccaacgagggcaagtgcgacctgaaggagaagtggttcggcacccagtacagcatcgaggacatcgagaacagctgggccgagctgtggaacagcaacttcgagctgaaccccgacctgcacctgcccgccgagaacaagtacatcgccaccgacttcaccctgaaggccttcgactgccccgagaccgagtaccccgtgaagatcgtgaacaccccccagggctgcctgtggtacaagaaggacaacaagttcaagatccccaaggcctacatcagattccacctgatcagccccctgatccagaagagcgccgccaacgtggtgctgttcgacatcttcgtgaacatcctgacccacaacctggccgagcccgcctacgaggccgacgtggcccagctggagtacaagctggtggccggcgagcacggcctgatcatcagagtgaagggcttcaaccacaagctgcccctgctgttccagctgatcatcgactacctggccgagttcaacagcacccccgccgtgttcaccatgatcaccgagcagctgaagaagacctacttcaacatcctgatcaagcccgagaccctggccaaggacgtgagactgctgatcctggagtacgccagatggagcatgatcgacaagtaccaggccctgatggacggcctgagcctggagagcctgctgagcttcgtgaaggagttcaagagccagctgttcgtggagggcctggtgcagggcaacgtgaccagcaccgagagcatggacttcctgaagtacgtggtggacaagctgaacttcaagcccctggagcaggagatgcccgtgcagttccaggtggtggagctgcccagcggccaccacctgtgcaaggtgaaggccctgaacaagggcgacgccaacagcgaggtgaccgtgtactaccagagcggcaccagaagcctgagagagtacaccctgatggagctgctggtgatgcacatggaggagccctgcttcgacttcctgagaaccaagcagaccctgggctaccacgtgtaccccacctgcagaaacaccagcggcatcctgggcttcagcgtgaccgtgggcacccaggccaccaagtacaacagcgaggtggtggacaagaagatcgaggagttcctgagcagcttcgaggagaagatcgagaacctgaccgaggaggccttcaacacccaggtgaccgccctgatcaagctgaaggagtgcgaggacacccacctgggcgaggaggtggacagaaactggaacgaggtggtgacccagcagtacctgttcgacagactggcccacgagatcgaggccctgaagagcttcagcaagagcgacctggtgaactggttcaaggcccacagaggccccggcagcaagatgctgagcgtgcacgtggtgggctacggcaagtacgagctggaggaggacggcacccccagcagcgaggacagcaacagcagctgcgaggtgatgcagctgacctacctgcccaccagccccctgctggccgactgcatcatccccatcaccgacatcagagccttcaccaccaccctgaacctgctgccctaccacaagatcgtgaagtag

SEQ ID NO: 90426 - DNA, 3660 bp, synthetic construct
  misc_feature 1..3660: note = Description of Artificial Sequence: Synthetic coding sequence
  source 1..3660: mol_type = other DNA
atgctgagaagagtgaccgtggccgccgtgtgcgccaccagaagaaagctgtgcgaggccggcagagagctggccgccctgtggggcatcgagaccagaggcagatgcgaggacagcgccgccgccagacccttccccatcctggccatgcccggcagaaacaaggccaagagcacctgcagctgccccgacctgcagcccaacggccaggacctgggcgagaacagcagagtggccagactgggcgccgacgagagcgaggaggagggcagaagaggcagcctgagcaacgccggcgaccccgagatcgtgaagagccccagcgaccccaagcagtacagatacatcaagctgcagaacggcctgcaggccctgctgatcagcgacctgagcaacatggagggcaagaccggcaacaccaccgacgacgaggaggaggaggaggtggaggaggaggaggaggacgacgacgaggacagcggcgccgagatcgaggacgacgacgaggagggcttcgacgacgaggacgagttcgacgacgagcacgacgacgacctggacaccgaggacaacgagctggaggagctggaggagagagccgaggccagaaagaagaccaccgagaagcagcagctgcagagcctgttcctgctgtggagcaagctgaccgacagactgtggttcaagagcacctacagcaagatgagcagcaccctgctggtggagaccagaaacctgtacggcgtggtgggcgccgagagcagaagcgcccccgtgcagcacctggccggctggcaggccgaggagcagcagggcgagaccgacaccgtgctgagcgccgccgccctgtgcgtgggcgtgggcagcttcgccgaccccgacgacctgcccggcctggcccacttcctggagcacatggtgttcatgggcagcctgaagtaccccgacgagaacggcttcgacgccttcctgaagaagcacggcggcagcgacaacgccagcaccgactgcgagagaaccgtgttccagttcgacgtgcagagaaagtacttcaaggaggccctggacagatgggcccagttcttcatccaccccctgatgatcagagacgccatcgacagagaggtggaggccgtggacagcgagtaccagctggccagacccagcgacgccaacagaaaggagatgctgttcggcagcctggccagacccggccaccccatgggcaagttcttctggggcaacgccgagaccctgaagcacgagcccagaaagaacaacatcgacacccacgccagactgagagagttctggatgagatactacagcagccactacatgaccctggtggtgcagagcaaggagaccctggacaccctggagaagtgggtgaccgagatcttcagccagatccccaacaacggcctgcccagacccaacttcggccacctgaccgaccccttcgacacccccgccttcaacaagctgtacagagtggtgcccatcagaaagatccacgccctgaccatcacctgggccctgcccccccagcagcagcactacagagtgaagcccctgcactacatcagctggctggtgggccacgagggcaagggcagcatcctgagcttcctgagaaagaagtgctgggccctggccctgttcggcggcaacggcgagaccggcttcgagcagaacagcacctacagcgtgttcagcatcagcatcaccctgaccgacgagggctacgagcacttctacgaggtggcctacaccgtgttccagtacctgaagatgctgcagaagctgggccccgagaagagaatcttcgaggagatcagaaagatcgaggacaacgagttccactaccaggagcagaccgaccccgtggagtacgtggagaacatgtgcgagaacatgcagctgtaccccctgcaggacatcctgaccggcgaccagctgctgttcgagtacaagcccgaggtgatcggcgaggccctgaaccagctggtgccccagaaggccaacctggtgctgctgagcggcgccaacgagggcaagtgcgacctgaaggagaagtggttcggcacccagtacagcatcgaggacatcgagaacagctgggccgagctgtggaacagcaacttcgagctgaaccccgacctgcacctgcccgccgagaacaagtacatcgccaccgacttcaccctgaaggccttcgactgccccgagaccgagtaccccgtgaagatcgtgaacaccccccagggctgcctgtggtacaagaaggacaacaagttcaagatccccaaggcctacatcagattccacctgatcagccccctgatccagaagagcgccgccaacgtggtgctgttcgacatcttcgtgaacatcctgacccacaacctggccgagcccgcctacgaggccgacgtggcccagctggagtacaagctggtggccggcgagcacggcctgatcatcagagtgaagggcttcaaccacaagctgcccctgctgttccagctgatcatcgactacctggccgagttcaacagcacccccgccgtgttcaccatgatcaccgagcagctgaagaagacctacttcaacatcctgatcaagcccgagaccctggccaaggacgtgagactgctgatcctggagtacgccagatggagcatgatcgacaagtaccaggccctgatggacggcctgagcctggagagcctgctgagcttcgtgaaggagttcaagagccagctgttcgtggagggcctggtgcagggcaacgtgaccagcaccgagagcatggacttcctgaagtacgtggtggacaagctgaacttcaagcccctggagcaggagatgcccgtgcagttccaggtggtggagctgcccagcggccaccacctgtgcaaggtgaaggccctgaacaagggcgacgccaacagcgaggtgaccgtgtactaccagagcggcaccagaagcctgagagagtacaccctgatggagctgctggtgatgcacatggaggagccctgcttcgacttcctgagaaccaagcagaccctgggctaccacgtgtaccccacctgcagaaacaccagcggcatcctgggcttcagcgtgaccgtgggcacccaggccaccaagtacaacagcgaggtggtggacaagaagatcgaggagttcctgagcagcttcgaggagaagatcgagaacctgaccgaggaggccttcaacacccaggtgaccgccctgatcaagctgaaggagtgcgaggacacccacctgggcgaggaggtggacagaaactggaacgaggtggtgacccagcagtacctgttcgacagactggcccacgagatcgaggccctgaagagcttcagcaagagcgacctggtgaactggttcaaggcccacagaggccccggcagcaagatgctgagcgtgcacgtggtgggctacggcaagtacgagctggaggaggacggcacccccagcagcgaggacagcaacagcagctgcgaggtgatgcagctgacctacctgcccaccagccccctgctggccgactgcatcatccccatcaccgacatcagagccttcaccaccaccctgaacctgctgccctaccacaagatcgtgaagtag

SEQ ID NO: 90427 - DNA, 1662 bp, synthetic construct
  misc_feature 1..1662: note = Description of Artificial Sequence: Synthetic coding sequence
  source 1..1662: mol_type = other DNA
atgctgcagaagctgggccccgagaagagaatcttcgaggagatcagaaagatcgaggacaacgagttccactaccaggagcagaccgaccccgtggagtacgtggagaacatgtgcgagaacatgcagctgtaccccctgcaggacatcctgaccggcgaccagctgctgttcgagtacaagcccgaggtgatcggcgaggccctgaaccagctggtgccccagaaggccaacctggtgctgctgagcggcgccaacgagggcaagtgcgacctgaaggagaagtggttcggcacccagtacagcatcgaggacatcgagaacagctgggccgagctgtggaacagcaacttcgagctgaaccccgacctgcacctgcccgccgagaacaagtacatcgcctacatcagattccacctgatcagccccctgatccagaagagcgccgccaacgtggtgctgttcgacatcttcgtgaacatcctgacccacaacctggccgagcccgcctacgaggccgacgtggcccagctggagtacaagctggtggccggcgagcacggcctgatcatcagagtgaagggcttcaaccacaagctgcccctgctgttccagctgatcatcgactacctggccgagttcaacagcacccccgccgtgttcaccatgatcaccgagcagctgaagaagacctacttcaacatcctgatcaagcccgagaccctggccaaggacgtgagactgctgatcctggagtacgccagatggagcatgatcgacaagtaccaggccctgatggacggcctgagcctggagagcctgctgagcttcgtgaaggagttcaagagccagctgttcgtggagggcctggtgcagggcaacgtgaccagcaccgagagcatggacttcctgaagtacgtggtggacaagctgaacttcaagcccctggagcaggagatgcccgtgcagttccaggtggtggagctgcccagcggccaccacctgtgcaaggtgaaggccctgaacaagggcgacgccaacagcgaggtgaccgtgtactaccagagcggcaccagaagcctgagagagtacaccctgatggagctgctggtgatgcacatggaggagccctgcttcgacttcctgagaaccaagcagaccctgggcagcgaggtggtggacaagaagatcgaggagttcctgagcagcttcgaggagaagatcgagaacctgaccgaggaggccttcaacacccaggtgaccgccctgatcaagctgaaggagtgcgaggacacccacctgggcgaggaggtggacagaaactggaacgaggtggtgacccagcagtacctgttcgacagactggcccacgagatcgaggccctgaagagcttcagcaagagcgacctggtgaactggttcaaggcccacagaggccccggcagcaagatgctgagcgtgcacgtggtgggctacggcaagtacgagctggaggaggacggcacccccagcagcgaggacagcaacagcagctgcgaggtgatgcagctgacctacctgcccaccagccccctgctggccgactgcatcatccccatcaccgacatcagagccttcaccaccaccctgaacctgctgccctaccacaagatcgtgaagtag

SEQ ID NO: 90428 - DNA, 1617 bp, synthetic construct
  misc_feature 1..1617: note = Description of Artificial Sequence: Synthetic coding sequence
  source 1..1617: mol_type = other DNA
tgaaagatcgaggacaacgagttccactaccaggagcagaccgaccccgtggagtacgtggagaacatgtgcgagaacatgcagctgtaccccctgcaggacatcctgaccggcgaccagctgctgttcgagtacaagcccgaggtgatcggcgaggccctgaaccagctggtgccccagaaggccaacctggtgctgctgagcggcgccaacgagggcaagtgcgacctgaaggagaagtggttcggcacccagtacagcatcgaggacatcgagaacagctgggccgagctgtggaacagcaacttcgagctgaaccccgacctgcacctgcccgccgagaacaagtacatcgcctacatcagattccacctgatcagccccctgatccagaagagcgccgccaacgtggtgctgttcgacatcttcgtgaacatcctgacccacaacctggccgagcccgcctacgaggccgacgtggcccagctggagtacaagctggtggccggcgagcacggcctgatcatcagagtgaagggcttcaaccacaagctgcccctgctgttccagctgatcatcgactacctggccgagttcaacagcacccccgccgtgttcaccatgatcaccgagcagctgaagaagacctacttcaacatcctgatcaagcccgagaccctggccaaggacgtgagactgctgatcctggagtacgccagatggagcatgatcgacaagtaccaggccctgatggacggcctgagcctggagagcctgctgagcttcgtgaaggagttcaagagccagctgttcgtggagggcctggtgcagggcaacgtgaccagcaccgagagcatggacttcctgaagtacgtggtggacaagctgaacttcaagcccctggagcaggagatgcccgtgcagttccaggtggtggagctgcccagcggccaccacctgtgcaaggtgaaggccctgaacaagggcgacgccaacagcgaggtgaccgtgtactaccagagcggcaccagaagcctgagagagtacaccctgatggagctgctggtgatgcacatggaggagccctgcttcgacttcctgagaaccaagcagaccctgggcagcgaggtggtggacaagaagatcgaggagttcctgagcagcttcgaggagaagatcgagaacctgaccgaggaggccttcaacacccaggtgaccgccctgatcaagctgaaggagtgcgaggacacccacctgggcgaggaggtggacagaaactggaacgaggtggtgacccagcagtacctgttcgacagactggcccacgagatcgaggccctgaagagcttcagcaagagcgacctggtgaactggttcaaggcccacagaggccccggcagcaagatgctgagcgtgcacgtggtgggctacggcaagtacgagctggaggaggacggcacccccagcagcgaggacagcaacagcagctgcgaggtgatgcagctgacctacctgcccaccagccccctgctggccgactgcatcatccccatcaccgacatcagagccttcaccaccaccctgaacctgctgccctaccacaagatcgtgaagtag

SEQ ID NO: 90429 - DNA, 3264 bp, synthetic construct
  misc_feature 1..3264: note = Description of Artificial Sequence: Synthetic coding sequence
  source 1..3264: mol_type = other DNA
atggagggcaagaccggcaacaccaccgacgacgaggaggaggaggaggtggaggaggaggaggaggacgacgacgaggacagcggcgccgagatcgaggacgacgacgaggagggcttcgacgacgaggacgagttcgacgacgagcacgacgacgacctggacaccgaggacaacgagctggaggagctggaggagagagccgaggccagaaagaagaccaccgagaagcagcagctgcagagcctgttcctgctgtggagcaagctgaccgacagactgtggttcaagagcacctacagcaagatgagcagcaccctgctggtggagaccagaaacctgtacggcgtggtgggcgccgagagcagaagcgcccccgtgcagcacctggccggctggcaggccgaggagcagcagggcgagaccgacaccgtgctgagcgccgccgccctgtgcgtgggcgtgggcagcttcgccgaccccgacgacctgcccggcctggcccacttcctggagcacatggtgttcatgggcagcctgaagtaccccgacgagaacggcttcgacgccttcctgaagaagcacggcggcagcgacaacgccagcaccgactgcgagagaaccgtgttccagttcgacgtgcagagaaagtacttcaaggaggccctggacagatgggcccagttcttcatccaccccctgatgatcagagacgccatcgacagagaggtggaggccgtggacagcgagtaccagctggccagacccagcgacgccaacagaaaggagatgctgttcggcagcctggccagacccggccaccccatgggcaagttcttctggggcaacgccgagaccctgaagcacgagcccagaaagaacaacatcgacacccacgccagactgagagagttctggatgagatactacagcagccactacatgaccctggtggtgcagagcaaggagaccctggacaccctggagaagtgggtgaccgagatcttcagccagatccccaacaacggcctgcccagacccaacttcggccacctgaccgaccccttcgacacccccgccttcaacaagctgtacagagtggtgcccatcagaaagatccacgccctgaccatcacctgggccctgcccccccagcagcagcactacagagtgaagcccctgcactacatcagctggctggtgggccacgagggcaagggcagcatcctgagcttcctgagaaagaagtgctgggccctggccctgttcggcggcaacggcgagaccggcttcgagcagaacagcacctacagcgtgttcagcatcagcatcaccctgaccgacgagggctacgagcacttctacgaggtggcctacaccgtgttccagtacctgaagatgctgcagaagctgggccccgagaagagaatcttcgaggagatcagaaagatcgaggacaacgagttccactaccaggagcagaccgaccccgtggagtacgtggagaacatgtgcgagaacatgcagctgtaccccctgcaggacatcctgaccggcgaccagctgctgttcgagtacaagcccgaggtgatcggcgaggccctgaaccagctggtgccccagaaggccaacctggtgctgctgagcggcgccaacgagggcaagtgcgacctgaaggagaagtggttcggcacccagtacagcatcgaggacatcgagaacagctgggccgagctgtggaacagcaacttcgagctgaaccccgacctgcacctgcccgccgagaacaagtacatcgccaccgacttcaccctgaaggccttcgactgccccgagaccgagtaccccgtgaagatcgtgaacaccccccagggctgcctgtggtacaagaaggacaacaagttcaagatccccaaggcctacatcagattccacctgatcagccccctgatccagaagagcgccgccaacgtggtgctgttcgacatcttcgtgaacatcctgacccacaacctggccgagcccgcctacgaggccgacgtggcccagctggagtacaagctggtggccggcgagcacggcctgatcatcagagtgaagggcttcaaccacaagctgcccctgctgttccagctgatcatcgactacctggccgagttcaacagcacccccgccgtgttcaccatgatcaccgagcagctgaagaagacctacttcaacatcctgatcaagcccgagaccctggccaaggacgtgagactgctgatcctggagtacgccagatggagcatgatcgacaagtaccaggccctgatggacggcctgagcctggagagcctgctgagcttcgtgaaggagttcaagagccagctgttcgtggagggcctggtgcagggcaacgtgaccagcaccgagagcatggacttcctgaagtacgtggtggacaagctgaacttcaagcccctggagcaggagatgcccgtgcagttccaggtggtggagctgcccagcggccaccacctgtgcaaggtgaaggccctgaacaagggcgacgccaacagcgaggtgaccgtgtactaccagagcggcaccagaagcctgagagagtacaccctgatggagctgctggtgatgcacatggaggagccctgcttcgacttcctgagaaccaagcagaccctgggctaccacgtgtaccccacctgcagaaacaccagcggcatcctgggcttcagcgtgaccgtgggcacccaggccaccaagtacaacagcgaggtggtggacaagaagatcgaggagttcctgagcagcttcgaggagaagatcgagaacctgaccgaggaggccttcaacacccaggtgaccgccctgatcaagctgaaggagtgcgaggacacccacctgggcgaggaggtggacagaaactggaacgaggtggtgacccagcagtacctgttcgacagactggcccacgagatcgaggccctgaagagcttcagcaagagcgacctggtgaactggttcaaggcccacagaggccccggcagcaagatgctgagcgtgcacgtggtgggctacggcaagtacgagctggaggaggacggcacccccagcagcgaggacagcaacagcagctgcgaggtgatgcagctgacctacctgcccaccagccccctgctggccgactgcatcatccccatcaccgacatcagagccttcaccaccaccctgaacctgctgccctaccacaagatcgtgaagtag

SEQ ID NO: 90430 - DNA, 2244 bp, synthetic construct
  misc_feature 1..2244: note = Description of Artificial Sequence: Synthetic coding sequence
  source 1..2244: mol_type = other DNA
atggagggcaagaccggcaacaccaccgacgacgaggaggaggaggaggtggaggaggaggaggaggacgacgacgaggacagcggcgccgagatcgaggacgacgacgaggagggcttcgacgacgaggacgagttcgacgacgagcacgacgacgacctggacaccgaggacaacgagctggaggagctggaggagagagccgaggccagaaagaagaccaccgagaagcagagcgccgccgccctgtgcgtgggcgtgggcagcttcgccgaccccgacgacctgcccggcctggcccacttcctggagcacatggtgttcatgggcagcctgaagtaccccgacgagaacggcttcgacgccttcctgaagaagcacggcggcagcgacaacgccagcaccgactgcgagagaaccgtgttccagttcgacgtgcagagaaagtacttcaaggaggccctggacagatgggcccagttcttcatccaccccctgatgatcagagacgccatcgacagagaggtggaggccgtggacagcgagtaccagctggccagacccagcgacgccaacagaaaggagatgctgttcggcagcctggccagacccggccaccccatgggcaagttcttctggggcaacgccgagaccctgaagcacgagcccagaaagaacaacatcgacacccacgccagactgagagagttctggatgagatactacagcagccactacatgaccctggtggtgcagagcaaggagaccctggacaccctggagaagtgggtgaccgagatcttcagccagatccccaacaacggcctgcccagacccaacttcggccacctgaccgaccccttcgacacccccgccttcaacaagctgtacagagtggtgcccatcagaaagatccacgccctgaccatcacctgggccctgcccccccagcagcagcactacagagtgaagcccctgcactacatcagctggctggtgggccacgagggcaagggcagcatcctgagcttcctgagaaagaagtgctgggccctggccctgttcggcggcaacggcgagaccggcttcgagcagaacagcacctacagcgtgttcagcatcagcatcaccctgaccgacgagggctacgagcacttctacgaggtggcctacaccgtgttccagtacctgaagatgctgcagaagctgggccccgagaagagaatcttcgaggagatcagaaagatcgaggacaacgagttccactaccaggagcagaccgaccccgtggagtacgtggagaacatgtgcgagaacatgcagctgtaccccctgcaggacatcctgaccggcgaccagctgctgttcgagtacaagcccgaggtgatcggcgaggccctgaaccagctggtgccccagaaggccaacctggtgctgctgagcggcgccaacgagggcaagtgcgacctgaaggagaagtggttcggcacccagtacagcatcgaggacatcgagaacagctgggccgagctgtggaacagcaacttcgagctgaaccccgacctgcacctgcccgccgagaacaagtacatcgccaccgacttcaccctgaaggccttcgactgccccgagaccgagtaccccgtgaagatcgtgaacaccccccagggctgcctgtggtacaagaaggacaacaagttcaagatccccaaggcctacatcagattccacctgatcagccccctgatccagaagagcgccgccaacgtggtgctgttcgacatcttcgtgaacatcctgacccacaacctggccgagcccgcctacgaggccgacgtggcccagctggagtacaagctggtggccggcgagcacggcctgatcatcagagtgaagggcttcaaccacaagctgcccctgctgttccagctgatcatcgactacctggccgagttcaacagcacccccgccgtgttcaccatgatcaccgagcagctgaagaagacctacttcaacatcctgatcaagcccgagaccctggccaaggacgtgagactgctgatcctggagtacgccagatggagcatgatcgacaagtaccaggccctgatggacggcctgagcctggagagcctgctgagcttcgtgaaggagttcaagagccagctgttcgtggagggcctggtgcagggcaacgtgaccagcaccgtgctgtgccagtgggcccaggacagcgagacctag

SEQ ID NO: 90431 - DNA, 3447 bp, synthetic construct
  misc_feature 1..3447: note = Description of Artificial Sequence: Synthetic coding sequence
  source 1..3447: mol_type = other DNA
atgctgagaagagtgaccgtggccgccgtgtgcgccaccagaagaaagctgtgcgaggccggcagagagctggccgccctgtggggcatcgagaccagaggcagatgcgaggacagcgccgccgccagacccttccccatcctggccatgcccggcagaaacaaggccaagagcacctgcagctgccccgacctgcagcccaacggccaggacctgggcgagaacagcagagtggccagactgggcgccgacgagagcgaggaggagggcagaagaggcagcctgagcaacgccggcgaccccgagatcgtgaagagccccagcgaccccaagcagtacagatacatcaagctgcagaacggcctgcaggccctgctgatcagcgacctgagcaacatggagggcaagaccggcaacaccaccgacgacgaggaggaggaggaggtggaggaggaggaggaggacgacgacgaggacagcggcgccgagatcgaggacgacgacgaggagggcttcgacgacgaggacgagttcgacgacgagcacgacgacgacctggacaccgaggacaacgagctggaggagctggaggagagagccgaggccagaaagaagaccaccgagaagcagagcgccgccgccctgtgcgtgggcgtgggcagcttcgccgaccccgacgacctgcccggcctggcccacttcctggagcacatggtgttcatgggcagcctgaagtaccccgacgagaacggcttcgacgccttcctgaagaagcacggcggcagcgacaacgccagcaccgactgcgagagaaccgtgttccagttcgacgtgcagagaaagtacttcaaggaggccctggacagatgggcccagttcttcatccaccccctgatgatcagagacgccatcgacagagaggtggaggccgtggacagcgagtaccagctggccagacccagcgacgccaacagaaaggagatgctgttcggcagcctggccagacccggccaccccatgggcaagttcttctggggcaacgccgagaccctgaagcacgagcccagaaagaacaacatcgacacccacgccagactgagagagttctggatgagatactacagcagccactacatgaccctggtggtgcagagcaaggagaccctggacaccctggagaagtgggtgaccgagatcttcagccagatccccaacaacggcctgcccagacccaacttcggccacctgaccgaccccttcgacacccccgccttcaacaagctgtacagagtggtgcccatcagaaagatccacgccctgaccatcacctgggccctgcccccccagcagcagcactacagagtgaagcccctgcactacatcagctggctggtgggccacgagggcaagggcagcatcctgagcttcctgagaaagaagtgctgggccctggccctgttcggcggcaacggcgagaccggcttcgagcagaacagcacctacagcgtgttcagcatcagcatcaccctgaccgacgagggctacgagcacttctacgaggtggcctacaccgtgttccagtacctgaagatgctgcagaagctgggccccgagaagagaatcttcgaggagatcagaaagatcgaggacaacgagttccactaccaggagcagaccgaccccgtggagtacgtggagaacatgtgcgagaacatgcagctgtaccccctgcaggacatcctgaccggcgaccagctgctgttcgagtacaagcccgaggtgatcggcgaggccctgaaccagctggtgccccagaaggccaacctggtgctgctgagcggcgccaacgagggcaagtgcgacctgaaggagaagtggttcggcacccagtacagcatcgaggacatcgagaacagctgggccgagctgtggaacagcaacttcgagctgaaccccgacctgcacctgcccgccgagaacaagtacatcgccaccgacttcaccctgaaggccttcgactgccccgagaccgagtaccccgtgaagatcgtgaacaccccccagggctgcctgtggtacaagaaggacaacaagttcaagatccccaaggcctacatcagattccacctgatcagccccctgatccagaagagcgccgccaacgtggtgctgttcgacatcttcgtgaacatcctgacccacaacctggccgagcccgcctacgaggccgacgtggcccagctggagtacaagctggtggccggcgagcacggcctgatcatcagagtgaagggcttcaaccacaagctgcccctgctgttccagctgatcatcgactacctggccgagttcaacagcacccccgccgtgttcaccatgatcaccgagcagctgaagaagacctacttcaacatcctgatcaagcccgagaccctggccaaggacgtgagactgctgatcctggagtacgccagatggagcatgatcgacaagtaccaggccctgatggacggcctgagcctggagagcctgctgagcttcgtgaaggagttcaagagccagctgttcgtggagggcctggtgcagggcaacgtgaccagcaccgagagcatggacttcctgaagtacgtggtggacaagctgaacttcaagcccctggagcaggagatgcccgtgcagttccaggtggtggagctgcccagcggccaccacctgtgcaaggtgaaggccctgaacaagggcgacgccaacagcgaggtgaccgtgtactaccagagcggcaccagaagcctgagagagtacaccctgatggagctgctggtgatgcacatggaggagccctgcttcgacttcctgagaaccaagcagaccctgggctaccacgtgtaccccacctgcagaaacaccagcggcatcctgggcttcagcgtgaccgtgggcacccaggccaccaagtacaacagcgaggtggtggacaagaagatcgaggagttcctgagcagcttcgaggagaagatcgagaacctgaccgaggaggccttcaacacccaggtgaccgccctgatcaagctgaaggagtgcgaggacacccacctgggcgaggaggtggacagaaactggaacgaggtggtgacccagcagtacctgttcgacagactggcccacgagatcgaggccctgaagagcttcagcaagagcgacctggtgaactggttcaaggcccacagaggccccggcagcaagatgctgagcgtgcacgtggtgggctacggcaagtacgagctggaggaggacggcacccccagcagcgaggacagcaacagcagctgcgaggtgatgcagctgacctacctgcccaccagccccctgctggccatcgtgagcagccccctgctgatcagcggcctgagccagcagcacagcaccttcagccccaccatcaagtag

SEQ ID NO: 90432 - DNA, 1587 bp, synthetic construct
  misc_feature 1..1587: note = Description of Artificial Sequence: Synthetic coding sequence
  source 1..1587: mol_type = other DNA
atgggcgccgccgccagcagaagaagagccctgagaagcgaggccatgagcagcgtggccgccaaggtgagagccgccagagccttcggcgagtacctgagccagagccaccccgagaacagaaacggcgccgaccacctgctggccgacgcctacagcggccacgacggcagccccgagatgcagcccgccccccagaacaagagaagactgagcctggtgagcaacggctgctacgagggcagcctgagcgaggagcccagcatcagaaagcccgccggcgagggcccccagcccagagtgtacaccatcagcggcgagcccgccctgctgcccagccccgaggccgaggccatcgagctggccgtggtgaagggcagaagacagagacacccccaccaccacagccagcccctgagagccagccccggcggcagcagagaggacgtgagcagaccctgccagagctgggccggcagcagacagggcagcaaggagtgccccggctgcgcccagctggcccccggccccacccccagagccttcggcctggaccagccccccctgcccgagaccagcggcagaagaaagaagctggagagaatgtacagcgtggacagagtgagcgacgacatccccatcagaacctggttccccaaggagaacctgttcagcttccagaccgccaccaccaccatgcaggccgtgttcagaggctacgccgagagaaagagaagaaagagagagaacgacagcgccagcgtgatccagagaaacttcagaaagcacctgagaatggtgggcagcagaagagtgaaggcccagaccttcgccgagagaagagagagaagcttcagcagaagctggagcgaccccacccccatgaaggccgacaccagccacgacagcagagacagcagcgacctgcagagcagccactgcaccctggacgaggccttcgaggacctggactgggacaccgagaagggcctggaggccgtggcctgcgacaccgagggcttcgtgccccccaaggtgatgctgatcagcagcaaggtgcccaaggccgagtacatccccaccatcatcagaagagacgaccccagcatcatccccatcctgtacgaccacgagcacgccaccttcgaggacatcctggaggagatcgagagaaagctgaacgtgtaccacaagggcgccaagatctggaagatgctgatcttctgccagggcggccccggccacctgtacctgctgaagaacaaggtggccaccttcgccaaggtggagaaggaggaggacatgatccacttctggaagagactgagcagactgatgagcaaggtgaaccccgagcccaacgtgatccacatcatgggctgctacatcctgggcaaccccaacggcgagaagctgttccagaacctgagaaccctgatgaccccctacagagtgaccttcgagagccccctggagctgagcgcccagggcaagcagatgatcgagacctacttcgacttcagactgtacagactgtggaagagcagacagcacagcaagctgctggacttcgacgacgtgctgtag

SEQ ID NO: 90433 - DNA, 984 bp, synthetic construct
  misc_feature 1..984: note = Description of Artificial Sequence: Synthetic coding sequence
  source 1..984: mol_type = other DNA
atgtacagcgtggacagagtgagcgacgacatccccatcagaacctggttccccaaggagaacctgttcagcttccagaccgccaccaccaccatgcaggccgtgttcagaggctacgccgagagaaagagaagaaagagagagaacgacagcgccagcgtgatccagagaaacttcagaaagcacctgagaatggtgggcagcagaagagtgaaggcccagaccttcgccgagagaagagagagaagcttcagcagaagctggagcgaccccacccccatgaaggccgacaccagccacgacagcagagacagcagcgacctgcagagcagccactgcaccctggacgaggccttcgaggacctggactgggacaccgagaagggcctggaggccgtggcctgcgacaccgagggcttcgtgccccccaaggtgatgctgatcagcagcaaggtgcccaaggccgagtacatccccaccatcatcagaagagacgaccccagcatcatccccatcctgtacgaccacgagcacgccaccttcgaggacatcctggaggagatcgagagaaagctgaacgtgtaccacaagggcgccaagatctggaagatgctgatcttctgccagggcggccccggccacctgtacctgctgaagaacaaggtggccaccttcgccaaggtggagaaggaggaggacatgatccacttctggaagagactgagcagactgatgagcaaggtgaaccccgagcccaacgtgatccacatcatgggctgctacatcctgggcaaccccaacggcgagaagctgttccagaacctgagaaccctgatgaccccctacagagtgaccttcgagagccccctggagctgagcgcccagggcaagcagatgatcgagacctacttcgacttcagactgtacagactgtggaagagcagacagcacagcaagctgctggacttcgacgacgtgctgtag

SEQ ID NO: 90434 - DNA, 438 bp, synthetic construct
  misc_feature 1..438: note = Description of Artificial Sequence: Synthetic coding sequence
  source 1..438: mol_type = other DNA
atggtgggcagcagaagagtgaaggcccagaccttcgccgagagaagagagagaagcttcagcagaagctggagcgaccccacccccatgaaggccgacaccagccacgacagcagagacagcagcgacctgcagagcagccactgcaccctggacgaggccttcgaggacctggactgggacaccgagaagggcctggaggccgtggcctgcgacaccgagggcttcgtgccccccaaggtgatgctgatcagcagcaaggtgcccaaggccgagtacatccccaccatcatcagaagagacgaccccagcatcatccccatcctgtacgtgagccccgcccccggcctgccccccaccgacgccctgctgagaccccaccccggccccgcccccgccccccaggtgcccagagtgctgtggagatgctggctgtag

SEQ ID NO: 90435 - DNA, 1587 bp, synthetic construct; identical to SEQ ID NO: 90432
  misc_feature 1..1587: note = Description of Artificial Sequence: Synthetic coding sequence
  source 1..1587: mol_type = other DNA

SEQ ID NO: 90436 - DNA, 1503 bp, synthetic construct
  misc_feature 1..1503: note = Description of Artificial Sequence: Synthetic coding sequence
  source 1..1503: mol_type = other DNA
atgggcgccgccgccagcagaagaagagccctgagaagcgaggccatgagcagcgtggccgccaaggtgagagccgccagagccttcggcgagtacctgagccagagccaccccgagaacagaaacggcgccgaccacctgctggccgacgcctacagcggccacgacggcagccccgagatgcagcccgccccccagaacaagagaagactgagcctggtgagcaacggctgctacgagggcagcctgagcgaggagcccagcatcagaaagcccgccggcgagggcccccagcccagagtgtacaccatcagcggcgagcccgccctgctgcccagccccgaggccgaggccatcgagctggccgtggtgaagggcagaagacagagacacccccaccaccacagccagcccctgagagccagccccggcggcagcagagaggacgtgagcagaccctgccagagctgggccggcagcagacagggcagcaaggagtgccccggctgcgcccagctggcccccggccccacccccagagccttcggcctggaccagccccccctgcccgagaccagcggcagaagaaagaagctggagagaatgtacagcgtggacagagtgagcgacgacatccccatcagaacctggttccccaaggagaacctgttcagcttccagaccgccaccaccaccatgcaggccatcagcgtgttcagaggctacgccgagagaaagagaagaaagagagagaacgacagcgccagcgtgatccagagaaacttcagaaagcacctgagaatggtgggcagcagaagagtgaaggcccagagcagcgacctgcagagcagccactgcaccctggacgaggccttcgaggacctggactgggacaccgagaagggcctggaggccgtggcctgcgacaccgagggcttcgtgccccccaaggtgatgctgatcagcagcaaggtgcccaaggccgagtacatccccaccatcatcagaagagacgaccccagcatcatccccatcctgtacgaccacgagcacgccaccttcgaggacatcctggaggagatcgagagaaagctgaacgtgtaccacaagggcgccaagatctggaagatgctgatcttctgccagggcggccccggccacctgtacctgctgaagaacaaggtggccaccttcgccaaggtggagaaggaggaggacatgatccacttctggaagagactgagcagactgatgagcaaggtgaaccccgagcccaacgtgatccacatcatgggctgctacatcctgggcaaccccaacggcgagaagctgttccagaacctgagaaccctgatgaccccctacagagtgaccttcgagagccccctggagctgagcgcccagggcaagcagatgatcgagacctacttcgacttcagactgtacagactgtggaagagcagacagcacagcaagctgctggacttcgacgacgtgctgtag

SEQ ID NO: 90437 - DNA, 1518 bp, synthetic construct
  misc_feature 1..1518: note = Description of Artificial Sequence: Synthetic coding sequence
  source 1..1518: mol_type = other DNA
atgggcgccgccgccagcagaagaagagccctgagaagcgaggccatgagcagcgtggccgccaaggtgagagccgccagagccttcggcgagtacctgagccagagccaccccgagaacagaaacggcgccgaccacctgctggccgacgcctacagcggccacgacggcagccccgagatgcagcccgccccccagaacaagagaagactgagcctggtgagcaacggctgctacgagggcagcctgagcgaggagcccagcatcagaaagcccgccggcgagggcccccagcccagagtgtacaccatcagcggcgagcccgccctgctgcccagccccgaggccgaggccatcgagctggccgtggtgaagggcagaagacagagacacccccaccaccacagccagcccctgagagccagccccggcggcagcagagaggacgtgagcagaccctgccagagctgggccggcagcagacagggcagcaaggagtgccccggctgcgcccagctggcccccggccccacccccagagccttcggcctggaccagccccccctgcccgagaccagcggcagaagaaagaagctggagagaatgtacagcgtggacagagtgagcgacgacatccccatcagaacctggttccccaaggagaacctgttcagcttccagaccgccaccaccaccatgcaggccaacttcagaaagcacctgagaatggtgggcagcagaagagtgaaggcccagaccttcgccgagagaagagagagaagcttcagcagaagctggagcgaccccacccccatgaaggccgacaccagccacgacagcagagacagcagcgacctgcagagcagccactgcaccctggacgaggccttcgaggacctggactgggacaccgagaagggcctggaggccgtggcctgcgacaccgagggcttcgtgccccccaaggtgatgctgatcagcagcaaggtgcccaaggccgagtacatccccaccatcatcagaagagacgaccccagcatcatccccatcctgtacgaccacgagcacgccaccttcgaggacatcctggaggagatcgagagaaagctgaacgtgtaccacaagggcgccaagatctggaagatgctgatcttctgccagggcggccccggccacctgtacctgctgaagaacaaggtggccaccttcgccaaggtggagaaggaggaggacatgatccacttctggaagagactgagcagactgatgagcaaggtgaaccccgagcccaacgtgatccacatcatgggctgctacatcctgggcaaccccaacggcgagaagctgttccagaacctgagaaccctgatgaccccctacagagtgaccttcgagagccccctggagctgagcgcccagggcaagcagatgatcgagacctacttcgacttcagactgtacagactgtggaagagcagacagcacagcaagctgctggacttcgacgacgtgctgtag

SEQ ID NO: 90438 - DNA, 1593 bp, synthetic construct
  misc_feature 1..1593: note = Description of Artificial Sequence: Synthetic coding sequence
  source 1..1593: mol_type = other DNA
atgggcgccgccgccagcagaagaagagccctgagaagcgaggccatgagcagcgtggccgccaaggtgagagccgccagagccttcggcgagtacctgagccagagccaccccgagaacagaaacggcgccgaccacctgctggccgacgcctacagcggccacgacggcagccccgagatgcagcccgccccccagaacaagagaagactgagcctggtgagcaacggctgctacgagggcagcctgagcgaggagcccagcatcagaaagcccgccggcgagggcccccagcccagagtgtacaccatcagcggcgagcccgccctgctgcccagccccgaggccgaggccatcgagctggccgtggtgaagggcagaagacagagacacccccaccaccacagccagcccctgagagccagccccggcggcagcagagaggacgtgagcagaccctgccagagctgggccggcagcagacagggcagcaaggagtgccccggctgcgcccagctggcccccggccccacccccagagccttcggcctggaccagccccccctgcccgagaccagcggcagaagaaagaagctggagagaatgtacagcgtggacagagtgagcgacgacatccccatcagaacctggttccccaaggagaacctgttcagcttccagaccgccaccaccaccatgcaggccatcagcgtgttcagaggctacgccgagagaaagagaagaaagagagagaacgacagcgccagcgtgatccagagaaacttcagaaagcacctgagaatggtgggcagcagaagagtgaaggcccagaccttcgccgagagaagagagagaagcttcagcagaagctggagcgaccccacccccatgaaggccgacaccagccacgacagcagagacagcagcgacctgcagagcagccactgcaccctggacgaggccttcgaggacctggactgggacaccgagaagggcctggaggccgtggcctgcgacaccgagggcttcgtgccccccaaggtgatgctgatcagcagcaaggtgcccaaggccgagtacatccccaccatcatcagaagagacgaccccagcatcatccccatcctgtacgaccacgagcacgccaccttcgaggacatcctggaggagatcgagagaaagctgaacgtgtaccacaagggcgccaagatctggaagatgctgatcttctgccagggcggccccggccacctgtacctgctgaagaacaaggtggccaccttcgccaaggtggagaaggaggaggacatgatccacttctggaagagactgagcagactgatgagcaaggtgaaccccgagcccaacgtgatccacatcatgggctgctacatcctgggcaaccccaacggcgagaagctgttccagaacctgagaaccctgatgaccccctacagagtgaccttcgagagccccctggagctgagcgcccagggcaagcagatgatcgagacctacttcgacttcagactgtacagactgtggaagagcagacagcacagcaagctgctggacttcgacgacgtgctgtag

SEQ ID NO: 90439 - DNA, 585 bp, synthetic construct
  misc_feature 1..585: note = Description of Artificial Sequence: Synthetic coding sequence
  source 1..585: mol_type = other DNA
atgggcctgggccccctgagcagcagcctgagcccccagctgatcagcagcaaggtgcccaaggccgagtacatccccaccatcatcagaagagacgaccccagcatcatccccatcctgtacgaccacgagcacgccaccttcgaggacatcctggaggagatcgagagaaagctgaacgtgtaccacaagggcgccaagatctggaagatgctgatcttctgccagggcggccccggccacctgtacctgctgaagaacaaggtggccaccttcgccaaggtggagaaggaggaggacatgatccacttctggaagagactgagcagactgatgagcaaggtgaaccccgagcccaacgtgatccacatcatgggctgctacatcctgggcaaccccaacggcgagaagctgttccagaacctgagaaccctgatgaccccctacagagtgaccttcgagagccccctggagctgagcgcccagggcaagcagatgatcgagacctacttcgacttcagactgtacagactgtggaagagcagacagcacagcaagctgctggacttcgacgacgtgctgtag

SEQ ID NO: 90440 - DNA, 1524 bp, synthetic construct
  misc_feature 1..1524: note = Description of Artificial Sequence: Synthetic coding sequence
  source 1..1524: mol_type = other DNA
atgggcgccgccgccagcagaagaagagccctgagaagcgaggccatgagcagcgtggccgccaaggtgagagccgccagagccttcggcgagtacctgagccagagccaccccgagaacagaaacggcgccgaccacctgctggccgacgcctacagcggccacgacggcagccccgagatgcagcccgccccccagaacaagagaagactgagcctggtgagcaacggctgctacgagggcagcctgagcgaggagcccagcatcagaaagcccgccggcgagggcccccagcccagagtgtacaccatcagcggcgagcccgccctgctgcccagccccgaggccgaggccatcgagctggccgtggtgaagggcagaagacagagacacccccaccaccacagccagcccctgagagccagccccggcggcagcagagaggacgtgagcagaccctgccagagctgggccggcagcagacagggcagcaaggagtgccccggctgcgcccagctggcccccggccccacccccagagccttcggcctggaccagccccccctgcccgagaccagcggcagaagaaagaagctggagagaatgtacagcgtggacagagtgagcgacgacatccccatcagaacctggttccccaaggagaacctgttcagcttccagaccgccaccaccaccatgcaggccgtgggcaacttcagaaagcacctgagaatggtgggcagcagaagagtgaaggcccagaccttcgccgagagaagagagagaagcttcagcagaagctggagcgaccccacccccatgaaggccgacaccagccacgacagcagagacagcagcgacctgcagagcagccactgcaccctggacgaggccttcgaggacctggactgggacaccgagaagggcctggaggccgtggcctgcgacaccgagggcttcgtgccccccaaggtgatgctgatcagcagcaaggtgcccaaggccgagtacatccccaccatcatcagaagagacgaccccagcatcatccccatcctgtacgaccacgagcacgccaccttcgaggacatcctggaggagatcgagagaaagctgaacgtgtaccacaagggcgccaagatctggaagatgctgatcttctgccagggcggccccggccacctgtacctgctgaagaacaaggtggccaccttcgccaaggtggagaaggaggaggacatgatccacttctggaagagactgagcagactgatgagcaaggtgaaccccgagcccaacgtgatccacatcatgggctgctacatcctgggcaaccccaacggcgagaagctgttccagaacctgagaaccctgatgaccccctacagagtgaccttcgagagccccctggagctgagcgcccagggcaagcagatgatcgagacctacttcgacttcagactgtacagactgtggaagagcagacagcacagcaagctgctggacttcgacgacgtgctgtag

SEQ ID NO: 90441 - DNA, 1524 bp, synthetic construct
  misc_feature 1..1524: note = Description of Artificial Sequence: Synthetic coding sequence
  source 1..1524: mol_type = other DNA
atgggcgccgccgccagcagaagaagagccctgagaagcgaggccatgagcagcgtggccgccaaggtgagagccgccagagccttcggcgagtacctgagccagagccaccccgagaacagaaacggcgccgaccacctgctggccgacgcctacagcggccacgacggcagccccgagatgcagcccgccccccagaacaagagaagactgagcctggtgagcaacggctgctacgagggcagcctgagcgaggagcccagcatcagaaagcccgccggcgagggcccccagcccagagtgtacaccatcagcggcgagcccgccctgctgcccagccccgaggccgaggccatcgagctggccgtggtgaagggcagaagacagagacacccccaccaccacagccagcccctgagagccagccccggcggcagcagagaggacgtgagcagaccctgccagagctgggccggcagcagacagggcagcaaggagtgccccggctgcgcccagctggcccccggccccacccccagagccttcggcctggaccagccccccctgcccgagaccagcggcagaagaaagaagctggagagaatgtacagcgtggacagagtgagcgacgacatccccatcagaacctggttccccaaggagaacctgttcagcttccagaccgccaccaccaccatgcaggccatcagcaacttcagaaagcacctgagaatggtgggcagcagaagagtgaaggcccagaccttcgccgagagaagagagagaagcttcagcagaagctggagcgaccccacccccatgaaggccgacaccagccacgacagcagagacagcagcgacctgcagagcagccactgcaccctggacgaggccttcgaggacctggactgggacaccgagaagggcctggaggccgtggcctgcgacaccgagggcttcgtgccccccaaggtgatgctgatcagcagcaaggtgcccaaggccgagtacatccccaccatcatcagaagagacgaccccagcatcatccccatcctgtacgaccacgagcacgccaccttcgaggacatcctggaggagatcgagagaaagctgaacgtgtaccacaagggcgccaagatctggaagatgctgatcttctgccagggcggccccggccacctgtacctgctgaagaacaaggtggccaccttcgccaaggtggagaaggaggaggacatgatccacttctggaagagactgagcagactgatgagcaaggtgaaccccgagcccaacgtgatccacatcatgggctgctacatcctgggcaaccccaacggcgagaagctgttccagaacctgagaaccctgatgaccccctacagagtgaccttcgagagccccctggagctgagcgcccagggcaagcagatgatcgagacctacttcgacttcagactgtacagactgtggaagagcagacagcacagcaagctgctggacttcgacgacgtgctgtag

SEQ ID NO: 90442 - DNA, 984 bp, synthetic construct
  misc_feature 1..984: note = Description of Artificial Sequence: Synthetic coding sequence
  source 1..984: mol_type = other DNA
atgcagctgggcagaagactggaccccgagagacaggccctgcacctgtgcagcggcgtggagggcgagccctggaaggccgtggccggcagagccctgggcggcatctgcctgtgggtgggcggcggcgccagaagccagggcgagcactggctgcccacccccaagggcaacttcagaaagcacctgagaatggtgggcagcagaagagtgaaggcccagaccttcgccgagagaagagagagaagcttcagcagaagctggagcgaccccacccccatgaaggccgacaccagccacgacagcagagacagcagcgacctgcagagcagccactgcaccctggacgaggccttcgaggacctggactgggacaccgagaagggcctggaggccgtggcctgcgacaccgagggcttcgtgccccccaaggtgatgctgatcagcagcaaggtgcccaaggccgagtacatccccaccatcatcagaagagacgaccccagcatcatccccatcctgtacgaccacgagcacgccaccttcgaggacatcctggaggagatcgagagaaagctgaacgtgtaccacaagggcgccaagatctggaagatgctgatcttctgccagggcggccccggccacctgtacctgctgaagaacaaggtggccaccttcgccaaggtggagaaggaggaggacatgatccacttctggaagagactgagcagactgatgagcaaggtgaaccccgagcccaacgtgatccacatcatgggctgctacatcctgggcaaccccaacggcgagaagctgttccagaacctgagaaccctgatgaccccctacagagtgaccttcgagagccccctggagctgagcgcccagggcaagcagatgatcgagacctacttcgacttcagactgtacagactgtggaagagcagacagcacagcaagctgctggacttcgacgacgtgctgtag

SEQ ID NO: 90443 - DNA, 648 bp, synthetic construct
  misc_feature 1..648: note = Description of Artificial Sequence: Synthetic coding sequence
  source 1..648: mol_type = other DNA
atgcccggcgaggccaccgagaccgtgcccgccaccgagcaggagctgccccagccccaggccgagaccggcagcggcaccgagagcgacagcgacgagagcgtgcccgagctggaggagcaggacagcacccaggccaccacccagcaggcccagctggccgccgccgccgagatcgacgaggagcccgtgagcaaggccaagcagagcagaagcgagaagaaggccagaaaggccatgagcaagctgggcctgagacaggtgaccggcgtgaccagagtgaccatcagaaagagcaagaacatcctgttcgtgatcaccaagcccgacgtgtacaagagccccgccagcgacacctacatcgtgttcggcgaggccaagatcgaggacctgagccagcaggcccagctggccgccgccgagaagttcaaggtgcagggcgaggccgtgagcaacatccaggagaacacccagacccccaccgtgcaggaggagagcgaggaggaggaggtggacgagaccggcgtggaggtgaaggacatcgagctggtgatgagccaggccaacgtgagcagagccaaggccgtgagagccctgaagaacaacagcaacgacatcgtgaacgccatcatggagctgaccatgtag

SEQ ID NO: 90444 - DNA, 648 bp, synthetic construct; identical to SEQ ID NO: 90443
  misc_feature 1..648: note = Description of Artificial Sequence: Synthetic coding sequence
  source 1..648: mol_type = other DNA

SEQ ID NO: 90445 - DNA, 6237 bp, synthetic construct
  misc_feature 1..6237: note = Description of Artificial Sequence: Synthetic coding sequence
  source 1..6237: mol_type = other DNA
atgcccggcgaggccaccgagaccgtgcccgccaccgagcaggagctgccccagccccaggccgagaccgccgtgctgcccatgagcagcgccctgagcgtgaccgccgccctgggccagcccggccccaccctgccccccccctgcagccccgccccccagcagtgccccctgagcgccgccaaccaggccagccccttccccagccccagcaccatcgccagcacccccctggaggtgcccttcccccagagcagcagcggcaccgccctgcccctgggcaccgcccccgaggcccccaccttcctgcccaacctgatcggcccccccatcagccccgccgccctggccctggccagccccatgatcgcccccaccctgaagggcacccccagcagcagcgcccccctggccctggtggccctggccccccacagcgtgcagaagagcagcgccttcccccccaacctgctgaccagcccccccagcgtggccgtggccgagagcggcagcgtgatcaccctgagcgcccccatcgcccccagcgagcccaagaccaacctgaacaaggtgcccagcgaggtggtgcccaaccccaagggcacccccagccccccctgcatcgtgagcaccgtgccctaccactgcgtgacccccatggccagcatccagagcggcgtggccagcctgccccagaccacccccaccaccaccctggccatcgccagcccccaggtgaaggacaccaccatcagcagcgtgctgatcagcccccagaaccccggcagcctgagcctgaagggccccgtgagcccccccgccgccctgagcctgagcacccagagcctgcccgtggtgaccagcagccagaagaccgccggccccaacaccccccccgacttccccatcagcctgggcagccacctggcccccctgcaccagagcagcttcggcagcgtgcagctgctgggccagaccggccccagcgccctgagcgaccccaccgtgaagaccatcagcgtggaccacagcagcaccggcgccagctaccccagccagagaagcgtgatcccccccctgcccagcagaaacgaggtggtgcccgccaccgtggccgccttccccgtggtggcccccagcgtggacaagggccccagcaccatcagcagcatcacctgcagccccagcggcagcctgaacgtggccaccagcttcagcctgagccccaccaccagcctgatcctgaagagcagccccaacgccacctaccactaccccctggtggcccagatgcccgtgagcagcgtgggcaccacccccctggtggtgaccaacccctgcaccatcgccgccgcccccaccaccaccttcgaggtggccacctgcgtgagcccccccatgagcagcggccccatcagcaacatcgagcccaccagccccgccgccctggtgatggcccccgtggcccccaaggagcccagcacccaggtggccaccaccctgagaatccccgtgagcccccccctgcccgaccccgaggacctgaagaacctgcccagcagcgtgctggtgaagttccccacccagaaggacctgcagaccgtgcccgccagcctggagggcgcccccttcagccccgcccaggccggcctgaccaccaagaaggaccccaccgtgctgcccctggtgcaggccgcccccaagaacagccccagcttccagagcaccagcagcagccccgagatccccctgagccccgaggccaccctggccaagaagagcctgggcgagcccctgcccatcggcaagcccgccagcagcatgaccagccccctgggcgtgaacagcagcgccagcgtgatcaagaccgacagctacgccggccccgacagcgccggccccctgctgaagagcagcctgatcacccccaccgtggccgccttccccctggagagcgccgaccccgccggcgtggcccccaccaccgccaagggcaccagcacctacaccaccaccgccagccccttcctggagggcaccgtgagcctggcccccaagaaccaccccgtgaaggagggcaccctgaccaccctgcccctggtgcccaccgccagcgagaactgccccgtggcccccagcccccagaacacctgcgcccccctggccaccctggtgctggcccccgagatccccaagagcgtgcccagccccagcctgccccccgccggcaccccccccggcaccaagaaggtggacggcatcagccacaccagcgccctggcccccgtggccagcagccccaaggagtgccccaccgaggacagcggcgccagcgccaccgccagcagcaagggcaccctgacctacctggccgacagccccagccccctgggcgtgagcgtgagcccccagaccaagagaccccccaccaagaagggcagcgccggccccgacacccccatcggcaacctgagcagccccgtgagccccgtggaggccagcttcctgcccgagaacagcctgagcttccagggcagcaaggacagccccgccaccacccacagccccaccccccccagccccaagggcgcccccacccccagcgccgtgacccccctgagccccaagggcgtgaccctgccccccaaggagacccccacccccagcgtggtgaacctgcccttccccaaggagggccccgccacccccgcccccaagcaggcccccgccctgagcatgaccagcagcagccccaagaaggccagagccacccccgcccccaagggcatccccgccagccccagccccaagggcgcccccaccccccccgccgccaccccccccagccccaagggcggccccgccacccccagccccaagtgggcccccaccccccccgccgccaccccccccagccccaagggcggccccgccacccccagccccaagggcgcccccaccccccccgccgccaccccccccagccccaagggcggccccgccacccccagccccaagggcgcccccaccccccccgccgtgaccccccccagccccaagggcagccccgccgccacccccttccccaagggcgccagcaccccccccgccgccaccccccccagccccaagggcagccccgccgccacccccctgcccaagggcgcccccaccacccccgccgccaccctgcccagccccaagggcggccccgccacccccagcctgaagggcgcccccaccccccccgccgccaccccccccagccccaagggcggccccgccacccccagccccaagggcgcccccatgccccccgccgccaccccccccagccccaagggcggcctggccacccccccccacaagggcgcccccaccacccccgccgccaccccccccagccccaagggcggcctggccacccccccccccaagggcgcccccaccacccccgccgccaccccccccagccccaagggcggcctggccacccccccccccaagggcgcccccaccacccccgccgccaccccccccagccccaagggcggcctggccacccccagccccaagggcgcccccaccacccccgccgccaccccccccagccccaagggcggcctggccacccccagccccaagggcgcccccaccacccccgccgccaccccccccagccccaagggcggcctggccacccccagccccaagggcgcccccaccacccccgccgccaccccccccagccccaagggcggccccgccacccccccccccaagggcgcccccaccccccccgccgccaccccccccagcctgaagggcggcctggccacccccccccacaagggcgcccccaaccccgccgtggtgaccccccccagccccaagggcggccccgccaccagcccccccaagggcgcccccaccccccccgccgccaccccccccagccccaagggcagccccggcacccccccccccaagggcgcccccaccccccccgccgtgaccccccccagccccaagggcacccccaccctgcccgccaccacccccagcagcaagggcggccccaccacccccagcagcaaggagggccccaccccccccgccgccacccccagccacaagggcggccccgccatgaccccccccagccccaagagaggccccgccatccccagccccaagggcgaccccaccagccccgccgtgatccccctgagccccaagaaggcccccgccacccccgtgaccagagagggcgccgccacccccagcaagggcgacctgaccccccccgccgtgacccccgtgagcctgaagaaggcccccgccaccagcgcccccaagggcggccccgccacccccagcagcaagggcgaccccaccctgcccgccgtgaccccccccagccccaaggagccccccgcccccaagcaggtggccaccagcagcagccccaagaaggcccccgccacccccgcccccatgggcgcccccaccctgcccgccgtgatccccagcagccccaaggaggtgcccgccacccccagcagcagaagagaccccatcgcccccaccgccaccctgctgagcaagaagacccccgccaccctggcccccaaggaggccctgatcccccccgccatgaccgtgcccagccccaagaagacccccgccatccccacccccaaggaggcccccgccacccccagcagcaaggaggccagcagcccccccgccgtgacccccagcacctacaagggcgcccccagccccaaggagctgctgatcccccccgccgtgaccagccccagccccaaggaggcccccaccccccccgccgtgaccccccccagccccgagaagggccccgccacccccgcccccaagggcacccccaccagcccccccgtgacccccagcagcctgaaggacagccccaccagccccgccagcgtgacctgcaagatgggcgccaccgtgccccaggccagcaagggcctgcccgccaagaagggccccaccgccctgaaggaggtgctggtggcccccgcccccgagagcacccccatcatcaccgcccccaccagaaagggcccccagaccaagaagagcagcgccaccagcccccccatctgccccgaccccagcgccaagaacggcagcaagggccccctgagcaccgtggcccccgcccccctgctgcccgtgcagaaggacagcagcaagaccgccaagggcaaggacgccagccacagccccaagggccccctggccccccccgagagcaaggccagcacccccctgaccgccgccgccttcgagaaggtgctgcccaagcccgagagcgccagcgtgagcgccgcccccagcccccccgtgagcctgcccctggcccccagccccgtgcccaccctgccccccaagcagcagttcctgcccagcagccccggcctggtgctggagagccccagcaagcccctggcccccgccgacgaggacgagctgctgcccctgatcccccccgagcccatcagcggcggcgtgcccttccagagcgtgctggtgaacatgcccacccccaagagcgccggcatccccgtgcccacccccagcgccaagcagcccgtgaccaagaacaacaagggcagcggcaccgagagcgacagcgacgagagcgtgcccgagctggaggagcaggacagcacccaggccaccacccagcaggcccagctggccgccgccgccgagatcgacgaggagcccgtgagcaaggccaagcagagcagaagcgagaagaaggccagaaaggccatgagcaagctgggcctgagacaggtgaccggcgtgaccagagtgaccatcagaaagagcaagaacatcctgttcgtgatcaccaagcccgacgtgtacaagagccccgccagcgacacctacatcgtgttcggcgaggccaagatcgaggacctgagccagcaggcccagctggccgccgccgagaagttcaaggtgcagggcgaggccgtgagcaacatccaggagaacacccagacccccaccgtgcaggaggagagcgaggaggaggaggtggacgagaccggcgtggaggtgaaggacatcgagctggtgatgagccaggccaacgtgagcagagccaaggccgtgagagccctgaagaacaacagcaacgacatcgtgaacgccatcatggagctgaccatgtag

SEQ ID NO: 90446 - DNA, 648 bp, synthetic construct; identical to SEQ ID NO: 90443
  misc_feature 1..648: note = Description of Artificial Sequence: Synthetic coding sequence
  source 1..648: mol_type = other DNA

SEQ ID NO: 90447 - DNA, 21 bp, synthetic construct
  misc_feature 1..21: note = Description of Artificial Sequence: Synthetic coding sequence
  source 1..21: mol_type = other DNA
atgcccggcgaggccacctag

SEQ ID NO: 90448 - DNA, 597 bp, synthetic construct
  misc_feature 1..597: note = Description of Artificial Sequence: Synthetic coding sequence
  source 1..597: mol_type = other DNA
atgcccggcgaggccaccgagaccgtgcccgccaccgagcaggagctgccccagccccaggccgagaccggcagcggcaccgagagcgacagcgacgagagcgtgcccgagctggaggagcaggacagcacccaggccaccacccagcaggcccagctggccgccgccgccgagatcgacgaggagcccgtgagcaaggccaagcagagcagaagcgagaagaaggccagaaaggccatgagcaagctgggcctgagacaggtgaccggcgtgaccagagtgaccatcagaaagagcaagaacatcctgttcgtgatcaccaagcccgacgtgtacaagagccccgccagcgacacctacatcgtgttcggcgaggccaagatcgaggacctgagccagcaggcccagctggccgccgccgagaagttcaaggtgcagggcgaggccgtgagcaacatccaggagaacacccagacccccaccgtgcaggaggagagcgaggaggaggaggtggacgagaccggcgtggaggtgaaggacatcgagctggtgatgagccaggccaacgtgagcagagccaaggccgtgagagcctag

SEQ ID NO: 90449 - DNA, 381 bp, synthetic construct
  misc_feature 1..381: note = Description of Artificial Sequence: Synthetic coding sequence
  source 1..381: mol_type = other DNA
atgcccggcgaggccaccgagaccgtgcccgccaccgagcaggagctgccccagccccaggccgagaccggcagcggcaccgagagcgacagcgacgagagcgtgcccgagctggaggagcaggacagcacccaggccaccacccagcaggcccagctggccgccgccgccgagatcgacgaggagcccgtgagcaaggccaagcagagcagaagcgagaagaaggccagaaaggccatgagcaagctgggcctgagacaggtgaccggcgtgaccagagtgaccatcagaaagagcaagaacatcctgttcgtgatcaccaagcccgacgtgtacaagagccccgccagcgacacctacatcgtgttcggcgaggcctag

SEQ ID NO: 90450 - DNA, 648 bp, synthetic construct; identical to SEQ ID NO: 90443
  misc_feature 1..648: note = Description of Artificial Sequence: Synthetic coding sequence
  source 1..648: mol_type = other DNA

SEQ ID NO: 90451 - DNA, 2778 bp, synthetic construct
  misc_feature 1..2778: note = Description of Artificial Sequence: Synthetic coding sequence
  source 1..2778: mol_type = other DNA
atgcccggcgaggccaccgagaccgtgcccgccaccgagcaggagctgccccagccccaggccgagaccgccgtgctgcccatgagcagcgccctgagcgtgaccgccgccctgggccagcccggccccaccctgccccccccctgcagccccgccccccagcagtgccccctgagcgccgccaaccaggccagccccttccccagccccagcaccatcgccagcacccccctggaggtgcccttcccccagagcagcagcggcaccgccctgcccctgggcaccgcccccgaggcccccaccttcctgcccaacctgatcggcccccccatcagccccgccgccctggccctggccagccccatgatcgcccccaccctgaagggcacccccagcagcagcgcccccctggccctggtggccctggccccccacagcgtgcagaagagcagcgccttcccccccaacctgctgaccagcccccccagcgtggccgtggccgagagcggcagcgtgatcaccctgagcgcccccatcgcccccagcgagcccaagaccaacctgaacaaggtgcccagcgaggtggtgcccaaccccaagggcacccccagccccccctgcatcgtgagcaccgtgccctaccactgcgtgacccccatggccagcatccagagcggcgtggccagcctgccccagaccacccccaccaccaccctggccatcgccagcccccaggtgaaggacaccaccatcagcagcgtgctgatcagcccccagaaccccggcagcctgagcctgaagggccccgtgagcccccccgccgccctgagcctgagcacccagagcctgcccgtggtgaccagcagccagaagaccgccggccccaacaccccccccgacttccccatcagcctgggcagccacctggcccccctgcaccagagcagcttcggcagcgtgcagctgctgggccagaccggccccagcgccctgagcgaccccaccgtgaagaccatcagcgtggaccacagcagcaccggcgccagctaccccagccagagaagcgtgatcccccccctgcccagcagaaacgaggtggtgcccgccaccgtggccgccttccccgtggtggcccccagcgtggacaagggccccagcaccatcagcagcatcacctgcagccccagcggcagcctgaacgtggccaccagcttcagcctgagccccaccaccagcctgatcctgaagagcagccccaacgccacctaccactaccccctggtggcccagatgcccgtgagcagcgtgggcaccacccccctggtggtgaccaacccctgcaccatcgccgccgcccccaccaccaccttcgaggtggccacctgcgtgagcccccccatgagcagcggccccatcagcaacatcgagcccaccagccccgccgccctggtgatggcccccgtggcccccaaggagcccagcacccaggtggccaccaccctgagaatccccgtgagcccccccctgcccgaccccgaggacctgaagaacctgcccagcagcgtgctggtgaagttccccacccagaaggacctgcagaccgtgcccgccagcctggagggcgcccccttcagccccgcccaggccggcctgaccaccaagaaggaccccaccgtgctgcccctggtgcaggccgcccccaagaacagccccagcttccagagcaccagcagcagccccgagatccccctgagccccgaggccaccctggccaagaagagcctgggcgagcccctgcccatcgtggccgccttccccctggagagcgccgaccccgccggcgtggcccccaccaccgccaaggccgccgccttcgagaaggtgctgcccaagcccgagagcgccagcgtgagcgccgcccccagcccccccgtgagcctgcccctggcccccagccccgtgcccaccctgccccccaagcagcagttcctgcccagcagccccggcctggtgctggagagccccagcaagcccctggcccccgccgacgaggacgagctgctgcccctgatcccccccgagcccatcagcggcggcgtgcccttccagagcgtgctggtgaacatgcccacccccaagagcgccggcatccccgtgcccacccccagcgccaagcagcccgtgaccaagaacaacaagggcagcggcaccgagagcgacagcgacgagagcgtgcccgagctggaggagcaggacagcacccaggccaccacccagcaggcccagctggccgccgccgccgagatcgacgaggagcccgtgagcaaggccaagcagagcagaagcgagaagaaggccagaaaggccatgagcaagctgggcctgagacaggtgaccggcgtgaccagagtgaccatcagaaagagcaagaacatcctgttcgtgatcaccaagcccgacgtgtacaagagccccgccagcgacacctacatcgtgttcggcgaggccaagatcgaggacctgagccagcaggcccagctggccgccgccgagaagttcaaggtgcagggcgaggccgtgagcaacatccaggagaacacccagacccccaccgtgcaggaggagagcgaggaggaggaggtggacgagaccggcgtggaggtgaaggacatcgagctggtgatgagccaggccaacgtgagcagagccaaggccgtgagagccctgaagaacaacagcaacgacatcgtgaacgccatcatggagctgaccatgtag

SEQ ID NO: 90452 - DNA, 306 bp, synthetic construct
  misc_feature 1..306: note = Description of Artificial Sequence: Synthetic coding sequence
  source 1..306: mol_type = other DNA
atgcccctggaggacgaggtggtgcccccccaggtgctgagcgagcccaacgaggaggccggcgccgccctgagccccctgcccgaggtgcccccctggaccggcgaggtgagccccgcccagagagacggcggcgccctgggcagaggcccctgggacagcagcgacagaagcgccctgctgaagagcaagctgagagccctgctgaccgcccccagaagcctgagaagaagcagctgcttcggcggcagaatggacagaatcggcgcccagagcggcctgggctgcaacagcttcagatactag

SEQ ID NO: 90453 - DNA, 456 bp, synthetic construct
  misc_feature 1..456: note = Description of Artificial Sequence: Synthetic coding sequence
  source 1..456: mol_type = other DNA
atgagcagcttcagcaccaccaccgtgagcttcctgctgctgctggccttccagctgctgggccagaccagagccaaccccatgtacaacgccgtgagcaacgccgacctgatggacttcaagaacctgctggaccacctggaggagaagatgcccctggaggacgaggtggtgcccccccaggtgctgagcgagcccaacgaggaggccggcgccgccctgagccccctgcccgaggtgcccccctggaccggcgaggtgagccccgcccagagagacggcggcgccctgggcagaggcccctgggacagcagcgacagaagcgccctgctgaagagcaagctgagagccctgctgaccgcccccagaagcctgagaagaagcagctgcttcggcggcagaatggacagaatcggcgcccagagcggcctgggctgcaacagcttcagatactag

SEQ ID NO: 90454 - DNA, 768 bp, synthetic construct
  misc_feature 1..768: note = Description of Artificial Sequence: Synthetic coding sequence
  source 1..768: mol_type = other DNA
atggagcagtacgccaacaacctggaggagctggtggaggagagaacccaggcctacctggaggagaagagaaaggccgaggccctgctgtaccagatcctgccccacagcgtggccgagcagctgaagagaggcgagaccgtgcaggccgaggccttcgacagcgtgaccatctacttcagcgacatcgtgggcttcaccgccctgagcgccgagagcacccccatgcaggtggtgaccctgctgaacgacctgtacacctgcttcgacgccgtgatcgacaacttcgacgtgtacaaggtggagaccatcggcgacgcctacatggtggtgagcggcctgcccgtgagaaacggcagactgcacgcctgcgaggtggccagaatggccctggccctgctggacgccgtgagaagcttcagaatcagacacagaccccaggagcagctgagactgagaatcggcatccacaccggccccgtgtgcgccggcgtggtgggcctgaagatgcccagatactgcctgttcggcgacaccgtgaacaccgccagcagaatggagagcaacggcgaggccctgaagatccacctgagcagcgagaccaaggccgtgctggaggagttcggcggcttcgagctggagctgagaggcgacgtggagatgaaggtggagggcgaggccagcgccctgcccaccttctggggccccagaggcagctaccccagccaggccgccaacgccacccccatccccaaggccctgatctag

SEQ ID NO: 90455 - DNA, 3186 bp, synthetic construct
  misc_feature 1..3186: note = Description of Artificial Sequence: Synthetic coding sequence
  source 1..3186: mol_type = other DNA
atgcccggccccagaagacccgccggcagcagactgagactgctgctgctgctgctgctgccccccctgctgctgctgctgagaggcagccacgccggcaacctgaccgtggccgtggtgctgcccctggccaacaccagctacccctggagctgggccagagtgggccccgccgtggagctggccctggcccaggtgaaggccagacccgacctgctgcccggctggaccgtgagaaccgtgctgggcagcagcgagaacgccctgggcgtgtgcagcgacaccgccgcccccctggccgccgtggacctgaagtgggagcacaaccccgccgtgttcctgggccccggctgcgtgtacgccgccgcccccgtgggcagattcaccgcccactggagagtgcccctgctgaccgccggcgcccccgccctgggcttcggcgtgaaggacgagtacgccctgaccaccagagccggccccagctacgccaagctgggcgacttcgtggccgccctgcacagaagactgggctgggagagacaggccctgatgctgtacgcctacagacccggcgacgaggagcactgcttcttcctggtggagggcctgttcatgagagtgagagacagactgaacatcaccgtggaccacctggagttcgccgaggacgacctgagccactacaccagactgctgagaaccatgcccagaaagggcagagtgatctacatctgcagcagccccgacgccttcagaaccctgatgctgctggccctggaggccggcctgtgcggcgaggactacgtgttcttccacctggacatcttcggccagagcctgcagggcggccagggccccgcccccagaagaccctgggagagaggcgacggccaggacgtgagcgccagacaggccttccaggccgccaagatcatcacctacaaggaccccgacaaccccgagtacctggagttcctgaagcagctgaagcacctggcctacgagcagttcaacttcaccatggaggacggcctggtgaacaccatccccgccagcttccacgacggcctgctgctgtacatccaggccgtgaccgagaccctggcccacggcggcaccgtgaccgacggcgagaacatcacccagagaatgtggaacagaagcttccagggcgtgaccggctacctgaagatcgacagcagcggcgacagagagaccgacttcagcctgtgggacatggaccccgagaacggcgccttcagagtggtgctgaactacaacggcaccagccaggagctggtggccgtgagcggcagaaagctgaactggcccctgggctaccccccccccgacatccccaagtgcggcttcgacaacgaggaccccgcctgcaaccaggaccacctgagcaccctggaggtgctggccctggtgggcagcctgagcctgctgggcatcctgatcgtgagcttcttcatctacagaaagatgcagctggagaaggagctggccagcgagctgtggagagtgagatgggaggacgtggagcccagcagcctggagagacacctgagaagcgccggcagcagactgaccctgagcggcagaggcagcaactacggcagcctgctgaccaccgagggccagttccaggtgttcgccaagaccgcctactacaagggcaacctggtggccgtgaagagagtgaacagaaagagaatcgagctgaccagaaaggtgctgttcgagctgaagcacatgagagacgtgcagaacgagcacctgaccagattcgtgggcgcctgcaccgacccccccaacatctgcatcctgaccgagtactgccccagaggcagcctgcaggacatcctggagaacgagagcatcaccctggactggatgttcagatacagcctgaccaacgacatcgtgaagggcatgctgttcctgcacaacggcgccatctgcagccacggcaacctgaagagcagcaactgcgtggtggacggcagattcgtgctgaagatcaccgactacggcctggagagcttcagagacctggaccccgagcagggccacaccgtgtacgccaagaagctgtggaccgcccccgagctgctgagaatggccagcccccccgtgagaggcagccaggccggcgacgtgtacagcttcggcatcatcctgcaggagatcgccctgagaagcggcgtgttccacgtggagggcctggacctgagccccaaggagatcatcgagagagtgaccagaggcgagcagccccccttcagacccagcctggccctgcagagccacctggaggagctgggcctgctgatgcagagatgctgggccgaggacccccaggagagaccccccttccagcagatcagactgaccctgagaaagttcaacagagagaacagcagcaacatcctggacaacctgctgagcagaatggagcagtacgccaacaacctggaggagctggtggaggagagaacccaggcctacctggaggagaagagaaaggccgaggccctgctgtaccagatcctgccccacagcgtggccgagcagctgaagagaggcgagaccgtgcaggccgaggccttcgacagcgtgaccatctacttcagcgacatcgtgggcttcaccgccctgagcgccgagagcacccccatgcaggtggtgaccctgctgaacgacctgtacacctgcttcgacgccgtgatcgacaacttcgacgtgtacaaggtggagaccatcggcgacgcctacatggtggtgagcggcctgcccgtgagaaacggcagactgcacgcctgcgaggtggccagaatggccctggccctgctggacgccgtgagaagcttcagaatcagacacagaccccaggagcagctgagactgagaatcggcatccacaccggccccgtgtgcgccggcgtggtgggcctgaagatgcccagatactgcctgttcggcgacaccgtgaacaccgccagcagaatggagagcaacggcgaggccctgaagatccacctgagcagcgagaccaaggccgtgctggaggagttcggcggcttcgagctggagctgagaggcgacgtggagatgaagggcaagggcaaggtgagaacctactggctgctgggcgagagaggcagcagcaccagaggctag

SEQ ID NO: 90456 - DNA, 1623 bp, synthetic construct
  misc_feature 1..1623: note = Description of Artificial Sequence: Synthetic coding sequence
  source 1..1623: mol_type = other DNA
aagatgcagctggagaaggagctggccagcgagctgtggagagtgagatgggaggacgtggagcccagcagcctggagagacacctgagaagcgccggcagcagactgaccctgagcggcagaggcagcaactacggcagcctgctgaccaccgagggccagttccaggtgttcgccaagaccgcctactacaagatgagagacgtgcagaacgagcacctgaccagattcgtgggcgcctgcaccgacccccccaacatctgcatcctgaccgagtactgccccagaggcagcctgcaggacatcctggagaacgagagcatcaccctggactggatgttcagatacagcctgaccaacgacatcgtgaagggcatgctgttcctgcacaacggcgccatctgcagccacggcaacctgaagagcagcaactgcgtggtggacggcagattcgtgctgaagatcaccgactacggcctggagagcttcagagacctggaccccgagcagggccacaccgtgtacgccaagaagctgtggaccgcccccgagctgctgagaatggccagcccccccgtgagaggcagccaggccggcgacgtgtacagcttcggcatcatcctgcaggagatcgccctgagaagcggcgtgttccacgtggagggcctggacctgagccccaaggagatcatcgagagagtgaccagaggcgagcagccccccttcagacccagcctggccctgcagagccacctggaggagctgggcctgctgatgcagagatgctgggccgaggacccccaggagagaccccccttccagcagatcagactgaccctgagaaagttcaacagagagaacagcagcaacatcctggacaacctgctgagcagaatggagcagtacgccaacaacctggaggagctggtggaggagagaacccaggcctacctggaggagaagagaaaggccgaggccctgctgtaccagatcctgccccacagcgtggccgagcagctgaagagaggcgagaccgtgcaggccgaggccttcgacagcgtgaccatctacttcagcgacatcgtgggcttcaccgccctgagcgccgagagcacccccatgcaggtggtgaccctgctgaacgacctgtacacctgcttcgacgccgtgatcgacaacttcgacgtgtacaaggtggagaccatcggcgacgcctacatggtggtgagcggcctgcccgtgagaaacggcagactgcacgcctgcgaggtggccagaatggccctggccctgctggacgccgtgagaagcttcagaatcagacacagaccccaggagcagctgagactgagaatcggcatccacaccggccccgtgtgcgccggcgtggtgggcctgaagatgcccagatactgcctgttcggcgacaccgtgaacaccgccagcagaatggagagcaacggcgaggccctgaagatccacctgagcagcgagaccaaggccgtgctggaggagttcggcggcttcgagctggagctgagaggcgacgtggagatgaagggcaagggcaaggtgagaacctactggctgctgggcgagagaggcagcagcaccagaggctag

SEQ ID NO: 90457 - DNA, 3144 bp, synthetic construct
  misc_feature 1..3144: note = Description of Artificial Sequence: Synthetic coding sequence
  source 1..3144: mol_type = other DNA
atggccctgcccagcctgctgctgctggtggccgccctggccggcggcgtgagaccccccggcgccagaaacctgaccctggccgtggtgctgcccgagcacaacctgagctacgcctgggcctggcccagagtgggccccgccgtggccctggccgtggaggccctgggcagagccctgcccgtggacctgagattcgtgagcagcgagctggagggcgcctgcagcgagtacctggcccccctgagcgccgtggacctgaagctgtaccacgaccccgacctgctgctgggccccggctgcgtgtaccccgccgccagcgtggccagattcgccagccactggagactgcccctgctgaccgccggcgccgtggccagcggcttcagcgccaagaacgaccactacagaaccctggtgagaaccggccccagcgcccccaagctgggcgagttcgtggtgaccctgcacggccacttcaactggaccgccagagccgccctgctgtacctggacgccagaaccgacgacagaccccactacttcaccatcgagggcgtgttcgaggccctgcagggcagcaacctgagcgtgcagcaccaggtgtacgccagagagcccggcggccccgagcaggccacccacttcatcagagccaacggcagaatcgtgtacatctgcggccccctggagatgctgcacgagatcctgctgcaggcccagagagagaacctgaccaacggcgactacgtgttcttctacctggacgtgttcggcgagagcctgagagccggccccaccagagccaccggcagaccctggcaggacaacagaaccagagagcaggcccaggccctgagagaggccttccagaccgtgctggtgatcacctacagagagccccccaaccccgagtaccaggagttccagaacagactgctgatcagagccagagaggacttcggcgtggagctgggccccagcctgatgaacctgatcgccggctgcttctacgacggcatcctgctgtacgccgaggtgctgaacgagaccatccaggagggcggcaccagagaggacggcctgagaatcgtggagaagatgcagggcagaagataccacggcgtgaccggcctggtggtgatggacaagaacaacgacagagagaccgacttcgtgctgtgggccatgggcgacctggacagcggcgacttccagcccgccgcccactacagcggcgccgagaagcagatctggtggaccggcagacccatcccctgggtgaagggcgccccccccagcgacaaccccccctgcgccttcgacctggacgaccccagctgcgacaagacccccctgagcaccctggccatcgtggccctgggcaccggcatcaccttcatcatgttcggcgtgagcagcttcctgatcttcagaaagctgatgctggagaaggagctggccagcatgctgtggagaatcagatgggaggagctgcagttcggcaacagcgagagataccacaagggcgccggcagcagactgaccctgagcctgagaggcagcagctacggcagcctgatgaccgcccacggcaagtaccagatcttcgccaacaccggccacttcaagggcaacgtggtggccatcaagcacgtgaacaagaagagaatcgagctgaccagacaggtgctgttcgagctgaagcacatgagagacgtgcagttcaaccacctgaccagattcatcggcgcctgcatcgacccccccaacatctgcatcgtgaccgagtactgccccagaggcagcctgcaggacatcctggagaacgacagcatcaacctggactggatgttcagatacagcctgatcaacgacctggtgaagggcatggccttcctgcacaacagcatcatcagcagccacggcagcctgaagagcagcaactgcgtggtggacagcagattcgtgctgaagatcaccgactacggcctggccagcttcagaagcaccgccgagcccgacgacagccacgccctgtacgccaagaagctgtggaccgcccccgagctgctgagcggcaaccccctgcccaccaccggcatgcagaaggccgacgtgtacagcttcggcatcatcctgcaggagatcgccctgagaagcggccccttctacctggagggcctggacctgagccccaaggagatcgtgcagaaggtgagaaacggccagagaccctacttcagacccagcatcgacagaacccagctgaacgaggagctggtgctgctgatggagagatgctgggcccaggaccccgccgagagacccgacttcggccagatcaagggcttcatcagaagattcaacaaggagggcggcaccagcatcctggacaacctgctgctgagaatggagcagtacgccaacaacctggagaagctggtggaggagagaacccaggcctacctggaggagaagagaaaggccgaggccctgctgtaccagatcctgccccacagcgtggccgagcagctgaagagaggcgagaccgtgcaggccgaggccttcgacagcgtgaccatctacttcagcgacatcgtgggcttcaccgccctgagcgccgagagcacccccatgcaggtggtgaccctgctgaacgacctgtacacctgcttcgacgccatcatcgacaacttcgacgtgtacaaggtggagaccatcggcgacgcctacatggtggtgagcggcctgcccggcagaaacggccagagacacgcccccgagatcgccagaatggccctggccctgctggacgccgtgagcagcttcagaatcagacacagaccccacgaccagctgagactgagaatcggcgtgcacaccggccccgtgtgcgccggcgtggtgggcctgaagatgcccagatactgcctgttcggcgacaccgtgaacaccgccagcagaatggagagcaacggccaggccctgaagatccacgtgagcagcaccaccaaggacgccctggacgagctgggctgcttccagctggagctgagaggcgacgtggagatgaagggcaagggcaagatgagaacctactggctgctgggcgagagaaagggcccccccggcctgctgtag

SEQ ID NO: 90458 - DNA, 1626 bp, synthetic construct
  misc_feature 1..1626: note = Description of Artificial Sequence: Synthetic coding sequence
  source 1..1626: mol_type = other DNA
atgcccagcctgctggtgctgaccttcagcccctgcgtgctgctgggctgggccctgctggccggcggcaccggcggcggcggcgtgggcggcggcggcggcggcgccggcatcggcggcggcagacaggagagagaggccctgcccccccagaagatcgaggtgctggtgctgctgccccaggacgacagctacctgttcagcctgaccagagtgagacccgccatcgagtacgccctgagaagcgtggagggcaacggcaccggcagaagactgctgccccccggcaccagattccaggtggcctacgaggacagcgactgcggcaacagagccctgttcagcctggtggacagagtggccgccgccagaggcgccaagcccgacctgatcctgggccccgtgtgcgagtacgccgccgcccccgtggccagactggccagccactgggacctgcccatgctgagcgccggcgccctggccgccggcttccagcacaaggacagcgagtacagccacctgaccagagtggcccccgcctacgccaagatgggcgagatgatgctggccctgttcagacaccaccactggagcagagccgccctggtgtacagcgacgacaagctggagagaaactgctacttcaccctggagggcgtgcacgaggtgttccaggaggagggcctgcacaccagcatctacagcttcgacgagaccaaggacctggacctggaggacatcgtgagaaacatccaggccagcgagagagtggtgatcatgtgcgccagcagcgacaccatcagaagcatcatgctggtggcccacagacacggcatgaccagcggcgactacgccttcttcaacatcgagctgttcaacagcagcagctacggcgacggcagctggaagagaggcgacaagcacgacttcgaggccaagcaggcctacagcagcctgcagaccgtgaccctgctgagaaccgtgaagcccgagttcgagaagttcagcatggaggtgaagagcagcgtggagaagcagggcctgaacatggaggactacgtgaacatgttcgtggagggcttccacgacgccatcctgctgtacgtgctggccctgcacgaggtgctgagagccggctacagcaagaaggacggcggcaagatcatccagcagacctggaacagaaccttcgagggcatcgccggccaggtgagcatcgacgccaacggcgacagatacggcgacttcagcgtgatcgccatgaccgacgtggaggccggcacccaggaggtgatcggcgactacttcggcaaggagggcagattcgagatgagacccaacgtgaagtacccctggggccccctgaagctgagaatcgacgagaacagaatcgtggagcacaccaacagcagcccctgcaagagcagcggcggcctggaggagagcgccgtgaccggcatcgtggtgggcgccctgctgggcgccggcctgctgatggccttctacttcttcagaaagaagtacagaatcaccatcgagagaagaacccagcaggaggagagcaacctgggcaagcacagagagctgagagaggacagcatcagaagccacttcagcgtggcctag

SEQ ID NO: 90459 - DNA, 1623 bp, synthetic construct
  misc_feature 1..1623: note = Description of Artificial Sequence: Synthetic coding sequence
  source 1..1623: mol_type = other DNA
atgcccagcctgctggtgctgaccttcagcccctgcgtgctgctgggctgggccctgctggccggcggcaccggcggcggcggcgtgggcggcggcggcggcggcgccggcatcggcggcggcagacaggagagagaggccctgcccccccagaagatcgaggtgctggtgctgctgccccaggacgacagctacctgttcagcctgaccagagtgagacccgccatcgagtacgccctgagaagcgtggagggcaacggcaccggcagaagactgctgccccccggcaccagattccaggtggcctacgaggacagcgactgcggcaacagagccctgttcagcctggtggacagagtggccgccgccagaggcgccaagcccgacctgatcctgggccccgtgtgcgagtacgccgccgcccccgtggccagactggccagccactgggacctgcccatgctgagcgccggcgccctggccgccggcttccagcacaaggacagcgagtacagccacctgaccagagtggcccccgcctacgccaagatgggcgagatgatgctggccctgttcagacaccaccactggagcagagccgccctggtgtacagcgacgacaagctggagagaaactgctacttcaccctggagggcgtgcacgaggtgttccaggaggagggcctgcacaccagcatctacagcttcgacgagaccaaggacctggacctggaggacatcgtgagaaacatccaggccagcgagagagtggtgatcatgtgcgccagcagcgacaccatcagaagcatcatgctggtggcccacagacacggcatgaccagcggcgactacgccttcttcaacatcgagctgttcaacagcagcagctacggcgacggcagctggaagagaggcgacaagcacgacttcgaggccaagcaggcctacagcagcctgcagaccgtgaccctgctgagaaccgtgaagcccgagttcgagaagttcagcatggaggtgaagagcagcgtggagaagcagggcctgaacatggaggactacgtgaacatgttcgtggagggcttccacgacgccatcctgctgtacgtgctggccctgcacgaggtgctgagagccggctacagcaagaaggacggcggcaagatcatccagcagacctggaacagaaccttcgagggcatcgccggccaggtgagcatcgacgccaacggcgacagatacggcgacttcagcgtgatcgccatgaccgacgtggaggccggcacccaggaggtgatcggcgactacttcggcaaggagggcagattcgagatgagacccaacgtgaagtacccctggggccccctgaagctgagaatcgacgagaacagaatcgtggagcacaccaacagcagcccctgcaagagctgcggcctggaggagagcgccgtgaccggcatcgtggtgggcgccctgctgggcgccggcctgctgatggccttctacttcttcagaaagaagtacagaatcaccatcgagagaagaacccagcaggaggagagcaacctgggcaagcacagagagctgagagaggacagcatcagaagccacttcagcgtggcctag

SEQ ID NO: 90460 - DNA, 975 bp, synthetic construct
  misc_feature 1..975: note = Description of Artificial Sequence: Synthetic coding sequence
  source 1..975: mol_type = other DNA
atggagcccagcgccctgggcccctggagcctgttccccgacctggcccccagagaccaggagggccaggtgctggcccccagaagatgcttcagaagagagtgcggccagaacgagaaggtggtgatcatgtgcgccagcagcgacaccatcagaagcatcatgctggtggcccacagacacggcatgaccagcggcgactacgccttcttcaacatcgagctgttcaacagcagcagctacggcgacggcagctggaagagaggcgacaagcacgacttcgaggccaagcaggcctacagcagcctgcagaccgtgaccctgctgagaaccgtgaagcccgagttcgagaagttcagcatggaggtgaagagcagcgtggagaagcagggcctgaacatggaggactacgtgaacatgttcgtggagggcttccacgacgccatcctgctgtacgtgctggccctgcacgaggtgctgagagccggctacagcaagaaggacggcggcaagatcatccagcagacctggaacagaaccttcgagggcatcgccggccaggtgagcatcgacgccaacggcgacagatacggcgacttcagcgtgatcgccatgaccgacgtggaggccggcacccaggaggtgatcggcgactacttcggcaaggagggcagattcgagatgagacccaacgtgaagtacccctggggccccctgaagctgagaatcgacgagaacagaatcgtggagcacaccaacagcagcccctgcaagagctgcggcctggaggagagcgccgtgaccggcatcgtggtgggcgccctgctgggcgccggcctgctgatggccttctacttcttcagaaagaagtacagaatcaccatcgagagaagaacccagcaggaggagagcaacctgggcaagcacagagagctgagagaggacagcatcagaagccacttcagcgtggcctag

SEQ ID NO: 90461 - DNA, 915 bp, synthetic construct
  misc_feature 1..915: note = Description of Artificial Sequence: Synthetic coding sequence
  source 1..915: mol_type = other DNA
atgagcagcaccctgcccgccctgctgtgcgtgggcctgtgcctgagccagagaatcagcgcccagcagcagaccctgcccaagcccttcatctgggccgagccccacttcatggtgcccaaggagaagcaggtgaccatctgctgccagggcaactacggcgccgtggagtaccagctgcacttcgagggcagcctgttcgccgtggacagacccaagccccccgagagaatcaacaaggtgaagttctacatccccgacatgaacagcagaatggccggccagtacagctgcatctacagagtgggcgagctgtggagcgagcccagcaacctgctggacctggtggtgaccgagatgtacgacacccccaccctgagcgtgcaccccggccccgaggtgatcagcggcgagaaggtgaccttctactgcagactggacaccgccaccagcatgttcctgctgctgaaggagggcagaagcagccacgtgcagagaggctacggcaaggtgcaggccgagttccccctgggccccgtgaccaccgcccacagaggcacctacagatgcttcggcagctacaacaaccacgcctggagcttccccagcgagcccgtgaagctgctggtgaccggcgacatcgagaacaccagcctggcccccgaggaccccaccttccccgccgacacctggggcacctacctgctgaccaccgagaccggcctgcagaaggaccacgccctgtgggaccacaccgcccagaacctgctgagaatgggcctggccttcctggtgctggtggccctggtgtggttcctggtggaggactggctgagcagaaagagaaccagagagagagccagcagagccagcacctgggagggcagaagaagactgaacacccagaccctgtag

SEQ ID NO: 90462 - DNA, 864 bp, synthetic construct
  misc_feature 1..864: note = Description of Artificial Sequence: Synthetic coding sequence
  source 1..864: mol_type = other DNA
atgagcagcaccctgcccgccctgctgtgcgtgggcctgtgcctgagccagagaatcagcgcccagcagcagaccctgcccaagcccttcatctgggccgagccccacttcatggtgcccaaggagaagcaggtgaccatctgctgccagggcaactacggcgccgtggagtaccagctgcacttcgagggcagcctgttcgccgtggacagacccaagccccccgagagaatcaacaaggtgaagttctacatccccgacatgaacagcagaatggccggccagtacagctgcatctacagagtgggcgagctgtggagcgagcccagcaacctgctggacctggtggtgaccgagatgtacgacacccccaccctgagcgtgcaccccggccccgaggtgatcagcggcgagaaggtgaccttctactgcagactggacaccgccaccagcatgttcctgctgctgaaggagggcagaagcagccacgtgcagagaggctacggcaaggtgcaggccgagttccccctgggccccgtgaccaccgcccacagaggcacctacagatgcttcggcagctacaacaaccacgcctggagcttccccagcgagcccgtgaagctgctggtgaccggcgacatcgagaacaccagcctggcccccgaggaccccaccttccccgaccacgccctgtgggaccacaccgcccagaacctgctgagaatgggcctggccttcctggtgctggtggccctggtgtggttcctggtggaggactggctgagcagaaagagaaccagagagagagccagcagagccagcacctgggagggcagaagaagactgaacacccagaccctgtag

SEQ ID NO: 90463 - DNA, 630 bp, synthetic construct
  misc_feature 1..630: note = Description of Artificial Sequence: Synthetic coding sequence
  source 1..630: mol_type = other DNA
atgagcagcaccctgcccgccctgctgtgcgtgggcctgtgcctgagccagagaatcagcgcccagcagcagatgtacgacacccccaccctgagcgtgcaccccggccccgaggtgatcagcggcgagaaggtgaccttctactgcagactggacaccgccaccagcatgttcctgctgctgaaggagggcagaagcagccacgtgcagagaggctacggcaaggtgcaggccgagttccccctgggccccgtgaccaccgcccacagaggcacctacagatgcttcggcagctacaacaaccacgcctggagcttccccagcgagcccgtgaagctgctggtgaccggcgacatcgagaacaccagcctggcccccgaggaccccaccttccccgccgacacctggggcacctacctgctgaccaccgagaccggcctgcagaaggaccacgccctgtgggaccacaccgcccagaacctgctgagaatgggcctggccttcctggtgctggtggccctggtgtggttcctggtggaggactggctgagcagaaagagaaccagagagagagccagcagagccagcacctgggagggcagaagaagactgaacacccagaccctgtag

SEQ ID NO: 90464 - DNA, 594 bp, synthetic construct
  misc_feature 1..594: note = Description of Artificial Sequence: Synthetic coding sequence
  source 1..594: mol_type = other DNA
atgagcagcaccctgcccgccctgctgtgcgtggagatgtacgacacccccaccctgagcgtgcaccccggccccgaggtgatcagcggcgagaaggtgaccttctactgcagactggacaccgccaccagcatgttcctgctgctgaaggagggcagaagcagccacgtgcagagaggctacggcaaggtgcaggccgagttccccctgggccccgtgaccaccgcccacagaggcacctacagatgcttcggcagctacaacaaccacgcctggagcttccccagcgagcccgtgaagctgctggtgaccggcgacatcgagaacaccagcctggcccccgaggaccccaccttccccgccgacacctggggcacctacctgctgaccaccgagaccggcctgcagaaggaccacgccctgtgggaccacaccgcccagaacctgctgagaatgggcctggccttcctggtgctggtggccctggtgtggttcctggtggaggactggctgagcagaaagagaaccagagagagagccagcagagccagcacctgggagggcagaagaagactgaacacccagaccctgtag

SEQ ID NO: 90465 - DNA, 912 bp, synthetic construct
  misc_feature 1..912: note = Description of Artificial Sequence: Synthetic coding sequence
  source 1..912: mol_type = other DNA
atgagcagcaccctgcccgccctgctgtgcgtgggcctgtgcctgagccagagaatcagcgcccagcagcagaccctgcccaagcccttcatctgggccgagccccacttcatggtgcccaaggagaagcaggtgaccatctgctgccagggcaactacggcgccgtggagtaccagctgcacttcgagggcagcctgttcgccgtggacagacccaagccccccgagagaatcaacaaggtgaagttctacatccccgacatgaacagcagaatggccggccagtacagctgcatctacagagtgggcgagctgtggagcgagcccagcaacctgctggacctggtggtgaccgagatgtacgacacccccaccctgagcgtgcaccccggccccgaggtgatcagcggcgagaaggtgaccttctactgcagactggacaccgccaccagcatgttcctgctgctgaaggagggcagaagcagccacgtgcagagaggctacggcaaggtgcaggccgagttccccctgggccccgtgaccaccgcccacagaggcacctacagatgcttcggcagctacaacaaccacgcctggagcttccccagcgagcccgtgaagctgctggtgaccggcgacatcgagaacaccagcctggcccccgaggaccccaccttccccgacacctggggcacctacctgctgaccaccgagaccggcctgcagaaggaccacgccctgtgggaccacaccgcccagaacctgctgagaatgggcctggccttcctggtgctggtggccctggtgtggttcctggtggaggactggctgagcagaaagagaaccagagagagagccagcagagccagcacctgggagggcagaagaagactgaacacccagaccctgtag

SEQ ID NO: 90466 - DNA, 777 bp, synthetic construct
  misc_feature 1..777: note = Description of Artificial Sequence: Synthetic coding sequence
  source 1..777: mol_type = other DNA
atggcctggagagccctgcaccccctgctgctgctgctgctgctgttccccggcagccaggcccagagcaaggcccaggtgctgcagagcgtggccggccagaccctgaccgtgagatgccagtacccccccaccggcagcctgtacgagaagaagggctggtgcaaggaggccagcgccctggtgtgcatcagactggtgaccagcagcaagcccagaaccatggcctggaccagcagattcaccatctgggacgaccccgacgccggcttcttcaccgtgaccatgaccgacctgagagaggaggacagcggccactactggtgcagaatctacagacccagcgacaacagcgtgagcaagagcgtgagattctacctggtggtgagccccgccagcgccagcacccagaccagctggacccccagagacctggtgagcagccagacccagacccagagctgcgtgccccccaccgccggcgccagacaggcccccgagagccccagcaccatccccgtgcccagccagccccagaacagcaccctgagacccggccccgccgcccccatcgccctggtgcccgtgttctgcggcctgctggtggccaagagcctggtgctgagcgccctgctggtgtggtgggtgctgagaaacagacacatgcagcaccagggcagaagcctgctgcaccccgcccagcccagaccccaggcccacagacacttccccctgagccacagagcccccggcggcacctacggcggcaagccctag

SEQ ID NO: 90467 - DNA, 813 bp, synthetic construct
  misc_feature 1..813: note = Description of Artificial Sequence: Synthetic coding sequence
  source 1..813: mol_type = other DNA
atggcctggagagccctgcaccccctgctgctgctgctgctgctgttccccggcagccaggcccagagcaaggcccaggtgctgcagagcgtggccggccagaccctgaccgtgagatgccagtacccccccaccggcagcctgtacgagaagaagggctggtgcaaggaggccagcgccctggtgtgcatcagactggtgaccagcagcaagcccagaaccatggcctggaccagcagattcaccatctgggacgaccccgacgccggcttcttcaccgtgaccatgaccgacctgagagaggaggacagcggccactactggtgcagaatctacagacccagcgacaacagcgtgagcaagagcgtgagattctacctggtggtgagccccgccagcgccagcacccagaccagctggacccccagagacctggtgagcagccagacccagacccagagctgcgtgccccccaccgccggcgccagacaggcccccgagagccccagcaccatccccgtgcccagccaccccagcagccccctgcccgtgcccctgcccagcagaccccagaacagcaccctgagacccggccccgccgcccccatcgccctggtgcccgtgttctgcggcctgctggtggccaagagcctggtgctgagcgccctgctggtgtggtgggtgctgagaaacagacacatgcagcaccagggcagaagcctgctgcaccccgcccagcccagaccccaggcccacagacacttccccctgagccacagagcccccggcggcacctacggcggcaagccctag

SEQ ID NO: 90468 - DNA, 831 bp, synthetic construct
  misc_feature 1..831: note = Description of Artificial Sequence: Synthetic coding sequence
  source 1..831: mol_type = other DNA
atggcctggagagccctgcaccccctgctgctgctgctgctgctgttccccggcagccaggcccagagcaaggcccaggtgctgcagagcgtggccggccagaccctgaccgtgagatgccagtacccccccaccggcagcctgtacgagaagaagggctggtgcaaggaggccagcgccctggtgtgcatcagactggtgaccagcagcaagcccagaaccatggcctggaccagcagattcaccatctgggacgaccccgacgccggcttcttcaccgtgaccatgaccgacctgagagaggaggacagcggccactactggtgcagaatctacagacccagcgacaacagcgtgagcaagagcgtgagattctacctggtggtgagccccgccagcgccagcacccagaccagctggacccccagagacctggtgagcagccagacccagacccagagctgcgtgccccccaccgccggcgccagacaggcccccgagagccccagcaccatccccgtgcccagccagccccagaacagcaccctgagacccggccccgccgcccccatcgccctggtgcccgtgttctgcggcctgctggtggccaagagcctggtgctgagcgccctgctggtgtggtggggcgacatctggtggaagaccatgatggagctgagaagcctggacacccagaaggccacctgccacctgcagcaggtgaccgacctgccctggaccagcgtgagcagccccgtggagagagagatcctgtaccacaccgtggccagaaccaagatcagcgacgacgacgacgagcacaccctgtag

SEQ ID NO: 90469 - DNA, 606 bp, synthetic construct
  misc_feature 1..606: note = Description of Artificial Sequence: Synthetic coding sequence
  source 1..606: mol_type = other DNA
atggcctggatgctgctgctgatcctgatcatggtgcaccccggcagctgcgccctgtgggtgagccagccccccgagatcagaaccctggagggcagcagcgccttcctgccctgcagcttcaacgccagccagggcagactggccatcggcagcgtgacctggttcagagacgaggtggtgcccggcaaggaggtgagaaacggcacccccgagttcagaggcagactggcccccctggccagcagcagattcctgcacgaccaccaggccgagctgcacatcagagacgtgagaggccacgacgccagcatctacgtgtgcagagtggaggtgctgggcctgggcgtgggcaccggcaacggcaccagactggtggtggagaaggagcacccccagctgggcgccggcaccgtgctgctgctgagagccggcttctacgccgtgagcttcctgagcgtggccgtgggcagcaccgtgtactaccagggcaagtgcctgacctggaagggccccagaagacagctgcccgccgtggtgcccgcccccctgccccccccctgcggcagcagcgcccacctgctgccccccgtgcccggcggctag

SEQ ID NO: 90470 - DNA, 498 bp, synthetic construct
  misc_feature 1..498: note = Description of Artificial Sequence: Synthetic coding sequence
  source 1..498: mol_type = other DNA
atggcctggatgctgctgctgatcctgatcatggtgcaccccggcagctgcgccctgtgggtgagccagccccccgagatcagaaccctggagggcagcagcgccttcctgccctgcagcttcaacgccagccagggcagactggccatcggcagcgtgacctggttcagagacgaggtggtgcccggcaaggaggccgagctgcacatcagagacgtgagaggccacgacgccagcatctacgtgtgcagagtggaggtgctgggcctgggcgtgggcaccggcaacggcaccagactggtggtggagaaggagcacccccagctgggcgccggcaccgtgctgctgctgagagccggcttctacgccgtgagcttcctgagcgtggccgtgggcagcaccgtgtactaccagggcaagtgccactgccacatgggcacccactgccacagcagcgacggccccagaggcgtgatccccgagcccagatgcccctag

SEQ ID NO: 90471 - DNA, 573 bp, synthetic construct
  misc_feature 1..573: note = Description of Artificial Sequence: Synthetic coding sequence
  source 1..573: mol_type = other DNA
atggcctggatgctgctgctgatcctgatcatggtgcaccccggcagctgcgccctgtgggtgagccagccccccgagatcagaaccctggagggcagcagcgccttcctgccctgcagcttcaacgccagccagggcagactggccatcggcagcgtgacctggttcagagacgaggtggtgcccggcaaggaggtgagaaacggcacccccgagttcagaggcagactggcccccctggccagcagcagattcctgcacgaccaccaggccgagctgcacatcagagacgtgagaggccacgacgccagcatctacgtgtgcagagtggaggtgctgggcctgggcgtgggcaccggcaacggcaccagactggtggtggagaaggagcacccccagctgggcgccggcaccgtgctgctgctgagagccggcttctacgccgtgagcttcctgagcgtggccgtgggcagcaccgtgtactaccagggcaagtgccactgccacatgggcacccactgccacagcagcgacggccccagaggcgtgatccccgagcccagatgcccctag

SEQ ID NO: 90472 - DNA, 534 bp, synthetic construct
  misc_feature 1..534: note = Description of Artificial Sequence: Synthetic coding sequence
  source 1..534: mol_type = other DNA
atggcctggatgctgctgctgatcctgatcatggtgcaccccggcagctgcgccctgtgggtgagccagccccccgagatcagaaccctggagggcagcagcgccttcctgccctgcagcttcaacgccagccagggcagactggccatcggcagcgtgacctggttcagagacgaggtggtgcccggcaaggaggtgagaaacggcacccccgagttcagaggcagactggcccccctggccagcagcagattcctgcacgaccaccaggccgagctgcacatcagagacgtgagaggccacgacgccagcatctacgtgtgcagagtggaggtgctgggcctgggcgtgggcaccggcaacggcaccagactggtggtggagaaggagcacccccagctgggcgccggcaccgtgctgctgctgagagccggcttctacgccgtgagcttcctgagcgtggccgtgggcagcaccgtgtactaccagggcaagtacgccaagagcaccctgagcggcttcccccagctgtag

SEQ ID NO: 90473 - DNA, 573 bp, synthetic construct; identical to SEQ ID NO: 90471
  misc_feature 1..573: note = Description of Artificial Sequence: Synthetic coding sequence
  source 1..573: mol_type = other DNA

SEQ ID NO: 90474 - DNA, 606 bp, synthetic construct; identical to SEQ ID NO: 90469
  misc_feature 1..606: note = Description of Artificial Sequence: Synthetic coding sequence
  source 1..606: mol_type = other DNA

SEQ ID NO: 90475 - DNA, 534 bp, synthetic construct; identical to SEQ ID NO: 90472
  misc_feature 1..534: note = Description of Artificial Sequence: Synthetic coding sequence
  source 1..534: mol_type = other DNA

SEQ ID NO: 90476 - DNA, 498 bp, synthetic construct; identical to SEQ ID NO: 90470
  misc_feature 1..498: note = Description of Artificial Sequence: Synthetic coding sequence
  source 1..498: mol_type = other DNA

SEQ ID NO: 90477 - DNA, 573 bp, synthetic construct; identical to SEQ ID NO: 90471
  misc_feature 1..573: note = Description of Artificial Sequence: Synthetic coding sequence
  source 1..573: mol_type = other DNA

SEQ ID NO: 90478 - DNA, 606 bp, synthetic construct; identical to SEQ ID NO: 90469
  misc_feature 1..606: note = Description of Artificial Sequence: Synthetic coding sequence
  source 1..606: mol_type = other DNA

SEQ ID NO: 90479 - DNA, 573 bp, synthetic construct; identical to SEQ ID NO: 90471
  misc_feature 1..573: note = Description of Artificial Sequence: Synthetic coding sequence
  source 1..573: mol_type = other DNA

SEQ ID NO: 90480 - DNA, 498 bp, synthetic construct; identical to SEQ ID NO: 90470
  misc_feature 1..498: note = Description of Artificial Sequence: Synthetic coding sequence
  source 1..498: mol_type = other DNA

SEQ ID NO: 90481 - DNA, 498 bp, synthetic construct; identical to SEQ ID NO: 90470
  misc_feature 1..498: note = Description of Artificial Sequence: Synthetic coding sequence
  source 1..498: mol_type = other DNA

SEQ ID NO: 90482 - DNA, 498 bp, synthetic construct; identical to SEQ ID NO: 90470
  misc_feature 1..498: note = Description of Artificial Sequence: Synthetic coding sequence
  source 1..498: mol_type = other DNA

SEQ ID NO: 90483 - DNA, 606 bp, synthetic construct; identical to SEQ ID NO: 90469
  misc_feature 1..606: note = Description of Artificial Sequence: Synthetic coding sequence
  source 1..606: mol_type = other DNA

SEQ ID NO: 90484 - DNA, 606 bp, synthetic construct; identical to SEQ ID NO: 90469
  misc_feature 1..606: note = Description of Artificial Sequence: Synthetic coding sequence
  source 1..606: mol_type = other DNA

SEQ ID NO: 90485 - DNA, 534 bp, synthetic construct; identical to SEQ ID NO: 90472
  misc_feature 1..534: note = Description of Artificial Sequence: Synthetic coding sequence
  source 1..534: mol_type = other DNA

SEQ ID NO: 90486 - DNA, 534 bp, synthetic construct; identical to SEQ ID NO: 90472
  misc_feature 1..534: note = Description of Artificial Sequence: Synthetic coding sequence
  source 1..534: mol_type = other DNA

SEQ ID NO: 90487 - DNA, 606 bp, synthetic construct; identical to SEQ ID NO: 90469
  misc_feature 1..606: note = Description of Artificial Sequence: Synthetic coding sequence
  source 1..606: mol_type = other DNA

SEQ ID NO: 90488 - DNA, 534 bp, synthetic construct; identical to SEQ ID NO: 90472
  misc_feature 1..534: note = Description of Artificial Sequence: Synthetic coding sequence
  source 1..534: mol_type = other DNA

SEQ ID NO: 90489 - DNA, 573 bp, synthetic construct; identical to SEQ ID NO: 90471
  misc_feature 1..573: note = Description of Artificial Sequence: Synthetic coding sequence
  source 1..573: mol_type = other DNA

SEQ ID NO: 90490 - DNA, 606 bp, synthetic construct; identical to SEQ ID NO: 90469
  misc_feature 1..606: note = Description of Artificial Sequence: Synthetic coding sequence
  source 1..606: mol_type = other DNA

SEQ ID NO: 90491 - DNA, 498 bp, synthetic construct; identical to SEQ ID NO: 90470
  misc_feature 1..498: note = Description of Artificial Sequence: Synthetic coding sequence
  source 1..498: mol_type = other DNA

SEQ ID NO: 90492 - DNA, 534 bp, synthetic construct; identical to SEQ ID NO: 90472
  misc_feature 1..534: note = Description of Artificial Sequence: Synthetic coding sequence
  source 1..534: mol_type = other DNA

SEQ ID NO: 90493 - DNA, 573 bp, synthetic construct; identical to SEQ ID NO: 90471
  misc_feature 1..573: note = Description of Artificial Sequence: Synthetic coding sequence
  source 1..573: mol_type = other DNA

SEQ ID NO: 90494 - DNA, 534 bp, synthetic construct; identical to SEQ ID NO: 90472
  misc_feature 1..534: note = Description of Artificial Sequence: Synthetic coding sequence
  source 1..534: mol_type = other DNA

SEQ ID NO: 90495 - DNA, 606 bp, synthetic construct; identical to SEQ ID NO: 90469
  misc_feature 1..606: note = Description of Artificial Sequence: Synthetic coding sequence
  source 1..606: mol_type = other DNA

SEQ ID NO: 90496 - DNA, 573 bp, synthetic construct; identical to SEQ ID NO: 90471
  misc_feature 1..573: note = Description of Artificial Sequence: Synthetic coding sequence
  source 1..573: mol_type = other DNA

SEQ ID NO: 90497 - DNA, 498 bp, synthetic construct; identical to SEQ ID NO: 90470
  misc_feature 1..498: note = Description of Artificial Sequence: Synthetic coding sequence
  source 1..498: mol_type = other DNA

SEQ ID NO: 90498 - DNA, 498 bp, synthetic construct; identical to SEQ ID NO: 90470
  misc_feature 1..498: note = Description of Artificial Sequence: Synthetic coding sequence
  source 1..498: mol_type = other DNA

SEQ ID NO: 90499 - DNA, 534 bp, synthetic construct; identical to SEQ ID NO: 90472
  misc_feature 1..534: note = Description of Artificial Sequence: Synthetic coding sequence
  source 1..534: mol_type = other DNA

SEQ ID NO: 90500 - DNA, 573 bp, synthetic construct; identical to SEQ ID NO: 90471
  misc_feature 1..573: note = Description of Artificial Sequence: Synthetic coding sequence
  source 1..573: mol_type = other DNA

SEQ ID NO: 90501 - DNA, 486 bp, synthetic construct
  misc_feature 1..486: note = Description of Artificial Sequence: Synthetic coding sequence
  source 1..486: mol_type = other DNA
atggacgacatctacaaggccgccgtggagcagctgaccgaggagcagaagaacgagttcaaggccgccttcgacatcttcgtgctgggcgccgaggacggctgcatcagcaccaaggagctgggcaaggtgatgagaatgctgggccagaaccccacccccgaggagctgcaggagatgatcgacgaggtggacgaggacggcagcggcaccgtggacttcgacgagttcctggtgatgatggtgagatgcatgaaggacgacagcaagggcaagagcgaggaggagctgagcgacctgttcagaatgttcgacaagaacgccgacggctacatcgacctggacgagctgaagatcatgctgcaggccaccggcgagaccatcaccgaggacgacatcgaggagctgatgaaggacggcgacaagaacaacgacggcagaatcgactacgacgagttcctggagttcatgaagggcgtggagtag

SEQ ID NO: 90502 - DNA, 315 bp, synthetic construct
  misc_feature 1..315: note = Description of Artificial Sequence: Synthetic coding sequence
  source 1..315: mol_type = other DNA
atgggcgcccaggacagaccccagtgccacttcgacatcgagatcaacagagagcccgtgggcagaatcatgttccagctgttcagcgacatctgccccaagacctgcaagaacttcctgtgcctgtgcagcggcgagaagggcctgggcaagaccaccggcaagaagctgtgctacaagggcagcaccttccacagagtggtgaagaacttcatgatccagggcggcgacttcagcgagggcaacggcaagggcggcgagagcatctacggcggctacttcaaggagaacgtggtgttctgcaagatgaagtag

SEQ ID NO: 90503 - DNA, 2805 bp, synthetic construct
  misc_feature 1..2805: note = Description of Artificial Sequence: Synthetic coding sequence
  source 1..2805: mol_type = other DNA
atggccgtgcagcccaaggagaccctgcagctggagagcgccgccgaggtgggcttcgtgagattcttccagggcatgcccgagaagcccaccaccaccgtgagactgttcgacagaggcgacttctacaccgcccacggcgaggacgccctgctggccgccagagaggtgttcaagacccagggcgtgatcaagtacatgggccccgccggcgccaagaacctgcagagcgtggtgctgagcaagatgaacttcgagagcttcgtgaaggacctgctgctggtgagacagtacagagtggaggtgtacaagaacagagccggcaacaaggccagcaaggagaacgactggtacctggcctacaaggccagccccggcaacctgagccagttcgaggacatcctgttcggcaacaacgacatgagcgccagcatcggcgtggtgggcgtgaagatgagcgccgtggacggccagagacaggtgggcgtgggctacgtggacagcatccagagaaagctgggcctgtgcgagttccccgacaacgaccagttcagcaacctggaggccctgctgatccagatcggccccaaggagtgcgtgctgcccggcggcgagaccgccggcgacatgggcaagctgagacagatcatccagagaggcggcatcctgatcaccgagagaaagaaggccgacttcagcaccaaggacatctaccaggacctgaacagactgctgaagggcaagaagggcgagcagatgaacagcgccgtgctgcccgagatggagaaccaggtggccgtgagcagcctgagcgccgtgatcaagttcctggagctgctgagcgacgacagcaacttcggccagttcgagctgaccaccttcgacttcagccagtacatgaagctggacatcgccgccgtgagagccctgaacctgttccagggcagcgtggaggacaccaccggcagccagagcctggccgccctgctgaacaagtgcaagaccccccagggccagagactggtgaaccagtggatcaagcagcccctgatggacaagaacagaatcgaggagagactgaacctggtggaggccttcgtggaggacgccgagctgagacagaccctgcaggaggacctgctgagaagattccccgacctgaacagactggccaagaagttccagagacaggccgccaacctgcaggactgctacagactgtaccagggcatcaaccagctgcccaacgtgatccaggccctggagaagcacgagggcaagcaccagaagctgctgctggccgtgttcgtgacccccctgaccgacctgagaagcgacttcagcaagttccaggagatgatcgagaccaccctggacatggaccaggtggagaaccacgagttcctggtgaagcccagcttcgaccccaacctgagcgagctgagagagatcatgaacgacctggagaagaagatgcagagcaccctgatcagcgccgccagagacctgggcctggaccccggcaagcagatcaagctggacagcagcgcccagttcggctactacttcagagtgacctgcaaggaggagaaggtgctgagaaacaacaagaacttcagcaccgtggacatccagaagaacggcgtgaagttcaccaacagcaagctgaccagcctgaacgaggagtacaccaagaacaagaccgagtacgaggaggcccaggacgccatcgtgaaggagatcgtgaacatcagcagcggctacgtggagcccatgcagaccctgaacgacgtgctggcccagctggacgccgtggtgagcttcgcccacgtgagcaacggcgcccccgtgccctacgtgagacccgccatcctggagaagggccagggcagaatcatcctgaaggccagcagacacgcctgcgtggaggtgcaggacgagatcgccttcatccccaacgacgtgtacttcgagaaggacaagcagatgttccacatcatcaccggccccaacatgggcggcaagagcacctacatcagacagaccggcgtgatcgtgctgatggcccagatcggctgcttcgtgccctgcgagagcgccgaggtgagcatcgtggactgcatcctggccagagtgggcgccggcgacagccagctgaagggcgtgagcaccttcatggccgagatgctggagaccgccagcatcctgagaagcgccaccaaggacagcctgatcatcatcgacgagctgggcagaggcaccagcacctacgacggcttcggcctggcctgggccatcagcgagtacatcgccaccaagatcggcgccttctgcatgttcgccacccacttccacgagctgaccgccctggccaaccagatccccaccgtgaacaacctgcacgtgaccgccctgaccaccgaggagaccctgaccatgctgtaccaggtgaagaagggcgtgtgcgaccagagcttcggcatccacgtggccgagctggccaacttccccaagcacgtgatcgagtgcgccaagcagaaggccctggagctggaggagttccagtacatcggcgagagccagggctacgacatcatggagcccgccgccaagaagtgctacctggagagagagcagggcgagaagatcatccaggagttcctgagcaaggtgaagcagatgcccttcaccgagatgagcgaggagaacatcaccatcaagctgaagcagctgaaggccgaggtgatcgccaagaacaacagcttcgtgaacgagatcatcagcagaatcaaggtgaccacctag

SEQ ID NO: 90504 - DNA, 435 bp, synthetic construct
  misc_feature 1..435: note = Description of Artificial Sequence: Synthetic coding sequence
  source 1..435: mol_type = other DNA
atgaccgaggaggtgatcgtgatcgccaagtgggactacaccgcccagcaggaccaggagctggacatcaagaagaacgagagactgtggctgctggacgacagcaagacctggtggagagtgagaaacgccgccaacagaaccggctacgtgcccagcaactacgtggagagaaagaacagcctgaagaagggcagcctggtgaagaacctgaaggacaccctgggcctgggcaagaccagaagaaagaccagcgccagagacgccagccccacccccagcaccgacgccgagtaccccgccaacggcagcggcgccgacagaatctacgacctgaacatccccgccttcgtgaagttcgcctacgtggccgagagagaggacgagctgagcctggtgaagggcagcagagtgaccgtgatggagaagtgctag

SEQ ID NO: 90505 - DNA, 1143 bp, synthetic construct
  misc_feature 1..1143: note = Description of Artificial Sequence: Synthetic coding sequence
  source 1..1143: mol_type = other DNA
atgaccgaggaggtgatcgtgatcgccaagtgggactacaccgcccagcaggaccaggagctggacatcaagaagaacgagagactgtggctgctggacgacagcaagacctggtggagagtgagaaacgccgccaacagaaccggctacgtgcccagcaactacgtggagagaaagaacagcctgaagaagggcagcctggtgaagaacctgaaggacaccctgggcctgggcaagaccagaagaaagaccagcgccagagacgccagccccacccccagcaccgacgccgagtaccccgccaacggcagcggcgccgacagaatctacgacctgaacatccccgccttcgtgaagttcgcctacgtggccgagagagaggacgagctgagcctggtgaagggcagcagagtgaccgtgatggagaagtgcagcgacggctggtggagaggcagctacaacggccagatcggctggttccccagcaactacgtgctggaggaggtggacgaggccgccgccgagagccccagcttcctgagcctgagaaagggcgccagcctgagcaacggccagggcagcagagtgctgcacgtggtgcagaccctgtaccccttcagcagcgtgaccgaggaggagctgaacttcgagaagggcgagaccatggaggtgatcgagaagcccgagaacgaccccgagtggtggaagtgcaagaacgccagaggccaggtgggcctggtgcccaagaactacgtggtggtgctgagcgacggccccgccctgcaccccgcccacgccccccagatcagctacaccggccccagcagcagcggcagattcgccggcagagagtggtactacggcaacgtgaccagacaccaggccgagtgcgccctgaacgagagaggcgtggagggcgacttcctgatcagagacagcgagagcagccccagcgacttcagcgtgagcctgaaggccagcggcaagaacaagcacttcaaggtgcagctggtggacaacgtgtactgcatcggccagagaagattccacaccatggacgagctggtggagcactacaagaaggcccccatcttcaccagcgagcacggcgagaagctgtacctggtgagagccctgcagtag

SEQ ID NO: 90506 - DNA, 333 bp, synthetic construct
  misc_feature 1..333: note = Description of Artificial Sequence: Synthetic coding sequence
  source 1..333: mol_type = other DNA
atgaccgaggaggtgatcgtgatcgccaagtgggactacaccgcccagcaggaccaggagctggacatcaagaagaacgagagactgtggctgctggacgacagcaagacctggtggagagtgagaaacgccgccaacagaaccggctacgtgcccagcaactacgtggagagaaagaacagcctgaagaagggcagcctggtgaagaacctgaaggacaccctgggcctgggcaagaccagaagaaagaccagcgccagagacgccagccccacccccagcaccgacgccgagtaccccgccaacggcagcggcgccgacagaatctactag

SEQ ID NO: 90507 - DNA, 252 bp, synthetic construct
  misc_feature 1..252: note = Description of Artificial Sequence: Synthetic coding sequence
  source 1..252: mol_type = other DNA
atgaccgaggaggtgatcgtgatcgccaagtgggactacaccgcccagcaggaccaggagctggacatcaagaagaacgagagactgtggctgctggacgacagcaagacctggtggagagtgagaaacgccgccaacagaaccggctacgtgcccagcaactacgtggagagaaagaacagcctgaagaagggcagcctggtgaagaacctgaaggacaccctggcccagagactgctgagagtgccctag

SEQ ID NO: 90508 - DNA, 252 bp, synthetic construct; identical to SEQ ID NO: 90507
  misc_feature 1..252: note = Description of Artificial Sequence: Synthetic coding sequence
  source 1..252: mol_type = other DNA

SEQ ID NO: 90509 - DNA, 2169 bp, synthetic construct
  misc_feature 1..2169: note = Description of Artificial Sequence: Synthetic coding sequence
  source 1..2169: mol_type = other DNA
atgtacagagccctgtacgccttcagaagcgccgagcccaacgccctggccttcgccgccggcgagaccttcctggtgctggagagaagcagcgcccactggtggctggccgccagagccagaagcggcgagaccggctacgtgccccccgcctacctgagaagactgcagggcctggagcaggacgtgctgcaggccatcgacagagccatcgaggccgtgcacaacaccgccatgagagacggcggcaagtacagcctggagcagagaggcgtgctgcagaagctgatccaccacagaaaggagaccctgagcagaagaggccccagcgccagcagcgtggccgtgatgaccagcagcaccagcgaccaccacctggacgccgccgccgccagacagcccaacggcgtgtgcagagccggcttcgagagacagcacagcctgcccagcagcgagcacctgggcgccgacggcggcctgtaccagatccccctgcccagcagccagatccccccccagcccagaagagccgcccccaccaccccccccccccccgtgaagagaagagacagagaggccctgatggccagcggcagcggcggccacaacaccatgcccagcggcggcaacagcgtgagcagcggcagcagcgtgagcagcaccagcctggacaccctgtacaccagcagcagccccagcgagcccggcagcagctgcagccccacccccccccccgtgcccagaagaggcacccacaccaccgtgagccaggtgcagcccccccccagcaaggccagcgcccccgagccccccgccgaggaggaggtggccaccggcaccaccagcgccagcgacgacctggaggccctgggcaccctgagcctgggcaccaccgaggagaaggccgccgccgaggccgccgtgcccagaaccatcggcgccgagctgatggagctggtgagaagaaacaccggcctgagccacgagctgtgcagagtggccatcggcatcatcgtgggccacatccaggccagcgtgcccgccagcagccccgtgatggagcaggtgctgctgagcctggtggagggcaaggacctgagcatggccctgcccagcggccaggtgtgccacgaccagcagagactggaggtgatcttcgccgacctggccagaagaaaggacgacgcccagcagagaagctgggccctgtacgaggacgagggcgtgatcagatgctacctggaggagctgctgcacatcctgaccgacgccgaccccgaggtgtgcaagaagatgtgcaagagaaacgagttcgagagcgtgctggccctggtggcctactaccagatggagcacagagccagcctgagactgctgctgctgaagtgcttcggcgccatgtgcagcctggacgccgccatcatcagcaccctggtgagcagcgtgctgcccgtggagctggccagagacatgcagaccgacacccaggaccaccagaagctgtgctacagcgccctgatcctggccatggtgttcagcatgggcgaggccgtgccctacgcccactacgagcacctgggcacccccttcgcccagttcctgctgaacatcgtggaggacggcctgcccctggacaccaccgagcagctgcccgacctgtgcgtgaacctgctgctggccctgaacctgcacctgcccgccgccgaccagaacgtgatcatggccgccctgagcaagcacgccaacgtgaagatcttcagcgagaagctgctgctgctgctgaacagaggcgacgaccccgtgagaatcttcaagcacgagccccagcccccccacagcgtgctgaagttcctgcaggacgtgttcggcagccccgccaccgccgccatcttctaccacaccgacatgatggccctgatcgacatcaccgtgagacacatcgccgacctgagccccggcgacaagctgagaatggagtacctgagcctgatgcacgccatcgtgagaaccaccccctacctgcagcacagacacagactgcccgacctgcaggccatcctgagaagaatcctgaacgaggaggagaccagcccccagtgccagatggacagaatgatcgtgagagagatgtgcaaggagttcctggtgctgggcgaggcccccagctag

SEQ ID NO: 90510 - DNA, 2169 bp, synthetic construct
  misc_feature 1..2169: note = Description of Artificial Sequence: Synthetic coding sequence
  source 1..2169: mol_type = other DNA
atgtacagagccctgtacgccttcagaagcgccgagcccaacgccctggccttcgccgccggcgagaccttcctggtgctggagagaagcagcgcccactggtggctggccgccagagccagaagcggcgagaccggctacgtgccccccgcctacctgagaagactgcagggcctggagcaggacgtgctgcaggccatcgacagagccatcgaggccgtgcacaacaccgccatgagagacggcggcaagtacagcctggagcagagaggcgtgctgcagaagctgatccaccacagaaaggagaccctgagcagaagaggccccagcgccagcagcgtggccgtgatgaccagcagcaccagcgaccaccacctggacgccgccgccgccagacagcccaacggcgtgtgcagagccggcttcgagagacagcacagcctgcccagcagcgagcacctgggcgccgacggcggcctgtaccagatccccctgcccagcagccagatccccccccagcccagaagagccgcccccaccaccccccccccccccgtgaagagaagagacagagaggccctgatggccagcggcagcggcggccacaacaccatgcccagcggcggcaacagcgtgagcagcggcagcagcgtgagcagcaccagcctggacaccctgtacaccagcagcagccccagcgagcccggcagcagctgcagccccacccccccccccgtgcccagaagaggcacccacaccaccgtgagccaggtgcagcccccccccagcaaggccagcgcccccgagccccccgccgaggaggaggtggccaccggcaccaccagcgccagcgacgacctggaggccctgggcaccctgagcctgggcaccaccgaggagaaggccgccgccgaggccgccgtgcccagaaccatcggcgccgagctgatggagctggtgagaagaaacaccggcctgagccacgagctgtgcagagtggccatcggcatcatcgtgggccacatccaggccagcgtgcccgccagcagccccgtgatggagcaggtgctgctgagcctggtggagggcaaggacctgagcatggccctgcccagcggccaggtgtgccacgaccagcagagactggaggtgatcttcgccgacctggccagaagaaaggacgacgcccagcagagaagctgggccctgtacgaggacgagggcgtgatcagatgctacctggaggagctgctgcacatcctgaccgacgccgaccccgaggtgtgcaagaagatgtgcaagagaaacgagttcgagagcgtgctggccctggtggcctactaccagatggagcacagagccagcctgagactgctgctgctgaagtgcttcggcgccatgtgcagcctggacgccgccatcatcagcaccctggtgagcagcgtgctgcccgtggagctggccagagacatgcagaccgacacccaggaccaccagaagctgtgctacagcgccctgatcctggccatggtgttcagcatgggcgaggccgtgccctacgcccactacgagcacctgggcacccccttcgcccagttcctgctgaacatcgtggaggacggcctgcccctggacaccaccgagcagctgcccgacctgtgcgtgaacctgctgctggccctgaacctgcacctgcccgccgccgaccagaacgtgatcatggccgccctgagcaagcacgccaacgtgaagatcttcagcgagaagctgctgctgctgctgaacagaggcgacgaccccgtgagaatcttcaagcacgagccccagcccccccacagcgtgctgaagttcctgcaggacgtgttcggcagccccgccaccgccgccatcttctaccacaccgacatgatggccctgatcgacatcaccgtgagacacatcgccgacctgagccccggcgacaagggccccttcggcgccggccagagaccctggcccggcgtgcccagactgctggagcccggcagcacccccagcagagagccccaccccgtggagagaagcggcgtgcccgccctgaccagcagctgggccagcggctgccccagacccctgcaccccgccctgcagctggtgatcgacagcgccttcggcggcagaagcgtgtag

SEQ ID NO: 90511 - DNA, 2148 bp, synthetic construct
  misc_feature 1..2148: note = Description of Artificial Sequence: Synthetic coding sequence
  source 1..2148: mol_type = other DNA
atgtacagagccctgtacgccttcagaagcgccgagcccaacgccctggccttcgccgccggcgagaccttcctggtgctggagagaagcagcgcccactggtggctggccgccagagccagaagcggcgagaccggctacgtgccccccgcctacctgagaagactgcagggcctggagcaggacgtgctgcaggccatcgacagagccatcgaggccgtgcacaacaccgccatgagagacggcggcaagtacagcctggagcagagaggcgtgctgcagaagctgatccaccacagaaaggagaccctgagcagaagaggccccagcgccagcagcgtggccgtgatgaccagcagcaccagcgaccaccacctggacgccgccgccgccagacagcccaacggcgtgtgcagagccggcttcgagagacagcacagcctgcccagcagcgagcacctgggcgccgacggcggcctgtaccagatccccccccagcccagaagagccgcccccaccaccccccccccccccgtgaagagaagagacagagaggccctgatggccagcggcagcggcggccacaacaccatgcccagcggcggcaacagcgtgagcagcggcagcagcgtgagcagcaccagcctggacaccctgtacaccagcagcagccccagcgagcccggcagcagctgcagccccacccccccccccgtgcccagaagaggcacccacaccaccgtgagccaggtgcagcccccccccagcaaggccagcgcccccgagccccccgccgaggaggaggtggccaccggcaccaccagcgccagcgacgacctggaggccctgggcaccctgagcctgggcaccaccgaggagaaggccgccgccgaggccgccgtgcccagaaccatcggcgccgagctgatggagctggtgagaagaaacaccggcctgagccacgagctgtgcagagtggccatcggcatcatcgtgggccacatccaggccagcgtgcccgccagcagccccgtgatggagcaggtgctgctgagcctggtggagggcaaggacctgagcatggccctgcccagcggccaggtgtgccacgaccagcagagactggaggtgatcttcgccgacctggccagaagaaaggacgacgcccagcagagaagctgggccctgtacgaggacgagggcgtgatcagatgctacctggaggagctgctgcacatcctgaccgacgccgaccccgaggtgtgcaagaagatgtgcaagagaaacgagttcgagagcgtgctggccctggtggcctactaccagatggagcacagagccagcctgagactgctgctgctgaagtgcttcggcgccatgtgcagcctggacgccgccatcatcagcaccctggtgagcagcgtgctgcccgtggagctggccagagacatgcagaccgacacccaggaccaccagaagctgtgctacagcgccctgatcctggccatggtgttcagcatgggcgaggccgtgccctacgcccactacgagcacctgggcacccccttcgcccagttcctgctgaacatcgtggaggacggcctgcccctggacaccaccgagcagctgcccgacctgtgcgtgaacctgctgctggccctgaacctgcacctgcccgccgccgaccagaacgtgatcatggccgccctgagcaagcacgccaacgtgaagatcttcagcgagaagctgctgctgctgctgaacagaggcgacgaccccgtgagaatcttcaagcacgagccccagcccccccacagcgtgctgaagttcctgcaggacgtgttcggcagccccgccaccgccgccatcttctaccacaccgacatgatggccctgatcgacatcaccgtgagacacatcgccgacctgagccccggcgacaagctgagaatggagtacctgagcctgatgcacgccatcgtgagaaccaccccctacctgcagcacagacacagactgcccgacctgcaggccatcctgagaagaatcctgaacgaggaggagaccagcccccagtgccagatggacagaatgatcgtgagagagatgtgcaaggagttcctggtgctgggcgaggcccccagctag

SEQ ID NO: 90512 - DNA, 3405 bp, synthetic construct
  misc_feature 1..3405: note = Description of Artificial Sequence: Synthetic coding sequence
  source 1..3405: mol_type = other DNA
atgagcagaagcgtgctgcagcccagccagcagaagctggccgagaagctgaccatcctgaacgacagaggcgtgggcatgctgaccagactgtacaacatcaagaagcagggccaggtgtggaaggcctgcggcgaccccaaggccaagcccagctacctgatcgacaagaacctggagagcgccgtgaagttcatcgtgagaaagttccccgccgtggagaccagaaacaacaaccagcagctggcccagctgcagaaggagaagagcgagatcctgaagaacctggccctgtactacttcaccttcgtggacgtgatggagttcaaggaccacgtgtgcgagctgctgaacaccatcgacgtgtgccaggtgttcttcgacatcaccgtgaacttcgacctgaccaagaactacctggacctgatcatcacctacaccaccctgatgatcctgctgagcagaatcgaggagagaaaggccatcatcggcctgtacaactacgcccacgagatgacccacggcgccagcgacagagagtaccccagactgggccagatgatcgtggactacgagaaccccctgaagaagatgatggaggagttcgtgccccacagcaagagcctgagcgacgccctgatcagcctgcagatggtgtaccccagaagaaacctgagcgccgaccagtggagaaacgcccagctgctgagcctgatcagcgcccccagcaccatgctgaaccccgcccagagcgacaccatgccctgcgagtacctgagcctggacgccatggagaagtggatcatcttcggcttcatcctgtgccacggcatcctgaacaccgacgccaccgccctgaacctgtggaagctggccctgcagagcagcagctgcctgagcctgttcagagacgaggtgttccacatccacaaggccgccgaggacctgttcgtgaacatcagaggctacaacaagagaatcaacgacatcagagagtgcaaggaggccgccgtgagccacgccggcagcatgcacagagagagaagaaagttcctgagaagcgccctgaaggagctggccaccgtgctgagcgaccagcccggcctgctgggccccaaggccctgttcgtgttcatggccctgagcttcgccagagacgagatcatctggctgctgagacacgccgacaacatgcccaagaagagcgccgacgacttcatcgacaagcacatcgccgagctgatcttctacatggaggagctgagagcccacgtgagaaagtacggccccgtgatgcagagatactacgtgcagtacctgagcggcttcgacgccgtggtgctgaacgagctggtgcagaacctgagcgtgtgccccgaggacgagagcatcatcatgagcagcttcgtgaacaccatgaccagcctgagcgtgaagcaggtggaggacggcgaggtgttcgacttcagaggcatgagactggactggttcagactgcaggcctacaccagcgtgagcaaggccagcctgggcctggccgaccacagagagctgggcaagatgatgaacaccatcatcttccacaccaagatggtggacagcctggtggagatgctggtggagaccagcgacctgagcatcttctgcttctacagcagagccttcgagaagatgttccagcagtgcctggagctgcccagccagagcagatacagcatcgccttccccctgctgtgcacccacttcatgagctgcacccacgagctgtgccccgaggagagacaccacatcggcgacagaagcctgagcctgtgcaacatgttcctggacgagatggccaagcaggccagaaacctgatcaccgacatctgcaccgagcagtgcaccctgagcgaccagctgctgcccaagcactgcgccaagaccatcagccaggccgtgaacaagaagagcaagaagcagaccggcaagaagggcgagcccgagagagagaagcccggcgtggagagcatgagaaagaacagactggtggtgaccaacctggacaagctgcacaccgccctgagcgagctgtgcttcagcatcaactacgtgcccaacatggtggtgtgggagcacaccttcacccccagagagtacctgaccagccacctggagatcagattcaccaagagcatcgtgggcatgaccatgtacaaccaggccacccaggagatcgccaagcccagcgagctgctgaccagcgtgagagcctacatgaccgtgctgcagagcatcgagaactacgtgcagatcgacatcaccagagtgttcaacaacgtgctgctgcagcagacccagcacctggacagccacggcgagcccaccatcaccagcctgtacaccaactggtacctggagaccctgctgagacaggtgagcaacggccacatcgcctacttccccgccatgaaggccttcgtgaacctgcccaccgagaacgagctgaccttcaacgccgaggagtacagcgacatcagcgagatgagaagcctgagcgagctgctgggcccctacggcatgaagttcctgagcgagagcctgatgtggcacatcagcagccaggtggccgagctgaagaagctggtggtggagaacgtggacgtgctgacccagatgagaaccagcttcgacaagcccgaccagatggccgccctgttcaagagactgagcagcgtggacagcgtgctgaagagaatgaccatcatcggcgtgatcctgagcttcagaagcctggcccaggaggccctgagagacgtgctgagctaccacatccccttcctggtgagcagcatcgaggacttcaaggaccacatccccagagagaccgacatgaaggtggccatgaacgtgtacgagctgagcagcgccgccggcctgccctgcgagatcgaccccgccctggtggtggccctgagcagccagaagagcgagaacatcagccccgaggaggagtacaagatcgcctgcctgctgatggtgttcgtggccgtgagcctgcccaccctggccagcaacgtgatgagccagtacagccccgccatcgagggccactgcaacaacatccactgcctggccaaggccatcaaccagatcgccgccgccctgttcaccatccacaagggcagcatcgaggacagactgaaggagttcctggccctggccagcagcagcctgctgaagatcggccaggagaccgacaagaccaccaccagaaacagagagagcgtgtacctgctgctggacatgatcgtgcaggagagccccttcctgaccatggacctgctggagagctgcttcccctacgtgctgctgagaaacgcctaccacgccgtgtacaagcagagcgtgaccagcagcgcctag

SEQ ID NO: 90513 - DNA, 3387 bp, synthetic construct
  misc_feature 1..3387: note = Description of Artificial Sequence: Synthetic coding sequence
  source 1..3387: mol_type = other DNA
atgagcagaagcgtgctgcagcccagccagcagaagctggccgagaagctgaccatcctgaacgacagaggcgtgggcatgctgaccagactgtacaacatcaagaaggcctgcggcgaccccaaggccaagcccagctacctgatcgacaagaacctggagagcgccgtgaagttcatcgtgagaaagttccccgccgtggagaccagaaacaacaaccagcagctggcccagctgcagaaggagaagagcgagatcctgaagaacctggccctgtactacttcaccttcgtggacgtgatggagttcaaggaccacgtgtgcgagctgctgaacaccatcgacgtgtgccaggtgttcttcgacatcaccgtgaacttcgacctgaccaagaactacctggacctgatcatcacctacaccaccctgatgatcctgctgagcagaatcgaggagagaaaggccatcatcggcctgtacaactacgcccacgagatgacccacggcgccagcgacagagagtaccccagactgggccagatgatcgtggactacgagaaccccctgaagaagatgatggaggagttcgtgccccacagcaagagcctgagcgacgccctgatcagcctgcagatggtgtaccccagaagaaacctgagcgccgaccagtggagaaacgcccagctgctgagcctgatcagcgcccccagcaccatgctgaaccccgcccagagcgacaccatgccctgcgagtacctgagcctggacgccatggagaagtggatcatcttcggcttcatcctgtgccacggcatcctgaacaccgacgccaccgccctgaacctgtggaagctggccctgcagagcagcagctgcctgagcctgttcagagacgaggtgttccacatccacaaggccgccgaggacctgttcgtgaacatcagaggctacaacaagagaatcaacgacatcagagagtgcaaggaggccgccgtgagccacgccggcagcatgcacagagagagaagaaagttcctgagaagcgccctgaaggagctggccaccgtgctgagcgaccagcccggcctgctgggccccaaggccctgttcgtgttcatggccctgagcttcgccagagacgagatcatctggctgctgagacacgccgacaacatgcccaagaagagcgccgacgacttcatcgacaagcacatcgccgagctgatcttctacatggaggagctgagagcccacgtgagaaagtacggccccgtgatgcagagatactacgtgcagtacctgagcggcttcgacgccgtggtgctgaacgagctggtgcagaacctgagcgtgtgccccgaggacgagagcatcatcatgagcagcttcgtgaacaccatgaccagcctgagcgtgaagcaggtggaggacggcgaggtgttcgacttcagaggcatgagactggactggttcagactgcaggcctacaccagcgtgagcaaggccagcctgggcctggccgaccacagagagctgggcaagatgatgaacaccatcatcttccacaccaagatggtggacagcctggtggagatgctggtggagaccagcgacctgagcatcttctgcttctacagcagagccttcgagaagatgttccagcagtgcctggagctgcccagccagagcagatacagcatcgccttccccctgctgtgcacccacttcatgagctgcacccacgagctgtgccccgaggagagacaccacatcggcgacagaagcctgagcctgtgcaacatgttcctggacgagatggccaagcaggccagaaacctgatcaccgacatctgcaccgagcagtgcaccctgagcgaccagctgctgcccaagcactgcgccaagaccatcagccaggccgtgaacaagaagagcaagaagcagaccggcaagaagggcgagcccgagagagagaagcccggcgtggagagcatgagaaagaacagactggtggtgaccaacctggacaagctgcacaccgccctgagcgagctgtgcttcagcatcaactacgtgcccaacatggtggtgtgggagcacaccttcacccccagagagtacctgaccagccacctggagatcagattcaccaagagcatcgtgggcatgaccatgtacaaccaggccacccaggagatcgccaagcccagcgagctgctgaccagcgtgagagcctacatgaccgtgctgcagagcatcgagaactacgtgcagatcgacatcaccagagtgttcaacaacgtgctgctgcagcagacccagcacctggacagccacggcgagcccaccatcaccagcctgtacaccaactggtacctggagaccctgctgagacaggtgagcaacggccacatcgcctacttccccgccatgaaggccttcgtgaacctgcccaccgagaacgagctgaccttcaacgccgaggagtacagcgacatcagcgagatgagaagcctgagcgagctgctgggcccctacggcatgaagttcctgagcgagagcctgatgtggcacatcagcagccaggtggccgagctgaagaagctggtggtggagaacgtggacgtgctgacccagatgagaaccagcttcgacaagcccgaccagatggccgccctgttcaagagactgagcagcgtggacagcgtgctgaagagaatgaccatcatcggcgtgatcctgagcttcagaagcctggcccaggaggccctgagagacgtgctgagctaccacatccccttcctggtgagcagcatcgaggacttcaaggaccacatccccagagagaccgacatgaaggtggccatgaacgtgtacgagctgagcagcgccgccggcctgccctgcgagatcgaccccgccctggtggtggccctgagcagccagaagagcgagaacatcagccccgaggaggagtacaagatcgcctgcctgctgatggtgttcgtggccgtgagcctgcccaccctggccagcaacgtgatgagccagtacagccccgccatcgagggccactgcaacaacatccactgcctggccaaggccatcaaccagatcgccgccgccctgttcaccatccacaagggcagcatcgaggacagactgaaggagttcctggccctggccagcagcagcctgctgaagatcggccaggagaccgacaagaccaccaccagaaacagagagagcgtgtacctgctgctggacatgatcgtgcaggagagccccttcctgaccatggacctgctggagagctgcttcccctacgtgctgctgagaaacgcctaccacgccgtgtacaagcagagcgtgaccagcagcgcctag

SEQ ID NO: 90514 - DNA, 2649 bp, synthetic construct
  misc_feature 1..2649: note = Description of Artificial Sequence: Synthetic coding sequence
  source 1..2649: mol_type = other DNA
atgcccgccctggcctgcctgagaagactgtgcagacacgtgagcccccaggccgtgctgttcctgctgttcatcttctgcctgttcagcgtgttcatcagcgcctactacctgtacggctggaagagaggcctggagcccagcgccgacgcccccgagcccgactgcggcgaccccccccccgtggcccccagcagactgctgcccctgaagcccgtgcaggccgccacccccagcagaaccgaccccctggtgctggtgttcgtggagagcctgtacagccagctgggccaggaggtggtggccatcctggagagcagcagattcaagtacagaaccgagatcgcccccggcaagggcgacatgcccaccctgaccgacaagggcagaggcagattcgccctgatcatctacgagaacatcctgaagtacgtgaacctggacgcctggaacagagagctgctggacaagtactgcgtggcctacggcgtgggcatcatcggcttcttcaaggccaacgagaacagcctgctgagcgcccagctgaagggcttccccctgttcctgcacagcaacctgggcctgaaggactgcagcatcaaccccaagagccccctgctgtacgtgaccagacccagcgaggtggagaagggcgtgctgcccggcgaggactggaccgtgttccagagcaaccacagcacctacgagcccgtgctgctggccaagaccagaagcagcgagagcatcccccacctgggcgccgacgccggcctgcacgccgccctgcacgccaccgtggtgcaggacctgggcctgcacgacggcatccagagagtgctgttcggcaacaacctgaacttctggctgcacaagctggtgttcgtggacgccgtggccttcctgaccggcaagagactgagcctgcccctggacagatacatcctggtggacatcgacgacatcttcgtgggcaaggagggcaccagaatgaaggtggaggacgtgaaggccctgttcgacacccagaacgagctgagagcccacatccccaacttcaccttcaacctgggctacagcggcaagttcttccacaccggcaccaacgccgaggacgccggcgacgacctgctgctgagctacgtgaaggagttctggtggttcccccacatgtggagccacatgcagccccacctgttccacaaccagagcgtgctggccgagcagatggccctgaacaagaagttcgccgtggagcacggcatccccaccgacatgggctacgccgtggccccccaccacagcggcgtgtaccccgtgcacgtgcagctgtacgaggcctggaagcaggtgtggagcatcagagtgaccagcaccgaggagtacccccacctgaagcccgccagatacagaagaggcttcatccacaacggcatcatggtgctgcccagacagacctgcggcctgttcacccacaccatcttctacaacgagtaccccggcggcagcagcgagctggacaagatcatcaacggcggcgagctgttcctgaccgtgctgctgaaccccatcagcatcttcatgacccacctgagcaactacggcaacgacagactgggcctgtacaccttcaagcacctggtgagattcctgcacagctggaccaacctgagactgcagaccctgccccccgtgcagctggcccagaagtacttccagatcttcagcgaggagaaggaccccctgtggcaggacccctgcgaggacaagagacacaaggacatctggagcaaggagaagacctgcgacagattccccaagctgctgatcatcggcccccagaagaccggcaccaccgccctgtacctgttcctgggcatgcaccccgacctgagcagcaactaccccagcagcgagaccttcgaggagatccagttcttcaacggccacaactaccacaagggcatcgactggtacatggagttcttccccatccccagcaacaccaccagcgacttctacttcgagaagagcgccaactacttcgacagcgaggtggcccccagaagagccgccgccctgctgcccaaggccaaggtgctgaccatcctgatcaaccccgccgacagagcctacagctggtaccagcaccagagagcccacgacgaccccgtggccctgaagtacaccttccacgaggtgatcaccgccggcagcgacgccagcagcaagctgagagccctgcagaacagatgcctggtgcccggctggtacgccacccacatcgagagatggctgagcgcctaccacgccaaccagatcctggtgctggacggcaagctgctgagaaccgagcccgccaaggtgatggacatggtgcagaagttcctgggcgtgaccaacaccatcgactaccacaagaccctggccttcgaccccaagaagggcttctggtgccagctgctggagggcggcaagaccaagtgcctgggcaagagcaagggcagaaagtaccccgagatggacctggacagcagagccttcctgaaggactactacagagaccacaacatcgagctgagcaagctgctgtacaagatgggccagaccctgcccacctggctgagagaggacctgcagaacaccagatag

SEQ ID NO: 90515 - DNA, 72 bp, synthetic construct
  misc_feature 1..72: note = Description of Artificial Sequence: Synthetic coding sequence
  source 1..72: mol_type = other DNA
atgcccgccctggcctgcctgagaagactgtgcagacacgtgagcccccaggccgtgctgttcctgctgtag

SEQ ID NO: 90516 - DNA, 480 bp, synthetic construct
  misc_feature 1..480: note = Description of Artificial Sequence: Synthetic coding sequence
  source 1..480: mol_type = other DNA
atgcccgccctggcctgcctgagaagactgtgcagacacgtgagcccccaggccgtgctgttcctgctgttcatcttctgcctgttcagcgtgttcatcagcgcctactacctgtacggctggaagagaggcctggagcccagcgccgacgcccccgagcccgactgcggcgaccccccccccgtggcccccagcagactgctgcccctgaagcccgtgcaggccgccacccccagcagaaccgaccccctggtgctggtgttcgtggagagcctgtacagccagctgggccaggaggtggtggccatcctggagagcagcagattcaagtacagaaccgagatcgcccccggcaagggcgacatgcccaccctgaccgacaagggcagaggcagattcgccctgatcatctacgagaacatcctgaagtacgtgaacctggacgcctggaacagagagctgctggacaagtactgctag

SEQ ID NO: 90517 - DNA, 207 bp, synthetic construct
  misc_feature 1..207: note = Description of Artificial Sequence: Synthetic coding sequence
  source 1..207: mol_type = other DNA
atgcccgccctggcctgcctgagaagactgtgcagacacgtgagcccccaggccgtgctgttcctgctgttcatcttctgcctgttcagcgtgttcatcagcgcctactacctgtacggctggaagagaggcctggagcccagcgccgacgcccccgagcccgactgcggcgaccccccccccgtggcccccagcagactgctgtag

SEQ ID NO: 90518 - DNA, 2283 bp, synthetic construct
  misc_feature 1..2283: note = Description of Artificial Sequence: Synthetic coding sequence
  source 1..2283: mol_type = other DNA
atgcccaccctgaccgacaacacccacggcagatacgtgctggtgatctacgagaacctgctgaagtacgtgaacctggacgcctggagcagagagctgctggacagatactgcgtggagtacggcgtgggcatcatcggcttcttcagagcccacgagcacagcctgctgagcgcccagctgaagggcttccccctgttcctgcacagcaacctgggcctgagagactaccaggtgaaccccagcgcccccctgctgcacctgaccagacccagcagactggagcccggccccctgcccggcgacgactggaccatcttccagagcaaccacagcacctacgagcccgtgctgctggccagcctgagacccgccgagcccgccgtgcccggccccgtgctgagaagagccagactgcccaccgtggtgcaggacctgggcctgcacgacggcatccagagagtgctgttcggccacggcctgagcttctggctgcacaagctgatcttcgtggacgccgtggcctacctgaccggcaagagactgtgcctggacctggacagatacatcctggtggacatcgacgacatcttcgtgggcaaggagggcaccagaatgaaggtggccgacgtggaggccctgctgaccacccagaacaagctgagaaccctggtgcccaacttcaccttcaacctgggcttcagcggcaagttctaccacaccggcaccgaggaggaggacgccggcgacgacatgctgctgaagcacagaaaggagttctggtggttcccccacatgtggagccacatgcagccccacctgttccacaacagaagcgtgctggccgaccagatgagactgaacaagcagttcgccctggagcacggcatccccaccgacctgggctacgccgtggccccccaccacagcggcgtgtaccccatccacacccagctgtacgaggcctggaagagcgtgtggggcatccaggtgaccagcaccgaggagtacccccacctgagacccgccagatacagaagaggcttcatccacaacggcatcatggtgctgcccagacagacctgcggcctgttcacccacaccatcttctacaacgagtaccccggcggcagcagagagctggacagaagcatcagaggcggcgagctgttcctgaccgtgctgctgaaccccatcagcatcttcatgacccacctgagcaactacggcaacgacagactgggcctgtacaccttcgagagcctggtgagattcctgcagtgctggaccagactgagactgcagaccctgccccccgtgcccctggcccagaagtacttcgagctgttcccccaggagagaagccccctgtggcagaacccctgcgacgacaagagacacaaggacatctggagcaaggagaagacctgcgacagactgcccaagttcctgatcgtgggcccccagaagaccggcaccaccgccatccacttcttcctgagcctgcaccccgccgtgaccagcagcttccccagccccagcaccttcgaggagatccagttcttcaacagccccaactaccacaagggcatcgactggtacatggacttcttccccgtgcccagcaacgccagcaccgacttcctgttcgagaagagcgccacctacttcgacagcgaggtggtgcccagaagaggcgccgccctgctgcccagagccaagatcatcaccgtgctgaccaaccccgccgacagagcctacagctggtaccagcaccagagagcccacggcgaccccgtggccctgaactacaccttctaccaggtgatcagcgccagcagccagacccccctggccctgagaagcctgcagaacagatgcctggtgcccggctactacagcacccacctgcagagatggctgacctactaccccagcggccagctgctgatcgtggacggccaggagctgagaaccaaccccgccgccagcatggagagcatccagaagttcctgggcatcacccccttcctgaactacaccagaaccctgagattcgacgacgacaagggcttctggtgccagggcctggagggcggcaagaccagatgcctgggcagaagcaagggcagaagataccccgacatggacaccgagagcagactgttcctgaccgacttcttcagaaaccacaacctggagctgagcaagctgctgagcagactgggccagcccgtgcccagctggctgagagaggagctgcagcacagcagcctgggctag

SEQ ID NO: 90519 - DNA, 2652 bp, synthetic construct
  misc_feature 1..2652: note = Description of Artificial Sequence: Synthetic coding sequence
  source 1..2652: mol_type = other DNA
atgctgcagctgtggaaggtggtgagacccgccagacagctggagctgcacagactgatcctgctgctgatcgccttcagcctgggcagcatgggcttcctggcctactacgtgagcaccagccccaaggccaaggagcccctgcccctgcccctgggcgactgcagcagcggcggcgccgccggccccggccccgccagaccccccgtgccccccagaccccccagaccccccgagaccgccagaaccgagcccgtggtgctggtgttcgtggagagcgcctacagccagctgggccaggagatcgtggccatcctggagagcagcagattcagatacagcaccgagctggcccccggcagaggcgacatgcccaccctgaccgacaacacccacggcagatacgtgctggtgatctacgagaacctgctgaagtacgtgaacctggacgcctggagcagagagctgctggacagatactgcgtggagtacggcgtgggcatcatcggcttcttcagagcccacgagcacagcctgctgagcgcccagctgaagggcttccccctgttcctgcacagcaacctgggcctgagagactaccaggtgaaccccagcgcccccctgctgcacctgaccagacccagcagactggagcccggccccctgcccggcgacgactggaccatcttccagagcaaccacagcacctacgagcccgtgctgctggccagcctgagacccgccgagcccgccgtgcccggccccgtgctgagaagagccagactgcccaccgtggtgcaggacctgggcctgcacgacggcatccagagagtgctgttcggccacggcctgagcttctggctgcacaagctgatcttcgtggacgccgtggcctacctgaccggcaagagactgtgcctggacctggacagatacatcctggtggacatcgacgacatcttcgtgggcaaggagggcaccagaatgaaggtggccgacgtggaggccctgctgaccacccagaacaagctgagaaccctggtgcccaacttcaccttcaacctgggcttcagcggcaagttctaccacaccggcaccgaggaggaggacgccggcgacgacatgctgctgaagcacagaaaggagttctggtggttcccccacatgtggagccacatgcagccccacctgttccacaacagaagcgtgctggccgaccagatgagactgaacaagcagttcgccctggagcacggcatccccaccgacctgggctacgccgtggccccccaccacagcggcgtgtaccccatccacacccagctgtacgaggcctggaagagcgtgtggggcatccaggtgaccagcaccgaggagtacccccacctgagacccgccagatacagaagaggcttcatccacaacggcatcatggtgctgcccagacagacctgcggcctgttcacccacaccatcttctacaacgagtaccccggcggcagcagagagctggacagaagcatcagaggcggcgagctgttcctgaccgtgctgctgaaccccatcagcatcttcatgacccacctgagcaactacggcaacgacagactgggcctgtacaccttcgagagcctggtgagattcctgcagtgctggaccagactgagactgcagaccctgccccccgtgcccctggcccagaagtacttcgagctgttcccccaggagagaagccccctgtggcagaacccctgcgacgacaagagacacaaggacatctggagcaaggagaagacctgcgacagactgcccaagttcctgatcgtgggcccccagaagaccggcaccaccgccatccacttcttcctgagcctgcaccccgccgtgaccagcagcttccccagccccagcaccttcgaggagatccagttcttcaacagccccaactaccacaagggcatcgactggtacatggacttcttccccgtgcccagcaacgccagcaccgacttcctgttcgagaagagcgccacctacttcgacagcgaggtggtgcccagaagaggcgccgccctgctgcccagagccaagatcatcaccgtgctgaccaaccccgccgacagagcctacagctggtaccagcaccagagagcccacggcgaccccgtggccctgaactacaccttctaccaggtgatcagcgccagcagccagacccccctggccctgagaagcctgcagaacagatgcctggtgcccggctactacagcacccacctgcagagatggctgacctactaccccagcggccagctgctgatcgtggacggccaggagctgagaaccaaccccgccgccagcatggagagcatccagaagttcctgggcatcacccccttcctgaactacaccagaaccctgagattcgacgacgacaagggcttctggtgccagggcctggagggcggcaagaccagatgcctgggcagaagcaagggcagaagataccccgacatggacaccgagagcagactgttcctgaccgacttcttcagaaaccacaacctggagctgagcaagctgctgagcagactgggccagcccgtgcccagctggctgagagaggagctgcagcacagcagcctgggctag

SEQ ID NO: 90520 - DNA, 450 bp, synthetic construct
  misc_feature 1..450: note = Description of Artificial Sequence: Synthetic coding sequence
  source 1..450: mol_type = other DNA
ggcgaccccgtggccctgaactacaccttctaccaggtgatcagcgccagcagccagacccccctggccctgagaagcctgcagaacagatgcctggtgcccggctactacagcacccacctgcagagatggctgacctactaccccagcggccagctgctgatcgtggacggccaggagctgagaaccaaccccgccgccagcatggagagcatccagaagttcctgggcatcacccccttcctgaactacaccagaaccctgagattcgacgacgacaagggcttctggtgccagggcctggagggcggcaagaccagatgcctgggcagaagcaagggcagaagataccccgacatggacaccgaggtgagcaaggccagaggcagaggcatccccctgcacttccaggacctgatcctgtgccccaccagctaccacttctgctag

SEQ ID NO: 90521 - DNA, 696 bp, synthetic construct
  misc_feature 1..696: note = Description of Artificial Sequence: Synthetic coding sequence
  source 1..696: mol_type = other DNA
atgagagtgcccgtgttcgaggacatcaaggacgagaccgaggaggagaagatcggcgaggaggagaacgaggaggaccaggtgttctacaagcccgtgatcgaggacctgagcatggagctggccagaaagtgcaccgagctgatcagcgacatcagatacaaggaggagttcaagaagagcaaggacaagtgcaccttcgtgaccgacagccccatgctgaaccacgtgaagaacatcggcgccttcatcagcgaggccaagtacaagggcaccatcaaggccgacctgagcaacagcctgtacaagagaatgcccgccaccatcgacagcgtgttcgccggcgaggtgacccagctgcagagcgaggtggcctacaagcagaagcacgacgccgccaagggcttcagcgactacgcccacatgaaggagccccccgaggtgaagcacgccatggaggtgaacaagcaccagagcaacatcagctacagaaaggacgtgcaggacacccacacctacagcgccgagctggacagacccgacatcaagatggccacccagatcagcaagatcatcagcaacgccgagtacaagaagggccagggcatcatgaacaaggagcccgccgtgatcggcagacccgacttcgagcacgccgtggaggccagcaagctgagcagccaggtgagactgtag

SEQ ID NO: 90522 - DNA, 3045 bp, synthetic construct
  misc_feature 1..3045: note = Description of Artificial Sequence: Synthetic coding sequence
  source 1..3045: mol_type = other DNA
atgagagtgcccgtgttcgaggacatcaaggacgagaccgaggaggagaagatcggcgaggaggagaacgaggaggaccaggtgttctacaagcccgtgatcgaggacctgagcatggagctggccagaaagtgcaccgagctgatcagcgacatcagatacaaggaggagttcaagaagagcaaggacaagtgcaccttcgtgaccgacagccccatgctgaaccacgtgaagaacatcggcgccttcatcagcgaggccaagtacaagggcaccatcaaggccgacctgagcaacagcctgtacaagagaatgcccgccaccatcgacagcgtgttcgccggcgaggtgacccagctgcagagcgaggtggcctacaagcagaagcacgacgccgccaagggcttcagcgactacgcccacatgaaggagccccccgaggtgaagcacgccatggaggtgaacaagcaccagagcaacatcagctacagaaaggacgtgcaggacacccacacctacagcgccgagctggacagacccgacatcaagatggccacccagatcagcaagatcatcagcaacgccgagtacaagaagggccagggcatcatgaacaaggagcccgccgtgatcggcagacccgacttcgagcacgccgtggaggccagcaagctgagcagccagatcaagtacaaggagaagttcgacaacgagatgaaggacaagaagcaccactacaaccccctggagagcgccagcttcagacagaaccagctggccgccaccctggccagcaacgtgaagtacaagaaggacatccagaacatgcacgaccccgtgagcgacctgcccaacctgctgttcctggaccacgtgctgaaggccagcaagatgctgagcggcagagagtacaagaagctgttcgaggagaacaagggcatgtaccacttcgacgccgacgccgtggagcacctgcaccacaagggcaacgccgtgctgcagagccaggtgaagtacaaggaggagtacgagaagaacaagggcaagcccatgctggagttcgtggagacccccagctaccaggccagcaaggaggcccagaagatgcagagcgagaaggtgtacaaggaggacttcgagaaggagatcaagggcagaagcagcctggacctggacaagacccccgagttcctgcacgtgaagtacatcaccaacctgctgagagagaaggagtacaagaaggacctggagaacgagatcaagggcaagggcatggagctgaacagcgaggtgctggacatccagagagccaagagagccagcgagatggccagcgagaaggagtacaagaaggacctggagagcatcatcaagggcaagggcatgcaggccggcaccgacaccctggagatgcagcacgccaagaaggccgccgagatcgccagcgagaaggactacaagagagacctggagaccgagatcaagggcaagggcatgcaggtgagcaccgacaccctggacgtgcagagagccaagaaggccagcgagatggccagccagaagcagtacaagaaggacctggagaacgagatcaagggcaagggcatgcaggtgagcatggacatccccgacatcctgagagccaagagaaccagcgagatctacagccagagaaagtacaaggacgaggccgagaagatgctgagcaactacagcaccatcgccgacacccccgagatccagagaatcaagaccacccagcagaacatcagcgccgtgttctacaagaaggaggtgggcgccggcaccgccgtgaaggacagccccgagatcgagagagtgaagaagaaccagcagaacatcagcagcgtgaagtacaaggaggagatcaagcacgccaccgccatcagcgacccccccgagctgaagagagtgaaggagaaccagaagaacatcagcaacctgcagtacaaggagcagaactacaaggccacccccgtgagcatgacccccgagatcgagagagtgagaagaaaccaggagcagctgagcgccgtgaagtacaagggcgagctgcagagaggcaccgccatcagcgacccccccgagctgaagagagccaaggagaaccagaagaacatcagcaacgtgtactacagaggccagctgggcagagccaccaccctgagcgtgacccccgagatggagagagtgaagaagaaccaggagaacatcagcagcgtgaagtacacccaggaccacaagcagatgaagggcagacccagcctgatcctggacacccccgccatgagacacgtgaaggaggcccagaaccacatcagcatggtgaagtaccacgaggacttcgagaagaccaagggcagaggcttcacccccgtggtggacgaccccgtgaccgagagagtgagaaagaacacccaggtggtgagcgacgccgcctacaagggcgtgcacccccacatcgtggagatggacagaagacccggcatcatcgtggacctgaaggtgtggagaaccgaccccggcagcatcttcgacctggaccccctggaggacaacatccagagcagaagcctgcacatgctgagcgagaaggccagccactacagaagacactggagcagaagccacagcagcagcaccttcggcaccggcctgggcgacgacagaagcgagatcagcgagatctaccccagcttcagctgctgcagcgaggtgaccagacccagcgacgagggcgcccccgtgctgcccggcgcctaccagcagagccacagccagggctacggctacatgcaccagaccagcgtgagcagcatgagaagcatgcagcacagccccaacctgagaacctacagagccatgtacgactacagcgcccaggacgaggacgaggtgagcttcagagacggcgactacatcgtgaacgtgcagcccatcgacgacggctggatgtacggcaccgtgcagagaaccggcagaaccggcatgctgcccgccaactacatcgagttcgtgaactag

SEQ ID NO: 90523 - DNA, 711 bp, synthetic construct
  misc_feature 1..711: note = Description of Artificial Sequence: Synthetic coding sequence
  source 1..711: mol_type = other DNA
atgctgcacttctactacgagtggctgcacagcggcagcagaggcgccgtgcccaagcccctgcactaccccaagcagagcttcaccaccgtggccgacacccccgagaacctgagactgaagcagcagagcgagctgcagagccaggtgaagtacaagagagacttcgaggagagcaagggcagaggcttcagcatcgtgaccgacacccccgagctgcagagactgaagagaacccaggagcagatcagcaacgtgaagtaccacgaggacttcgagaagaccaagggcagaggcttcacccccgtggtggacgaccccgtgaccgagagagtgagaaagaacacccaggtggtgagcgacgccgcctacaagggcgtgcacccccacatcgtggagatggacagaagacccggcatcatcgtggcccccgtgctgcccggcgcctaccagcagagccacagccagggctacggctacatgcaccagaccagcgtgagcagcatgagaagcatgcagcacagccccaacctgagaacctacagagccatgtacgactacagcgcccaggacgaggacgaggtgagcttcagagacggcgactacatcgtgaacgtgcagcccatcgacgacggctggatgtacggcaccgtgcagagaaccggcagaaccggcatgctgcccgccaactacatcgagttcgtgaactag

SEQ ID NO: 90524 - DNA, 813 bp, synthetic construct
  misc_feature 1..813: note = Description of Artificial Sequence: Synthetic coding sequence
  source 1..813: mol_type = other DNA
atgaacccccagtgcgccagatgcggcaaggtggtgtaccccaccgagaaggtgaactgcctggacaagtactggcacaagggctgcttccactgcgaggtgtgcaagatggccctgaacatgaacaactacaagggctacgagaagaagccctactgcaacgcccactaccccaagcagagcttcaccaccgtggccgacacccccgagaacctgagactgaagcagcagagcgagctgcagagccaggtgaagtacaagagagacttcgaggagagcaagggcagaggcttcagcatcgtgaccgacacccccgagctgcagagactgaagagaacccaggagcagatcagcaacgtgaagtaccacgaggacttcgagaagaccaagggcagaggcttcacccccgtggtggacgaccccgtgaccgagagagtgagaaagaacacccaggtggtgagcgacgccgcctacaagggcgtgcacccccacatcgtggagatggacagaagacccggcatcatcgtggcccccgtgctgcccggcgcctaccagcagagccacagccagggctacggctacatgcaccagaccagcgtgagcagcatgagaagcatgcagcacagccccaacctgagaacctacagagccatgtacgactacagcgcccaggacgaggacgaggtgagcttcagagacggcgactacatcgtgaacgtgcagcccatcgacgacggctggatgtacggcaccgtgcagagaaccggcagaaccggcatgctgcccgccaactacatcgagttcgtgaactag

SEQ ID NO: 90525 - DNA, 354 bp, synthetic construct
  misc_feature 1..354: note = Description of Artificial Sequence: Synthetic coding sequence
  source 1..354: mol_type = other DNA
atgagaaacaactgcaccgccagcctgatgaaggtgttctacaagcccgtgatcgaggacctgagcatggagctggccagaaagtgcaccgagctgatcagcgacatcagatacaaggaggagttcaagaagagcaaggacaagtgcaccttcgtgaccgacagccccatgctgaaccacgtgaagaacatcggcgccttcatcagcgaggccaagtacaagggcaccatcaaggccgacctgagcaacagcctgtacaagagaatgcccgccaccatcgacagcgtgttcgccggcgaggtgacccagctgcagagcgaggtggcctacaagcagaagcacgacgccgcctag

SEQ ID NO: 90526 - DNA, 20010 bp, synthetic construct
  misc_feature 1..20010: note = Description of Artificial Sequence: Synthetic coding sequence
  source 1..20010: mol_type = other DNA
atggccgacgacgaggactacgaggaggtggtggagtactacaccgaggaggtggtgtacgaggaggtgcccggcgagaccatcaccaagatctacgagaccaccaccaccagaaccagcgactacgagcagagcgagaccagcaagcccgccctggcccagcccgccctggcccagcccgccagcgccaagcccgtggagagaagaaaggtgatcagaaagaaggtggaccccagcaagttcatgaccccctacatcgcccacagccagaagatgcaggacctgttcagccccaacaagtacaaggagaagttcgagaagaccaagggccagccctacgccagcaccaccgacacccccgagctgagaagaatcaagaaggtgcaggaccagctgagcgaggtgaagtacagaatggacggcgacgtggccaagaccatctgccacgtggacgagaaggccaaggacatcgagcacgccaagaaggtgagccagcaggtgagcaaggtgctgtacaagcagaactgggaggacaccaaggacaagtacctgctgccccccgacgcccccgagctggtgcaggccgtgaagaacaccgccatgttcagcaagaagctgtacaccgaggactgggaggccgacaagagcctgttctacccctacaacgacagccccgagctgagaagagtggcccaggcccagaaggccctgagcgacgtggcctacaagaagggcctggccgagcagcaggcccagttcacccccctggccgacccccccgacatcgagttcgccaagaaggtgaccaaccaggtgagcaagcagaagtacaaggaggactacgagaacaagatcaagggcaagtggagcgagaccccctgcttcgaggtggccaacgccagaatgaacgccgacaacatcagcaccagaaagtaccaggaggacttcgagaacatgaaggaccagatctacttcatgcagaccgagacccccgagtacaagatgaacaagaaggccggcgtggccgccagcaaggtgaagtacaaggaggactacgagaagaacaagggcaaggccgactacaacgtgctgcccgccagcgagaacccccagctgagacagctgaaggccgccggcgacgccctgagcgacaagctgtacaaggagaactacgagaagaccaaggccaagagcatcaactactgcgagacccccaagttcaagctggacaccgtgctgcagaacttcagcagcgacaagaagtacaaggacagctacctgaaggacatcctgggccactacgtgggcagcttcgaggacccctaccacagccactgcatgaaggtgaccgcccagaacagcgacaagaactacaaggccgagtacgaggaggacagaggcaagggcttcttcccccagaccatcacccaggagtacgaggccatcaagaagctggaccagtgcaaggaccacacctacaaggtgcaccccgacaagaccaagttcacccaggtgaccgacagccccgtgctgctgcaggcccaggtgaacagcaagcagctgagcgacctgaactacaaggccaagcacgagagcgagaagttcaagtgccacatcccccccgacacccccgccttcatccagcacaaggtgaacgcctacaacctgagcgacaacctgtacaagcaggactgggagaagagcaaggccaagaagttcgacatcaaggtggacgccatccccctgctggccgccaaggccaacaccaagaacaccagcgacgtgatgtacaagaaggactacgagaagaacaagggcaagatgatcggcgtgctgagcatcaacgacgaccccaagatgctgcacagcctgaaggtggccaagaaccagagcgacagactgtacaaggagaactacgagaagaccaaggccaagagcatgaactactgcgagacccccaagtaccagctggacacccagctgaagaacttcagcgaggccagatacaaggacctgtacgtgaaggacgtgctgggccactacgtgggcagcatggaggacccctaccacacccactgcatgaaggtggccgcccagaacagcgacaagagctacaaggccgagtacgaggaggacaagggcaagtgctacttcccccagaccatcacccaggagtacgaggccatcaagaagctggaccagtgcaaggaccacacctacaaggtgcaccccgacaagaccaagttcaccgccgtgaccgacagccccgtgctgctgcaggcccagctgaacaccaagcagctgagcgacctgaactacaaggccaagcacgagggcgagaagttcaagtgccacatccccgccgacgccccccagttcatccagcacagagtgaacgcctacaacctgagcgacaacgtgtacaagcaggactgggagaagagcaaggccaagaagttcgacatcaaggtggacgccatccccctgctggccgccaaggccaacaccaagaacaccagcgacgtgatgtacaagaaggactacgagaagagcaagggcaagatgatcggcgccctgagcatcaacgacgaccccaagatgctgcacagcctgaagaccgccaagaaccagagcgacagagagtacagaaaggactacgagaagagcaagaccatctacaccgcccccctggacatgctgcaggtgacccaggccaagaagagccaggccatcgccagcgacgtggactacaagcacatcctgcacagctacagctacccccccgacagcatcaacgtggacctggccaagaaggcctacgccctgcagagcgacgtggagtacaaggccgactacaacagctggatgaagggctgcggctgggtgcccttcggcagcctggagatggagaaggccaagagagccagcgacatcctgaacgagaagaagtacagacagcaccccgacaccctgaagttcaccagcatcgaggacgcccccatcaccgtgcagagcaagatcaaccaggcccagagaagcgacatcgcctacaaggccaagggcgaggagatcatccacaagtacaacctgccccccgacctgccccagttcatccaggccaaggtgaacgcctacaacatcagcgagaacatgtacaaggccgacctgaaggacctgagcaagaagggctacgacctgagaaccgacgccatccccatcagagccgccaaggccgccagacaggccgccagcgacgtgcagtacaagaaggactacgagaaggccaagggcaagatggtgggcttccagagcctgcaggacgaccccaagctggtgcactacatgaacgtggccaagatccagagcgacagagagtacaagaaggactacgagaagaccaagagcaagtacaacaccccccacgacatgttcaacgtggtggccgccaagaaggcccaggacgtggtgagcaacgtgaactacaagcacagcctgcaccactacacctacctgcccgacgccatggacctggagctgagcaagaacatgatgcagatccagagcgacaacgtgtacaaggaggactacaacaactggatgaagggcatcggctggatccccatcggcagcctggacgtggagaaggtgaagaaggccggcgacgccctgaacgagaagaagtacagacagcaccccgacaccctgaagttcaccagcatcgtggacagccccgtgatggtgcaggccaagcagaacaccaagcaggtgagcgacatcctgtacaaggccaagggcgaggacgtgaagcacaagtacaccatgagccccgacctgccccagttcctgcaggccaagtgcaacgcctacaacatcagcgacgtgtgctacaagagagactggtacgacctgatcgccaagggcaacaacgtgctgggcgacgccatccccatcaccgccgccaaggccagcagaaacatcgccagcgactacaagtacaaggaggcctacgagaagagcaagggcaagcacgtgggcttcagaagcctgcaggacgaccccaagctggtgcactacatgaacgtggccaagctgcagagcgacagagagtacaagaagaactacgagaacaccaagaccagctaccacacccccggcgacatggtgagcatcaccgccgccaagatggcccaggacgtggccaccaacgtgaactacaagcagcccctgcaccactacacctacctgcccgacgccatgagcctggagcacaccagaaacgtgaaccagatccagagcgacaacgtgtacaaggacgagtacaacagcttcctgaagggcatcggctggatccccatcggcagcctggaggtggagaaggtgaagaaggccggcgacgccctgaacgagagaaagtacagacagcaccccgacaccgtgaagttcaccagcgtgcccgacagcatgggcatggtgctggcccagcacaacaccaagcagctgagcgacctgaactacaaggtggagggcgagaagctgaagcacaagtacaccatcgaccccgagctgccccagttcatccaggccaaggtgaacgccctgaacatgagcgacgcccactacaaggccgactggaagaagaccatcgccaagggctacgacctgagacccgacgccatccccatcgtggccgccaagagcagcagaaacatcgccagcgactgcaagtacaaggaggcctacgagaaggccaagggcaagcaggtgggcttcctgagcctgcaggacgaccccaagctggtgcactacatgaacgtggccaagatccagagcgacagagagtacaagaagggctacgaggccagcaagaccaagtaccacacccccctggacatggtgagcgtgaccgccgccaagaagagccaggaggtggccaccaacgccaactacagacagagctaccaccactacaccctgctgcccgacgccctgaacgtggagcacagcagaaacgccatgcagatccagagcgacaacctgtacaagagcgacttcaccaactggatgaagggcatcggctgggtgcccatcgagagcctggaggtggagaaggccaagaaggccggcgagatcctgagcgagaagaagtacagacagcaccccgagaagctgaagttcacctacgccatggacaccatggagcaggccctgaacaagagcaacaagctgaacatggacaagagactgtacaccgagaagtggaacaaggacaagaccaccatccacgtgatgcccgacacccccgacatcctgctgagcagagtgaaccagatcaccatgagcgacaagctgtacaaggccggctgggaggaggagaagaagaagggctacgacctgagacccgacgccatcgccatcaaggccgccagagccagcagagacatcgccagcgactacaagtacaagaaggcctacgagcaggccaagggcaagcacatcggcttcagaagcctggaggacgaccccaagctggtgcacttcatgcaggtggccaagatgcagagcgacagagagtacaagaagggctacgagaagagcaagaccagcttccacacccccgtggacatgctgagcgtggtggccgccaagaagagccaggaggtggccaccaacgccaactacagaaacgtgatccacacctacaacatgctgcccgacgccatgagcttcgagctggccaagaacatgatgcagatccagagcgacaaccagtacaaggccgactacgccgacttcatgaagggcatcggctggctgcccctgggcagcctggaggccgagaagaacaagaaggccatggagatcatcagcgagaagaagtacagacagcaccccgacaccctgaagtacagcaccctgatggacagcatgaacatggtgctggcccagaacaacgccaagatcatgaacgagcacctgtacaagcaggcctgggaggccgacaagaccaaggtgcacatcatgcccgacatcccccagatcatcctggccaaggccaacgccatcaacatgagcgacaagctgtacaagctgagcctggaggagagcaagaagaagggctacgacctgagacccgacgccatccccatcaaggccgccaaggccagcagagacatcgccagcgactacaagtacaagtacaactacgagaagggcaagggcaagatggtgggcttcagaagcctggaggacgaccccaagctggtgcacagcatgcaggtggccaagatgcagagcgacagagagtacaagaagaactacgagaacaccaagaccagctaccacacccccgccgacatgctgagcgtgaccgccgccaaggacgcccaggccaacatcaccaacaccaactacaagcacctgatccacaagtacatcctgctgcccgacgccatgaacatcgagctgaccagaaacatgaacagaatccagagcgacaacgagtacaagcaggactacaacgagtggtacaagggcctgggctggagccccgccggcagcctggaggtggagaaggccaagaaggccaccgagtacgccagcgaccagaagtacagacagcaccccagcaacttccagttcaagaagctgaccgacagcatggacatggtgctggccaagcagaacgcccacaccatgaacaagcacctgtacaccatcgactggaacaaggacaagaccaagatccacgtgatgcccgacacccccgacatcctgcaggccaagcagaaccagaccctgtacagccagaagctgtacaagctgggctgggaggaggccctgaagaagggctacgacctgcccgtggacgccatcagcgtgcagctggccaaggccagcagagacatcgccagcgactacaagtacaagcagggctacagaaagcagctgggccaccacgtgggcttcagaagcctgcaggacgaccccaagctggtgctgagcatgaacgtggccaagatgcagagcgagagagagtacaagaaggacttcgagaagtggaagaccaagttcagcagccccgtggacatgctgggcgtggtgctggccaagaagtgccaggagctggtgagcgacgtggactacaagaactacctgcaccagtggacctgcctgcccgaccagaacgacgtggtgcaggccaagaaggtgtacgagctgcagagcgagaacctgtacaagagcgacctggagtggctgagaggcatcggctggagccccctgggcagcctggaggccgagaagaacaagagagccagcgagatcatcagcgagaagaagtacagacagccccccgacagaaacaagttcaccagcatccccgacgccatggacatcgtgctggccaagaccaacgccaagaacagaagcgacagactgtacagagaggcctgggacaaggacaagacccagatccacatcatgcccgacacccccgacatcgtgctggccaaggccaacctgatcaacaccagcgacaagctgtacagaatgggctacgaggagctgaagagaaagggctacgacctgcccgtggacgccatccccatcaaggccgccaaggccagcagagagatcgccagcgagtacaagtacaaggagggcttcagaaagcagctgggccaccacatcggcgccagaaacatcgaggacgaccccaagatgatgtggagcatgcacgtggccaagatccagagcgacagagagtacaagaaggacttcgagaagtggaagaccaagttcagcagccccgtggacatgctgggcgtggtgctggccaagaagtgccagaccctggtgagcgacgtggactacaagaactacctgcaccagtggacctgcctgcccgaccagagcgacgtgatccacgccagacaggcctacgacctgcagagcgacaacctgtacaagagcgacctgcagtggctgaagggcatcggctggatgaccagcggcagcctggaggacgagaagaacaagagagccacccagatcctgagcgaccacgtgtacagacagcaccccgaccagttcaagttcagcagcctgatggacagcatccccatggtgctggccaagaacaacgccatcaccatgaaccacagactgtacaccgaggcctgggacaaggacaagaccaccgtgcacatcatgcccgacacccccgaggtgctgctggccaagcagaacaaggtgaactacagcgagaagctgtacaagctgggcctggaggaggccaagagaaagggctacgacatgagagtggacgccatccccatcaaggccgccaaggccagcagagacatcgccagcgagttcaagtacaaggagggctacagaaagcagctgggccaccacatcggcgccagagccatcagagacgaccccaagatgatgtggagcatgcacgtggccaagatccagagcgacagagagtacaagaaggacttcgagaagtggaagaccaagttcagcagccccgtggacatgctgggcgtggtgctggccaagaagtgccagaccctggtgagcgacgtggactacaagaactacctgcaccagtggacctgcctgcccgaccagagcgacgtgatccacgccagacaggcctacgacctgcagagcgacaacatgtacaagagcgacctgcagtggatgagaggcatcggctgggtgagcatcggcagcctggacgtggagaagtgcaagagagccaccgagatcctgagcgacaagatctacagacagccccccgacagattcaagttcaccagcgtgaccgacagcctggagcaggtgctggccaagaacaacgccatcaccatgaacaagagactgtacaccgaggcctgggacaaggacaagacccagatccacatcatgcccgacacccccgagatcatgctggccagacagaacaagatcaactacagcgagaccctgtacaagctggccaacgaggaggccaagaagaagggctacgacctgagaagcgacgccatccccatcgtggccgccaaggccagcagagacgtgatcagcgactacaagtacaaggacggctacagaaagcagctgggccaccacatcggcgccagaaacatcgaggacgaccccaagatgatgtggagcatgcacgtggccaagatccagagcgacagagagtacaagaaggacttcgagaagtggaagaccaagttcagcagccccgtggacatgctgggcgtggtgctggccaagaagtgccagaccctggtgagcgacgtggactacaagaactacctgcacgagtggacctgcctgcccgaccagaacgacgtgatccacgccagacaggcctacgacctgcagagcgacaacatctacaagagcgacctgcagtggctgagaggcatcggctgggtgcccatcggcagcatggacgtggtgaagtgcaagagagccgccgagatcctgagcgacaacatctacagacagccccccgacaagctgaagttcaccagcgtgaccgacagcctggagcaggtgctggccaagaacaacgccctgaacatgaacaagagactgtacaccgaggcctgggacaaggacaagacccaggtgcacatcatgcccgacacccccgagatcatgctggccagacagaacaagatcaactacagcgagagcctgtacagacaggccatggaggaggccaagaaggagggctacgacctgagaagcgacgccatccccatcgtggccgccaaggccagcagagacatcgccagcgactacaagtacaaggaggcctacagaaagcagctgggccaccacatcggcgccagagccgtgcacgacgaccccaagatcatgtggagcctgcacatcgccaaggtgcagagcgacagagagtacaagaaggacttcgagaagtacaagaccagatacagcagccccgtggacatgctgggcatcgtgctggccaagaagtgccagaccctggtgagcgacgtggactacaagcaccccctgcacgagtggatctgcctgcccgaccagaacgacatcatccacgccagaaaggcctacgacctgcagagcgacaacctgtacaagagcgacctggagtggatgaagggcatcggctgggtgcccatcgacagcctggaggtggtgagagccaagagagccggcgagctgctgagcgacaccatctacagacagagacccgagaccctgaagttcaccagcatcaccgacacccccgagcaggtgctggccaagaacaacgccctgaacatgaacaagagactgtacaccgaggcctgggacaacgacaagaagaccatccacgtgatgcccgacacccccgagatcatgctggccaagctgaacagaatcaactacagcgacaagctgtacaagctggccctggaggagagcaagaaggagggctacgacctgagactggacgccatccccatccaggccgccaaggccagcagagacatcgccagcgactacaagtacaaggagggctacagaaagcagctgggccaccacatcggcgccagaaacatcaaggacgaccccaagatgatgtggagcatccacgtggccaagatccagagcgacagagagtacaagaaggagttcgagaagtggaagaccaagttcagcagccccgtggacatgctgggcgtggtgctggccaagaagtgccagatcctggtgagcgacatcgactacaagcaccccctgcacgagtggacctgcctgcccgaccagaacgacgtgatccaggccagaaaggcctacgacctgcagagcgacgccatctacaagagcgacctggagtggctgagaggcatcggctgggtgcccatcggcagcgtggaggtggagaaggtgaagagagccggcgagatcctgagcgacagaaagtacagacagcccgccgaccagctgaagttcacctgcatcaccgacacccccgagatcgtgctggccaagaacaacgccctgaccatgagcaagcacctgtacaccgaggcctgggacgccgacaagaccagcatccacgtgatgcccgacacccccgacatcctgctggccaagagcaacagcgccaacatcagccagaagctgtacaccaagggctgggacgagagcaagatgaaggactacgacctgagagccgacgccatcagcatcaagagcgccaaggccagcagagacatcgccagcgactacaagtacaaggaggcctacgagaagcagaagggccaccacatcggcgcccagagcatcgaggacgaccccaagatcatgtgcgccatccacgccggcaagatccagagcgagagagagtacaagaaggagttccagaagtggaagaccaagttcagcagccccgtggacatgctgagcatcctgctggccaagaagtgccagaccctggtgaccgacatcgactacagaaactacctgcacgagtggacctgcatgcccgaccagaacgacatcatccaggccaagaaggcctacgacctgcagagcgacgccctgtacaaggccgacctggagtggctgagaggcatcggctggatgccccagggcagccccgaggtgctgagagtgaagaacgcccagaacatcttctgcgacagcgtgtacagaacccccgtggtgaacctgaagtacaccagcatcgtggacacccccgaggtggtgctggccaagagcaacgccgagaacatcagcatccccaagtacagagaggtgtgggacaaggacaagaccagcatccacatcatgcccgacacccccgagatcaacctggccagagccaacgccctgaacgtgagcaacaagctgtacagagagggctgggacgagatgaaggccggctgcgacgtgagactggacgccatccccatccaggccgccaaggccagcagagagatcgccagcgactacaagtacaagctggaccacgagaagcagaagggccactacgtgggcaccctgaccgccagagacgacaacaagatcagatgggccctgatcgccgacaagctgcagaacgagagagagtacagactggactgggccaagtggaaggccaagatccagagccccgtggacatgctgagcatcctgcacagcaagaacagccaggccctggtgagcgacatggactacagaaactacctgcaccagtggacctgcatgcccgaccagaacgacgtgatccaggccaagaaggcctacgagctgcagagcgacaacgtgtacaaggccgacctggagtggctgagaggcatcggctggatgcccaacgacagcgtgagcgtgaaccacgccaagcacgccgccgacatcttcagcgagaagaagtacagaaccaagatcgagaccctgaacttcacccccgtggacgacagagtggactacgtgaccgccaagcagagcggcgagatcctggacgacatcaagtacagaaaggactggaacgccaccaagagcaagtacaccctgaccgagacccccctgctgcacaccgcccaggaggccgccagaatcctggaccagtacctgtacaaggagggctgggagagacagaaggccaccggctacatcctgccccccgacgccgtgcccttcgtgcacgcccaccactgcaacgacgtgcagagcgagctgaagtacaaggccgagcacgtgaagcagaagggccactacgtgggcgtgcccaccatgagagacgaccccaagctggtgtggttcgagcacgccggccagatccagaacgagagactgtacaaggaggactaccacaagaccaaggccaagatcaacatccccgccgacatggtgagcgtgctggccgccaagcagggccagaccctggtgagcgacatcgactacagaaactacctgcaccagtggatgtgccaccccgaccagaacgacgtgatccaggccagaaaggcctacgacctgcagagcgacaacgtgtacagagccgacctggagtggctgagaggcatcggctggatccccctggacagcgtggaccacgtgagagtgaccaagaaccaggagatgatgagccagatcaagtacaagaagaacgccctggagaactaccccaacttcagaagcgtggtggacccccccgagatcgtgctggccaagatcaacagcgtgaaccagagcgacgtgaagtacaaggagaccttcaacaaggccaagggcaagtacaccttcagccccgacaccccccacatcagccacagcaaggacatgggcaagctgtacagcaccatcctgtacaagggcgcctgggagggcaccaaggcctacggctacaccctggacgagagatacatccccatcgtgggcgccaagcacgccgacctggtgaacagcgagctgaagtacaaggagacctacgagaagcagaagggccactacctggccggcaaggtgatcggcgagttccccggcgtggtgcactgcctggacttccagaagatgagaagcgccctgaactacagaaagcactacgaggacaccaaggccaacgtgcacatccccaacgacatgatgaaccacgtgctggccaagagatgccagtacatcctgagcgacctggagtacagacactacttccaccagtggaccagcctgctggaggagcccaacgtgatcagagtgagaaacgcccaggagatcctgagcgacaacgtgtacaaggacgacctgaactggctgaagggcatcggctgctacgtgtgggacaccccccagatcctgcacgccaagaagagctacgacctgcagagccagctgcagtacaccgccgccggcaaggagaacctgcagaactacaacctggtgaccgacacccccctgtacgtgaccgccgtgcagagcggcatcaacgccagcgaggtgaagtacaaggagaactaccaccagatcaaggacaagtacaccaccgtgctggagaccgtggactacgacagaaccagaaacctgaagaacctgtacagcagcaacctgtacaaggaggcctgggacagagtgaaggccaccagctacatcctgcccagcagcaccctgagcctgacccacgccaagaaccagaagcacctggccagccacatcaagtacagagaggagtacgagaagttcaaggccctgtacaccctgcccagaagcgtggacgacgaccccaacaccgccagatgcctgagagtgggcaagctgaacatcgacagactgtacagaagcgtgtacgagaagaacaagatgaagatccacatcgtgcccgacatggtggagatggtgaccgccaaggacagccagaagaaggtgagcgagatcgactacagactgagactgcacgagtggatctgccaccccgacctgcaggtgaacgaccacgtgagaaaggtgaccgaccagatcagcgacatcgtgtacaaggacgacctgaactggctgaagggcatcggctgctacgtgtgggacacccccgagatcctgcacgccaagcacgcctacgacctgagagacgacatcaagtacaaggcccacatgctgaagaccagaaacgactacaagctggtgaccgacacccccgtgtacgtgcaggccgtgaagagcggcaagcagctgagcgacgccgtgtaccactacgactacgtgcacagcgtgagaggcaaggtggcccccaccaccaagaccgtggacctggacagagccctgcacgcctacaagctgcagagcagcaacctgtacaagaccagcctgagaaccctgcccaccggctacagactgcccggcgacaccccccacttcaagcacatcaaggacaccagatacatgagcagctacttcaagtacaaggaggcctacgagcacaccaaggcctacggctacaccctgggccccaaggacgtgcccttcgtgcacgtgagaagagtgaacaacgtgaccagcgagagactgtacagagagctgtaccacaagctgaaggacaagatccacaccacccccgacacccccgagatcagacaggtgaagaagacccaggaggccgtgagcgagctgatctacaagagcgacttcttcaagatgcagggccacatgatcagcctgccctacaccccccaggtgatccactgcagatacgtgggcgacatcaccagcgacatcaagtacaaggaggacctgcaggtgctgaagggcttcggctgcttcctgtacgacacccccgacatggtgagaagcagacacctgagaaagctgtggagcaactacctgtacaccgacaaggccagaaagatgagagacaagtacaaggtggtgctggacacccccgagtacagaaaggtgcaggagctgaagacccacctgagcgagctggtgtacagagccgccggcaagaagcagaagagcatcttcaccagcgtgcccgacacccccgacctgctgagagccaagagaggccagaagctgcagagccagtacctgtacgtggagctggccaccaaggagagaccccaccaccacgccggcaaccagaccaccgccctgaagcacgccaaggacgtgaaggacatggtgagcgagaagaagtacaagatccagtacgagaagatgaaggacaagtacacccccgtgcccgacacccccatcctgatcagagccaagagagcctactggaacgccagcgacctgagatacaaggagaccttccagaagaccaagggcaagtaccacaccgtgaaggacgccctggacatcgtgtaccacagaaaggtgaccgacgacatcagcaagatcaagtacaaggagaactacatgagccagctgggcatctggagaagcatccccgacagacccgagcacttccaccacagagccgtgaccgacaccgtgagcgacgtgaagtacaaggaggacctgacctggctgaagggcatcggctgctacgcctacgacacccccgacttcaccctggccgagaagaacaagaccctgtacagcaagtacaagtacaaggaggtgttcgagagaaccaagagcgacttcaagtacgtggccgacagccccatcaacagacacttcaagtacgccacccagctgatgaacgagaagaagtacagagccgactacgagcagagaaaggacaagtaccacctggtggtggacgagcccagacacctgctggccaagaccgccggcgaccagatcagccagatcaagtacagaaagaactacgagaagagcaaggacaagttcaccagcatcgtggacacccccgagcacctgagaaccaccaaggtgaacaagcagatcagcgacatcctgtacaagctggagtacaacaaggccaagcccagaggctacaccaccatccacgacacccccatgctgctgcacgtgagaaaggtgaaggacgaggtgagcgacctgaagtacaaggaggtgtaccagagaaacaagagcaactgcaccatcgagcccgacgccgtgcacatcaaggccgccaaggacgcctacaaggtgaacaccaacctggactacaagaagcagtacgaggccaacaaggcccactggaagtggacccccgacagacccgacttcctgcaggccgccaagagcagcctgcagcagagcgacttcgagtacaagctggacagagagttcctgaagggctgcaagctgagcgtgaccgacgacaagaacaccgtgctggccctgagaaacaccctgatcgagagcgacctgaagtacaaggagaagcacgtgaaggagagaggcacctgccacgccgtgcccgacaccccccagatcctgctggccaagaccgtgagcaacctggtgagcgagaacaagtacaaggaccacgtgaagaagcacctggcccagggcagctacaccaccctgcccgagaccagagacaccgtgcacgtgaaggaggtgaccaagcacgtgagcgacaccaactacaagaagaagttcgtgaaggagaagggcaagagcaactacagcatcatgctggagccccccgaggtgaagcacgccatggaggtggccaagaagcagagcgacgtggcctacagaaaggacgccaaggagaacctgcactacaccaccgtggccgacagacccgacatcaagaaggccacccaggccgccaagcaggccagcgaggtggagtacagagccaagcacagaaaggagggcagccacggcctgagcatgctgggcagacccgacatcgagatggccaagaaggccgccaagctgagcagccaggtgaagtacagagagaacttcgacaaggagaagggcaagacccccaagtacaaccccaaggacagccagctgtacaaggtgatgaaggacgccaacaacctggccagcgaggtgaagtacaaggccgacctgaagaagctgcacaagcccgtgaccgacatgaaggagagcctgatcatgaaccacgtgctgaacaccagccagctggccagcagctaccagtacaagaagaagtacgagaagagcaagggccactaccacaccatccccgacaacctggagcagctgcacctgaaggaggccaccgagctgcagagcatcgtgaagtacaaggagaagtacgagaaggagagaggcaagcccatgctggacttcgagacccccacctacatcaccgccaaggagagccagcagatgcagagcggcaaggagtacagaaaggactacgaggagagcatcaagggcagaaacctgaccggcctggaggtgacccccgccctgctgcacgtgaagtacgccaccaagatcgccagcgagaaggagtacagaaaggacctggaggagagcatcagaggcaagggcctgaccgagatggaggacacccccgacatgctgagagccaagaacgccacccagatcctgaacgagaaggagtacaagagagacctggagctggaggtgaagggcagaggcctgaacgccatggccaacgagacccccgacttcatgagagccagaaacgccaccgacatcgccagccagatcaagtacaagcagagcgccgagatggagaaggccaacttcaccagcgtggtggacacccccgagatcatccacgcccagcaggtgaagaacctgagcagccagaagaagtacaaggaggacgccgagaagagcatgagctactacgagaccgtgctggacacccccgagatccagagagtgagagagaaccagaagaacttcagcctgctgcagtaccagtgcgacctgaagaacagcaagggcaagatcaccgtggtgcaggacacccccgagatcctgagagtgaaggagaaccagaagaacttcagcagcgtgctgtacaaggaggacgtgagccccggcaccgccatcggcaagacccccgagatgatgagagtgaagcagacccaggaccacatcagcagcgtgaagtacaaggaggccatcggccagggcacccccatccccgacctgcccgaggtgaagagagtgaaggagacccagaagcacatcagcagcgtgatgtacaaggagaacctgggcaccggcatccccaccaccgtgacccccgagatcgagagagtgaagagaaaccaggagaacttcagcagcgtgctgtacaaggagaacctgggcaagggcatccccacccccatcacccccgagatggagagagtgaagagaaaccaggagaacttcagcagcgtgctgtacaaggagaacatgggcaagggcacccccctggccgtgacccccgagatggagagagtgaagcacaaccaggagaacatcagcagcgtgctgtacaaggagaacgtgggcaaggccaccgccacccccgtgacccccgagatgcagagagtgaagagaaaccaggagaacatcagcagcgtgctgtacaaggagaacctgggcaaggccacccccacccccttcacccccgagatggagagagtgaagagaaaccaggagaacttcagcagcgtgctgtacaaggagaacatgagaaaggccacccccacccccgtgacccccgagatggagagagccaagagaaaccaggagaacatcagcagcgtgctgtacagcgacagcttcagaaagcagatccagggcaaggccgcctacgtgctggacacccccgagatgagaagagtgagagagacccagagacacatcagcaccgtgaagtaccacgaggacttcgagaagcacaagggctgcttcacccccgtggtgaccgaccccatcaccgagagagtgaagaagaacatgcaggacttcagcgacatcaactacagaggcatccagagaaaggtggtggagatggagcagaagagaaacgaccaggaccaggagaccatcaccggcctgagagtgtggagaaccaaccccggcagcgtgttcgactacgaccccgccgaggacaacatccagagcagaagcctgcacatgatcaacgtgcaggcccagagaagaagcagagagcagagcagaagcgccagcgccctgagcatcagcggcggcgaggagaagagcgagcacagcgaggcccccgaccaccacctgagcacctacagcgacggcggcgtgttcgccgtgagcaccgcctacaagcacgccaagaccaccgagctgccccagcagagaagcagcagcgtggccacccagcagaccaccgtgagcagcatccccagccaccccagcaccgccggcaagatcttcagagccatgtacgactacatggccgccgacgccgacgaggtgagcttcaaggacggcgacgccatcatcaacgtgcaggccatcgacgagggctggatgtacggcaccgtgcagagaaccggcagaaccggcatgctgcccgccaactacgtggaggccatctag

SEQ ID NO: 90527 - DNA, 1503 bp, synthetic construct
  misc_feature 1..1503: note = Description of Artificial Sequence: Synthetic coding sequence
  source 1..1503: mol_type = other DNA
atggagagagtgaagagaaaccaggagaacttcagcagcgtgctgtacaaggagaacctgggcaccggcatccccatccccatcacccccgagatgcagagagtgaagcacaaccaggagaacctgagcagcgtgctgtacaaggagaacatgggcaagggcacccccctgcccgtgacccccgagatggagagagtgaagcacaaccaggagaacatcagcagcgtgctgtacaaggagaacatgggcaagggcacccccctgcccgtgacccccgagatggagagagtgaagcacaaccaggagaacatcagcagcgtgctgtacaaggagaacatgggcaagggcacccccctggccgtgacccccgagatggagagagtgaagcacaaccaggagaacatcagcagcgtgctgtacaaggagaacgtgggcaaggccaccgccacccccgtgacccccgagatgcagagagtgaagagaaaccaggagaacatcagcagcgtgctgtacaaggagaacctgggcaaggccacccccacccccttcacccccgagatggagagagtgaagagaaaccaggagaacttcagcagcgtgctgtacaaggagaacatgagaaaggccacccccacccccgtgacccccgagatggagagagccaagagaaaccaggagaacatcagcagcgtgctgtacagcgacagcttcagaaagcagatccagggcaaggccgcctacgtgctggacacccccgagatgagaagagtgagagagacccagagacacatcagcaccgtgaagtaccacgaggacttcgagaagcacaagggctgcttcacccccgtggtgaccgaccccatcaccgagagagtgaagaagaacatgcaggacttcagcgacatcaactacagaggcatccagagaaaggtggtggagatggagcagaagagaaacgaccaggaccaggagaccatcaccggcctgagagtgtggagaaccaaccccggcagcgtgttcgactacgaccccgccgaggacaacatccagagcagaagcctgcacatgatcaacgtgcaggcccagagaagaagcagagagcagagcagaagcgccagcgccctgagcatcagcggcggcgaggagaagagcgagcacagcgaggcccccgaccaccacctgagcacctacagcgacggcggcgtgttcgccgtgagcaccgcctacaagcacgccaagaccaccgagctgccccagcagagaagcagcagcgtggccacccagcagaccaccgtgagcagcatccccagccaccccagcaccgccggcaagatcttcagagccatgtacgactacatggccgccgacgccgacgaggtgagcttcaaggacggcgacgccatcatcaacgtgcaggccatcgacgagggctggatgtacggcaccgtgcagagaaccggcagaaccggcatgctgcccgccaactacgtggaggccatctag

SEQ ID NO: 90528 - DNA, 7878 bp, synthetic construct
  misc_feature 1..7878: note = Description of Artificial Sequence: Synthetic coding sequence
  source 1..7878: mol_type = other DNA
atgcccgacacccccgagatcaacctggccagagccaacgccctgaacgtgagcaacaagctgtacagagagggctgggacgagatgaaggccggctgcgacgtgagactggacgccatccccatccaggccgccaaggccagcagagagatcgccagcgactacaagtacaagctggaccacgagaagcagaagggccactacgtgggcaccctgaccgccagagacgacaacaagatcagatgggccctgatcgccgacaagctgcagaacgagagagagtacagactggactgggccaagtggaaggccaagatccagagccccgtggacatgctgagcatcctgcacagcaagaacagccaggccctggtgagcgacatggactacagaaactacctgcaccagtggacctgcatgcccgaccagaacgacgtgatccaggccaagaaggcctacgagctgcagagcgacaacgtgtacaaggccgacctggagtggctgagaggcatcggctggatgcccaacgacagcgtgagcgtgaaccacgccaagcacgccgccgacatcttcagcgagaagaagtacagaaccaagatcgagaccctgaacttcacccccgtggacgacagagtggactacgtgaccgccaagcagagcggcgagatcctggacgacatcaagtacagaaaggactggaacgccaccaagagcaagtacaccctgaccgagacccccctgctgcacaccgcccaggaggccgccagaatcctggaccagtacctgtacaaggagggctgggagagacagaaggccaccggctacatcctgccccccgacgccgtgcccttcgtgcacgcccaccactgcaacgacgtgcagagcgagctgaagtacaaggccgagcacgtgaagcagaagggccactacgtgggcgtgcccaccatgagagacgaccccaagctggtgtggttcgagcacgccggccagatccagaacgagagactgtacaaggaggactaccacaagaccaaggccaagatcaacatccccgccgacatggtgagcgtgctggccgccaagcagggccagaccctggtgagcgacatcgactacagaaactacctgcaccagtggatgtgccaccccgaccagaacgacgtgatccaggccagaaaggcctacgacctgcagagcgacaacgtgtacagagccgacctggagtggctgagaggcatcggctggatccccctggacagcgtggaccacgtgagagtgaccaagaaccaggagatgatgagccagatcaagtacaagaagaacgccctggagaactaccccaacttcagaagcgtggtggacccccccgagatcgtgctggccaagatcaacagcgtgaaccagagcgacgtgaagtacaaggagaccttcaacaaggccaagggcaagtacaccttcagccccgacaccccccacatcagccacagcaaggacatgggcaagctgtacagcaccatcctgtacaagggcgcctgggagggcaccaaggcctacggctacaccctggacgagagatacatccccatcgtgggcgccaagcacgccgacctggtgaacagcgagctgaagtacaaggagacctacgagaagcagaagggccactacctggccggcaaggtgatcggcgagttccccggcgtggtgcactgcctggacttccagaagatgagaagcgccctgaactacagaaagcactacgaggacaccaaggccaacgtgcacatccccaacgacatgatgaaccacgtgctggccaagagatgccagtacatcctgagcgacctggagtacagacactacttccaccagtggaccagcctgctggaggagcccaacgtgatcagagtgagaaacgcccaggagatcctgagcgacaacgtgtacaaggacgacctgaactggctgaagggcatcggctgctacgtgtgggacaccccccagatcctgcacgccaagaagagctacgacctgcagagccagctgcagtacaccgccgccggcaaggagaacctgcagaactacaacctggtgaccgacacccccctgtacgtgaccgccgtgcagagcggcatcaacgccagcgaggtgaagtacaaggagaactaccaccagatcaaggacaagtacaccaccgtgctggagaccgtggactacgacagaaccagaaacctgaagaacctgtacagcagcaacctgtacaaggaggcctgggacagagtgaaggccaccagctacatcctgcccagcagcaccctgagcctgacccacgccaagaaccagaagcacctggccagccacatcaagtacagagaggagtacgagaagttcaaggccctgtacaccctgcccagaagcgtggacgacgaccccaacaccgccagatgcctgagagtgggcaagctgaacatcgacagactgtacagaagcgtgtacgagaagaacaagatgaagatccacatcgtgcccgacatggtggagatggtgaccgccaaggacagccagaagaaggtgagcgagatcgactacagactgagactgcacgagtggatctgccaccccgacctgcaggtgaacgaccacgtgagaaaggtgaccgaccagatcagcgacatcgtgtacaaggacgacctgaactggctgaagggcatcggctgctacgtgtgggacacccccgagatcctgcacgccaagcacgcctacgacctgagagacgacatcaagtacaaggcccacatgctgaagaccagaaacgactacaagctggtgaccgacacccccgtgtacgtgcaggccgtgaagagcggcaagcagctgagcgacgccgtgtaccactacgactacgtgcacagcgtgagaggcaaggtggcccccaccaccaagaccgtggacctggacagagccctgcacgcctacaagctgcagagcagcaacctgtacaagaccagcctgagaaccctgcccaccggctacagactgcccggcgacaccccccacttcaagcacatcaaggacaccagatacatgagcagctacttcaagtacaaggaggcctacgagcacaccaaggcctacggctacaccctgggccccaaggacgtgcccttcgtgcacgtgagaagagtgaacaacgtgaccagcgagagactgtacagagagctgtaccacaagctgaaggacaagatccacaccacccccgacacccccgagatcagacaggtgaagaagacccaggaggccgtgagcgagctgatctacaagagcgacttcttcaagatgcagggccacatgatcagcctgccctacaccccccaggtgatccactgcagatacgtgggcgacatcaccagcgacatcaagtacaaggaggacctgcaggtgctgaagggcttcggctgcttcctgtacgacacccccgacatggtgagaagcagacacctgagaaagctgtggagcaactacctgtacaccgacaaggccagaaagatgagagacaagtacaaggtggtgctggacacccccgagtacagaaaggtgcaggagctgaagacccacctgagcgagctggtgtacagagccgccggcaagaagcagaagagcatcttcaccagcgtgcccgacacccccgacctgctgagagccaagagaggccagaagctgcagagccagtacctgtacgtggagctggccaccaaggagagaccccaccaccacgccggcaaccagaccaccgccctgaagcacgccaaggacgtgaaggacatggtgagcgagaagaagtacaagatccagtacgagaagatgaaggacaagtacacccccgtgcccgacacccccatcctgatcagagccaagagagcctactggaacgccagcgacctgagatacaaggagaccttccagaagaccaagggcaagtaccacaccgtgaaggacgccctggacatcgtgtaccacagaaaggtgaccgacgacatcagcaagatcaagtacaaggagaactacatgagccagctgggcatctggagaagcatccccgacagacccgagcacttccaccacagagccgtgaccgacaccgtgagcgacgtgaagtacaaggaggacctgacctggctgaagggcatcggctgctacgcctacgacacccccgacttcaccctggccgagaagaacaagaccctgtacagcaagtacaagtacaaggaggtgttcgagagaaccaagagcgacttcaagtacgtggccgacagccccatcaacagacacttcaagtacgccacccagctgatgaacgagaagaagtacagagccgactacgagcagagaaaggacaagtaccacctggtggtggacgagcccagacacctgctggccaagaccgccggcgaccagatcagccagatcaagtacagaaagaactacgagaagagcaaggacaagttcaccagcatcgtggacacccccgagcacctgagaaccaccaaggtgaacaagcagatcagcgacatcctgtacaagctggagtacaacaaggccaagcccagaggctacaccaccatccacgacacccccatgctgctgcacgtgagaaaggtgaaggacgaggtgagcgacctgaagtacaaggaggtgtaccagagaaacaagagcaactgcaccatcgagcccgacgccgtgcacatcaaggccgccaaggacgcctacaaggtgaacaccaacctggactacaagaagcagtacgaggccaacaaggcccactggaagtggacccccgacagacccgacttcctgcaggccgccaagagcagcctgcagcagagcgacttcgagtacaagctggacagagagttcctgaagggctgcaagctgagcgtgaccgacgacaagaacaccgtgctggccctgagaaacaccctgatcgagagcgacctgaagtacaaggagaagcacgtgaaggagagaggcacctgccacgccgtgcccgacaccccccagatcctgctggccaagaccgtgagcaacctggtgagcgagaacaagtacaaggaccacgtgaagaagcacctggcccagggcagctacaccaccctgcccgagaccagagacaccgtgcacgtgaaggaggtgaccaagcacgtgagcgacaccaactacaagaagaagttcgtgaaggagaagggcaagagcaactacagcatcatgctggagccccccgaggtgaagcacgccatggaggtggccaagaagcagagcgacgtggcctacagaaaggacgccaaggagaacctgcactacaccaccgtggccgacagacccgacatcaagaaggccacccaggccgccaagcaggccagcgaggtggagtacagagccaagcacagaaaggagggcagccacggcctgagcatgctgggcagacccgacatcgagatggccaagaaggccgccaagctgagcagccaggtgaagtacagagagaacttcgacaaggagaagggcaagacccccaagtacaaccccaaggacagccagctgtacaaggtgatgaaggacgccaacaacctggccagcgaggtgaagtacaaggccgacctgaagaagctgcacaagcccgtgaccgacatgaaggagagcctgatcatgaaccacgtgctgaacaccagccagctggccagcagctaccagtacaagaagaagtacgagaagagcaagggccactaccacaccatccccgacaacctggagcagctgcacctgaaggaggccaccgagctgcagagcatcgtgaagtacaaggagaagtacgagaaggagagaggcaagcccatgctggacttcgagacccccacctacatcaccgccaaggagagccagcagatgcagagcggcaaggagtacagaaaggactacgaggagagcatcaagggcagaaacctgaccggcctggaggtgacccccgccctgctgcacgtgaagtacgccaccaagatcgccagcgagaaggagtacagaaaggacctggaggagagcatcagaggcaagggcctgaccgagatggaggacacccccgacatgctgagagccaagaacgccacccagatcctgaacgagaaggagtacaagagagacctggagctggaggtgaagggcagaggcctgaacgccatggccaacgagacccccgacttcatgagagccagaaacgccaccgacatcgccagccagatcaagtacaagcagagcgccgagatggagaaggccaacttcaccagcgtggtggacacccccgagatcatccacgcccagcaggtgaagaacctgagcagccagaagaagtacaaggaggacgccgagaagagcatgagctactacgagaccgtgctggacacccccgagatccagagagtgagagagaaccagaagaacttcagcctgctgcagtaccagtgcgacctgaagaacagcaagggcaagatcaccgtggtgcaggacacccccgagatcctgagagtgaaggagaaccagaagaacttcagcagcgtgctgtacaaggaggacgtgagccccggcaccgccatcggcaagacccccgagatgatgagagtgaagcagacccaggaccacatcagcagcgtgaagtacaaggaggccatcggccagggcacccccatccccgacctgcccgaggtgaagagagtgaaggagacccagaagcacatcagcagcgtgatgtacaaggagaacctgggcaccggcatccccaccaccgtgacccccgagatcgagagagtgaagagaaaccaggagaacttcagcagcgtgctgtacaaggagaacatgggcaagggcacccccctgcccgtgacccccgagatggagagagtgaagcacaaccaggagaacatcagcagcgtgctgtacaaggagaacgtgggcaaggccaccgccacccccgtgacccccgagatgcagagagtgaagagaaaccaggagaacatcagcagcgtgctgtacagcgacagcttcagaaagcagatccagggcaaggccgcctacgtgctggacacccccgagatgagaagagtgagagagacccagagacacatcagcaccgtgaagtaccacgaggacttcgagaagcacaagggctgcttcacccccgtggtgaccgaccccatcaccgagagagtgaagaagaacatgcaggacttcagcgacatcaactacagaggcatccagagaaaggtggtggagatggagcagaagagaaacgaccaggaccaggagaccatcaccggcctgagagtgtggagaaccaaccccggcagcgtgttcgactacgaccccgccgaggacaacatccagagcagaagcctgcacatgatcaacgtgcaggcccagagaagaagcagagagcagagcagaagcgccagcgccctgagcatcagcggcggcgaggagaagagcgagcacagcgaggcccccgaccaccacctgagcacctacagcgacggcggcgtgttcgccgtgagcaccgcctacaagcacgccaagaccaccgagctgccccagcagagaagcagcagcgtggccacccagcagaccaccgtgagcagcatccccagccaccccagcaccgccggcaagatcttcagagccatgtacgactacatggccgccgacgccgacgaggtgagcttcaaggacggcgacgccatcatcaacgtgcaggccatcgacgagggctggatgtacggcaccgtgcagagaaccggcagaaccggcatgctgcccgccaactacgtggaggccatctag

SEQ ID NO: 90529 - DNA, 25578 bp, synthetic construct
  misc_feature 1..25578: note = Description of Artificial Sequence: Synthetic coding sequence
  source 1..25578: mol_type = other DNA
atggccgacgacgaggactacgaggaggtggtggagtactacaccgaggaggtggtgtacgaggaggtgcccggcgagaccatcaccaagatctacgagaccaccaccaccagaaccagcgactacgagcagagcgagaccagcaagcccgccctggcccagcccgccctggcccagcccgccagcgccaagcccgtggagagaagaaaggtgatcagaaagaaggtggaccccagcaagttcatgaccccctacatcgcccacagccagaagatgcaggacctgttcagccccaacaagtacaaggagaagttcgagaagaccaagggccagccctacgccagcaccaccgacacccccgagctgagaagaatcaagaaggtgcaggaccagctgagcgaggtgaagtacagaatggacggcgacgtggccaagaccatctgccacgtggacgagaaggccaaggacatcgagcacgccaagaaggtgagccagcaggtgagcaaggtgctgtacaagcagaactgggaggacaccaaggacaagtacctgctgccccccgacgcccccgagctggtgcaggccgtgaagaacaccgccatgttcagcaagaagctgtacaccgaggactgggaggccgacaagagcctgttctacccctacaacgacagccccgagctgagaagagtggcccaggcccagaaggccctgagcgacgtggcctacaagaagggcctggccgagcagcaggcccagttcacccccctggccgacccccccgacatcgagttcgccaagaaggtgaccaaccaggtgagcaagcagaagtacaaggaggactacgagaacaagatcaagggcaagtggagcgagaccccctgcttcgaggtggccaacgccagaatgaacgccgacaacatcagcaccagaaagtaccaggaggacttcgagaacatgaaggaccagatctacttcatgcagaccgagacccccgagtacaagatgaacaagaaggccggcgtggccgccagcaaggtgaagtacaaggaggactacgagaagaacaagggcaaggccgactacaacgtgctgcccgccagcgagaacccccagctgagacagctgaaggccgccggcgacgccctgagcgacaagctgtacaaggagaactacgagaagaccaaggccaagagcatcaactactgcgagacccccaagttcaagctggacaccgtgctgcagaacttcagcagcgacaagaagtacaaggacagctacctgaaggacatcctgggccactacgtgggcagcttcgaggacccctaccacagccactgcatgaaggtgaccgcccagaacagcgacaagaactacaaggccgagtacgaggaggacagaggcaagggcttcttcccccagaccatcacccaggagtacgaggccatcaagaagctggaccagtgcaaggaccacacctacaaggtgcaccccgacaagaccaagttcacccaggtgaccgacagccccgtgctgctgcaggcccaggtgaacagcaagcagctgagcgacctgaactacaaggccaagcacgagagcgagaagttcaagtgccacatcccccccgacacccccgccttcatccagcacaaggtgaacgcctacaacctgagcgacaacctgtacaagcaggactgggagaagagcaaggccaagaagttcgacatcaaggtggacgccatccccctgctggccgccaaggccaacaccaagaacaccagcgacgtgatgtacaagaaggactacgagaagaacaagggcaagatgatcggcgtgctgagcatcaacgacgaccccaagatgctgcacagcctgaaggtggccaagaaccagagcgacagactgtacaaggagaactacgagaagaccaaggccaagagcatgaactactgcgagacccccaagtaccagctggacacccagctgaagaacttcagcgaggccagatacaaggacctgtacgtgaaggacgtgctgggccactacgtgggcagcatggaggacccctaccacacccactgcatgaaggtggccgcccagaacagcgacaagagctacaaggccgagtacgaggaggacaagggcaagtgctacttcccccagaccatcacccaggagtacgaggccatcaagaagctggaccagtgcaaggaccacacctacaaggtgcaccccgacaagaccaagttcaccgccgtgaccgacagccccgtgctgctgcaggcccagctgaacaccaagcagctgagcgacctgaactacaaggccaagcacgagggcgagaagttcaagtgccacatccccgccgacgccccccagttcatccagcacagagtgaacgcctacaacctgagcgacaacgtgtacaagcaggactgggagaagagcaaggccaagaagttcgacatcaaggtggacgccatccccctgctggccgccaaggccaacaccaagaacaccagcgacgtgatgtacaagaaggactacgagaagagcaagggcaagatgatcggcgccctgagcatcaacgacgaccccaagatgctgcacagcctgaagaccgccaagaaccagagcgacagagagtacagaaaggactacgagaagagcaagaccatctacaccgcccccctggacatgctgcaggtgacccaggccaagaagagccaggccatcgccagcgacgtggactacaagcacatcctgcacagctacagctacccccccgacagcatcaacgtggacctggccaagaaggcctacgccctgcagagcgacgtggagtacaaggccgactacaacagctggatgaagggctgcggctgggtgcccttcggcagcctggagatggagaaggccaagagagccagcgacatcctgaacgagaagaagtacagacagcaccccgacaccctgaagttcaccagcatcgaggacgcccccatcaccgtgcagagcaagatcaaccaggcccagagaagcgacatcgcctacaaggccaagggcgaggagatcatccacaagtacaacctgccccccgacctgccccagttcatccaggccaaggtgaacgcctacaacatcagcgagaacatgtacaaggccgacctgaaggacctgagcaagaagggctacgacctgagaaccgacgccatccccatcagagccgccaaggccgccagacaggccgccagcgacgtgcagtacaagaaggactacgagaaggccaagggcaagatggtgggcttccagagcctgcaggacgaccccaagctggtgcactacatgaacgtggccaagatccagagcgacagagagtacaagaaggactacgagaagaccaagagcaagtacaacaccccccacgacatgttcaacgtggtggccgccaagaaggcccaggacgtggtgagcaacgtgaactacaagcacagcctgcaccactacacctacctgcccgacgccatggacctggagctgagcaagaacatgatgcagatccagagcgacaacgtgtacaaggaggactacaacaactggatgaagggcatcggctggatccccatcggcagcctggacgtggagaaggtgaagaaggccggcgacgccctgaacgagaagaagtacagacagcaccccgacaccctgaagttcaccagcatcgtggacagccccgtgatggtgcaggccaagcagaacaccaagcaggtgagcgacatcctgtacaaggccaagggcgaggacgtgaagcacaagtacaccatgagccccgacctgccccagttcctgcaggccaagtgcaacgcctacaacatcagcgacgtgtgctacaagagagactggtacgacctgatcgccaagggcaacaacgtgctgggcgacgccatccccatcaccgccgccaaggccagcagaaacatcgccagcgactacaagtacaaggaggcctacgagaagagcaagggcaagcacgtgggcttcagaagcctgcaggacgaccccaagctggtgcactacatgaacgtggccaagctgcagagcgacagagagtacaagaagaactacgagaacaccaagaccagctaccacacccccggcgacatggtgagcatcaccgccgccaagatggcccaggacgtggccaccaacgtgaactacaagcagcccctgcaccactacacctacctgcccgacgccatgagcctggagcacaccagaaacgtgaaccagatccagagcgacaacgtgtacaaggacgagtacaacagcttcctgaagggcatcggctggatccccatcggcagcctggaggtggagaaggtgaagaaggccggcgacgccctgaacgagagaaagtacagacagcaccccgacaccgtgaagttcaccagcgtgcccgacagcatgggcatggtgctggcccagcacaacaccaagcagctgagcgacctgaactacaaggtggagggcgagaagctgaagcacaagtacaccatcgaccccgagctgccccagttcatccaggccaaggtgaacgccctgaacatgagcgacgcccactacaaggccgactggaagaagaccatcgccaagggctacgacctgagacccgacgccatccccatcgtggccgccaagagcagcagaaacatcgccagcgactgcaagtacaaggaggcctacgagaaggccaagggcaagcaggtgggcttcctgagcctgcaggacgaccccaagctggtgcactacatgaacgtggccaagatccagagcgacagagagtacaagaagggctacgaggccagcaagaccaagtaccacacccccctggacatggtgagcgtgaccgccgccaagaagagccaggaggtggccaccaacgccaactacagacagagctaccaccactacaccctgctgcccgacgccctgaacgtggagcacagcagaaacgccatgcagatccagagcgacaacctgtacaagagcgacttcaccaactggatgaagggcatcggctgggtgcccatcgagagcctggaggtggagaaggccaagaaggccggcgagatcctgagcgagaagaagtacagacagcaccccgagaagctgaagttcacctacgccatggacaccatggagcaggccctgaacaagagcaacaagctgaacatggacaagagactgtacaccgagaagtggaacaaggacaagaccaccatccacgtgatgcccgacacccccgacatcctgctgagcagagtgaaccagatcaccatgagcgacaagctgtacaaggccggctgggaggaggagaagaagaagggctacgacctgagacccgacgccatcgccatcaaggccgccagagccagcagagacatcgccagcgactacaagtacaagaaggcctacgagcaggccaagggcaagcacatcggcttcagaagcctggaggacgaccccaagctggtgcacttcatgcaggtggccaagatgcagagcgacagagagtacaagaagggctacgagaagagcaagaccagcttccacacccccgtggacatgctgagcgtggtggccgccaagaagagccaggaggtggccaccaacgccaactacagaaacgtgatccacacctacaacatgctgcccgacgccatgagcttcgagctggccaagaacatgatgcagatccagagcgacaaccagtacaaggccgactacgccgacttcatgaagggcatcggctggctgcccctgggcagcctggaggccgagaagaacaagaaggccatggagatcatcagcgagaagaagtacagacagcaccccgacaccctgaagtacagcaccctgatggacagcatgaacatggtgctggcccagaacaacgccaagatcatgaacgagcacctgtacaagcaggcctgggaggccgacaagaccaaggtgcacatcatgcccgacatcccccagatcatcctggccaaggccaacgccatcaacatgagcgacaagctgtacaagctgagcctggaggagagcaagaagaagggctacgacctgagacccgacgccatccccatcaaggccgccaaggccagcagagacatcgccagcgactacaagtacaagtacaactacgagaagggcaagggcaagatggtgggcttcagaagcctggaggacgaccccaagctggtgcacagcatgcaggtggccaagatgcagagcgacagagagtacaagaagaactacgagaacaccaagaccagctaccacacccccgccgacatgctgagcgtgaccgccgccaaggacgcccaggccaacatcaccaacaccaactacaagcacctgatccacaagtacatcctgctgcccgacgccatgaacatcgagctgaccagaaacatgaacagaatccagagcgacaacgagtacaagcaggactacaacgagtggtacaagggcctgggctggagccccgccggcagcctggaggtggagaaggccaagaaggccaccgagtacgccagcgaccagaagtacagacagcaccccagcaacttccagttcaagaagctgaccgacagcatggacatggtgctggccaagcagaacgcccacaccatgaacaagcacctgtacaccatcgactggaacaaggacaagaccaagatccacgtgatgcccgacacccccgacatcctgcaggccaagcagaaccagaccctgtacagccagaagctgtacaagctgggctgggaggaggccctgaagaagggctacgacctgcccgtggacgccatcagcgtgcagctggccaaggccagcagagacatcgccagcgactacaagtacaagcagggctacagaaagcagctgggccaccacgtgggcttcagaagcctgcaggacgaccccaagctggtgctgagcatgaacgtggccaagatgcagagcgagagagagtacaagaaggacttcgagaagtggaagaccaagttcagcagccccgtggacatgctgggcgtggtgctggccaagaagtgccaggagctggtgagcgacgtggactacaagaactacctgcaccagtggacctgcctgcccgaccagaacgacgtggtgcaggccaagaaggtgtacgagctgcagagcgagaacctgtacaagagcgacctggagtggctgagaggcatcggctggagccccctgggcagcctggaggccgagaagaacaagagagccagcgagatcatcagcgagaagaagtacagacagccccccgacagaaacaagttcaccagcatccccgacgccatggacatcgtgctggccaagaccaacgccaagaacagaagcgacagactgtacagagaggcctgggacaaggacaagacccagatccacatcatgcccgacacccccgacatcgtgctggccaaggccaacctgatcaacaccagcgacaagctgtacagaatgggctacgaggagctgaagagaaagggctacgacctgcccgtggacgccatccccatcaaggccgccaaggccagcagagagatcgccagcgagtacaagtacaaggagggcttcagaaagcagctgggccaccacatcggcgccagaaacatcgaggacgaccccaagatgatgtggagcatgcacgtggccaagatccagagcgacagagagtacaagaaggacttcgagaagtggaagaccaagttcagcagccccgtggacatgctgggcgtggtgctggccaagaagtgccagaccctggtgagcgacgtggactacaagaactacctgcaccagtggacctgcctgcccgaccagagcgacgtgatccacgccagacaggcctacgacctgcagagcgacaacctgtacaagagcgacctgcagtggctgaagggcatcggctggatgaccagcggcagcctggaggacgagaagaacaagagagccacccagatcctgagcgaccacgtgtacagacagcaccccgaccagttcaagttcagcagcctgatggacagcatccccatggtgctggccaagaacaacgccatcaccatgaaccacagactgtacaccgaggcctgggacaaggacaagaccaccgtgcacatcatgcccgacacccccgaggtgctgctggccaagcagaacaaggtgaactacagcgagaagctgtacaagctgggcctggaggaggccaagagaaagggctacgacatgagagtggacgccatccccatcaaggccgccaaggccagcagagacatcgccagcgagttcaagtacaaggagggctacagaaagcagctgggccaccacatcggcgccagagccatcagagacgaccccaagatgatgtggagcatgcacgtggccaagatccagagcgacagagagtacaagaaggacttcgagaagtggaagaccaagttcagcagccccgtggacatgctgggcgtggtgctggccaagaagtgccagaccctggtgagcgacgtggactacaagaactacctgcaccagtggacctgcctgcccgaccagagcgacgtgatccacgccagacaggcctacgacctgcagagcgacaacatgtacaagagcgacctgcagtggatgagaggcatcggctgggtgagcatcggcagcctggacgtggagaagtgcaagagagccaccgagatcctgagcgacaagatctacagacagccccccgacagattcaagttcaccagcgtgaccgacagcctggagcaggtgctggccaagaacaacgccatcaccatgaacaagagactgtacaccgaggcctgggacaaggacaagacccagatccacatcatgcccgacacccccgagatcatgctggccagaatgaacaagatcaactacagcgagagcctgtacaagctggccaacgaggaggccaagaagaagggctacgacctgagaagcgacgccatccccatcgtggccgccaaggccagcagagacatcatcagcgactacaagtacaaggacggctactgcaagcagctgggccaccacatcggcgccagaaacatcgaggacgaccccaagatgatgtggagcatgcacgtggccaagatccagagcgacagagagtacaagaaggacttcgagaagtggaagaccaagttcagcagccccgtggacatgctgggcgtggtgctggccaagaagtgccagaccctggtgagcgacgtggactacaagaactacctgcacgagtggacctgcctgcccgaccagagcgacgtgatccacgccagacaggcctacgacctgcagagcgacaacatctacaagagcgacctgcagtggctgagaggcatcggctgggtgcccatcggcagcatggacgtggtgaagtgcaagagagccaccgagatcctgagcgacaacatctacagacagccccccgacaagctgaagttcaccagcgtgaccgacagcctggagcaggtgctggccaagaacaacgccctgaacatgaacaagagactgtacaccgaggcctgggacaaggacaagacccagatccacatcatgcccgacacccccgagatcatgctggccagacagaacaagatcaactacagcgagaccctgtacaagctggccaacgaggaggccaagaagaagggctacgacctgagaagcgacgccatccccatcgtggccgccaaggccagcagagacgtgatcagcgactacaagtacaaggacggctacagaaagcagctgggccaccacatcggcgccagaaacatcgaggacgaccccaagatgatgtggagcatgcacgtggccaagatccagagcgacagagagtacaagaaggacttcgagaagtggaagaccaagttcagcagccccgtggacatgctgggcgtggtgctggccaagaagtgccagaccctggtgagcgacgtggactacaagaactacctgcacgagtggacctgcctgcccgaccagaacgacgtgatccacgccagacaggcctacgacctgcagagcgacaacatctacaagagcgacctgcagtggctgagaggcatcggctgggtgcccatcggcagcatggacgtggtgaagtgcaagagagccgccgagatcctgagcgacaacatctacagacagccccccgacaagctgaagttcaccagcgtgaccgacagcctggagcaggtgctggccaagaacaacgccctgaacatgaacaagagactgtacaccgaggcctgggacaaggacaagacccaggtgcacatcatgcccgacacccccgagatcatgctggccagacagaacaagatcaactacagcgagagcctgtacagacaggccatggaggaggccaagaaggagggctacgacctgagaagcgacgccatccccatcgtggccgccaaggccagcagagacatcgccagcgactacaagtacaaggaggcctacagaaagcagctgggccaccacatcggcgccagagccgtgcacgacgaccccaagatcatgtggagcctgcacatcgccaaggtgcagagcgacagagagtacaagaaggacttcgagaagtacaagaccagatacagcagccccgtggacatgctgggcatcgtgctggccaagaagtgccagaccctggtgagcgacgtggactacaagcaccccctgcacgagtggatctgcctgcccgaccagaacgacatcatccacgccagaaaggcctacgacctgcagagcgacaacctgtacaagagcgacctggagtggatgaagggcatcggctgggtgcccatcgacagcctggaggtggtgagagccaagagagccggcgagctgctgagcgacaccatctacagacagagacccgagaccctgaagttcaccagcatcaccgacacccccgagcaggtgctggccaagaacaacgccctgaacatgaacaagagactgtacaccgaggcctgggacaacgacaagaagaccatccacgtgatgcccgacacccccgagatcatgctggccaagctgaacagaatcaactacagcgacaagctgtacaagctggccctggaggagagcaagaaggagggctacgacctgagactggacgccatccccatccaggccgccaaggccagcagagacatcgccagcgactacaagtacaaggagggctacagaaagcagctgggccaccacatcggcgccagaaacatcaaggacgaccccaagatgatgtggagcatccacgtggccaagatccagagcgacagagagtacaagaaggagttcgagaagtggaagaccaagttcagcagccccgtggacatgctgggcgtggtgctggccaagaagtgccagatcctggtgagcgacatcgactacaagcaccccctgcacgagtggacctgcctgcccgaccagaacgacgtgatccaggccagaaaggcctacgacctgcagagcgacgccatctacaagagcgacctggagtggctgagaggcatcggctgggtgcccatcggcagcgtggaggtggagaaggtgaagagagccggcgagatcctgagcgacagaaagtacagacagcccgccgaccagctgaagttcacctgcatcaccgacacccccgagatcgtgctggccaagaacaacgccctgaccatgagcaagcacctgtacaccgaggcctgggacgccgacaagaccagcatccacgtgatgcccgacacccccgacatcctgctggccaagagcaacagcgccaacatcagccagaagctgtacaccaagggctgggacgagagcaagatgaaggactacgacctgagagccgacgccatcagcatcaagagcgccaaggccagcagagacatcgccagcgactacaagtacaaggaggcctacgagaagcagaagggccaccacatcggcgcccagagcatcgaggacgaccccaagatcatgtgcgccatccacgccggcaagatccagagcgagagagagtacaagaaggagttccagaagtggaagaccaagttcagcagccccgtggacatgctgagcatcctgctggccaagaagtgccagaccctggtgaccgacatcgactacagaaactacctgcacgagtggacctgcatgcccgaccagaacgacatcatccaggccaagaaggcctacgacctgcagagcgacagcgtgtacaaggccgacctggagtggctgagaggcatcggctggatgcccgagggcagcgtggagatgaacagagtgaaggtggcccaggacctggtgaacgagagactgtacagaaccagacccgaggccctgagcttcaccagcatcgtggacacccccgaggtggtgctggccaaggccaacagcctgcagatcagcgagaagctgtaccaggaggcctggaacaaggacaagagcaacatcaccatccccagcgacacccccgagatgctgcaggcccacatcaacgccctgcagatcagcaacaagctgtaccagaaggactggaacgacgccaagcagaagggctacgacatcagagccgacgccatcgagatcaagcacgccaaggccagcagagagatcgccagcgagtacaagtacaaggagggctacagaaagcagctgggccaccacatgggcttcagaaccctgcaggacgaccccaagagcgtgtgggccatccacgccgccaagatccagagcgacagagagtacaagaaggcctacgagaagagcaagggcatccacaacacccccctggacatgatgagcatcgtgcaggccaagaagtgccaggtgctggtgagcgacatcgactacagaaactacctgcaccagtggacctgcctgcccgaccagaacgacgtgatccaggccaagaaggcctacgacctgcagagcgacaacctgtacaagagcgacctggagtggctgaagggcatcggctggctgcccgagggcagcgtggaggtgatgagagtgaagaacgcccagaacctgctgaacgagagactgtacagaatcaagcccgaggccctgaagttcaccagcatcgtggacacccccgaggtgatccaggccaagatcaacgccgtgcagatcagcgagcccctgtacagagacgcctgggagaaggagaaggccaacgtgaacgtgcccgccgacacccccctgatgctgcagagcaagatcaacgccctgcagatcagcaacaagagataccagcaggcctgggaggacgtgaagatgaccggctacgacctgagagccgacgccatcggcatccagcacgccaaggccagcagagacatcgccagcgactacctgtacaagaccgcctacgagaagcagaagggccactacatcggctgcagaagcgccaaggaggaccccaagctggtgtgggccgccaacgtgctgaagatgcagaacgacagactgtacaagaaggcctacaacgaccacaaggccaagatcagcatccccgtggacatggtgagcatcagcgccgccaaggagggccaggccctggccagcgacgtggactacagacactacctgcaccactggagctgcttccccgaccagaacgacgtgatccaggccagaaaggcctacgacctgcagagcgacagcgtgtacaaggccgacctggagtggctgagaggcatcggctggatgcccgagggcagcgtggagatgaacagagtgaaggtggcccaggacctggtgaacgagagactgtacagaaccagacccgaggccctgagcttcaccagcatcgtggacacccccgaggtggtgctggccaaggccaacagcctgcagatcagcgagaagctgtaccaggaggcctggaacaaggacaagagcaacatcaccatccccagcgacacccccgagatgctgcaggcccacatcaacgccctgcagatcagcaacaagctgtaccagaaggactggaacgacaccaagcagaagggctacgacatcagagccgacgccatcgagatcaagcacgccaaggccagcagagagatcgccagcgagtacaagtacaaggagggctacagaaagcagctgggccaccacatgggcttcagaaccctgcaggacgaccccaagagcgtgtgggccatccacgccgccaagatccagagcgacagagagtacaagaaggcctacgagaagagcaagggcatccacaacacccccctggacatgatgagcatcgtgcaggccaagaagtgccaggtgctggtgagcgacatcgactacagaaactacctgcaccagtggacctgcctgcccgaccagaacgacgtgatccaggccaagaaggcctacgacctgcagagcgacaacctgtacaagagcgacctggagtggctgaagggcatcggctggctgcccgagggcagcgtggaggtgatgagagtgaagaacgcccagaacctgctgaacgagagactgtacagaatcaagcccgaggccctgaagttcaccagcatcgtggacacccccgaggtgatccaggccaagatcaacgccgtgcagatcagcgagcccctgtacagaaacgcctgggagaaggagaaggccaacgtgaacgtgcccgccgacacccccctgatgctgcagagcaagatcaacgccctgcagatcagcaacaagagataccagcaggcctgggaggacgtgaagatgaccggctacgacctgagagccgacgccatcggcatccagcacgccaaggccagcagagacatcgccagcgactacctgtacaagaccgcctacgagaagcagaagggccactacatcggctgcagaagcgccaaggaggaccccaagctggtgtgggccgccaacgtgctgaagatgcagaacgacagactgtacaagaaggcctacaacgaccacaaggccaagatcagcatccccgtggacatggtgagcatcagcgccgccaaggagggccaggccctggccagcgacgtggactacagacactacctgcaccactggagctgcttccccgaccagaacgacgtgatccaggccagaaaggcctacgacctgcagagcgacagcgtgtacaaggccgacctggagtggctgagaggcatcggctggatgcccgagggcagcgtggagatgaacagagtgaaggtggcccaggacctggtgaacgagagactgtacagaaccagacccgaggccctgagcttcaccagcatcgtggacacccccgaggtggtgctggccaaggccaacagcctgcagatcagcgagaagctgtaccaggaggcctggaacaaggacaagagcaacatcaccatccccagcgacacccccgagatgctgcaggcccacatcaacgccctgcagatcagcaacaagctgtaccagaaggactggaacgacaccaagcagaagggctacgacatcagagccgacgccatcgagatcaagcacgccaaggccagcagagagatcgccagcgagtacaagtacaaggagggctacagaaagcagctgggccaccacatgggcttcagaaccctgcaggacgaccccaagagcgtgtgggccatccacgccgccaagatccagagcgacagagagtacaagaaggcctacgagaagagcaagggcatccacaacacccccctggacatgatgagcatcgtgcaggccaagaagtgccaggtgctggtgagcgacatcgactacagaaactacctgcaccagtggacctgcctgcccgaccagaacgacgtgatccaggccaagaaggcctacgacctgcagagcgacaacctgtacaagagcgacctggagtggctgaagggcatcggctggctgcccgagggcagcgtggaggtgatgagagtgaagaacgcccagaacctgctgaacgagagactgtacagaatcaagcccgaggccctgaagttcaccagcatcgtggacacccccgaggtgatccaggccaagatcaacgccgtgcagatcagcgagcccctgtacagagacgcctgggagaaggagaaggccaacgtgaacgtgcccgccgacacccccctgatgctgcagagcaagatcaacgccctgcagatcagcaacaagagataccagcaggcctgggaggacgtgaagatgaccggctacgacctgagagccgacgccatcggcatccagcacgccaaggccagcagagacatcgccagcgactacctgtacaagaccgcctacgagaagcagaagggccactacatcggctgcagaagcgccaaggaggaccccaagctggtgtgggccgccaacgtgctgaagatgcagaacgacagactgtacaagaaggcctacaacgaccacaaggccaagatcagcatccccgtggacatggtgagcatcagcgccgccaaggagggccaggccctggccagcgacgtggactacagacactacctgcacagatggagctgcttccccgaccagaacgacgtgatccaggccagaaaggcctacgacctgcagagcgacgccctgtacaaggccgacctggagtggctgagaggcatcggctggatgccccagggcagccccgaggtgctgagagtgaagaacgcccagaacatcttctgcgacagcgtgtacagaacccccgtggtgaacctgaagtacaccagcatcgtggacacccccgaggtggtgctggccaagagcaacgccgagaacatcagcatccccaagtacagagaggtgtgggacaaggacaagaccagcatccacatcatgcccgacacccccgagatcaacctggccagagccaacgccctgaacgtgagcaacaagctgtacagagagggctgggacgagatgaaggccggctgcgacgtgagactggacgccatccccatccaggccgccaaggccagcagagagatcgccagcgactacaagtacaagctggaccacgagaagcagaagggccactacgtgggcaccctgaccgccagagacgacaacaagatcagatgggccctgatcgccgacaagctgcagaacgagagagagtacagactggactgggccaagtggaaggccaagatccagagccccgtggacatgctgagcatcctgcacagcaagaacagccaggccctggtgagcgacatggactacagaaactacctgcaccagtggacctgcatgcccgaccagaacgacgtgatccaggccaagaaggcctacgagctgcagagcgacaacgtgtacaaggccgacctggagtggctgagaggcatcggctggatgcccaacgacagcgtgagcgtgaaccacgccaagcacgccgccgacatcttcagcgagaagaagtacagaaccaagatcgagaccctgaacttcacccccgtggacgacagagtggactacgtgaccgccaagcagagcggcgagatcctggacgacatcaagtacagaaaggactggaacgccaccaagagcaagtacaccctgaccgagacccccctgctgcacaccgcccaggaggccgccagaatcctggaccagtacctgtacaaggagggctgggagagacagaaggccaccggctacatcctgccccccgacgccgtgcccttcgtgcacgcccaccactgcaacgacgtgcagagcgagctgaagtacaaggccgagcacgtgaagcagaagggccactacgtgggcgtgcccaccatgagagacgaccccaagctggtgtggttcgagcacgccggccagatccagaacgagagactgtacaaggaggactaccacaagaccaaggccaagatcaacatccccgccgacatggtgagcgtgctggccgccaagcagggccagaccctggtgagcgacatcgactacagaaactacctgcaccagtggatgtgccaccccgaccagaacgacgtgatccaggccagaaaggcctacgacctgcagagcgacaacgtgtacagagccgacctggagtggctgagaggcatcggctggatccccctggacagcgtggaccacgtgagagtgaccaagaaccaggagatgatgagccagatcaagtacaagaagaacgccctggagaactaccccaacttcagaagcgtggtggacccccccgagatcgtgctggccaagatcaacagcgtgaaccagagcgacgtgaagtacaaggagaccttcaacaaggccaagggcaagtacaccttcagccccgacaccccccacatcagccacagcaaggacatgggcaagctgtacagcaccatcctgtacaagggcgcctgggagggcaccaaggcctacggctacaccctggacgagagatacatccccatcgtgggcgccaagcacgccgacctggtgaacagcgagctgaagtacaaggagacctacgagaagcagaagggccactacctggccggcaaggtgatcggcgagttccccggcgtggtgcactgcctggacttccagaagatgagaagcgccctgaactacagaaagcactacgaggacaccaaggccaacgtgcacatccccaacgacatgatgaaccacgtgctggccaagagatgccagtacatcctgagcgacctggagtacagacactacttccaccagtggaccagcctgctggaggagcccaacgtgatcagagtgagaaacgcccaggagatcctgagcgacaacgtgtacaaggacgacctgaactggctgaagggcatcggctgctacgtgtgggacaccccccagatcctgcacgccaagaagagctacgacctgcagagccagctgcagtacaccgccgccggcaaggagaacctgcagaactacaacctggtgaccgacacccccctgtacgtgaccgccgtgcagagcggcatcaacgccagcgaggtgaagtacaaggagaactaccaccagatcaaggacaagtacaccaccgtgctggagaccgtggactacgacagaaccagaaacctgaagaacctgtacagcagcaacctgtacaaggaggcctgggacagagtgaaggccaccagctacatcctgcccagcagcaccctgagcctgacccacgccaagaaccagaagcacctggccagccacatcaagtacagagaggagtacgagaagttcaaggccctgtacaccctgcccagaagcgtggacgacgaccccaacaccgccagatgcctgagagtgggcaagctgaacatcgacagactgtacagaagcgtgtacgagaagaacaagatgaagatccacatcgtgcccgacatggtggagatggtgaccgccaaggacagccagaagaaggtgagcgagatcgactacagactgagactgcacgagtggatctgccaccccgacctgcaggtgaacgaccacgtgagaaaggtgaccgaccagatcagcgacatcgtgtacaaggacgacctgaactggctgaagggcatcggctgctacgtgtgggacacccccgagatcctgcacgccaagcacgcctacgacctgagagacgacatcaagtacaaggcccacatgctgaagaccagaaacgactacaagctggtgaccgacacccccgtgtacgtgcaggccgtgaagagcggcaagcagctgagcgacgccgtgtaccactacgactacgtgcacagcgtgagaggcaaggtggcccccaccaccaagaccgtggacctggacagagccctgcacgcctacaagctgcagagcagcaacctgtacaagaccagcctgagaaccctgcccaccggctacagactgcccggcgacaccccccacttcaagcacatcaaggacaccagatacatgagcagctacttcaagtacaaggaggcctacgagcacaccaaggcctacggctacaccctgggccccaaggacgtgcccttcgtgcacgtgagaagagtgaacaacgtgaccagcgagagactgtacagagagctgtaccacaagctgaaggacaagatccacaccacccccgacacccccgagatcagacaggtgaagaagacccaggaggccgtgagcgagctgatctacaagagcgacttcttcaagatgcagggccacatgatcagcctgccctacaccccccaggtgatccactgcagatacgtgggcgacatcaccagcgacatcaagtacaaggaggacctgcaggtgctgaagggcttcggctgcttcctgtacgacacccccgacatggtgagaagcagacacctgagaaagctgtggagcaactacctgtacaccgacaaggccagaaagatgagagacaagtacaaggtggtgctggacacccccgagtacagaaaggtgcaggagctgaagacccacctgagcgagctggtgtacagagccgccggcaagaagcagaagagcatcttcaccagcgtgcccgacacccccgacctgctgagagccaagagaggccagaagctgcagagccagtacctgtacgtggagctggccaccaaggagagaccccaccaccacgccggcaaccagaccaccgccctgaagcacgccaaggacgtgaaggacatggtgagcgagaagaagtacaagatccagtacgagaagatgaaggacaagtacacccccgtgcccgacacccccatcctgatcagagccaagagagcctactggaacgccagcgacctgagatacaaggagaccttccagaagaccaagggcaagtaccacaccgtgaaggacgccctggacatcgtgtaccacagaaaggtgaccgacgacatcagcaagatcaagtacaaggagaactacatgagccagctgggcatctggagaagcatccccgacagacccgagcacttccaccacagagccgtgaccgacaccgtgagcgacgtgaagtacaaggaggacctgacctggctgaagggcatcggctgctacgcctacgacacccccgacttcaccctggccgagaagaacaagaccctgtacagcaagtacaagtacaaggaggtgttcgagagaaccaagagcgacttcaagtacgtggccgacagccccatcaacagacacttcaagtacgccacccagctgatgaacgagagaaagtacaagagcagcgccaagatgttcctgcagcacggctgcaacgagatcctgagacccgacatgctgaccgccctgtacaacagccacatgtggagccagatcaagtacagaaagaactacgagaagagcaaggacaagttcaccagcatcgtggacacccccgagcacctgagaaccaccaaggtgaacaagcagatcagcgacatcctgtacaagctggagtacaacaaggccaagcccagaggctacaccaccatccacgacacccccatgctgctgcacgtgagaaaggtgaaggacgaggtgagcgacctgaagtacaaggaggtgtaccagagaaacaagagcaactgcaccatcgagcccgacgccgtgcacatcaaggccgccaaggacgcctacaaggtgaacaccaacctggactacaagaagcagtacgaggccaacaaggcccactggaagtggacccccgacagacccgacttcctgcaggccgccaagagcagcctgcagcagagcgacttcgagtacaagctggacagagagttcctgaagggctgcaagctgagcgtgaccgacgacaagaacaccgtgctggccctgagaaacaccctgatcgagagcgacctgaagtacaaggagaagcacgtgaaggagagaggcacctgccacgccgtgcccgacaccccccagatcctgctggccaagaccgtgagcaacctggtgagcgagaacaagtacaaggaccacgtgaagaagcacctggcccagggcagctacaccaccctgcccgagaccagagacaccgtgcacgtgaaggaggtgaccaagcacgtgagcgacaccaactacaagaagaagttcgtgaaggagaagggcaagagcaactacagcatcatgctggagccccccgaggtgaagcacgccatggaggtggccaagaagcagagcgacgtggcctacagaaaggacgccaaggagaacctgcactacaccaccgtggccgacagacccgacatcaagaaggccacccaggccgccaagcaggccagcgaggtggagtacagagccaagcacagaaaggagggcagccacggcctgagcatgctgggcagacccgacatcgagatggccaagaaggccgccaagctgagcagccaggtgaagtacagagagaacttcgacaaggagaagggcaagacccccaagtacaaccccaaggacagccagctgtacaaggtgatgaaggacgccaacaacctggccagcgaggtgaagtacaaggccgacctgaagaagctgcacaagcccgtgaccgacatgaaggagagcctgatcatgaaccacgtgctgaacaccagccagctggccagcagctaccagtacaagaagaagtacgagaagagcaagggccactaccacaccatccccgacaacctggagcagctgcacctgaaggaggccaccgagctgcagagcatcgtgaagtacaaggagaagtacgagaaggagagaggcaagcccatgctggacttcgagacccccacctacatcaccgccaaggagagccagcagatgcagagcggcaaggagtacagaaaggactacgaggagagcatcaagggcagaaacctgaccggcctggaggtgacccccgccctgctgcacgtgaagtacgccaccaagatcgccagcgagaaggagtacagaaaggacctggaggagagcatcagaggcaagggcctgaccgagatggaggacacccccgacatgctgagagccaagaacgccacccagatcctgaacgagaaggagtacaagagagacctggagctggaggtgaagggcagaggcctgaacgccatggccaacgagacccccgacttcatgagagccagaaacgccaccgacatcgccagccagatcaagtacaagcagagcgccgagatggagaaggccaacttcaccagcgtggtggacacccccgagatcatccacgcccagcaggtgaagaacctgagcagccagaagaagtacaaggaggacgccgagaagagcatgagctactacgagaccgtgctggacacccccgagatccagagagtgagagagaaccagaagaacttcagcctgctgcagtaccagtgcgacctgaagaacagcaagggcaagatcaccgtggtgcaggacacccccgagatcctgagagtgaaggagaaccagaagaacttcagcagcgtgctgtacaaggaggacgtgagccccggcaccgccatcggcaagacccccgagatgatgagagtgaagcagacccaggaccacatcagcagcgtgaagtacaaggaggccatcggccagggcacccccatccccgacctgcccgaggtgaagagagtgaaggagacccagaagcacatcagcagcgtgatgtacaaggagaacctgggcaccggcatccccaccaccgtgacccccgagatcgagagagtgaagagaaaccaggagaacttcagcagcgtgctgtacaaggagaacctgggcaagggcatccccacccccatcacccccgagatggagagagtgaagagaaaccaggagaacttcagcagcatcctgtacaaggagaacctgagcaagggcacccccctgcccgtgacccccgagatggagagagtgaagctgaaccaggagaacttcagcagcgtgctgtacaaggagaacgtgggcaagggcatccccatccccatcacccccgagatggagagagtgaagcacaaccaggagaacttcagcagcgtgctgtacaaggagaacctgggcaccggcatccccatccccatcacccccgagatgcagagagtgaagcacaaccaggagaacctgagcagcgtgctgtacaaggagaacatgggcaagggcacccccctgcccgtgacccccgagatggagagagtgaagcacaaccaggagaacatcagcagcgtgctgtacaaggagaacatgggcaagggcacccccctgcccgtgacccccgagatggagagagtgaagcacaaccaggagaacatcagcagcgtgctgtacaaggagaacatgggcaagggcacccccctggccgtgacccccgagatggagagagtgaagcacaaccaggagaacatcagcagcgtgctgtacaaggagaacgtgggcaaggccaccgccacccccgtgacccccgagatgcagagagtgaagagaaaccaggagaacatcagcagcgtgctgtacaaggagaacctgggcaaggccacccccacccccttcacccccgagatggagagagtgaagagaaaccaggagaacttcagcagcgtgctgtacaaggagaacatgagaaaggccacccccacccccgtgacccccgagatggagagagccaagagaaaccaggagaacatcagcagcgtgctgtacagcgacagcttcagaaagcagatccagggcaaggccgcctacgtgctggacacccccgagatgagaagagtgagagagacccagagacacatcagcaccgtgaagtaccacgaggacttcgagaagcacaagggctgcttcacccccgtggtgaccgaccccatcaccgagagagtgaagaagaacatgcaggacttcagcgacatcaactacagaggcatccagagaaaggtggtggagatggagcagaagagaaacgaccaggaccaggagaccatcaccggcctgagagtgtggagaaccaaccccggcagcgtgttcgactacgaccccgccgaggacaacatccagagcagaagcctgcacatgatcaacgtgcaggcccagagaagaagcagagagcagagcagaagcgccagcgccctgagcatcagcggcggcgaggagaagagcgagcacagcgaggcccccgaccaccacctgagcacctacagcgacggcggcgtgttcgccgtgagcaccgcctacaagcacgccaagaccaccgagctgccccagcagagaagcagcagcgtggccacccagcagaccaccgtgagcagcatccccagccaccccagcaccgccggcaagatcttcagagccatgtacgactacatggccgccgacgccgacgaggtgagcttcaaggacggcgacgccatcatcaacgtgcaggccatcgacgagggctggatgtacggcaccgtgcagagaaccggcagaaccggcatgctgcccgccaactacgtggaggccatctag

SEQ ID NO: 90530 - DNA, 20010 bp, synthetic construct
  misc_feature 1..20010: note = Description of Artificial Sequence: Synthetic coding sequence
  source 1..20010: mol_type = other DNA
atggccgacgacgaggactacgaggaggtggtggagtactacaccgaggaggtggtgtacgaggaggtgcccggcgagaccatcaccaagatctacgagaccaccaccaccagaaccagcgactacgagcagagcgagaccagcaagcccgccctggcccagcccgccctggcccagcccgccagcgccaagcccgtggagagaagaaaggtgatcagaaagaaggtggaccccagcaagttcatgaccccctacatcgcccacagccagaagatgcaggacctgttcagccccaacaagtacaaggagaagttcgagaagaccaagggccagccctacgccagcaccaccgacacccccgagctgagaagaatcaagaaggtgcaggaccagctgagcgaggtgaagtacagaatggacggcgacgtggccaagaccatctgccacgtggacgagaaggccaaggacatcgagcacgccaagaaggtgagccagcaggtgagcaaggtgctgtacaagcagaactgggaggacaccaaggacaagtacctgctgccccccgacgcccccgagctggtgcaggccgtgaagaacaccgccatgttcagcaagaagctgtacaccgaggactgggaggccgacaagagcctgttctacccctacaacgacagccccgagctgagaagagtggcccaggcccagaaggccctgagcgacgtggcctacaagaagggcctggccgagcagcaggcccagttcacccccctggccgacccccccgacatcgagttcgccaagaaggtgaccaaccaggtgagcaagcagaagtacaaggaggactacgagaacaagatcaagggcaagtggagcgagaccccctgcttcgaggtggccaacgccagaatgaacgccgacaacatcagcaccagaaagtaccaggaggacttcgagaacatgaaggaccagatctacttcatgcagaccgagacccccgagtacaagatgaacaagaaggccggcgtggccgccagcaaggtgaagtacaaggaggactacgagaagaacaagggcaaggccgactacaacgtgctgcccgccagcgagaacccccagctgagacagctgaaggccgccggcgacgccctgagcgacaagctgtacaaggagaactacgagaagaccaaggccaagagcatcaactactgcgagacccccaagttcaagctggacaccgtgctgcagaacttcagcagcgacaagaagtacaaggacagctacctgaaggacatcctgggccactacgtgggcagcttcgaggacccctaccacagccactgcatgaaggtgaccgcccagaacagcgacaagaactacaaggccgagtacgaggaggacagaggcaagggcttcttcccccagaccatcacccaggagtacgaggccatcaagaagctggaccagtgcaaggaccacacctacaaggtgcaccccgacaagaccaagttcacccaggtgaccgacagccccgtgctgctgcaggcccaggtgaacagcaagcagctgagcgacctgaactacaaggccaagcacgagagcgagaagttcaagtgccacatcccccccgacacccccgccttcatccagcacaaggtgaacgcctacaacctgagcgacaacctgtacaagcaggactgggagaagagcaaggccaagaagttcgacatcaaggtggacgccatccccctgctggccgccaaggccaacaccaagaacaccagcgacgtgatgtacaagaaggactacgagaagaacaagggcaagatgatcggcgtgctgagcatcaacgacgaccccaagatgctgcacagcctgaaggtggccaagaaccagagcgacagactgtacaaggagaactacgagaagaccaaggccaagagcatgaactactgcgagacccccaagtaccagctggacacccagctgaagaacttcagcgaggccagatacaaggacctgtacgtgaaggacgtgctgggccactacgtgggcagcatggaggacccctaccacacccactgcatgaaggtggccgcccagaacagcgacaagagctacaaggccgagtacgaggaggacaagggcaagtgctacttcccccagaccatcacccaggagtacgaggccatcaagaagctggaccagtgcaaggaccacacctacaaggtgcaccccgacaagaccaagttcaccgccgtgaccgacagccccgtgctgctgcaggcccagctgaacaccaagcagctgagcgacctgaactacaaggccaagcacgagggcgagaagttcaagtgccacatccccgccgacgccccccagttcatccagcacagagtgaacgcctacaacctgagcgacaacgtgtacaagcaggactgggagaagagcaaggccaagaagttcgacatcaaggtggacgccatccccctgctggccgccaaggccaacaccaagaacaccagcgacgtgatgtacaagaaggactacgagaagagcaagggcaagatgatcggcgccctgagcatcaacgacgaccccaagatgctgcacagcctgaagaccgccaagaaccagagcgacagagagtacagaaaggactacgagaagagcaagaccatctacaccgcccccctggacatgctgcaggtgacccaggccaagaagagccaggccatcgccagcgacgtggactacaagcacatcctgcacagctacagctacccccccgacagcatcaacgtggacctggccaagaaggcctacgccctgcagagcgacgtggagtacaaggccgactacaacagctggatgaagggctgcggctgggtgcccttcggcagcctggagatggagaaggccaagagagccagcgacatcctgaacgagaagaagtacagacagcaccccgacaccctgaagttcaccagcatcgaggacgcccccatcaccgtgcagagcaagatcaaccaggcccagagaagcgacatcgcctacaaggccaagggcgaggagatcatccacaagtacaacctgccccccgacctgccccagttcatccaggccaaggtgaacgcctacaacatcagcgagaacatgtacaaggccgacctgaaggacctgagcaagaagggctacgacctgagaaccgacgccatccccatcagagccgccaaggccgccagacaggccgccagcgacgtgcagtacaagaaggactacgagaaggccaagggcaagatggtgggcttccagagcctgcaggacgaccccaagctggtgcactacatgaacgtggccaagatccagagcgacagagagtacaagaaggactacgagaagaccaagagcaagtacaacaccccccacgacatgttcaacgtggtggccgccaagaaggcccaggacgtggtgagcaacgtgaactacaagcacagcctgcaccactacacctacctgcccgacgccatggacctggagctgagcaagaacatgatgcagatccagagcgacaacgtgtacaaggaggactacaacaactggatgaagggcatcggctggatccccatcggcagcctggacgtggagaaggtgaagaaggccggcgacgccctgaacgagaagaagtacagacagcaccccgacaccctgaagttcaccagcatcgtggacagccccgtgatggtgcaggccaagcagaacaccaagcaggtgagcgacatcctgtacaaggccaagggcgaggacgtgaagcacaagtacaccatgagccccgacctgccccagttcctgcaggccaagtgcaacgcctacaacatcagcgacgtgtgctacaagagagactggtacgacctgatcgccaagggcaacaacgtgctgggcgacgccatccccatcaccgccgccaaggccagcagaaacatcgccagcgactacaagtacaaggaggcctacgagaagagcaagggcaagcacgtgggcttcagaagcctgcaggacgaccccaagctggtgcactacatgaacgtggccaagctgcagagcgacagagagtacaagaagaactacgagaacaccaagaccagctaccacacccccggcgacatggtgagcatcaccgccgccaagatggcccaggacgtggccaccaacgtgaactacaagcagcccctgcaccactacacctacctgcccgacgccatgagcctggagcacaccagaaacgtgaaccagatccagagcgacaacgtgtacaaggacgagtacaacagcttcctgaagggcatcggctggatccccatcggcagcctggaggtggagaaggtgaagaaggccggcgacgccctgaacgagagaaagtacagacagcaccccgacaccgtgaagttcaccagcgtgcccgacagcatgggcatggtgctggcccagcacaacaccaagcagctgagcgacctgaactacaaggtggagggcgagaagctgaagcacaagtacaccatcgaccccgagctgccccagttcatccaggccaaggtgaacgccctgaacatgagcgacgcccactacaaggccgactggaagaagaccatcgccaagggctacgacctgagacccgacgccatccccatcgtggccgccaagagcagcagaaacatcgccagcgactgcaagtacaaggaggcctacgagaaggccaagggcaagcaggtgggcttcctgagcctgcaggacgaccccaagctggtgcactacatgaacgtggccaagatccagagcgacagagagtacaagaagggctacgaggccagcaagaccaagtaccacacccccctggacatggtgagcgtgaccgccgccaagaagagccaggaggtggccaccaacgccaactacagacagagctaccaccactacaccctgctgcccgacgccctgaacgtggagcacagcagaaacgccatgcagatccagagcgacaacctgtacaagagcgacttcaccaactggatgaagggcatcggctgggtgcccatcgagagcctggaggtggagaaggccaagaaggccggcgagatcctgagcgagaagaagtacagacagcaccccgagaagctgaagttcacctacgccatggacaccatggagcaggccctgaacaagagcaacaagctgaacatggacaagagactgtacaccgagaagtggaacaaggacaagaccaccatccacgtgatgcccgacacccccgacatcctgctgagcagagtgaaccagatcaccatgagcgacaagctgtacaaggccggctgggaggaggagaagaagaagggctacgacctgagacccgacgccatcgccatcaaggccgccagagccagcagagacatcgccagcgactacaagtacaagaaggcctacgagcaggccaagggcaagcacatcggcttcagaagcctggaggacgaccccaagctggtgcacttcatgcaggtggccaagatgcagagcgacagagagtacaagaagggctacgagaagagcaagaccagcttccacacccccgtggacatgctgagcgtggtggccgccaagaagagccaggaggtggccaccaacgccaactacagaaacgtgatccacacctacaacatgctgcccgacgccatgagcttcgagctggccaagaacatgatgcagatccagagcgacaaccagtacaaggccgactacgccgacttcatgaagggcatcggctggctgcccctgggcagcctggaggccgagaagaacaagaaggccatggagatcatcagcgagaagaagtacagacagcaccccgacaccctgaagtacagcaccctgatggacagcatgaacatggtgctggcccagaacaacgccaagatcatgaacgagcacctgtacaagcaggcctgggaggccgacaagaccaaggtgcacatcatgcccgacatcccccagatcatcctggccaaggccaacgccatcaacatgagcgacaagctgtacaagctgagcctggaggagagcaagaagaagggctacgacctgagacccgacgccatccccatcaaggccgccaaggccagcagagacatcgccagcgactacaagtacaagtacaactacgagaagggcaagggcaagatggtgggcttcagaagcctggaggacgaccccaagctggtgcacagcatgcaggtggccaagatgcagagcgacagagagtacaagaagaactacgagaacaccaagaccagctaccacacccccgccgacatgctgagcgtgaccgccgccaaggacgcccaggccaacatcaccaacaccaactacaagcacctgatccacaagtacatcctgctgcccgacgccatgaacatcgagctgaccagaaacatgaacagaatccagagcgacaacgagtacaagcaggactacaacgagtggtacaagggcctgggctggagccccgccggcagcctggaggtggagaaggccaagaaggccaccgagtacgccagcgaccagaagtacagacagcaccccagcaacttccagttcaagaagctgaccgacagcatggacatggtgctggccaagcagaacgcccacaccatgaacaagcacctgtacaccatcgactggaacaaggacaagaccaagatccacgtgatgcccgacacccccgacatcctgcaggccaagcagaaccagaccctgtacagccagaagctgtacaagctgggctgggaggaggccctgaagaagggctacgacctgcccgtggacgccatcagcgtgcagctggccaaggccagcagagacatcgccagcgactacaagtacaagcagggctacagaaagcagctgggccaccacgtgggcttcagaagcctgcaggacgaccccaagctggtgctgagcatgaacgtggccaagatgcagagcgagagagagtacaagaaggacttcgagaagtggaagaccaagttcagcagccccgtggacatgctgggcgtggtgctggccaagaagtgccaggagctggtgagcgacgtggactacaagaactacctgcaccagtggacctgcctgcccgaccagaacgacgtggtgcaggccaagaaggtgtacgagctgcagagcgagaacctgtacaagagcgacctggagtggctgagaggcatcggctggagccccctgggcagcctggaggccgagaagaacaagagagccagcgagatcatcagcgagaagaagtacagacagccccccgacagaaacaagttcaccagcatccccgacgccatggacatcgtgctggccaagaccaacgccaagaacagaagcgacagactgtacagagaggcctgggacaaggacaagacccagatccacatcatgcccgacacccccgacatcgtgctggccaaggccaacctgatcaacaccagcgacaagctgtacagaatgggctacgaggagctgaagagaaagggctacgacctgcccgtggacgccatccccatcaaggccgccaaggccagcagagagatcgccagcgagtacaagtacaaggagggcttcagaaagcagctgggccaccacatcggcgccagaaacatcgaggacgaccccaagatgatgtggagcatgcacgtggccaagatccagagcgacagagagtacaagaaggacttcgagaagtggaagaccaagttcagcagccccgtggacatgctgggcgtggtgctggccaagaagtgccagaccctggtgagcgacgtggactacaagaactacctgcaccagtggacctgcctgcccgaccagagcgacgtgatccacgccagacaggcctacgacctgcagagcgacaacctgtacaagagcgacctgcagtggctgaagggcatcggctggatgaccagcggcagcctggaggacgagaagaacaagagagccacccagatcctgagcgaccacgtgtacagacagcaccccgaccagttcaagttcagcagcctgatggacagcatccccatggtgctggccaagaacaacgccatcaccatgaaccacagactgtacaccgaggcctgggacaaggacaagaccaccgtgcacatcatgcccgacacccccgaggtgctgctggccaagcagaacaaggtgaactacagcgagaagctgtacaagctgggcctggaggaggccaagagaaagggctacgacatgagagtggacgccatccccatcaaggccgccaaggccagcagagacatcgccagcgagttcaagtacaaggagggctacagaaagcagctgggccaccacatcggcgccagagccatcagagacgaccccaagatgatgtggagcatgcacgtggccaagatccagagcgacagagagtacaagaaggacttcgagaagtggaagaccaagttcagcagccccgtggacatgctgggcgtggtgctggccaagaagtgccagaccctggtgagcgacgtggactacaagaactacctgcaccagtggacctgcctgcccgaccagagcgacgtgatccacgccagacaggcctacgacctgcagagcgacaacatgtacaagagcgacctgcagtggatgagaggcatcggctgggtgagcatcggcagcctggacgtggagaagtgcaagagagccaccgagatcctgagcgacaagatctacagacagccccccgacagattcaagttcaccagcgtgaccgacagcctggagcaggtgctggccaagaacaacgccctgaacatgaacaagagactgtacaccgaggcctgggacaaggacaagacccagatccacatcatgcccgacacccccgagatcatgctggccagacagaacaagatcaactacagcgagaccctgtacaagctggccaacgaggaggccaagaagaagggctacgacctgagaagcgacgccatccccatcgtggccgccaaggccagcagagacgtgatcagcgactacaagtacaaggacggctacagaaagcagctgggccaccacatcggcgccagaaacatcgaggacgaccccaagatgatgtggagcatgcacgtggccaagatccagagcgacagagagtacaagaaggacttcgagaagtggaagaccaagttcagcagccccgtggacatgctgggcgtggtgctggccaagaagtgccagaccctggtgagcgacgtggactacaagaactacctgcacgagtggacctgcctgcccgaccagaacgacgtgatccacgccagacaggcctacgacctgcagagcgacaacatctacaagagcgacctgcagtggctgagaggcatcggctgggtgcccatcggcagcatggacgtggtgaagtgcaagagagccgccgagatcctgagcgacaacatctacagacagccccccgacaagctgaagttcaccagcgtgaccgacagcctggagcaggtgctggccaagaacaacgccctgaacatgaacaagagactgtacaccgaggcctgggacaaggacaagacccaggtgcacatcatgcccgacacccccgagatcatgctggccagacagaacaagatcaactacagcgagagcctgtacagacaggccatggaggaggccaagaaggagggctacgacctgagaagcgacgccatccccatcgtggccgccaaggccagcagagacatcgccagcgactacaagtacaaggaggcctacagaaagcagctgggccaccacatcggcgccagagccgtgcacgacgaccccaagatcatgtggagcctgcacatcgccaaggtgcagagcgacagagagtacaagaaggacttcgagaagtacaagaccagatacagcagccccgtggacatgctgggcatcgtgctggccaagaagtgccagaccctggtgagcgacgtggactacaagcaccccctgcacgagtggatctgcctgcccgaccagaacgacatcatccacgccagaaaggcctacgacctgcagagcgacaacctgtacaagagcgacctggagtggatgaagggcatcggctgggtgcccatcgacagcctggaggtggtgagagccaagagagccggcgagctgctgagcgacaccatctacagacagagacccgagaccctgaagttcaccagcatcaccgacacccccgagcaggtgctggccaagaacaacgccctgaacatgaacaagagactgtacaccgaggcctgggacaacgacaagaagaccatccacgtgatgcccgacacccccgagatcatgctggccaagctgaacagaatcaactacagcgacaagctgtacaagctggccctggaggagagcaagaaggagggctacgacctgagactggacgccatccccatccaggccgccaaggccagcagagacatcgccagcgactacaagtacaaggagggctacagaaagcagctgggccaccacatcggcgccagaaacatcaaggacgaccccaagatgatgtggagcatccacgtggccaagatccagagcgacagagagtacaagaaggagttcgagaagtggaagaccaagttcagcagccccgtggacatgctgggcgtggtgctggccaagaagtgccagatcctggtgagcgacatcgactacaagcaccccctgcacgagtggacctgcctgcccgaccagaacgacgtgatccaggccagaaaggcctacgacctgcagagcgacgccatctacaagagcgacctggagtggctgagaggcatcggctgggtgcccatcggcagcgtggaggtggagaaggtgaagagagccggcgagatcctgagcgacagaaagtacagacagcccgccgaccagctgaagttcacctgcatcaccgacacccccgagatcgtgctggccaagaacaacgccctgaccatgagcaagcacctgtacaccgaggcctgggacgccgacaagaccagcatccacgtgatgcccgacacccccgacatcctgctggccaagagcaacagcgccaacatcagccagaagctgtacaccaagggctgggacgagagcaagatgaaggactacgacctgagagccgacgccatcagcatcaagagcgccaaggccagcagagacatcgccagcgactacaagtacaaggaggcctacgagaagcagaagggccaccacatcggcgcccagagcatcgaggacgaccccaagatcatgtgcgccatccacgccggcaagatccagagcgagagagagtacaagaaggagttccagaagtggaagaccaagttcagcagccccgtggacatgctgagcatcctgctggccaagaagtgccagaccctggtgaccgacatcgactacagaaactacctgcacgagtggacctgcatgcccgaccagaacgacatcatccaggccaagaaggcctacgacctgcagagcgacgccctgtacaaggccgacctggagtggctgagaggcatcggctggatgccccagggcagccccgaggtgctgagagtgaagaacgcccagaacatcttctgcgacagcgtgtacagaacccccgtggtgaacctgaagtacaccagcatcgtggacacccccgaggtggtgctggccaagagcaacgccgagaacatcagcatccccaagtacagagaggtgtgggacaaggacaagaccagcatccacatcatgcccgacacccccgagatcaacctggccagagccaacgccctgaacgtgagcaacaagctgtacagagagggctgggacgagatgaaggccggctgcgacgtgagactggacgccatccccatccaggccgccaaggccagcagagagatcgccagcgactacaagtacaagctggaccacgagaagcagaagggccactacgtgggcaccctgaccgccagagacgacaacaagatcagatgggccctgatcgccgacaagctgcagaacgagagagagtacagactggactgggccaagtggaaggccaagatccagagccccgtggacatgctgagcatcctgcacagcaagaacagccaggccctggtgagcgacatggactacagaaactacctgcaccagtggacctgcatgcccgaccagaacgacgtgatccaggccaagaaggcctacgagctgcagagcgacaacgtgtacaaggccgacctggagtggctgagaggcatcggctggatgcccaacgacagcgtgagcgtgaaccacgccaagcacgccgccgacatcttcagcgagaagaagtacagaaccaagatcgagaccctgaacttcacccccgtggacgacagagtggactacgtgaccgccaagcagagcggcgagatcctggacgacatcaagtacagaaaggactggaacgccaccaagagcaagtacaccctgaccgagacccccctgctgcacaccgcccaggaggccgccagaatcctggaccagtacctgtacaaggagggctgggagagacagaaggccaccggctacatcctgccccccgacgccgtgcccttcgtgcacgcccaccactgcaacgacgtgcagagcgagctgaagtacaaggccgagcacgtgaagcagaagggccactacgtgggcgtgcccaccatgagagacgaccccaagctggtgtggttcgagcacgccggccagatccagaacgagagactgtacaaggaggactaccacaagaccaaggccaagatcaacatccccgccgacatggtgagcgtgctggccgccaagcagggccagaccctggtgagcgacatcgactacagaaactacctgcaccagtggatgtgccaccccgaccagaacgacgtgatccaggccagaaaggcctacgacctgcagagcgacaacgtgtacagagccgacctggagtggctgagaggcatcggctggatccccctggacagcgtggaccacgtgagagtgaccaagaaccaggagatgatgagccagatcaagtacaagaagaacgccctggagaactaccccaacttcagaagcgtggtggacccccccgagatcgtgctggccaagatcaacagcgtgaaccagagcgacgtgaagtacaaggagaccttcaacaaggccaagggcaagtacaccttcagccccgacaccccccacatcagccacagcaaggacatgggcaagctgtacagcaccatcctgtacaagggcgcctgggagggcaccaaggcctacggctacaccctggacgagagatacatccccatcgtgggcgccaagcacgccgacctggtgaacagcgagctgaagtacaaggagacctacgagaagcagaagggccactacctggccggcaaggtgatcggcgagttccccggcgtggtgcactgcctggacttccagaagatgagaagcgccctgaactacagaaagcactacgaggacaccaaggccaacgtgcacatccccaacgacatgatgaaccacgtgctggccaagagatgccagtacatcctgagcgacctggagtacagacactacttccaccagtggaccagcctgctggaggagcccaacgtgatcagagtgagaaacgcccaggagatcctgagcgacaacgtgtacaaggacgacctgaactggctgaagggcatcggctgctacgtgtgggacaccccccagatcctgcacgccaagaagagctacgacctgcagagccagctgcagtacaccgccgccggcaaggagaacctgcagaactacaacctggtgaccgacacccccctgtacgtgaccgccgtgcagagcggcatcaacgccagcgaggtgaagtacaaggagaactaccaccagatcaaggacaagtacaccaccgtgctggagaccgtggactacgacagaaccagaaacctgaagaacctgtacagcagcaacctgtacaaggaggcctgggacagagtgaaggccaccagctacatcctgcccagcagcaccctgagcctgacccacgccaagaaccagaagcacctggccagccacatcaagtacagagaggagtacgagaagttcaaggccctgtacaccctgcccagaagcgtggacgacgaccccaacaccgccagatgcctgagagtgggcaagctgaacatcgacagactgtacagaagcgtgtacgagaagaacaagatgaagatccacatcgtgcccgacatggtggagatggtgaccgccaaggacagccagaagaaggtgagcgagatcgactacagactgagactgcacgagtggatctgccaccccgacctgcaggtgaacgaccacgtgagaaaggtgaccgaccagatcagcgacatcgtgtacaaggacgacctgaactggctgaagggcatcggctgctacgtgtgggacacccccgagatcctgcacgccaagcacgcctacgacctgagagacgacatcaagtacaaggcccacatgctgaagaccagaaacgactacaagctggtgaccgacacccccgtgtacgtgcaggccgtgaagagcggcaagcagctgagcgacgccgtgtaccactacgactacgtgcacagcgtgagaggcaaggtggcccccaccaccaagaccgtggacctggacagagccctgcacgcctacaagctgcagagcagcaacctgtacaagaccagcctgagaaccctgcccaccggctacagactgcccggcgacaccccccacttcaagcacatcaaggacaccagatacatgagcagctacttcaagtacaaggaggcctacgagcacaccaaggcctacggctacaccctgggccccaaggacgtgcccttcgtgcacgtgagaagagtgaacaacgtgaccagcgagagactgtacagagagctgtaccacaagctgaaggacaagatccacaccacccccgacacccccgagatcagacaggtgaagaagacccaggaggccgtgagcgagctgatctacaagagcgacttcttcaagatgcagggccacatgatcagcctgccctacaccccccaggtgatccactgcagatacgtgggcgacatcaccagcgacatcaagtacaaggaggacctgcaggtgctgaagggcttcggctgcttcctgtacgacacccccgacatggtgagaagcagacacctgagaaagctgtggagcaactacctgtacaccgacaaggccagaaagatgagagacaagtacaaggtggtgctggacacccccgagtacagaaaggtgcaggagctgaagacccacctgagcgagctggtgtacagagccgccggcaagaagcagaagagcatcttcaccagcgtgcccgacacccccgacctgctgagagccaagagaggccagaagctgcagagccagtacctgtacgtggagctggccaccaaggagagaccccaccaccacgccggcaaccagaccaccgccctgaagcacgccaaggacgtgaaggacatggtgagcgagaagaagtacaagatccagtacgagaagatgaaggacaagtacacccccgtgcccgacacccccatcctgatcagagccaagagagcctactggaacgccagcgacctgagatacaaggagaccttccagaagaccaagggcaagtaccacaccgtgaaggacgccctggacatcgtgtaccacagaaaggtgaccgacgacatcagcaagatcaagtacaaggagaactacatgagccagctgggcatctggagaagcatccccgacagacccgagcacttccaccacagagccgtgaccgacaccgtgagcgacgtgaagtacaaggaggacctgacctggctgaagggcatcggctgctacgcctacgacacccccgacttcaccctggccgagaagaacaagaccctgtacagcaagtacaagtacaaggaggtgttcgagagaaccaagagcgacttcaagtacgtggccgacagccccatcaacagacacttcaagtacgccacccagctgatgaacgagaagaagtacagagccgactacgagcagagaaaggacaagtaccacctggtggtggacgagcccagacacctgctggccaagaccgccggcgaccagatcagccagatcaagtacagaaagaactacgagaagagcaaggacaagttcaccagcatcgtggacacccccgagcacctgagaaccaccaaggtgaacaagcagatcagcgacatcctgtacaagctggagtacaacaaggccaagcccagaggctacaccaccatccacgacacccccatgctgctgcacgtgagaaaggtgaaggacgaggtgagcgacctgaagtacaaggaggtgtaccagagaaacaagagcaactgcaccatcgagcccgacgccgtgcacatcaaggccgccaaggacgcctacaaggtgaacaccaacctggactacaagaagcagtacgaggccaacaaggcccactggaagtggacccccgacagacccgacttcctgcaggccgccaagagcagcctgcagcagagcgacttcgagtacaagctggacagagagttcctgaagggctgcaagctgagcgtgaccgacgacaagaacaccgtgctggccctgagaaacaccctgatcgagagcgacctgaagtacaaggagaagcacgtgaaggagagaggcacctgccacgccgtgcccgacaccccccagatcctgctggccaagaccgtgagcaacctggtgagcgagaacaagtacaaggaccacgtgaagaagcacctggcccagggcagctacaccaccctgcccgagaccagagacaccgtgcacgtgaaggaggtgaccaagcacgtgagcgacaccaactacaagaagaagttcgtgaaggagaagggcaagagcaactacagcatcatgctggagccccccgaggtgaagcacgccatggaggtggccaagaagcagagcgacgtggcctacagaaaggacgccaaggagaacctgcactacaccaccgtggccgacagacccgacatcaagaaggccacccaggccgccaagcaggccagcgaggtggagtacagagccaagcacagaaaggagggcagccacggcctgagcatgctgggcagacccgacatcgagatggccaagaaggccgccaagctgagcagccaggtgaagtacagagagaacttcgacaaggagaagggcaagacccccaagtacaaccccaaggacagccagctgtacaaggtgatgaaggacgccaacaacctggccagcgaggtgaagtacaaggccgacctgaagaagctgcacaagcccgtgaccgacatgaaggagagcctgatcatgaaccacgtgctgaacaccagccagctggccagcagctaccagtacaagaagaagtacgagaagagcaagggccactaccacaccatccccgacaacctggagcagctgcacctgaaggaggccaccgagctgcagagcatcgtgaagtacaaggagaagtacgagaaggagagaggcaagcccatgctggacttcgagacccccacctacatcaccgccaaggagagccagcagatgcagagcggcaaggagtacagaaaggactacgaggagagcatcaagggcagaaacctgaccggcctggaggtgacccccgccctgctgcacgtgaagtacgccaccaagatcgccagcgagaaggagtacagaaaggacctggaggagagcatcagaggcaagggcctgaccgagatggaggacacccccgacatgctgagagccaagaacgccacccagatcctgaacgagaaggagtacaagagagacctggagctggaggtgaagggcagaggcctgaacgccatggccaacgagacccccgacttcatgagagccagaaacgccaccgacatcgccagccagatcaagtacaagcagagcgccgagatggagaaggccaacttcaccagcgtggtggacacccccgagatcatccacgcccagcaggtgaagaacctgagcagccagaagaagtacaaggaggacgccgagaagagcatgagctactacgagaccgtgctggacacccccgagatccagagagtgagagagaaccagaagaacttcagcctgctgcagtaccagtgcgacctgaagaacagcaagggcaagatcaccgtggtgcaggacacccccgagatcctgagagtgaaggagaaccagaagaacttcagcagcgtgctgtacaaggaggacgtgagccccggcaccgccatcggcaagacccccgagatgatgagagtgaagcagacccaggaccacatcagcagcgtgaagtacaaggaggccatcggccagggcacccccatccccgacctgcccgaggtgaagagagtgaaggagacccagaagcacatcagcagcgtgatgtacaaggagaacctgggcaccggcatccccaccaccgtgacccccgagatcgagagagtgaagagaaaccaggagaacttcagcagcgtgctgtacaaggagaacctgggcaagggcatccccacccccatcacccccgagatggagagagtgaagagaaaccaggagaacttcagcagcgtgctgtacaaggagaacatgggcaagggcacccccctggccgtgacccccgagatggagagagtgaagcacaaccaggagaacatcagcagcgtgctgtacaaggagaacgtgggcaaggccaccgccacccccgtgacccccgagatgcagagagtgaagagaaaccaggagaacatcagcagcgtgctgtacaaggagaacctgggcaaggccacccccacccccttcacccccgagatggagagagtgaagagaaaccaggagaacttcagcagcgtgctgtacaaggagaacatgagaaaggccacccccacccccgtgacccccgagatggagagagccaagagaaaccaggagaacatcagcagcgtgctgtacagcgacagcttcagaaagcagatccagggcaaggccgcctacgtgctggacacccccgagatgagaagagtgagagagacccagagacacatcagcaccgtgaagtaccacgaggacttcgagaagcacaagggctgcttcacccccgtggtgaccgaccccatcaccgagagagtgaagaagaacatgcaggacttcagcgacatcaactacagaggcatccagagaaaggtggtggagatggagcagaagagaaacgaccaggaccaggagaccatcaccggcctgagagtgtggagaaccaaccccggcagcgtgttcgactacgaccccgccgaggacaacatccagagcagaagcctgcacatgatcaacgtgcaggcccagagaagaagcagagagcagagcagaagcgccagcgccctgagcatcagcggcggcgaggagaagagcgagcacagcgaggcccccgaccaccacctgagcacctacagcgacggcggcgtgttcgccgtgagcaccgcctacaagcacgccaagaccaccgagctgccccagcagagaagcagcagcgtggccacccagcagaccaccgtgagcagcatccccagccaccccagcaccgccggcaagatcttcagagccatgtacgactacatggccgccgacgccgacgaggtgagcttcaaggacggcgacgccatcatcaacgtgcaggccatcgacgagggctggatgtacggcaccgtgcagagaaccggcagaaccggcatgctgcccgccaactacgtggaggccatctag

SEQ ID NO: 90531 - DNA, 25578 bp, synthetic construct
  misc_feature 1..25578: note = Description of Artificial Sequence: Synthetic coding sequence
  source 1..25578: mol_type = other DNA
atggccgacgacgaggactacgaggaggtggtggagtactacaccgaggaggtggtgtacgaggaggtgcccggcgagaccatcaccaagatctacgagaccaccaccaccagaaccagcgactacgagcagagcgagaccagcaagcccgccctggcccagcccgccctggcccagcccgccagcgccaagcccgtggagagaagaaaggtgatcagaaagaaggtggaccccagcaagttcatgaccccctacatcgcccacagccagaagatgcaggacctgttcagccccaacaagtacaaggagaagttcgagaagaccaagggccagccctacgccagcaccaccgacacccccgagctgagaagaatcaagaaggtgcaggaccagctgagcgaggtgaagtacagaatggacggcgacgtggccaagaccatctgccacgtggacgagaaggccaaggacatcgagcacgccaagaaggtgagccagcaggtgagcaaggtgctgtacaagcagaactgggaggacaccaaggacaagtacctgctgccccccgacgcccccgagctggtgcaggccgtgaagaacaccgccatgttcagcaagaagctgtacaccgaggactgggaggccgacaagagcctgttctacccctacaacgacagccccgagctgagaagagtggcccaggcccagaaggccctgagcgacgtggcctacaagaagggcctggccgagcagcaggcccagttcacccccctggccgacccccccgacatcgagttcgccaagaaggtgaccaaccaggtgagcaagcagaagtacaaggaggactacgagaacaagatcaagggcaagtggagcgagaccccctgcttcgaggtggccaacgccagaatgaacgccgacaacatcagcaccagaaagtaccaggaggacttcgagaacatgaaggaccagatctacttcatgcagaccgagacccccgagtacaagatgaacaagaaggccggcgtggccgccagcaaggtgaagtacaaggaggactacgagaagaacaagggcaaggccgactacaacgtgctgcccgccagcgagaacccccagctgagacagctgaaggccgccggcgacgccctgagcgacaagctgtacaaggagaactacgagaagaccaaggccaagagcatcaactactgcgagacccccaagttcaagctggacaccgtgctgcagaacttcagcagcgacaagaagtacaaggacagctacctgaaggacatcctgggccactacgtgggcagcttcgaggacccctaccacagccactgcatgaaggtgaccgcccagaacagcgacaagaactacaaggccgagtacgaggaggacagaggcaagggcttcttcccccagaccatcacccaggagtacgaggccatcaagaagctggaccagtgcaaggaccacacctacaaggtgcaccccgacaagaccaagttcacccaggtgaccgacagccccgtgctgctgcaggcccaggtgaacagcaagcagctgagcgacctgaactacaaggccaagcacgagagcgagaagttcaagtgccacatcccccccgacacccccgccttcatccagcacaaggtgaacgcctacaacctgagcgacaacctgtacaagcaggactgggagaagagcaaggccaagaagttcgacatcaaggtggacgccatccccctgctggccgccaaggccaacaccaagaacaccagcgacgtgatgtacaagaaggactacgagaagaacaagggcaagatgatcggcgtgctgagcatcaacgacgaccccaagatgctgcacagcctgaaggtggccaagaaccagagcgacagactgtacaaggagaactacgagaagaccaaggccaagagcatgaactactgcgagacccccaagtaccagctggacacccagctgaagaacttcagcgaggccagatacaaggacctgtacgtgaaggacgtgctgggccactacgtgggcagcatggaggacccctaccacacccactgcatgaaggtggccgcccagaacagcgacaagagctacaaggccgagtacgaggaggacaagggcaagtgctacttcccccagaccatcacccaggagtacgaggccatcaagaagctggaccagtgcaaggaccacacctacaaggtgcaccccgacaagaccaagttcaccgccgtgaccgacagccccgtgctgctgcaggcccagctgaacaccaagcagctgagcgacctgaactacaaggccaagcacgagggcgagaagttcaagtgccacatccccgccgacgccccccagttcatccagcacagagtgaacgcctacaacctgagcgacaacgtgtacaagcaggactgggagaagagcaaggccaagaagttcgacatcaaggtggacgccatccccctgctggccgccaaggccaacaccaagaacaccagcgacgtgatgtacaagaaggactacgagaagagcaagggcaagatgatcggcgccctgagcatcaacgacgaccccaagatgctgcacagcctgaagaccgccaagaaccagagcgacagagagtacagaaaggactacgagaagagcaagaccatctacaccgcccccctggacatgctgcaggtgacccaggccaagaagagccaggccatcgccagcgacgtggactacaagcacatcctgcacagctacagctacccccccgacagcatcaacgtggacctggccaagaaggcctacgccctgcagagcgacgtggagtacaaggccgactacaacagctggatgaagggctgcggctgggtgcccttcggcagcctggagatggagaaggccaagagagccagcgacatcctgaacgagaagaagtacagacagcaccccgacaccctgaagttcaccagcatcgaggacgcccccatcaccgtgcagagcaagatcaaccaggcccagagaagcgacatcgcctacaaggccaagggcgaggagatcatccacaagtacaacctgccccccgacctgccccagttcatccaggccaaggtgaacgcctacaacatcagcgagaacatgtacaaggccgacctgaaggacctgagcaagaagggctacgacctgagaaccgacgccatccccatcagagccgccaaggccgccagacaggccgccagcgacgtgcagtacaagaaggactacgagaaggccaagggcaagatggtgggcttccagagcctgcaggacgaccccaagctggtgcactacatgaacgtggccaagatccagagcgacagagagtacaagaaggactacgagaagaccaagagcaagtacaacaccccccacgacatgttcaacgtggtggccgccaagaaggcccaggacgtggtgagcaacgtgaactacaagcacagcctgcaccactacacctacctgcccgacgccatggacctggagctgagcaagaacatgatgcagatccagagcgacaacgtgtacaaggaggactacaacaactggatgaagggcatcggctggatccccatcggcagcctggacgtggagaaggtgaagaaggccggcgacgccctgaacgagaagaagtacagacagcaccccgacaccctgaagttcaccagcatcgtggacagccccgtgatggtgcaggccaagcagaacaccaagcaggtgagcgacatcctgtacaaggccaagggcgaggacgtgaagcacaagtacaccatgagccccgacctgccccagttcctgcaggccaagtgcaacgcctacaacatcagcgacgtgtgctacaagagagactggtacgacctgatcgccaagggcaacaacgtgctgggcgacgccatccccatcaccgccgccaaggccagcagaaacatcgccagcgactacaagtacaaggaggcctacgagaagagcaagggcaagcacgtgggcttcagaagcctgcaggacgaccccaagctggtgcactacatgaacgtggccaagctgcagagcgacagagagtacaagaagaactacgagaacaccaagaccagctaccacacccccggcgacatggtgagcatcaccgccgccaagatggcccaggacgtggccaccaacgtgaactacaagcagcccctgcaccactacacctacctgcccgacgccatgagcctggagcacaccagaaacgtgaaccagatccagagcgacaacgtgtacaaggacgagtacaacagcttcctgaagggcatcggctggatccccatcggcagcctggaggtggagaaggtgaagaaggccggcgacgccctgaacgagagaaagtacagacagcaccccgacaccgtgaagttcaccagcgtgcccgacagcatgggcatggtgctggcccagcacaacaccaagcagctgagcgacctgaactacaaggtggagggcgagaagctgaagcacaagtacaccatcgaccccgagctgccccagttcatccaggccaaggtgaacgccctgaacatgagcgacgcccactacaaggccgactggaagaagaccatcgccaagggctacgacctgagacccgacgccatccccatcgtggccgccaagagcagcagaaacatcgccagcgactgcaagtacaaggaggcctacgagaaggccaagggcaagcaggtgggcttcctgagcctgcaggacgaccccaagctggtgcactacatgaacgtggccaagatccagagcgacagagagtacaagaagggctacgaggccagcaagaccaagtaccacacccccctggacatggtgagcgtgaccgccgccaagaagagccaggaggtggccaccaacgccaactacagacagagctaccaccactacaccctgctgcccgacgccctgaacgtggagcacagcagaaacgccatgcagatccagagcgacaacctgtacaagagcgacttcaccaactggatgaagggcatcggctgggtgcccatcgagagcctggaggtggagaaggccaagaaggccggcgagatcctgagcgagaagaagtacagacagcaccccgagaagctgaagttcacctacgccatggacaccatggagcaggccctgaacaagagcaacaagctgaacatggacaagagactgtacaccgagaagtggaacaaggacaagaccaccatccacgtgatgcccgacacccccgacatcctgctgagcagagtgaaccagatcaccatgagcgacaagctgtacaaggccggctgggaggaggagaagaagaagggctacgacctgagacccgacgccatcgccatcaaggccgccagagccagcagagacatcgccagcgactacaagtacaagaaggcctacgagcaggccaagggcaagcacatcggcttcagaagcctggaggacgaccccaagctggtgcacttcatgcaggtggccaagatgcagagcgacagagagtacaagaagggctacgagaagagcaagaccagcttccacacccccgtggacatgctgagcgtggtggccgccaagaagagccaggaggtggccaccaacgccaactacagaaacgtgatccacacctacaacatgctgcccgacgccatgagcttcgagctggccaagaacatgatgcagatccagagcgacaaccagtacaaggccgactacgccgacttcatgaagggcatcggctggctgcccctgggcagcctggaggccgagaagaacaagaaggccatggagatcatcagcgagaagaagtacagacagcaccccgacaccctgaagtacagcaccctgatggacagcatgaacatggtgctggcccagaacaacgccaagatcatgaacgagcacctgtacaagcaggcctgggaggccgacaagaccaaggtgcacatcatgcccgacatcccccagatcatcctggccaaggccaacgccatcaacatgagcgacaagctgtacaagctgagcctggaggagagcaagaagaagggctacgacctgagacccgacgccatccccatcaaggccgccaaggccagcagagacatcgccagcgactacaagtacaagtacaactacgagaagggcaagggcaagatggtgggcttcagaagcctggaggacgaccccaagctggtgcacagcatgcaggtggccaagatgcagagcgacagagagtacaagaagaactacgagaacaccaagaccagctaccacacccccgccgacatgctgagcgtgaccgccgccaaggacgcccaggccaacatcaccaacaccaactacaagcacctgatccacaagtacatcctgctgcccgacgccatgaacatcgagctgaccagaaacatgaacagaatccagagcgacaacgagtacaagcaggactacaacgagtggtacaagggcctgggctggagccccgccggcagcctggaggtggagaaggccaagaaggccaccgagtacgccagcgaccagaagtacagacagcaccccagcaacttccagttcaagaagctgaccgacagcatggacatggtgctggccaagcagaacgcccacaccatgaacaagcacctgtacaccatcgactggaacaaggacaagaccaagatccacgtgatgcccgacacccccgacatcctgcaggccaagcagaaccagaccctgtacagccagaagctgtacaagctgggctgggaggaggccctgaagaagggctacgacctgcccgtggacgccatcagcgtgcagctggccaaggccagcagagacatcgccagcgactacaagtacaagcagggctacagaaagcagctgggccaccacgtgggcttcagaagcctgcaggacgaccccaagctggtgctgagcatgaacgtggccaagatgcagagcgagagagagtacaagaaggacttcgagaagtggaagaccaagttcagcagccccgtggacatgctgggcgtggtgctggccaagaagtgccaggagctggtgagcgacgtggactacaagaactacctgcaccagtggacctgcctgcccgaccagaacgacgtggtgcaggccaagaaggtgtacgagctgcagagcgagaacctgtacaagagcgacctggagtggctgagaggcatcggctggagccccctgggcagcctggaggccgagaagaacaagagagccagcgagatcatcagcgagaagaagtacagacagccccccgacagaaacaagttcaccagcatccccgacgccatggacatcgtgctggccaagaccaacgccaagaacagaagcgacagactgtacagagaggcctgggacaaggacaagacccagatccacatcatgcccgacacccccgacatcgtgctggccaaggccaacctgatcaacaccagcgacaagctgtacagaatgggctacgaggagctgaagagaaagggctacgacctgcccgtggacgccatccccatcaaggccgccaaggccagcagagagatcgccagcgagtacaagtacaaggagggcttcagaaagcagctgggccaccacatcggcgccagaaacatcgaggacgaccccaagatgatgtggagcatgcacgtggccaagatccagagcgacagagagtacaagaaggacttcgagaagtggaagaccaagttcagcagccccgtggacatgctgggcgtggtgctggccaagaagtgccagaccctggtgagcgacgtggactacaagaactacctgcaccagtggacctgcctgcccgaccagagcgacgtgatccacgccagacaggcctacgacctgcagagcgacaacctgtacaagagcgacctgcagtggctgaagggcatcggctggatgaccagcggcagcctggaggacgagaagaacaagagagccacccagatcctgagcgaccacgtgtacagacagcaccccgaccagttcaagttcagcagcctgatggacagcatccccatggtgctggccaagaacaacgccatcaccatgaaccacagactgtacaccgaggcctgggacaaggacaagaccaccgtgcacatcatgcccgacacccccgaggtgctgctggccaagcagaacaaggtgaactacagcgagaagctgtacaagctgggcctggaggaggccaagagaaagggctacgacatgagagtggacgccatccccatcaaggccgccaaggccagcagagacatcgccagcgagttcaagtacaaggagggctacagaaagcagctgggccaccacatcggcgccagagccatcagagacgaccccaagatgatgtggagcatgcacgtggccaagatccagagcgacagagagtacaagaaggacttcgagaagtggaagaccaagttcagcagccccgtggacatgctgggcgtggtgctggccaagaagtgccagaccctggtgagcgacgtggactacaagaactacctgcaccagtggacctgcctgcccgaccagagcgacgtgatccacgccagacaggcctacgacctgcagagcgacaacatgtacaagagcgacctgcagtggatgagaggcatcggctgggtgagcatcggcagcctggacgtggagaagtgcaagagagccaccgagatcctgagcgacaagatctacagacagccccccgacagattcaagttcaccagcgtgaccgacagcctggagcaggtgctggccaagaacaacgccatcaccatgaacaagagactgtacaccgaggcctgggacaaggacaagacccagatccacatcatgcccgacacccccgagatcatgctggccagaatgaacaagatcaactacagcgagagcctgtacaagctggccaacgaggaggccaagaagaagggctacgacctgagaagcgacgccatccccatcgtggccgccaaggccagcagagacatcatcagcgactacaagtacaaggacggctactgcaagcagctgggccaccacatcggcgccagaaacatcgaggacgaccccaagatgatgtggagcatgcacgtggccaagatccagagcgacagagagtacaagaaggacttcgagaagtggaagaccaagttcagcagccccgtggacatgctgggcgtggtgctggccaagaagtgccagaccctggtgagcgacgtggactacaagaactacctgcacgagtggacctgcctgcccgaccagagcgacgtgatccacgccagacaggcctacgacctgcagagcgacaacatctacaagagcgacctgcagtggctgagaggcatcggctgggtgcccatcggcagcatggacgtggtgaagtgcaagagagccaccgagatcctgagcgacaacatctacagacagccccccgacaagctgaagttcaccagcgtgaccgacagcctggagcaggtgctggccaagaacaacgccctgaacatgaacaagagactgtacaccgaggcctgggacaaggacaagacccagatccacatcatgcccgacacccccgagatcatgctggccagacagaacaagatcaactacagcgagaccctgtacaagctggccaacgaggaggccaagaagaagggctacgacctgagaagcgacgccatccccatcgtggccgccaaggccagcagagacgtgatcagcgactacaagtacaaggacggctacagaaagcagctgggccaccacatcggcgccagaaacatcgaggacgaccccaagatgatgtggagcatgcacgtggccaagatccagagcgacagagagtacaagaaggacttcgagaagtggaagaccaagttcagcagccccgtggacatgctgggcgtggtgctggccaagaagtgccagaccctggtgagcgacgtggactacaagaactacctgcacgagtggacctgcctgcccgaccagaacgacgtgatccacgccagacaggcctacgacctgcagagcgacaacatctacaagagcgacctgcagtggctgagaggcatcggctgggtgcccatcggcagcatggacgtggtgaagtgcaagagagccgccgagatcctgagcgacaacatctacagacagccccccgacaagctgaagttcaccagcgtgaccgacagcctggagcaggtgctggccaagaacaacgccctgaacatgaacaagagactgtacaccgaggcctgggacaaggacaagacccaggtgcacatcatgcccgacacccccgagatcatgctggccagacagaacaagatcaactacagcgagagcctgtacagacaggccatggaggaggccaagaaggagggctacgacctgagaagcgacgccatccccatcgtggccgccaaggccagcagagacatcgccagcgactacaagtacaaggaggcctacagaaagcagctgggccaccacatcggcgccagagccgtgcacgacgaccccaagatcatgtggagcctgcacatcgccaaggtgcagagcgacagagagtacaagaaggacttcgagaagtacaagaccagatacagcagccccgtggacatgctgggcatcgtgctggccaagaagtgccagaccctggtgagcgacgtggactacaagcaccccctgcacgagtggatctgcctgcccgaccagaacgacatcatccacgccagaaaggcctacgacctgcagagcgacaacctgtacaagagcgacctggagtggatgaagggcatcggctgggtgcccatcgacagcctggaggtggtgagagccaagagagccggcgagctgctgagcgacaccatctacagacagagacccgagaccctgaagttcaccagcatcaccgacacccccgagcaggtgctggccaagaacaacgccctgaacatgaacaagagactgtacaccgaggcctgggacaacgacaagaagaccatccacgtgatgcccgacacccccgagatcatgctggccaagctgaacagaatcaactacagcgacaagctgtacaagctggccctggaggagagcaagaaggagggctacgacctgagactggacgccatccccatccaggccgccaaggccagcagagacatcgccagcgactacaagtacaaggagggctacagaaagcagctgggccaccacatcggcgccagaaacatcaaggacgaccccaagatgatgtggagcatccacgtggccaagatccagagcgacagagagtacaagaaggagttcgagaagtggaagaccaagttcagcagccccgtggacatgctgggcgtggtgctggccaagaagtgccagatcctggtgagcgacatcgactacaagcaccccctgcacgagtggacctgcctgcccgaccagaacgacgtgatccaggccagaaaggcctacgacctgcagagcgacgccatctacaagagcgacctggagtggctgagaggcatcggctgggtgcccatcggcagcgtggaggtggagaaggtgaagagagccggcgagatcctgagcgacagaaagtacagacagcccgccgaccagctgaagttcacctgcatcaccgacacccccgagatcgtgctggccaagaacaacgccctgaccatgagcaagcacctgtacaccgaggcctgggacgccgacaagaccagcatccacgtgatgcccgacacccccgacatcctgctggccaagagcaacagcgccaacatcagccagaagctgtacaccaagggctgggacgagagcaagatgaaggactacgacctgagagccgacgccatcagcatcaagagcgccaaggccagcagagacatcgccagcgactacaagtacaaggaggcctacgagaagcagaagggccaccacatcggcgcccagagcatcgaggacgaccccaagatcatgtgcgccatccacgccggcaagatccagagcgagagagagtacaagaaggagttccagaagtggaagaccaagttcagcagccccgtggacatgctgagcatcctgctggccaagaagtgccagaccctggtgaccgacatcgactacagaaactacctgcacgagtggacctgcatgcccgaccagaacgacatcatccaggccaagaaggcctacgacctgcagagcgacagcgtgtacaaggccgacctggagtggctgagaggcatcggctggatgcccgagggcagcgtggagatgaacagagtgaaggtggcccaggacctggtgaacgagagactgtacagaaccagacccgaggccctgagcttcaccagcatcgtggacacccccgaggtggtgctggccaaggccaacagcctgcagatcagcgagaagctgtaccaggaggcctggaacaaggacaagagcaacatcaccatccccagcgacacccccgagatgctgcaggcccacatcaacgccctgcagatcagcaacaagctgtaccagaaggactggaacgacgccaagcagaagggctacgacatcagagccgacgccatcgagatcaagcacgccaaggccagcagagagatcgccagcgagtacaagtacaaggagggctacagaaagcagctgggccaccacatgggcttcagaaccctgcaggacgaccccaagagcgtgtgggccatccacgccgccaagatccagagcgacagagagtacaagaaggcctacgagaagagcaagggcatccacaacacccccctggacatgatgagcatcgtgcaggccaagaagtgccaggtgctggtgagcgacatcgactacagaaactacctgcaccagtggacctgcctgcccgaccagaacgacgtgatccaggccaagaaggcctacgacctgcagagcgacaacctgtacaagagcgacctggagtggctgaagggcatcggctggctgcccgagggcagcgtggaggtgatgagagtgaagaacgcccagaacctgctgaacgagagactgtacagaatcaagcccgaggccctgaagttcaccagcatcgtggacacccccgaggtgatccaggccaagatcaacgccgtgcagatcagcgagcccctgtacagagacgcctgggagaaggagaaggccaacgtgaacgtgcccgccgacacccccctgatgctgcagagcaagatcaacgccctgcagatcagcaacaagagataccagcaggcctgggaggacgtgaagatgaccggctacgacctgagagccgacgccatcggcatccagcacgccaaggccagcagagacatcgccagcgactacctgtacaagaccgcctacgagaagcagaagggccactacatcggctgcagaagcgccaaggaggaccccaagctggtgtgggccgccaacgtgctgaagatgcagaacgacagactgtacaagaaggcctacaacgaccacaaggccaagatcagcatccccgtggacatggtgagcatcagcgccgccaaggagggccaggccctggccagcgacgtggactacagacactacctgcaccactggagctgcttccccgaccagaacgacgtgatccaggccagaaaggcctacgacctgcagagcgacagcgtgtacaaggccgacctggagtggctgagaggcatcggctggatgcccgagggcagcgtggagatgaacagagtgaaggtggcccaggacctggtgaacgagagactgtacagaaccagacccgaggccctgagcttcaccagcatcgtggacacccccgaggtggtgctggccaaggccaacagcctgcagatcagcgagaagctgtaccaggaggcctggaacaaggacaagagcaacatcaccatccccagcgacacccccgagatgctgcaggcccacatcaacgccctgcagatcagcaacaagctgtaccagaaggactggaacgacaccaagcagaagggctacgacatcagagccgacgccatcgagatcaagcacgccaaggccagcagagagatcgccagcgagtacaagtacaaggagggctacagaaagcagctgggccaccacatgggcttcagaaccctgcaggacgaccccaagagcgtgtgggccatccacgccgccaagatccagagcgacagagagtacaagaaggcctacgagaagagcaagggcatccacaacacccccctggacatgatgagcatcgtgcaggccaagaagtgccaggtgctggtgagcgacatcgactacagaaactacctgcaccagtggacctgcctgcccgaccagaacgacgtgatccaggccaagaaggcctacgacctgcagagcgacaacctgtacaagagcgacctggagtggctgaagggcatcggctggctgcccgagggcagcgtggaggtgatgagagtgaagaacgcccagaacctgctgaacgagagactgtacagaatcaagcccgaggccctgaagttcaccagcatcgtggacacccccgaggtgatccaggccaagatcaacgccgtgcagatcagcgagcccctgtacagaaacgcctgggagaaggagaaggccaacgtgaacgtgcccgccgacacccccctgatgctgcagagcaagatcaacgccctgcagatcagcaacaagagataccagcaggcctgggaggacgtgaagatgaccggctacgacctgagagccgacgccatcggcatccagcacgccaaggccagcagagacatcgccagcgactacctgtacaagaccgcctacgagaagcagaagggccactacatcggctgcagaagcgccaaggaggaccccaagctggtgtgggccgccaacgtgctgaagatgcagaacgacagactgtacaagaaggcctacaacgaccacaaggccaagatcagcatccccgtggacatggtgagcatcagcgccgccaaggagggccaggccctggccagcgacgtggactacagacactacctgcaccactggagctgcttccccgaccagaacgacgtgatccaggccagaaaggcctacgacctgcagagcgacagcgtgtacaaggccgacctggagtggctgagaggcatcggctggatgcccgagggcagcgtggagatgaacagagtgaaggtggcccaggacctggtgaacgagagactgtacagaaccagacccgaggccctgagcttcaccagcatcgtggacacccccgaggtggtgctggccaaggccaacagcctgcagatcagcgagaagctgtaccaggaggcctggaacaaggacaagagcaacatcaccatccccagcgacacccccgagatgctgcaggcccacatcaacgccctgcagatcagcaacaagctgtaccagaaggactggaacgacaccaagcagaagggctacgacatcagagccgacgccatcgagatcaagcacgccaaggccagcagagagatcgccagcgagtacaagtacaaggagggctacagaaagcagctgggccaccacatgggcttcagaaccctgcaggacgaccccaagagcgtgtgggccatccacgccgccaagatccagagcgacagagagtacaagaaggcctacgagaagagcaagggcatccacaacacccccctggacatgatgagcatcgtgcaggccaagaagtgccaggtgctggtgagcgacatcgactacagaaactacctgcaccagtggacctgcctgcccgaccagaacgacgtgatccaggccaagaaggcctacgacctgcagagcgacaacctgtacaagagcgacctggagtggctgaagggcatcggctggctgcccgagggcagcgtggaggtgatgagagtgaagaacgcccagaacctgctgaacgagagactgtacagaatcaagcccgaggccctgaagttcaccagcatcgtggacacccccgaggtgatccaggccaagatcaacgccgtgcagatcagcgagcccctgtacagagacgcctgggagaaggagaaggccaacgtgaacgtgcccgccgacacccccctgatgctgcagagcaagatcaacgccctgcagatcagcaacaagagataccagcaggcctgggaggacgtgaagatgaccggctacgacctgagagccgacgccatcggcatccagcacgccaaggccagcagagacatcgccagcgactacctgtacaagaccgcctacgagaagcagaagggccactacatcggctgcagaagcgccaaggaggaccccaagctggtgtgggccgccaacgtgctgaagatgcagaacgacagactgtacaagaaggcctacaacgaccacaaggccaagatcagcatccccgtggacatggtgagcatcagcgccgccaaggagggccaggccctggccagcgacgtggactacagacactacctgcacagatggagctgcttccccgaccagaacgacgtgatccaggccagaaaggcctacgacctgcagagcgacgccctgtacaaggccgacctggagtggctgagaggcatcggctggatgccccagggcagccccgaggtgctgagagtgaagaacgcccagaacatcttctgcgacagcgtgtacagaacccccgtggtgaacctgaagtacaccagcatcgtggacacccccgaggtggtgctggccaagagcaacgccgagaacatcagcatccccaagtacagagaggtgtgggacaaggacaagaccagcatccacatcatgcccgacacccccgagatcaacctggccagagccaacgccctgaacgtgagcaacaagctgtacagagagggctgggacgagatgaaggccggctgcgacgtgagactggacgccatccccatccaggccgccaaggccagcagagagatcgccagcgactacaagtacaagctggaccacgagaagcagaagggccactacgtgggcaccctgaccgccagagacgacaacaagatcagatgggccctgatcgccgacaagctgcagaacgagagagagtacagactggactgggccaagtggaaggccaagatccagagccccgtggacatgctgagcatcctgcacagcaagaacagccaggccctggtgagcgacatggactacagaaactacctgcaccagtggacctgcatgcccgaccagaacgacgtgatccaggccaagaaggcctacgagctgcagagcgacaacgtgtacaaggccgacctggagtggctgagaggcatcggctggatgcccaacgacagcgtgagcgtgaaccacgccaagcacgccgccgacatcttcagcgagaagaagtacagaaccaagatcgagaccctgaacttcacccccgtggacgacagagtggactacgtgaccgccaagcagagcggcgagatcctggacgacatcaagtacagaaaggactggaacgccaccaagagcaagtacaccctgaccgagacccccctgctgcacaccgcccaggaggccgccagaatcctggaccagtacctgtacaaggagggctgggagagacagaaggccaccggctacatcctgccccccgacgccgtgcccttcgtgcacgcccaccactgcaacgacgtgcagagcgagctgaagtacaaggccgagcacgtgaagcagaagggccactacgtgggcgtgcccaccatgagagacgaccccaagctggtgtggttcgagcacgccggccagatccagaacgagagactgtacaaggaggactaccacaagaccaaggccaagatcaacatccccgccgacatggtgagcgtgctggccgccaagcagggccagaccctggtgagcgacatcgactacagaaactacctgcaccagtggatgtgccaccccgaccagaacgacgtgatccaggccagaaaggcctacgacctgcagagcgacaacgtgtacagagccgacctggagtggctgagaggcatcggctggatccccctggacagcgtggaccacgtgagagtgaccaagaaccaggagatgatgagccagatcaagtacaagaagaacgccctggagaactaccccaacttcagaagcgtggtggacccccccgagatcgtgctggccaagatcaacagcgtgaaccagagcgacgtgaagtacaaggagaccttcaacaaggccaagggcaagtacaccttcagccccgacaccccccacatcagccacagcaaggacatgggcaagctgtacagcaccatcctgtacaagggcgcctgggagggcaccaaggcctacggctacaccctggacgagagatacatccccatcgtgggcgccaagcacgccgacctggtgaacagcgagctgaagtacaaggagacctacgagaagcagaagggccactacctggccggcaaggtgatcggcgagttccccggcgtggtgcactgcctggacttccagaagatgagaagcgccctgaactacagaaagcactacgaggacaccaaggccaacgtgcacatccccaacgacatgatgaaccacgtgctggccaagagatgccagtacatcctgagcgacctggagtacagacactacttccaccagtggaccagcctgctggaggagcccaacgtgatcagagtgagaaacgcccaggagatcctgagcgacaacgtgtacaaggacgacctgaactggctgaagggcatcggctgctacgtgtgggacaccccccagatcctgcacgccaagaagagctacgacctgcagagccagctgcagtacaccgccgccggcaaggagaacctgcagaactacaacctggtgaccgacacccccctgtacgtgaccgccgtgcagagcggcatcaacgccagcgaggtgaagtacaaggagaactaccaccagatcaaggacaagtacaccaccgtgctggagaccgtggactacgacagaaccagaaacctgaagaacctgtacagcagcaacctgtacaaggaggcctgggacagagtgaaggccaccagctacatcctgcccagcagcaccctgagcctgacccacgccaagaaccagaagcacctggccagccacatcaagtacagagaggagtacgagaagttcaaggccctgtacaccctgcccagaagcgtggacgacgaccccaacaccgccagatgcctgagagtgggcaagctgaacatcgacagactgtacagaagcgtgtacgagaagaacaagatgaagatccacatcgtgcccgacatggtggagatggtgaccgccaaggacagccagaagaaggtgagcgagatcgactacagactgagactgcacgagtggatctgccaccccgacctgcaggtgaacgaccacgtgagaaaggtgaccgaccagatcagcgacatcgtgtacaaggacgacctgaactggctgaagggcatcggctgctacgtgtgggacacccccgagatcctgcacgccaagcacgcctacgacctgagagacgacatcaagtacaaggcccacatgctgaagaccagaaacgactacaagctggtgaccgacacccccgtgtacgtgcaggccgtgaagagcggcaagcagctgagcgacgccgtgtaccactacgactacgtgcacagcgtgagaggcaaggtggcccccaccaccaagaccgtggacctggacagagccctgcacgcctacaagctgcagagcagcaacctgtacaagaccagcctgagaaccctgcccaccggctacagactgcccggcgacaccccccacttcaagcacatcaaggacaccagatacatgagcagctacttcaagtacaaggaggcctacgagcacaccaaggcctacggctacaccctgggccccaaggacgtgcccttcgtgcacgtgagaagagtgaacaacgtgaccagcgagagactgtacagagagctgtaccacaagctgaaggacaagatccacaccacccccgacacccccgagatcagacaggtgaagaagacccaggaggccgtgagcgagctgatctacaagagcgacttcttcaagatgcagggccacatgatcagcctgccctacaccccccaggtgatccactgcagatacgtgggcgacatcaccagcgacatcaagtacaaggaggacctgcaggtgctgaagggcttcggctgcttcctgtacgacacccccgacatggtgagaagcagacacctgagaaagctgtggagcaactacctgtacaccgacaaggccagaaagatgagagacaagtacaaggtggtgctggacacccccgagtacagaaaggtgcaggagctgaagacccacctgagcgagctggtgtacagagccgccggcaagaagcagaagagcatcttcaccagcgtgcccgacacccccgacctgctgagagccaagagaggccagaagctgcagagccagtacctgtacgtggagctggccaccaaggagagaccccaccaccacgccggcaaccagaccaccgccctgaagcacgccaaggacgtgaaggacatggtgagcgagaagaagtacaagatccagtacgagaagatgaaggacaagtacacccccgtgcccgacacccccatcctgatcagagccaagagagcctactggaacgccagcgacctgagatacaaggagaccttccagaagaccaagggcaagtaccacaccgtgaaggacgccctggacatcgtgtaccacagaaaggtgaccgacgacatcagcaagatcaagtacaaggagaactacatgagccagctgggcatctggagaagcatccccgacagacccgagcacttccaccacagagccgtgaccgacaccgtgagcgacgtgaagtacaaggaggacctgacctggctgaagggcatcggctgctacgcctacgacacccccgacttcaccctggccgagaagaacaagaccctgtacagcaagtacaagtacaaggaggtgttcgagagaaccaagagcgacttcaagtacgtggccgacagccccatcaacagacacttcaagtacgccacccagctgatgaacgagaagaagtacagagccgactacgagcagagaaaggacaagtaccacctggtggtggacgagcccagacacctgctggccaagaccgccggcgaccagatcagccagatcaagtacagaaagaactacgagaagagcaaggacaagttcaccagcatcgtggacacccccgagcacctgagaaccaccaaggtgaacaagcagatcagcgacatcctgtacaagctggagtacaacaaggccaagcccagaggctacaccaccatccacgacacccccatgctgctgcacgtgagaaaggtgaaggacgaggtgagcgacctgaagtacaaggaggtgtaccagagaaacaagagcaactgcaccatcgagcccgacgccgtgcacatcaaggccgccaaggacgcctacaaggtgaacaccaacctggactacaagaagcagtacgaggccaacaaggcccactggaagtggacccccgacagacccgacttcctgcaggccgccaagagcagcctgcagcagagcgacttcgagtacaagctggacagagagttcctgaagggctgcaagctgagcgtgaccgacgacaagaacaccgtgctggccctgagaaacaccctgatcgagagcgacctgaagtacaaggagaagcacgtgaaggagagaggcacctgccacgccgtgcccgacaccccccagatcctgctggccaagaccgtgagcaacctggtgagcgagaacaagtacaaggaccacgtgaagaagcacctggcccagggcagctacaccaccctgcccgagaccagagacaccgtgcacgtgaaggaggtgaccaagcacgtgagcgacaccaactacaagaagaagttcgtgaaggagaagggcaagagcaactacagcatcatgctggagccccccgaggtgaagcacgccatggaggtggccaagaagcagagcgacgtggcctacagaaaggacgccaaggagaacctgcactacaccaccgtggccgacagacccgacatcaagaaggccacccaggccgccaagcaggccagcgaggtggagtacagagccaagcacagaaaggagggcagccacggcctgagcatgctgggcagacccgacatcgagatggccaagaaggccgccaagctgagcagccaggtgaagtacagagagaacttcgacaaggagaagggcaagacccccaagtacaaccccaaggacagccagctgtacaaggtgatgaaggacgccaacaacctggccagcgaggtgaagtacaaggccgacctgaagaagctgcacaagcccgtgaccgacatgaaggagagcctgatcatgaaccacgtgctgaacaccagccagctggccagcagctaccagtacaagaagaagtacgagaagagcaagggccactaccacaccatccccgacaacctggagcagctgcacctgaaggaggccaccgagctgcagagcatcgtgaagtacaaggagaagtacgagaaggagagaggcaagcccatgctggacttcgagacccccacctacatcaccgccaaggagagccagcagatgcagagcggcaaggagtacagaaaggactacgaggagagcatcaagggcagaaacctgaccggcctggaggtgacccccgccctgctgcacgtgaagtacgccaccaagatcgccagcgagaaggagtacagaaaggacctggaggagagcatcagaggcaagggcctgaccgagatggaggacacccccgacatgctgagagccaagaacgccacccagatcctgaacgagaaggagtacaagagagacctggagctggaggtgaagggcagaggcctgaacgccatggccaacgagacccccgacttcatgagagccagaaacgccaccgacatcgccagccagatcaagtacaagcagagcgccgagatggagaaggccaacttcaccagcgtggtggacacccccgagatcatccacgcccagcaggtgaagaacctgagcagccagaagaagtacaaggaggacgccgagaagagcatgagctactacgagaccgtgctggacacccccgagatccagagagtgagagagaaccagaagaacttcagcctgctgcagtaccagtgcgacctgaagaacagcaagggcaagatcaccgtggtgcaggacacccccgagatcctgagagtgaaggagaaccagaagaacttcagcagcgtgctgtacaaggaggacgtgagccccggcaccgccatcggcaagacccccgagatgatgagagtgaagcagacccaggaccacatcagcagcgtgaagtacaaggaggccatcggccagggcacccccatccccgacctgcccgaggtgaagagagtgaaggagacccagaagcacatcagcagcgtgatgtacaaggagaacctgggcaccggcatccccaccaccgtgacccccgagatcgagagagtgaagagaaaccaggagaacttcagcagcgtgctgtacaaggagaacctgggcaagggcatccccacccccatcacccccgagatggagagagtgaagagaaaccaggagaacttcagcagcatcctgtacaaggagaacctgagcaagggcacccccctgcccgtgacccccgagatggagagagtgaagctgaaccaggagaacttcagcagcgtgctgtacaaggagaacgtgggcaagggcatccccatccccatcacccccgagatggagagagtgaagcacaaccaggagaacttcagcagcgtgctgtacaaggagaacctgggcaccggcatccccatccccatcacccccgagatgcagagagtgaagcacaaccaggagaacctgagcagcgtgctgtacaaggagaacatgggcaagggcacccccctgcccgtgacccccgagatggagagagtgaagcacaaccaggagaacatcagcagcgtgctgtacaaggagaacatgggcaagggcacccccctgcccgtgacccccgagatggagagagtgaagcacaaccaggagaacatcagcagcgtgctgtacaaggagaacatgggcaagggcacccccctggccgtgacccccgagatggagagagtgaagcacaaccaggagaacatcagcagcgtgctgtacaaggagaacgtgggcaaggccaccgccacccccgtgacccccgagatgcagagagtgaagagaaaccaggagaacatcagcagcgtgctgtacaaggagaacctgggcaaggccacccccacccccttcacccccgagatggagagagtgaagagaaaccaggagaacttcagcagcgtgctgtacaaggagaacatgagaaaggccacccccacccccgtgacccccgagatggagagagccaagagaaaccaggagaacatcagcagcgtgctgtacagcgacagcttcagaaagcagatccagggcaaggccgcctacgtgctggacacccccgagatgagaagagtgagagagacccagagacacatcagcaccgtgaagtaccacgaggacttcgagaagcacaagggctgcttcacccccgtggtgaccgaccccatcaccgagagagtgaagaagaacatgcaggacttcagcgacatcaactacagaggcatccagagaaaggtggtggagatggagcagaagagaaacgaccaggaccaggagaccatcaccggcctgagagtgtggagaaccaaccccggcagcgtgttcgactacgaccccgccgaggacaacatccagagcagaagcctgcacatgatcaacgtgcaggcccagagaagaagcagagagcagagcagaagcgccagcgccctgagcatcagcggcggcgaggagaagagcgagcacagcgaggcccccgaccaccacctgagcacctacagcgacggcggcgtgttcgccgtgagcaccgcctacaagcacgccaagaccaccgagctgccccagcagagaagcagcagcgtggccacccagcagaccaccgtgagcagcatccccagccaccccagcaccgccggcaagatcttcagagccatgtacgactacatggccgccgacgccgacgaggtgagcttcaaggacggcgacgccatcatcaacgtgcaggccatcgacgagggctggatgtacggcaccgtgcagagaaccggcagaaccggcatgctgcccgccaactacgtggaggccatctag

SEQ ID NO: 90532 - DNA, 864 bp, synthetic construct
  misc_feature 1..864: note = Description of Artificial Sequence: Synthetic coding sequence
  source 1..864: mol_type = other DNA
atggccgacgacgaggactacgaggaggtggtggagtactacaccgaggaggtggtgtacgaggaggtgcccggcgagaccatcaccaagatctacgagaccaccaccaccagaaccagcgactacgagcagagcgagaccagcaagcccgccctggcccagcccgccctggcccagcccgccagcgccaagcccgtggagagaagaaaggtgatcagaaagaaggtggaccccagcaagttcatgaccccctacatcgcccacagccagaagatgcaggacctgttcagccccaacaagtacaaggagaagttcgagaagaccaagggccagccctacgccagcaccaccgacacccccgagctgagaagaatcaagaaggtgcaggaccagctgagcgaggtgaagtacagaatggacggcgacgtggccaagaccatctgccacgtggacgagaaggccaaggacatcgagcacgccaagaaggtgagccagcaggtgagcaaggtgctgtacaagcagaactgggaggacaccaaggacaagtacctgctgccccccgacgcccccgagctggtgcaggccgtgaagaacaccgccatgttcagcaagaagctgtacaccgaggactgggaggccgacaagagcctgttctacccctacaacgacagccccgagctgagaagagtggcccaggcccagaaggccctgagcgacgtggcctacaagaagggcctggccgagcagcaggcccagttcacccccctggccgacccccccgacatcgagttcgccaagaaggtgaccaaccaggtgagcaagcagaaggagaagaagagaaagaagaagagaaagaaggtgtag

SEQ ID NO: 90533 - DNA, 1317 bp, synthetic construct
  misc_feature 1..1317: note = Description of Artificial Sequence: Synthetic coding sequence
  source 1..1317: mol_type = other DNA
atgatgagagtgaagcagacccaggaccacatcagcagcgtgaagtacaaggaggccatcggccagggcacccccatccccgacctgcccgaggtgaagagagtgaaggagacccagaagcacatcagcagcgtgatgtacaaggagaacctgggcaccggcatccccaccaccgtgacccccgagatcgagagagtgaagagaaaccaggagaacttcagcagcgtgctgtacaaggagaacatgggcaagggcacccccctggccgtgacccccgagatggagagagtgaagcacaaccaggagaacatcagcagcgtgctgtacaaggagaacgtgggcaaggccaccgccacccccgtgacccccgagatgcagagagtgaagagaaaccaggagaacatcagcagcgtgctgtacaaggagaacatgagaaaggccacccccacccccgtgacccccgagatggagagagccaagagaaaccaggagaacatcagcagcgtgctgtacagcgacagcttcagaaagcagatccagggcaaggccgcctacgtgctggacacccccgagatgagaagagtgagagagacccagagacacatcagcaccgtgaagtaccacgaggacttcgagaagcacaagggctgcttcacccccgtggtgaccgaccccatcaccgagagagtgaagaagaacatgcaggacttcagcgacatcaactacagaggcatccagagaaaggtggtggagatggagcagaagagaaacgaccaggaccaggagaccatcaccggcctgagagtgtggagaaccaaccccggcagcgtgttcgactacgaccccgccgaggacaacatccagagcagaagcctgcacatgatcaacgtgcaggcccagagaagaagcagagagcagagcagaagcgccagcgccctgagcatcagcggcggcgaggagaagagcgagcacagcgaggcccccgaccaccacctgagcacctacagcgacggcggcgtgttcgccgtgagcaccgcctacaagcacgccaagaccaccgagctgccccagcagagaagcagcagcgtggccacccagcagaccaccgtgagcagcatccccagccaccccagcaccgccggcaagatcttcagagccatgtacgactacatggccgccgacgccgacgaggtgagcttcaaggacggcgacgccatcatcaacgtgcaggccatcgacgagggctggatgtacggcaccgtgcagagaaccggcagaaccggcatgctgcccgccaactacgtggaggccatctag

SEQ ID NO: 90534 - DNA, 1014 bp, synthetic construct
  misc_feature 1..1014: note = Description of Artificial Sequence: Synthetic coding sequence
  source 1..1014: mol_type = other DNA
cagaagtacaaggaggactacgagaacaagatcaagggcaagtggagcgagaccccctgcttcgaggtggccaacgccagaatgaacgccgacaacatcagcaccagaaagtaccaggaggacttcgagaacatgaaggaccagatctacttcatgcagaccgagacccccgagtacaagatgaacaagaaggccggcgtggccgccagcaaggtgaagtacaaggaggactacgagaagaacaagggcaaggccgactacaacgtgctgcccgccagcgagaacccccagctgagacagctgaaggccgccggcgacgccctgagcgacaagctgtacaaggagaactacgagaagaccaaggccaagagcatcaactactgcgagacccccaagttcaagctggacaccgtgctgcagaacttcagcagcgacaagaagtacaaggacagctacctgaaggacatcctgggccactacgtgggcagcttcgaggacccctaccacagccactgcatgaaggtgaccgcccagaacagcgacaagaactacaaggccgagtacgaggaggacagaggcaagggcttcttcccccagaccatcacccaggagtacgaggccatcaagaagctggaccagtgcaaggaccacacctacaaggtgcaccccgacaagaccaagttcacccaggtgaccgacagccccgtgctgctgcaggcccaggtgaacagcaagcagctgagcgacctgaactacaaggccaagcacgagagcgagaagttcaagtgccacatcccccccgacacccccgccttcatccagcacaaggtgaacgcctacaacctgagcgacaacctgtacaagcaggactgggagaagagcaaggccaagaagttcgacatcaaggtggacgccatccccctgctggccgccaaggccaacaccaagaacaccagcgacgtgatgtacaagaaggactacgagaagaacaaggtgaaggtgcagcagagatag

SEQ ID NO: 90535 - DNA, 5193 bp, synthetic construct
  misc_feature 1..5193: note = Description of Artificial Sequence: Synthetic coding sequence
  source 1..5193: mol_type = other DNA
atgaacgtgcagccctgcagcagatgcggctacggcgtgtaccccgccgagaagatcagctgcatcgaccagatctggcacaaggcctgcttccactgcgaggtgtgcaagatgatgctgagcgtgaacaacttcgtgagccaccagaagaagccctactgccacgcccacaaccccaagaacaacaccttcaccagcgtgtaccacacccccctgaacctgaacgtgagaaccttccccgaggccatcagcggcatccacgaccaggaggacggcgagcagtgcaagagcgtgttccactgggacatgaagagcaaggacaaggagggcgcccccaacagacagcccctggccaacgagagagcctactggaccggctacggcgagggcaacgcctggtgccccggcgccctgcccgaccccgagatcgtgagaatggtggaggccagaaagagcctgggcgaggagtacaccgaggactacgagcagcccagaggcaagggcagcttccccgccatgatcacccccgcctaccagagagccaagaaggccaaccagctggccagccaggtggagtacaagagaggccacgacgagagaatcagcagattcagcaccgtggtggacacccccgagctgctgagaagcaaggccggcgcccagctgcagagcgacgtgagatacaccgaggactacgagcagcagagaggcaagggcagcttccccgccatgatcacccccgcctaccagatcgccaagagagccaacgagctggccagcgacgtgagataccaccagcagtaccagaaggagatgagaggcatggccggccccgccatcggcgccgagggcatcctgaccagagagtgcgccgaccagtacggccagggctaccccgaggagtacgaggagcacagaggcaagggcagcttccccgccatgatcacccccgcctaccagaacgccaagaaggcccacgagctggccagcgacatcaagtacagacaggacttcaacaagatgaagggcgccgcccactaccacagcctgcccgcccaggacaacctggtgctgaagcaggcccagagcgtgaacaagctggtgagcgaggtggagtacaagaaggacctggagagcagcagaggccacagcatcaactactgcgagaccccccagttcagaaacgtgagcaagatcagcaagttcaccagcgacaacaagtacaaggagaactaccagaaccacatgagaggcagatacgagggcgtgggcatggacagaagaaccctgcacgccatgaaggtgggcagcctggccagcaacgtggcctacaaggccgactacaagcacgacatcgtggactacaactaccccgccaccctgacccccagctaccagaccgccatgaagctggtgcccctgaaggacgccaactacagacagagcatcgacaagctgaagtacagcagcgtgaccgacaccccccagatcgtgcaggccaagatcaacgcccagcagctgagccacgtgaactacagagccgactacgagaagaacaagctgaactacaccctgccccaggacgtgccccagctggtgaaggccaagaccaacgccaagctgttcagcgaggtgaagtacaaggagggctgggagaagaccaagggcaagggcttcgagatgaagctggacgccatgagcctgctggccgccaaggccagcggcgagctggccagcaacatcaagtacaaggaggagtacgagaagaccaagggcaaggccatgggcaccgccgacagcagactgctgcacagcctgcagatcgccaagatgagcagcgaggtggagtacaagaagggcttcgaggagagcaagaccagattccacctgcccatggacatggtgaacatcagacacgccaagaaggcccagaccctggccagcgacctggactacagaaagaagctgcacgagtacaccgtgctgcccgaggacatgaagacccagtgggccaagaaggcctacggcctgcagagcgagctgcagtacaaggccgacctggcctggatgaagggcgtgggctggctgaccgagggcagcctgaacctggagcaggccaagaaggccggccagctggtgagcgagaagaactacagacagagagtggacgagctgaagttcaccagcgtgaccgacagcagccagatggagcacgccaagaagagccaggagctgcagagcggcgtggcctacaaggccggcaacgagcagagcgtgcaccagtacaccatcagcaaggacgagcccctgttcctgcaggccagagccaacgccgccaacctgagcgagaagctgtacaagagcagctgggagaaccagaaggccaagggcttcgagctgagactggacagcctgaccttcctggccgccaaggccaagagagacctggccagcgaggtgaagtacaaggaggactacgagagaagcagaggcaagctgatcggcgccaaggacgtgcagggcgacagccagatgagccacagcctgcagatgagcaagctgcagagcgagctggagtacaagaagggcttcgaggacaccaagagccagtgccacgtgagcctggacatggtgcacctggtgcacgccagaaaggcccagcacctggccaccgacgtgggctacaagaccgccgagcaccacttcaccgccctgcccaccgacatgaaggtggagtgggccaagaaggcctacggcctgcagagcgacaaccagtacagagccgacgtgaagtggatgaagggcatgggctgggtggccaccggcagcctgaacgtggagcaggccaagaaggccggcgagctgatcagcgagaagaagtacagacagcaccccgacgccctgaagttcaccagcatcaaggacacccccgagatggtgcaggccagaatcagctacacccaggccgtggacagactgtacagagagcagggcgagaacatcaagcaccactacacccccaccgccgacctgcccgaggtgctgctggccaagctgaacgccatgaacatcagcgagaccagatacaaggagagctggagcaagctgagagacggcggctacaagctgagactggacgccctgcccttccaggccgccaaggccagcggcgagatcatcagcgactacaagtacaaggaggccttcgagaagatgaagggccagatgctgggcagcagaagcctggaggacgacatcagcctggcccacagcgtgtacgccaccagcctgcagagcgacgtgaactacaagaagggcttcgagcacagcaaggcccagttccacctgcccctggacatggccgccctggtgcacgccaagaaggcccagaccctggccagcaaccaggactacaagcaccccctgccccagtacaccagcctggccgaggacctgagactgagctgcgccaagaaggcccacaagctgcagagcgagaacctgtacagaagcgacctgaacttcatgagaggcgtggcctgcgtgatccccggcaccctggagatcgagggcagaaagaaggccagcgagctgatcagcgagagcaagtacagacagcacccccacagcttcaagtacaccgccgtgaccgacacccccaacctgctgcacgccaagttcagcaaccagatcaccaacgagagactgtacaaggccgccggcgaggacgccagacacgagtacaccatgaccctgggcctgcccgagttcatcagagccaagaccaacgccgccaacctgagcgacgccagatacaaggagagctggagaaacctgagagcccagggctacaagctgaccatcgaggccctgcccttccaggccgccagagccagcggcgacatcgccagcgacttcctgtacagacacgacttcgtgaaggagagaggcaagctgatcggcccccagagcgtgagagacgaccccagaatccagcactgcagaagaatgggccagctgcagagcgagctgcagtacagaagaggcgccaccagcagccaggcccagttccacctgcccatggacatggtgcacctggtgcacgccaagaacgcccaggccctggccagcgaccacgactacagaacccagtaccacaagttcaccgccctgcccgaggacctgaagatggcctgggccaagaaggcccacgccctgcagagcgagctgagatacaagagcgacctgatcggcatgaagggcatcggctggctggccctgagaagcccccagatggagagcgccaagaaggccggcgagctgatcagcgagaccaagtacagaaagaagcccgacagcatcaagttcaccaccgtggtggacagccccgacctggtgcacgccaagaacagctacatgcactgcaacgagagaatgtacagaagcggcgacgccgagagcctgcacagatacaccctgatccccgaccaccccgacttcaccagagccagactgaacgccctgcacctgagcgacaaggtgtacagaaacagctgggagcagaccagagccggcagctacgacttcagactggacgccatccccttccagaccgccagagccagcagagagatcgccagcgacttcagatacaaggaggccttcctgagagacagaggcctgcagatcggctacagaagcgtggacgacgaccccagaatgaagcacttcctgaacgtgggcagactgcagagcgacaacgagtacaagaaggacttcgccaagagcagaagccagttccacagcagcaccgaccagcccggcctgctgcaggccaagagaagccagcagctggccagcgacgtgcactacagacagcccctgccccagcccacctgcgaccccgagcagctgggcctgagacacgcccagaaggcccaccagctgcagagcgacgtgaagtacaagagcgacctgaacctgaccagaggcgtgggctggaccccccccggcagctacaaggtggagatggccagaagagccgccgagctggccaacgccagaggcctgggcctgcagggcgcctacagaggcgccgaggccgtggaggccggcgaccaccagagcggcgaggtgaaccccgacgccaccgagatcctgcacgtgaagaagaagaaggccctgctgctgtag

SEQ ID NO: 90536 - DNA, 5088 bp, synthetic construct
  misc_feature 1..5088: note = Description of Artificial Sequence: Synthetic coding sequence
  source 1..5088: mol_type = other DNA
atgaacgtgcagccctgcagcagatgcggctacggcgtgtaccccgccgagaagatcagctgcatcgaccagatctggcacaaggcctgcttccactgcgaggtgtgcaagatgatgctgagcgtgaacaacttcgtgagccaccagaagaagccctactgccacgcccacaaccccaagaacaacaccttcaccagcgtgtaccacacccccctgaacctgaacgtgagaaccttccccgaggccatcagcggcatccacgaccaggaggacggcgagcagtgcaagagcgtgttccactgggacatgaagagcaaggacaaggagggcgcccccaacagacagcccctggccaacgagagagcctactggaccggctacggcgagggcaacgcctggtgccccggcgccctgcccgaccccgagatcgtgagaatggtggaggccagaaagagcctgggcgaggagtacaccgaggactacgagcagcccagaggcaagggcagcttccccgccatgatcacccccgcctaccagagagccaagaaggccaaccagctggccagccaggtggagtacaagagaggccacgacgagagaatcagcagattcagcaccgtggtggacacccccgagctgctgagaagcaaggccggcgcccagctgcagagcgacgtgagatacaccgaggactacgagcagcagagaggcaagggcagcttccccgccatgatcacccccgcctaccagatcgccaagagagccaacgagctggccagcgacgtgagataccaccagcagtaccagaaggagatgagaggcatggccggccccgccatcggcgccgagggcatcctgaccagagagtgcgccgaccagtacggccagggctaccccgaggagtacgaggagcacagaggcaagggcagcttccccgccatgatcacccccgcctaccagaacgccaagaaggcccacgagctggccagcgacatcaagtacagacaggacttcaacaagatgaagggcgccgcccactaccacagcctgcccgcccaggacaacctggtgctgaagcaggcccagagcgtgaacaagctggtgagcgagaacaagtacaaggagaactaccagaaccacatgagaggcagatacgagggcgtgggcatggacagaagaaccctgcacgccatgaaggtgggcagcctggccagcaacgtggcctacaaggccgactacaagcacgacatcgtggactacaactaccccgccaccctgacccccagctaccagaccgccatgaagctggtgcccctgaaggacgccaactacagacagagcatcgacaagctgaagtacagcagcgtgaccgacaccccccagatcgtgcaggccaagatcaacgcccagcagctgagccacgtgaactacagagccgactacgagaagaacaagctgaactacaccctgccccaggacgtgccccagctggtgaaggccaagaccaacgccaagctgttcagcgaggtgaagtacaaggagggctgggagaagaccaagggcaagggcttcgagatgaagctggacgccatgagcctgctggccgccaaggccagcggcgagctggccagcaacatcaagtacaaggaggagtacgagaagaccaagggcaaggccatgggcaccgccgacagcagactgctgcacagcctgcagatcgccaagatgagcagcgaggtggagtacaagaagggcttcgaggagagcaagaccagattccacctgcccatggacatggtgaacatcagacacgccaagaaggcccagaccctggccagcgacctggactacagaaagaagctgcacgagtacaccgtgctgcccgaggacatgaagacccagtgggccaagaaggcctacggcctgcagagcgagctgcagtacaaggccgacctggcctggatgaagggcgtgggctggctgaccgagggcagcctgaacctggagcaggccaagaaggccggccagctggtgagcgagaagaactacagacagagagtggacgagctgaagttcaccagcgtgaccgacagcagccagatggagcacgccaagaagagccaggagctgcagagcggcgtggcctacaaggccggcaacgagcagagcgtgcaccagtacaccatcagcaaggacgagcccctgttcctgcaggccagagccaacgccgccaacctgagcgagaagctgtacaagagcagctgggagaaccagaaggccaagggcttcgagctgagactggacagcctgaccttcctggccgccaaggccaagagagacctggccagcgaggtgaagtacaaggaggactacgagagaagcagaggcaagctgatcggcgccaaggacgtgcagggcgacagccagatgagccacagcctgcagatgagcaagctgcagagcgagctggagtacaagaagggcttcgaggacaccaagagccagtgccacgtgagcctggacatggtgcacctggtgcacgccagaaaggcccagcacctggccaccgacgtgggctacaagaccgccgagcaccacttcaccgccctgcccaccgacatgaaggtggagtgggccaagaaggcctacggcctgcagagcgacaaccagtacagagccgacgtgaagtggatgaagggcatgggctgggtggccaccggcagcctgaacgtggagcaggccaagaaggccggcgagctgatcagcgagaagaagtacagacagcaccccgacgccctgaagttcaccagcatcaaggacacccccgagatggtgcaggccagaatcagctacacccaggccgtggacagactgtacagagagcagggcgagaacatcaagcaccactacacccccaccgccgacctgcccgaggtgctgctggccaagctgaacgccatgaacatcagcgagaccagatacaaggagagctggagcaagctgagagacggcggctacaagctgagactggacgccctgcccttccaggccgccaaggccagcggcgagatcatcagcgactacaagtacaaggaggccttcgagaagatgaagggccagatgctgggcagcagaagcctggaggacgacatcagcctggcccacagcgtgtacgccaccagcctgcagagcgacgtgaactacaagaagggcttcgagcacagcaaggcccagttccacctgcccctggacatggccgccctggtgcacgccaagaaggcccagaccctggccagcaaccaggactacaagcaccccctgccccagtacaccagcctggccgaggacctgagactgagctgcgccaagaaggcccacaagctgcagagcgagaacctgtacagaagcgacctgaacttcatgagaggcgtggcctgcgtgatccccggcaccctggagatcgagggcagaaagaaggccagcgagctgatcagcgagagcaagtacagacagcacccccacagcttcaagtacaccgccgtgaccgacacccccaacctgctgcacgccaagttcagcaaccagatcaccaacgagagactgtacaaggccgccggcgaggacgccagacacgagtacaccatgaccctgggcctgcccgagttcatcagagccaagaccaacgccgccaacctgagcgacgccagatacaaggagagctggagaaacctgagagcccagggctacaagctgaccatcgaggccctgcccttccaggccgccagagccagcggcgacatcgccagcgacttcctgtacagacacgacttcgtgaaggagagaggcaagctgatcggcccccagagcgtgagagacgaccccagaatccagcactgcagaagaatgggccagctgcagagcgagctgcagtacagaagaggcgccaccagcagccaggcccagttccacctgcccatggacatggtgcacctggtgcacgccaagaacgcccaggccctggccagcgaccacgactacagaacccagtaccacaagttcaccgccctgcccgaggacctgaagatggcctgggccaagaaggcccacgccctgcagagcgagctgagatacaagagcgacctgatcggcatgaagggcatcggctggctggccctgagaagcccccagatggagagcgccaagaaggccggcgagctgatcagcgagaccaagtacagaaagaagcccgacagcatcaagttcaccaccgtggtggacagccccgacctggtgcacgccaagaacagctacatgcactgcaacgagagaatgtacagaagcggcgacgccgagagcctgcacagatacaccctgatccccgaccaccccgacttcaccagagccagactgaacgccctgcacctgagcgacaaggtgtacagaaacagctgggagcagaccagagccggcagctacgacttcagactggacgccatccccttccagaccgccagagccagcagagagatcgccagcgacttcagatacaaggaggccttcctgagagacagaggcctgcagatcggctacagaagcgtggacgacgaccccagaatgaagcacttcctgaacgtgggcagactgcagagcgacaacgagtacaagaaggacttcgccaagagcagaagccagttccacagcagcaccgaccagcccggcctgctgcaggccaagagaagccagcagctggccagcgacgtgcactacagacagcccctgccccagcccacctgcgaccccgagcagctgggcctgagacacgcccagaaggcccaccagctgcagagcgacgtgaagtacaagagcgacctgaacctgaccagaggcgtgggctggaccccccccggcagctacaaggtggagatggccagaagagccgccgagctggccaacgccagaggcctgggcctgcagggcgcctacagaggcgccgaggccgtggaggccggcgaccaccagagcggcgaggtgaaccccgacgccaccgagatcctgcacgtgaagaagaagaaggccctgctgctgtag

SEQ ID NO: 90537 - DNA, 2559 bp, synthetic construct
  misc_feature 1..2559: note = Description of Artificial Sequence: Synthetic coding sequence
  source 1..2559: mol_type = other DNA
atgagaggcatggccggccccgccatcggcgccgagggcatcctgaccagagagtgcgccgaccagtacggccagggctaccccgaggagtacgaggagcacagaggcaagggcagcttccccgccatgatcacccccgcctaccagaacgccaagaaggcccacgagctggccagcgacatcaagtacagacaggacttcaacaagatgaagggcgccgcccactaccacagcctgcccgcccaggacaacctggtgctgaagcaggcccagagcgtgaacaagctggtgagcgaggtggagtacaagaaggacctggagagcagcagaggccacagcatcaactactgcgagaccccccagttcagaaacgtgagcaagatcagcaagttcaccagcgacaacaagtacaaggagaactaccagaaccacatgagaggcagatacgagggcgtgggcatggacagaagaaccctgcacgccatgaaggtgggcagcctggccagcaacgtggcctacaaggccgactacaagcacgacatcgtggactacaactaccccgccaccctgacccccagctaccagaccgccatgaagctggtgcccctgaaggacgccaactacagacagagcatcgacaagctgaagtacagcagcgtgaccgacaccccccagatcgtgcaggccaagatcaacgcccagcagctgagccacgtgaactacagagccgactacgagaagaacaagctgaactacaccctgccccaggacgtgccccagctggtgaaggccaagaccaacgccaagctgttcagcgaggtgaagtacaaggagggctgggagaagaccaagggcaagggcttcgagatgaagctggacgccatgagcctgctggccgccaaggccagcggcgagctggccagcaacgtgcacctgctgctgagcctgaagatcaagtacaaggaggagtacgagaagaccaagggcaaggccatgggcaccgccgacagcagactgctgcacagcctgcagatcgccaagatgagcagcgaggtggagtacaagaagggcttcgaggagagcaagaccagattccacctgcccatggacatgggcgtgggctggctgaccgagggcagcctgaacctggagcaggccaagaaggccggccagctggtgagcgagaagaactacagacagagagtggacgagctgaagttcaccagcgtgaccgacagcagccagatggagcacgccaagaagagccaggagctgcagagcggcgtggcctacaaggccggcaacgagcagagcgtgcaccagtacaccatcagcaaggacgagcccctgttcctgcaggccagagccaacgccgccaacctgagcgagttcctgtacagacacgacttcgtgaaggagagaggcaagctgatcggcccccagagcgtgagagacgaccccagaatccagcactgcagaagaatgggccagctgcagagcgagctgcagtacagaagaggcgccaccagcagccaggcccagttccacctgcccatggacatggtgcacctggtgcacgccaagaacgcccaggccctggccagcgaccacgactacagaacccagtaccacaagttcaccgccctgcccgaggacctgaagatggcctgggccaagaaggcccacgccctgcagagcgagctgagatacaagagcgacctgatcggcatgaagggcatcggctggctggccctgagaagcccccagatggagagcgccaagaaggccggcgagctgatcagcgagaccaagtacagaaagaagcccgacagcatcaagttcaccaccgtggtggacagccccgacctggtgcacgccaagaacagctacatgcactgcaacgagagaatgtacagaagcggcgacgccgagagcctgcacagatacaccctgatccccgaccaccccgacttcaccagagccagactgaacgccctgcacctgagcgacttcagatacaaggaggccttcctgagagacagaggcctgcagatcggctacagaagcgtggacgacgaccccagaatgaagcacttcctgaacgtgggcagactgcagagcgacaacgagtacaagaaggacttcgccaagagcagaagccagttccacagcagcaccgaccagcccggcctgctgcaggccaagagaagccagcagctggccagcgacgtgcactacagacagcccctgccccagcccacctgcgaccccgagcagctgggcctgagacacgcccagaaggcccaccagctgcagagcgacgtgaagtacaagagcgacctgaacctgaccagaggcgtgggctggaccccccccggcagctacaaggtggagatggccagaagagccgccgagctggccaacgccagaggcctgggcctgcagggcgcctacagaggcgccgaggccgtggaggccggcgaccaccagagcggcgaggtgaaccccgacgccaccgagatcctgcacgtgaagaagaagaaggccctgctgctgtag

SEQ ID NO: 90538 - DNA, 5217 bp, synthetic construct
  misc_feature 1..5217: note = Description of Artificial Sequence: Synthetic coding sequence
  source 1..5217: mol_type = other DNA
atgaacgtgcagccctgcagcagatgcggctacggcgtgtaccccgccgagaagatcagctgcatcgaccagatctggcacaaggcctgcttccactgcgaggtgtgcaagatgatgctgagcgtgaacaacttcgtgagccaccagaagaagccctactgccacgcccacaaccccaagaacaacaccttcaccagcgtgtaccacacccccctgaacctgaacgtgagaaccttccccgaggccatcagcggcatccacgaccaggaggacggcgagcagtgcaagagcgtgttccactgggacatgaagagcaaggacaaggagggcgcccccaacagacagcccctggccaacgagagagcctactggaccggctacggcgagggcaacgcctggtgccccggcgccctgcccgaccccgagatcgtgagaatggtggaggccagaaagagcctgggcgaggagtacaccgaggactacgagcagcccagaggcaagggcagcttccccgccatgatcacccccgcctaccagagagccaagaaggccaaccagctggccagccaggtggagtacaagagaggccacgacgagagaatcagcagattcagcaccgtggtggacacccccgagctgctgagaagcaaggccggcgcccagctgcagagcgacgtgagatacaccgaggactacgagcagcagagaggcaagggcagcttccccgccatgatcacccccgcctaccagatcgccaagagagccaacgagctggccagcgacgtgagataccaccagcagtaccagaaggagatgagaggcatggccggccccgccatcggcgccgagggcatcctgaccagagagtgcgccgaccagtacggccagggctaccccgaggagtacgaggagcacagaggcaagggcagcttccccgccatgatcacccccgcctaccagaacgccaagaaggcccacgagctggccagcgacatcaagtacagacaggacttcaacaagatgaagggcgccgcccactaccacagcctgcccgcccaggacaacctggtgctgaagcaggcccagagcgtgaacaagctggtgagcgaggtggagtacaagaaggacctggagagcagcagaggccacagcatcaactactgcgagaccccccagttcagaaacgtgagcaagatcagcaagttcaccagcgacaacaagtacaaggagaactaccagaaccacatgagaggcagatacgagggcgtgggcatggacagaagaaccctgcacgccatgaaggtgggcagcctggccagcaacgtggcctacaaggccgactacaagcacgacatcgtggactacaactaccccgccaccctgacccccagctaccagaccgccatgaagctggtgcccctgaaggacgccaactacagacagagcatcgacaagctgaagtacagcagcgtgaccgacaccccccagatcgtgcaggccaagatcaacgcccagcagctgagccacgtgaactacagagccgactacgagaagaacaagctgaactacaccctgccccaggacgtgccccagctggtgaaggccaagaccaacgccaagctgttcagcgaggtgaagtacaaggagggctgggagaagaccaagggcaagggcttcgagatgaagctggacgccatgagcctgctggccgccaaggccagcggcgagctggccagcaacgtgcacctgctgctgagcctgaagatcaagtacaaggaggagtacgagaagaccaagggcaaggccatgggcaccgccgacagcagactgctgcacagcctgcagatcgccaagatgagcagcgaggtggagtacaagaagggcttcgaggagagcaagaccagattccacctgcccatggacatggtgaacatcagacacgccaagaaggcccagaccctggccagcgacctggactacagaaagaagctgcacgagtacaccgtgctgcccgaggacatgaagacccagtgggccaagaaggcctacggcctgcagagcgagctgcagtacaaggccgacctggcctggatgaagggcgtgggctggctgaccgagggcagcctgaacctggagcaggccaagaaggccggccagctggtgagcgagaagaactacagacagagagtggacgagctgaagttcaccagcgtgaccgacagcagccagatggagcacgccaagaagagccaggagctgcagagcggcgtggcctacaaggccggcaacgagcagagcgtgcaccagtacaccatcagcaaggacgagcccctgttcctgcaggccagagccaacgccgccaacctgagcgagaagctgtacaagagcagctgggagaaccagaaggccaagggcttcgagctgagactggacagcctgaccttcctggccgccaaggccaagagagacctggccagcgaggtgaagtacaaggaggactacgagagaagcagaggcaagctgatcggcgccaaggacgtgcagggcgacagccagatgagccacagcctgcagatgagcaagctgcagagcgagctggagtacaagaagggcttcgaggacaccaagagccagtgccacgtgagcctggacatggtgcacctggtgcacgccagaaaggcccagcacctggccaccgacgtgggctacaagaccgccgagcaccacttcaccgccctgcccaccgacatgaaggtggagtgggccaagaaggcctacggcctgcagagcgacaaccagtacagagccgacgtgaagtggatgaagggcatgggctgggtggccaccggcagcctgaacgtggagcaggccaagaaggccggcgagctgatcagcgagaagaagtacagacagcaccccgacgccctgaagttcaccagcatcaaggacacccccgagatggtgcaggccagaatcagctacacccaggccgtggacagactgtacagagagcagggcgagaacatcaagcaccactacacccccaccgccgacctgcccgaggtgctgctggccaagctgaacgccatgaacatcagcgagaccagatacaaggagagctggagcaagctgagagacggcggctacaagctgagactggacgccctgcccttccaggccgccaaggccagcggcgagatcatcagcgactacaagtacaaggaggccttcgagaagatgaagggccagatgctgggcagcagaagcctggaggacgacatcagcctggcccacagcgtgtacgccaccagcctgcagagcgacgtgaactacaagaagggcttcgagcacagcaaggcccagttccacctgcccctggacatggccgccctggtgcacgccaagaaggcccagaccctggccagcaaccaggactacaagcaccccctgccccagtacaccagcctggccgaggacctgagactgagctgcgccaagaaggcccacaagctgcagagcgagaacctgtacagaagcgacctgaacttcatgagaggcgtggcctgcgtgatccccggcaccctggagatcgagggcagaaagaaggccagcgagctgatcagcgagagcaagtacagacagcacccccacagcttcaagtacaccgccgtgaccgacacccccaacctgctgcacgccaagttcagcaaccagatcaccaacgagagactgtacaaggccgccggcgaggacgccagacacgagtacaccatgaccctgggcctgcccgagttcatcagagccaagaccaacgccgccaacctgagcgacgccagatacaaggagagctggagaaacctgagagcccagggctacaagctgaccatcgaggccctgcccttccaggccgccagagccagcggcgacatcgccagcgacttcctgtacagacacgacttcgtgaaggagagaggcaagctgatcggcccccagagcgtgagagacgaccccagaatccagcactgcagaagaatgggccagctgcagagcgagctgcagtacagaagaggcgccaccagcagccaggcccagttccacctgcccatggacatggtgcacctggtgcacgccaagaacgcccaggccctggccagcgaccacgactacagaacccagtaccacaagttcaccgccctgcccgaggacctgaagatggcctgggccaagaaggcccacgccctgcagagcgagctgagatacaagagcgacctgatcggcatgaagggcatcggctggctggccctgagaagcccccagatggagagcgccaagaaggccggcgagctgatcagcgagaccaagtacagaaagaagcccgacagcatcaagttcaccaccgtggtggacagccccgacctggtgcacgccaagaacagctacatgcactgcaacgagagaatgtacagaagcggcgacgccgagagcctgcacagatacaccctgatccccgaccaccccgacttcaccagagccagactgaacgccctgcacctgagcgacaaggtgtacagaaacagctgggagcagaccagagccggcagctacgacttcagactggacgccatccccttccagaccgccagagccagcagagagatcgccagcgacttcagatacaaggaggccttcctgagagacagaggcctgcagatcggctacagaagcgtggacgacgaccccagaatgaagcacttcctgaacgtgggcagactgcagagcgacaacgagtacaagaaggacttcgccaagagcagaagccagttccacagcagcaccgaccagcccggcctgctgcaggccaagagaagccagcagctggccagcgacgtgcactacagacagcccctgccccagcccacctgcgaccccgagcagctgggcctgagacacgcccagaaggcccaccagctgcagagcgacgtgaagtacaagagcgacctgaacctgaccagaggcgtgggctggaccccccccggcagctacaaggtggagatggccagaagagccgccgagctggccaacgccagaggcctgggcctgcagggcgcctacagaggcgccgaggccgtggaggccggcgaccaccagagcggcgaggtgaaccccgacgccaccgagatcctgcacgtgaagaagaagaaggccctgctgctgtag

SEQ ID NO: 90539 - DNA, 5112 bp, synthetic construct
  misc_feature 1..5112: note = Description of Artificial Sequence: Synthetic coding sequence
  source 1..5112: mol_type = other DNA
atgaacgtgcagccctgcagcagatgcggctacggcgtgtaccccgccgagaagatcagctgcatcgaccagatctggcacaaggcctgcttccactgcgaggtgtgcaagatgatgctgagcgtgaacaacttcgtgagccaccagaagaagccctactgccacgcccacaaccccaagaacaacaccttcaccagcgtgtaccacacccccctgaacctgaacgtgagaaccttccccgaggccatcagcggcatccacgaccaggaggacggcgagcagtgcaagagcgtgttccactgggacatgaagagcaaggacaaggagggcgcccccaacagacagcccctggccaacgagagagcctactggaccggctacggcgagggcaacgcctggtgccccggcgccctgcccgaccccgagatcgtgagaatggtggaggccagaaagagcctgggcgaggagtacaccgaggactacgagcagcccagaggcaagggcagcttccccgccatgatcacccccgcctaccagagagccaagaaggccaaccagctggccagccaggtggagtacaagagaggccacgacgagagaatcagcagattcagcaccgtggtggacacccccgagctgctgagaagcaaggccggcgcccagctgcagagcgacgtgagatacaccgaggactacgagcagcagagaggcaagggcagcttccccgccatgatcacccccgcctaccagatcgccaagagagccaacgagctggccagcgacgtgagataccaccagcagtaccagaaggagatgagaggcatggccggccccgccatcggcgccgagggcatcctgaccagagagtgcgccgaccagtacggccagggctaccccgaggagtacgaggagcacagaggcaagggcagcttccccgccatgatcacccccgcctaccagaacgccaagaaggcccacgagctggccagcgacatcaagtacagacaggacttcaacaagatgaagggcgccgcccactaccacagcctgcccgcccaggacaacctggtgctgaagcaggcccagagcgtgaacaagctggtgagcgagaacaagtacaaggagaactaccagaaccacatgagaggcagatacgagggcgtgggcatggacagaagaaccctgcacgccatgaaggtgggcagcctggccagcaacgtggcctacaaggccgactacaagcacgacatcgtggactacaactaccccgccaccctgacccccagctaccagaccgccatgaagctggtgcccctgaaggacgccaactacagacagagcatcgacaagctgaagtacagcagcgtgaccgacaccccccagatcgtgcaggccaagatcaacgcccagcagctgagccacgtgaactacagagccgactacgagaagaacaagctgaactacaccctgccccaggacgtgccccagctggtgaaggccaagaccaacgccaagctgttcagcgaggtgaagtacaaggagggctgggagaagaccaagggcaagggcttcgagatgaagctggacgccatgagcctgctggccgccaaggccagcggcgagctggccagcaacgtgcacctgctgctgagcctgaagatcaagtacaaggaggagtacgagaagaccaagggcaaggccatgggcaccgccgacagcagactgctgcacagcctgcagatcgccaagatgagcagcgaggtggagtacaagaagggcttcgaggagagcaagaccagattccacctgcccatggacatggtgaacatcagacacgccaagaaggcccagaccctggccagcgacctggactacagaaagaagctgcacgagtacaccgtgctgcccgaggacatgaagacccagtgggccaagaaggcctacggcctgcagagcgagctgcagtacaaggccgacctggcctggatgaagggcgtgggctggctgaccgagggcagcctgaacctggagcaggccaagaaggccggccagctggtgagcgagaagaactacagacagagagtggacgagctgaagttcaccagcgtgaccgacagcagccagatggagcacgccaagaagagccaggagctgcagagcggcgtggcctacaaggccggcaacgagcagagcgtgcaccagtacaccatcagcaaggacgagcccctgttcctgcaggccagagccaacgccgccaacctgagcgagaagctgtacaagagcagctgggagaaccagaaggccaagggcttcgagctgagactggacagcctgaccttcctggccgccaaggccaagagagacctggccagcgaggtgaagtacaaggaggactacgagagaagcagaggcaagctgatcggcgccaaggacgtgcagggcgacagccagatgagccacagcctgcagatgagcaagctgcagagcgagctggagtacaagaagggcttcgaggacaccaagagccagtgccacgtgagcctggacatggtgcacctggtgcacgccagaaaggcccagcacctggccaccgacgtgggctacaagaccgccgagcaccacttcaccgccctgcccaccgacatgaaggtggagtgggccaagaaggcctacggcctgcagagcgacaaccagtacagagccgacgtgaagtggatgaagggcatgggctgggtggccaccggcagcctgaacgtggagcaggccaagaaggccggcgagctgatcagcgagaagaagtacagacagcaccccgacgccctgaagttcaccagcatcaaggacacccccgagatggtgcaggccagaatcagctacacccaggccgtggacagactgtacagagagcagggcgagaacatcaagcaccactacacccccaccgccgacctgcccgaggtgctgctggccaagctgaacgccatgaacatcagcgagaccagatacaaggagagctggagcaagctgagagacggcggctacaagctgagactggacgccctgcccttccaggccgccaaggccagcggcgagatcatcagcgactacaagtacaaggaggccttcgagaagatgaagggccagatgctgggcagcagaagcctggaggacgacatcagcctggcccacagcgtgtacgccaccagcctgcagagcgacgtgaactacaagaagggcttcgagcacagcaaggcccagttccacctgcccctggacatggccgccctggtgcacgccaagaaggcccagaccctggccagcaaccaggactacaagcaccccctgccccagtacaccagcctggccgaggacctgagactgagctgcgccaagaaggcccacaagctgcagagcgagaacctgtacagaagcgacctgaacttcatgagaggcgtggcctgcgtgatccccggcaccctggagatcgagggcagaaagaaggccagcgagctgatcagcgagagcaagtacagacagcacccccacagcttcaagtacaccgccgtgaccgacacccccaacctgctgcacgccaagttcagcaaccagatcaccaacgagagactgtacaaggccgccggcgaggacgccagacacgagtacaccatgaccctgggcctgcccgagttcatcagagccaagaccaacgccgccaacctgagcgacgccagatacaaggagagctggagaaacctgagagcccagggctacaagctgaccatcgaggccctgcccttccaggccgccagagccagcggcgacatcgccagcgacttcctgtacagacacgacttcgtgaaggagagaggcaagctgatcggcccccagagcgtgagagacgaccccagaatccagcactgcagaagaatgggccagctgcagagcgagctgcagtacagaagaggcgccaccagcagccaggcccagttccacctgcccatggacatggtgcacctggtgcacgccaagaacgcccaggccctggccagcgaccacgactacagaacccagtaccacaagttcaccgccctgcccgaggacctgaagatggcctgggccaagaaggcccacgccctgcagagcgagctgagatacaagagcgacctgatcggcatgaagggcatcggctggctggccctgagaagcccccagatggagagcgccaagaaggccggcgagctgatcagcgagaccaagtacagaaagaagcccgacagcatcaagttcaccaccgtggtggacagccccgacctggtgcacgccaagaacagctacatgcactgcaacgagagaatgtacagaagcggcgacgccgagagcctgcacagatacaccctgatccccgaccaccccgacttcaccagagccagactgaacgccctgcacctgagcgacaaggtgtacagaaacagctgggagcagaccagagccggcagctacgacttcagactggacgccatccccttccagaccgccagagccagcagagagatcgccagcgacttcagatacaaggaggccttcctgagagacagaggcctgcagatcggctacagaagcgtggacgacgaccccagaatgaagcacttcctgaacgtgggcagactgcagagcgacaacgagtacaagaaggacttcgccaagagcagaagccagttccacagcagcaccgaccagcccggcctgctgcaggccaagagaagccagcagctggccagcgacgtgcactacagacagcccctgccccagcccacctgcgaccccgagcagctgggcctgagacacgcccagaaggcccaccagctgcagagcgacgtgaagtacaagagcgacctgaacctgaccagaggcgtgggctggaccccccccggcagctacaaggtggagatggccagaagagccgccgagctggccaacgccagaggcctgggcctgcagggcgcctacagaggcgccgaggccgtggaggccggcgaccaccagagcggcgaggtgaaccccgacgccaccgagatcctgcacgtgaagaagaagaaggccctgctgctgtag

SEQ ID NO: 90540 - DNA, 828 bp, synthetic construct
  misc_feature 1..828: note = Description of Artificial Sequence: Synthetic coding sequence
  source 1..828: mol_type = other DNA
atggccaccgagctggagtacgagagcgtgctgtgcgtgaagcccgacgtgagcgtgtacagaatcccccccagagccagcaacagaggctacagagccagcgactggaagctggaccagcccgactggaccggcagactgagaatcaccagcaagggcaagaccgcctacatcaagctggaggacaaggtgagcggcgagctgttcgcccaggcccccgtggagcagtaccccggcatcgccgtggagaccgtgaccgacagcagcagatacttcgtgatcagaatccaggacggcaccggcagaagcgccttcatcggcatcggcttcaccgacagaggcgacgccttcgacttcaacgtgagcctgcaggaccacttcaagtgggtgaagcaggagagcgagatcagcaaggagagccaggagatggacgccagacccaagctggacctgggcttcaaggagggccagaccatcaagctgtgcatcggcaacatcaccaacaagaagggcggcgccagcaagcccagaaccgccagaggcggcggcctgagcctgctgccccccccccccggcggcaaggtgaccatccccccccccagcagcagcgtggccatcagcaaccacgtgacccccccccccatccccaagagcaaccacggcggcagcgacgccgacatcctgctggacctggacagccccgcccccgtgaccacccccgcccccacccccgtgagcgtgagcaacgacctgtggggcgacttcagcaccgccagcagcagcgtgcccaaccaggccccccagcccagcaactgggtgcagttctag

SEQ ID NO: 90541 - DNA, 402 bp, synthetic construct
  misc_feature 1..402: note = Description of Artificial Sequence: Synthetic coding sequence
  source 1..402: mol_type = other DNA
atggacgccagacccaagctggacctgggcttcaaggagggccagaccatcaagctgtgcatcggcaacatcaccaacaagaagggcggcgccagcaagcccagaaccgccagaggcggcggcctgagcctgctgccccccccccccggcggcaaggtgaccatccccccccccagcagcagcgtggccatcagcaaccacgtgacccccccccccatccccaagagcaaccacggcggcagcgacgccgacatcctgctggacctggacagccccgcccccgtgaccacccccgcccccacccccgtgagcgtgagcaacgacctgtggggcgacttcagcaccgccagcagcagcgtgcccaaccaggccccccagcccagcaactgggtgcagttctag

SEQ ID NO: 90542 - DNA, 828 bp, synthetic construct; identical to SEQ ID NO: 90540
  misc_feature 1..828: note = Description of Artificial Sequence: Synthetic coding sequence
  source 1..828: mol_type = other DNA

SEQ ID NO: 90543 - DNA, 558 bp, synthetic construct
  misc_feature 1..558: note = Description of Artificial Sequence: Synthetic coding sequence
  source 1..558: mol_type = other DNA
atggaggagagcggctacgagagcgtgctgtgcgtgaagcccgacgtgcacgtgtacagaatcccccccagagccaccaacagaggctacagagccgccgagtggcagctggaccagcccagctggagcggcagactgagaatcaccgccaagggccagatggcctacatcaagctggaggacagaaccagcggcgagctgttcgcccaggcccccgtggaccagttccccggcaccgccgtggagagcgtgaccgacagcagcagatacttcgtgatcagaatcgaggacggcaacggcagaagagccttcatcggcatcggcttcggcgacagaggcgacgccttcgacttcaacgtggccctgcaggaccacttcaagtgggtgaagcagcagtgcgagttcgccaagcaggcccagaaccccgaccagggccccaagctggacctgggcttcaaggagggccagaccatcaagctgaacatcgccgtgggcctgggcaacatcaacagaagatgcagctgcaccctggccaccgcccagagctgccactgctag

SEQ ID NO: 90544 - DNA, 792 bp, synthetic construct
  misc_feature 1..792: note = Description of Artificial Sequence: Synthetic coding sequence
  source 1..792: mol_type = other DNA
atggaggagagcggctacgagagcgtgctgtgcgtgaagcccgacgtgcacgtgtacagaatcccccccagagccaccaacagaggctacagagccgccgagtggcagctggaccagcccagctggagcggcagactgagaatcaccgccaagggccagatggcctacatcaagctggaggacagaaccagcggcgagctgttcgcccaggcccccgtggaccagttccccggcaccgccgtggagagcgtgaccgacagcagcagatacttcgtgatcagaatcgaggacggcaacggcagaagagccttcatcggcatcggcttcggcgacagaggcgacgccttcgacttcaacgtggccctgcaggaccacttcaagtgggtgaagcagcagtgcgagttcgccaagcaggcccagaaccccgaccagggccccaagctggacctgggcttcaaggagggccagaccatcaagctgaacatcgccaacatgaagaagaaggagggcgccgccggcaaccccagagtgagacccgccagcaccggcggcctgagcctgctgccccccccccccggcggcaagaccagcaccctgatccccccccccggcgagcagctggccgtgggcggcagcctggtgcagcccgccgtggcccccagcagcggcggcgcccccgtgccctggccccagcccaaccccgccaccgccgacatctggggcgacttcaccaagagcaccggcagcaccagcagccagacccagcccggcaccggctgggtgcagttctag

SEQ ID NO: 90545 - DNA, 792 bp, synthetic construct; identical to SEQ ID NO: 90544
  misc_feature 1..792: note = Description of Artificial Sequence: Synthetic coding sequence
  source 1..792: mol_type = other DNA

SEQ ID NO: 90546 - DNA, 822 bp, synthetic construct
  misc_feature 1..822: note = Description of Artificial Sequence: Synthetic coding sequence
  source 1..822: mol_type = other DNA
atggaggagagcggctacgagagcgtgctgtgcgtgaagcccgacgtgcacgtgtacagaatcccccccagagccaccaacagaggctacagagccgccgagtggcagctggaccagcccagctggagcggcagactgagaatcaccgccaagggccagatggcctacatcaagctggaggacagaaccagcggcgagctgttcgcccaggcccccgtggaccagttccccggcaccgccgtggagagcgtgaccgacagcagcagatacttcgtgatcagaatcgaggacggcaacggcagaagagccttcatcggcatcggcttcggcgacagaggcgacgccttcgacttcaacgtggccctgcaggaccacttcaagtgggtgaagcagcagtgcgagttcgccaagcaggcccagaaccccgaccagggccccaagctggacctgggcttcaaggagggccagaccatcaagctgaacatcgccaacatgaagaagaaggagggcgccgccggcaaccccagagtgagacccgccagcaccggcggcctgagcctgctgccccccccccccggcggcaagaccagcaccctgatccccccccccggcgagcagctggccgtgggcggcagcctggtgcagcccgccgtggcccccagcagcgaccagctgcccgccagacccagccaggcccaggccggcagcagcagcgacctgagcaccgtgttcccccacgtgaccagcggcaaggccctgccccacctgggccagagaaaggaggacgaggccctgctgagctggcccgtgttcggcgcctag

SEQ ID NO: 90547 - DNA, 714 bp, synthetic construct
  misc_feature 1..714: note = Description of Artificial Sequence: Synthetic coding sequence
  source 1..714: mol_type = other DNA
atggaggagagcggcgccgccgagtggcagctggaccagcccagctggagcggcagactgagaatcaccgccaagggccagatggcctacatcaagctggaggacagaaccagcggcgagctgttcgcccaggcccccgtggaccagttccccggcaccgccgtggagagcgtgaccgacagcagcagatacttcgtgatcagaatcgaggacggcaacggcagaagagccttcatcggcatcggcttcggcgacagaggcgacgccttcgacttcaacgtggccctgcaggaccacttcaagtgggtgaagcagcagtgcgagttcgccaagcaggcccagaaccccgaccagggccccaagctggacctgggcttcaaggagggccagaccatcaagctgaacatcgccaacatgaagaagaaggagggcgccgccggcaaccccagagtgagacccgccagcaccggcggcctgagcctgctgccccccccccccggcggcaagaccagcaccctgatccccccccccggcgagcagctggccgtgggcggcagcctggtgcagcccgccgtggcccccagcagcggcggcgcccccgtgccctggccccagcccaaccccgccaccgccgacatctggggcgacttcaccaagagcaccggcagcaccagcagccagacccagcccggcaccggctgggtgcagttctag

SEQ ID NO: 90548 - DNA, 792 bp, synthetic construct; identical to SEQ ID NO: 90544
  misc_feature 1..792: note = Description of Artificial Sequence: Synthetic coding sequence
  source 1..792: mol_type = other DNA

SEQ ID NO: 90549 - DNA, 966 bp, synthetic construct
  misc_feature 1..966: note = Description of Artificial Sequence: Synthetic coding sequence
  source 1..966: mol_type = other DNA
atgagcgagcagagcaaggacctgagcgaccccaacttcgccgccgaggcccccaacagcgaggtgcacagcagccccggcgtgagcgagggcgtgccccccagcgccaccctggccgagccccagagcccccccctgggccccaccgccgccccccaggccgccccccccccccaggcccccaacgacgagggcgaccccaaggccctgcagcaggccgccgaggagggcagagcccaccaggcccccagcgccgcccagcccggccccgccccccccgcccccgcccagctggtgcagaaggcccacgagctgatgtggtacgtgctggtgaaggaccagaagaagatgatcatctggttccccgacatggtgaaggacgtgatcggcagctacaagaagtggtgcagaagcatcctgagaagaaccagcctgatcctggccagagtgttcggcctgcacctgagactgaccagcctgcacaccatggagttcgccctggtgaaggccctggagcccgaggagctggacagagtggccctgagcaacagaatgcccatgaccggcctgctgctgatgatcctgagcctgatctacgtgaagggcagaggcgccagagagagcgccgtgtggaacgtgctgagaatcctgggcctgagaccctggaagaagcacagcaccttcggcgacgtgagaaagctgatcaccgaggagttcgtgcagatgaactacctgaagtaccagagagtgccctacgtggagccccccgagtacgagttcttctggggcagcagagccagcagagagatcaccaagatgcagatcatggagttcctggccagagtgttcaagaaggacccccaggcctggcccagcagatacagagaggccctggaggaggccagagccctgagagaggccaaccccaccgcccactaccccagaagcagcgtgagcgaggactag

SEQ ID NO: 90550 - DNA, 915 bp, synthetic construct
  misc_feature 1..915: note = Description of Artificial Sequence: Synthetic coding sequence
  source 1..915: mol_type = other DNA
atgctgcagaagcccagaaacagaggcagaagcggcggccaggccgagagagacagagactggagccacagcggcaaccccggcgccagcagagccggcgaggacgccagagtgctgagagacggcttcgccgaggaggcccccagcaccagcagaggccccggcggcagccagggcagccagggccccagcccccagggcgccagaagagcccaggccgcccccgccgtgggccccagaagccagaagcagctggagctgaaggtgagcgagctggtgcagttcctgctgatcaaggaccagaagaagatccccatcaagagagccgacatcctgaagcacgtgatcggcgactacaaggacatcttccccgacctgttcaagagagccgccgagagactgcagtacgtgttcggctacaagctggtggagctggagcccaagagcaacacctacatcctgatcaacaccctggagcccgtggaggaggacgccgagatgagaggcgaccagggcacccccaccaccggcctgctgatgatcgtgctgggcctgatcttcatgaagggcaacaccatcaaggagaccgaggcctgggacttcctgagaagactgggcgtgtaccccaccaagaagcacctgatcttcggcgaccccaagaagctgatcaccgaggacttcgtgagacagagatacctggagtacagaagaatcccccacaccgaccccgtggactacgagttccagtggggccccagaaccaacctggagaccagcaagatgaaggtgctgaagttcgtggccaaggtgcacaaccaggaccccaaggactggcccgcccagtactgcgaggccctggccgacgaggagaacagagccagaccccagcccagcggccccgcccccagcagctag

SEQ ID NO: 90551 - DNA, 666 bp, synthetic construct
  misc_feature 1..666: note = Description of Artificial Sequence: Synthetic coding sequence
  source 1..666: mol_type = other DNA
atggccctggccctggccgccctggccgccgtggagcccgcctgcggcagcagataccagcagctgcagaacgaggaggagagcggcgagcccgagcaggccgccggcgacgccccccccccctacagcagcatcagcgccgagagcgccgcctacttcgactacaaggacgagagcggcttccccaagccccccagctacaacgtggccaccaccctgcccagctacgacgaggccgagagaaccaaggccgaggccaccatccccctggtgcccggcagagacgaggacttcgtgggcagagacgacttcgacgacgccgaccagctgagaatcggcaacgacggcatcttcatgctgaccttcttcatggccttcctgttcaactggatcggcttcttcctgagcttctgcctgaccaccagcgccgccggcagatacggcgccatcagcggcttcggcctgagcctgatcaagtggatcctgatcgtgagattcagcacctacttccccggctacttcgacggccagtactggctgtggtgggtgttcctggtgctgggcttcctgctgttcctgagaggcttcatcaactacgccaaggtgagaaagatgcccgagaccttcagcaacctgcccagaaccagagtgctgttcatctactag

SEQ ID NO: 90552 - DNA, 462 bp, synthetic construct
  misc_feature 1..462: note = Description of Artificial Sequence: Synthetic coding sequence
  source 1..462: mol_type = other DNA
atggccctggccctggccgccctggccgccgtggagcccgcctgcggcagcagataccagcagctgcagaacgaggaggagagcggcgagcccgagcaggccgccggcgacgccccccccccctacagcagcatcagcgccgagagcgccgcctacttcgactacaaggacgagagcggcttccccaagccccccagctacaacgtggccaccaccctgcccagctgcttctacgacatcagccacctgatcttcttcatcttctacctgagaaacatgaagaagaagtacaccaagatggtgaagctgctgcacaagagcgcccccgcccagagcgacagctgcaagtgccccttcatctgctgcgtgtgcatcagcagaatcagcatcggcagcagaagcggctaccagtacatcatgcacagaagcgtgggctgcctgaaggccaagcaggagaactag

SEQ ID NO: 90553 - DNA, 3138 bp, synthetic construct
  misc_feature 1..3138: note = Description of Artificial Sequence: Synthetic coding sequence
  source 1..3138: mol_type = other DNA
atgcaccagaagacccccgagatctacagcgtggagctgagcggcaccaaggacatcgtgaagaccgacaagggcgacggcaaggagaagtacagaggcctgaagaacaactgcctggagctgaagaagaagaaccacaaggaggagttccagaaggagctgcacctggacgaccacaagctgagcaacagagagctggaggagaagtacggcaccgacatcatcatgggcctgagcagcaccagagccgccgagctgctggccagagacggccccaacagcctgaccccccccaagcagacccccgagatcgtgaagttcctgaagcagatggtgggcggcttcagcatcctgctgtgggtgggcgccttcctgtgctggatcgcctacggcatccagtacagcagcgacaagagcgccagcctgaacaacgtgtacctgggctgcgtgctgggcctggtggtgatcctgaccggcatcttcgcctactaccaggaggccaagagcaccaacatcatgagcagcttcaacaagatgatcccccagcaggccctggtgatcagagacagcgagaagaagaccatccccagcgagcagctggtggtgggcgacatcgtggaggtgaagggcggcgaccagatccccgccgacatcagagtgctgagcagccagggctgcagagtggacaacagcagcctgaccggcgagagcgagccccagcccagaagcagcgagttcacccacgagaaccccctggagaccaagaacatctgcttctacagcaccacctgcctggaggccagcaccagccccgtgggcaccgtgaccggcatggtgatcaacaccggcgacagaaccatcatcggccacatcgccagcctggccagcggcgtgggcaacgagaagacccccatcgccatcgagatcgagcacttcgtgcacatcgtggccggcgtggccgtgagcatcggcatcctgttcttcatcatcgccgtgagcctgaagtaccaggtgctggacagcatcatcttcctgatcggcatcatcgtggccaacgtgcccgagggcctgctggccaccgtgaccgtgaccctgagcctgaccgccaagagaatggccaagaagaactgcctggtgaagaacctggaggccgtggagaccctgggcagcaccagcatcatctgcagcgacaagaccggcaccctgacccagaacagaatgaccgtggcccacctgtggttcgacaaccagatcttcgtggccgacaccagcgaggaccacagcaaccaggtgttcgaccagagcagcagaacctgggccagcctgagcaagatcatcaccctgtgcaacagagccgagttcaagcccggccaggagaacgtgcccatcatgaagaaggccgtgatcggcgacgccagcgagaccgccctgctgaagttcagcgaggtgatcctgggcgacgtgatggagatcagaaagagaaacagaaaggtggccgagatccccttcaacagcaccaacaagttccagctgagcatccacgagatggacgacccccacggcaagagattcctgatggtgatgaagggcgcccccgagagaatcctggagaagtgcagcaccatcatgatcaacggcgaggagcaccccctggacaagagcaccgccaagaccttccacaccgcctacatggagctgggcggcctgggcgagagagtgctgggcttctgccacctgtacctgcccgccgacgagttccccgagacctacagcttcgacatcgacgccatgaacttccccaccagcaacctgtgcttcgtgggcctgctgagcatgatcgacccccccagaagcaccgtgcccgacgccgtgaccaagtgcagaagcgccggcatcaaggtgatcatggtgaccggcgaccaccccatcaccgccaaggccatcgccaagagcgtgggcatcatcagcgccaacagcgagaccgtggaggacatcgcccacagactgaacatcgccgtggagcaggtgaacaagagagacgccaaggccgccgtggtgaccggcatggagctgaaggacatgagcagcgagcagctggacgagatcctggccaactaccaggagatcgtgttcgccagaaccagcccccagcagaagctgatcatcgtggagggctgccagagacaggacgccgtggtggccgtgaccggcgacggcgtgaacgacagccccgccctgaagaaggccgacatcggcatcgccatgggcatcgccggcagcgacgccgccaagaacgccgccgacatggtgctgctggacgacaacttcgccagcatcgtgaccggcgtggaggagggcagactgatcttcgacaacctgaagaagaccatcgcctacagcctgaccaagaacatcgccgagctgtgccccttcctgatctacatcatcgtgggcctgcccctgcccatcggcaccatcaccatcctgttcatcgacctgggcaccgacatcatccccagcatcgccctggcctacgagaaggccgagagcgacatcatgaacagaaagcccagacacaagaacaaggacagactggtgaaccagcccctggccgtgtacagctacctgcacatcggcctgatgcaggccctgggcgccttcctggtgtacttcaccgtgtacgcccaggagggcttcctgcccagaaccctgatcaacctgagagtggagtgggagaaggactacgtgaacgacctgaaggacagctacggccaggagtggaccagataccagagagagtacctggagtggaccggctacaccgccttcttcgtgggcatcctggtgcagcagatcgccgacctgatcatcagaaagaccagaagaaacagcatcttccagcagggcctgttcagaaacaaggtgatctgggtgggcatcaccagccagatcatcatcggcctgatcctgagctacggcctgggcagcgtgaccgccctgagcttcaccatgctgagagcccagtactggttcgtggccgtgccccacgccatcctgatctgggtgtacgacgaggtgagaaagctgttcatcagactgtaccccggcagctggtgggacaagaacatgtactactag

SEQ ID NO: 90554 - DNA, 1605 bp, synthetic construct
  misc_feature 1..1605: note = Description of Artificial Sequence: Synthetic coding sequence
  source 1..1605: mol_type = other DNA
atggcccagctgggcaagctgctgaaggagcagaagtacgacagacagctgagactgtggggcgaccacggccaggaggccctggagagcgcccacgtgtgcctgatcaacgccaccgccaccggcaccgagatcctgaagaacctggtgctgcccggcatcggcagcttcaccatcatcgacggcaaccaggtgagcggcgaggacgccggcaacaacttcttcctgcagagaagcagcatcggcaagaacagagccgaggccgccatggagttcctgcaggagctgaacagcgacgtgagcggcagcttcgtggaggagagccccgagaacctgctggacaacgaccccagcttcttctgcagattcaccgtggtggtggccacccagctgcccgagagcaccagcctgagactggccgacgtgctgtggaacagccagatccccctgctgatctgcagaacctacggcctggtgggctacatgagaatcatcatcaaggagcaccccgtgatcgagagccaccccgacaacgccctggaggacctgagactggacaagcccttccccgagctgagagagcacttccagagctacgacctggaccacatggagaagaaggaccacagccacaccccctggatcgtgatcatcgccaagtacctggcccagtggtacagcgagaccaacggcagaatccccaagacctacaaggagaaggaggacttcagagacctgatcagacagggcatcctgaagaacgagaacggcgcccccgaggacgaggagaacttcgaggaggccatcaagaacgtgaacaccgccctgaacaccacccagatccccagcagcatcgaggacatcttcaacgacgacagatgcatcaacatcaccaagcagacccccagcttctggatcctggccagagccctgaaggagttcgtggccaaggagggccagggcaacctgcccgtgagaggcaccatccccgacatgatcgccgacagcggcaagtacatcaagctgcagaacgtgtacagagagaaggccaagaaggacgccgccgccgtgggcaaccacgtggccaagctgctgcagagcatcggccaggcccccgagagcatcagcgagaaggagctgaagctgctgtgcagcaacagcgccttcctgagagtggtgagatgcagaagcctggccgaggagtacggcctggacaccatcaacaaggacgagatcatcagcagcatggacaaccccgacaacgagatcgtgctgtacctgatgctgagagccgtggacagattccacaagcagcagggcagataccccggcgtgagcaactaccaggtggaggaggacatcggcaagctgaagagctgcctgaccggcttcctgcaggagtacggcctgagcgtgatggtgaaggacgactacgtgcacgagttctgcagatacggcgccgccgagccccacaccatcgccgccttcctgggcggcgccgccgcccaggaggtgatcaagatcatcaccaagcagttcgtgatcttcaacaacacctacatctacagcggcatgagccagaccagcgccaccttccagctgtag

SEQ ID NO: 90555 - DNA, 1587 bp, synthetic construct
  misc_feature 1..1587: note = Description of Artificial Sequence: Synthetic coding sequence
  source 1..1587: mol_type = other DNA
atggacgcccagcagaccaagaccaacgaggccagactgtggggcgaccacggccaggaggccctggagagcgcccacgtgtgcctgatcaacgccaccgccaccggcaccgagatcctgaagaacctggtgctgcccggcatcggcagcttcaccatcatcgacggcaaccaggtgagcggcgaggacgccggcaacaacttcttcctgcagagaagcagcatcggcaagaacagagccgaggccgccatggagttcctgcaggagctgaacagcgacgtgagcggcagcttcgtggaggagagccccgagaacctgctggacaacgaccccagcttcttctgcagattcaccgtggtggtggccacccagctgcccgagagcaccagcctgagactggccgacgtgctgtggaacagccagatccccctgctgatctgcagaacctacggcctggtgggctacatgagaatcatcatcaaggagcaccccgtgatcgagagccaccccgacaacgccctggaggacctgagactggacaagcccttccccgagctgagagagcacttccagagctacgacctggaccacatggagaagaaggaccacagccacaccccctggatcgtgatcatcgccaagtacctggcccagtggtacagcgagaccaacggcagaatccccaagacctacaaggagaaggaggacttcagagacctgatcagacagggcatcctgaagaacgagaacggcgcccccgaggacgaggagaacttcgaggaggccatcaagaacgtgaacaccgccctgaacaccacccagatccccagcagcatcgaggacatcttcaacgacgacagatgcatcaacatcaccaagcagacccccagcttctggatcctggccagagccctgaaggagttcgtggccaaggagggccagggcaacctgcccgtgagaggcaccatccccgacatgatcgccgacagcggcaagtacatcaagctgcagaacgtgtacagagagaaggccaagaaggacgccgccgccgtgggcaaccacgtggccaagctgctgcagagcatcggccaggcccccgagagcatcagcgagaaggagctgaagctgctgtgcagcaacagcgccttcctgagagtggtgagatgcagaagcctggccgaggagtacggcctggacaccatcaacaaggacgagatcatcagcagcatggacaaccccgacaacgagatcgtgctgtacctgatgctgagagccgtggacagattccacaagcagcagggcagataccccggcgtgagcaactaccaggtggaggaggacatcggcaagctgaagagctgcctgaccggcttcctgcaggagtacggcctgagcgtgatggtgaaggacgactacgtgcacgagttctgcagatacggcgccgccgagccccacaccatcgccgccttcctgggcggcgccgccgcccaggaggtgatcaagatcatcaccaagcagttcgtgatcttcaacaacacctacatctacagcggcatgagccagaccagcgccaccttccagctgtag

SEQ ID NO: 90556 - DNA, 1338 bp, synthetic construct
  misc_feature 1..1338: note = Description of Artificial Sequence: Synthetic coding sequence
  source 1..1338: mol_type = other DNA
atggagttcctgcaggagctgaacagcgacgtgagcggcagcttcgtggaggagagccccgagaacctgctggacaacgaccccagcttcttctgcagattcaccgtggtggtggccacccagctgcccgagagcaccagcctgagactggccgacgtgctgtggaacagccagatccccctgctgatctgcagaacctacggcctggtgggctacatgagaatcatcatcaaggagcaccccgtgatcgagagccaccccgacaacgccctggaggacctgagactggacaagcccttccccgagctgagagagcacttccagagctacgacctggaccacatggagaagaaggaccacagccacaccccctggatcgtgatcatcgccaagtacctggcccagtggtacagcgagaccaacggcagaatccccaagacctacaaggagaaggaggacttcagagacctgatcagacagggcatcctgaagaacgagaacggcgcccccgaggacgaggagaacttcgaggaggccatcaagaacgtgaacaccgccctgaacaccacccagatccccagcagcatcgaggacatcttcaacgacgacagatgcatcaacatcaccaagcagacccccagcttctggatcctggccagagccctgaaggagttcgtggccaaggagggccagggcaacctgcccgtgagaggcaccatccccgacatgatcgccgacagcggcaagtacatcaagctgcagaacgtgtacagagagaaggccaagaaggacgccgccgccgtgggcaaccacgtggccaagctgctgcagagcatcggccaggcccccgagagcatcagcgagaaggagctgaagctgctgtgcagcaacagcgccttcctgagagtggtgagatgcagaagcctggccgaggagtacggcctggacaccatcaacaaggacgagatcatcagcagcatggacaaccccgacaacgagatcgtgctgtacctgatgctgagagccgtggacagattccacaagcagcagggcagataccccggcgtgagcaactaccaggtggaggaggacatcggcaagctgaagagctgcctgaccggcttcctgcaggagtacggcctgagcgtgatggtgaaggacgactacgtgcacgagttctgcagatacggcgccgccgagccccacaccatcgccgccttcctgggcggcgccgccgcccaggaggtgatcaagatcatcaccaagcagttcgtgatcttcaacaacacctacatctacagcggcatgagccagaccagcgccaccttccagctgtag

SEQ ID NO: 90557 - DNA, 2901 bp, synthetic construct
  misc_feature 1..2901: note = Description of Artificial Sequence: Synthetic coding sequence
  source 1..2901: mol_type = other DNA
atggagccccaggtgaccctgaacgtgaccttcaagaacgagatccagagcttcctggtgagcgaccccgagaacaccacctgggccgacatcgaggccatggtgaaggtgagcttcgacctgaacaccatccagatcaagtacctggacgaggagaacgaggaggtgagcatcaacagccagggcgagtacgaggaggccctgaagatggccgtgaagcagggcaaccagctgcagatgcaggtgcacgagggccaccacgtggtggacgaggcccccccccccgtggtgggcgccaagagactggccgccagagccggcaagaagcccctggcccactacagcagcctggtgagagtgctgggcagcgacatgaagacccccgaggaccccgccgtgcagagcttccccctggtgccctgcgacaccgaccagccccaggacaagccccccgactggttcaccagctacctggagaccttcagagagcaggtggtgaacgagaccgtggagaagctggagcagaagctgcacgagaagctggtgctgcagaaccccagcctgggcagctgccccagcgaggtgagcatgcccaccagcgaggagaccctgttcctgcccgagaaccagttcagctggcacatcgcctgcaacaactgccagagaagaatcgtgggcgtgagataccagtgcagcctgtgccccagctacaacatctgcgaggactgcgaggccggcccctacggccacgacaccaaccacgtgctgctgaagctgagaagacccgtggtgggcagcagcgagcccttctgccacagcaagtacagcacccccagactgcccgccgccctggagcaggtgagactgcagaagcaggtggacaagaacttcctgaaggccgagaagcagagactgagagccgagaagaagcagagaaaggccgaggtgaaggagctgaagaagcagctgaagctgcacagaaagatccacctgtggaacagcatccacggcctgcagagccccaagagccccctgggcagacccgagagcctgctgcagagcaacaccctgatgctgcccctgcagccctgcaccagcgtgatgcccatgctgagcgccgccttcgtggacgagaacctgcccgacggcacccacctgcagcccggcaccaagttcatcaagcactggagaatgaagaacaccggcaacgtgaagtggagcgccgacaccaagctgaagttcatgtggggcaacctgaccctggccagcaccgagaagaaggacgtgctggtgccctgcctgaaggccggccacgtgggcgtggtgagcgtggagttcatcgcccccgccctggagggcacctacaccagccactggagactgagccacaagggccagcagttcggccccagagtgtggtgcagcatcatcgtggaccccttccccagcgaggagagccccgacaacatcgagaagggcatgatcagcagcagcaagaccgacgacctgacctgccagcaggaggagaccttcctgctggccaaggaggagagacagctgggcgaggtgaccgagcagaccgagggcaccgccgcctgcatcccccagaaggccaagaacgtggccagcgagagagagctgtacatccccagcgtggacctgctgaccgcccaggacctgctgagcttcgagctgctggacatcaacatcgtgcaggagctggagagagtgccccacaacacccccgtggacgtgaccccctgcatgagccccctgccccacgacagccccctgatcgagaagcccggcctgggccagatcgaggaggagaacgagggcgccggcttcaaggccctgcccgacagcatggtgagcgtgaagagaaaggccgagaacatcgccagcgtggaggaggccgaggaggacctgagcggcacccagttcgtgtgcgagaccgtgatcagaagcctgaccctggacgccgcccccgaccacaaccccccctgcagacagaagagcctgcagatgaccttcgccctgcccgagggccccctgggcaacgagaaggaggagatcatccacatcgccgaggaggaggccgtgatggaggaggaggaggacgaggaggacgaggaggaggaggacgagctgaaggacgaggtgcagagccagagcagcgccagcagcgaggactacatcatcatcctgcccgagtgcttcgacaccagcagacccctgggcgacagcatgtacagcagcgccctgagccagcccggcctggagagaggcgccgagggcaagcccggcgtggaggccggccaggagcccgccgaggccggcgagagactgcccggcggcgagaaccagccccaggagcacagcatcagcgacatcctgaccaccagccagaccctggagaccgtgcccctgatccccgaggtggtggagctgccccccagcctgcccagaagcagcccctgcgtgcaccaccacggcagccccggcgtggacctgcccgtgaccatccccgaggtgagcagcgtgcccgaccagatcagaggcgagcccagaggcagcagcggcctggtgaacagcagacagaagagctacgaccacagcagacaccaccacggcagcagcatcgccggcggcctggtgaagggcgccctgagcgtggccgccagcgcctacaaggccctgttcgccggcccccccgtgaccgcccagcccatcatcagcgaggaccagaccgccgccctgatggcccacctgttcgagatgggcttctgcgacagacagctgaacctgagactgctgaagaagcacaactacaacatcctgcaggtggtgaccgagctgctgcagctgaacaacaacgactggtacagccagagatactag

SEQ ID NO: 90558 - DNA, 2814 bp, synthetic construct
  misc_feature 1..2814: note = Description of Artificial Sequence: Synthetic coding sequence
  source 1..2814: mol_type = other DNA
atggagccccaggtgaccctgaacgtgaccttcaagaacgagatccagagcttcctggtgagcgaccccgagaacaccacctgggccgacatcgaggccatggtgaaggtgagcttcgacctgaacaccatccagatcaagtacctggacgaggagaacgaggaggtgaagatcgtgctgctgggcgagtacgaggaggccctgaagatggccgtgaagcagggcaaccagctgcagatgcaggtgcacgagggccaccacgtggtggacgaggcccccccccccgtggtgggcgccaagagactggccgccagagccggcaagaagcccctggcccactacagcagcctggtgagagtgctgggcagcgacatgaagacccccgaggaccccgccgtgcagagcttccccctggtgccctgcgacaccgaccagccccaggacaagccccccgactggttcaccagctacctggagaccttcagagagcaggtggtgaacgagaccgtggagaagctggagcagaagctgcacgagaagctggtgctgcagaaccccagcctgggcagctgccccagcgaggtgagcatgcccaccagcgaggagaccctgttcctgcccgagaaccagttcagctggcacatcgcctgcaacaactgccagagaagaatcgtgggcgtgagataccagtgcagcctgtgccccagctacaacatctgcgaggactgcgaggccggcccctacggccacgacaccaaccacgtgctgctgaagctgagaagacccgtggtgggcagcagcgagcccttctgccacagcaagtacagcacccccagactgcccgccgccctggagcaggtgagactgcagaagcaggtggacaagaacttcctgaaggccgagaagcagagactgagagccgagaagaagcagagaaaggccgaggtgaaggagctgaagaagcagctgaagctgcacagaaagatccacctgtggaacagcatccacggcctgcagagccccaagagccccctgggcagacccgagagcctgctgcagagcaacaccctgatgctgcccctgcagccctgcaccagcgtgatgcccatgctgagcgccgccttcgtggacgagaacctgcccgacggcacccacctgcagcccggcaccaagttcatcaagcactggagaatgaagaacaccggcaacgtgaagtggagcgccgacaccaagctgaagttcatgtggggcaacctgaccctggccagcaccgagaagaaggacgtgctggtgccctgcctgaaggccggccacgtgggcgtggtgagcgtggagttcatcgcccccgccctggagggcacctacaccagccactggagactgagccacaagggccagcagttcggccccagagtgtggtgcagcatcatcgtggaccccttccccagcgaggagagccccgacaacatcgagaagggcatgatcagcagcagcaagaccgacgacctgacctgccagcaggaggagaccttcctgctggccaaggaggagagacagctgggcgaggtgaccgagcagaccgagggcaccgccgcctgcatcccccagaaggccaagaacgtggccagcgagagagagctgtacatccccagcgtggacctgctgaccgcccaggacctgctgagcttcgagctgctggacatcaacatcgtgcaggagctggagagagtgccccacaacacccccgtggacgtgaccccctgcatgagccccctgccccacgacagccccctgatcgagaagcccggcctgggccagatcgaggaggagaacgagggcgccggcttcaaggccctgcccgacagcatggtgagcgtgaagagaaaggccgagaacatcgccagcgtggaggaggccgaggaggacctgagcggcacccagttcgtgtgcgagaccgtgatcagaagcctgaccctggacgccgcccccgaccacaaccccccctgcagacagaagagcctgcagatgaccttcgccctgcccgagggccccctgggcaacgagaaggaggagatcatccacatcgccgaggaggaggccgtgatggaggaggaggaggacgaggaggacgaggaggaggaggacgagctgaaggacgaggtgcagagccagagcagcgccagcagcgaggactacatcatcatcctgcccgagtgcttcgacaccagcagacccctgggcgacagcatgtacagcagcgccctgagccagcccggcctggagagaggcgccgagggcaagcccggcgtggaggccggccaggagcccgccgaggccggcgagagactgcccggcggcgagaaccagccccaggagcacagcatcagcgacatcctgaccaccagccagaccctggagaccgtgcccctgatccccgaggtggtggagctgccccccagcctgcccagaagcagcccctgcgtgcaccaccacggcagccccggcgtggacctgcccgtgaccatccccgaggtgagcagcgtgcccgaccagatcagaggcgagcccagaggcagcagcggcctggtgaacagcagacagaagagctacgaccacagcagacaccaccacggcagcagcatcgccggcggcctggtgaagggcgccctgagcgtggccgccagcgcctacaaggccctgttcgccggcccccccgtgaccgcccagggcctgtggggcctgctgagcttcctgcacctggccaagaagtgcttcttcctgaaggcccccagcgaggccttcagctggttctag

SEQ ID NO: 90559 - DNA, 2901 bp, synthetic construct
  misc_feature 1..2901: note = Description of Artificial Sequence: Synthetic coding sequence
  source 1..2901: mol_type = other DNA
atggagccccaggtgaccctgaacgtgaccttcaagaacgagatccagagcttcctggtgagcgaccccgagaacaccacctgggccgacatcgaggccatggtgaaggtgagcttcgacctgaacaccatccagatcaagtacctggacgaggagaacgaggaggtgaagatcgtgctgctgggcgagtacgaggaggccctgaagatggccgtgaagcagggcaaccagctgcagatgcaggtgcacgagggccaccacgtggtggacgaggcccccccccccgtggtgggcgccaagagactggccgccagagccggcaagaagcccctggcccactacagcagcctggtgagagtgctgggcagcgacatgaagacccccgaggaccccgccgtgcagagcttccccctggtgccctgcgacaccgaccagccccaggacaagccccccgactggttcaccagctacctggagaccttcagagagcaggtggtgaacgagaccgtggagaagctggagcagaagctgcacgagaagctggtgctgcagaaccccagcctgggcagctgccccagcgaggtgagcatgcccaccagcgaggagaccctgttcctgcccgagaaccagttcagctggcacatcgcctgcaacaactgccagagaagaatcgtgggcgtgagataccagtgcagcctgtgccccagctacaacatctgcgaggactgcgaggccggcccctacggccacgacaccaaccacgtgctgctgaagctgagaagacccgtggtgggcagcagcgagcccttctgccacagcaagtacagcacccccagactgcccgccgccctggagcaggtgagactgcagaagcaggtggacaagaacttcctgaaggccgagaagcagagactgagagccgagaagaagcagagaaaggccgaggtgaaggagctgaagaagcagctgaagctgcacagaaagatccacctgtggaacagcatccacggcctgcagagccccaagagccccctgggcagacccgagagcctgctgcagagcaacaccctgatgctgcccctgcagccctgcaccagcgtgatgcccatgctgagcgccgccttcgtggacgagaacctgcccgacggcacccacctgcagcccggcaccaagttcatcaagcactggagaatgaagaacaccggcaacgtgaagtggagcgccgacaccaagctgaagttcatgtggggcaacctgaccctggccagcaccgagaagaaggacgtgctggtgccctgcctgaaggccggccacgtgggcgtggtgagcgtggagttcatcgcccccgccctggagggcacctacaccagccactggagactgagccacaagggccagcagttcggccccagagtgtggtgcagcatcatcgtggaccccttccccagcgaggagagccccgacaacatcgagaagggcatgatcagcagcagcaagaccgacgacctgacctgccagcaggaggagaccttcctgctggccaaggaggagagacagctgggcgaggtgaccgagcagaccgagggcaccgccgcctgcatcccccagaaggccaagaacgtggccagcgagagagagctgtacatccccagcgtggacctgctgaccgcccaggacctgctgagcttcgagctgctggacatcaacatcgtgcaggagctggagagagtgccccacaacacccccgtggacgtgaccccctgcatgagccccctgccccacgacagccccctgatcgagaagcccggcctgggccagatcgaggaggagaacgagggcgccggcttcaaggccctgcccgacagcatggtgagcgtgaagagaaaggccgagaacatcgccagcgtggaggaggccgaggaggacctgagcggcacccagttcgtgtgcgagaccgtgatcagaagcctgaccctggacgccgcccccgaccacaaccccccctgcagacagaagagcctgcagatgaccttcgccctgcccgagggccccctgggcaacgagaaggaggagatcatccacatcgccgaggaggaggccgtgatggaggaggaggaggacgaggaggacgaggaggaggaggacgagctgaaggacgaggtgcagagccagagcagcgccagcagcgaggactacatcatcatcctgcccgagtgcttcgacaccagcagacccctgggcgacagcatgtacagcagcgccctgagccagcccggcctggagagaggcgccgagggcaagcccggcgtggaggccggccaggagcccgccgaggccggcgagagactgcccggcggcgagaaccagccccaggagcacagcatcagcgacatcctgaccaccagccagaccctggagaccgtgcccctgatccccgaggtggtggagctgccccccagcctgcccagaagcagcccctgcgtgcaccaccacggcagccccggcgtggacctgcccgtgaccatccccgaggtgagcagcgtgcccgaccagatcagaggcgagcccagaggcagcagcggcctggtgaacagcagacagaagagctacgaccacagcagacaccaccacggcagcagcatcgccggcggcctggtgaagggcgccctgagcgtggccgccagcgcctacaaggccctgttcgccggcccccccgtgaccgcccagcccatcatcagcgaggaccagaccgccgccctgatggcccacctgttcgagatgggcttctgcgacagacagctgaacctgagactgctgaagaagcacaactacaacatcctgcaggtggtgaccgagctgctgcagctgaacaacaacgactggtacagccagagatactag

SEQ ID NO: 90560 - DNA, 2901 bp, synthetic construct; identical to SEQ ID NO: 90557
  misc_feature 1..2901: note = Description of Artificial Sequence: Synthetic coding sequence
  source 1..2901: mol_type = other DNA

SEQ ID NO: 90561 - DNA, 654 bp, synthetic construct
  misc_feature 1..654: note = Description of Artificial Sequence: Synthetic coding sequence
  source 1..654: mol_type = other DNA
atgtacagcagcgccctgagccagcccggcctggagagaggcgccgagggcaagcccggcgtggaggccggccaggagcccgccgaggccggcgagagactgcccggcggcgagaaccagccccaggagcacagcatcagcgacatcctgaccaccagccagaccctggagaccgtgcccctgatccccgaggtggtggagctgccccccagcctgcccagaagcagcccctgcgtgcaccaccacggcagccccggcgtggacctgcccgtgaccatccccgaggtgagcagcgtgcccgaccagatcagaggcgagcccagaggcagcagcggcctggtgaacagcagacagaagagctacgaccacagcagacaccaccacggcagcagcatcgccggcggcctggtgaagggcgccctgagcgtggccgccagcgcctacaaggccctgttcgccggcccccccgtgaccgcccagcccatcatcagcgaggaccagaccgccgccctgatggcccacctgttcgagatgggcttctgcgacagacagctgaacctgagactgctgaagaagcacaactacaacatcctgcaggtggtgaccgagctgctgcagctgaacaacaacgactggtacagccagagatactag

SEQ ID NO: 90562 - DNA, 2514 bp, synthetic construct
  misc_feature 1..2514: note = Description of Artificial Sequence: Synthetic coding sequence
  source 1..2514: mol_type = other DNA
atggagccccaggtgaccctgaacgtgaccttcaagaacgagatccagagcttcctggtgagcgaccccgagaacaccacctgggccgacatcgaggccatggtgagcatcaacagccagggcgagtacgaggaggccctgaagatggccgtgaagcagggcaaccagctgcagatgcaggtgcacgagggccaccacgtggtggacgaggcccccccccccgtggtgggcgccaagagactggccgccagagccggcaagaagcccctggcccactacagcagcctggtgagagtgctgggcagcgacatgaagacccccgaggaccccgccgtgcagagcttccccctggtgccctgcgacaccgaccagccccaggacaagccccccgactggttcaccagctacctggagaccttcagagagcaggtggtgaacgagaccgtggagaagctggagcagaagctgcacgagaagctggtgctgcagaaccccagcctgggcagctgccccagcgaggtgagcatgcccaccagcgaggagaccctgttcctgcccgagaaccagttcagctggcacatcgcctgcaacaactgccagagaagaatcgtgggcgtgagataccagtgcagcctgtgccccagctacaacatctgcgaggactgcgaggccggcccctacggccacgacaccaaccacgtgctgctgaagctgagaagacccgtggtgggcagcagcgagcccttctgccacagcaagtacagcacccccagactgcccgccgccctggagcaggtgagactgcagaagcaggtggacaagaacttcctgaaggccgagaagcagagactgagagccgagaagaagcagagaaaggccgaggtgaaggagctgaagaagcagctgaagctgcacagaaagatccacctgtggaacagcatccacggcctgcagagccccaagagccccctgggcagacccgagagcctgctgcagagcaacaccctgatgctgcccctgcagccctgcaccagcgtgatgcccatgctgagcgccgccttcgtggacgagaacctgcccgacggcacccacctgcagcccggcaccaagttcatcaagcactggagaatgaagaacaccggcaacgtgaagtggagcgccgacaccaagctgaagttcatgtggggcaacctgaccctggccagcaccgagaagaaggacgtgctggtgccctgcctgaaggccggccacgtgggcgtggtgagcgtggagttcatcgcccccgccctggagggcacctacaccagccactggagactgagccacaagggccagcagttcggccccagagtgtggtgcagcatcatcgtggaccccttccccagcgaggagagccccgacaacatcgagaagggcatgatcagcagcagcaagaccgacgacctgacctgccagcaggaggagaccttcctgctggccaaggaggagagacagctgggcgaggtgaccgagcagaccgagggcaccgccgcctgcatcccccagaaggccaagaacgtggccagcgagagagagctgtacatccccagcgtggacctgctgaccgcccaggacctgctgagcttcgagctgctggacatcaacatcgtgcaggagctggagagagtgccccacaacacccccgtggacgtgaccccctgcatgagccccctgccccacgacagccccctgatcgagaagcccggcctgggccagatcgaggaggagaacgagggcgccggcttcaaggccctgcccgacagcatggtgagcgtgaagagaaaggccgagaacatcgccagcgtggaggaggccgaggaggacctgagcggcacccagttcgtgtgcgagaccgtgatcagaagcctgaccctggacgccgcccccgaccacaaccccccctgcagacagaagagcctgcagatgaccttcgccctgcccgagggccccctgggcaacgagaaggaggagatcatccacatcgccgaggaggaggccgtgatggaggaggaggaggacgaggaggacgaggaggaggaggacgagctgaaggacgaggtgcagagccagagcagcgccagcagcgaggactacatcatcatcctgcccgagtgcttcgacaccagcagacccctgggcgacagcatgtacagcagcgccctgagccagcccggcctggagagaggcgccgagggcaagcccggcgtggaggccggccaggagcccgccgaggccggcgagagactgcccggcggcgagaaccagccccaggagcacagcatcagcgacatcctgaccaccagccagaccctggagaccgtgcccctgatccccgaggtggtggagctgccccccagcctgcccagaagcagcccctgcgtgcaccaccacggcagccccggcgtggacctgcccgtgaccatccccgaggtgagcagcgtgcccgaccagatcagaggcgccaacaacttctag

SEQ ID NO: 90563 - DNA, 2262 bp, synthetic construct
  misc_feature 1..2262: note = Description of Artificial Sequence: Synthetic coding sequence
  source 1..2262: mol_type = other DNA
atgcccatggacctgatcctggtggtgtggttctgcgtgtgcaccgccagaaccgtggtgggcttcggcatggaccccgacctgcagatggacatcgtgaccgagctggacctggtgaacaccaccctgggcgtggcccaggtgagcggcatgcacaacgccagcaaggccttcctgttccaggacatcgagagagagatccacgccgccccccacgtgagcgagaagctgatccagctgttcagaaacaagagcgagttcaccatcctggccaccgtgcagcagaagcccagcaccagcggcgtgatcctgagcatcagagagctggagcacagaatctacgagagagtgatcgacccccccgacaccaacctgccccccggcatcaacctgtggctgggccagagaaaccagaagcacggcctgttcaagggcatcatccaggacggcaagatcatcttcatgcccaacggctacatcacccagtgccccaacctgaaccacacctgccccacctgcagcgacttcctgagcctggtgcagggcatcatggacctgcaggagctgctggccaagatgaccgccaagctgaactacgccgagaccagactgagccagctggagaactgccactgcgagaagacctgccaggtgagcggcctgctgtacagagaccaggacagctgggtggacggcgaccactgcagaaactgcacctgcaagagcggcgccgtggagtgcagaagaatgagctgcccccccctgaactgcagccccgacagcctgcccgtgcacatcgccggccagtgctgcaaggtgtgcagacccaagtgcatctacggcggcaaggtgctggccgagggccagagaatcctgaccaagagctgcagagagtgcagaggcggcgtgctggtgaagatcaccgagatgtgcccccccctgaactgcagcgagaaggaccacatcctgcccgagaaccagtgctgcagagtgtgcagaggccacaacttctgcgccgagggccccaagtgcggcgagaacagcgagtgcaagaactggaacaccaaggccacctgcgagtgcaagagcggctacatcagcgtgcagggcgacagcgcctactgcgaggacatcgacgagtgcgccgccaagatgcactactgccacgccaacaccgtgtgcgtgaacctgcccggcctgtacagatgcgactgcgtgcccggctacatcagagtggacgacttcagctgcaccgagcacgacgagtgcggcagcggccagcacaactgcgacgagaacgccatctgcaccaacaccgtgcagggccacagctgcacctgcaagcccggctacgtgggcaacggcaccatctgcagagccttctgcgaggagggctgcagatacggcggcacctgcgtggcccccaacaagtgcgtgtgccccagcggcttcaccggcagccactgcgagaaggacatcgacgagtgcagcgagggcatcatcgagtgccacaaccacagcagatgcgtgaacctgcccggctggtaccactgcgagtgcagaagcggcttccacgacgacggcacctacagcctgagcggcgagagctgcatcgacatcgacgagtgcgccctgagaacccacacctgctggaacgacagcgcctgcatcaacctggccggcggcttcgactgcctgtgccccagcggccccagctgcagcggcgactgcccccacgagggcggcctgaagcacaacggccaggtgtggaccctgaaggaggacagatgcagcgtgtgcagctgcaaggacggcaagatcttctgcagaagaaccgcctgcgactgccagaaccccagcgccgacctgttctgctgccccgagtgcgacaccagagtgaccagccagtgcctggaccagaacggccacaagctgtacagaagcggcgacaactggacccacagctgccagcagtgcagatgcctggagggcgaggtggactgctggcccctgacctgccccaacctgagctgcgagtacaccgccatcctggagggcgagtgctgccccagatgcgtgagcgacccctgcctggccgacaacatcacctacgacatcagaaagacctgcctggacagctacggcgtgagcagactgagcggcagcgtgtggaccatggccggcagcccctgcaccacctgcaagtgcaagaacggcagagtgtgctgcagcgtggacttcgagtgcctgcagaacaactag

SEQ ID NO: 90564 - DNA, 2433 bp, synthetic construct
  misc_feature 1..2433: note = Description of Artificial Sequence: Synthetic coding sequence
  source 1..2433: mol_type = other DNA
atgcccatggacctgatcctggtggtgtggttctgcgtgtgcaccgccagaaccgtggtgggcttcggcatggaccccgacctgcagatggacatcgtgaccgagctggacctggtgaacaccaccctgggcgtggcccaggtgagcggcatgcacaacgccagcaaggccttcctgttccaggacatcgagagagagatccacgccgccccccacgtgagcgagaagctgatccagctgttcagaaacaagagcgagttcaccatcctggccaccgtgcagcagaagcccagcaccagcggcgtgatcctgagcatcagagagctggagcacagctacttcgagctggagagcagcggcctgagagacgagatcagataccactacatccacaacggcaagcccagaaccgaggccctgccctacagaatggccgacggccagtggcacaaggtggccctgagcgtgagcgccagccacctgctgctgcacgtggactgcaacagaatctacgagagagtgatcgacccccccgacaccaacctgccccccggcatcaacctgtggctgggccagagaaaccagaagcacggcctgttcaagggcatcatccaggacggcaagatcatcttcatgcccaacggctacatcacccagtgccccaacctgaaccacacctgccccacctgcagcgacttcctgagcctggtgcagggcatcatggacctgcaggagctgctggccaagatgaccgccaagctgaactacgccgagaccagactgagccagctggagaactgccactgcgagaagacctgccaggtgagcggcctgctgtacagagaccaggacagctgggtggacggcgaccactgcagaaactgcacctgcaagagcggcgccgtggagtgcagaagaatgagctgcccccccctgaactgcagccccgacagcctgcccgtgcacatcgccggccagtgctgcaaggtgtgcagacccaagtgcatctacggcggcaaggtgctggccgagggccagagaatcctgaccaagagctgcagagagtgcagaggcggcgtgctggtgaagatcaccgagatgtgcccccccctgaactgcagcgagaaggaccacatcctgcccgagaaccagtgctgcagagtgtgcagaggccacaacttctgcgccgagggccccaagtgcggcgagaacagcgagtgcaagaactggaacaccaaggccacctgcgagtgcaagagcggctacatcagcgtgcagggcgacagcgcctactgcgaggacatcgacgagtgcgccgccaagatgcactactgccacgccaacaccgtgtgcgtgaacctgcccggcctgtacagatgcgactgcgtgcccggctacatcagagtggacgacttcagctgcaccgagcacgacgagtgcggcagcggccagcacaactgcgacgagaacgccatctgcaccaacaccgtgcagggccacagctgcacctgcaagcccggctacgtgggcaacggcaccatctgcagagccttctgcgaggagggctgcagatacggcggcacctgcgtggcccccaacaagtgcgtgtgccccagcggcttcaccggcagccactgcgagaaggacatcgacgagtgcagcgagggcatcatcgagtgccacaaccacagcagatgcgtgaacctgcccggctggtaccactgcgagtgcagaagcggcttccacgacgacggcacctacagcctgagcggcgagagctgcatcgacatcgacgagtgcgccctgagaacccacacctgctggaacgacagcgcctgcatcaacctggccggcggcttcgactgcctgtgccccagcggccccagctgcagcggcgactgcccccacgagggcggcctgaagcacaacggccaggtgtggaccctgaaggaggacagatgcagcgtgtgcagctgcaaggacggcaagatcttctgcagaagaaccgcctgcgactgccagaaccccagcgccgacctgttctgctgccccgagtgcgacaccagagtgaccagccagtgcctggaccagaacggccacaagctgtacagaagcggcgacaactggacccacagctgccagcagtgcagatgcctggagggcgaggtggactgctggcccctgacctgccccaacctgagctgcgagtacaccgccatcctggagggcgagtgctgccccagatgcgtgagcgacccctgcctggccgacaacatcacctacgacatcagaaagacctgcctggacagctacggcgtgagcagactgagcggcagcgtgtggaccatggccggcagcccctgcaccacctgcaagtgcaagaacggcagagtgtgctgcagcgtggacttcgagtgcctgcagaacaactag

SEQ ID NO: 90565 - DNA, 2292 bp, synthetic construct
  misc_feature 1..2292: note = Description of Artificial Sequence: Synthetic coding sequence
  source 1..2292: mol_type = other DNA
atgcccatggacctgatcctggtggtgtggttctgcgtgtgcaccgccagaaccgtggtgggcttcggcatggaccccgacctgcagatggacatcgtgaccgagctggacctggtgaacaccaccctgggcgtggcccaggtgagcggcatgcacaacgccagcaaggccttcctgttccaggacatcgagagagagatccacgccgccccccacgtgagcgagaagctgatccagctgttcagaaacaagagcgagttcaccatcctggccaccgtgcagcagaagcccagcaccagcggcgtgatcctgagcatcagagagctggagcacagctacttcgagctggagagcagcggcctgagagacgagatcagataccactacatccacaacggcaagcccagaaccgaggccctgccctacagaatggccgacggccagtggcacaaggtggccctgagcgtgagcgccagccacctgctgctgcacgtggactgcaacagaatctacgagagagtgatcgacccccccgacaccaacctgccccccggcatcaacctgtggctgggccagagaaaccagaagcacggcctgttcaagggcatcatccaggacggcaagatcatcttcatgcccaacggctacatcacccagtgccccaacctgaaccacacctgccccacctgcagcgacttcctgagcctggtgcagggcatcatggacctgcaggagctgctggccaagatgaccgccaagctgaactacgccgagaccagactgagccagctggagaactgccactgcgagaagacctgccaggtgagcggcctgctgtacagagaccaggacagctgggtggacggcgaccactgcagaaactgcacctgcaagagcggcgccgtggagtgcagaagaatgagctgcccccccctgaactgcagccccgacagcctgcccgtgcacatcgccggccagtgctgcaaggtgtgcagacccaagtgcatctacggcggcaaggtgctggccgagggccagagaatcctgaccaagagctgcagagagtgcagaggcggcgtgctggtgaagatcaccgagatgtgcccccccctgaactgcagcgagaaggaccacatcctgcccgagaaccagtgctgcagagtgtgcagaggccacaacttctgcgccgagggccccaagtgcggcgagaacagcgagtgcaagaactggaacaccaaggccacctgcgagtgcaagagcggctacatcagcgtgcagggcgacagcgcctactgcgaggacatcgacgagtgcgccgccaagatgcactactgccacgccaacaccgtgtgcgtgaacctgcccggcctgtacagatgcgactgcgtgcccggctacatcagagtggacgacttcagctgcaccgagcacgacgagtgcggcagcggccagcacaactgcgacgagaacgccatctgcaccaacaccgtgcagggccacagctgcacctgcaagcccggctacgtgggcaacggcaccatctgcagagccttctgcgaggagggctgcagatacggcggcacctgcgtggcccccaacaagtgcgtgtgccccagcggcttcaccggcagccactgcgagaaggacatcgacgagtgcgccctgagaacccacacctgctggaacgacagcgcctgcatcaacctggccggcggcttcgactgcctgtgccccagcggccccagctgcagcggcgactgcccccacgagggcggcctgaagcacaacggccaggtgtggaccctgaaggaggacagatgcagcgtgtgcagctgcaaggacggcaagatcttctgcagaagaaccgcctgcgactgccagaaccccagcgccgacctgttctgctgccccgagtgcgacaccagagtgaccagccagtgcctggaccagaacggccacaagctgtacagaagcggcgacaactggacccacagctgccagcagtgcagatgcctggagggcgaggtggactgctggcccctgacctgccccaacctgagctgcgagtacaccgccatcctggagggcgagtgctgccccagatgcgtgagcgacccctgcctggccgacaacatcacctacgacatcagaaagacctgcctggacagctacggcgtgagcagactgagcggcagcgtgtggaccatggccggcagcccctgcaccacctgcaagtgcaagaacggcagagtgtgctgcagcgtggacttcgagtgcctgcagaacaactag

SEQ ID NO: 90566 - DNA, 2520 bp, synthetic construct
  misc_feature 1..2520: note = Description of Artificial Sequence: Synthetic coding sequence
  source 1..2520: mol_type = other DNA
atgagcatcagaagactgctgatcctgatcctgaagatcggcagaagatggaccgagctgatcagaaccatggagagcagagtgctgctgagaaccttctgcctgatcttcggcctgggcgccgtgtggggcctgggcgtggaccccagcctgcagatcgacgtgctgaccgagctggagctgggcgagagcaccaccggcgtgagacaggtgcccggcctgcacaacggcaccaaggccttcctgttccaggacacccccagaagcatcaaggccagcaccgccaccgccgagcagttcttccagaagctgagaaacaagcacgagttcaccatcctggtgaccctgaagcagacccacctgaacagcggcgtgatcctgagcatccaccacctggaccacagatacctggagctggagagcagcggccacagaaacgaggtgagactgcactacagaagcggcagccacagaccccacaccgaggtgttcccctacatcctggccgacgacaagtggcacaagctgagcctggccatcagcgccagccacctgatcctgcacatcgactgcaacaagatctacgagagagtggtggagaagcccagcaccgacctgcccctgggcaccaccttctggctgggccagagaaacaacgcccacggctacttcaagggcatcatgcaggacgtgcagctgctggtgatgccccagggcttcatcgcccagtgccccgacctgaacagaacctgccccacctgcaacgacttccacggcctggtgcagaagatcatggagctgcaggacatcctggccaagaccagcgccaagctgagcagagccgagcagagaatgaacagactggaccagtgctactgcgagagaacctgcaccatgaagggcaccacctacagagagttcgagagctggatcgacggctgcaagaactgcacctgcctgaacggcaccatccagtgcgagaccctgatctgccccaaccccgactgccccctgaagagcgccctggcctacgtggacggcaagtgctgcaaggagtgcaagagcatctgccagttccagggcagaacctacttcgagggcgagagaaacaccgtgtacagcagcagcggcgtgtgcgtgctgtacgagtgcaaggaccagaccatgaagctggtggagagcagcggctgccccgccctggactgccccgagagccaccagatcaccctgagccacagctgctgcaaggtgtgcaagggctacgacttctgcagcgagagacacaactgcatggagaacagcatctgcagaaacctgaacgacagagccgtgtgcagctgcagagacggcttcagagccctgagagaggacaacgcctactgcgaggacatcgacgagtgcgccgagggcagacactactgcagagagaacaccatgtgcgtgaacacccccggcagcttcatgtgcatctgcaagaccggctacatcagaatcgacgactacagctgcaccgagcacgacgagtgcatcaccaaccagcacaactgcgacgagaacgccctgtgcttcaacaccgtgggcggccacaactgcgtgtgcaagcccggctacaccggcaacggcaccacctgcaaggccttctgcaaggacggctgcagaaacggcggcgcctgcatcgccgccaacgtgtgcgcctgcccccagggcttcaccggccccagctgcgagaccgacatcgacgagtgcagcgacggcttcgtgcagtgcgacagcagagccaactgcatcaacctgcccggctggtaccactgcgagtgcagagacggctaccacgacaacggcatgttcagccccagcggcgagagctgcgaggacatcgacgagtgcggcaccggcagacacagctgcgccaacgacaccatctgcttcaacctggacggcggctacgactgcagatgcccccacggcaagaactgcaccggcgactgcatccacgacggcaaggtgaagcacaacggccagatctgggtgctggagaacgacagatgcagcgtgtgcagctgccagaacggcttcgtgatgtgcagaagaatggtgtgcgactgcgagaaccccaccgtggacctgttctgctgccccgagtgcgaccccagactgagcagccagtgcctgcaccagaacggcgagaccctgtacaacagcggcgacacctgggtgcagaactgccagcagtgcagatgcctgcagggcgaggtggactgctggcccctgccctgccccgacgtggagtgcgagttcagcatcctgcccgagaacgagtgctgccccagatgcgtgaccgacccctgccaggccgacaccatcagaaacgacatcaccaagacctgcctggacgagatgaacgtggtgagattcaccggcagcagctggatcaagcacggcaccgagtgcaccctgtgccagtgcaagaacggccacatctgctgcagcgtggacccccagtgcctgcaggagctgtag

SEQ ID NO: 90567 - DNA, 2448 bp, synthetic construct
  misc_feature 1..2448: note = Description of Artificial Sequence: Synthetic coding sequence
  source 1..2448: mol_type = other DNA
atggagaccggcctgggcgcccccctgttcaaggcctggctgctgatcagcgtgtggggcctgggcgtggaccccagcctgcagatcgacgtgctgaccgagctggagctgggcgagagcaccaccggcgtgagacaggtgcccggcctgcacaacggcaccaaggccttcctgttccaggacacccccagaagcatcaaggccagcaccgccaccgccgagcagttcttccagaagctgagaaacaagcacgagttcaccatcctggtgaccctgaagcagacccacctgaacagcggcgtgatcctgagcatccaccacctggaccacagatacctggagctggagagcagcggccacagaaacgaggtgagactgcactacagaagcggcagccacagaccccacaccgaggtgttcccctacatcctggccgacgacaagtggcacaagctgagcctggccatcagcgccagccacctgatcctgcacatcgactgcaacaagatctacgagagagtggtggagaagcccagcaccgacctgcccctgggcaccaccttctggctgggccagagaaacaacgcccacggctacttcaagggcatcatgcaggacgtgcagctgctggtgatgccccagggcttcatcgcccagtgccccgacctgaacagaacctgccccacctgcaacgacttccacggcctggtgcagaagatcatggagctgcaggacatcctggccaagaccagcgccaagctgagcagagccgagcagagaatgaacagactggaccagtgctactgcgagagaacctgcaccatgaagggcaccacctacagagagttcgagagctggatcgacggctgcaagaactgcacctgcctgaacggcaccatccagtgcgagaccctgatctgccccaaccccgactgccccctgaagagcgccctggcctacgtggacggcaagtgctgcaaggagtgcaagagcatctgccagttccagggcagaacctacttcgagggcgagagaaacaccgtgtacagcagcagcggcgtgtgcgtgctgtacgagtgcaaggaccagaccatgaagctggtggagagcagcggctgccccgccctggactgccccgagagccaccagatcaccctgagccacagctgctgcaaggtgtgcaagggctacgacttctgcagcgagagacacaactgcatggagaacagcatctgcagaaacctgaacgacagagccgtgtgcagctgcagagacggcttcagagccctgagagaggacaacgcctactgcgaggacatcgacgagtgcgccgagggcagacactactgcagagagaacaccatgtgcgtgaacacccccggcagcttcatgtgcatctgcaagaccggctacatcagaatcgacgactacagctgcaccgagcacgacgagtgcatcaccaaccagcacaactgcgacgagaacgccctgtgcttcaacaccgtgggcggccacaactgcgtgtgcaagcccggctacaccggcaacggcaccacctgcaaggccttctgcaaggacggctgcagaaacggcggcgcctgcatcgccgccaacgtgtgcgcctgcccccagggcttcaccggccccagctgcgagaccgacatcgacgagtgcagcgacggcttcgtgcagtgcgacagcagagccaactgcatcaacctgcccggctggtaccactgcgagtgcagagacggctaccacgacaacggcatgttcagccccagcggcgagagctgcgaggacatcgacgagtgcggcaccggcagacacagctgcgccaacgacaccatctgcttcaacctggacggcggctacgactgcagatgcccccacggcaagaactgcaccggcgactgcatccacgacggcaaggtgaagcacaacggccagatctgggtgctggagaacgacagatgcagcgtgtgcagctgccagaacggcttcgtgatgtgcagaagaatggtgtgcgactgcgagaaccccaccgtggacctgttctgctgccccgagtgcgaccccagactgagcagccagtgcctgcaccagaacggcgagaccctgtacaacagcggcgacacctgggtgcagaactgccagcagtgcagatgcctgcagggcgaggtggactgctggcccctgccctgccccgacgtggagtgcgagttcagcatcctgcccgagaacgagtgctgccccagatgcgtgaccgacccctgccaggccgacaccatcagaaacgacatcaccaagacctgcctggacgagatgaacgtggtgagattcaccggcagcagctggatcaagcacggcaccgagtgcaccctgtgccagtgcaagaacggccacatctgctgcagcgtggacccccagtgcctgcaggagctgtag

SEQ ID NO: 90568 - DNA, 2451 bp, synthetic construct
  misc_feature 1..2451: note = Description of Artificial Sequence: Synthetic coding sequence
  source 1..2451: mol_type = other DNA
atggagagcagagtgctgctgagaaccttctgcctgatcttcggcctgggcgccgtgtggggcctgggcgtggaccccagcctgcagatcgacgtgctgaccgagctggagctgggcgagagcaccaccggcgtgagacaggtgcccggcctgcacaacggcaccaaggccttcctgttccaggacacccccagaagcatcaaggccagcaccgccaccgccgagcagttcttccagaagctgagaaacaagcacgagttcaccatcctggtgaccctgaagcagacccacctgaacagcggcgtgatcctgagcatccaccacctggaccacagatacctggagctggagagcagcggccacagaaacgaggtgagactgcactacagaagcggcagccacagaccccacaccgaggtgttcccctacatcctggccgacgacaagtggcacaagctgagcctggccatcagcgccagccacctgatcctgcacatcgactgcaacaagatctacgagagagtggtggagaagcccagcaccgacctgcccctgggcaccaccttctggctgggccagagaaacaacgcccacggctacttcaagggcatcatgcaggacgtgcagctgctggtgatgccccagggcttcatcgcccagtgccccgacctgaacagaacctgccccacctgcaacgacttccacggcctggtgcagaagatcatggagctgcaggacatcctggccaagaccagcgccaagctgagcagagccgagcagagaatgaacagactggaccagtgctactgcgagagaacctgcaccatgaagggcaccacctacagagagttcgagagctggatcgacggctgcaagaactgcacctgcctgaacggcaccatccagtgcgagaccctgatctgccccaaccccgactgccccctgaagagcgccctggcctacgtggacggcaagtgctgcaaggagtgcaagagcatctgccagttccagggcagaacctacttcgagggcgagagaaacaccgtgtacagcagcagcggcgtgtgcgtgctgtacgagtgcaaggaccagaccatgaagctggtggagagcagcggctgccccgccctggactgccccgagagccaccagatcaccctgagccacagctgctgcaaggtgtgcaagggctacgacttctgcagcgagagacacaactgcatggagaacagcatctgcagaaacctgaacgacagagccgtgtgcagctgcagagacggcttcagagccctgagagaggacaacgcctactgcgaggacatcgacgagtgcgccgagggcagacactactgcagagagaacaccatgtgcgtgaacacccccggcagcttcatgtgcatctgcaagaccggctacatcagaatcgacgactacagctgcaccgagcacgacgagtgcatcaccaaccagcacaactgcgacgagaacgccctgtgcttcaacaccgtgggcggccacaactgcgtgtgcaagcccggctacaccggcaacggcaccacctgcaaggccttctgcaaggacggctgcagaaacggcggcgcctgcatcgccgccaacgtgtgcgcctgcccccagggcttcaccggccccagctgcgagaccgacatcgacgagtgcagcgacggcttcgtgcagtgcgacagcagagccaactgcatcaacctgcccggctggtaccactgcgagtgcagagacggctaccacgacaacggcatgttcagccccagcggcgagagctgcgaggacatcgacgagtgcggcaccggcagacacagctgcgccaacgacaccatctgcttcaacctggacggcggctacgactgcagatgcccccacggcaagaactgcaccggcgactgcatccacgacggcaaggtgaagcacaacggccagatctgggtgctggagaacgacagatgcagcgtgtgcagctgccagaacggcttcgtgatgtgcagaagaatggtgtgcgactgcgagaaccccaccgtggacctgttctgctgccccgagtgcgaccccagactgagcagccagtgcctgcaccagaacggcgagaccctgtacaacagcggcgacacctgggtgcagaactgccagcagtgcagatgcctgcagggcgaggtggactgctggcccctgccctgccccgacgtggagtgcgagttcagcatcctgcccgagaacgagtgctgccccagatgcgtgaccgacccctgccaggccgacaccatcagaaacgacatcaccaagacctgcctggacgagatgaacgtggtgagattcaccggcagcagctggatcaagcacggcaccgagtgcaccctgtgccagtgcaagaacggccacatctgctgcagcgtggacccccagtgcctgcaggagctgtag

SEQ ID NO: 90569 - DNA, 2601 bp, synthetic construct
  misc_feature 1..2601: note = Description of Artificial Sequence: Synthetic coding sequence
  source 1..2601: mol_type = other DNA
atgggcttcccccccctgctgaagggccaggccagcgccaccagaagcagcctggccagctgcagctgggtggtgttcttcctgagctgcctgagcagacacgcccccgagatcgagggcggcagaagatggaccgagctgatcagaaccatggagagcagagtgctgctgagaaccttctgcctgatcttcggcctgggcgccgtgtggggcctgggcgtggaccccagcctgcagatcgacgtgctgaccgagctggagctgggcgagagcaccaccggcgtgagacaggtgcccggcctgcacaacggcaccaaggccttcctgttccaggacacccccagaagcatcaaggccagcaccgccaccgccgagcagttcttccagaagctgagaaacaagcacgagttcaccatcctggtgaccctgaagcagacccacctgaacagcggcgtgatcctgagcatccaccacctggaccacagatacctggagctggagagcagcggccacagaaacgaggtgagactgcactacagaagcggcagccacagaccccacaccgaggtgttcccctacatcctggccgacgacaagtggcacaagctgagcctggccatcagcgccagccacctgatcctgcacatcgactgcaacaagatctacgagagagtggtggagaagcccagcaccgacctgcccctgggcaccaccttctggctgggccagagaaacaacgcccacggctacttcaagggcatcatgcaggacgtgcagctgctggtgatgccccagggcttcatcgcccagtgccccgacctgaacagaacctgccccacctgcaacgacttccacggcctggtgcagaagatcatggagctgcaggacatcctggccaagaccagcgccaagctgagcagagccgagcagagaatgaacagactggaccagtgctactgcgagagaacctgcaccatgaagggcaccacctacagagagttcgagagctggatcgacggctgcaagaactgcacctgcctgaacggcaccatccagtgcgagaccctgatctgccccaaccccgactgccccctgaagagcgccctggcctacgtggacggcaagtgctgcaaggagtgcaagagcatctgccagttccagggcagaacctacttcgagggcgagagaaacaccgtgtacagcagcagcggcgtgtgcgtgctgtacgagtgcaaggaccagaccatgaagctggtggagagcagcggctgccccgccctggactgccccgagagccaccagatcaccctgagccacagctgctgcaaggtgtgcaagggctacgacttctgcagcgagagacacaactgcatggagaacagcatctgcagaaacctgaacgacagagccgtgtgcagctgcagagacggcttcagagccctgagagaggacaacgcctactgcgaggacatcgacgagtgcgccgagggcagacactactgcagagagaacaccatgtgcgtgaacacccccggcagcttcatgtgcatctgcaagaccggctacatcagaatcgacgactacagctgcaccgagcacgacgagtgcatcaccaaccagcacaactgcgacgagaacgccctgtgcttcaacaccgtgggcggccacaactgcgtgtgcaagcccggctacaccggcaacggcaccacctgcaaggccttctgcaaggacggctgcagaaacggcggcgcctgcatcgccgccaacgtgtgcgcctgcccccagggcttcaccggccccagctgcgagaccgacatcgacgagtgcagcgacggcttcgtgcagtgcgacagcagagccaactgcatcaacctgcccggctggtaccactgcgagtgcagagacggctaccacgacaacggcatgttcagccccagcggcgagagctgcgaggacatcgacgagtgcggcaccggcagacacagctgcgccaacgacaccatctgcttcaacctggacggcggctacgactgcagatgcccccacggcaagaactgcaccggcgactgcatccacgacggcaaggtgaagcacaacggccagatctgggtgctggagaacgacagatgcagcgtgtgcagctgccagaacggcttcgtgatgtgcagaagaatggtgtgcgactgcgagaaccccaccgtggacctgttctgctgccccgagtgcgaccccagactgagcagccagtgcctgcaccagaacggcgagaccctgtacaacagcggcgacacctgggtgcagaactgccagcagtgcagatgcctgcagggcgaggtggactgctggcccctgccctgccccgacgtggagtgcgagttcagcatcctgcccgagaacgagtgctgccccagatgcgtgaccgacccctgccaggccgacaccatcagaaacgacatcaccaagacctgcctggacgagatgaacgtggtgagattcaccggcagcagctggatcaagcacggcaccgagtgcaccctgtgccagtgcaagaacggccacatctgctgcagcgtggacccccagtgcctgcaggagctgtag

SEQ ID NO: 90570 - DNA, 2451 bp, synthetic construct; identical to SEQ ID NO: 90568
  misc_feature 1..2451: note = Description of Artificial Sequence: Synthetic coding sequence
  source 1..2451: mol_type = other DNA

SEQ ID NO: 90571 - DNA, 1734 bp, synthetic construct
  misc_feature 1..1734: note = Description of Artificial Sequence: Synthetic coding sequence
  source 1..1734: mol_type = other DNA
atggagaccggcctgggcgcccccctgttcaaggcctggctgctgatcagcgtgtggggcctgggcgtggaccccagcctgcagatcgacgtgctgaccgagctggagctgggcgagagcaccaccggcgtgagacaggtgcccggcctgcacaacggcaccaaggccttcctgttccaggacacccccagaagcatcaaggccagcaccgccaccgccgagcagttcttccagaagctgagaaacaagcacgagttcaccatcctggtgaccctgaagcagacccacctgaacagcggcgtgatcctgagcatccaccacctggaccacagatacctggagctggagagcagcggccacagaaacgaggtgagactgcactacagaagcggcagccacagaccccacaccgaggtgttcccctacatcctggccgacgacaagtggcacaagctgagcctggccatcagcgccagccacctgatcctgcacatcgactgcaacaagatctacgagagagtggtggagaagcccagcaccgacctgcccctgggcaccaccttctggctgggccagagaaacaacgcccacggctacttcaagggcatcatgcaggacgtgcagctgctggtgatgccccagggcttcatcgcccagtgccccgacctgaacagaacctgccccacctgcaacgacttccacggcctggtgcagaagatcatggagctgcaggacatcctggccaagaccagcgccaagctgagcagagccgagcagagaatgaacagactggaccagtgctactgcgagagaacctgcaccatgaagggcaccacctacagagagttcgagagctggatcgacggctgcaagaactgcacctgcctgaacggcaccatccagtgcgagaccctgatctgccccaaccccgactgccccctgaagagcgccctggcctacgtggacggcaagtgctgcaaggagtgcaagagcatctgccagttccagggcagaacctacttcgagggcgagagaaacaccgtgtacagcagcagcggcgtgtgcgtgctgtacgagtgcaaggaccagaccatgaagctggtggagagcagcggctgccccgccctggactgccccgagagccaccagatcaccctgagccacagctgctgcaaggtgtgcaagggctacgacttctgcagcgagagacacaactgcatggagaacagcatctgcagaaacctgaacgacagagccgtgtgcagctgcagagacggcttcagagccctgagagaggacaacgcctactgcgaggacatcgacgagtgcgccgagggcagacactactgcagagagaacaccatgtgcgtgaacacccccggcagcttcatgtgcatctgcaagaccggctacatcagaatcgacgactacagctgcaccgagcacgacgagtgcatcaccaaccagcacaactgcgacgagaacgccctgtgcttcaacaccgtgggcggccacaactgcgtgtgcaagcccggctacaccggcaacggcaccacctgcaaggccttctgcaaggacggctgcagaaacggcggcgcctgcatcgccgccaacgtgtgcgcctgcccccagggcttcaccggccccagctgcgagaccgacatcgacgagtgcagcgacggcttcgtgcagtgcgacagcagagccaactgcatctgcctggtgcccctgtag

SEQ ID NO: 90572 - DNA, 333 bp, synthetic construct
  misc_feature 1..333: note = Description of Artificial Sequence: Synthetic coding sequence
  source 1..333: mol_type = other DNA
atggagaccggcctgggcgcccccctgttcaaggcctggctgctgatcagcgtgtggggcctgggcgtggaccccagcctgcagatcgacgtgctgaccgagctggagctgggcgagagcaccaccggcgtgagacaggtgcccggcctgcacaacggcaccaaggccttcctgttccaggacacccccagaagcatcaaggccagcaccgccaccgccgagcagttcttccagaagctgagaaacaagcacgagttcaccatcctggtgaccctgaagcagacccacctgaacagcggcgtgatcctgagcatccaccacctggaccactag

SEQ ID NO: 90573 - DNA, 2448 bp, synthetic construct; identical to SEQ ID NO: 90567
  misc_feature 1..2448: note = Description of Artificial Sequence: Synthetic coding sequence
  source 1..2448: mol_type = other DNA

SEQ ID NO: 90574 - DNA, 69 bp, synthetic construct
  misc_feature 1..69: note = Description of Artificial Sequence: Synthetic coding sequence
  source 1..69: mol_type = other DNA
atggagagcagagtgctgctgagaaccttctgcctgatcttcggcctgggcgccgtgtggggcctgtag

SEQ ID NO: 90575 - DNA, 966 bp, synthetic construct
  misc_feature 1..966: note = Description of Artificial Sequence: Synthetic coding sequence
  source 1..966: mol_type = other DNA
atggagagcagagtgctgctgagaaccttctgcctgatcttcggcctgggcgccgtgtggggcctgggcgtggaccccagcctgcagatcgacgtgctgaccgagctggagctgggcgagagcaccaccggcgtgagacaggtgcccggcctgcacaacggcaccaaggccttcctgttccaggacacccccagaagcatcaaggccagcaccgccaccgccgagcagttcttccagaagctgagaaacaagcacgagttcaccatcctggtgaccctgaagcagacccacctgaacagcggcgtgatcctgagcatccaccacctggaccacagatacctggagctggagagcagcggccacagaaacgaggtgagactgcactacagaagcggcagccacagaccccacaccgaggtgttcccctacatcctggccgacgacaagtggcacaagctgagcctggccatcagcgccagccacctgatcctgcacatcgactgcaacaagatctacgagagagtggtggagaagcccagcaccgacctgcccctgggcaccaccttctggctgggccagagaaacaacgcccacggctacttcaagggcatcatgcaggacgtgcagctgctggtgatgccccagggcttcatcgcccagtgccccgacctgaacagaacctgccccacctgcaacgacttccacggcctggtgcagaagatcatggagctgcaggacatcctggccaagaccagcgccaagctgagcagagccgagcagagaatgaacagactggaccagtgctactgcgagagaacctgcaccatgaagggcaccacctacagagagttcgagagctggatcgacggctgcaagaactgcacctgcctgaacggcaccatccagtgcgagaccctgatctgccccaaccccgactgccccctgaagagcgccctggcctactag

SEQ ID NO: 90576 - DNA, 4386 bp, synthetic construct
  misc_feature 1..4386: note = Description of Artificial Sequence: Synthetic coding sequence
  source 1..4386: mol_type = other DNA
atggccgccgagagaggcgccagaagactgctgagcacccccagcttctggctgtactgcctgctgctgctgggcagaagagcccccggcgccgccgccgccagaagcggcagcgccccccagagccccggcgccagcatcagaaccttcacccccttctacttcctggtggagcccgtggacaccctgagcgtgagaggcagcagcgtgatcctgaactgcagcgcctacagcgagcccagccccaagatcgagtggaagaaggacggcaccttcctgaacctggtgagcgacgacagaagacagctgctgcccgacggcagcctgttcatcagcaacgtggtgcacagcaagcacaacaagcccgacgagggctactaccagtgcgtggccaccgtggagagcctgggcaccatcatcagcagaaccgccaagctgatcgtggccggcctgcccagattcaccagccagcccgagcccagcagcgtgtacgccggcaacaacgccatcctgaactgcgaggtgaacgccgacctggtgcccttcgtgagatgggagcagaacagacagcccctgctgctggacgacagagtgatcaagctgcccagcggcatgctggtgatcagcaacgccaccgagggcgacggcggcctgtacagatgcgtggtggagagcggcggcccccccaagtacagcgacgaggtggagctgaaggtgctgcccgaccccgaggtgatcagcgacctggtgttcctgaagcagcccagccccctggtgagagtgatcggccaggacgtggtgctgccctgcgtggccagcggcctgcccacccccaccatcaagtggatgaagaacgaggaggccctggacaccgagagcagcgagagactggtgctgctggccggcggcagcctggagatcagcgacgtgaccgaggacgacgccggcacctacttctgcatcgccgacaacggcaacgagaccatcgaggcccaggccgagctgaccgtgcaggcccagcccgagttcctgaagcagcccaccaacatctacgcccacgagagcatggacatcgtgttcgagtgcgaggtgaccggcaagcccacccccaccgtgaagtgggtgaagaacggcgacatggtgatccccagcgactacttcaagatcgtgaaggagcacaacctgcaggtgctgggcctggtgaagagcgacgagggcttctaccagtgcatcgccgagaacgacgtgggcaacgcccaggccggcgcccagctgatcatcctggagcacgcccccgccaccaccggccccctgcccagcgcccccagagacgtggtggccagcctggtgagcaccagattcatcaagctgacctggagaacccccgccagcgacccccacggcgacaacctgacctacagcgtgttctacaccaaggagggcatcgccagagagagagtggagaacaccagccaccccggcgagatgcaggtgaccatccagaacctgatgcccgccaccgtgtacatcttcagagtgatggcccagaacaagcacggcagcggcgagagcagcgcccccctgagagtggagacccagcccgaggtgcagctgcccggccccgcccccaacctgagagcctacgccgccagccccaccagcatcaccgtgacctgggagacccccgtgagcggcaacggcgagatccagaactacaagctgtactacatggagaagggcaccgacaaggagcaggacgtggacgtgagcagccacagctacaccatcaacggcctgaagaagtacaccgagtacagcttcagagtggtggcctacaacaagcacggccccggcgtgagcacccccgacgtggccgtgagaaccctgagcgacgtgcccagcgccgccccccagaacctgagcctggaggtgagaaacagcaagagcatcatgatccactggcagccccccgcccccgccacccagaacggccagatcaccggctacaagatcagatacagaaaggccagcagaaagagcgacgtgaccgagaccctggtgagcggcacccagctgagccagctgatcgagggcctggacagaggcaccgagtacaacttcagagtggccgccctgaccatcaacggcaccggccccgccaccgactggctgagcgccgagaccttcgagagcgacctggacgagaccagagtgcccgaggtgcccagcagcctgcacgtgagacccctggtgaccagcatcgtggtgagctggaccccccccgagaaccagaacatcgtggtgagaggctacgccatcggctacggcatcggcagcccccacgcccagaccatcaaggtggactacaagcagagatactacaccatcgagaacctggaccccagcagccactacgtgatcaccctgaaggccttcaacaacgtgggcgagggcatccccctgtacgagagcgccgtgaccagaccccacaccgacaccagcgaggtggacctgttcgtgatcaacgccccctacacccccgtgcccgaccccacccccatgatgccccccgtgggcgtgcaggccagcatcctgagccacgacaccatcagaatcacctgggccgacaacagcctgcccaagcaccagaagatcaccgacagcagatactacaccgtgagatggaagaccaacatccccgccaacaccaagtacaagaacgccaacgccaccaccctgagctacctggtgaccggcctgaagcccaacaccctgtacgagttcagcgtgatggtgaccaagggcagaagaagcagcacctggagcatgaccgcccacggcaccaccttcgagctggtgcccaccagcccccccaaggacgtgaccgtggtgagcaaggagggcaagcccaagaccatcatcgtgaactggcagccccccagcgaggccaacggcaagatcaccggctacatcatctactacagcaccgacgtgaacgccgagatccacgactgggtgatcgagcccgtggtgggcaacagactgacccaccagatccaggagctgaccctggacaccccctactacttcaagatccaggccagaaacagcaagggcatgggccccatgagcgaggccgtgcagttcagaacccccaaggccgacagcagcgacaagatgcccaacgaccaggccagcggcagcggcggcaagggcagcagactgcccgacctgggcagcgactacaagccccccatgagcggcagcaacagcccccacggcagccccaccagccccctggacagcaacatgctgctggtgatcatcgtgagcgtgggcgtgatcaccatcgtggtggtggtgatcatcgccgtgttctgcaccagaagaaccaccagccaccagaagaagaagagagccgcctgcaagagcgtgaacggcagccacaagtacaagggcaacagcaaggacgtgaagccccccgacctgtggatccaccacgagagactggagctgaagcccatcgacaagagccccgaccccaaccccatcatgaccgacacccccatccccagaaacagccaggacatcacccccgtggacaacagcatggacagcaacatccaccagagaagaaacagctacagaggccacgagagcgaggacagcatgagcaccctggccggcagaagaggcatgagacccaagatgatgatgcccttcgacagccagcccccccagcccgtgatcagcgcccaccccatccacagcctggacaacccccaccaccacttccacagcagcagcctggccagccccgccagaagccacctgtaccaccccggcagcccctggcccatcggcaccagcatgagcctgagcgacagagccaacagcaccgagagcgtgagaaacacccccagcaccgacaccatgcccgccagcagcagccagacctgctgcaccgaccaccaggaccccgagggcgccaccagcagcagctacctggccagcagccaggaggaggacagcggccagagcctgcccaccgcccacgtgagacccagccaccccctgaagagcttcgccgtgcccgccatccccccccccggcccccccacctacgaccccgccctgcccagcacccccctgctgagccagcaggccctgaaccaccacatccacagcgtgaagaccgccagcatcggcaccctgggcagaagcagaccccccatgcccgtggtggtgcccagcgcccccgaggtgcaggagaccaccagaatgctggaggacagcgagagcagctacgagcccgacgagctgaccaaggagatggcccacctggagggcctgatgaaggacctgaacgccatcaccaccgcctag

SEQ ID NO: 90577 - DNA, 4386 bp, synthetic construct; identical to SEQ ID NO: 90576
  misc_feature 1..4386: note = Description of Artificial Sequence: Synthetic coding sequence
  source 1..4386: mol_type = other DNA

SEQ ID NO: 90578 - DNA, 3519 bp, synthetic construct
  misc_feature 1..3519: note = Description of Artificial Sequence: Synthetic coding sequence
  source 1..3519: mol_type = other DNA
atgaagaacgaggaggccctggacaccgagagcagcgagagactggtgctgctggccggcggcagcctggagatcagcgacgtgaccgaggacgacgccggcacctacttctgcatcgccgacaacggcaacgagaccatcgaggcccaggccgagctgaccgtgcaggcccagcccgagttcctgaagcagcccaccaacatctacgcccacgagagcatggacatcgtgttcgagtgcgaggtgaccggcaagcccacccccaccgtgaagtgggtgaagaacggcgacatggtgatccccagcgactacttcaagatcgtgaaggagcacaacctgcaggtgctgggcctggtgaagagcgacgagggcttctaccagtgcatcgccgagaacgacgtgggcaacgcccaggccggcgcccagctgatcatcctggagcacgacgtggccatccccaccctgccccccaccagcctgaccagcgccaccaccgaccacctggcccccgccaccaccggccccctgcccagcgcccccagagacgtggtggccagcctggtgagcaccagattcatcaagctgacctggagaacccccgccagcgacccccacggcgacaacctgacctacagcgtgttctacaccaaggagggcatcgccagagagagagtggagaacaccagccaccccggcgagatgcaggtgaccatccagaacctgatgcccgccaccgtgtacatcttcagagtgatggcccagaacaagcacggcagcggcgagagcagcgcccccctgagagtggagacccagcccgaggtgcagctgcccggccccgcccccaacctgagagcctacgccgccagccccaccagcatcaccgtgacctgggagacccccgtgagcggcaacggcgagatccagaactacaagctgtactacatggagaagggcaccgacaaggagcaggacgtggacgtgagcagccacagctacaccatcaacggcctgaagaagtacaccgagtacagcttcagagtggtggcctacaacaagcacggccccggcgtgagcacccccgacgtggccgtgagaaccctgagcgacgtgcccagcgccgccccccagaacctgagcctggaggtgagaaacagcaagagcatcatgatccactggcagccccccgcccccgccacccagaacggccagatcaccggctacaagatcagatacagaaaggccagcagaaagagcgacgtgaccgagaccctggtgagcggcacccagctgagccagctgatcgagggcctggacagaggcaccgagtacaacttcagagtggccgccctgaccatcaacggcaccggccccgccaccgactggctgagcgccgagaccttcgagagcgacctggacgagaccagagtgcccgaggtgcccagcagcctgcacgtgagacccctggtgaccagcatcgtggtgagctggaccccccccgagaaccagaacatcgtggtgagaggctacgccatcggctacggcatcggcagcccccacgcccagaccatcaaggtggactacaagcagagatactacaccatcgagaacctggaccccagcagccactacgtgatcaccctgaaggccttcaacaacgtgggcgagggcatccccctgtacgagagcgccgtgaccagaccccacaccgtgcccgaccccacccccatgatgccccccgtgggcgtgcaggccagcatcctgagccacgacaccatcagaatcacctgggccgacaacagcctgcccaagcaccagaagatcaccgacagcagatactacaccgtgagatggaagaccaacatccccgccaacaccaagtacaagaacgccaacgccaccaccctgagctacctggtgaccggcctgaagcccaacaccctgtacgagttcagcgtgatggtgaccaagggcagaagaagcagcacctggagcatgaccgcccacggcaccaccttcgagctggtgcccaccagcccccccaaggacgtgaccgtggtgagcaaggagggcaagcccaagaccatcatcgtgaactggcagccccccagcgaggccaacggcaagatcaccggctacatcatctactacagcaccgacgtgaacgccgagatccacgactgggtgatcgagcccgtggtgggcaacagactgacccaccagatccaggagctgaccctggacaccccctactacttcaagatccaggccagaaacagcaagggcatgggccccatgagcgaggccgtgcagttcagaacccccaaggccagcggcagcggcggcaagggcagcagactgcccgacctgggcagcgactacaagccccccatgagcggcagcaacagcccccacggcagccccaccagccccctggacagcaacatgctgctggtgatcatcgtgagcgtgggcgtgatcaccatcgtggtggtggtgatcatcgccgtgttctgcaccagaagaaccaccagccaccagaagaagaagagagccgcctgcaagagcgtgaacggcagccacaagtacaagggcaacagcaaggacgtgaagccccccgacctgtggatccaccacgagagactggagctgaagcccatcgacaagagccccgaccccaaccccatcatgaccgacacccccatccccagaaacagccaggacatcacccccgtggacaacagcatggacagcaacatccaccagagaagaaacagctacagaggccacgagagcgaggacagcatgagcaccctggccggcagaagaggcatgagacccaagatgatgatgcccttcgacagccagcccccccagcccgtgatcagcgcccaccccatccacagcctggacaacccccaccaccacttccacagcagcagcctggccagccccgccagaagccacctgtaccaccccggcagcccctggcccatcggcaccagcatgagcctgagcgacagagccaacagcaccgagagcgtgagaaacacccccagcaccgacaccatgcccgccagcagcagccagacctgctgcaccgaccaccaggaccccgagggcgccaccagcagcagctacctggccagcagccaggaggaggacagcggccagagcctgcccaccgcccacgtgagacccagccaccccctgaagagcttcgccgtgcccgccatccccccccccggcccccccacctacgaccccgccctgcccagcacccccctgctgagccagcaggccctgaaccaccacatccacagcgtgaagaccgccagcatcggcaccctgggcagaagcagaccccccatgcccgtggtggtgcccagcgcccccgaggtgcaggagaccaccagaatgctggaggacagcgagagcagctacgagcccgacgagctgaccaaggagatggcccacctggagggcctgatgaaggacctgaacgccatcaccaccgcctag

SEQ ID NO: 90579 - DNA, 4353 bp, synthetic construct
  misc_feature 1..4353: note = Description of Artificial Sequence: Synthetic coding sequence
  source 1..4353: mol_type = other DNA
atggccgccgagagaggcgccagaagactgctgagcacccccagcttctggctgtactgcctgctgctgctgggcagaagagcccccggcgccgccgccgccagaagcggcagcgccccccagagccccggcgccagcatcagaaccttcacccccttctacttcctggtggagcccgtggacaccctgagcgtgagaggcagcagcgtgatcctgaactgcagcgcctacagcgagcccagccccaagatcgagtggaagaaggacggcaccttcctgaacctggtgagcgacgacagaagacagctgctgcccgacggcagcctgttcatcagcaacgtggtgcacagcaagcacaacaagcccgacgagggctactaccagtgcgtggccaccgtggagagcctgggcaccatcatcagcagaaccgccaagctgatcgtggccggcctgcccagattcaccagccagcccgagcccagcagcgtgtacgccggcaacaacgccatcctgaactgcgaggtgaacgccgacctggtgcccttcgtgagatgggagcagaacagacagcccctgctgctggacgacagagtgatcaagctgcccagcggcatgctggtgatcagcaacgccaccgagggcgacggcggcctgtacagatgcgtggtggagagcggcggcccccccaagtacagcgacgaggtggagctgaaggtgctgcccgaccccgaggtgatcagcgacctggtgttcctgaagcagcccagccccctggtgagagtgatcggccaggacgtggtgctgccctgcgtggccagcggcctgcccacccccaccatcaagtggatgaagaacgaggaggccctggacaccgagagcagcgagagactggtgctgctggccggcggcagcctggagatcagcgacgtgaccgaggacgacgccggcacctacttctgcatcgccgacaacggcaacgagaccatcgaggcccaggccgagctgaccgtgcaggcccagcccgagttcctgaagcagcccaccaacatctacgcccacgagagcatggacatcgtgttcgagtgcgaggtgaccggcaagcccacccccaccgtgaagtgggtgaagaacggcgacatggtgatccccagcgactacttcaagatcgtgaaggagcacaacctgcaggtgctgggcctggtgaagagcgacgagggcttctaccagtgcatcgccgagaacgacgtgggcaacgcccaggccggcgcccagctgatcatcctggagcacgcccccgccaccaccggccccctgcccagcgcccccagagacgtggtggccagcctggtgagcaccagattcatcaagctgacctggagaacccccgccagcgacccccacggcgacaacctgacctacagcgtgttctacaccaaggagggcatcgccagagagagagtggagaacaccagccaccccggcgagatgcaggtgaccatccagaacctgatgcccgccaccgtgtacatcttcagagtgatggcccagaacaagcacggcagcggcgagagcagcgcccccctgagagtggagacccagcccgaggtgcagctgcccggccccgcccccaacctgagagcctacgccgccagccccaccagcatcaccgtgacctgggagacccccgtgagcggcaacggcgagatccagaactacaagctgtactacatggagaagggcaccgacaaggagcaggacgtggacgtgagcagccacagctacaccatcaacggcctgaagaagtacaccgagtacagcttcagagtggtggcctacaacaagcacggccccggcgtgagcacccccgacgtggccgtgagaaccctgagcgacgtgcccagcgccgccccccagaacctgagcctggaggtgagaaacagcaagagcatcatgatccactggcagccccccgcccccgccacccagaacggccagatcaccggctacaagatcagatacagaaaggccagcagaaagagcgacgtgaccgagaccctggtgagcggcacccagctgagccagctgatcgagggcctggacagaggcaccgagtacaacttcagagtggccgccctgaccatcaacggcaccggccccgccaccgactggctgagcgccgagaccttcgagagcgacctggacgagaccagagtgcccgaggtgcccagcagcctgcacgtgagacccctggtgaccagcatcgtggtgagctggaccccccccgagaaccagaacatcgtggtgagaggctacgccatcggctacggcatcggcagcccccacgcccagaccatcaaggtggactacaagcagagatactacaccatcgagaacctggaccccagcagccactacgtgatcaccctgaaggccttcaacaacgtgggcgagggcatccccctgtacgagagcgccgtgaccagaccccacaccgacaccagcgaggtggacctgttcgtgatcaacgccccctacacccccgtgcccgaccccacccccatgatgccccccgtgggcgtgcaggccagcatcctgagccacgacaccatcagaatcacctgggccgacaacagcctgcccaagcaccagaagatcaccgacagcagatactacaccgtgagatggaagaccaacatccccgccaacaccaagtacaagaacgccaacgccaccaccctgagctacctggtgaccggcctgaagcccaacaccctgtacgagttcagcgtgatggtgaccaagggcagaagaagcagcacctggagcatgaccgcccacggcaccaccttcgagctggtgcccaccagcccccccaaggacgtgaccgtggtgagcaaggagggcaagcccaagaccatcatcgtgaactggcagccccccagcgaggccaacggcaagatcaccggctacatcatctactacagcaccgacgtgaacgccgagatccacgactgggtgatcgagcccgtggtgggcaacagactgacccaccagatccaggagctgaccctggacaccccctactacttcaagatccaggccagaaacagcaagggcatgggccccatgagcgaggccgtgcagttcagaacccccaaggccagcggcagcggcggcaagggcagcagactgcccgacctgggcagcgactacaagccccccatgagcggcagcaacagcccccacggcagccccaccagccccctggacagcaacatgctgctggtgatcatcgtgagcgtgggcgtgatcaccatcgtggtggtggtgatcatcgccgtgttctgcaccagaagaaccaccagccaccagaagaagaagagagccgcctgcaagagcgtgaacggcagccacaagtacaagggcaacagcaaggacgtgaagccccccgacctgtggatccaccacgagagactggagctgaagcccatcgacaagagccccgaccccaaccccatcatgaccgacacccccatccccagaaacagccaggacatcacccccgtggacaacagcatggacagcaacatccaccagagaagaaacagctacagaggccacgagagcgaggacagcatgagcaccctggccggcagaagaggcatgagacccaagatgatgatgcccttcgacagccagcccccccagcccgtgatcagcgcccaccccatccacagcctggacaacccccaccaccacttccacagcagcagcctggccagccccgccagaagccacctgtaccaccccggcagcccctggcccatcggcaccagcatgagcctgagcgacagagccaacagcaccgagagcgtgagaaacacccccagcaccgacaccatgcccgccagcagcagccagacctgctgcaccgaccaccaggaccccgagggcgccaccagcagcagctacctggccagcagccaggaggaggacagcggccagagcctgcccaccgcccacgtgagacccagccaccccctgaagagcttcgccgtgcccgccatccccccccccggcccccccacctacgaccccgccctgcccagcacccccctgctgagccagcaggccctgaaccaccacatccacagcgtgaagaccgccagcatcggcaccctgggcagaagcagaccccccatgcccgtggtggtgcccagcgcccccgaggtgcaggagaccaccagaatgctggaggacagcgagagcagctacgagcccgacgagctgaccaaggagatggcccacctggagggcctgatgaaggacctgaacgccatcaccaccgcctag

SEQ ID NO: 90580 - DNA, 4227 bp, synthetic construct
  misc_feature 1..4227: note = Description of Artificial Sequence: Synthetic coding sequence
  source 1..4227: mol_type = other DNA
atggccgccgagagaggcgccagaagactgctgagcacccccagcttctggctgtactgcctgctgctgctgggcagaagagcccccggcgccgccgccgccagaagcggcagcgccccccagagccccggcgccagcatcagaaccttcacccccttctacttcctggtggagcccgtggacaccctgagcgtgagaggcagcagcgtgatcctgaactgcagcgcctacagcgagcccagccccaagatcgagtggaagaaggacggcaccttcctgaacctggtgagcgacgacagaagacagctgctgcccgacggcagcctgttcatcagcaacgtggtgcacagcaagcacaacaagcccgacgagggctactaccagtgcgtggccaccgtggagagcctgggcaccatcatcagcagaaccgccaagctgatcgtggccggcctgcccagattcaccagccagcccgagcccagcagcgtgtacgccggcaacaacgccatcctgaactgcgaggtgaacgccgacctggtgcccttcgtgagatgggagcagaacagacagcccctgctgctggacgacagagtgatcaagctgcccagcggcatgctggtgatcagcaacgccaccgagggcgacggcggcctgtacagatgcgtggtggagagcggcggcccccccaagtacagcgacgaggtggagctgaaggtgctgcccgaccccgaggtgatcagcgacctggtgttcctgaagcagcccagccccctggtgagagtgatcggccaggacgtggtgctgccctgcgtggccagcggcctgcccacccccaccatcaagtggatgaagaacgaggaggccctggacaccgagagcagcgagagactggtgctgctggccggcggcagcctggagatcagcgacgtgaccgaggacgacgccggcacctacttctgcatcgccgacaacggcaacgagaccatcgaggcccaggccgagctgaccgtgcaggcccagcccgagttcctgaagcagcccaccaacatctacgcccacgagagcatggacatcgtgttcgagtgcgaggtgaccggcaagcccacccccaccgtgaagtgggtgaagaacggcgacatggtgatccccagcgactacttcaagatcgtgaaggagcacaacctgcaggtgctgggcctggtgaagagcgacgagggcttctaccagtgcatcgccgagaacgacgtgggcaacgcccaggccggcgcccagctgatcatcctggagcacgcccccgccaccaccggccccctgcccagcgcccccagagacgtggtggccagcctggtgagcaccagattcatcaagctgacctggagaacccccgccagcgacccccacggcgacaacctgacctacagcgtgttctacaccaaggagggcatcgccagagagagagtggagaacaccagccaccccggcgagatgcaggtgaccatccagaacctgatgcccgccaccgtgtacatcttcagagtgatggcccagaacaagcacggcagcggcgagagcagcgcccccctgagagtggagacccagcccgaggtgcagctgcccggccccgcccccaacctgagagcctacgccgccagccccaccagcatcaccgtgacctgggagacccccgtgagcggcaacggcgagatccagaactacaagctgtactacatggagaagggcaccgacaaggagcaggacgtggacgtgagcagccacagctacaccatcaacggcctgaagaagtacaccgagtacagcttcagagtggtggcctacaacaagcacggccccggcgtgagcacccccgacgtggccgtgagaaccctgagcgacgtgcccagcgccgccccccagaacctgagcctggaggtgagaaacagcaagagcatcatgatccactggcagccccccgcccccgccacccagaacggccagatcaccggctacaagatcagatacagaaaggccagcagaaagagcgacgtgaccgagaccctggtgagcggcacccagctgagccagctgatcgagggcctggacagaggcaccgagtacaacttcagagtggccgccctgaccatcaacggcaccggccccgccaccgactggctgagcgccgagaccttcgagagcgacctggacgagaccagagtgcccgaggtgcccagcagcctgcacgtgagacccctggtgaccagcatcgtggtgagctggaccccccccgagaaccagaacatcgtggtgagaggctacgccatcggctacggcatcggcagcccccacgcccagaccatcaaggtggactacaagcagagatactacaccatcgagaacctggaccccagcagccactacgtgatcaccctgaaggccttcaacaacgtgggcgagggcatccccctgtacgagagcgccgtgaccagaccccacaccgacaccagcgaggtggacctgttcgtgatcaacgccccctacacccccgtgcccgaccccacccccatgatgccccccgtgggcgtgcaggccagcatcctgagccacgacaccatcagaatcacctgggccgacaacagcctgcccaagcaccagaagatcaccgacagcagatactacaccgtgagatggaagaccaacatccccgccaacaccaagtacaagaacgccaacgccaccaccctgagctacctggtgaccggcctgaagcccaacaccctgtacgagttcagcgtgatggtgaccaagggcagaagaagcagcacctggagcatgaccgcccacggcaccaccttcgagctggtgcccaccagcccccccaaggacgtgaccgtggtgagcaaggagggcaagcccaagaccatcatcgtgaactggcagccccccagcgaggccaacggcaagatcaccggctacatcatctactacagcaccgacgtgaacgccgagatccacgactgggtgatcgagcccgtggtgggcaacagactgacccaccagatccaggagctgaccctggacaccccctactacttcaagatccaggccagaaacagcaagggcatgggccccatgagcgaggccgtgcagttcagaacccccaaggccgacagcagcgacaagatgcccaacgaccaggccagcggcagcggcggcaagggcagcagactgcccgacctgggcagcgactacaagccccccatgagcggcagcaacagcccccacggcagccccaccagccccctggacagcaacatgctgctggtgatcatcgtgagcgtgggcgtgatcaccatcgtggtggtggtgatcatcgccgtgttctgcaccagaagaaccaccagccaccagaagaagaagagagccgcctgcaagagcgtgaacggcagccacaagtacaagggcaacagcaaggacgtgaagccccccgacctgtggatccaccacgagagactggagctgaagcccatcgacaagagccccgaccccaaccccatcatgaccgacacccccatccccagaaacagccaggacatcacccccgtggacaacagcatggacagcaacatccaccagagaagaaacagctacagaggccacgagagcgaggacagcatgagcaccctggccggcagaagaggcatgagacccaagatgatgatgcccttcgacagccagcccccccagcagagcgtgagaaacacccccagcaccgacaccatgcccgccagcagcagccagacctgctgcaccgaccaccaggaccccgagggcgccaccagcagcagctacctggccagcagccaggaggaggacagcggccagagcctgcccaccgcccacgtgagacccagccaccccctgaagagcttcgccgtgcccgccatccccccccccggcccccccacctacgaccccgccctgcccagcacccccctgctgagccagcaggccctgaaccaccacatccacagcgtgaagaccgccagcatcggcaccctgggcagaagcagaccccccatgcccgtggtggtgcccagcgcccccgaggtgcaggagaccaccagaatgctggaggacagcgagagcagctacgagcccgacgagctgaccaaggagatggcccacctggagggcctgatgaaggacctgaacgccatcaccaccgcctag

SEQ ID NO: 90581 - DNA, 1074 bp, synthetic construct
  misc_feature 1..1074: note = Description of Artificial Sequence: Synthetic coding sequence
  source 1..1074: mol_type = other DNA
atgcagagcgtgcagagcaccagcttctgcctgagaaagcagtgcctgtgcctgaccttcctgctgctgcacctgctgggccaggtggccgccacccagagatgccccccccagtgccccggcagatgccccgccaccccccccacctgcgcccccggcgtgagagccgtgctggacggctgcagctgctgcctggtgtgcgccagacagagaggcgagagctgcagcgacctggagccctgcgacgagagcagcggcctgtactgcgacagaagcgccgaccccagcaaccagaccggcatctgcaccgccgtggagggcgacaactgcgtgttcgacggcgtgatctacagaagcggcgagaagttccagcccagctgcaagttccagtgcacctgcagagacggccagatcggctgcgtgcccagatgccagctggacgtgctgctgcccgagcccaactgccccgcccccagaaaggtggaggtgcccggcgagtgctgcgagaagtggatctgcggccccgacgaggaggacagcctgggcggcctgaccctggccgcctacagacccgaggccaccctgggcgtggaggtgagcgacagcagcgtgaactgcatcgagcagaccaccgagtggaccgcctgcagcaagagctgcggcatgggcttcagcaccagagtgaccaacagaaacagacagtgcgagatgctgaagcagaccagactgtgcatggtgagaccctgcgagcaggagcccgagcagcccaccgacaagaagggcaagaagtgcctgagaaccaagaagagcctgaaggccatccacctgcagttcaagaactgcaccagcctgcacacctacaagcccagattctgcggcgtgtgcagcgacggcagatgctgcaccccccacaacaccaagaccatccaggccgagttccagtgcagccccggccagatcgtgaagaagcccgtgatggtgatcggcacctgcacctgccacaccaactgccccaagaacaacgaggccttcctgcaggagctggagctgaagaccaccagaggcaagatgtag

SEQ ID NO: 90582 - DNA, 2202 bp, synthetic construct
  misc_feature 1..2202: note = Description of Artificial Sequence: Synthetic coding sequence
  source 1..2202: mol_type = other DNA
atgctggccagaagacagagagaccccctgcaggccctgagaagaagaaaccaggagctgaagcagcaggtggacagcctgctgagcgagagccagctgaaggaggccctggagcccaacaagagacagcacatctaccagagatgcatccagctgaagcaggccatcgacgagaacaagaacgccctgcagaagctgagcaaggccgacgagagcgcccccgtggccaactacaaccagagaaaggaggaggagcacaccctgctggacaagctgacccagcagctgcagggcctggccgtgaccatcagcagagagaacatcaccgaggtgggcgcccccaccgaggaggaggaggagagcgagagcgaggacagcgaggacagcggcggcgaggaggaggacgccgaggaggaggaggaggagaaggaggagaacgagagccacaagtggagcaccggcgaggagtacatcgccgtgggcgacttcaccgcccagcaggtgggcgacctgaccttcaagaagggcgagatcctgctggtgatcgagaagaagcccgacggctggtggatcgccaaggacgccaagggcaacgagggcctggtgcccagaacctacctggagccctacagcgaggaggaggagggccaggagagcagcgaggagggcagcgaggaggacgtggaggccgtggacgagaccgccgacggcgccgaggtgaagcagagaaccgacccccactggagcgccgtgcagaaggccatcagcgaggccggcatcttctgcctggtgaaccacgtgagcttctgctacctgatcgtgctgatgagaaacagaatggagaccgtggaggacaccaacggcagcgagaccggcttcagagcctggaacgtgcagagcagaggcagaatcttcctggtgagcaagcccgtgctgcagcagatcaacaccgtggacgtgctgaccaccatgggcgccatccccgccggcttcagacccagcaccctgagccagctgctggaggagggcaaccagttcagagccaactacttcctgcagcccgagctgatgcccagccagctggccttcagagacctgatgtgggacgccaccgagggcaccatcagaagcagacccagcagaatcagcctgatcctgaccctgtggagctgcaagatgatccccctgcccggcatgagcatccaggtgctgagcagacacgtgagactgtgcctgttcgacggcaacaaggtgctgagcaacatccacaccgtgagagccacctggcagcccaagaagcccaagacctggaccttcagcccccaggtgaccagaatcctgccctgcctgctggacggcgactgcttcatcagaagcaacagcgccagccccgacctgggcatcctgttcgagctgggcatcagctacatcagaaacagcaccggcgagagaggcgagctgagctgcggctgggtgttcctgaagctgttcgacgccagcggcgtgcccatccccgccaagacctacgagctgttcctgaacggcggcaccccctacgagaagggcatcgaggtggaccccagcatcagcagaagagcccacggcagcgtgttctaccagatcatgaccatgagaagacagccccagctgctggtgaagctgagaagcctgaacagaagaagcagaaacgtgctgagcctgctgcccgagaccctgatcggcaacatgtgcagcatccacctgctgatcttctacagacagatcctgggcgacgtgctgctgaaggacagaatgagcctgcagagcaccgacctgatcagccaccccatgctggccaccttccccatgctgctggagcagcccgacgtgatggacgccctgagaagcagctgggccggcaaggagagcaccctgaagagaagcgagaagagagacaaggagttcctgaagagcaccttcctgctggtgtaccacgactgcgtgctgcccctgctgcacagcaccagactgccccccttcagatgggccgaggaggagaccgagaccgccagatggaaggtgatcaccgacttcctgaagcagaaccaggagaaccagggcgccctgcaggccctgctgagccccgacggcgtgcacgagcccttcgacctgagcgagcagacctacgacttcctgggcgagatgagaaagaacgccgtgtag

SEQ ID NO: 90583 - DNA, 1845 bp, synthetic construct
  misc_feature 1..1845: note = Description of Artificial Sequence: Synthetic coding sequence
  source 1..1845: mol_type = other DNA
atgctggccagaagacagagagaccccctgcaggccctgagaagaagaaaccaggagctgaagcagcaggtggacagcctgctgagcgagagccagctgaaggaggccctggagcccaacaagagacagcacatctaccagagagtgggcgcccccaccgaggaggaggaggagagcgagagcgaggacagcgaggacagcggcggcgaggaggaggacgccgaggaggaggaggaggagaaggaggagaacgagagccacaagtggagcaccggcgaggagtacatcgccgtgggcgacttcaccgcccagcaggtgggcgacctgaccttcaagaagggcgagatcctgctggtgatcgagaagaagcccgacggctggtggatcgccaaggacgccaagggcaacgagggcctggtgcccagaacctacctggagccctacagcgaggaggaggagggccaggagagcagcgaggagggcagcgaggaggacgtggaggccgtggacgagaccgccgacggcgccgaggtgaagcagagaaccgacccccactggagcgccgtgcagaaggccatcagcgagatcaacaccgtggacgtgctgaccaccatgggcgccatccccgccggcttcagacccagcaccctgagccagctgctggaggagggcaaccagttcagagccaactacttcctgcagcccgagctgatgcccagccagctggccttcagagacctgatgtgggacgccaccgagggcaccatcagaagcagacccagcagaatcagcctgatcctgaccctgtggagctgcaagatgatccccctgcccggcatgagcatccaggtgctgagcagacacgtgagactgtgcctgttcgacggcaacaaggtgctgagcaacatccacaccgtgagagccacctggcagcccaagaagcccaagacctggaccttcagcccccaggtgaccagaatcctgccctgcctgctggacggcgactgcttcatcagaagcaacagcgccagccccgacctgggcatcctgttcgagctgggcatcagctacatcagaaacagcaccggcgagagaggcgagctgagctgcggctgggtgttcctgaagctgttcgacgccagcggcgtgcccatccccgccaagacctacgagctgttcctgaacggcggcaccccctacgagaagggcatcgaggtggaccccagcatcagcagaagagcccacggcagcgtgttctaccagatcatgaccatgagaagacagccccagctgctggtgaagctgagaagcctgaacagaagaagcagaaacgtgctgagcctgctgcccgagaccctgatcggcaacatgtgcagcatccacctgctgatcttctacagacagatcctgggcgacgtgctgctgaaggacagaatgagcctgcagagcaccgacctgatcagccaccccatgctggccaccttccccatgctgctggagcagcccgacgtgatggacgccctgagaagcagctgggccggcaaggagagcaccctgaagagaagcgagaagagagacaaggagttcctgaagagcaccttcctgctggtgtaccacgactgcgtgctgcccctgctgcacagcaccagactgccccccttcagatgggccgaggaggagaccgagaccgccagatggaaggtgatcaccgacttcctgaagcagaaccaggagaaccagggcgccctgcaggccctgctgagccccgacggcgtgcacgagcccttcgacctgagcgagcagacctacgacttcctgggcgagatgagaaagaacgccgtgtag

SEQ ID NO: 90584 - DNA, 2199 bp, synthetic construct
  misc_feature 1..2199: note = Description of Artificial Sequence: Synthetic coding sequence
  source 1..2199: mol_type = other DNA
atgctggccagaagacagagagaccccctgcaggccctgagaagaagaaaccaggagctgaagcagcaggtggacagcctgctgagcgagagccagctgaaggaggccctggagcccaacaagagacagcacatctaccagagatgcatccagctgaagcaggccatcgacgagaacaagaacgccctgcagaagctgagcaaggccgacgagagcgcccccgtggccaactacaaccagagaaaggaggaggagcacaccctgctggacaagctgacccagcagctgcagggcctggccgtgaccatcagcagagagaacatcaccgaggtgggcgcccccaccgaggaggaggaggagagcgagagcgaggacagcgaggacagcggcggcgaggaggaggacgccgaggaggaggaggaggagaaggaggagaacgagagccacaagtggagcaccggcgaggagtacatcgccgtgggcgacttcaccgcccagcaggtgggcgacctgaccttcaagaagggcgagatcctgctggtgatcgagaagaagcccgacggctggtggatcgccaaggacgccaagggcaacgagggcctggtgcccagaacctacctggagccctacagcgaggaggaggagggccaggagagcagcgaggagggcagcgaggaggacgtggaggccgtggacgagaccgccgacggcgccgaggtgaagcagagaaccgacccccactggagcgccgtgcagaaggccatcagcgaggccggcatcttctgcctggtgaaccacgtgagcttctgctacctgatcgtgctgatgagaaacagaatggagaccgtggaggacaccaacggcagcgagaccggcttcagagcctggaacgtgcagagcagaggcagaatcttcctggtgagcaagcccgtgctgcagatcaacaccgtggacgtgctgaccaccatgggcgccatccccgccggcttcagacccagcaccctgagccagctgctggaggagggcaaccagttcagagccaactacttcctgcagcccgagctgatgcccagccagctggccttcagagacctgatgtgggacgccaccgagggcaccatcagaagcagacccagcagaatcagcctgatcctgaccctgtggagctgcaagatgatccccctgcccggcatgagcatccaggtgctgagcagacacgtgagactgtgcctgttcgacggcaacaaggtgctgagcaacatccacaccgtgagagccacctggcagcccaagaagcccaagacctggaccttcagcccccaggtgaccagaatcctgccctgcctgctggacggcgactgcttcatcagaagcaacagcgccagccccgacctgggcatcctgttcgagctgggcatcagctacatcagaaacagcaccggcgagagaggcgagctgagctgcggctgggtgttcctgaagctgttcgacgccagcggcgtgcccatccccgccaagacctacgagctgttcctgaacggcggcaccccctacgagaagggcatcgaggtggaccccagcatcagcagaagagcccacggcagcgtgttctaccagatcatgaccatgagaagacagccccagctgctggtgaagctgagaagcctgaacagaagaagcagaaacgtgctgagcctgctgcccgagaccctgatcggcaacatgtgcagcatccacctgctgatcttctacagacagatcctgggcgacgtgctgctgaaggacagaatgagcctgcagagcaccgacctgatcagccaccccatgctggccaccttccccatgctgctggagcagcccgacgtgatggacgccctgagaagcagctgggccggcaaggagagcaccctgaagagaagcgagaagagagacaaggagttcctgaagagcaccttcctgctggtgtaccacgactgcgtgctgcccctgctgcacagcaccagactgccccccttcagatgggccgaggaggagaccgagaccgccagatggaaggtgatcaccgacttcctgaagcagaaccaggagaaccagggcgccctgcaggccctgctgagccccgacggcgtgcacgagcccttcgacctgagcgagcagacctacgacttcctgggcgagatgagaaagaacgccgtgtag

SEQ ID NO: 90585 - DNA, 2034 bp, synthetic construct
  misc_feature 1..2034: note = Description of Artificial Sequence: Synthetic coding sequence
  source 1..2034: mol_type = other DNA
atgctggccagaagacagagagaccccctgcaggccctgagaagaagaaaccaggagctgaagcagcaggtggacagcctgctgagcgagagccagctgaaggaggccctggagcccaacaagagacagcacatctaccagagatgcatccagctgaagcaggccatcgacgagaacaagaacgccctgcagaagctgagcaaggccgacgagagcgcccccgtggccaactacaaccagagaaaggaggaggagcacaccctgctggacaagctgacccagcagctgcagggcctggccgtgaccatcagcagagagaacatcaccgaggtgggcgcccccaccgaggaggaggaggagagcgagagcgaggacagcgaggacagcggcggcgaggaggaggacgccgaggaggaggaggaggagaaggaggagaacgagagccacaagtggagcaccggcgaggagtacatcgccgtgggcgacttcaccgcccagcaggtgggcgacctgaccttcaagaagggcgagatcctgctggtgatcgagaagaagcccgacggctggtggatcgccaaggacgccaagggcaacgagggcctggtgcccagaacctacctggagccctacagcgaggaggaggagggccaggagagcagcgaggagggcagcgaggaggacgtggaggccgtggacgagaccgccgacggcgccgaggtgaagcagagaaccgacccccactggagcgccgtgcagaaggccatcagcgagcagatcaacaccgtggacgtgctgaccaccatgggcgccatccccgccggcttcagacccagcaccctgagccagctgctggaggagggcaaccagttcagagccaactacttcctgcagcccgagctgatgcccagccagctggccttcagagacctgatgtgggacgccaccgagggcaccatcagaagcagacccagcagaatcagcctgatcctgaccctgtggagctgcaagatgatccccctgcccggcatgagcatccaggtgctgagcagacacgtgagactgtgcctgttcgacggcaacaaggtgctgagcaacatccacaccgtgagagccacctggcagcccaagaagcccaagacctggaccttcagcccccaggtgaccagaatcctgccctgcctgctggacggcgactgcttcatcagaagcaacagcgccagccccgacctgggcatcctgttcgagctgggcatcagctacatcagaaacagcaccggcgagagaggcgagctgagctgcggctgggtgttcctgaagctgttcgacgccagcggcgtgcccatccccgccaagacctacgagctgttcctgaacggcggcaccccctacgagaagggcatcgaggtggaccccagcatcagcagaagagcccacggcagcgtgttctaccagatcatgaccatgagaagacagccccagctgctggtgaagctgagaagcctgaacagaagaagcagaaacgtgctgagcctgctgcccgagaccctgatcggcaacatgtgcagcatccacctgctgatcttctacagacagatcctgggcgacgtgctgctgaaggacagaatgagcctgcagagcaccgacctgatcagccaccccatgctggccaccttccccatgctgctggagcagcccgacgtgatggacgccctgagaagcagctgggccggcaaggagagcaccctgaagagaagcgagaagagagacaaggagttcctgaagagcaccttcctgctggtgtaccacgactgcgtgctgcccctgctgcacagcaccagactgccccccttcagatgggccgaggaggagaccgagaccgccagatggaaggtgatcaccgacttcctgaagcagaaccaggagaaccagggcgccctgcaggccctgctgagccccgacggcgtgcacgagcccttcgacctgagcgagcagacctacgacttcctgggcgagatgagaaagaacgccgtgtag

SEQ ID NO: 90586 - DNA, 2115 bp, synthetic construct
  misc_feature 1..2115: note = Description of Artificial Sequence: Synthetic coding sequence
  source 1..2115: mol_type = other DNA
atgggcaccgccagcagcctggtgagccccgccggcggcgaggtgatcgaggacacctacggcgccggcggcggcgaggcctgcgagatccccgtggaggtgaagcccaaggccagactgctgagaaacagcttcagaagaggcgccggcgccgccgccggcgccggccccggcagcctgcccagaggcgtgggcgccggcggcctgctgggcgccagcttcaagagcaccggcagcagcgtgcccgagctggagtacgccgccgccgagtacgagagactgagaaaggagtacgagatcttcagagtgagcaagaaccaggagctgctgagcatgggcagaagagaggccaagctggacaccgagaacaagagactgagagccgagctgcaggccctgcagaagacctaccagaagatcctgagagagaaggagagcgccctggaggccaagtaccaggccatggagagagccgccaccttcgagcacgacagagacaaggtgaagagacagttcaagatcttcagagagaccaaggagaacgagatccaggacctgctgagagccaagagagagctggagagcaagctgcagagactgcaggcccagggcatccaggtgttcgaccccggcgagagcgacagcgacgacaactgcaccgacgtgaccgccgccggcacccagtgcgagtactggaccggcggcgccctgggcagcgagcccagcatcggcagcatgatccagctgcagcagagcttcagaggccccgagttcgcccacagcagcatcgacgtggagggccccttcgccaacgtgaacagagacgactgggacatcgccgtggccagcctgctgcaggtgacccccctgttcagccacagcctgtggagcaacaccgtgagatgctacctgatctacaccgacgagacccagcccgagatggacctgttcctgaaggactacagccccaagctgaagagaatgtgcgagaccatgggctacttcttccacgccgtgtacttccccatcgacgtggagaaccagtacctgaccgtgagaaagtgggagatcgagaagagcagcctggtgatcctgttcatccacctgaccctgcccagcctgctgctggaggactgcgaggaggccttcctgaagaaccccgagggcaagcccagactgatcttccacagactggaggacggcaaggtgagcagcgacagcgtgcagcagctgatcgaccaggtgagcaacctgaacaagaccagcaaggccaagatcatcgaccacagcggcgaccccgccgagggcgtgtacaagacctacatctgcgtggagaagatcatcaagcaggacatcctgggcttcgagaacaccgacctggagaccaaggacctgggcagcgaggacagcatccccgaggaggacgacttcggcgacgtgctgtgggacatccacgacgagcaggagcagatggagaccttccagcaggccagcaacagcgcccacgagctgggcttcgagaagtactaccagagactgaacgacctggtggccgcccccgcccccatcccccccctgctggtgagcggcggccccggcagcggcaagagcctgctgctgagcaagtggatccagctgcagcagaagaacagccccaacaccctgatcctgagccacttcgtgggcagacccatgagcaccagcagcgagagcagcctgatcatcaagagactgaccctgaagctgatgcagcacagctggagcgtgagcgccctgaccctggaccccgccaagctgctggaggagttccccagatggctggagaagctgagcgccagacaccagggcagcatcatcatcgtgatcgacagcatcgaccaggtgcagcaggtggagaagcacatgaagtggctgatcgaccccctgcccgtgaacgtgagagtgatcgtgagcgtgaacgtggagacctgcccccccgcctggagactgtggcccaccctgcacctggaccccctgagccccaaggacgccaagagcatcatcatcgccgagtgccacagcgtggacatcaagctgagcaaggagcagtgctgggagagcagacagttcagatag

SEQ ID NO: 90587 - DNA, 3993 bp, synthetic construct
  misc_feature 1..3993: note = Description of Artificial Sequence: Synthetic coding sequence
  source 1..3993: mol_type = other DNA
atgggcaccgccagcagcctggtgagccccgccggcggcgaggtgatcgaggacacctacggcgccggcggcggcgaggcctgcgagatccccgtggaggtgaagcccaaggccagactgctgagaaacagcttcagaagaggcgccggcgccgccgccggcgccggccccggcagcctgcccagaggcgtgggcgccggcggcctgctgggcgccagcttcaagagcaccggcagcagcgtgcccgagctggagtacgccgccgccgagtacgagagactgagaaaggagtacgagatcttcagagtgagcaagaaccaggagctgctgagcatgggcagaagagaggccaagctggacaccgagaacaagagactgagagccgagctgcaggccctgcagaagacctaccagaagatcctgagagagaaggagagcgccctggaggccaagtaccaggccatggagagagccgccaccttcgagcacgacagagacaaggtgaagagacagttcaagatcttcagagagaccaaggagaacgagatccaggacctgctgagagccaagagagagctggagagcaagctgcagagactgcaggcccagggcatccaggtgttcgaccccggcgagagcgacagcgacgacaactgcaccgacgtgaccgccgccggcacccagtgcgagtactggaccggcggcgccctgggcagcgagcccagcatcggcagcatgatccagctgcagcagagcttcagaggccccgagttcgcccacagcagcatcgacgtggagggccccttcgccaacgtgaacagagacgactgggacatcgccgtggccagcctgctgcaggtgacccccctgttcagccacagcctgtggagcaacaccgtgagatgctacctgatctacaccgacgagacccagcccgagatggacctgttcctgaaggactacagccccaagctgaagagaatgtgcgagaccatgggctacttcttccacgccgtgtacttccccatcgacgtggagaaccagtacctgaccgtgagaaagtgggagatcgagaagagcagcctggtgatcctgttcatccacctgaccctgcccagcctgctgctggaggactgcgaggaggccttcctgaagaaccccgagggcaagcccagactgatcttccacagactggaggacggcaaggtgagcagcgacagcgtgcagcagctgatcgaccaggtgagcaacctgaacaagaccagcaaggccaagatcatcgaccacagcggcgaccccgccgagggcgtgtacaagacctacatctgcgtggagaagatcatcaagcaggacatcctgggcttcgagaacaccgacctggagaccaaggacctgggcagcgaggacagcatccccgaggaggacgacttcggcgacgtgctgtgggacatccacgacgagcaggagcagatggagaccttccagcaggccagcaacagcgcccacgagctgggcttcgagaagtactaccagagactgaacgacctggtggccgcccccgcccccatcccccccctgctggtgagcggcggccccggcagcggcaagagcctgctgctgagcaagtggatccagctgcagcagaagaacagccccaacaccctgatcctgagccacttcgtgggcagacccatgagcaccagcagcgagagcagcctgatcatcaagagactgaccctgaagctgatgcagcacagctggagcgtgagcgccctgaccctggaccccgccaagctgctggaggagttccccagatggctggagaagctgagcgccagacaccagggcagcatcatcatcgtgatcgacagcatcgaccaggtgcagcaggtggagaagcacatgaagtggctgatcgaccccctgcccgtgaacgtgagagtgatcgtgagcgtgaacgtggagacctgcccccccgcctggagactgtggcccaccctgcacctggaccccctgagccccaaggacgccaagagcatcatcatcgccgagtgccacagcgtggacatcaagctgagcaaggagcaggagaagaagctggagagacactgcagaagcgccaccacctgcaacgccctgtacgtgaccctgttcggcaagatgatcgccagagccggcagagccggcaacctggacaagatcctgcaccagtgcttccagtgccaggacaccctgagcctgtacagactggtgctgcacagcatcagagagagcatggccaacgacgtggacaaggagctgatgaagcagatcctgtgcctggtgaacgtgagccacaacggcgtgagcgagagcgagctgatggagctgtaccccgagatgagctggaccttcctgaccagcctgatccacagcctgtacaagatgtgcctgctgacctacggctgcggcctgctgagattccagcacctgcaggcctgggagaccgtgagactggagtacctggagggccccaccgtgaccagcagctacagacagaagctgatcaactacttcaccctgcagctgagccaggacagagtgacctggagaagcgccgacgagctgccctggctgttccagcagcagggcagcaagcagaagctgcacgactgcctgctgaacctgttcgtgagccagaacctgtacaagagaggccacttcgccgagctgctgagctactggcagttcgtgggcaaggacaagagcgccatggccaccgagtacttcgacagcctgaagcagtacgagaagaactgcgagggcgaggacaacatgagctgcctggccgacctgtacgagaccctgggcagattcctgaaggacctgggcctgctgagccaggccatcgtgcccctgcagagaagcctggagatcagagagaccgccctggaccccgaccaccccagagtggcccagagcctgcaccagctggccagcgtgtacgtgcagtggaagaagttcggcaacgccgagcagctgtacaagcaggccctggagatcagcgagaacgcctacggcgccgaccacccctacaccgccagagagctggaggccctggccaccctgtaccagaagcagaacaagtacgagcaggccgagcacttcagaaagaagagcttcaagatccaccagaaggccatcaagaagaagggcaacctgtacggcttcgccctgctgagaagaagagccctgcagctggaggagctgaccctgggcaaggacacccccgacaacgccagaaccctgaacgagctgggcgtgctgtactacctgcagaacaacctggagaccgccgaccagttcctgaagagaagcctggagatgagagagagagtgctgggccccgaccaccccgactgcgcccagagcctgaacaacctggccgccctgtgcaacgagaagaagcagtacgacaaggccgaggagctgtacgagagagccctggacatcagaagaagagccctggcccccgaccaccccagcctggcctacaccgtgaagcacctggccatcctgtacaagaagatgggcaagctggacaaggccgtgcccctgtacgagctggccgtggagatcagacagaagagcttcggccccaagcaccccagcgtggccaccgccctggtgaacctggccgtgctgtacagccagatgaagaagcacgtggaggccctgcccctgtacgagagagccctgaagatctacgaggacagcctgggcagaatgcaccccagagtgggcgagaccctgaagaacctggccgtgctgagctacgagggcggcgacttcgagaaggccgccgagctgtacaagagagccatggagatcaaggaggccgagaccagcctgctgggcggcaaggcccccagcagacacagcagcagcggcgacaccttcagcctgaagaccgcccacagccccaacgtgttcctgcagcagggccagagatag

SEQ ID NO: 90588 - DNA, 720 bp, synthetic construct
  misc_feature 1..720: note = Description of Artificial Sequence: Synthetic coding sequence
  source 1..720: mol_type = other DNA
atgggcaccgccagcagcctggtgagccccgccggcggcgaggtgatcgaggacacctacggcgccggcggcggcgaggcctgcgagatccccgtggaggtgaagcccaaggccagactgctgagaaacagcttcagaagaggcgccggcgccgccgccggcgccggccccggcagcctgcccagaggcgtgggcgccggcggcctgctgggcgccagcttcaagagcaccggcagcagcgtgcccgagctggagtacgccgccgccgagtacgagagactgagaaaggagtacgagatcttcagagtgagcaagaaccaggagctgctgagcatgggcagaagagaggccaagctggacaccgagaacaagagactgagagccgagctgcaggccctgcagaagacctaccagaagatcctgagagagaaggagagcgccctggaggccaagtaccaggccatggagagagccgccaccttcgagcacgacagagacaaggtgaagagacagttcaagatcttcagagagaccaaggagaacgagatccaggacctgctgagagccaagagagagctggagagcaagctgcagagactgcaggcccagggcatccaggtgttcgaccccggcgagagcgacagcgacgacaactgcaccgacgtgaccgtgagcctggagagcgaccagcaccccggcatcttcatcgccaacttctag

SEQ ID NO: 90589 - DNA, 453 bp, synthetic construct
  misc_feature 1..453: note = Description of Artificial Sequence: Synthetic coding sequence
  source 1..453: mol_type = other DNA
atgggcaccgccagcagcctggtgagccccgccggcggcgaggtgatcgaggacacctacggcgccggcggcggcgaggcctgcgagatccccgtggaggtgaagcccaaggccagactgctgagaaacagcttcagaagaggcgccggcgccgccgccggcgccggccccggcagcctgcccagaggcgtgggcgccggcggcctgctgggcgccagcttcaagagcaccggcagcagcgtgcccgagctggagtacgccgccgccgagtacgagagactgagaaaggagtacgagatcttcagagtgagcaagaaccaggagctgctgagcatgggcagaagagaggccaagctggacaccgagaacaagagactgagagccgagctgcagggcctggccgccgtggccagaagcagactgaccgccacctggaacagctgggcccagtag

SEQ ID NO: 90590 - DNA, 1914 bp, synthetic construct
  misc_feature 1..1914: note = Description of Artificial Sequence: Synthetic coding sequence
  source 1..1914: mol_type = other DNA
atcatcgccaacgccggcagagccggcaacctggacaagatcctgcaccagtgcttccagtgccaggacaccctgagcctgtacagactggtgctgcacagcatcagagagagcatggccaacgacgtggacaaggagctgatgaagcagatcctgtgcctggtgaacgtgagccacaacggcgtgagcgagagcgagctgatggagctgtaccccgagatgagctggaccttcctgaccagcctgatccacagcctgtacaagatgtgcctgctgacctacggctgcggcctgctgagattccagcacctgcaggcctgggagaccgtgagactggagtacctggagggccccaccgtgaccagcagctacagacagaagctgatcaactacttcaccctgcagctgagccaggacagagtgacctggagaagcgccgacgagctgccctggctgttccagcagcagggcagcaagcagaagctgcacgactgcctgctgaacctgttcgtgagccagaacctgtacaagagaggccacttcgccgagctgctgagctactggcagttcgtgggcaaggacaagagcgccatggccaccgagtacttcgacagcctgaagcagtacgagaagaactgcgagggcgaggacaacatgagctgcctggccgacctgtacgagaccctgggcagattcctgaaggacctgggcctgctgagccaggccatcgtgcccctgcagagaagcctggagatcagagagaccgccctggaccccgaccaccccagagtggcccagagcctgcaccagctggccagcgtgtacgtgcagtggaagaagttcggcaacgccgagcagctgtacaagcaggccctggagatcagcgagaacgcctacggcgccgaccacccctacaccgccagagagctggaggccctggccaccctgtaccagaagcagaacaagtacgagcaggccgagcacttcagaaagaagagcttcaagatccaccagaaggccatcaagaagaagggcaacctgtacggcttcgccctgctgagaagaagagccctgcagctggaggagctgaccctgggcaaggacacccccgacaacgccagaaccctgaacgagctgggcgtgctgtactacctgcagaacaacctggagaccgccgaccagttcctgaagagaagcctggagatgagagagagagtgctgggccccgaccaccccgactgcgcccagagcctgaacaacctggccgccctgtgcaacgagaagaagcagtacgacaaggccgaggagctgtacgagagagccctggacatcagaagaagagccctggcccccgaccaccccagcctggcctacaccgtgaagcacctggccatcctgtacaagaagatgggcaagctggacaaggccgtgcccctgtacgagctggccgtggagatcagacagaagagcttcggccccaagcaccccagcgtggccaccgccctggtgaacctggccgtgctgtacagccagatgaagaagcacgtggaggccctgcccctgtacgagagagccctgaagatctacgaggacagcctgggcagaatgcaccccagagtgggcgagaccctgaagaacctggccgtgctgagctacgagggcggcgacttcgagaaggccgccgagctgtacaagagagccatggagatcaaggaggccgagaccagcctgctgggcggcaaggcccccagcagacacagcagcagcggcgacaccttcagcctgaagaccgcccacagccccaacgtgttcctgcagcagggccagagaaaggtgcagagcaacctgctgagccccgagggcctgagcaacatctgcgcccaggagaagaccaccagattcaccagcagctag

SEQ ID NO: 90591 - DNA, 1236 bp, synthetic construct
  misc_feature 1..1236: note = Description of Artificial Sequence: Synthetic coding sequence
  source 1..1236: mol_type = other DNA
atgagctgcctggccgacctgtacgagaccctgggcagattcctgaaggacctgggcctgctgagccaggccatcgtgcccctgcagagaagcctggagatcagagagaccgccctggaccccgaccaccccagagtggcccagagcctgcaccagctggccagcgtgtacgtgcagtggaagaagttcggcaacgccgagcagctgtacaagcaggccctggagatcagcgagaacgcctacggcgccgaccacccctacaccgccagagagctggaggccctggccaccctgtaccagaagcagaacaagtacgagcaggccgagcacttcagaaagaagagcttcaagatccaccagaaggccatcaagaagaagggcaacctgtacggcttcgccctgctgagaagaagagccctgcagctggaggagctgaccctgggcaaggacacccccgacaacgccagaaccctgaacgagctgggcgtgctgtactacctgcagaacaacctggagaccgccgaccagttcctgaagagaagcctggagatgagagagagagtgctgggccccgaccaccccgactgcgcccagagcctgaacaacctggccgccctgtgcaacgagaagaagcagtacgacaaggccgaggagctgtacgagagagccctggacatcagaagaagagccctggcccccgaccaccccagcctggcctacaccgtgaagcacctggccatcctgtacaagaagatgggcaagctggacaaggccgtgcccctgtacgagctggccgtggagatcagacagaagagcttcggccccaagcaccccagcgtggccaccgccctggtgaacctggccgtgctgtacagccagatgaagaagcacgtggaggccctgcccctgtacgagagagccctgaagatctacgaggacagcctgggcagaatgcaccccagagtgggcgagaccctgaagaacctggccgtgctgagctacgagggcggcgacttcgagaaggccgccgagctgtacaagagagccatggagatcaaggaggccgagaccagcctgctgggcggcaaggcccccagcagacacagcagcagcggcgacaccttcagcctgaagaccgcccacagccccaacgtgttcctgcagcagggccagagagccggcaagagcaaccccaccttctacctgcagaagggcttccagacctacgtgctgtag

SEQ ID NO: 90592 - DNA, 4281 bp, synthetic construct
  misc_feature 1..4281: note = Description of Artificial Sequence: Synthetic coding sequence
  source 1..4281: mol_type = other DNA
atgaacgactggcacagaatcttcacccagaacgtgctggtgcccccccacccccagagagccagacagccctggaaggagagcaccgccttccagtgcgtgctgaagtggctggacggccccgtgatcagacagggcgtgctggaggtgctgagcgaggtggagtgccacctgagagtgagcttcttcgacgtgacctacagacacttcttcggcagaacctggaagaccaccgtgaagcccaccaagagaccccccagcagaatcgtgttcaacgagcccctgtacttccacaccagcctgaaccacccccacatcgtggccgtggtggaggtggtggccgagggcaagaagagagacggcagcctgcagaccctgagctgcggcttcggcatcctgagaatcttcagcaaccagcccgacagccccatcagcgccagccaggacaagagactgagactgtaccacggcacccccagagccctgctgcaccccctgctgcaggaccccgccgagcagaacagacacatgaccctgatcgagaactgcagcctgcagtacaccctgaagccccaccccgccctggagcccgccttccacctgctgcccgagaacctgctggtgagcggcctgcagcagatccccggcctgctgcccgcccacggcgagagcggcgacgccctgagaaagcccagactgcagaagcccatcaccggccacctggacgacctgttcttcaccctgtaccccagcctggagaagttcgaggaggagctgctggagctgcacgtgcaggaccacttccaggagggctgcggccccctggacggcggcgccctggagatcctggagagaagactgagagtgggcgtgcacaacggcctgggcttcgtgcagagaccccaggtggtggtgctggtgcccgagatggacgtggccctgaccagaagcgccagcttcagcagaaaggtggtgagcagcagcaagaccagcagcggcagccaggccctggtgctgagaagcagactgagactgcccgagatggtgggccaccccgccttcgccgtgatcttccagctggagtacgtgttcagcagccccgccggcgtggacggcaacgccgccagcgtgaccagcctgagcaacctggcctgcatgcacatggtgagatgggccgtgtggaaccccctgctggaggccgacagcggcagagtgaccctgcccctgcagggcggcatccagcccaaccccagccactgcctggtgtacaaggtgcccagcgccagcatgagcagcgaggaggtgaagcaggtggagagcggcaccctgagattccagttcagcctgggcagcgaggagcacctggacgcccccaccgagcccgtgagcggccccaaggtggagagaagacccagcagaaagccccccaccagccccagcagcccccccgcccccgtgcccagagtgctggccgccccccagaacagccccgtgggccccggcctgagcatcagccagctggccgccagccccagaagccccacccagcactgcctggccagacccaccagccagctgccccacggcagccaggccagccccgcccaggcccaggagttccccctggaggccggcatcagccacctggaggccgacctgagccagaccagcctggtgctggagaccagcatcgccgagcagctgcaggagctgcccttcacccccctgcacgcccccatcgtggtgggcacccagaccagaagcagcgccggccagcccagcagagccagcatggtgctgctgcagagcagcggcttccccgagatcctggacgccaacaagcagcccgccgaggccgtgagcgccaccgagcccgtgaccttcaacccccagaaggaggagagcgactgcctgcagagcaacgagatggtgctgcagttcctggccttcagcagagtggcccaggactgcagaggcaccagctggcccaagaccgtgtacttcaccttccagttctacagattcccccccgccaccacccccagactgcagctggtgcagctggacgaggccggccagcccagcagcggcgccctgacccacatcctggtgcccgtgagcagagacggcaccttcgacgccggcagccccggcttccagctgagatacatggtgggccccggcttcctgaagcccggcgagagaagatgcttcgccagatacctggccgtgcagaccctgcagatcgacgtgtgggacggcgacagcctgctgctgatcggcagcgccgccgtgcagatgaagcacctgctgagacagggcagacccgccgtgcaggccagccacgagctggaggtggtggccaccgagtacgagcaggacaacatggtggtgagcggcgacatgctgggcttcggcagagtgaagcccatcggcgtgcacagcgtggtgaagggcagactgcacctgaccctggccaacgtgggccacccctgcgagcagaaggtgagaggctgcagcaccctgccccccagcagaagcagagtgatcagcaacgacggcgccagcagattcagcggcggcagcctgctgaccaccggcagcagcagaagaaagcacgtggtgcaggcccagaagctggccgacgtggacagcgagctggccgccatgctgctgacccacgccagacagggcaagggcccccaggacgtgagcagagagagcgacgccaccagaagaagaaagctggagagaatgagaagcgtgagactgcaggaggccggcggcgacctgggcagaagaggcaccagcgtgctggcccagcagagcgtgagaacccagcacctgagagacctgcaggtgatcgccgcctacagagagagaaccaaggccgagagcatcgccagcctgctgagcctggccatcaccaccgagcacaccctgcacgccaccctgggcgtggccgagttcttcgagttcgtgctgaagaacccccacaacacccagcacaccgtgaccgtggagatcgacaaccccgagctgagcgtgatcgtggacagccaggagtggagagacttcaagggcgccgccggcctgcacacccccgtggaggaggacatgttccacctgagaggcagcctggccccccagctgtacctgagaccccacgagaccgcccacgtgcccttcaagttccagagcttcagcgccggccagctggccatggtgcaggccagccccggcctgagcaacgagaagggcatggacgccgtgagcccctggaagagcagcgccgtgcccaccaagcacgccaaggtgctgttcagagccagcggcggcaagcccatcgccgtgctgtgcctgaccgtggagctgcagccccacgtggtggaccaggtgttcagattctaccaccccgagctgagcttcctgaagaaggccatcagactgcccccctggcacaccttccccggcgcccccgtgggcatgctgggcgaggacccccccgtgcacgtgagatgcagcgaccccaacgtgatctgcgagacccagaacgtgggccccggcgagcccagagacatcttcctgaaggtggccagcggccccagccccgagatcaaggacttcttcgtgatcatctacagcgacagatggctggccacccccacccagacctggcaggtgtacctgcacagcctgcagagagtggacgtgagctgcgtggccggccagctgaccagactgagcctggtgctgagaggcacccagaccgtgagaaaggtgagagccttcaccagccacccccaggagctgaagaccgaccccaagggcgtgttcgtgctgccccccagaggcgtgcaggacctgcacgtgggcgtgagacccctgagagccggcagcagattcgtgcacctgaacctggtggacgtggactgccaccagctggtggccagctggctggtgtgcctgtgctgcagacagcccctgatcagcaaggccttcgagatcatgctggccgccggcgagggcaagggcgtgaacaagagaatcacctacaccaacccctaccccagcagaagaaccttccacctgcacagcgaccaccccgagctgctgagattcagagaggacagcttccaggtgggcggcggcgagacctacaccatcggcctgcagttcgcccccagccagagagtgggcgaggaggagatcctgatctacatcaacgaccacgaggacaagaacgaggaggccttctgcgtgaaggtgatctaccagtag

SEQ ID NO: 90593 - DNA, 546 bp, synthetic construct
  misc_feature 1..546: note = Description of Artificial Sequence: Synthetic coding sequence
  source 1..546: mol_type = other DNA
atggtgctgctgcagagcagcggcttccccgagatcctggacgccaacaagcagcccgccgaggccgtgagcgccaccgagcccgtgaccttcaacccccagaaggaggagagcgactgcctgcagagcaacgagatggtgctgcagttcctggccttcagcagagtggcccaggactgcagaggcaccagctggcccaagaccgtgtacttcaccttccagttctacagattcccccccgccaccacccccagactgcagctggtgcagctggacgaggccggccagcccagcagcggcgccctgacccacatcctggtgcccgtgagcagagacggcaccttcgacgccggcagccccggcttccagctgagatacatggtgggccccggcttcctgaagcccggcgagagaagatgcttcgccagatacctggccgtgcagaccctgcagatcgacgtgtgggacggcgacagcctgctgctgatcggcagcgccgccgtgcagatgaaggagaccagccacatcttcagcgtgagccagtag

SEQ ID NO: 90594 - DNA, 3606 bp, synthetic construct
  misc_feature 1..3606: note = Description of Artificial Sequence: Synthetic coding sequence
  source 1..3606: mol_type = other DNA
atggccctgggcaccaccctgagagccagcctgctgctgctgggcctgctgaccgagggcctggcccagctggccatccccgccagcgtgcccagaggcttctgggccctgcccgagaacctgaccgtggtggagggcgccagcgtggagctgagatgcggcgtgagcacccccggcagcgccgtgcagtgggccaaggacggcctgctgctgggccccgaccccagaatccccggcttccccagatacagactggagggcgaccccgccagaggcgagttccacctgcacatcgaggcctgcgacctgagcgacgacgccgagtacgagtgccaggtgggcagaagcgagatgggccccgagctggtgagccccagagtgatcctgagcatcctggtgccccccaagctgctgctgctgacccccgaggccggcaccatggtgacctgggtggccggccaggagtacgtggtgaactgcgtgagcggcgacgccaagcccgcccccgacatcaccatcctgctgagcggccagaccatcagcgacatcagcgccaacgtgaacgagggcagccagcagaagctgttcaccgtggaggccaccgccagagtgacccccagaagcagcgacaacagacagctgctggtgtgcgaggccagcagccccgccctggaggcccccatcaaggccagcttcaccgtgaacgtgctgttcccccccggcccccccgtgatcgagtggcccggcctggacgagggccacgtgagagccggccagagcctggagctgccctgcgtggccagaggcggcaaccccctggccaccctgcagtggctgaagaacggccagcccgtgagcaccgcctggggcaccgagcacacccaggccgtggccagaagcgtgctggtgatgaccgtgagacccgaggaccacggcgcccagctgagctgcgaggcccacaacagcgtgagcgccggcacccaggagcacggcatcaccctgcaggtgaccttcccccccagcgccatcatcatcctgggcagcgccagccagaccgagaacaagaacgtgaccctgagctgcgtgagcaagagcagcagacccagagtgctgctgagatggtggctgggctggagacagctgctgcccatggaggagaccgtgatggacggcctgcacggcggccacatcagcatgagcaacctgaccttcctggccagaagagaggacaacggcctgaccctgacctgcgaggccttcagcgaggccttcaccaaggagaccttcaagaagagcctgatcctgaacgtgaagtaccccgcccagaagctgtggatcgagggcccccccgagggccagaagctgagagccggcaccagagtgagactggtgtgcctggccatcggcggcaaccccgagcccagcctgatgtggtacaaggacagcagaaccgtgaccgagagcagactgccccaggagagcagaagagtgcacctgggcagcgtggagaagagcggcagcaccttcagcagagagctggtgctggtgaccggccccagcgacaaccaggccaagttcacctgcaaggccggccagctgagcgccagcacccagctggccgtgcagttcccccccaccaacgtgaccatcctggccaacgccagcgccctgagacccggcgacgccctgaacctgacctgcgtgagcgtgagcagcaacccccccgtgaacctgagctgggacaaggagggcgagagactggagggcgtggccgccccccccagaagagcccccttcaagggcagcgccgccgccagaagcgtgctgctgcaggtgagcagcagagaccacggccagagagtgacctgcagagcccacagcgccgagctgagagagaccgtgagcagcttctacagactgaacgtgctgtacagacccgagttcctgggcgagcaggtgctggtggtgaccgccgtggagcagggcgaggccctgctgcccgtgagcgtgagcgccaaccccgcccccgaggccttcaactggaccttcagaggctacagactgagccccgccggcggccccagacacagaatcctgagcagcggcgccctgcacctgtggaacgtgaccagagccgacgacggcctgtaccagctgcactgccagaacagcgagggcaccgccgaggccagactgagactggacgtgcactacgcccccaccatcagagccctgcaggaccccaccgaggtgaacgtgggcggcagcgtggacatcgtgtgcaccgtggacgccaaccccatcctgcccggcatgttcaactgggagagactgggcgaggacgaggaggaccagagcctggacgacatggagaagatcagcagaggccccaccggcagactgagaatccaccacgccaagctggcccaggccggcgcctaccagtgcatcgtggacaacggcgtggccccccccgccagaagactgctgagactggtggtgagattcgccccccaggtggagcaccccacccccctgaccaaggtggccgccgccggcgacagcaccagcagcgccaccctgcactgcagagccagaggcgtgcccaacatcgtgttcacctggaccaagaacggcgtgcccctggacctgcaggaccccagatacaccgagcacacctaccaccagggcggcgtgcacagcagcctgctgaccatcgccaacgtgagcgccgcccaggactacgccctgttcacctgcaccgccaccaacgccctgggcagcgaccagaccaacatccagctggtgagcatcagcagacccgacccccccagcggcctgaaggtggtgagcctgaccccccacagcgtgggcctggagtggaagcccggcttcgacggcggcctgccccagagattctgcatcagatacgaggccctgggcacccccggcttccactacgtggacgtggtgcccccccaggccaccaccttcaccctgaccggcctgcagcccagcaccagatacagagtgtggctgctggccagcaacgccctgggcgacagcggcctggccgacaagggcacccagctgcccatcaccacccccggcctgcaccagcccagcggcgagcccgaggaccagctgcccaccgagccccccagcggcatcagcgagaagaccgaggccggcagcgaggaggacagagtgagaaacgagtacgaggagagccagtggaccggcgagagagacacccagagcagcaccgtgagcaccaccgaggccgagccctactacagaagcctgagagacttcagcccccagctgccccccacccaggaggaggtgagctacagcagaggcttcaccggcgaggacgaggacatggccttccccggccacctgtacgacgaggtggagagaacctacccccccagcggcgcctggggccccctgtacgacgaggtgcagatgggcccctgggacctgcactggcccgaggacacctaccaggaccccagaggcatctacgaccaggtggccggcgacctggacaccctggagcccgacagcctgcccttcgagctgagaggccacctggtgtag

SEQ ID NO: 90595 - DNA, 3726 bp, synthetic construct
  misc_feature 1..3726: note = Description of Artificial Sequence: Synthetic coding sequence
  source 1..3726: mol_type = other DNA
atggccctgggcaccaccctgagagccagcctgctgctgctgggcctgctgaccgagggcctggcccagctggccatccccgccagcgtgcccagaggcttctgggccctgcccgagaacctgaccgtggtggagggcgccagcgtggagctgagatgcggcgtgagcacccccggcagcgccgtgcagtgggccaaggacggcctgctgctgggccccgaccccagaatccccggcttccccagatacagactggagggcgaccccgccagaggcgagttccacctgcacatcgaggcctgcgacctgagcgacgacgccgagtacgagtgccaggtgggcagaagcgagatgggccccgagctggtgagccccagagtgatcctgagcatcctggtgccccccaagctgctgctgctgacccccgaggccggcaccatggtgacctgggtggccggccaggagtacgtggtgaactgcgtgagcggcgacgccaagcccgcccccgacatcaccatcctgctgagcggccagaccatcagcgacatcagcgccaacgtgaacgagggcagccagcagaagctgttcaccgtggaggccaccgccagagtgacccccagaagcagcgacaacagacagctgctggtgtgcgaggccagcagccccgccctggaggcccccatcaaggccagcttcaccgtgaacgtgctgttcccccccggcccccccgtgatcgagtggcccggcctggacgagggccacgtgagagccggccagagcctggagctgccctgcgtggccagaggcggcaaccccctggccaccctgcagtggctgaagaacggccagcccgtgagcaccgcctggggcaccgagcacacccaggccgtggccagaagcgtgctggtgatgaccgtgagacccgaggaccacggcgcccagctgagctgcgaggcccacaacagcgtgagcgccggcacccaggagcacggcatcaccctgcaggtgaccttcccccccagcgccatcatcatcctgggcagcgccagccagaccgagaacaagaacgtgaccctgagctgcgtgagcaagagcagcagacccagagtgctgctgagatggtggctgggctggagacagctgctgcccatggaggagaccgtgatggacggcctgcacggcggccacatcagcatgagcaacctgaccttcctggccagaagagaggacaacggcctgaccctgacctgcgaggccttcagcgaggccttcaccaaggagaccttcaagaagagcctgatcctgaacgtgaagtaccccgcccagaagctgtggatcgagggcccccccgagggccagaagctgagagccggcaccagagtgagactggtgtgcctggccatcggcggcaaccccgagcccagcctgatgtggtacaaggacagcagaaccgtgaccgagagcagactgccccaggagagcagaagagtgcacctgggcagcgtggagaagagcggcagcaccttcagcagagagctggtgctggtgaccggccccagcgacaaccaggccaagttcacctgcaaggccggccagctgagcgccagcacccagctggccgtgcagttcccccccaccaacgtgaccatcctggccaacgccagcgccctgagacccggcgacgccctgaacctgacctgcgtgagcgtgagcagcaacccccccgtgaacctgagctgggacaaggagggcgagagactggagggcgtggccgccccccccagaagagcccccttcaagggcagcgccgccgccagaagcgtgctgctgcaggtgagcagcagagaccacggccagagagtgacctgcagagcccacagcgccgagctgagagagaccgtgagcagcttctacagactgaacgtgctgtacagacccgagttcctgggcgagcaggtgctggtggtgaccgccgtggagcagggcgaggccctgctgcccgtgagcgtgagcgccaaccccgcccccgaggccttcaactggaccttcagaggctacagactgagccccgccggcggccccagacacagaatcctgagcagcggcgccctgcacctgtggaacgtgaccagagccgacgacggcctgtaccagctgcactgccagaacagcgagggcaccgccgaggccagactgagactggacgtgcactacgcccccaccatcagagccctgcaggaccccaccgaggtgaacgtgggcggcagcgtggacatcgtgtgcaccgtggacgccaaccccatcctgcccggcatgttcaactgggagagactgggcgaggacgaggaggaccagagcctggacgacatggagaagatcagcagaggccccaccggcagactgagaatccaccacgccaagctggcccaggccggcgcctaccagtgcatcgtggacaacggcgtggccccccccgccagaagactgctgagactggtggtgagattcgccccccaggtggagcaccccacccccctgaccaaggtggccgccgccggcgacagcaccagcagcgccaccctgcactgcagagccagaggcgtgcccaacatcgtgttcacctggaccaagaacggcgtgcccctggacctgcaggaccccagatacaccgagcacacctaccaccagggcggcgtgcacagcagcctgctgaccatcgccaacgtgagcgccgcccaggactacgccctgttcacctgcaccgccaccaacgccctgggcagcgaccagaccaacatccagctggtgagcatcagcagacccgacccccccagcggcctgaaggtggtgagcctgaccccccacagcgtgggcctggagtggaagcccggcttcgacggcggcctgccccagagattctgcatcagatacgaggccctgggcacccccggcttccactacgtggacgtggtgcccccccaggccaccaccttcaccctgaccggcctgcagcccagcaccagatacagagtgtggctgctggccagcaacgccctgggcgacagcggcctggccgacaagggcacccagctgcccatcaccacccccggcctgcaccagcccagcggcgagcccgaggaccagctgcccaccgagccccccagcggccccagcggcctgcccctgctgcccgtgctgttcgccctgggcggcctgctgctgctgagcaacgccagctgcgtgggcggcgtgctgtggcagagaagactgagaagactggccgagggcatcagcgagaagaccgaggccggcagcgaggaggacagagtgagaaacgagtacgaggagagccagtggaccggcgagagagacacccagagcagcaccgtgagcaccaccgaggccgagccctactacagaagcctgagagacttcagcccccagctgccccccacccaggaggaggtgagctacagcagaggcttcaccggcgaggacgaggacatggccttccccggccacctgtacgacgaggtggagagaacctacccccccagcggcgcctggggccccctgtacgacgaggtgcagatgggcccctgggacctgcactggcccgaggacacctaccaggaccccagaggcatctacgaccaggtggccggcgacctggacaccctggagcccgacagcctgcccttcgagctgagaggccacctggtgtag

SEQ ID NO: 90596 - DNA, 1152 bp, synthetic construct
  misc_feature 1..1152: note = Description of Artificial Sequence: Synthetic coding sequence
  source 1..1152: mol_type = other DNA
atggagagaagagccagaagcagcagcagagagagcagaggcagaggcggcagaaccccccacaaggagaacaagagagccaaggccgagagaagcggcggcggcagaggcagacaggaggccggccccgagcccagcggcagcggcagagccggcacccccggcgagcccagagcccccgccgccaccgtggtggacgtggacgaggtgagaggcagcggcgaggagggcaccgaggtggtggccctgctggagagcgagagacccgaggagggcaccaagagcagcggcctgggcgcctgcgagtggctgctggtgctgatcagcctgctgttcatcatcatgaccttccccttcagcatctggttctgcgtgaaggtggtgcaggagtacgagagagtgatcatcttcagactgggccacctgctgcccggcagagccaagggccccggcctgttcttcttcctgccctgcctggacacctaccacaaggtggacctgagactgcagaccctggagatccccttccacgagatcgtgaccaaggacatgttcatcatggagatcgacgccatctgctactacagaatggagaacgccagcctgctgctgagcagcctggcccacgtgagcaaggccgtgcagttcctggtgcagaccaccatgaagagactgctggcccacagaagcctgaccgagatcctgctggagagaaagagcatcgcccaggacgccaaggtggccctggacagcgtgacctgcatctggggcatcaaggtggagagaatcgagatcaaggacgtgagactgcccgccggcctgcagcacagcctggccgtggaggccgaggcccagagacaggccaaggtgagaatgatcgccgccgaggccgagaaggccgccagcgagagcctgagaatggccgccgagatcctgagcggcacccccgccgccgtgcagctgagatacctgcacaccctgcagagcctgagcaccgagaagcccagcaccgtggtgctgcccctgcccttcgacctgctgaactgcctgagcagccccagcaacagaacccagggcagcctgcccttccccagccccagcaagcccgtggagcccctgaaccccaagaagaaggacagccccatgctgtag

SEQ ID NO: 90597 - DNA, 948 bp, synthetic construct
  misc_feature 1..948: note = Description of Artificial Sequence: Synthetic coding sequence
  source 1..948: mol_type = other DNA
atggagagaagagccagaagcagcagcagagagagcagaggcagaggcggcagaaccccccacaaggagaacaagagagccaaggccgagagaagcggcggcggcagaggcagacaggaggccggccccgagcccagcggcagcggcagagccggcacccccggcgagcccagagcccccgccgccaccgtggtggacgtggacgaggtgagaggcagcggcgaggagggcaccgaggtggtggccctgctggagagcgagagacccgaggagggcaccaagagcagcggcctgggcgcctgcgagtggctgctggtgctgatcagcctgctgttcatcatcatgaccttccccttcagcatctggttctgcgtgaaggtggtgcaggagtacgagagagtgatcatcttcagactgggccacctgctgcccggcagagccaagggccccggcctgttcttcttcctgccctgcctggacacctaccacaaggtggacctgagactgcagaccctggagatccccttccacgaggtggccctggacagcgtgacctgcatctggggcatcaaggtggagagaatcgagatcaaggacgtgagactgcccgccggcctgcagcacagcctggccgtggaggccgaggcccagagacaggccaaggtgagaatgatcgccgccgaggccgagaaggccgccagcgagagcctgagaatggccgccgagatcctgagcggcacccccgccgccgtgcagctgagatacctgcacaccctgcagagcctgagcaccgagaagcccagcaccgtggtgctgcccctgcccttcgacctgctgaactgcctgagcagccccagcaacagaacccagggcagcctgcccttccccagccccagcaagcccgtggagcccctgaaccccaagaagaaggacagccccatgctgtag

SEQ ID NO: 90598 - DNA, 1284 bp, synthetic construct
  misc_feature 1..1284: note = Description of Artificial Sequence: Synthetic coding sequence
  source 1..1284: mol_type = other DNA
atgggcgccggcgccaccggcagagccatggacggccccagactgctgctgctgctgctgctgggcgtgagcctgggcggcgccaaggaggcctgccccaccggcctgtacacccacagcggcgagtgctgcaaggcctgcaacctgggcgagggcgtggcccagccctgcggcgccaaccagaccgtgtgcgagccctgcctggacagcgtgaccttcagcgacgtggtgagcgccaccgagccctgcaagccctgcaccgagtgcgtgggcctgcagagcatgagcgccccctgcgtggaggccgacgacgccgtgtgcagatgcgcctacggctactaccaggacgagaccaccggcagatgcgaggcctgcagagtgtgcgaggccggcagcggcctggtgttcagctgccaggacaagcagaacaccgtgtgcgaggagtgccccgacggcacctacagcgacgaggccaaccacgtggacccctgcctgccctgcaccgtgtgcgaggacaccgagagacagctgagagagtgcaccagatgggccgacgccgagtgcgaggagatccccggcagatggatcaccagaagcaccccccccgagggcagcgacagcaccgcccccagcacccaggagcccgaggccccccccgagcaggacctgatcgccagcaccgtggccggcgtggtgaccaccgtgatgggcagcagccagcccgtggtgaccagaggcaccaccgacaacctgatccccgtgtactgcagcatcctggccgccgtggtggtgggcctggtggcctacatcgccttcaagagatggaacagctgcaagcagaacaagcagggcgccaacagcagacccgtgaaccagacccccccccccgagggcgagaagctgcacagcgacagcggcatcagcgtggacagccagagcctgcacgaccagcagccccacacccagaccgccagcggccaggccctgaagggcgacggcggcctgtacagcagcctgccccccgccaagagagaggaggtggagaagctgctgaacggcagcgccggcgacacctggagacacctggccggcgagctgggctaccagcccgagcacatcgacagcttcacccacgaggcctgccccgtgagagccctgctggccagctgggccacccaggacagcgccaccctggacgccctgctggccgccctgagaagaatccagagagccgacctggtggagagcctgtgcagcgagagcaccgccaccagccccgtgtag

SEQ ID NO: 90599 - DNA, 1002 bp, synthetic construct
  misc_feature 1..1002: note = Description of Artificial Sequence: Synthetic coding sequence
  source 1..1002: mol_type = other DNA
atgagcgccccctgcgtggaggccgacgacgccgtgtgcagatgcgcctacggctactaccaggacgagaccaccggcagatgcgaggcctgcagagtgtgcgaggccggcagcggcctggtgttcagctgccaggacaagcagaacaccgtgtgcgaggagtgccccgacggcacctacagcgacgaggccaaccacgtggacccctgcctgccctgcaccgtgtgcgaggacaccgagagacagctgagagagtgcaccagatgggccgacgccgagtgcgaggagatccccggcagatggatcaccagaagcaccccccccgagggcagcgacagcaccgcccccagcacccaggagcccgaggccccccccgagcaggacctgatcgccagcaccgtggccggcgtggtgaccaccgtgatgggcagcagccagcccgtggtgaccagaggcaccaccgacaacctgatccccgtgtactgcagcatcctggccgccgtggtggtgggcctggtggcctacatcgccttcaagagatggaacagctgcaagcagaacaagcagggcgccaacagcagacccgtgaaccagacccccccccccgagggcgagaagctgcacagcgacagcggcatcagcgtggacagccagagcctgcacgaccagcagccccacacccagaccgccagcggccaggccctgaagggcgacggcggcctgtacagcagcctgccccccgccaagagagaggaggtggagaagctgctgaacggcagcgccggcgacacctggagacacctggccggcgagctgggctaccagcccgagcacatcgacagcttcacccacgaggcctgccccgtgagagccctgctggccagctgggccacccaggacagcgccaccctggacgccctgctggccgccctgagaagaatccagagagccgacctggtggagagcctgtgcagcgagagcaccgccaccagccccgtgtag

SEQ ID NO: 90600 - DNA, 336 bp, synthetic construct
  misc_feature 1..336: note = Description of Artificial Sequence: Synthetic coding sequence
  source 1..336: mol_type = other DNA
atggccaacatccaccaggagaacgaggagatggagcagcccatgcagaacggcgaggaggacagacccctgggcggcggcgagggccaccagcccgccggcaacagaagaggccaggccagaagactggcccccaacttcagatgggccatccccaacagacagatcaacgacggcatgggcggcgacggcgacgacatggagatcttcatggaggagatgagagagatcagaagaaagctgagagagctgcagctgagaaactgcctgagaatcctgatgggcgagctgagcaaccaccacgaccaccacgacgagttctgcctgatgccctag

SEQ ID NO: 90601 - DNA, 306 bp, synthetic construct
  misc_feature 1..306: note = Description of Artificial Sequence: Synthetic coding sequence
  source 1..306: mol_type = other DNA
atggagcagcccatgcagaacggcgaggaggacagacccctgggcggcggcgagggccaccagcccgccggcaacagaagaggccaggccagaagactggcccccaacttcagatgggccatccccaacagacagatcaacgacggcatgggcggcgacggcgacgacatggagatcttcatggaggagatgagagagatcagaagaaagctgagagagctgcagctgagaaactgcctgagaatcctgatgggcgagctgagcaaccaccacgaccaccacgacgagttctgcctgatgccctag

SEQ ID NO: 90602 - DNA, 306 bp, synthetic construct; identical to SEQ ID NO: 90601
  misc_feature 1..306: note = Description of Artificial Sequence: Synthetic coding sequence
  source 1..306: mol_type = other DNA

SEQ ID NO: 90603 - DNA, 336 bp, synthetic construct; identical to SEQ ID NO: 90600
  misc_feature 1..336: note = Description of Artificial Sequence: Synthetic coding sequence
  source 1..336: mol_type = other DNA

SEQ ID NO: 90604 - DNA, 336 bp, synthetic construct; identical to SEQ ID NO: 90600
  misc_feature 1..336: note = Description of Artificial Sequence: Synthetic coding sequence
  source 1..336: mol_type = other DNA

SEQ ID NO: 90605 - DNA, 402 bp, synthetic construct
  misc_feature 1..402: note = Description of Artificial Sequence: Synthetic coding sequence
  source 1..402: mol_type = other DNA
atgatgctgaacagcgacaccatggagctggacctgccccccacccacagcgagaccgagagcggcttcagcgactgcggcggcggcgccggccccgacggcgccggccccggcggccccggcggcggccaggccagaggccccgagcccggcgagcccggcagaaaggacctgcagcacctgagcagagaggagagaagaagaagaagaagagccaccgccaagtacagaaccgcccacgccaccagagagagaatcagagtggaggccttcaacctggccttcgccgagctgagaaagctgctgcccaccctgccccccgacaagaagctgagcaagatcgagatcctgagactggccatctgctacatcagctacctgaaccacgtgctggacgtgtag

SEQ ID NO: 90606 - DNA, 408 bp, synthetic construct
  misc_feature 1..408: note = Description of Artificial Sequence: Synthetic coding sequence
  source 1..408: mol_type = other DNA
atgatgctgagccccgaccaggccgccgacagcgaccaccccagcagcgcccacagcgaccccgagagcctgggcggcaccgacaccaaggtgctgggcagcgtgagcgacctggagcccgtggaggaggccgagggcgacggcaagggcggcagcagagccgccctgtacccccacccccagcagctgagcagagaggagaagagaagaagaagaagagccaccgccaagtacagaagcgcccacgccaccagagagagaatcagagtggaggccttcaacctggccttcgccgagctgagaaagctgctgcccaccctgccccccgacaagaagctgagcaagatcgagatcctgagactggccatctgctacatcagctacctgaaccacgtgctggacgtgtag

SEQ ID NO: 90607 - DNA, 408 bp, synthetic construct; identical to SEQ ID NO: 90606
  misc_feature 1..408: note = Description of Artificial Sequence: Synthetic coding sequence
  source 1..408: mol_type = other DNA

SEQ ID NO: 90608 - DNA, 324 bp, synthetic construct
  misc_feature 1..324: note = Description of Artificial Sequence: Synthetic coding sequence
  source 1..324: mol_type = other DNA
atgatgctgagccccgaccaggccgccgacagcgaccaccccagcagcgcccacagcgaccccgagagcctgggcggcaccgacaccaaggtgctgggcagcgtgagcgacctggagcccgtggaggaggccgagggcgacggcaagggcggcagcagagccgccctgtacccccacccccagcagctgagcagagaggagaagagaagaagaagaagagccaccgccaagtacagaagcgcccacgccaccagagagagaatcagagtggaggccttcaacctggccttcgccgagctgagaaagctgctgcccaccctgtag

SEQ ID NO: 90609 - DNA, 1125 bp, synthetic construct
  misc_feature 1..1125: note = Description of Artificial Sequence: Synthetic coding sequence
  source 1..1125: mol_type = other DNA
atgggcctgcccagaggcagcttcttctggctgctgctgctgctgaccgccgcctgcagcggcctgctgttcgccctgtacttcagcgccgtgcagagataccccggccccgccgccggcgccagagacaccaccagcttcgaggccttcttccagagcaaggccagcaacagctggaccggcaagggccaggcctgcagacacctgctgcacctggccatccagagacacccccacttcagaggcctgttcaacctgagcatccccgtgctgctgtggggcgacctgttcacccccgccctgtgggacagactgagccagcacaaggccccctacggctggagaggcctgagccaccaggtgatcgccagcaccctgagcctgctgaacggcagcgagagcgccaagctgttcgccccccccagagacaccccccccaagtgcatcagatgcgccgtggtgggcaacggcggcatcctgaacggcagcagacagggccccaacatcgacgcccacgactacgtgttcagactgaacggcgccgtgatcaagggcttcgagagagacgtgggcaccaagaccagcttctacggcttcaccgtgaacaccatgaagaacagcctggtgagctactggaacctgggcttcaccagcgtgccccagggccaggacctgcagtacatcttcatccccagcgacatcagagactacgtgatgctgagaagcgccatcctgggcgtgcccgtgcccgagggcctggacaagggcgacagaccccacgcctacttcggccccgaggccagcgccagcaagttcaagctgctgcaccccgacttcatcagctacctgaccgagagattcctgaagagcaagctgatcaacacccacttcggcgacctgtacatgcccagcaccggcgccctgatgctgctgaccgccctgcacacctgcgaccaggtgagcgcctacggcttcatcaccagcaactactggaagttcagcgaccactacttcgagagaaagatgaagcccctgatcttctacgccaaccacgacctgagcctggaggccgccctgtggagagacctgcacaaggccggcatcctgcagctgtaccagagatag

SEQ ID NO: 90610 - DNA, 2235 bp, synthetic construct
  misc_feature 1..2235: note = Description of Artificial Sequence: Synthetic coding sequence
  source 1..2235: mol_type = other DNA
atggccggcagaagcatgcaggccgccagatgccccaccgacgagctgagcctgaccaactgcgccgtggtgaacgagaaggacttccagagcggccagcacgtgatcgtgagaaccagccccaaccacagatacaccttcaccctgaagacccaccccagcgtggtgcccggcagcatcgccttcagcctgccccagagaaagtgggccggcctgagcatcggccaggagatcgaggtgagcctgtacaccttcgacaaggccaagcagtgcatcggcaccatgaccatcgagatcgacttcctgcagaagaagagcatcgacagcaacccctacgacaccgacaagatggccgccgagttcatccagcagttcaacaaccaggccttcagcgtgggccagcagctggtgttcagcttcaacgagaagctgttcggcctgctggtgaaggacatcgaggccatggaccccagcatcctgaagggcgagcccgccaccggcaagagacagaagatcgaggtgggcctggtggtgggcaacagccaggtggccttcgagaaggccgagaacagcagcctgaacctgatcggcaaggccaagaccaaggagaacagacagagcatcatcaaccccgactggaacttcgagaagatgggcatcggcggcctggacaaggagttcagcgacatcttcagaagagccttcgccagcagagtgttcccccccgagatcgtggagcagatgggctgcaagcacgtgaagggcatcctgctgtacggcccccccggctgcggcaagaccctgctggccagacagatcggcaagatgctgaacgccagagagcccaaggtggtgaacggccccgagatcctgaacaagtacgtgggcgagagcgaggccaacatcagaaagctgttcgccgacgccgaggaggagcagagaagactgggcgccaacagcggcctgcacatcatcatcttcgacgagatcgacgccatctgcaagcagagaggcagcatggccggcagcaccggcgtgcacgacaccgtggtgaaccagctgctgagcaagatcgacggcgtggagcagctgaacaacatcctggtgatcggcatgaccaacagacccgacctgatcgacgaggccctgctgagacccggcagactggaggtgaagatggagatcggcctgcccgacgagaagggcagactgcagatcctgcacatccacaccgccagaatgagaggccaccagctgctgagcgccgacgtggacatcaaggagctggccgtggagaccaagaacttcagcggcgccgagctggagggcctggtgagagccgcccagagcaccgccatgaacagacacatcaaggccagcaccaaggtggaggtggacatggagaaggccgagagcctgcaggtgaccagaggcgacttcctggccagcctggagaacgacatcaagcccgccttcggcaccaaccaggaggactacgccagctacatcatgaacggcatcatcaagtggggcgaccccgtgaccagagtgctggacgacggcgagctgctggtgcagcagaccaagaacagcgacagaacccccctggtgagcgtgctgctggagggccccccccacagcggcaagaccgccctggccgccaagatcgccgaggagagcaacttccccttcatcaagatctgcagccccgacaagatgatcggcttcagcgagaccgccaagtgccaggccatgaagaagatcttcgacgacgcctacaagagccagctgagctgcgtggtggtggacgacatcgagagactgctggactacgtgcccatcggccccagattcagcaacctggtgctgcaggccctgctggtgctgctgaagaaggcccccccccagggcagaaagctgctgatcatcggcaccaccagcagaaaggacgtgctgcaggagatggagatgctgaacgccttcagcaccaccatccacgtgcccaacatcgccaccggcgagcagctgctggaggccctggagctgctgggcaacttcaaggacaaggagagaaccaccatcgcccagcaggtgaagggcaagaaggtgtggatcggcatcaagaagctgctgatgctgatcgagatgagcctgcagatggaccccgagtacagagtgagaaagttcctggccctgctgagagaggagggcgccagccccctggacttcgactag

SEQ ID NO: 90611 - DNA, 888 bp, synthetic construct
  misc_feature 1..888: note = Description of Artificial Sequence: Synthetic coding sequence
  source 1..888: mol_type = other DNA
atggacaacagcggcaaggaggccgaggccatggccctgctggccgaggccgagagaaaggtgaagaacagccagagcttcttcagcggcctgttcggcggcagcagcaagatcgaggaggcctgcgagatctacgccagagccgccaacatgttcaagatggccaagaactggagcgccgccggcaacgccttctgccaggccgcccagctgcacctgcagctgcagagcaagcacgacgccgccacctgcttcgtggacgccggcaacgccttcaagaaggccgacccccaggaggccatcaactgcctgatgagagccatcgagatctacaccgacatgggcagattcaccatcgccgccaagcaccacatcagcatcgccgagatctacgagaccgagctggtggacatcgagaaggccatcgcccactacgagcagagcgccgactactacaagggcgaggagagcaacagcagcgccaacaagtgcctgctgaaggtggccggctacgccgccctgctggagcagtaccagaaggccatcgacatctacgagcaggtgggcaccaacgccatggacagccccctgctgaagtacagcgccaaggactacttcttcaaggccgccctgtgccacttctgcatcgacatgctgaacgccaagctggccgtgcagaagtacgaggagctgttccccgccttcagcgacagcagagagtgcaagctgatgaagaagctgctggaggcccacgaggagcagaacgtggacagctacaccgagagcgtgaaggagtacgacagcatcagcagactggaccagtggctgaccaccatgctgctgagaatcaagaagaccatccagggcgacgaggaggacctgagatag

SEQ ID NO: 90612 - DNA, 897 bp, synthetic construct
  misc_feature 1..897: note = Description of Artificial Sequence: Synthetic coding sequence
  source 1..897: mol_type = other DNA
atggacaacgccggcaaggagagagaggccgtgcagctgatggccgaggccgagaagagagtgaaggccagccacagcttcctgagaggcctgttcggcggcaacaccagaatcgaggaggcctgcgagatgtacaccagagccgccaacatgttcaagatggccaagaactggagcgccgccggcaacgccttctgccaggccgccaagctgcacatgcagctgcagagcaagcacgacagcgccaccagcttcgtggacgccggcaacgcctacaagaaggccgacccccaggaggccatcaactgcctgaacgccgccatcgacatctacaccgacatgggcagattcaccatcgccgccaagcaccacatcaccatcgccgagatctacgagaccgagctggtggacatcgagaaggccatcgcccactacgagcagagcgccgactactacaagggcgaggagagcaacagcagcgccaacaagtgcctgctgaaggtggccgcctacgccgcccagctggagcagtaccagaaggccatcgagatctacgagcaggtgggcgccaacaccatggacaaccccctgctgaagtacagcgccaaggactacttcttcaaggccgccctgtgccacttcatcgtggacgagctgaacgccaagctggccctggagaagtacgaggagatgttccccgccttcaccgacagcagagagtgcaagctgctgaagaagctgctggaggcccacgaggagcagaacagcgaggcctacaccgaggccgtgaaggagttcgacagcatcagcagactggaccagtggctgaccaccatgctgctgagaatcaagaagagcatccagggcgacggcgagggcgacggcgacctgaagtag

SEQ ID NO: 90613 - DNA, 615 bp, synthetic construct
  misc_feature 1..615: note = Description of Artificial Sequence: Synthetic coding sequence
  source 1..615: mol_type = other DNA
atgaccctgctgcccgccctgtggatgctggagatgctgaccaagagacagatccccaagggcagattcaccatcgccgccaagcaccacatcaccatcgccgagatctacgagaccgagctggtggacatcgagaaggccatcgcccactacgagcagagcgccgactactacaagggcgaggagagcaacagcagcgccaacaagtgcctgctgaaggtggccgcctacgccgcccagctggagcagtaccagaaggccatcgagatctacgagcaggtgggcgccaacaccatggacaaccccctgctgaagtacagcgccaaggactacttcttcaaggccgccctgtgccacttcatcgtggacgagctgaacgccaagctggccctggagaagtacgaggagatgttccccgccttcaccgacagcagagagtgcaagctgctgaagaagctgctggaggcccacgaggagcagaacagcgaggcctacaccgaggccgtgaaggagttcgacagcatcagcagactggaccagtggctgaccaccatgctgctgagaatcaagaagagcatccagggcgacggcgagggcgacggcgacctgaagtag

SEQ ID NO: 90614 - DNA, 768 bp, synthetic construct
  misc_feature 1..768: note = Description of Artificial Sequence: Synthetic coding sequence
  source 1..768: mol_type = other DNA
atgtacaccagagccgccaacatgttcaagatggccaagaactggagcgccgccggcaacgccttctgccaggccgccaagctgcacatgcagctgcagagcaagcacgacagcgccaccagcttcgtggacgccggcaacgcctacaagaaggccgacccccaggaggccatcaactgcctgaacgccgccatcgacatctacaccgacatgggcagattcaccatcgccgccaagcaccacatcaccatcgccgagatctacgagaccgagctggtggacatcgagaaggccatcgcccactacgagcagagcgccgactactacaagggcgaggagagcaacagcagcgccaacaagtgcctgctgaaggtggccgcctacgccgcccagctggagcagtaccagaaggccatcgagatctacgagcaggtgggcgccaacaccatggacaaccccctgctgaagtacagcgccaaggactacttcttcaaggccgccctgtgccacttcatcgtggacgagctgaacgccaagctggccctggagaagtacgaggagatgttccccgccttcaccgacagcagagagtgcaagctgctgaagaagctgctggaggcccacgaggagcagaacagcgaggcctacaccgaggccgtgaaggagttcgacagcatcagcagactggaccagtggctgaccaccatgctgctgagaatcaagaagagcatccagggcgacggcgagggcgacggcgacctgaagtag

SEQ ID NO: 90615 - DNA, 780 bp, synthetic construct
  misc_feature 1..780: note = Description of Artificial Sequence: Synthetic coding sequence
  source 1..780: mol_type = other DNA
atggacaacgccggcaaggagagagaggccgtgcagctgatggccgaggccgagaagagagtgaaggccagccacagcttcctgagaggcctgttcggcggcaacaccagaatcgaggaggcctgcgagatgtacaccagagccgccaacatgttcaagatggccaagaactggagcgaggccatcaactgcctgaacgccgccatcgacatctacaccgacatgggcagattcaccatcgccgccaagcaccacatcaccatcgccgagatctacgagaccgagctggtggacatcgagaaggccatcgcccactacgagcagagcgccgactactacaagggcgaggagagcaacagcagcgccaacaagtgcctgctgaaggtggccgcctacgccgcccagctggagcagtaccagaaggccatcgagatctacgagcaggtgggcgccaacaccatggacaaccccctgctgaagtacagcgccaaggactacttcttcaaggccgccctgtgccacttcatcgtggacgagctgaacgccaagctggccctggagaagtacgaggagatgttccccgccttcaccgacagcagagagtgcaagctgctgaagaagctgctggaggcccacgaggagcagaacagcgaggcctacaccgaggccgtgaaggagttcgacagcatcagcagactggaccagtggctgaccaccatgctgctgagaatcaagaagagcatccagggcgacggcgagggcgacggcgacctgaagtag

SEQ ID NO: 90616 - DNA, 1887 bp, synthetic construct
  misc_feature 1..1887: note = Description of Artificial Sequence: Synthetic coding sequence
  source 1..1887: mol_type = other DNA
atgggcagctgcgccagactgctgctgctgtggggctgcaccgtggtggccgccggcctgagcggcgtggccggcgtgagcagcagatgcgagaaggcctgcaaccccagaatgggcaacctggccctgggcagaaagctgtgggccgacaccacctgcggccagaacgccaccgagctgtactgcttctacagcgagaacaccgacctgacctgcagacagcccaagtgcgacaagtgcaacgccgcctacccccacctggcccacctgcccagcgccatggccgacagcagcttcagattccccagaacctggtggcagagcgccgaggacgtgcacagagagaagatccagctggacctggaggccgagttctacttcacccacctgatcgtgatgttcaagagccccagacccgccgccatggtgctggacagaagccaggacttcggcaagacctggaagccctacaagtacttcgccaccaactgcagcgccaccttcggcctggaggacgacgtggtgaagaagggcgccatctgcaccagcaagtacagcagccccttcccctgcaccggcggcgaggtgatcttcaaggccctgagccccccctacgacaccgagaacccctacagcgccaaggtgcaggagcagctgaagatcaccaacctgagagtgcagctgctgaagagacagagctgcccctgccagagaaacgacctgaacgaggagccccagcacttcacccactacgccatctacgacttcatcgtgaagggcagctgcttctgcaacggccacgccgaccagtgcatccccgtgcacggcttcagacccgtgaaggcccccggcaccttccacatggtgcacggcaagtgcatgtgcaagcacaacaccgccggcagccactgccagcactgcgcccccctgtacaacgacagaccctgggaggccgccgacggcaagaccggcgcccccaacgagtgcagaacctgcaagtgcaacggccacgccgacacctgccacttcgacgtgaacgtgtgggaggccagcggcaacagaagcggcggcgtgtgcgacgactgccagcacaacaccgagggccagtactgccagagatgcaagcccggcttctacagagacctgagaagacccttcagcgcccccgacgcctgcaagccctgcagctgccaccccgtgggcagcgccgtgctgcccgccaacagcgtgaccttctgcgaccccagcaacggcgactgcccctgcaagcccggcgtggccggcagaagatgcgacagatgcatggtgggctactggggcttcggcgactacggctgcagaccctgcgactgcgccggcagctgcgaccccatcaccggcgactgcatcagcagccacaccgacatcgactggtaccacgaggtgcccgacttcagacccgtgcacaacaagagcgagcccgcctgggagtgggaggacgcccagggcttcagcgccctgctgcacagcggcaagtgcgagtgcaaggagcagaccctgggcaacgccaaggccttctgcggcatgaagtacagctacgtgctgaagatcaagatcctgagcgcccacgacaagggcacccacgtggaggtgaacgtgaagatcaagaaggtgctgaagagcaccaagctgaagatcttcagaggcaagagaaccctgtaccccgagagctggaccgacagaggctgcacctgccccatcctgaaccccggcctggagtacctggtggccggccacgaggacatcagaaccggcaagctgatcgtgaacatgaagagcttcgtgcagcactggaagcccagcctgggcagaaaggtgatggacatcctgaagagagagtgcaagtag

SEQ ID NO: 90617 - DNA, 1776 bp, synthetic construct
  misc_feature 1..1776: note = Description of Artificial Sequence: Synthetic coding sequence
  source 1..1776: mol_type = other DNA
atgggcaacctggccctgggcagaaagctgtgggccgacaccacctgcggccagaacgccaccgagctgtactgcttctacagcgagaacaccgacctgacctgcagacagcccaagtgcgacaagtgcaacgccgcctacccccacctggcccacctgcccagcgccatggccgacagcagcttcagattccccagaacctggtggcagagcgccgaggacgtgcacagagagaagatccagctggacctggaggccgagttctacttcacccacctgatcgtgatgttcaagagccccagacccgccgccatggtgctggacagaagccaggacttcggcaagacctggaagccctacaagtacttcgccaccaactgcagcgccaccttcggcctggaggacgacgtggtgaagaagggcgccatctgcaccagcaagtacagcagccccttcccctgcaccggcggcgaggtgatcttcaaggccctgagccccccctacgacaccgagaacccctacagcgccaaggtgcaggagcagctgaagatcaccaacctgagagtgcagctgctgaagagacagagctgcccctgccagagaaacgacctgaacgaggagccccagcacttcacccactacgccatctacgacttcatcgtgaagggcagctgcttctgcaacggccacgccgaccagtgcatccccgtgcacggcttcagacccgtgaaggcccccggcaccttccacatggtgcacggcaagtgcatgtgcaagcacaacaccgccggcagccactgccagcactgcgcccccctgtacaacgacagaccctgggaggccgccgacggcaagaccggcgcccccaacgagtgcagaacctgcaagtgcaacggccacgccgacacctgccacttcgacgtgaacgtgtgggaggccagcggcaacagaagcggcggcgtgtgcgacgactgccagcacaacaccgagggccagtactgccagagatgcaagcccggcttctacagagacctgagaagacccttcagcgcccccgacgcctgcaagccctgcagctgccaccccgtgggcagcgccgtgctgcccgccaacagcgtgaccttctgcgaccccagcaacggcgactgcccctgcaagcccggcgtggccggcagaagatgcgacagatgcatggtgggctactggggcttcggcgactacggctgcagaccctgcgactgcgccggcagctgcgaccccatcaccggcgactgcatcagcagccacaccgacatcgactggtaccacgaggtgcccgacttcagacccgtgcacaacaagagcgagcccgcctgggagtgggaggacgcccagggcttcagcgccctgctgcacagcggcaagtgcgagtgcaaggagcagaccctgggcaacgccaaggccttctgcggcatgaagtacagctacgtgctgaagatcaagatcctgagcgcccacgacaagggcacccacgtggaggtgaacgtgaagatcaagaaggtgctgaagagcaccaagctgaagatcttcagaggcaagagaaccctgtaccccgagagctggaccgacagaggctgcacctgccccatcctgaaccccggcctggagtacctggtggccggccacgaggacatcagaaccggcaagctgatcgtgaacatgaagagcttcgtgcagcactggaagcccagcctgggcagaaaggtgatggacatcctgaagagagagtgcaagtag

SEQ ID NO: 90618 - DNA, 1818 bp, synthetic construct
  misc_feature 1..1818: note = Description of Artificial Sequence: Synthetic coding sequence
  source 1..1818: mol_type = other DNA
atgggcagctgcgccagactgctgctgctgtggggctgcaccgtggtggccgccggcctgagcggcgtggccggcgtgagcagcagatgcgagaaggcctgcaaccccagaatgggcaacctggccctgggcagaaagctgtgggccgacaccacctgcggccagaacgccaccgagctgtactgcttctacagcgagaacaccgacctgacctgcagacagcccaagtgcgacaagtgcaacgccgcctacccccacctggcccacctgcccagcgccatggccgacagcagcttcagattccccagaacctggtggcagagcgccgaggacgtgcacagagagaagatccagctggacctggaggccgagttctacttcacccacctgatcgtgatgttcaagagccccagacccgccgccatggtgctggacagaagccaggacttcggcaagacctggaagccctacaagtacttcgccaccaactgcagcgccaccttcggcctggaggacgacgtggtgaagaagggcgccatctgcaccagcaagtacagcagccccttcccctgcaccggcggcgaggtgatcttcaaggccctgagccccccctacgacaccgagaacccctacagcgccaaggtgcaggagcagctgaagatcaccaacctgagagtgcagctgctgaagagacagagctgcccctgccagagaaacgacctgaacgaggagccccagcacttcacccactacgccatctacgacttcatcgtgaagggcagctgcttctgcaacggccacgccgaccagtgcatccccgtgcacggcttcagacccgtgaaggcccccggcaccttccacatggtgcacggcaagtgcatgtgcaagcacaacaccgccggcagccactgccagcactgcgcccccctgtacaacgacagaccctgggaggccgccgacggcaagaccggcgcccccaacgagtgcagaacctgcaagtgcaacggccacgccgacacctgccacttcgacgtgaacgtgtgggaggccagcggcaacagaagcggcggcgtgtgcgacgactgccagcacaacaccgagggccagtactgccagagatgcaagcccggcttctacagagacctgagaagacccttcagcgcccccgacgcctgcaagccctgcagctgccaccccgtgggcagcgccgtgctgcccgccaacagcgtgaccttctgcgaccccagcaacggcgactgcccctgcaagcccggcgtggccggcagaagatgcgacagatgcatggtgggctactggggcttcggcgactacggctgcagaccctgcgactgcgccggcagctgcgaccccatcaccggcgactgcatcagcagccacaccgacatcgactggtaccacgaggtgcccgacttcagacccgtgcacaacaagagcgagcccgcctgggagtgggaggacgcccagggcttcagcgccctgctgcacagcgtgctgaagatcaagatcctgagcgcccacgacaagggcacccacgtggaggtgaacgtgaagatcaagaaggtgctgaagagcaccaagctgaagatcttcagaggcaagagaaccctgtaccccgagagctggaccgacagaggctgcacctgccccatcctgaaccccggcctggagtacctggtggccggccacgaggacatcagaaccggcaagctgatcgtgaacatgaagagcttcgtgcagcactggaagcccagcctgggcagaaaggtgatggacatcctgaagagagagtgcaagtag

SEQ ID NO: 90619 - DNA, 1095 bp, synthetic construct
  misc_feature 1..1095: note = Description of Artificial Sequence: Synthetic coding sequence
  source 1..1095: mol_type = other DNA
atgtacctgagcagattcctgagcatccacgccctgtgggtgaccgtgagcagcgtgatgcagccctaccccctggtgtggggccactacgacctgtgcaagacccagatctacaccgaggagggcaaggtgtgggactacatggcctgccagcccgagagcaccgacatgaccaagtacctgaaggtgaagctggacccccccgacatcacctgcggcgacccccccgagaccttctgcgccatgggcaacccctacatgtgcaacaacgagtgcgacgccagcacccccgagctggcccacccccccgagctgatgttcgacttcgagggcagacaccccagcaccttctggcagagcgccacctggaaggagtaccccaagcccctgcaggtgaacatcaccctgagctggagcaagaccatcgagctgaccgacaacatcgtgatcaccttcgagagcggcagacccgaccagatgatcctggagaagagcctggactacggcagaacctggcagccctaccagtactacgccaccgactgcctggacgccttccacatggaccccaagagcgtgaaggacctgagccagcacaccgtgctggagatcatctgcaccgaggagtacagcaccggctacaccaccaacagcaagatcatccacttcgagatcaaggacagattcgccttcttcgccggccccagactgagaaacatggccagcctgtacggccagctggacaccaccaagaagctgagagacttcttcaccgtgaccgacctgagaatcagactgctgagacccgccgtgggcgagatcttcgtggacgagctgcacctggccagatacttctacgccatcagcgacatcaaggtgagaggcagatgcaagtgcaacctgcacgccaccgtgtgcgtgtacgacaacagcaagctgacctgcgagtgcgagcacaacaccaccggccccgactgcggcaagtgcaagaagaactaccagggcagaccctggagccccggcagctacctgcccatccccaagggcaccgccaacacctgcatccccagcatcagcagcatcggcagcaagtag

SEQ ID NO: 90620 - DNA, 1518 bp, synthetic construct
  misc_feature 1..1518: note = Description of Artificial Sequence: Synthetic coding sequence
  source 1..1518: mol_type = other DNA
atgtacctgagcagattcctgagcatccacgccctgtgggtgaccgtgagcagcgtgatgcagccctaccccctggtgtggggccactacgacctgtgcaagacccagatctacaccgaggagggcaaggtgtgggactacatggcctgccagcccgagagcaccgacatgaccaagtacctgaaggtgaagctggacccccccgacatcacctgcggcgacccccccgagaccttctgcgccatgggcaacccctacatgtgcaacaacgagtgcgacgccagcacccccgagctggcccacccccccgagctgatgttcgacttcgagggcagacaccccagcaccttctggcagagcgccacctggaaggagtaccccaagcccctgcaggtgaacatcaccctgagctggagcaagaccatcgagctgaccgacaacatcgtgatcaccttcgagagcggcagacccgaccagatgatcctggagaagagcctggactacggcagaacctggcagccctaccagtactacgccaccgactgcctggacgccttccacatggaccccaagagcgtgaaggacctgagccagcacaccgtgctggagatcatctgcaccgaggagtacagcaccggctacaccaccaacagcaagatcatccacttcgagatcaaggacagattcgccttcttcgccggccccagactgagaaacatggccagcctgtacggccagctggacaccaccaagaagctgagagacttcttcaccgtgaccgacctgagaatcagactgctgagacccgccgtgggcgagatcttcgtggacgagctgcacctggccagatacttctacgccatcagcgacatcaaggtgagaggcagatgcaagtgcaacctgcacgccaccgtgtgcgtgtacgacaacagcaagctgacctgcgagtgcgagcacaacaccaccggccccgactgcggcaagtgcaagaagaactaccagggcagaccctggagccccggcagctacctgcccatccccaagggcaccgccaacacctgcatccccagcatcagcagcatcggcaacccccccaagttcaacagaatctggcccaacatcagcagcctggaggtgagcaaccccaagcaggagtgctactgcaaccccctgggcagcatccacgacagatgcaacggcagcggcttctgcgagtgcaagaccggcaccaccggccccaagtgcgacgagtgcctgcccggcaacagctggcactacggctgccagcccaacgtgtgcgacaacgagctgctgcactgccagaacggcggcacctgccacaacaacgtgagatgcctgtgccccgccgcctacaccggcatcctgtgcgagaagctgagatgcgaggaggccggcagctgcggcagcgacagcggccagggcgcccccccccacggcagccccgccctgctgctgctgaccaccctgctgggcaccgccagccccctggtgttctag

SEQ ID NO: 90621 - DNA, 861 bp, synthetic construct
  misc_feature 1..861: note = Description of Artificial Sequence: Synthetic coding sequence
  source 1..861: mol_type = other DNA
atggccagcctgtacggccagctggacaccaccaagaagctgagagacttcttcaccgtgaccgacctgagaatcagactgctgagacccgccgtgggcgagatcttcgtggacgagctgcacctggccagatacttctacgccatcagcgacatcaaggtgagaggcagatgcaagtgcaacctgcacgccaccgtgtgcgtgtacgacaacagcaagctgacctgcgagtgcgagcacaacaccaccggccccgactgcggcaagtgcaagaagaactaccagggcagaccctggagccccggcagctacctgcccatccccaagggcaccgccaacacctgcatccccagcatcagcagcatcggcaacccccccaagttcaacagaatctggcccaacatcagcagcctggaggtgagcaaccccaagcaggtggcccccaagctggccctgagcaccgtgagcagcgtgcaggtggccaaccacaagagagagtgctactgcaaccccctgggcagcatccacgacagatgcaacggcagcggcttctgcgagtgcaagaccggcaccaccggccccaagtgcgacgagtgcctgcccggcaacagctggcactacggctgccagcccaacgtgtgcgacaacgagctgctgcactgccagaacggcggcacctgccacaacaacgtgagatgcctgtgccccgccgcctacaccggcatcctgtgcgagaagctgagatgcgaggaggccggcagctgcggcagcgacagcggccagggcgcccccccccacggcagccccgccctgctgctgctgaccaccctgctgggcaccgccagccccctggtgttctag

SEQ ID NO: 90622 - DNA, 1029 bp, synthetic construct
  misc_feature 1..1029: note = Description of Artificial Sequence: Synthetic coding sequence
  source 1..1029: mol_type = other DNA
atggccagcctgtacggccagctggacaccaccaagaagctgagagacttcttcaccgtgaccgacctgagaatcagactgctgagacccgccgtgggcgagatcttcgtggacgagctgcacctggccagatacttctacgccatcagcgacatcaaggtgagaggcagatgcaagtgcaacctgcacgccaccgtgtgcgtgtacgacaacagcaagctgacctgcgagtgcgagcacaacaccaccggccccgactgcggcaagtgcaagaagaactaccagggcagaccctggagccccggcagctacctgcccatccccaagggcaccgccaacacctgcatccccagcatcagcagcatcggcaacccccccaagttcaacagaatctggcccaacatcagcagcctggaggtgagcaaccccaagcaggtggcccccaagctggccctgagcaccgtgagcagcgtgcaggtggccaaccacaagagagactgcgagtgcttcggccacagcaacagatgcagctacatcgacctgctgaacaccgtgatctgcgtgagctgcaagcacaacaccagaggccagcactgcgagctgtgcagactgggctacttcagaaacgccagcgcccagctggacgacgagaacgtgtgcatcgagtgctactgcaaccccctgggcagcatccacgacagatgcaacggcagcggcttctgcgagtgcaagaccggcaccaccggccccaagtgcgacgagtgcctgcccggcaacagctggcactacggctgccagcccaacgtgtgcgacaacgagctgctgcactgccagaacggcggcacctgccacaacaacgtgagatgcctgtgccccgccgcctacaccggcatcctgtgcgagaagctgagatgcgaggaggccggcagctgcggcagcgacagcggccagggcgcccccccccacggcagccccgccctgctgctgctgaccaccctgctgggcaccgccagccccctggtgttctag

SEQ ID NO: 90623 - DNA, 1485 bp, synthetic construct
  misc_feature 1..1485: note = Description of Artificial Sequence: Synthetic coding sequence
  source 1..1485: mol_type = other DNA
atgtacctgagcagattcctgagcatccacgccctgtgggtgaccgtgagcagcgtgatgcagccctaccccctggtgtggggccactacgacctgtgcaagacccagatctacaccgaggagggcaaggtgtgggactacatggcctgccagcccgagagcaccgacatgaccaagtacctgaaggtgaagctggacccccccgacatcacctgcggcgacccccccgagaccttctgcgccatgggcaacccctacatgtgcaacaacgagtgcgacgccagcacccccgagctggcccacccccccgagctgatgttcgacttcgagggcagacaccccagcaccttctggcagagcgccacctggaaggagtaccccaagcccctgcaggtgaacatcaccctgagctggagcaagaccatcgagctgaccgacaacatcgtgatcaccttcgagagcggcagacccgaccagatgatcctggagaagagcctggactacggcagaacctggcagccctaccagtactacgccaccgactgcctggacgccttccacatggaccccaagagcgtgaaggacctgagccagcacaccgtgctggagatcatctgcaccgaggagtacagcaccggctacaccaccaacagcaagatcatccacttcgagatcaaggacagattcgccttcttcgccggccccagactgagaaacatggccagcctgtacggccagctggacaccaccaagaagctgagagacttcttcaccgtgaccgacctgagaatcagactgctgagacccgccgtgggcgagatcttcgtggacgagctgcacctggccagatacttctacgccatcagcgacatcaaggtgagaggcagatgcaagtgcaacctgcacgccaccgtgtgcgtgtacgacaacagcaagctgacctgcgagtgcgagcacaacaccaccggccccgactgcggcaagtgcaagaagaactaccagggcagaccctggagccccggcagctacctgcccatccccaagggcaccgccaacacctgcatccccagcatcagcagcatcggcaactgcgagtgcttcggccacagcaacagatgcagctacatcgacctgctgaacaccgtgatctgcgtgagctgcaagcacaacaccagaggccagcactgcgagctgtgcagactgggctacttcagaaacgccagcgcccagctggacgacgagaacgtgtgcatcgccaacgtgtgcgacaacgagctgctgcactgccagaacggcggcacctgccacaacaacgtgagatgcctgtgccccgccgcctacaccggcatcctgtgcgagaagctgagatgcgaggaggccggcagctgcggcagcgacagcggccagggcgcccccccccacggcagccccgccctgctgctgctgaccaccctgctgggcaccgccagccccctggtgttctag

SEQ ID NO: 90624 - DNA, 1443 bp, synthetic construct
  misc_feature 1..1443: note = Description of Artificial Sequence: Synthetic coding sequence
  source 1..1443: mol_type = other DNA
atgtacctgagcagattcctgagcatccacgccctgtgggtgaccgtgagcagcgtgatgcagccctaccccctggtgtggggccactacgacctgtgcaagacccagatctacaccgaggagggcaaggtgtgggactacatggcctgccagcccgagagcaccgacatgaccaagtacctgaaggtgaagctggacccccccgacatcacctgcggcgacccccccgagaccttctgcgccatgggcaacccctacatgtgcaacaacgagtgcgacgccagcacccccgagctggcccacccccccgagctgatgttcgacttcgagggcagacaccccagcaccttctggcagagcgccacctggaaggagtaccccaagcccctgcaggtgaacatcaccctgagctggagcaagaccatcgagctgaccgacaacatcgtgatcaccttcgagagcggcagacccgaccagatgatcctggagaagagcctggactacggcagaacctggcagccctaccagtactacgccaccgactgcctggacgccttccacatggaccccaagagcgtgaaggacctgagccagcacaccgtgctggagatcatctgcaccgaggagtacagcaccggctacaccaccaacagcaagatcatccacttcgagatcaaggacagattcgccttcttcgccggccccagactgagaaacatggccagcctgtacggccagctggacaccaccaagaagctgagagacttcttcaccgtgaccgacctgagaatcagactgctgagacccgccgtgggcgagatcttcgtggacgagctgcacctggccagatacttctacgccatcagcgacatcaaggtgagaggcagatgcaagtgcaacctgcacgccaccgtgtgcgtgtacgacaacagcaagctgacctgcgagtgcgagcacaacaccaccggccccgactgcggcaagtgcaagaagaactaccagggcagaccctggagccccggcagctacctgcccatccccaagggcaccgccaacacctgcatccccagcatcagcagcatcggcaacccccccaagttcaacagaatctggcccaacatcagcagcctggaggtgagcaaccccaagcaggtggcccccaagctggccctgagcaccgtgagcagcgtgcaggtggccaaccacaagagagccaacgtgtgcgacaacgagctgctgcactgccagaacggcggcacctgccacaacaacgtgagatgcctgtgccccgccgcctacaccggcatcctgtgcgagaagctgagatgcgaggaggccggcagctgcggcagcgacagcggccagggcgcccccccccacggcagccccgccctgctgctgctgaccaccctgctgggcaccgccagccccctggtgttctag

SEQ ID NO: 90625 - DNA, 1383 bp, synthetic construct
  misc_feature 1..1383: note = Description of Artificial Sequence: Synthetic coding sequence
  source 1..1383: mol_type = other DNA
atgtacctgagcagattcctgagcatccacgccctgtgggtgaccgtgagcagcgtgatgcagccctaccccctggtgtggggccactacgacctgtgcaagacccagatctacaccgaggagggcaaggtgtgggactacatggcctgccagcccgagagcaccgacatgaccaagtacctgaaggtgaagctggacccccccgacatcacctgcggcgacccccccgagaccttctgcgccatgggcaacccctacatgtgcaacaacgagtgcgacgccagcacccccgagctggcccacccccccgagctgatgttcgacttcgagggcagacaccccagcaccttctggcagagcgccacctggaaggagtaccccaagcccctgcaggtgaacatcaccctgagctggagcaagaccatcgagctgaccgacaacatcgtgatcaccttcgagagcggcagacccgaccagatgatcctggagaagagcctggactacggcagaacctggcagccctaccagtactacgccaccgactgcctggacgccttccacatggaccccaagagcgtgaaggacctgagccagcacaccgtgctggagatcatctgcaccgaggagtacagcaccggctacaccaccaacagcaagatcatccacttcgagatcaaggacagattcgccttcttcgccggccccagactgagaaacatggccagcctgtacggccagctggacaccaccaagaagctgagagacttcttcaccgtgaccgacctgagaatcagactgctgagacccgccgtgggcgagatcttcgtggacgagctgcacctggccagatacttctacgccatcagcgacatcaaggtgagaggcagatgcaagtgcaacctgcacgccaccgtgtgcgtgtacgacaacagcaagctgacctgcgagtgcgagcacaacaccaccggccccgactgcggcaagtgcaagaagaactaccagggcagaccctggagccccggcagctacctgcccatccccaagggcaccgccaacacctgcatccccagcatcagcagcatcggcaacccccccaagttcaacagaatctggcccaacatcagcagcctggaggtgagcaaccccaagcaggccaacgtgtgcgacaacgagctgctgcactgccagaacggcggcacctgccacaacaacgtgagatgcctgtgccccgccgcctacaccggcatcctgtgcgagaagctgagatgcgaggaggccggcagctgcggcagcgacagcggccagggcgcccccccccacggcagccccgccctgctgctgctgaccaccctgctgggcaccgccagccccctggtgttctag

SEQ ID NO: 90626 - DNA, 1620 bp, synthetic construct
  misc_feature 1..1620: note = Description of Artificial Sequence: Synthetic coding sequence
  source 1..1620: mol_type = other DNA
atgtacctgagcagattcctgagcatccacgccctgtgggtgaccgtgagcagcgtgatgcagccctaccccctggtgtggggccactacgacctgtgcaagacccagatctacaccgaggagggcaaggtgtgggactacatggcctgccagcccgagagcaccgacatgaccaagtacctgaaggtgaagctggacccccccgacatcacctgcggcgacccccccgagaccttctgcgccatgggcaacccctacatgtgcaacaacgagtgcgacgccagcacccccgagctggcccacccccccgagctgatgttcgacttcgagggcagacaccccagcaccttctggcagagcgccacctggaaggagtaccccaagcccctgcaggtgaacatcaccctgagctggagcaagaccatcgagctgaccgacaacatcgtgatcaccttcgagagcggcagacccgaccagatgatcctggagaagagcctggactacggcagaacctggcagccctaccagtactacgccaccgactgcctggacgccttccacatggaccccaagagcgtgaaggacctgagccagcacaccgtgctggagatcatctgcaccgaggagtacagcaccggctacaccaccaacagcaagatcatccacttcgagatcaaggacagattcgccttcttcgccggccccagactgagaaacatggccagcctgtacggccagctggacaccaccaagaagctgagagacttcttcaccgtgaccgacctgagaatcagactgctgagacccgccgtgggcgagatcttcgtggacgagctgcacctggccagatacttctacgccatcagcgacatcaaggtgagaggcagatgcaagtgcaacctgcacgccaccgtgtgcgtgtacgacaacagcaagctgacctgcgagtgcgagcacaacaccaccggccccgactgcggcaagtgcaagaagaactaccagggcagaccctggagccccggcagctacctgcccatccccaagggcaccgccaacacctgcatccccagcatcagcagcatcggcaactgcgagtgcttcggccacagcaacagatgcagctacatcgacctgctgaacaccgtgatctgcgtgagctgcaagcacaacaccagaggccagcactgcgagctgtgcagactgggctacttcagaaacgccagcgcccagctggacgacgagaacgtgtgcatcgagtgctactgcaaccccctgggcagcatccacgacagatgcaacggcagcggcttctgcgagtgcaagaccggcaccaccggccccaagtgcgacgagtgcctgcccggcaacagctggcactacggctgccagcccaacgtgtgcgacaacgagctgctgcactgccagaacggcggcacctgccacaacaacgtgagatgcctgtgccccgccgcctacaccggcatcctgtgcgagaagctgagatgcgaggaggccggcagctgcggcagcgacagcggccagggcgcccccccccacggcagccccgccctgctgctgctgaccaccctgctgggcaccgccagccccctggtgttctag

SEQ ID NO: 90627 - DNA, 1383 bp, synthetic construct
  misc_feature 1..1383: note = Description of Artificial Sequence: Synthetic coding sequence
  source 1..1383: mol_type = other DNA
atgtacctgagcagattcctgagcatccacgccctgtgggtgaccgtgagcagcgtgatgcagccctaccccctggtgtggggccactacgacctgtgcaagacccagatctacaccgaggagggcaaggtgtgggactacatggcctgccagcccgagagcaccgacatgaccaagtacctgaaggtgaagctggacccccccgacatcacctgcggcgacccccccgagaccttctgcgccatgggcaacccctacatgtgcaacaacgagtgcgacgccagcacccccgagctggcccacccccccgagctgatgttcgacttcgagggcagacaccccagcaccttctggcagagcgccacctggaaggagtaccccaagcccctgcaggtgaacatcaccctgagctggagcaagaccatcgagctgaccgacaacatcgtgatcaccttcgagagcggcagacccgaccagatgatcctggagaagagcctggactacggcagaacctggcagccctaccagtactacgccaccgactgcctggacgccttccacatggaccccaagagcgtgaaggacctgagccagcacaccgtgctggagatcatctgcaccgaggagtacagcaccggctacaccaccaacagcaagatcatccacttcgagatcaaggacagattcgccttcttcgccggccccagactgagaaacatggccagcctgtacggccagctggacaccaccaagaagctgagagacttcttcaccgtgaccgacctgagaatcagactgctgagacccgccgtgggcgagatcttcgtggacgagctgcacctggccagatacttctacgccatcagcgacatcaaggtgagaggcagatgcaagtgcaacctgcacgccaccgtgtgcgtgtacgacaacagcaagctgacctgcgagtgcgagcacaacaccaccggccccgactgcggcaagtgcaagaagaactaccagggcagaccctggagccccggcagctacctgcccatccccaagggcaccgccaacacctgcgacccctacctgaccagctgcggcgacccccccaagttcaacagaatctggcccaacatcagcagcctggaggtgagcaaccccaagcaggccaacgtgtgcgacaacgagctgctgcactgccagaacggcggcacctgccacaacaacgtgagatgcctgtgccccgccgcctacaccggcatcctgtgcgagaagctgagatgcgaggaggccggcagctgcggcagcgacagcggccagggcgcccccccccacggcagccccgccctgctgctgctgaccaccctgctgggcaccgccagccccctggtgttctag

SEQ ID NO: 90628 - DNA, 1443 bp, synthetic construct; identical to SEQ ID NO: 90624
  misc_feature 1..1443: note = Description of Artificial Sequence: Synthetic coding sequence
  source 1..1443: mol_type = other DNA

SEQ ID NO: 90629 - DNA, 1485 bp, synthetic construct
  misc_feature 1..1485: note = Description of Artificial Sequence: Synthetic coding sequence
  source 1..1485: mol_type = other DNA
atgtacctgagcagattcctgagcatccacgccctgtgggtgaccgtgagcagcgtgatgcagccctaccccctggtgtggggccactacgacctgtgcaagacccagatctacaccgaggagggcaaggtgtgggactacatggcctgccagcccgagagcaccgacatgaccaagtacctgaaggtgaagctggacccccccgacatcacctgcggcgacccccccgagaccttctgcgccatgggcaacccctacatgtgcaacaacgagtgcgacgccagcacccccgagctggcccacccccccgagctgatgttcgacttcgagggcagacaccccagcaccttctggcagagcgccacctggaaggagtaccccaagcccctgcaggtgaacatcaccctgagctggagcaagaccatcgagctgaccgacaacatcgtgatcaccttcgagagcggcagacccgaccagatgatcctggagaagagcctggactacggcagaacctggcagccctaccagtactacgccaccgactgcctggacgccttccacatggaccccaagagcgtgaaggacctgagccagcacaccgtgctggagatcatctgcaccgaggagtacagcaccggctacaccaccaacagcaagatcatccacttcgagatcaaggacagattcgccttcttcgccggccccagactgagaaacatggccagcctgtacggccagctggacaccaccaagaagctgagagacttcttcaccgtgaccgacctgagaatcagactgctgagacccgccgtgggcgagatcttcgtggacgagctgcacctggccagatacttctacgccatcagcgacatcaaggtgagaggcagatgcaagtgcaacctgcacgccaccgtgtgcgtgtacgacaacagcaagctgacctgcgagtgcgagcacaacaccaccggccccgactgcggcaagtgcaagaagaactaccagggcagaccctggagccccggcagctacctgcccatccccaagggcaccgccaacacctgcgacccctacctgaccagctgcggcgactgcgagtgcttcggccacagcaacagatgcagctacatcgacctgctgaacaccgtgatctgcgtgagctgcaagcacaacaccagaggccagcactgcgagctgtgcagactgggctacttcagaaacgccagcgcccagctggacgacgagaacgtgtgcatcgccaacgtgtgcgacaacgagctgctgcactgccagaacggcggcacctgccacaacaacgtgagatgcctgtgccccgccgcctacaccggcatcctgtgcgagaagctgagatgcgaggaggccggcagctgcggcagcgacagcggccagggcgcccccccccacggcagccccgccctgctgctgctgaccaccctgctgggcaccgccagccccctggtgttctag

SEQ ID NO: 90630 - DNA, 1620 bp, synthetic construct; identical to SEQ ID NO: 90626
  misc_feature 1..1620: note = Description of Artificial Sequence: Synthetic coding sequence
  source 1..1620: mol_type = other DNA

SEQ ID NO: 90631 - DNA, 1317 bp, synthetic construct
  misc_feature 1..1317: note = Description of Artificial Sequence: Synthetic coding sequence
  source 1..1317: mol_type = other DNA
atgtacctgagcagattcctgagcatccacgccctgtgggtgaccgtgagcagcgtgatgcagccctaccccctggtgtggggccactacgacctgtgcaagacccagatctacaccgaggagggcaaggtgtgggactacatggcctgccagcccgagagcaccgacatgaccaagtacctgaaggtgaagctggacccccccgacatcacctgcggcgacccccccgagaccttctgcgccatgggcaacccctacatgtgcaacaacgagtgcgacgccagcacccccgagctggcccacccccccgagctgatgttcgacttcgagggcagacaccccagcaccttctggcagagcgccacctggaaggagtaccccaagcccctgcaggtgaacatcaccctgagctggagcaagaccatcgagctgaccgacaacatcgtgatcaccttcgagagcggcagacccgaccagatgatcctggagaagagcctggactacggcagaacctggcagccctaccagtactacgccaccgactgcctggacgccttccacatggaccccaagagcgtgaaggacctgagccagcacaccgtgctggagatcatctgcaccgaggagtacagcaccggctacaccaccaacagcaagatcatccacttcgagatcaaggacagattcgccttcttcgccggccccagactgagaaacatggccagcctgtacggccagctggacaccaccaagaagctgagagacttcttcaccgtgaccgacctgagaatcagactgctgagacccgccgtgggcgagatcttcgtggacgagctgcacctggccagatacttctacgccatcagcgacatcaaggtgagaggcagatgcaagtgcaacctgcacgccaccgtgtgcgtgtacgacaacagcaagctgacctgcgagtgcgagcacaacaccaccggccccgactgcggcaagtgcaagaagaactaccagggcagaccctggagccccggcagctacctgcccatccccaagggcaccgccaacacctgcatccccagcatcagcagcatcggcaccaacgtgtgcgacaacgagctgctgcactgccagaacggcggcacctgccacaacaacgtgagatgcctgtgccccgccgcctacaccggcatcctgtgcgagaagctgagatgcgaggaggccggcagctgcggcagcgacagcggccagggcgcccccccccacggcagccccgccctgctgctgctgaccaccctgctgggcaccgccagccccctggtgttctag

SEQ ID NO: 90632 - DNA, 1095 bp, synthetic construct; identical to SEQ ID NO: 90619
  misc_feature 1..1095: note = Description of Artificial Sequence: Synthetic coding sequence
  source 1..1095: mol_type = other DNA

SEQ ID NO: 90633 - DNA, 1317 bp, synthetic construct
  misc_feature 1..1317: note = Description of Artificial Sequence: Synthetic coding sequence
  source 1..1317: mol_type = other DNA
atgtacctgagcagattcctgagcatccacgccctgtgggtgaccgtgagcagcgtgatgcagccctaccccctggtgtggggccactacgacctgtgcaagacccagatctacaccgaggagggcaaggtgtgggactacatggcctgccagcccgagagcaccgacatgaccaagtacctgaaggtgaagctggacccccccgacatcacctgcggcgacccccccgagaccttctgcgccatgggcaacccctacatgtgcaacaacgagtgcgacgccagcacccccgagctggcccacccccccgagctgatgttcgacttcgagggcagacaccccagcaccttctggcagagcgccacctggaaggagtaccccaagcccctgcaggtgaacatcaccctgagctggagcaagaccatcgagctgaccgacaacatcgtgatcaccttcgagagcggcagacccgaccagatgatcctggagaagagcctggactacggcagaacctggcagccctaccagtactacgccaccgactgcctggacgccttccacatggaccccaagagcgtgaaggacctgagccagcacaccgtgctggagatcatctgcaccgaggagtacagcaccggctacaccaccaacagcaagatcatccacttcgagatcaaggacagattcgccttcttcgccggccccagactgagaaacatggccagcctgtacggccagctggacaccaccaagaagctgagagacttcttcaccgtgaccgacctgagaatcagactgctgagacccgccgtgggcgagatcttcgtggacgagctgcacctggccagatacttctacgccatcagcgacatcaaggtgagaggcagatgcaagtgcaacctgcacgccaccgtgtgcgtgtacgacaacagcaagctgacctgcgagtgcgagcacaacaccaccggccccgactgcggcaagtgcaagaagaactaccagggcagaccctggagccccggcagctacctgcccatccccaagggcaccgccaacacctacctgcccagcatgtacagcgtggccgccaacgtgtgcgacaacgagctgctgcactgccagaacggcggcacctgccacaacaacgtgagatgcctgtgccccgccgcctacaccggcatcctgtgcgagaagctgagatgcgaggaggccggcagctgcggcagcgacagcggccagggcgcccccccccacggcagccccgccctgctgctgctgaccaccctgctgggcaccgccagccccctggtgttctag

SEQ ID NO: 90634 - DNA, 1620 bp, synthetic construct
  misc_feature 1..1620: note = Description of Artificial Sequence: Synthetic coding sequence
  source 1..1620: mol_type = other DNA
atgtacctgagcagattcctgagcatccacgccctgtgggtgaccgtgagcagcgtgatgcagccctaccccctggtgtggggccactacgacctgtgcaagacccagatctacaccgaggagggcaaggtgtgggactacatggcctgccagcccgagagcaccgacatgaccaagtacctgaaggtgaagctggacccccccgacatcacctgcggcgacccccccgagaccttctgcgccatgggcaacccctacatgtgcaacaacgagtgcgacgccagcacccccgagctggcccacccccccgagctgatgttcgacttcgagggcagacaccccagcaccttctggcagagcgccacctggaaggagtaccccaagcccctgcaggtgaacatcaccctgagctggagcaagaccatcgagctgaccgacaacatcgtgatcaccttcgagagcggcagacccgaccagatgatcctggagaagagcctggactacggcagaacctggcagccctaccagtactacgccaccgactgcctggacgccttccacatggaccccaagagcgtgaaggacctgagccagcacaccgtgctggagatcatctgcaccgaggagtacagcaccggctacaccaccaacagcaagatcatccacttcgagatcaaggacagattcgccttcttcgccggccccagactgagaaacatggccagcctgtacggccagctggacaccaccaagaagctgagagacttcttcaccgtgaccgacctgagaatcagactgctgagacccgccgtgggcgagatcttcgtggacgagctgcacctggccagatacttctacgccatcagcgacatcaaggtgagaggcagatgcaagtgcaacctgcacgccaccgtgtgcgtgtacgacaacagcaagctgacctgcgagtgcgagcacaacaccaccggccccgactgcggcaagtgcaagaagaactaccagggcagaccctggagccccggcagctacctgcccatccccaagggcaccgccaacacctgcgacccctacctgaccagctgcggcgactgcgagtgcttcggccacagcaacagatgcagctacatcgacctgctgaacaccgtgatctgcgtgagctgcaagcacaacaccagaggccagcactgcgagctgtgcagactgggctacttcagaaacgccagcgcccagctggacgacgagaacgtgtgcatcgagtgctactgcaaccccctgggcagcatccacgacagatgcaacggcagcggcttctgcgagtgcaagaccggcaccaccggccccaagtgcgacgagtgcctgcccggcaacagctggcactacggctgccagcccaacgtgtgcgacaacgagctgctgcactgccagaacggcggcacctgccacaacaacgtgagatgcctgtgccccgccgcctacaccggcatcctgtgcgagaagctgagatgcgaggaggccggcagctgcggcagcgacagcggccagggcgcccccccccacggcagccccgccctgctgctgctgaccaccctgctgggcaccgccagccccctggtgttctag

SEQ ID NO: 90635 - DNA, 519 bp, synthetic construct
  misc_feature 1..519: note = Description of Artificial Sequence: Synthetic coding sequence
  source 1..519: mol_type = other DNA
atggtgggccccgcccccagaagaagactgagacccctggccgccctggccctggtgctggccctggcccccggcctgcccaccgccagagccggccagacccccagacccgccgagagaggcccccccgtgagactgttcaccgaggaggagctggccagatacggcggcgaggaggaggaccagcccatctacctggccgtgaagggcgtggtgttcgacgtgaccagcggcaaggagttctacggcagaggcgccccctacaacgccctgaccggcaaggacagcaccagaggcgtggccaagatgagcctggaccccgccgacctgacccacgacaccaccggcctgaccgccaaggagctggaggccctggacgaggtgttcaccaaggtgtacaaggccaagtaccccatcgtgggctacaccgccagaagaatcctgaacgaggacggcagccccaacctggacttcaagcccgaggaccagccccacttcgacatcaaggacgagttctag

SEQ ID NO: 90636 - DNA, 2088 bp, synthetic construct
  misc_feature 1..2088: note = Description of Artificial Sequence: Synthetic coding sequence
  source 1..2088: mol_type = other DNA
atgagcctgctgctgagcttctacctgctgggcctgctggtgagcagcggccaggacagattcgccatgctggccaacaacaacctgcagatcctgaacatcaacaagagcgacgagggcatctacagatgcgagggcagagtggaggccagaggcgagatcgacttcagagacatcatcgtgatcgtgaacgtgccccccgccatcagcatgccccagaagagcttcaacgccaccgccgagagaggcgaggagatgaccttcagctgcagagccagcggcagccccgagcccgccatcagctggttcagaaacggcaagctgatcgaggagaacgagaagtacatcctgaagggcagcaacaccgagctgaccgtgagaaacatcatcaacagcgacggcggcccctacgtgtgcagagccaccaacaaggccggcgaggacgagaagcaggccttcctgcaggtgttcgtgcagccccacatcatccagctgaagaacgagaccacctacgagaacggccaggtgaccctggtgtgcgacgccgagggcgagcccatccccgagatcacctggaagagagccgtggacggcttcaccttcaccgagggcgacaagagcctggacggcagaatcgaggtgaagggccagcacggcagcagcagcctgcacatcaaggacgtgaagctgagcgacagcggcagatacgactgcgaggccgccagcagaatcggcggccaccagaagagcatgtacctggacatcgagtacgcccccaagttcatcagcaaccagaccatctactacagctgggagggcaaccccatcaacatcagctgcgacgtgaagagcaacccccccgccagcatccactggagaagagacaagctggtgctgcccgccaagaacaccaccaacctgaagacctacagcaccggcagaaagatgatcctggagatcgcccccaccagcgacaacgacttcggcagatacaactgcaccgccaccaaccacatcggcaccagattccaggagtacatcctggccctggccgacgtgcccagcagcccctacggcgtgaagatcatcgagctgagccagaccaccgccaaggtgagcttcaacaagcccgacagccacggcggcgtgcccatccaccactaccaggtggacgtgaaggaggtggccagcgagatctggaagatcgtgagaagccacggcgtgcagaccatggtggtgctgaacaacctggagcccaacaccacctacgagatcagagtggccgccgtgaacggcaagggccagggcgactacagcaagatcgagatcttccagaccctgcccgtgagagagcccagcccccccagcatccacggccagcccagcagcggcaagagcttcaagctgagcatcaccaagcaggacgacggcggcgcccccatcctggagtacatcgtgaagtacagaagcaaggacaaggaggaccagtggctggagaagaaggtgcagggcaacaaggaccacatcatcctggagcacctgcagtggaccatgggctacgaggtgcagatcaccgccgccaacagactgggctacagcgagcccaccgtgtacgagttcagcatgccccccaagcccaacatcatcaaggacaccctgttcaacggcctgggcctgggcgccgtgatcggcctgggcgtggccgccctgctgctgatcctggtggtgaccgacgtgagctgcttcttcatcagacagtgcggcctgctgatgtgcatcaccagaagaatgtgcggcaagaagagcggcagcagcggcaagagcaaggagctggaggagggcaaggccgcctacctgaaggacggcagcaaggagcccatcgtggagatgagaaccgaggacgagagagtgaccaaccacgaggacggcagccccgtgaacgagcccaacgagaccacccccctgaccgagcccgagaagctgcccctgaaggaggaggacggcaaggaggccctgaaccccgagaccatcgagatcaaggtgagcaacgacatcatccagagcaaggaggacgacagcaaggcctag

SEQ ID NO: 90637 - DNA, 2514 bp, synthetic construct
  misc_feature 1..2514: note = Description of Artificial Sequence: Synthetic coding sequence
  source 1..2514: mol_type = other DNA
atgagcctgctgctgagcttctacctgctgggcctgctggtgagcagcggccaggccctgctgcaggtgaccatcagcctgagcaaggtggagctgagcgtgggcgagagcaagttcttcacctgcaccgccatcggcgagcccgagagcatcgactggtacaacccccagggcgagaagatcatcagcacccagagagtggtggtgcagaaggagggcgtgagaagcagactgaccatctacaacgccaacatcgaggacgccggcatctacagatgccaggccaccgacgccaagggccagacccaggaggccaccgtggtgctggagatctaccagaagctgaccttcagagaggtggtgagcccccaggagttcaagcagggcgaggacgccgaggtggtgtgcagagtgagcagcagccccgcccccgccgtgagctggctgtaccacaacgaggaggtgaccaccatcagcgacaacagattcgccatgctggccaacaacaacctgcagatcctgaacatcaacaagagcgacgagggcatctacagatgcgagggcagagtggaggccagaggcgagatcgacttcagagacatcatcgtgatcgtgaacgtgccccccgccatcagcatgccccagaagagcttcaacgccaccgccgagagaggcgaggagatgaccttcagctgcagagccagcggcagccccgagcccgccatcagctggttcagaaacggcaagctgatcgaggagaacgagaagtacatcctgaagggcagcaacaccgagctgaccgtgagaaacatcatcaacagcgacggcggcccctacgtgtgcagagccaccaacaaggccggcgaggacgagaagcaggccttcctgcaggtgttcgtgcagccccacatcatccagctgaagaacgagaccacctacgagaacggccaggtgaccctggtgtgcgacgccgagggcgagcccatccccgagatcacctggaagagagccgtggacggcttcaccttcaccgagggcgacaagagcctggacggcagaatcgaggtgaagggccagcacggcagcagcagcctgcacatcaaggacgtgaagctgagcgacagcggcagatacgactgcgaggccgccagcagaatcggcggccaccagaagagcatgtacctggacatcgagtacgcccccaagttcatcagcaaccagaccatctactacagctgggagggcaaccccatcaacatcagctgcgacgtgaagagcaacccccccgccagcatccactggagaagagacaagctggtgctgcccgccaagaacaccaccaacctgaagacctacagcaccggcagaaagatgatcctggagatcgcccccaccagcgacaacgacttcggcagatacaactgcaccgccaccaaccacatcggcaccagattccaggagtacatcctggccctggccgacgtgcccagcagcccctacggcgtgaagatcatcgagctgagccagaccaccgccaaggtgagcttcaacaagcccgacagccacggcggcgtgcccatccaccactaccaggtggacgtgaaggaggtggccagcgagatctggaagatcgtgagaagccacggcgtgcagaccatggtggtgctgaacaacctggagcccaacaccacctacgagatcagagtggccgccgtgaacggcaagggccagggcgactacagcaagatcgagatcttccagaccctgcccgtgagagagcccagcccccccagcatccacggccagcccagcagcggcaagagcttcaagctgagcatcaccaagcaggacgacggcggcgcccccatcctggagtacatcgtgaagtacagaagcaaggacaaggaggaccagtggctggagaagaaggtgcagggcaacaaggaccacatcatcctggagcacctgcagtggaccatgggctacgaggtgcagatcaccgccgccaacagactgggctacagcgagcccaccgtgtacgagttcagcatgccccccaagcccaacatcatcaaggacaccctgttcaacggcctgggcctgggcgccgtgatcggcctgggcgtggccgccctgctgctgatcctggtggtgaccgacgtgagctgcttcttcatcagacagtgcggcctgctgatgtgcatcaccagaagaatgtgcggcaagaagagcggcagcagcggcaagagcaaggagctggaggagggcaaggccgcctacctgaaggacggcagcaaggagcccatcgtggagatgagaaccgaggacgagagagtgaccaaccacgaggacggcagccccgtgaacgagcccaacgagaccacccccctgaccgagcccgagaagctgcccctgaaggaggaggacggcaaggaggccctgaaccccgagaccatcgagatcaaggtgagcaacgacatcatccagagcaaggaggacgacagcaaggcctag

SEQ ID NO: 90638 - DNA, 1275 bp, synthetic construct
  misc_feature 1..1275: note = Description of Artificial Sequence: Synthetic coding sequence
  source 1..1275: mol_type = other DNA
atggtgagaagcgacagcggcggccaggtgtacctggactaccacaacagacagggcctgttcgtggactggaagtacaacgaggccctgtacctggaggagggccagcccgagacctactacagaaccgccctgctgcaggtgaccatcagcctgagcaaggtggagctgagcgtgggcgagagcaagttcttcacctgcaccgccatcggcgagcccgagagcatcgactggtacaacccccagggcgagaagatcatcagcacccagagagtggtggtgcagaaggagggcgtgagaagcagactgaccatctacaacgccaacatcgaggacgccggcatctacagatgccaggccaccgacgccaagggccagacccaggaggccaccgtggtgctggagatctaccagaagctgaccttcagagaggtggtgagcccccaggagttcaagcagggcgaggacgccgaggtggtgtgcagagtgagcagcagccccgcccccgccgtgagctggctgtaccacaacgaggaggtgaccaccatcagcgacaacagattcgccatgctggccaacaacaacctgcagatcctgaacatcaacaagagcgacgagggcatctacagatgcgagggcagagtggaggccagaggcgagatcgacttcagagacatcatcgtgatcgtgaacgtgccccccgccatcagcatgccccagaagagcttcaacgccaccgccgagagaggcgaggagatgaccttcagctgcagagccagcggcagccccgagcccgccatcagctggttcagaaacggcaagctgatcgaggagaacgagaagtacatcctgaagggcagcaacaccgagctgaccgtgagaaacatcatcaacagcgacggcggcccctacgtgtgcagagccaccaacaaggccggcgaggacgagaagcaggccttcctgcaggtgttcgtgcagccccacatcatccagctgaagaacgagaccacctacgagaacggccaggtgaccctggtgtgcgacgccgagggcgagcccatccccgagatcacctggaagagagccgtggacggcttcaccttcaccgagggcgacaagagcctggacggcagaatcgaggtgaagggccagcacggcagcagcagcctgcacatcaaggacgtgaagctgagcgacagcggcagatacgactgcgaggccgccagcagaatcggcggccaccagaagagcatgtacctggacatcgagagctag

SEQ ID NO: 90639 - DNA, 1983 bp, synthetic construct
  misc_feature 1..1983: note = Description of Artificial Sequence: Synthetic coding sequence
  source 1..1983: mol_type = other DNA
atgcaggagaacctgagattcgccagcagcggcgacgacatcaagatctgggacgccagcagcatgaccctggtggacaagttcaacccccacaccagcccccacggcatcagcagcatctgctggagcagcaacaacaacttcctggtgaccgccagcagcagcggcgacaagatcgtggtgagcagctgcaagtgcaagcccgtgcccctgctggagctggccgagggccagaagcagacctgcgtgaacctgaacagcaccagcatgtacctggtgagcggcggcctgaacaacaccgtgaacatctgggacctgaagagcaagagagtgcacagaagcctgaaggaccacaaggaccaggtgacctgcgtgacctacaactggaacgactgctacatcgccagcggcagcctgagcggcgagatcatcctgcacagcgtgaccaccaacctgagcagcacccccttcggccacggcagcaaccagagcgtgagacacctgaagtacagcctgttcaagaagagcctgctgggcagcgtgagcgacaacggcatcgtgaccctgtgggacgtgaacagccagagcccctaccacaacttcgacagcgtgcacaaggcccccgccagcggcatctgcttcagccccgtgaacgagctgctgttcgtgaccatcggcctggacaagagaatcatcctgtacgacaccagcagcaagaagctggtgaagaccctggtggccgacacccccctgaccgccgtggacttcatgcccgacggcgccaccctggccatcggcagcagcagaggcaagatctaccagtacgacctgagaatgctgaagagccccgtgaagaccatcagcgcccacaagaccagcgtgcagtgcatcgccttccagtacagcaccgtgctgaccaagagcagcctgaacaagggctgcagcaacaagcccaccaccgtgaacaagagaagcgtgaacgtgaacgccgccagcggcggcgtgcagaacagcggcatcgtgagagaggcccccgccaccagcatcgccaccgtgctgccccagcccatgaccagcgccatgggcaagggcaccgtggccgtgcaggagaaggccggcctgcccagaagcatcaacaccgacaccctgagcaaggagaccgacagcggcaagaaccaggacttcagcagcttcgacgacaccggcaagagcagcctgggcgacatgttcagccccatcagagacgacgccgtggtgaacaagggcagcgacgagagcatcggcaagggcgacggcttcgacttcctgccccagctgaacagcgtgttcccccccagaaagaaccccgtgaccagcagcaccagcgtgctgcacagcagccccctgaacgtgttcatgggcagccccggcaaggaggagaacgagaacagagacctgaccgccgagagcaagaagatctacatgggcaagcaggagagcaaggacagcttcaagcagctggccaagctggtgaccagcggcgccgagagcggcaacctgaacaccagccccagcagcaaccagaccagaaacagcgagaagttcgagaagcccgagaacgagatcgaggcccagctgatctgcgagccccccatcaacggcagcagcacccccaaccccaagatcgccagcagcgtgaccgccggcgtggccagcagcctgagcgagaagatcgccgacagcatcggcaacaacagacagaacgcccccctgaccagcatccagatcagattcatccagaacatgatccaggagaccctggacgacttcagagaggcctgccacagagacatcgtgaacctgcaggtggagatgatcaagcagttccacatgcagctgaacgagatgcacagcctgctggagagatacagcgtgaacgagggcctggtggccgagatcgagagactgagagaggagaacaagagactgagagcccacttctag

SEQ ID NO: 90640 - DNA, 1716 bp, synthetic construct
  misc_feature 1..1716: note = Description of Artificial Sequence: Synthetic coding sequence
  source 1..1716: mol_type = other DNA
atgtacctggtgagcggcggcctgaacaacaccgtgaacatctgggacctgaagagcaagagagtgcacagaagcctgaaggaccacaaggaccaggtgacctgcgtgacctacaactggaacgactgctacatcgccagcggcagcctgagcggcgagatcatcctgcacagcgtgaccaccaacctgagcagcacccccttcggccacggcagcaaccagagcgtgagacacctgaagtacagcctgttcaagaagagcctgctgggcagcgtgagcgacaacggcatcgtgaccctgtgggacgtgaacagccagagcccctaccacaacttcgacagcgtgcacaaggcccccgccagcggcatctgcttcagccccgtgaacgagctgctgttcgtgaccatcggcctggacaagagaatcatcctgtacgacaccagcagcaagaagctggtgaagaccctggtggccgacacccccctgaccgccgtggacttcatgcccgacggcgccaccctggccatcggcagcagcagaggcaagatctaccagtacgacctgagaatgctgaagagccccgtgaagaccatcagcgcccacaagaccagcgtgcagtgcatcgccttccagtacagcaccgtgctgaccaagagcagcctgaacaagggctgcagcaacaagcccaccaccgtgaacaagagaagcgtgaacgtgaacgccgccagcggcggcgtgcagaacagcggcatcgtgagagaggcccccgccaccagcatcgccaccgtgctgccccagcccatgaccagcgccatgggcaagggcaccgtggccgtgcaggagaaggccggcctgcccagaagcatcaacaccgacaccctgagcaaggagaccgacagcggcaagaaccaggacttcagcagcttcgacgacaccggcaagagcagcctgggcgacatgttcagccccatcagagacgacgccgtggtgaacaagggcagcgacgagagcatcggcaagggcgacggcttcgacttcctgccccagctgaacagcgtgttcccccccagaaagaaccccgtgaccagcagcaccagcgtgctgcacagcagccccctgaacgtgttcatgggcagccccggcaaggaggagaacgagaacagagacctgaccgccgagagcaagaagatctacatgggcaagcaggagagcaaggacagcttcaagcagctggccaagctggtgaccagcggcgccgagagcggcaacctgaacaccagccccagcagcaaccagaccagaaacagcgagaagttcgagaagcccgagaacgagatcgaggcccagctgatctgcgagccccccatcaacggcagcagcacccccaaccccaagatcgccagcagcgtgaccgccggcgtggccagcagcctgagcgagaagatcgccgacagcatcggcaacaacagacagaacgcccccctgaccagcatccagatcagattcatccagaacatgatccaggagaccctggacgacttcagagaggcctgccacagagacatcgtgaacctgcaggtggagatgatcaagcagttccacatgcagctgaacgagatgcacagcctgctggagagatacagcgtgaacgagggcctggtggccgagatcgagagactgagagaggagaacaagagactgagagcccacttctag

SEQ ID NO: 90641 - DNA, 1983 bp, synthetic construct; identical to SEQ ID NO: 90639
  misc_feature 1..1983: note = Description of Artificial Sequence: Synthetic coding sequence
  source 1..1983: mol_type = other DNA

SEQ ID NO: 90642 - DNA, 1716 bp, synthetic construct; identical to SEQ ID NO: 90640
  misc_feature 1..1716: note = Description of Artificial Sequence: Synthetic coding sequence
  source 1..1716: mol_type = other DNA

SEQ ID NO: 90643 - DNA, 483 bp, synthetic construct
  misc_feature 1..483: note = Description of Artificial Sequence: Synthetic coding sequence
  source 1..483: mol_type = other DNA
atgtacctggtgagcggcggcctgaacaacaccgtgaacatctgggacctgaagagcaagagagtgcacagaagcctgaaggaccacaaggaccaggtgacctgcgtgacctacaactggaacgactgctacatcgccagcggcagcctgagcggcgagatcatcctgcacagcgtgaccaccaacctgagcagcacccccttcggccacggcagcaaccagagcgtgagacacctgaagtacagcctgttcaagaagagcctgctgggcagcgtgagcgacaacggcatcgtgaccctgtgggacgtgaacagccagagcccctaccacaacttcgacagcgtgcacaaggcccccgccagcggcatctgcttcagccccgtgaacgagctgctgttcgtgaccatcggcctggacaagagaatcatcctgtacgacaccagcagcaagaagctggtgaagaccctggtggccgacacctag

SEQ ID NO: 90644 - DNA, 504 bp, synthetic construct
  misc_feature 1..504: note = Description of Artificial Sequence: Synthetic coding sequence
  source 1..504: mol_type = other DNA
atgcacttcaccggcgccgtgatgcaggagaacctgagattcgccagcagcggcgacgacatcaagatctgggacgccagcagcatgaccctggtggacaagttcaacccccacaccagcccccacggcatcagcagcatctgctggagcagcaacaacaacttcctggtgaccgccagcagcagcggcgacaagatcgtggtgagcagctgcaagtgcaagcccgtgcccctgctggagctggccgagggccagaagcagacctgcgtgaacctgaacagcaccagcatgtacctggtgagcggcggcctgaacaacaccgtgaacatctgggacctgaagagcaagagagtgcacagaagcctgaaggaccacaaggaccaggtgacctgcgtgacctacaactggaacgactgctacatcgccagcggcagcctgagcggcgagatcatcctgcacagcgtgaccaccaacctgagcagcacccccttcggccacggctag

SEQ ID NO: 90645 - DNA, 306 bp, synthetic construct
  misc_feature 1..306: note = Description of Artificial Sequence: Synthetic coding sequence
  source 1..306: mol_type = other DNA
atgcaggagaacctgagattcgccagcagcggcgacgacatcaagatctgggacgccagcagcatgaccctggtggacaagttcaacccccacaccagcccccacggcatcagcagcatctgctggagcagcaacaacaacttcctggtgaccgccagcagcagcggcgacaagatcgtggtgagcagctgcaagtgcaagcccgtgcccctgctggagctggccgagggccagaagcagacctgcgtgaacctgaacagcaccagcatgtacctggtgagcggcggcctgaacaacaccgtgtag

SEQ ID NO: 90646 - DNA, 498 bp, synthetic construct
  misc_feature 1..498: note = Description of Artificial Sequence: Synthetic coding sequence
  source 1..498: mol_type = other DNA
atgcaggagaacctgagattcgccagcagcggcgacgacatcaagatctgggacgccagcagcatgaccctggtggacaagttcaacccccacaccagcccccacggcatcagcagcatctgctggagcagcaacaacaacttcctggtgaccgccagcagcagcggcgacaagatcgtggtgagcagctgcaagtgcaagcccgtgcccctgctggagctggccgagggccagaagcagacctgcgtgaacctgaacagcaccagcatgtacctggtgagcggcggcctgaacaacaccgtgaacatctgggacctgaagagcaagagagtgcacagaagcctgaaggaccacaaggaccaggtgacctgcgtgacctacaactggaacgactgctacatcgccagcggcagcctgagcggcgagatcatcctgcacagcgtgaccaccaacctgagcagcacccccttcggccacggcagcaaccagagcgtgtag

SEQ ID NO: 90647 - DNA, 2004 bp, synthetic construct
  misc_feature 1..2004: note = Description of Artificial Sequence: Synthetic coding sequence
  source 1..2004: mol_type = other DNA
atgcacttcaccggcgccgtgatgcaggagaacctgagattcgccagcagcggcgacgacatcaagatctgggacgccagcagcatgaccctggtggacaagttcaacccccacaccagcccccacggcatcagcagcatctgctggagcagcaacaacaacttcctggtgaccgccagcagcagcggcgacaagatcgtggtgagcagctgcaagtgcaagcccgtgcccctgctggagctggccgagggccagaagcagacctgcgtgaacctgaacagcaccagcatgtacctggtgagcggcggcctgaacaacaccgtgaacatctgggacctgaagagcaagagagtgcacagaagcctgaaggaccacaaggaccaggtgacctgcgtgacctacaactggaacgactgctacatcgccagcggcagcctgagcggcgagatcatcctgcacagcgtgaccaccaacctgagcagcacccccttcggccacggcagcaaccagagcgtgagacacctgaagtacagcctgttcaagaagagcctgctgggcagcgtgagcgacaacggcatcgtgaccctgtgggacgtgaacagccagagcccctaccacaacttcgacagcgtgcacaaggcccccgccagcggcatctgcttcagccccgtgaacgagctgctgttcgtgaccatcggcctggacaagagaatcatcctgtacgacaccagcagcaagaagctggtgaagaccctggtggccgacacccccctgaccgccgtggacttcatgcccgacggcgccaccctggccatcggcagcagcagaggcaagatctaccagtacgacctgagaatgctgaagagccccgtgaagaccatcagcgcccacaagaccagcgtgcagtgcatcgccttccagtacagcaccgtgctgaccaagagcagcctgaacaagggctgcagcaacaagcccaccaccgtgaacaagagaagcgtgaacgtgaacgccgccagcggcggcgtgcagaacagcggcatcgtgagagaggcccccgccaccagcatcgccaccgtgctgccccagcccatgaccagcgccatgggcaagggcaccgtggccgtgcaggagaaggccggcctgcccagaagcatcaacaccgacaccctgagcaaggagaccgacagcggcaagaaccaggacttcagcagcttcgacgacaccggcaagagcagcctgggcgacatgttcagccccatcagagacgacgccgtggtgaacaagggcagcgacgagagcatcggcaagggcgacggcttcgacttcctgccccagctgaacagcgtgttcccccccagaaagaaccccgtgaccagcagcaccagcgtgctgcacagcagccccctgaacgtgttcatgggcagccccggcaaggaggagaacgagaacagagacctgaccgccgagagcaagaagatctacatgggcaagcaggagagcaaggacagcttcaagcagctggccaagctggtgaccagcggcgccgagagcggcaacctgaacaccagccccagcagcaaccagaccagaaacagcgagaagttcgagaagcccgagaacgagatcgaggcccagctgatctgcgagccccccatcaacggcagcagcacccccaaccccaagatcgccagcagcgtgaccgccggcgtggccagcagcctgagcgagaagatcgccgacagcatcggcaacaacagacagaacgcccccctgaccagcatccagatcagattcatccagaacatgatccaggagaccctggacgacttcagagaggcctgccacagagacatcgtgaacctgcaggtggagatgatcaagcagttccacatgcagctgaacgagatgcacagcctgctggagagatacagcgtgaacgagggcctggtggccgagatcgagagactgagagaggagaacaagagactgagagcccacttctag

SEQ ID NO: 90648 - DNA, 3744 bp, synthetic construct
  misc_feature 1..3744: note = Description of Artificial Sequence: Synthetic coding sequence
  source 1..3744: mol_type = other DNA
atggcccagagcctgagactgcacttcgccgccagaagaagcaacacctaccccctgagcgagaccagcggcgacgacctggacagccacgtgcacatgtgcttcaagagacccaccagaatcagcaccagcaacgtggtgcagatgaagctgacccccagacagaccgccctggcccccctgatcaaggagaacgtgcagagccaggagagaagcagcgtgcccagcagcgagaacgtgaacaagaagagcagctgcctgcagatcagcctgcagcccaccagatacagcggctacctgcagagcagcaacgtgctggccgacagcgacgacgccagcttcacctgcatcctgaaggacggcatctacagcagcgccgtggtggacaacgagctgaacgccgtgaacgacggccacctggtgagcagccccgccatctgcagcggcagcctgagcaacttcagcaccagcgacaacggcagctacagcagcaacggcagcgacttcggcagctgcgccagcatcaccagcggcggcagctacaccaacagcgtgatcagcgacagcagcagctacaccttcccccccagcgacgacaccttcctgggcggcaacctgcccagcgacagcaccagcaacagaagcgtgcccaacagaaacaccaccccctgcgagatcttcagcagaagcaccagcaccgaccccttcgtgcaggacgacctggagcacggcctggagatcatgaagctgcccgtgagcagaaacaccaagatccccctgaagagatacagcagcctggtgatcttccccagaagccccagcaccaccagacccaccagccccaccagcctgtgcaccctgctgagcaagggcagctaccagaccagccaccagttcatcatcagccccagcgagatcgcccacaacgaggacggcaccagcgccaagggcttcctgagcaccgccgtgaacggcctgagactgagcaagaccatctgcacccccggcgaggtgagagacatcagacccctgcacagaaagggcagcctgcagaagaagatcgtgctgagcaacaacacccccagacagaccgtgtgcgagaagagcagcgagggctacagctgcgtgagcgtgcacttcacccagagaaaggccgccaccctggactgcgagaccaccaacggcgactgcaagcccgagatgagcgagatcaagctgaacagcgacagcgagtacatcaagctgatgcacagaaccagcgcctgcctgcccagcagccagaacgtggactgccagatcaacatcaacggcgagctggagagaccccacagccagatgaacaagaaccacggcatcctgagaagaagcatcagcctgggcggcgcctaccccaacatcagctgcctgagcagcctgaagcacaactgcagcaagggcggccccagccagctgctgatcaagttcgccagcggcaacgagggcaaggtggacaacctgagcagagacagcaacagagactgcaccaacgagctgagcaacagctgcaagcccggctgggtggtgctggaccagcccgacgccgcctgccacctgcagcagcagcaggagcccagccccctgccccccggctgggaggagagacaggacatcctgggcagaacctactacgtgaaccacgagagcagaagaacccagtggaagagacccaccccccaggacaacctgaccgacgccgagaacggcaacatccagctgcaggcccagagagccttcaccaccagaagacagatcagcgaggagaccgagagcgtggacaacagagagagcagcgagaactgggagatcatcagagaggacgaggccaccatgtacagcaaccaggccttccccagccccccccccagcagcaacctggacgtgcccacccacctggccgaggagctgaacgccagactgaccatcttcggcaacagcgccgtgagccagcccgccagcagcagcaaccacagcagcagaagaggcagcctgcaggcctacaccttcgaggagcagcccaccctgcccgtgctgctgcccaccagcagcggcctgccccccggctgggaggagaagcaggacgagagaggcagaagctactacgtggaccacaacagcagaaccaccacctggaccaagcccaccgtgcaggccaccgtggagaccagccagctgaccagcagccagagcagcgccggcccccagagccaggccagcaccagcgacagcggccagcaggtgacccagcccagcgagatcgagcagggcttcctgcccaagggctgggaggtgagacacgcccccaacggcagacccttcttcatcgaccacaacaccaagaccaccacctgggaggaccccagactgaagatccccgcccacctgagaggcaagaccagcctggacaccagcaacgacctgggccccctgccccccggctgggaggagagaacccacaccgacggcagaatcttctacatcaaccacaacatcaagagaacccagtgggaggaccccagactggagaacgtggccatcaccggccccgccgtgccctacagcagagactacaagagaaagtacgagttcttcagaagaaagctgaagaagcagaacgacatccccaacaagttcgagatgaagctgagaagagccaccgtgctggaggacagctacagaagaatcatgggcgtgaagagagccgacttcctgaaggccagactgtggatcgagttcgacggcgagaagggcctggactacggcggcgtggccagagagtggttcttcctgatcagcaaggagatgttcaacccctactacggcctgttcgagtacagcgccaccgacaactacaccctgcagatcaaccccaacagcggcctgtgcaacgaggaccacctgagctacttcaagttcatcggcagagtggccggcatggccgtgtaccacggcaagctgctggacggcttcttcatcagacccttctacaagatgatgctgcacaagcccatcaccctgcacgacatggagagcgtggacagcgagtactacaacagcctgagatggatcctggagaacgaccccaccgagctggacctgagattcatcatcgacgaggagctgttcggccagacccaccagcacgagctgaagaacggcggcagcgagatcgtggtgaccaacaagaacaagaaggagtacatctacctggtgatccagtggagattcgtgaacagaatccagaagcagatggccgccttcaaggagggcttcttcgagctgatcccccaggacctgatcaagatcttcgacgagaacgagctggagctgctgatgtgcggcctgggcgacgtggacgtgaacgactggagagagcacaccaagtacaagaacggctacagcgccaaccaccaggtgatccagtggttctggaaggccgtgctgatgatggacagcgagaagagaatcagactgctgcagttcgtgaccggcaccagcagagtgcccatgaacggcttcgccgagctgtacggcagcaacggcccccagagcttcaccgtggagcagtggggcacccccgagaagctgcccagagcccacacctgcttcaacagactggacctgcccccctacgagagcttcgaggagctgtgggacaagctgcagatggccatcgagaacacccagggcttcgacggcgtggactag

SEQ ID NO: 90649 - DNA, 2703 bp, synthetic construct
  misc_feature 1..2703: note = Description of Artificial Sequence: Synthetic coding sequence
  source 1..2703: mol_type = other DNA
atggccacctgcgccgtggaggtgttcggcctgctggaggacgaggagaacagcagaatcgtgagagtgagagtgatcgccggcatcggcctggccaagaaggacatcctgggcgccagcgacccctacgtgagagtgaccctgtacgaccccatgaacggcgtgctgaccagcgtgcagaccaagaccatcaagaagagcctgaaccccaagtggaacgaggagatcctgttcagagtgcacccccagcagcacagactgctgttcgaggtgttcgacgagaacagactgaccagagacgacttcctgggccaggtggacgtgcccctgtaccccctgcccaccgagaaccccagactggagagaccctacaccttcaaggacttcgtgctgcaccccagaagccacaagagcagagtgaagggctacctgagactgaagatgacctacctgcccaagaccagcggcagcgaggacgacaacgccgagcaggccgaggagctggagcccggctgggtggtgctggaccagcccgacgccgcctgccacctgcagcagcagcaggagcccagccccctgccccccggctgggaggagagacaggacatcctgggcagaacctactacgtgaaccacgagagcagaagaacccagtggaagagacccaccccccaggacaacctgaccgacgccgagaacggcaacatccagctgcaggcccagagagccttcaccaccagaagacagatcagcgaggagaccgagagcgtggacaacagagagagcagcgagaactgggagatcatcagagaggacgaggccaccatgtacagcaaccaggccttccccagccccccccccagcagcaacctggacgtgcccacccacctggccgaggagctgaacgccagactgaccatcttcggcaacagcgccgtgagccagcccgccagcagcagcaaccacagcagcagaagaggcagcctgcaggcctacaccttcgaggagcagcccaccctgcccgtgctgctgcccaccagcagcggcctgccccccggctgggaggagaagcaggacgagagaggcagaagctactacgtggaccacaacagcagaaccaccacctggaccaagcccaccgtgcaggccaccgtggagaccagccagctgaccagcagccagagcagcgccggcccccagagccaggccagcaccagcgacagcggccagcaggtgacccagcccagcgagatcgagcagggcttcctgcccaagggctgggaggtgagacacgcccccaacggcagacccttcttcatcgaccacaacaccaagaccaccacctgggaggaccccagactgaagatccccgcccacctgagaggcaagaccagcctggacaccagcaacgacctgggccccctgccccccggctgggaggagagaacccacaccgacggcagaatcttctacatcaaccacaacatcaagagaacccagtgggaggaccccagactggagaacgtggccatcaccggccccgccgtgccctacagcagagactacaagagaaagtacgagttcttcagaagaaagctgaagaagcagaacgacatccccaacaagttcgagatgaagctgagaagagccaccgtgctggaggacagctacagaagaatcatgggcgtgaagagagccgacttcctgaaggccagactgtggatcgagttcgacggcgagaagggcctggactacggcggcgtggccagagagtggttcttcctgatcagcaaggagatgttcaacccctactacggcctgttcgagtacagcgccaccgacaactacaccctgcagatcaaccccaacagcggcctgtgcaacgaggaccacctgagctacttcaagttcatcggcagagtggccggcatggccgtgtaccacggcaagctgctggacggcttcttcatcagacccttctacaagatgatgctgcacaagcccatcaccctgcacgacatggagagcgtggacagcgagtactacaacagcctgagatggatcctggagaacgaccccaccgagctggacctgagattcatcatcgacgaggagctgttcggccagacccaccagcacgagctgaagaacggcggcagcgagatcgtggtgaccaacaagaacaagaaggagtacatctacctggtgatccagtggagattcgtgaacagaatccagaagcagatggccgccttcaaggagggcttcttcgagctgatcccccaggacctgatcaagatcttcgacgagaacgagctggagctgctgatgtgcggcctgggcgacgtggacgtgaacgactggagagagcacaccaagtacaagaacggctacagcgccaaccaccaggtgatccagtggttctggaaggccgtgctgatgatggacagcgagaagagaatcagactgctgcagttcgtgaccggcaccagcagagtgcccatgaacggcttcgccgagctgtacggcagcaacggcccccagagcttcaccgtggagcagtggggcacccccgagaagctgcccagagcccacacctgcttcaacagactggacctgcccccctacgagagcttcgaggagctgtgggacaagctgcagatggccatcgagaacacccagggcttcgacggcgtggactag

SEQ ID NO: 90650 - DNA, 3912 bp, synthetic construct
  misc_feature 1..3912: note = Description of Artificial Sequence: Synthetic coding sequence
  source 1..3912: mol_type = other DNA
atggcccagagcctgagactgcacttcgccgccagaagaagcaacacctaccccctgagcgagaccagcggcgacgacctggacagccacgtgcacatgtgcttcaagagacccaccagaatcagcaccagcaacgtggtgcagatgaagctgacccccagacagaccgccctggcccccctgatcaaggagaacgtgcagagccaggagagaagcagcgtgcccagcagcgagaacgtgaacaagaagagcagctgcctgcagatcagcctgcagcccaccagatacagcggctacctgcagagcagcaacgtgctggccgacagcgacgacgccagcttcacctgcatcctgaaggacggcatctacagcagcgccgtggtggacaacgagctgaacgccgtgaacgacggccacctggtgagcagccccgccatctgcagcggcagcctgagcaacttcagcaccagcgacaacggcagctacagcagcaacggcagcgacttcggcagctgcgccagcatcaccagcggcggcagctacaccaacagcgtgatcagcgacagcagcagctacaccttcccccccagcgacgacaccttcctgggcggcaacctgcccagcgacagcaccagcaacagaagcgtgcccaacagaaacaccaccccctgcgagatcttcagcagaagcaccagcaccgaccccttcgtgcaggacgacctggagcacggcctggagatcatgaagctgcccgtgagcagaaacaccaagatccccctgaagagatacagcagcctggtgatcttccccagaagccccagcaccaccagacccaccagccccaccagcctgtgcaccctgctgagcaagggcagctaccagaccagccaccagttcatcatcagccccagcgagatcgcccacaacgaggacggcaccagcgccaagggcttcctgagcaccgccgtgaacggcctgagactgagcaagaccatctgcacccccggcgaggtgagagacatcagacccctgcacagaaagggcagcctgcagaagaagatcgtgctgagcaacaacacccccagacagaccgtgtgcgagaagagcagcgagggctacagctgcgtgagcgtgcacttcacccagagaaaggccgccaccctggactgcgagaccaccaacggcgactgcaagcccgagatgagcgagatcaagctgaacagcgacagcgagtacatcaagctgatgcacagaaccagcgcctgcctgcccagcagccagaacgtggactgccagatcaacatcaacggcgagctggagagaccccacagccagatgaacaagaaccacggcatcctgagaagaagcatcagcctgggcggcgcctaccccaacatcagctgcctgagcagcctgaagcacaactgcagcaagggcggccccagccagctgctgatcaagttcgccagcggcaacgagggcaaggtggacaacctgagcagagacagcaacagagactgcaccaacgagctgagcaacagctgcaagaccagagacgacttcctgggccaggtggacgtgcccctgtaccccctgcccaccgagaaccccagactggagagaccctacaccttcaaggacttcgtgctgcaccccagaagccacaagagcagagtgaagggctacctgagactgaagatgacctacctgcccaagaccagcggcagcgaggacgacaacgccgagcaggccgaggagctggagcagcagcaggagcccagccccctgccccccggctgggaggagagacaggacatcctgggcagaacctactacgtgaaccacgagagcagaagaacccagtggaagagacccaccccccaggacaacctgaccgacgccgagaacggcaacatccagctgcaggcccagagagccttcaccaccagaagacagatcagcgaggagaccgagagcgtggacaacagagagagcagcgagaactgggagatcatcagagaggacgaggccaccatgtacagcaaccaggccttccccagccccccccccagcagcaacctggacgtgcccacccacctggccgaggagctgaacgccagactgaccatcttcggcaacagcgccgtgagccagcccgccagcagcagcaaccacagcagcagaagaggcagcctgcaggcctacaccttcgaggagcagcccaccctgcccgtgctgctgcccaccagcagcggcctgccccccggctgggaggagaagcaggacgagagaggcagaagctactacgtggaccacaacagcagaaccaccacctggaccaagcccaccgtgcaggccaccgtggagaccagccagctgaccagcagccagagcagcgccggcccccagagccaggccagcaccagcgacagcggccagcaggtgacccagcccagcgagatcgagcagggcttcctgcccaagggctgggaggtgagacacgcccccaacggcagacccttcttcatcgaccacaacaccaagaccaccacctgggaggaccccagactgaagatccccgcccacctgagaggcaagaccagcctggacaccagcaacgacctgggccccctgccccccggctgggaggagagaacccacaccgacggcagaatcttctacatcaaccacaacatcaagagaacccagtgggaggaccccagactggagaacgtggccatcaccggccccgccgtgccctacagcagagactacaagagaaagtacgagttcttcagaagaaagctgaagaagcagaacgacatccccaacaagttcgagatgaagctgagaagagccaccgtgctggaggacagctacagaagaatcatgggcgtgaagagagccgacttcctgaaggccagactgtggatcgagttcgacggcgagaagggcctggactacggcggcgtggccagagagtggttcttcctgatcagcaaggagatgttcaacccctactacggcctgttcgagtacagcgccaccgacaactacaccctgcagatcaaccccaacagcggcctgtgcaacgaggaccacctgagctacttcaagttcatcggcagagtggccggcatggccgtgtaccacggcaagctgctggacggcttcttcatcagacccttctacaagatgatgctgcacaagcccatcaccctgcacgacatggagagcgtggacagcgagtactacaacagcctgagatggatcctggagaacgaccccaccgagctggacctgagattcatcatcgacgaggagctgttcggccagacccaccagcacgagctgaagaacggcggcagcgagatcgtggtgaccaacaagaacaagaaggagtacatctacctggtgatccagtggagattcgtgaacagaatccagaagcagatggccgccttcaaggagggcttcttcgagctgatcccccaggacctgatcaagatcttcgacgagaacgagctggagctgctgatgtgcggcctgggcgacgtggacgtgaacgactggagagagcacaccaagtacaagaacggctacagcgccaaccaccaggtgatccagtggttctggaaggccgtgctgatgatggacagcgagaagagaatcagactgctgcagttcgtgaccggcaccagcagagtgcccatgaacggcttcgccgagctgtacggcagcaacggcccccagagcttcaccgtggagcagtggggcacccccgagaagctgcccagagcccacacctgcttcaacagactggacctgcccccctacgagagcttcgaggagctgtgggacaagctgcagatggccatcgagaacacccagggcttcgacggcgtggactag

SEQ ID NO: 90651 - DNA, 3960 bp, synthetic construct
  misc_feature 1..3960: note = Description of Artificial Sequence: Synthetic coding sequence
  source 1..3960: mol_type = other DNA
atggcccagagcctgagactgcacttcgccgccagaagaagcaacacctaccccctgagcgagaccagcggcgacgacctggacagccacgtgcacatgtgcttcaagagacccaccagaatcagcaccagcaacgtggtgcagatgaagctgacccccagacagaccgccctggcccccctgatcaaggagaacgtgcagagccaggagagaagcagcgtgcccagcagcgagaacgtgaacaagaagagcagctgcctgcagatcagcctgcagcccaccagatacagcggctacctgcagagcagcaacgtgctggccgacagcgacgacgccagcttcacctgcatcctgaaggacggcatctacagcagcgccgtggtggacaacgagctgaacgccgtgaacgacggccacctggtgagcagccccgccatctgcagcggcagcctgagcaacttcagcaccagcgacaacggcagctacagcagcaacggcagcgacttcggcagctgcgccagcatcaccagcggcggcagctacaccaacagcgtgatcagcgacagcagcagctacaccttcccccccagcgacgacaccttcctgggcggcaacctgcccagcgacagcaccagcaacagaagcgtgcccaacagaaacaccaccccctgcgagatcttcagcagaagcaccagcaccgaccccttcgtgcaggacgacctggagcacggcctggagatcatgaagctgcccgtgagcagaaacaccaagatccccctgaagagatacagcagcctggtgatcttccccagaagccccagcaccaccagacccaccagccccaccagcctgtgcaccctgctgagcaagggcagctaccagaccagccaccagttcatcatcagccccagcgagatcgcccacaacgaggacggcaccagcgccaagggcttcctgagcaccgccgtgaacggcctgagactgagcaagaccatctgcacccccggcgaggtgagagacatcagacccctgcacagaaagggcagcctgcagaagaagatcgtgctgagcaacaacacccccagacagaccgtgtgcgagaagagcagcgagggctacagctgcgtgagcgtgcacttcacccagagaaaggccgccaccctggactgcgagaccaccaacggcgactgcaagcccgagatgagcgagatcaagctgaacagcgacagcgagtacatcaagctgatgcacagaaccagcgcctgcctgcccagcagccagaacgtggactgccagatcaacatcaacggcgagctggagagaccccacagccagatgaacaagaaccacggcatcctgagaagaagcatcagcctgggcggcgcctaccccaacatcagctgcctgagcagcctgaagcacaactgcagcaagggcggccccagccagctgctgatcaagttcgccagcggcaacgagggcaaggtggacaacctgagcagagacagcaacagagactgcaccaacgagctgagcaacagctgcaagaccagagacgacttcctgggccaggtggacgtgcccctgtaccccctgcccaccgagaaccccagactggagagaccctacaccttcaaggacttcgtgctgcaccccagaagccacaagagcagagtgaagggctacctgagactgaagatgacctacctgcccaagaccagcggcagcgaggacgacaacgccgagcaggccgaggagctggagcccggctgggtggtgctggaccagcccgacgccgcctgccacctgcagcagcagcaggagcccagccccctgccccccggctgggaggagagacaggacatcctgggcagaacctactacgtgaaccacgagagcagaagaacccagtggaagagacccaccccccaggacaacctgaccgacgccgagaacggcaacatccagctgcaggcccagagagccttcaccaccagaagacagatcagcgaggagaccgagagcgtggacaacagagagagcagcgagaactgggagatcatcagagaggacgaggccaccatgtacagcaaccaggccttccccagccccccccccagcagcaacctggacgtgcccacccacctggccgaggagctgaacgccagactgaccatcttcggcaacagcgccgtgagccagcccgccagcagcagcaaccacagcagcagaagaggcagcctgcaggcctacaccttcgaggagcagcccaccctgcccgtgctgctgcccaccagcagcggcctgccccccggctgggaggagaagcaggacgagagaggcagaagctactacgtggaccacaacagcagaaccaccacctggaccaagcccaccgtgcaggccaccgtggagaccagccagctgaccagcagccagagcagcgccggcccccagagccaggccagcaccagcgacagcggccagcaggtgacccagcccagcgagatcgagcagggcttcctgcccaagggctgggaggtgagacacgcccccaacggcagacccttcttcatcgaccacaacaccaagaccaccacctgggaggaccccagactgaagatccccgcccacctgagaggcaagaccagcctggacaccagcaacgacctgggccccctgccccccggctgggaggagagaacccacaccgacggcagaatcttctacatcaaccacaacatcaagagaacccagtgggaggaccccagactggagaacgtggccatcaccggccccgccgtgccctacagcagagactacaagagaaagtacgagttcttcagaagaaagctgaagaagcagaacgacatccccaacaagttcgagatgaagctgagaagagccaccgtgctggaggacagctacagaagaatcatgggcgtgaagagagccgacttcctgaaggccagactgtggatcgagttcgacggcgagaagggcctggactacggcggcgtggccagagagtggttcttcctgatcagcaaggagatgttcaacccctactacggcctgttcgagtacagcgccaccgacaactacaccctgcagatcaaccccaacagcggcctgtgcaacgaggaccacctgagctacttcaagttcatcggcagagtggccggcatggccgtgtaccacggcaagctgctggacggcttcttcatcagacccttctacaagatgatgctgcacaagcccatcaccctgcacgacatggagagcgtggacagcgagtactacaacagcctgagatggatcctggagaacgaccccaccgagctggacctgagattcatcatcgacgaggagctgttcggccagacccaccagcacgagctgaagaacggcggcagcgagatcgtggtgaccaacaagaacaagaaggagtacatctacctggtgatccagtggagattcgtgaacagaatccagaagcagatggccgccttcaaggagggcttcttcgagctgatcccccaggacctgatcaagatcttcgacgagaacgagctggagctgctgatgtgcggcctgggcgacgtggacgtgaacgactggagagagcacaccaagtacaagaacggctacagcgccaaccaccaggtgatccagtggttctggaaggccgtgctgatgatggacagcgagaagagaatcagactgctgcagttcgtgaccggcaccagcagagtgcccatgaacggcttcgccgagctgtacggcagcaacggcccccagagcttcaccgtggagcagtggggcacccccgagaagctgcccagagcccacacctgcttcaacagactggacctgcccccctacgagagcttcgaggagctgtgggacaagctgcagatggccatcgagaacacccagggcttcgacggcgtggactag

SEQ ID NO: 90652 - DNA, 2616 bp, synthetic construct
  misc_feature 1..2616: note = Description of Artificial Sequence: Synthetic coding sequence
  source 1..2616: mol_type = other DNA
atggccaccggcctgggcgagcccgtgtacggcctgagcgaggacgagggcgagagcagaatcctgagagtgaaggtggtgagcggcatcgacctggccaagaaggacatcttcggcgccagcgacccctacgtgaagctgagcctgtacgtggccgacgagaacagagagctggccctggtgcagaccaagaccatcaagaagaccctgaaccccaagtggaacgaggagttctacttcagagtgaaccccagcaaccacagactgctgttcgaggtgttcgacgagaacagactgaccagagacgacttcctgggccaggtggacgtgcccctgagccacctgcccaccgaggaccccaccatggagagaccctacaccttcaaggacttcctgctgagacccagaagccacaagagcagagtgaagggcttcctgagactgaagatggcctacatgcccaagaacggcggccaggacgaggagaacagcgaccagagagacgacatggagcacggctgggaggtggtggacagcaacgacagcgccagccagcaccaggaggagctgccccccccccccctgccccccggctgggaggagaaggtggacaacctgggcagaacctactacgtgaaccacaacaacagaaccacccagtggcacagacccagcctgatggacgtgagcagcgagagcgacaacaacatcagacagatcaaccaggaggccgcccacagaagattcagaagcagaagacacatcagcgaggacctggagcccgagcccagcgagggcggcgacgtgcccgagccctgggagaccatcagcgaggaggtgaacatcgccggcgacagcctgggcctggccctgccccccccccccgccagccccggcagcagaaccagcccccaggagctgagcgaggagctgagcagaagactgcagatcacccccgacagcaacggcgagcagttcagcagcctgatccagagagagcccagcagcagactgagaagctgcagcgtgaccgacgccgtggccgagcagggccacctgccccccggcgccaaggacagccccgtgagaagagccgtgaaggacaccctgagcaacccccagagcccccagcccagcccctacaacagccccaagccccagcacaaggtgacccagagcttcctgccccccggctgggagatgagaatcgcccccaacggcagacccttcttcatcgaccacaacaccaagaccaccacctgggaggaccccagactgaagttccccgtgcacatgagaagcaagaccagcctgaaccccaacgacctgggccccctgccccccggctgggaggagagaatccacctggacggcagaaccttctacatcgaccacaacagcaagatcacccagtgggaggaccccagactgcagaaccccgccatcaccggccccgccgtgccctacagcagagagttcaagcagaagtacgactacttcagaaagaagctgaagaagcccgccgacatccccaacagattcgagatgaagctgcacagaaacaacatcttcgaggagagctacagaagaatcatgagcgtgaagagacccgacgtgctgaaggccagactgtggatcgagttcgagagcgagaagggcctggactacggcggcgtggccagagagtggttcttcctgctgagcaaggagatgttcaacccctactacggcctgttcgagtacagcgccaccgacaactacaccctgcagatcaaccccaacagcggcctgtgcaacgaggaccacctgagctacttcaccttcatcggcagagtggccggcctggccgtgttccacggcaagctgctggacggcttcttcatcagacccttctacaagatgatgctgggcaagcagatcaccctgaacgacatggagagcgtggacagcgagtactacaacagcctgaagtggatcctggagaacgaccccaccgagctggacctgatgttctgcatcgacgaggagaacttcggccagacctaccaggtggacctgaagcccaacggcagcgagatcatggtgaccaacgagaacaagagagagtacatcgacctggtgatccagtggagattcgtgaacagagtgcagaagcagatgaacgccttcctggagggcttcaccgagctgctgcccatcgacctgatcaagatcttcgacgagaacgagctggagctgctgatgtgcggcctgggcgacgtggacgtgaacgactggagacagcacagcatctacaagaacggctactgccccaaccaccccgtgatccagtggttctggaaggccgtgctgctgatggacgccgagaagagaatcagactgctgcagttcgtgaccggcaccagcagagtgcccatgaacggcttcgccgagctgtacggcagcaacggcccccagctgttcaccatcgagcagtggggcagccccgagaagctgcccagagcccacacctgcttcaacagactggacctgcccccctacgagaccttcgaggacctgagagagaagctgctgatggccgtggagaacgcccagggcttcgagggcgtggactag

SEQ ID NO: 90653 - DNA, 2508 bp, synthetic construct
  misc_feature 1..2508: note = Description of Artificial Sequence: Synthetic coding sequence
  source 1..2508: mol_type = other DNA
atggagagaccctacaccttcaaggacttcctgctgagacccagaagccacaagagcagagtgaagggcttcctgagactgaagatggcctacatgcccaagaacggcggccaggacgaggagaacagcgaccagagagacgacatggagcacggctgggaggtggtggacagcaacgacagcgccagccagcaccaggaggagctgccccccccccccctgccccccggctgggaggagaaggtggacaacctgggcagaacctactacgtgaaccacaacaacagaaccacccagtggcacagacccagcctgatggacgtgagcagcgagagcgacaacaacatcagacagatcaaccaggaggccgcccacagaagattcagaagcagaagacacatcagcgaggacctggagcccgagcccagcgagggcggcgacgtgcccgagccctgggagaccatcagcgaggaggtgaacatcgccggcgacagcctgggcctggccctgccccccccccccgccagccccggcagcagaaccagcccccaggagctgagcgaggagctgagcagaagactgcagatcacccccgacagcaacggcgagcagttcagcagcctgatccagagagagcccagcagcagactgagaagctgcagcgtgaccgacgccgtggccgagcagggccacctgcccccccccagcgtggcctacgtgcacaccacccccggcctgcccagcggctgggaggagagaaaggacgccaagggcagaacctactacgtgaaccacaacaacagaaccaccacctggaccagacccatcatgcagctggccgaggacggcgccagcggcagcgccaccaacagcaacaaccacctgatcgagccccagatcagaagacccagaagcctgagcagccccaccgtgaccctgagcgcccccctggagggcgccaaggacagccccgtgagaagagccgtgaaggacaccctgagcaacccccagagcccccagcccagcccctacaacagccccaagccccagcacaaggtgacccagagcttcctgccccccggctgggagatgagaatcgcccccaacggcagacccttcttcatcgaccacaacaccaagaccaccacctgggaggaccccagactgaagttccccgtgcacatgagaagcaagaccagcctgaaccccaacgacctgggccccctgccccccggctgggaggagagaatccacctggacggcagaaccttctacatcgaccacaacagcaagatcacccagtgggaggaccccagactgcagaaccccgccatcaccggccccaaggccgtgccctacagcagagagttcaagcagaagtacgactacttcagaaagaagctgaagaagcccgccgacatccccaacagattcgagatgaagctgcacagaaacaacatcttcgaggagagctacagaagaatcatgagcgtgaagagacccgacgtgctgaaggccagactgtggatcgagttcgagagcgagaagggcctggactacggcggcgtggccagagagtggttcttcctgctgagcaaggagatgttcaacccctactacggcctgttcgagtacagcgccaccgacaactacaccctgcagatcaaccccaacagcggcctgtgcaacgaggaccacctgagctacttcaccttcatcggcagagtggccggcctggccgtgttccacggcaagctgctggacggcttcttcatcagacccttctacaagatgatgctgggcaagcagatcaccctgaacgacatggagagcgtggacagcgagtactacaacagcctgaagtggatcctggagaacgaccccaccgagctggacctgatgttctgcatcgacgaggagaacttcggccagacctaccaggtggacctgaagcccaacggcagcgagatcatggtgaccaacgagaacaagagagagtacatcgacctggtgatccagtggagattcgtgaacagagtgcagaagcagatgaacgccttcctggagggcttcaccgagctgctgcccatcgacctgatcaagatcttcgacgagaacgagctggagctgctgatgtgcggcctgggcgacgtggacgtgaacgactggagacagcacagcatctacaagaacggctactgccccaaccaccccgtgatccagtggttctggaaggccgtgctgctgatggacgccgagaagagaatcagactgctgcagttcgtgaccggcaccagcagagtgcccatgaacggcttcgccgagctgtacggcagcaacggcccccagctgttcaccatcgagcagtggggcagccccgagaagctgcccagagcccacacctgcttcaacagactggacctgcccccctacgagaccttcgaggacctgagagagaagctgctgatggccgtggagaacgcccagggcttcgagggcgtggactag

SEQ ID NO: 90654 - DNA, 2736 bp, synthetic construct
  misc_feature 1..2736: note = Description of Artificial Sequence: Synthetic coding sequence
  source 1..2736: mol_type = other DNA
atggccaccggcctgggcgagcccgtgtacggcctgagcgaggacgagggcgagagcagaatcctgagagtgaaggtggtgagcggcatcgacctggccaagaaggacatcttcggcgccagcgacccctacgtgaagctgagcctgtacgtggccgacgagaacagagagctggccctggtgcagaccaagaccatcaagaagaccctgaaccccaagtggaacgaggagttctacttcagagtgaaccccagcaaccacagactgctgttcgaggtgttcgacgagaacagactgaccagagacgacttcctgggccaggtggacgtgcccctgagccacctgcccaccgaggaccccaccatggagagaccctacaccttcaaggacttcctgctgagacccagaagccacaagagcagagtgaagggcttcctgagactgaagatggcctacatgcccaagaacggcggccaggacgaggagaacagcgaccagagagacgacatggagcacggctgggaggtggtggacagcaacgacagcgccagccagcaccaggaggagctgccccccccccccctgccccccggctgggaggagaaggtggacaacctgggcagaacctactacgtgaaccacaacaacagaaccacccagtggcacagacccagcctgatggacgtgagcagcgagagcgacaacaacatcagacagatcaaccaggaggccgcccacagaagattcagaagcagaagacacatcagcgaggacctggagcccgagcccagcgagggcggcgacgtgcccgagccctgggagaccatcagcgaggaggtgaacatcgccggcgacagcctgggcctggccctgccccccccccccgccagccccggcagcagaaccagcccccaggagctgagcgaggagctgagcagaagactgcagatcacccccgacagcaacggcgagcagttcagcagcctgatccagagagagcccagcagcagactgagaagctgcagcgtgaccgacgccgtggccgagcagggccacctgccccccctggccgaggacggcgccagcggcagcgccaccaacagcaacaaccacctgatcgagccccagatcagaagacccagaagcctgagcagccccaccgtgaccctgagcgcccccctggagggcgccaaggacagccccgtgagaagagccgtgaaggacaccctgagcaacccccagagcccccagcccagcccctacaacagccccaagccccagcacaaggtgacccagagcttcctgccccccggctgggagatgagaatcgcccccaacggcagacccttcttcatcgaccacaacaccaagaccaccacctgggaggaccccagactgaagttccccgtgcacatgagaagcaagaccagcctgaaccccaacgacctgggccccctgccccccggctgggaggagagaatccacctggacggcagaaccttctacatcgaccacaacagcaagatcacccagtgggaggaccccagactgcagaaccccgccatcaccggccccgccgtgccctacagcagagagttcaagcagaagtacgactacttcagaaagaagctgaagaagcccgccgacatccccaacagattcgagatgaagctgcacagaaacaacatcttcgaggagagctacagaagaatcatgagcgtgaagagacccgacgtgctgaaggccagactgtggatcgagttcgagagcgagaagggcctggactacggcggcgtggccagagagtggttcttcctgctgagcaaggagatgttcaacccctactacggcctgttcgagtacagcgccaccgacaactacaccctgcagatcaaccccaacagcggcctgtgcaacgaggaccacctgagctacttcaccttcatcggcagagtggccggcctggccgtgttccacggcaagctgctggacggcttcttcatcagacccttctacaagatgatgctgggcaagcagatcaccctgaacgacatggagagcgtggacagcgagtactacaacagcctgaagtggatcctggagaacgaccccaccgagctggacctgatgttctgcatcgacgaggagaacttcggccagacctaccaggtggacctgaagcccaacggcagcgagatcatggtgaccaacgagaacaagagagagtacatcgacctggtgatccagtggagattcgtgaacagagtgcagaagcagatgaacgccttcctggagggcttcaccgagctgctgcccatcgacctgatcaagatcttcgacgagaacgagctggagctgctgatgtgcggcctgggcgacgtggacgtgaacgactggagacagcacagcatctacaagaacggctactgccccaaccaccccgtgatccagtggttctggaaggccgtgctgctgatggacgccgagaagagaatcagactgctgcagttcgtgaccggcaccagcagagtgcccatgaacggcttcgccgagctgtacggcagcaacggcccccagctgttcaccatcgagcagtggggcagccccgagaagctgcccagagcccacacctgcttcaacagactggacctgcccccctacgagaccttcgaggacctgagagagaagctgctgatggccgtggagaacgcccagggcttcgagggcgtggactag

SEQ ID NO: 90655 - DNA, 2904 bp, synthetic construct
  misc_feature 1..2904: note = Description of Artificial Sequence: Synthetic coding sequence
  source 1..2904: mol_type = other DNA
atgagaagactggccttcgagcagggcgagagcagaatcctgagagtgaaggtggtgagcggcatcgacctggccaagaaggacatcttcggcgccagcgacccctacgtgaagctgagcctgtacgtggccgacgagaacagagagctggccctggtgcagaccaagaccatcaagaagaccctgaaccccaagtggaacgaggagttctacttcagagtgaaccccagcaaccacagactgctgttcgaggtgttcgacgagaacagactgaccagagacgacttcctgggccaggtggacgtgcccctgagccacctgcccaccgaggaccccaccatggagagaccctacaccttcaaggacttcctgctgagacccagaagccacaagagcagagtgaagggcttcctgagactgaagatggcctacatgcccaagaacggcggccaggacgaggagaacagcgaccagagagacgacatggagcacggctgggaggtggtggacagcaacgacagcgccagccagcaccaggaggagctgccccccccccccctgccccccggctgggaggagaaggtggacaacctgggcagaacctactacgtgaaccacaacaacagaaccacccagtggcacagacccagcctgatggacgtgagcagcgagagcgacaacaacatcagacagatcaaccaggaggccgcccacagaagattcagaagcagaagacacatcagcgaggacctggagcccgagcccagcgagggcggcgacgtgcccgagccctgggagaccatcagcgaggaggtgaacatcgccggcgacagcctgggcctggccctgccccccccccccgccagccccggcagcagaaccagcccccaggagctgagcgaggagctgagcagaagactgcagatcacccccgacagcaacggcgagcagttcagcagcctgatccagagagagcccagcagcagactgagaagctgcagcgtgaccgacgccgtggccgagcagggccacctgcccccccccagcgcccccgccggcagagccagaagcagcaccgtgaccggcggcgaggagcccacccccagcgtggcctacgtgcacaccacccccggcctgcccagcggctgggaggagagaaaggacgccaagggcagaacctactacgtgaaccacaacaacagaaccaccacctggaccagacccatcatgcagctggccgaggacggcgccagcggcagcgccaccaacagcaacaaccacctgatcgagccccagatcagaagacccagaagcctgagcagccccaccgtgaccctgagcgcccccctggagggcgccaaggacagccccgtgagaagagccgtgaaggacaccctgagcaacccccagagcccccagcccagcccctacaacagccccaagccccagcacaaggtgacccagagcttcctgccccccggctgggagatgagaatcgcccccaacggcagacccttcttcatcgaccacaacaccaagaccaccacctgggaggaccccagactgaagttccccgtgcacatgagaagcaagaccagcctgaaccccaacgacctgggccccctgccccccggctgggaggagagaatccacctggacggcagaaccttctacatcgaccacaacagcaagatcacccagtgggaggaccccagactgcagaaccccgccatcaccggccccgccgtgccctacagcagagagttcaagcagaagtacgactacttcagaaagaagctgaagaagcccgccgacatccccaacagattcgagatgaagctgcacagaaacaacatcttcgaggagagctacagaagaatcatgagcgtgaagagacccgacgtgctgaaggccagactgtggatcgagttcgagagcgagaagggcctggactacggcggcgtggccagagagtggttcttcctgctgagcaaggagatgttcaacccctactacggcctgttcgagtacagcgccaccgacaactacaccctgcagatcaaccccaacagcggcctgtgcaacgaggaccacctgagctacttcaccttcatcggcagagtggccggcctggccgtgttccacggcaagctgctggacggcttcttcatcagacccttctacaagatgatgctgggcaagcagatcaccctgaacgacatggagagcgtggacagcgagtactacaacagcctgaagtggatcctggagaacgaccccaccgagctggacctgatgttctgcatcgacgaggagaacttcggccagacctaccaggtggacctgaagcccaacggcagcgagatcatggtgaccaacgagaacaagagagagtacatcgacctggtgatccagtggagattcgtgaacagagtgcagaagcagatgaacgccttcctggagggcttcaccgagctgctgcccatcgacctgatcaagatcttcgacgagaacgagctggagctgctgatgtgcggcctgggcgacgtggacgtgaacgactggagacagcacagcatctacaagaacggctactgccccaaccaccccgtgatccagtggttctggaaggccgtgctgctgatggacgccgagaagagaatcagactgctgcagttcgtgaccggcaccagcagagtgcccatgaacggcttcgccgagctgtacggcagcaacggcccccagctgttcaccatcgagcagtggggcagccccgagaagctgcccagagcccacacctgcttcaacagactggacctgcccccctacgagaccttcgaggacctgagagagaagctgctgatggccgtggagaacgcccagggcttcgagggcgtggactag

SEQ ID NO: 90656 - DNA, 2868 bp, synthetic construct
  misc_feature 1..2868: note = Description of Artificial Sequence: Synthetic coding sequence
  source 1..2868: mol_type = other DNA
atggccaccggcctgggcgagcccgtgtacggcctgagcgaggacgagggcgagagcagaatcctgagagtgaaggtggtgagcggcatcgacctggccaagaaggacatcttcggcgccagcgacccctacgtgaagctgagcctgtacgtggccgacgagaacagagagctggccctggtgcagaccaagaccatcaagaagaccctgaaccccaagtggaacgaggagttctacttcagagtgaaccccagcaaccacagactgctgttcgaggtgttcgacgagaacagactgaccagagacgacttcctgggccaggtggacgtgcccctgagccacctgcccaccgaggaccccaccatggagagaccctacaccttcaaggacttcctgctgagacccagaagccacaagagcagagtgaagggcttcctgagactgaagatggcctacatgcccaagaacggcggccaggacgaggagaacagcgaccagagagacgacatggagcacggctgggaggtggtggacagcaacgacagcgccagccagcaccaggaggagctgccccccccccccctgccccccggctgggaggagaaggtggacaacctgggcagaacctactacgtgaaccacaacaacagaaccacccagtggcacagacccagcctgatggacgtgagcagcgagagcgacaacaacatcagacagatcaaccaggaggccgcccacagaagattcagaagcagaagacacatcagcgaggacctggagcccgagcccagcgagggcggcgacgtgcccgagccctgggagaccatcagcgaggaggtgaacatcgccggcgacagcctgggcctggccctgccccccccccccgccagccccggcagcagaaccagcccccaggagctgagcgaggagctgagcagaagactgcagatcacccccgacagcaacggcgagcagttcagcagcctgatccagagagagcccagcagcagactgagaagctgcagcgtgaccgacgccgtggccgagcagggccacctgcccccccccagcgtggcctacgtgcacaccacccccggcctgcccagcggctgggaggagagaaaggacgccaagggcagaacctactacgtgaaccacaacaacagaaccaccacctggaccagacccatcatgcagctggccgaggacggcgccagcggcagcgccaccaacagcaacaaccacctgatcgagccccagatcagaagacccagaagcctgagcagccccaccgtgaccctgagcgcccccctggagggcgccaaggacagccccgtgagaagagccgtgaaggacaccctgagcaacccccagagcccccagcccagcccctacaacagccccaagccccagcacaaggtgacccagagcttcctgccccccggctgggagatgagaatcgcccccaacggcagacccttcttcatcgaccacaacaccaagaccaccacctgggaggaccccagactgaagttccccgtgcacatgagaagcaagaccagcctgaaccccaacgacctgggccccctgccccccggctgggaggagagaatccacctggacggcagaaccttctacatcgaccacaacagcaagatcacccagtgggaggaccccagactgcagaaccccgccatcaccggccccgccgtgccctacagcagagagttcaagcagaagtacgactacttcagaaagaagctgaagaagcccgccgacatccccaacagattcgagatgaagctgcacagaaacaacatcttcgaggagagctacagaagaatcatgagcgtgaagagacccgacgtgctgaaggccagactgtggatcgagttcgagagcgagaagggcctggactacggcggcgtggccagagagtggttcttcctgctgagcaaggagatgttcaacccctactacggcctgttcgagtacagcgccaccgacaactacaccctgcagatcaaccccaacagcggcctgtgcaacgaggaccacctgagctacttcaccttcatcggcagagtggccggcctggccgtgttccacggcaagctgctggacggcttcttcatcagacccttctacaagatgatgctgggcaagcagatcaccctgaacgacatggagagcgtggacagcgagtactacaacagcctgaagtggatcctggagaacgaccccaccgagctggacctgatgttctgcatcgacgaggagaacttcggccagacctaccaggtggacctgaagcccaacggcagcgagatcatggtgaccaacgagaacaagagagagtacatcgacctggtgatccagtggagattcgtgaacagagtgcagaagcagatgaacgccttcctggagggcttcaccgagctgctgcccatcgacctgatcaagatcttcgacgagaacgagctggagctgctgatgtgcggcctgggcgacgtggacgtgaacgactggagacagcacagcatctacaagaacggctactgccccaaccaccccgtgatccagtggttctggaaggccgtgctgctgatggacgccgagaagagaatcagactgctgcagttcgtgaccggcaccagcagagtgcccatgaacggcttcgccgagctgtacggcagcaacggcccccagctgttcaccatcgagcagtggggcagccccgagaagctgcccagagcccacacctgcttcaacagactggacctgcccccctacgagaccttcgaggacctgagagagaagctgctgatggccgtggagaacgcccagggcttcgagggcgtggactag

SEQ ID NO: 90657 - DNA, 2928 bp, synthetic construct
  misc_feature 1..2928: note = Description of Artificial Sequence: Synthetic coding sequence
  source 1..2928: mol_type = other DNA
atggccaccggcctgggcgagcccgtgtacggcctgagcgaggacgagggcgagagcagaatcctgagagtgaaggtggtgagcggcatcgacctggccaagaaggacatcttcggcgccagcgacccctacgtgaagctgagcctgtacgtggccgacgagaacagagagctggccctggtgcagaccaagaccatcaagaagaccctgaaccccaagtggaacgaggagttctacttcagagtgaaccccagcaaccacagactgctgttcgaggtgttcgacgagaacagactgaccagagacgacttcctgggccaggtggacgtgcccctgagccacctgcccaccgaggaccccaccatggagagaccctacaccttcaaggacttcctgctgagacccagaagccacaagagcagagtgaagggcttcctgagactgaagatggcctacatgcccaagaacggcggccaggacgaggagaacagcgaccagagagacgacatggagcacggctgggaggtggtggacagcaacgacagcgccagccagcaccaggaggagctgccccccccccccctgccccccggctgggaggagaaggtggacaacctgggcagaacctactacgtgaaccacaacaacagaaccacccagtggcacagacccagcctgatggacgtgagcagcgagagcgacaacaacatcagacagatcaaccaggaggccgcccacagaagattcagaagcagaagacacatcagcgaggacctggagcccgagcccagcgagggcggcgacgtgcccgagccctgggagaccatcagcgaggaggtgaacatcgccggcgacagcctgggcctggccctgccccccccccccgccagccccggcagcagaaccagcccccaggagctgagcgaggagctgagcagaagactgcagatcacccccgacagcaacggcgagcagttcagcagcctgatccagagagagcccagcagcagactgagaagctgcagcgtgaccgacgccgtggccgagcagggccacctgcccccccccagcgcccccgccggcagagccagaagcagcaccgtgaccggcggcgaggagcccacccccagcgtggcctacgtgcacaccacccccggcctgcccagcggctgggaggagagaaaggacgccaagggcagaacctactacgtgaaccacaacaacagaaccaccacctggaccagacccatcatgcagctggccgaggacggcgccagcggcagcgccaccaacagcaacaaccacctgatcgagccccagatcagaagacccagaagcctgagcagccccaccgtgaccctgagcgcccccctggagggcgccaaggacagccccgtgagaagagccgtgaaggacaccctgagcaacccccagagcccccagcccagcccctacaacagccccaagccccagcacaaggtgacccagagcttcctgccccccggctgggagatgagaatcgcccccaacggcagacccttcttcatcgaccacaacaccaagaccaccacctgggaggaccccagactgaagttccccgtgcacatgagaagcaagaccagcctgaaccccaacgacctgggccccctgccccccggctgggaggagagaatccacctggacggcagaaccttctacatcgaccacaacagcaagatcacccagtgggaggaccccagactgcagaaccccgccatcaccggccccgccgtgccctacagcagagagttcaagcagaagtacgactacttcagaaagaagctgaagaagcccgccgacatccccaacagattcgagatgaagctgcacagaaacaacatcttcgaggagagctacagaagaatcatgagcgtgaagagacccgacgtgctgaaggccagactgtggatcgagttcgagagcgagaagggcctggactacggcggcgtggccagagagtggttcttcctgctgagcaaggagatgttcaacccctactacggcctgttcgagtacagcgccaccgacaactacaccctgcagatcaaccccaacagcggcctgtgcaacgaggaccacctgagctacttcaccttcatcggcagagtggccggcctggccgtgttccacggcaagctgctggacggcttcttcatcagacccttctacaagatgatgctgggcaagcagatcaccctgaacgacatggagagcgtggacagcgagtactacaacagcctgaagtggatcctggagaacgaccccaccgagctggacctgatgttctgcatcgacgaggagaacttcggccagacctaccaggtggacctgaagcccaacggcagcgagatcatggtgaccaacgagaacaagagagagtacatcgacctggtgatccagtggagattcgtgaacagagtgcagaagcagatgaacgccttcctggagggcttcaccgagctgctgcccatcgacctgatcaagatcttcgacgagaacgagctggagctgctgatgtgcggcctgggcgacgtggacgtgaacgactggagacagcacagcatctacaagaacggctactgccccaaccaccccgtgatccagtggttctggaaggccgtgctgctgatggacgccgagaagagaatcagactgctgcagttcgtgaccggcaccagcagagtgcccatgaacggcttcgccgagctgtacggcagcaacggcccccagctgttcaccatcgagcagtggggcagccccgagaagctgcccagagcccacacctgcttcaacagactggacctgcccccctacgagaccttcgaggacctgagagagaagctgctgatggccgtggagaacgcccagggcttcgagggcgtggactag

SEQ ID NO: 90658 - DNA, 2565 bp, synthetic construct
  misc_feature 1..2565: note = Description of Artificial Sequence: Synthetic coding sequence
  source 1..2565: mol_type = other DNA
atggagagaccctacaccttcaaggacttcctgctgagacccagaagccacaagagcagagtgaagggcttcctgagactgaagatggcctacatgcccaagaacggcggccaggacgaggagaacagcgaccagagagacgacatggagcacggctgggaggtggtggacagcaacgacagcgccagccagcaccaggaggagctgccccccccccccctgccccccggctgggaggagaaggtggacaacctgggcagaacctactacgtgaaccacaacaacagaaccacccagtggcacagacccagcctgatggacgtgagcagcgagagcgacaacaacatcagacagatcaaccaggaggccgcccacagaagattcagaagcagaagacacatcagcgaggacctggagcccgagcccagcgagggcggcgacgtgcccgagccctgggagaccatcagcgaggaggtgaacatcgccggcgacagcctgggcctggccctgccccccccccccgccagccccggcagcagaaccagcccccaggagctgagcgaggagctgagcagaagactgcagatcacccccgacagcaacggcgagcagttcagcagcctgatccagagagagcccagcagcagactgagaagctgcagcgtgaccgacgccgtggccgagcagggccacctgcccccccccagcgcccccgccggcagagccagaagcagcaccgtgaccggcggcgaggagcccacccccagcgtggcctacgtgcacaccacccccggcctgcccagcggctgggaggagagaaaggacgccaagggcagaacctactacgtgaaccacaacaacagaaccaccacctggaccagacccatcatgcagctggccgaggacggcgccagcggcagcgccaccaacagcaacaaccacctgatcgagccccagatcagaagacccagaagcctgagcagccccaccgtgaccctgagcgcccccctggagggcgccaaggacagccccgtgagaagagccgtgaaggacaccctgagcaacccccagagcccccagcccagcccctacaacagccccaagccccagcacaaggtgacccagagcttcctgccccccggctgggagatgagaatcgcccccaacggcagacccttcttcatcgaccacaacaccaagaccaccacctgggaggaccccagactgaagttccccgtgcacatgagaagcaagaccagcctgaaccccaacgacctgggccccctgccccccggctgggaggagagaatccacctggacggcagaaccttctacatcgaccacaacagcaagatcacccagtgggaggaccccagactgcagaaccccgccatcaccggccccgccgtgccctacagcagagagttcaagcagaagtacgactacttcagaaagaagctgaagaagcccgccgacatccccaacagattcgagatgaagctgcacagaaacaacatcttcgaggagagctacagaagaatcatgagcgtgaagagacccgacgtgctgaaggccagactgtggatcgagttcgagagcgagaagggcctggactacggcggcgtggccagagagtggttcttcctgctgagcaaggagatgttcaacccctactacggcctgttcgagtacagcgccaccgacaactacaccctgcagatcaaccccaacagcggcctgtgcaacgaggaccacctgagctacttcaccttcatcggcagagtggccggcctggccgtgttccacggcaagctgctggacggcttcttcatcagacccttctacaagatgatgctgggcaagcagatcaccctgaacgacatggagagcgtggacagcgagtactacaacagcctgaagtggatcctggagaacgaccccaccgagctggacctgatgttctgcatcgacgaggagaacttcggccagacctaccaggtggacctgaagcccaacggcagcgagatcatggtgaccaacgagaacaagagagagtacatcgacctggtgatccagtggagattcgtgaacagagtgcagaagcagatgaacgccttcctggagggcttcaccgagctgctgcccatcgacctgatcaagatcttcgacgagaacgagctggagctgctgatgtgcggcctgggcgacgtggacgtgaacgactggagacagcacagcatctacaagaacggctactgccccaaccaccccgtgatccagtggttctggaaggccgtgctgctgatggacgccgagaagagaatcagactgctgcagttcgtgaccggcaccagcagagtgcccatgaacggcttcgccgagctgtacggcagcaacggcccccagctgttcaccatcgagcagtggggcagccccgagaagctgcccagagcccacacctgcttcaacagactggacctgcccccctacgagaccttcgaggacctgagagagaagctgctgatggccgtggagaacgcccagggcttcgagggcgtggactag

SEQ ID NO: 90659 - DNA, 2505 bp, synthetic construct
  misc_feature 1..2505: note = Description of Artificial Sequence: Synthetic coding sequence
  source 1..2505: mol_type = other DNA
atggagagaccctacaccttcaaggacttcctgctgagacccagaagccacaagagcagagtgaagggcttcctgagactgaagatggcctacatgcccaagaacggcggccaggacgaggagaacagcgaccagagagacgacatggagcacggctgggaggtggtggacagcaacgacagcgccagccagcaccaggaggagctgccccccccccccctgccccccggctgggaggagaaggtggacaacctgggcagaacctactacgtgaaccacaacaacagaaccacccagtggcacagacccagcctgatggacgtgagcagcgagagcgacaacaacatcagacagatcaaccaggaggccgcccacagaagattcagaagcagaagacacatcagcgaggacctggagcccgagcccagcgagggcggcgacgtgcccgagccctgggagaccatcagcgaggaggtgaacatcgccggcgacagcctgggcctggccctgccccccccccccgccagccccggcagcagaaccagcccccaggagctgagcgaggagctgagcagaagactgcagatcacccccgacagcaacggcgagcagttcagcagcctgatccagagagagcccagcagcagactgagaagctgcagcgtgaccgacgccgtggccgagcagggccacctgcccccccccagcgtggcctacgtgcacaccacccccggcctgcccagcggctgggaggagagaaaggacgccaagggcagaacctactacgtgaaccacaacaacagaaccaccacctggaccagacccatcatgcagctggccgaggacggcgccagcggcagcgccaccaacagcaacaaccacctgatcgagccccagatcagaagacccagaagcctgagcagccccaccgtgaccctgagcgcccccctggagggcgccaaggacagccccgtgagaagagccgtgaaggacaccctgagcaacccccagagcccccagcccagcccctacaacagccccaagccccagcacaaggtgacccagagcttcctgccccccggctgggagatgagaatcgcccccaacggcagacccttcttcatcgaccacaacaccaagaccaccacctgggaggaccccagactgaagttccccgtgcacatgagaagcaagaccagcctgaaccccaacgacctgggccccctgccccccggctgggaggagagaatccacctggacggcagaaccttctacatcgaccacaacagcaagatcacccagtgggaggaccccagactgcagaaccccgccatcaccggccccgccgtgccctacagcagagagttcaagcagaagtacgactacttcagaaagaagctgaagaagcccgccgacatccccaacagattcgagatgaagctgcacagaaacaacatcttcgaggagagctacagaagaatcatgagcgtgaagagacccgacgtgctgaaggccagactgtggatcgagttcgagagcgagaagggcctggactacggcggcgtggccagagagtggttcttcctgctgagcaaggagatgttcaacccctactacggcctgttcgagtacagcgccaccgacaactacaccctgcagatcaaccccaacagcggcctgtgcaacgaggaccacctgagctacttcaccttcatcggcagagtggccggcctggccgtgttccacggcaagctgctggacggcttcttcatcagacccttctacaagatgatgctgggcaagcagatcaccctgaacgacatggagagcgtggacagcgagtactacaacagcctgaagtggatcctggagaacgaccccaccgagctggacctgatgttctgcatcgacgaggagaacttcggccagacctaccaggtggacctgaagcccaacggcagcgagatcatggtgaccaacgagaacaagagagagtacatcgacctggtgatccagtggagattcgtgaacagagtgcagaagcagatgaacgccttcctggagggcttcaccgagctgctgcccatcgacctgatcaagatcttcgacgagaacgagctggagctgctgatgtgcggcctgggcgacgtggacgtgaacgactggagacagcacagcatctacaagaacggctactgccccaaccaccccgtgatccagtggttctggaaggccgtgctgctgatggacgccgagaagagaatcagactgctgcagttcgtgaccggcaccagcagagtgcccatgaacggcttcgccgagctgtacggcagcaacggcccccagctgttcaccatcgagcagtggggcagccccgagaagctgcccagagcccacacctgcttcaacagactggacctgcccccctacgagaccttcgaggacctgagagagaagctgctgatggccgtggagaacgcccagggcttcgagggcgtggactag

SEQ ID NO: 90660 - DNA, 2505 bp, synthetic construct; identical to SEQ ID NO: 90659
  misc_feature 1..2505: note = Description of Artificial Sequence: Synthetic coding sequence
  source 1..2505: mol_type = other DNA

SEQ ID NO: 90661 - DNA, 2565 bp, synthetic construct; identical to SEQ ID NO: 90658
  misc_feature 1..2565: note = Description of Artificial Sequence: Synthetic coding sequence
  source 1..2565: mol_type = other DNA

SEQ ID NO: 90662 - DNA, 525 bp, synthetic construct
  misc_feature 1..525: note = Description of Artificial Sequence: Synthetic coding sequence
  source 1..525: mol_type = other DNA
atgaagtacaagaacctgatggccagagccctgtacgacaacgtgcccgagtgcgccgaggagctggccttcagaaagggcgacatcctgaccgtgatcgagcagaacaccggcggcctggagggctggtggctgtgcagcctgcacggcagacagggcatcgtgcccggcaacagagtgaagctgctgatcggccccatgcaggagaccgccagcagccacgagcagcccgccagcggcctgatgcagcagaccttcggccagcagaagctgtaccaggtgcccaacccccaggccgcccccagagacaccatctaccaggtgccccccagctaccagaaccagggcatctaccaggtgcccaccggccacggcacccaggagcaggaggtgtaccaggtgccccccagcgtgcagagaagcatcggcggcaccagcggcccccacgtgggcaagaaggtgttccagagagacggccaggtgagctacttcctggtgagagccagcaagcagaccagcctgtag

SEQ ID NO: 90663 - DNA, 2505 bp, synthetic construct
  misc_feature 1..2505: note = Description of Artificial Sequence: Synthetic coding sequence
  source 1..2505: mol_type = other DNA
atgaagtacaagaacctgatggccagagccctgtacgacaacgtgcccgagtgcgccgaggagctggccttcagaaagggcgacatcctgaccgtgatcgagcagaacaccggcggcctggagggctggtggctgtgcagcctgcacggcagacagggcatcgtgcccggcaacagagtgaagctgctgatcggccccatgcaggagaccgccagcagccacgagcagcccgccagcggcctgatgcagcagaccttcggccagcagaagctgtaccaggtgcccaacccccaggccgcccccagagacaccatctaccaggtgccccccagctaccagaaccagggcatctaccaggtgcccaccggccacggcacccaggagcaggaggtgtaccaggtgccccccagcgtgcagagaagcatcggcggcaccagcggcccccacgtgggcaagaaggtgatcacccccgtgagaaccggccacggctacgtgtacgagtaccccagcagataccagaaggacgtgtacgacatcccccccagccacaccacccagggcgtgtacgacatcccccccagcagcgccaagggccccgtgttcagcgtgcccgtgggcgagatcaagccccagggcgtgtacgacatcccccccaccaagggcgtgtacgccatcccccccagcgcctgcagagacgaggccggcctgagagagaaggactacgacttccccccccccatgagacaggccggcagacccgacctgagacccgagggcgtgtacgacatcccccccacctgcaccaagcccgccggcaaggacctgcacgtgaagtacaactgcgacatccccggcgccgccgagcccgtggccagaagacaccagagcctgagccccaaccacccccccccccagctgggccagagcgtgggcagccagaacgacgcctacgacgtgcccagaggcgtgcagttcctggagccccccgccgagaccagcgagaaggccaacccccaggagagagacggcgtgtacgacgtgcccctgcacaacccccccgacgccaagggcagcagagacctggtggacggcatcaacagactgagcttcagcagcaccggcagcaccagaagcaacatgagcaccagcagcaccagcagcaaggagagcagcctgagcgccagccccgcccaggacaagagactgttcctggaccccgacaccgccatcgagagactgcagagactgcagcaggccctggagatgggcgtgagcagcctgatggccctggtgaccaccgactggagatgctacggctacatggagagacacatcaacgagatcagaaccgccgtggacaaggtggagctgttcctgaaggagtacctgcacttcgtgaagggcgccgtggccaacgccgcctgcctgcccgagctgatcctgcacaacaagatgaagagagagctgcagagagtggaggacagccaccagatcctgagccagaccagccacgacctgaacgagtgcagctggagcctgaacatcctggccatcaacaagccccagaacaagtgcgacgacctggacagattcgtgatggtggccaagaccgtgcccgacgacgccaagcagctgaccaccaccatcaacaccaacgccgaggccctgttcagacccggccccggcagcctgcacctgaagaacggccccgagagcatcatgaacagcaccgagtacccccacggcggcagccagggccagctgctgcaccccggcgaccacaaggcccaggcccacaacaaggccctgccccccggcctgagcaaggagcaggcccccgactgcagcagcagcgacggcagcgagagaagctggatggacgactacgactacgtgcacctgcagggcaaggaggagttcgagagacagcagaaggagctgctggagaaggagaacatcatgaagcagaacaagatgcagctggagcaccaccagctgagccagttccagctgctggagcaggagatcaccaagcccgtggagaacgacatcagcaagtggaagcccagccagagcctgcccaccaccaacagcggcgtgagcgcccaggacagacagctgctgtgcttctactacgaccagtgcgagacccacttcatcagcctgctgaacgccatcgacgccctgttcagctgcgtgagcagcgcccagccccccagaatcttcgtggcccacagcaagttcgtgatcctgagcgcccacaagctggtgttcatcggcgacaccctgaccagacaggtgaccgcccaggacatcagaaacaaggtgatgaacagcagcaaccagctgtgcgagcagctgaagaccatcgtgatggccaccaagatggccgccctgcactaccccagcaccaccgccctgcaggagatggtgcaccaggtgaccgacctgagcagaaacgcccagctgttcaagagaagcctgctggagatggccaccttctag

SEQ ID NO: 90664 - DNA, 99 bp, synthetic construct
  misc_feature 1..99: note = Description of Artificial Sequence: Synthetic coding sequence
  source 1..99: mol_type = other DNA
atgtggaccagaaacctgatggccagagccctgtacgacaacgtgcccgagtgcgccgaggagctggccttcagaaagggcgacatcctgaccgtgtag

SEQ ID NO: 90665 - DNA, 2505 bp, synthetic construct
  misc_feature 1..2505: note = Description of Artificial Sequence: Synthetic coding sequence
  source 1..2505: mol_type = other DNA
atgtggaccagaaacctgatggccagagccctgtacgacaacgtgcccgagtgcgccgaggagctggccttcagaaagggcgacatcctgaccgtgatcgagcagaacaccggcggcctggagggctggtggctgtgcagcctgcacggcagacagggcatcgtgcccggcaacagagtgaagctgctgatcggccccatgcaggagaccgccagcagccacgagcagcccgccagcggcctgatgcagcagaccttcggccagcagaagctgtaccaggtgcccaacccccaggccgcccccagagacaccatctaccaggtgccccccagctaccagaaccagggcatctaccaggtgcccaccggccacggcacccaggagcaggaggtgtaccaggtgccccccagcgtgcagagaagcatcggcggcaccagcggcccccacgtgggcaagaaggtgatcacccccgtgagaaccggccacggctacgtgtacgagtaccccagcagataccagaaggacgtgtacgacatcccccccagccacaccacccagggcgtgtacgacatcccccccagcagcgccaagggccccgtgttcagcgtgcccgtgggcgagatcaagccccagggcgtgtacgacatcccccccaccaagggcgtgtacgccatcccccccagcgcctgcagagacgaggccggcctgagagagaaggactacgacttccccccccccatgagacaggccggcagacccgacctgagacccgagggcgtgtacgacatcccccccacctgcaccaagcccgccggcaaggacctgcacgtgaagtacaactgcgacatccccggcgccgccgagcccgtggccagaagacaccagagcctgagccccaaccacccccccccccagctgggccagagcgtgggcagccagaacgacgcctacgacgtgcccagaggcgtgcagttcctggagccccccgccgagaccagcgagaaggccaacccccaggagagagacggcgtgtacgacgtgcccctgcacaacccccccgacgccaagggcagcagagacctggtggacggcatcaacagactgagcttcagcagcaccggcagcaccagaagcaacatgagcaccagcagcaccagcagcaaggagagcagcctgagcgccagccccgcccaggacaagagactgttcctggaccccgacaccgccatcgagagactgcagagactgcagcaggccctggagatgggcgtgagcagcctgatggccctggtgaccaccgactggagatgctacggctacatggagagacacatcaacgagatcagaaccgccgtggacaaggtggagctgttcctgaaggagtacctgcacttcgtgaagggcgccgtggccaacgccgcctgcctgcccgagctgatcctgcacaacaagatgaagagagagctgcagagagtggaggacagccaccagatcctgagccagaccagccacgacctgaacgagtgcagctggagcctgaacatcctggccatcaacaagccccagaacaagtgcgacgacctggacagattcgtgatggtggccaagaccgtgcccgacgacgccaagcagctgaccaccaccatcaacaccaacgccgaggccctgttcagacccggccccggcagcctgcacctgaagaacggccccgagagcatcatgaacagcaccgagtacccccacggcggcagccagggccagctgctgcaccccggcgaccacaaggcccaggcccacaacaaggccctgccccccggcctgagcaaggagcaggcccccgactgcagcagcagcgacggcagcgagagaagctggatggacgactacgactacgtgcacctgcagggcaaggaggagttcgagagacagcagaaggagctgctggagaaggagaacatcatgaagcagaacaagatgcagctggagcaccaccagctgagccagttccagctgctggagcaggagatcaccaagcccgtggagaacgacatcagcaagtggaagcccagccagagcctgcccaccaccaacagcggcgtgagcgcccaggacagacagctgctgtgcttctactacgaccagtgcgagacccacttcatcagcctgctgaacgccatcgacgccctgttcagctgcgtgagcagcgcccagccccccagaatcttcgtggcccacagcaagttcgtgatcctgagcgcccacaagctggtgttcatcggcgacaccctgaccagacaggtgaccgcccaggacatcagaaacaaggtgatgaacagcagcaaccagctgtgcgagcagctgaagaccatcgtgatggccaccaagatggccgccctgcactaccccagcaccaccgccctgcaggagatggtgcaccaggtgaccgacctgagcagaaacgcccagctgttcaagagaagcctgctggagatggccaccttctag

SEQ ID NO: 90666 - DNA, 1212 bp, synthetic construct
  misc_feature 1..1212: note = Description of Artificial Sequence: Synthetic coding sequence
  source 1..1212: mol_type = other DNA
atgctgagacccgaggccggcctggtgggcctgcacggccccgcccaggagaacagcgccctgcccggcagaagagacagcgccagcgagctgagagccctgagcggcctggaggtggaccccggcgagggctggggcagagtggtgctgatcagccccagaaccgtgagattcagagtgctgagccccggcgtgagagaggagggccacgtgcagaacaacggccagaaccaggccagacccgccagaggcgtgaccggcgccggcggctggggcagcgccgccgtgtgcagaggcagagccctgagaggcagagagcccgccctgcccagcgccagcttccccgacgtggccgcctgccccggcagcctggactgcgccctgaagagaagagccagatgcccccccggcgcccacgcctgcggcccctgcctgcagcccttccaggaggaccagcagggcctgtgcgtgcccagaatgagaagaccccccggcggcggcagaccccagcccagactggaggacgagatcgacttcctggcccaggagctggccagaaaggagagcggccacagcaccccccccctgcccaaggacagacagagactgcccgagcccgccaccctgggcttcagcgccagaggccagggcctggagctgggcctgcccagcacccccggcacccccacccccaccccccacaccagcctgggcagccccgtgagcagcgaccccgtgcacatgagccccctggagcccagaggcggccagggcgacggcctggccctggtgctgatcctggccttctgcgtggccggcgccgccgccctgagcgtggccagcctgtgctggtgcagactgcagagagagatcagactgacccagaaggccgactacgccaccgccaaggcccccggcagccccgccgcccccagaatcagccccggcgaccagagactggcccagagcgccgagatgtaccactaccagcaccagagacagcagatgctgtgcctggagagacacaaggagccccccaaggagctggacaccgccagcagcgacgaggagaacgaggacggcgacttcaccgtgtacgagtgccccggcctggcccccaccggcgagatggaggtgagaaaccccctgttcgaccacgccgccctgagcgcccccctgcccgcccccagcagcccccccgccctgccctag

SEQ ID NO: 90667 - DNA, 978 bp, synthetic construct
  misc_feature 1..978: note = Description of Artificial Sequence: Synthetic coding sequence
  source 1..978: mol_type = other DNA
atggccacccccctgcccccccccagccccagacacctgagactgctgagactgctgctgagcggcctggtgctgggcgccgccctgagaggcgccgccgccggccaccccgacgtggccgcctgccccggcagcctggactgcgccctgaagagaagagccagatgcccccccggcgcccacgcctgcggcccctgcctgcagcccttccaggaggaccagcagggcctgtgcgtgcccagaatgagaagaccccccggcggcggcagaccccagcccagactggaggacgagatcgacttcctggcccaggagctggccagaaaggagagcggccacagcaccccccccctgcccaaggacagacagagactgcccgagcccgccaccctgggcttcagcgccagaggccagggcctggagctgggcctgcccagcacccccggcacccccacccccaccccccacaccagcctgggcagccccgtgagcagcgaccccgtgcacatgagccccctggagcccagaggcggccagggcgacggcctggccctggtgctgatcctggccttctgcgtggccggcgccgccgccctgagcgtggccagcctgtgctggtgcagactgcagagagagatcagactgacccagaaggccgactacgccaccgccaaggcccccggcagccccgccgcccccagaatcagccccggcgaccagagactggcccagagcgccgagatgtaccactaccagcaccagagacagcagatgctgtgcctggagagacacaaggagccccccaaggagctggacaccgccagcagcgacgaggagaacgaggacggcgacttcaccgtgtacgagtgccccggcctggcccccaccggcgagatggaggtgagaaaccccctgttcgaccacgccgccctgagcgcccccctgcccgcccccagcagcccccccgccctgccctag

SEQ ID NO: 90668 - DNA, 297 bp, synthetic construct
  misc_feature 1..297: note = Description of Artificial Sequence: Synthetic coding sequence
  source 1..297: mol_type = other DNA
atgagcgtgagagagctgaacagacagctgagaggctgcggcagagacgaggccctgagactgaagcagagaagaagaaccctgaagaacagaggctacgcccaggcctgcagaagcaagagactgcagcagagaagaggcctggaggccgagagagccagactggccgcccagctggacgccctgagagccgaggtggccagactggccagagagagagacctgtacaaggccagatgcgacagactgaccagcagcggccccggcagcggcgaccccagccacctgttcctgtag

SEQ ID NO: 90669 - DNA, 714 bp, synthetic construct
  misc_feature 1..714: note = Description of Artificial Sequence: Synthetic coding sequence
  source 1..714: mol_type = other DNA
atggccctgccccccagccccctggccatggagtacgtgaacgacttcgacctgatgaagttcgaggtgaagagagagcccagcgagggcagacccggcccccccaccgccagcctgggcagcaccccctacagcagcgtgccccccagccccaccttcagcgagcccggcatggtgggcgccaccgagggcaccagacccggcctggaggagctgtactggctggccaccctgcagcagcagctgggcgccggcgaggccctgggcctgagccccgaggaggccatggagctgctgcagggccagggccccgtgcccgtggacggcccccacggctactaccccggcagccccgaggagaccggcgcccagcacgtgcagctggccgagagattcagcgacgccgccctggtgagcatgagcgtgagagagctgaacagacagctgagaggctgcggcagagacgaggccctgagactgaagcagagaagaagaaccctgaagaacagaggctacgcccaggcctgcagaagcaagagactgcagcagagaagaggcctggaggccgagagagccagactggccgcccagctggacgccctgagagccgaggtggccagactggccagagagagagacctgtacaaggccagatgcgacagactgaccagcagcggccccggcagcggcgaccccagccacctgttcctgtag

SEQ ID NO: 90670 - DNA, 714 bp, synthetic construct; identical to SEQ ID NO: 90669
  misc_feature 1..714: note = Description of Artificial Sequence: Synthetic coding sequence
  source 1..714: mol_type = other DNA

SEQ ID NO: 90671 - DNA, 198 bp, synthetic construct
  misc_feature 1..198: note = Description of Artificial Sequence: Synthetic coding sequence
  source 1..198: mol_type = other DNA
atggccctgccccccagccccctggccatggagtacgtgaacgacttcgacctgatgaagttcgaggtgaagagagagcccagcgagggcagacccggcccccccaccgccagcctgggcagcaccccctacagcagcgtgccccccagccccaccttcagcgagcccggcatggtgggcgccaccgagggcacctag

SEQ ID NO: 90672 - DNA, 297 bp, synthetic construct; identical to SEQ ID NO: 90668
  misc_feature 1..297: note = Description of Artificial Sequence: Synthetic coding sequence
  source 1..297: mol_type = other DNA

SEQ ID NO: 90673 - DNA, 714 bp, synthetic construct; identical to SEQ ID NO: 90669
  misc_feature 1..714: note = Description of Artificial Sequence: Synthetic coding sequence
  source 1..714: mol_type = other DNA

SEQ ID NO: 90674 - DNA, 1674 bp, synthetic construct
  misc_feature 1..1674: note = Description of Artificial Sequence: Synthetic coding sequence
  source 1..1674: mol_type = other DNA
atgggcggccagatcaccagaagcaccctgcacgacagcatcggcggccccttccccgtgaccagccacagatgccaccacaagcagaagcactgccccgccgtgctgcccagcggcggcctgcccgccacccccctgctgttccacccccacaccaagggcagccagatcctgatggacctgagccacaaggccgtgaagagacaggccagcttctgcaacgccatcaccttcagcaacagacccgtgctgatctacgagcaggtgagactgaagatcaccaagaagcagtgctgctggagcggcgccctgagactgggcttcaccagcaaggaccccagcagaatccaccccgacagcctgcccaagtacgcctgccccgacctggtgagccagagcggcttctgggccaaggccctgcccgaggagttcgccaacgagggcaacatcatcgccttctgggtggacaagaagggcagagtgttccacagaatcaacgacagcgccgtgatgctgttcttcagcggcgtgagaaccgccgaccccctgtgggccctggtggacgtgtacggcctgaccagaggcgtgcagctgctggacagcgagctggtgctgcccgactgcctgagacccagaagcttcaccgccctgagaagacccagcctgagaagagaggccgacgacgccagactgagcgtgagcctgtgcgacctgaacgtgcccggcgccgacggcgacgaggccgcccccgccgccggctgccccatcccccagaacagcctgaacagccagcacagcagagccctgcccgcccagctggacggcgacctgagattccacgccctgagagccggcgcccacgtgagaatcctggacgagcagaccgtggccagagtggagcacggcagagacgagagagccctggtgttcaccagcagacccgtgagagtggccgagaccatcttcgtgaaggtgaccagaagcggcggcgccagacccggcgccctgagcttcggcgtgaccacctgcgaccccggcaccctgagacccgccgacctgcccttcagccccgaggccctggtggacagaaaggagttctgggccgtgtgcagagtgcccggccccctgcacagcggcgacatcctgggcctggtggtgaacgccgacggcgagctgcacctgagccacaacggcgccgccgccggcatgcagctgtgcgtggacgccagccagcccctgtggatgctgttcggcctgcacggcaccatcacccagatcagaatcctgggcagcaccatcctggccgagagaggcatccccagcctgccctgcagccccgccagcacccccaccagccccagcgccctgggcagcagactgagcgaccccctgctgagcacctgcagcagcggccccctgggcagcagcgccggcggcaccgcccccaacagccccgtgagcctgcccgagagccccgtgacccccggcctgggccagtggagcgacgagtgcaccatctgctacgagcacgccgtggacaccgtgatctacacctgcggccacatgtgcctgtgctacgcctgcggcctgagactgaagaaggccctgcacgcctgctgccccatctgcagaagacccatcaaggacatcatcaagacctacagaagcagctag

SEQ ID NO: 90675 - DNA, 1725 bp, synthetic construct
  misc_feature 1..1725: note = Description of Artificial Sequence: Synthetic coding sequence
  source 1..1725: mol_type = other DNA
atgggcaacaacttcagcagcatccccagcctgcccagaggcaaccccagcagagcccccagaggccacccccagaacctgaaggacagcatcggcggccccttccccgtgaccagccacagatgccaccacaagcagaagcactgccccgccgtgctgcccagcggcggcctgcccgccacccccctgctgttccacccccacaccaagggcagccagatcctgatggacctgagccacaaggccgtgaagagacaggccagcttctgcaacgccatcaccttcagcaacagacccgtgctgatctacgagcaggtgagactgaagatcaccaagaagcagtgctgctggagcggcgccctgagactgggcttcaccagcaaggaccccagcagaatccaccccgacagcctgcccaagtacgcctgccccgacctggtgagccagagcggcttctgggccaaggccctgcccgaggagttcgccaacgagggcaacatcatcgccttctgggtggacaagaagggcagagtgttccacagaatcaacgacagcgccgtgatgctgttcttcagcggcgtgagaaccgccgaccccctgtgggccctggtggacgtgtacggcctgaccagaggcgtgcagctgctggacagcgagctggtgctgcccgactgcctgagacccagaagcttcaccgccctgagaagacccagcctgagaagagaggccgacgacgccagactgagcgtgagcctgtgcgacctgaacgtgcccggcgccgacggcgacgaggccgcccccgccgccggctgccccatcccccagaacagcctgaacagccagcacagcagagccctgcccgcccagctggacggcgacctgagattccacgccctgagagccggcgcccacgtgagaatcctggacgagcagaccgtggccagagtggagcacggcagagacgagagagccctggtgttcaccagcagacccgtgagagtggccgagaccatcttcgtgaaggtgaccagaagcggcggcgccagacccggcgccctgagcttcggcgtgaccacctgcgaccccggcaccctgagacccgccgacctgcccttcagccccgaggccctggtggacagaaaggagttctgggccgtgtgcagagtgcccggccccctgcacagcggcgacatcctgggcctggtggtgaacgccgacggcgagctgcacctgagccacaacggcgccgccgccggcatgcagctgtgcgtggacgccagccagcccctgtggatgctgttcggcctgcacggcaccatcacccagatcagaatcctgggcagcaccatcctggccgagagaggcatccccagcctgccctgcagccccgccagcacccccaccagccccagcgccctgggcagcagactgagcgaccccctgctgagcacctgcagcagcggccccctgggcagcagcgccggcggcaccgcccccaacagccccgtgagcctgcccgagagccccgtgacccccggcctgggccagtggagcgacgagtgcaccatctgctacgagcacgccgtggacaccgtgatctacacctgcggccacatgtgcctgtgctacgcctgcggcctgagactgaagaaggccctgcacgcctgctgccccatctgcagaagacccatcaaggacatcatcaagacctacagaagcagctag

SEQ ID NO: 90676 - DNA, 600 bp, synthetic construct
  misc_feature 1..600: note = Description of Artificial Sequence: Synthetic coding sequence
  source 1..600: mol_type = other DNA
atgggcggccagatcaccagaagcaccctgcacgacagcatcggcggccccttccccgtgaccagccacagatgccaccacaagcagaagcactgccccgccgtgctgcccagcggcggcctgcccgccacccccctgctgttccacccccacaccaagggcagccagatcctgatggacctgagccacaaggccgtgaagagacaggccagcttctgcaacgccatcaccttcagcaacagacccgtgctgatctacgagcaggtgagactgaagatcaccaagaagcagtgctgctggagcggcgccctgagactgggcttcaccagcaaggaccccagcagaatccaccccgacagcctgcccaagtacgcctgccccgacctggtgagccagagcggcttctgggccaaggccctgcccgaggagttcgccaacgagggcaacatcatcgccttctgggtggacaagaagggcagagtgttccacagaatcaacgacagcgccgtgatgctgttcttcagcggcgtgagaaccgccgaccccctgtgggccctggtggacgtgtacggcctgaccagaggcgtgcagctgctgtag

SEQ ID NO: 90677 - DNA, 327 bp, synthetic construct
  misc_feature 1..327: note = Description of Artificial Sequence: Synthetic coding sequence
  source 1..327: mol_type = other DNA
atggacctgagccacaaggccgtgaagagacaggccagcttctgcaacgccatcaccttcagcaacagacccgtgctgatctacgagcaggtgagactgaagatcaccaagaagcagtgctgctggagcggcgccctgagactgggcttcaccagcaaggaccccagcagaatccaccccgacagcctgcccaagtacgcctgccccgacctggtgagccagagcggcttctgggccaaggccctgcccgaggagttcgccaacgagggcaacatcatcgccttctgggtggacaagaagggcagagtgttccacagaatcaactag

SEQ ID NO: 90678 - DNA, 2553 bp, synthetic construct
  misc_feature 1..2553: note = Description of Artificial Sequence: Synthetic coding sequence
  source 1..2553: mol_type = other DNA
atgagacaggtgtgctgcagcgccctgccccccccccccctggagaagggcagatgcagcagctacagcgacagcagcagcagcagcagcgagagaagcagcagcagcagcagcagcagcagcgagagcggcagcagcagcagaagcagcagcaacaacagcagcatcagcagacccgccgccccccccgagcccagaccccagcagcagccccagcccagaagccccgccgccagaagagccgccgccagaagcagagccgccgccgccggcggcatgagaagagaccccgcccccggcttcagcatgctgctgttcggcgtgagcctggcctgctacagccccagcctgaagagcgtgcaggaccaggcctacaaggcccccgtggtggtggagggcaaggtgcagggcctggtgcccgccggcggcagcagcagcaacagcaccagagagccccccgccagcggcagagtggccctggtgaaggtgctggacaagtggcccctgagaagcggcggcctgcagagagagcaggtgatcagcgtgggcagctgcgtgcccctggagagaaaccagagatacatcttcttcctggagcccaccgagcagcccctggtgttcaagaccgccttcgcccccctggacaccaacggcaagaacctgaagaaggaggtgggcaagatcctgtgcaccgactgcgccaccagacccaagctgaagaagatgaagagccagaccggccaggtgggcgagaagcagagcctgaagtgcgaggccgccgccggcaacccccagcccagctacagatggttcaaggacggcaaggagctgaacagaagcagagacatcagaatcaagtacggcaacggcagaaagaacagcagactgcagttcaacaaggtgaaggtggaggacgccggcgagtacgtgtgcgaggccgagaacatcctgggcaaggacaccgtgagaggcagactgtacgtgaacagcgtgagcaccaccctgagcagctggagcggccacgccagaaagtgcaacgagaccgccaagagctactgcgtgaacggcggcgtgtgctactacatcgagggcatcaaccagctgagctgcaagtgccccaacggcttcttcggccagagatgcctggagaagctgcccctgagactgtacatgcccgaccccaagcagaaggccgaggagctgtaccagaagagagtgctgaccatcaccggcatctgcgtggccctgctggtggtgggcatcgtgtgcgtggtggcctactgcaagaccaagaagcagagaaagcagatgcacaaccacctgagacagaacatgtgccccgcccaccagaacagaagcctggccaacggccccagccaccccagactggaccccgaggagatccagatggccgactacatcagcaagaacgtgcccgccaccgaccacgtgatcagaagagagaccgagaccaccttcagcggcagccacagctgcagccccagccaccactgcagcaccgccacccccaccagcagccacagacacgagagccacacctggagcctggagagaagcgagagcctgaccagcgacagccagagcggcatcatgctgagcagcgtgggcaccagcaagtgcaacagccccgcctgcgtggaggccagagccagaagagccgccgcctacaacctggaggagagaagaagagccaccgcccccccctaccacgacagcgtggacagcctgagagacagcccccacagcgagagatacgtgagcgccctgaccacccccgccagactgagccccgtggacttccactacagcctggccacccaggtgcccaccttcgagatcaccagccccaacagcgcccacgccgtgagcctgccccccgccgcccccatcagctacagactggccgagcagcagcccctgctgagacaccccgccccccccggccccggccccggccccggccccggccccggccccggcgccgacatgcagagaagctacgacagctactactaccccgccgccggccccggccccagaagaggcacctgcgccctgggcggcagcctgggcagcctgcccgccagccccttcagaatccccgaggacgacgagtacgagaccacccaggagtgcgcccccccccccccccccagacccagagccagaggcgccagcagaagaaccagcgccggccccagaagatggagaagaagcagactgaacggcctggccgcccagagagccagagccgccagagacagcctgagcctgagcagcggcagcggcggcggcagcgccagcgccagcgacgacgacgccgacgacgccgacggcgccctggccgccgagagcacccccttcctgggcctgagaggcgcccacgacgccctgagaagcgacagcccccccctgtgccccgccgccgacagcagaacctactacagcctggacagccacagcaccagagccagcagcagacacagcagaggccccccccccagagccaagcaggacagcgcccccctgtag

SEQ ID NO: 90679 - DNA, 1281 bp, synthetic construct
  misc_feature 1..1281: note = Description of Artificial Sequence: Synthetic coding sequence
  source 1..1281: mol_type = other DNA
atgagacaggtgtgctgcagcgccctgccccccccccccctggagaagggcagatgcagcagctacagcgacagcagcagcagcagcagcgagagaagcagcagcagcagcagcagcagcagcgagagcggcagcagcagcagaagcagcagcaacaacagcagcatcagcagacccgccgccccccccgagcccagaccccagcagcagccccagcccagaagccccgccgccagaagagccgccgccagaagcagagccgccgccgccggcggcatgagaagagaccccgcccccggcttcagcatgctgctgttcggcgtgagcctggcctgctacagccccagcctgaagagcgtgcaggaccaggcctacaaggcccccgtggtggtggagggcaaggtgcagggcctggtgcccgccggcggcagcagcagcaacagcaccagagagccccccgccagcggcagagtggccctggtgaaggtgctggacaagtggcccctgagaagcggcggcctgcagagagagcaggtgatcagcgtgggcagctgcgtgcccctggagagaaaccagagatacatcttcttcctggagcccaccgagcagcccctggtgttcaagaccgccttcgcccccctggacaccaacggcaagaacctgaagaaggaggtgggcaagatcctgtgcaccgactgcgccaccagacccaagctgaagaagatgaagagccagaccggccaggtgggcgagaagcagagcctgaagtgcgaggccgccgccggcaacccccagcccagctacagatggttcaaggacggcaaggagctgaacagaagcagagacatcagaatcaagtacggcaacggcagaaagaacagcagactgcagttcaacaaggtgaaggtggaggacgccggcgagtacgtgtgcgaggccgagaacatcctgggcaaggacaccgtgagaggcagactgtacgtgaacagcgtgagcaccaccctgagcagctggagcggccacgccagaaagtgcaacgagaccgccaagagctactgcgtgaacggcggcgtgtgctactacatcgagggcatcaaccagctgagctgcaagtgccccaacggcttcttcggccagagatgcctggagaagctgcccctgagactgtacatgcccgaccccaagcagagcgtgctgtgggacacccccggcaccggcgtgagcagcagccagtggagcaccagccccaagcccagaagctgcaccagaagaggcagctag

SEQ ID NO: 90680 - DNA, 2577 bp, synthetic construct
  misc_feature 1..2577: note = Description of Artificial Sequence: Synthetic coding sequence
  source 1..2577: mol_type = other DNA
atgagacaggtgtgctgcagcgccctgccccccccccccctggagaagggcagatgcagcagctacagcgacagcagcagcagcagcagcgagagaagcagcagcagcagcagcagcagcagcgagagcggcagcagcagcagaagcagcagcaacaacagcagcatcagcagacccgccgccccccccgagcccagaccccagcagcagccccagcccagaagccccgccgccagaagagccgccgccagaagcagagccgccgccgccggcggcatgagaagagaccccgcccccggcttcagcatgctgctgttcggcgtgagcctggcctgctacagccccagcctgaagagcgtgcaggaccaggcctacaaggcccccgtggtggtggagggcaaggtgcagggcctggtgcccgccggcggcagcagcagcaacagcaccagagagccccccgccagcggcagagtggccctggtgaaggtgctggacaagtggcccctgagaagcggcggcctgcagagagagcaggtgatcagcgtgggcagctgcgtgcccctggagagaaaccagagatacatcttcttcctggagcccaccgagcagcccctggtgttcaagaccgccttcgcccccctggacaccaacggcaagaacctgaagaaggaggtgggcaagatcctgtgcaccgactgcgccaccagacccaagctgaagaagatgaagagccagaccggccaggtgggcgagaagcagagcctgaagtgcgaggccgccgccggcaacccccagcccagctacagatggttcaaggacggcaaggagctgaacagaagcagagacatcagaatcaagtacggcaacggcagaaagaacagcagactgcagttcaacaaggtgaaggtggaggacgccggcgagtacgtgtgcgaggccgagaacatcctgggcaaggacaccgtgagaggcagactgtacgtgaacagcgtgagcaccaccctgagcagctggagcggccacgccagaaagtgcaacgagaccgccaagagctactgcgtgaacggcggcgtgtgctactacatcgagggcatcaaccagctgagctgcaagtgccccaacggcttcttcggccagagatgcctggagaagctgcccctgagactgtacatgcccgaccccaagcagagcttcctgagcttcgagctgagcaaggccgaggagctgtaccagaagagagtgctgaccatcaccggcatctgcgtggccctgctggtggtgggcatcgtgtgcgtggtggcctactgcaagaccaagaagcagagaaagcagatgcacaaccacctgagacagaacatgtgccccgcccaccagaacagaagcctggccaacggccccagccaccccagactggaccccgaggagatccagatggccgactacatcagcaagaacgtgcccgccaccgaccacgtgatcagaagagagaccgagaccaccttcagcggcagccacagctgcagccccagccaccactgcagcaccgccacccccaccagcagccacagacacgagagccacacctggagcctggagagaagcgagagcctgaccagcgacagccagagcggcatcatgctgagcagcgtgggcaccagcaagtgcaacagccccgcctgcgtggaggccagagccagaagagccgccgcctacaacctggaggagagaagaagagccaccgcccccccctaccacgacagcgtggacagcctgagagacagcccccacagcgagagatacgtgagcgccctgaccacccccgccagactgagccccgtggacttccactacagcctggccacccaggtgcccaccttcgagatcaccagccccaacagcgcccacgccgtgagcctgccccccgccgcccccatcagctacagactggccgagcagcagcccctgctgagacaccccgccccccccggccccggccccggccccggccccggccccggccccggcgccgacatgcagagaagctacgacagctactactaccccgccgccggccccggccccagaagaggcacctgcgccctgggcggcagcctgggcagcctgcccgccagccccttcagaatccccgaggacgacgagtacgagaccacccaggagtgcgcccccccccccccccccagacccagagccagaggcgccagcagaagaaccagcgccggccccagaagatggagaagaagcagactgaacggcctggccgcccagagagccagagccgccagagacagcctgagcctgagcagcggcagcggcggcggcagcgccagcgccagcgacgacgacgccgacgacgccgacggcgccctggccgccgagagcacccccttcctgggcctgagaggcgcccacgacgccctgagaagcgacagcccccccctgtgccccgccgccgacagcagaacctactacagcctggacagccacagcaccagagccagcagcagacacagcagaggccccccccccagagccaagcaggacagcgcccccctgtag

SEQ ID NO: 90681 - DNA, 2355 bp, synthetic construct
  misc_feature 1..2355: note = Description of Artificial Sequence: Synthetic coding sequence
  source 1..2355: mol_type = other DNA
atgagacaggtgtgctgcagcgccctgccccccccccccctggagaagggcagatgcagcagctacagcgacagcagcagcagcagcagcgagagaagcagcagcagcagcagcagcagcagcgagagcggcagcagcagcagaagcagcagcaacaacagcagcatcagcagacccgccgccccccccgagcccagaccccagcagcagccccagcccagaagccccgccgccagaagagccgccgccagaagcagagccgccgccgccggcggcatgagaagagaccccgcccccggcttcagcatgctgctgttcggcgtgagcctggcctgctacagccccagcctgaagagcgtgcaggaccaggcctacaaggcccccgtggtggtggagggcaaggtgcagggcctggtgcccgccggcggcagcagcagcaacagcaccagagagccccccgccagcggcagagtggccctggtgaaggtgctggacaagtggcccctgagaagcggcggcctgcagagagagcaggtgatcagcgtgggcagctgcgtgcccctggagagaaaccagagatacatcttcttcctggagcccaccgagcagcccctggtgttcaagaccgccttcgcccccctggacaccaacggcaagaacctgaagaaggaggtgggcaagatcctgtgcaccgactgcgccaccagacccaagctgaagaagatgaagagccagaccggccaggtgggcgagaagcagagcctgaagtgcgaggccgccgccggcaacccccagcccagctacagatggttcaaggacggcaaggagctgaacagaagcagagacatcagaatcaagtacggcaacggcagaaagaacagcagactgcagttcaacaaggtgaaggtggaggacgccggcgagtacgtgtgcgaggccgagaacatcctgggcaaggacaccgtgagaggcagactgtacgtgaacagcgaggccgaggagctgtaccagaagagagtgctgaccatcaccggcatctgcgtggccctgctggtggtgggcatcgtgtgcgtggtggcctactgcaagaccaagaagcagagaaagcagatgcacaaccacctgagacagaacatgtgccccgcccaccagaacagaagcctggccaacggccccagccaccccagactggaccccgaggagatccagatggccgactacatcagcaagaacgtgcccgccaccgaccacgtgatcagaagagagaccgagaccaccttcagcggcagccacagctgcagccccagccaccactgcagcaccgccacccccaccagcagccacagacacgagagccacacctggagcctggagagaagcgagagcctgaccagcgacagccagagcggcatcatgctgagcagcgtgggcaccagcaagtgcaacagccccgcctgcgtggaggccagagccagaagagccgccgcctacaacctggaggagagaagaagagccaccgcccccccctaccacgacagcgtggacagcctgagagacagcccccacagcgagagatacgtgagcgccctgaccacccccgccagactgagccccgtggacttccactacagcctggccacccaggtgcccaccttcgagatcaccagccccaacagcgcccacgccgtgagcctgccccccgccgcccccatcagctacagactggccgagcagcagcccctgctgagacaccccgccccccccggccccggccccggccccggccccggccccggccccggcgccgacatgcagagaagctacgacagctactactaccccgccgccggccccggccccagaagaggcacctgcgccctgggcggcagcctgggcagcctgcccgccagccccttcagaatccccgaggacgacgagtacgagaccacccaggagtgcgcccccccccccccccccagacccagagccagaggcgccagcagaagaaccagcgccggccccagaagatggagaagaagcagactgaacggcctggccgcccagagagccagagccgccagagacagcctgagcctgagcagcggcagcggcggcggcagcgccagcgccagcgacgacgacgccgacgacgccgacggcgccctggccgccgagagcacccccttcctgggcctgagaggcgcccacgacgccctgagaagcgacagcccccccctgtgccccgccgccgacagcagaacctactacagcctggacagccacagcaccagagccagcagcagacacagcagaggccccccccccagagccaagcaggacagcgcccccctgtag

SEQ ID NO: 90682 - DNA, 993 bp, synthetic construct
  misc_feature 1..993: note = Description of Artificial Sequence: Synthetic coding sequence
  source 1..993: mol_type = other DNA
atgagaagagaccccgcccccggcttcagcatgctgctgttcggcgtgagcctggcctgctacagccccagcctgaagagcgtgcaggaccaggcctacaaggcccccgtggtggtggagggcaaggtgcagggcctggtgcccgccggcggcagcagcagcaacagcaccagagagccccccgccagcggcagagtggccctggtgaaggtgctggacaagtggcccctgagaagcggcggcctgcagagagagcaggtgatcagcgtgggcagctgcgtgcccctggagagaaaccagagatacatcttcttcctggagcccaccgagcagcccctggtgttcaagaccgccttcgcccccctggacaccaacggcaagaacctgaagaaggaggtgggcaagatcctgtgcaccgactgcgccaccagacccaagctgaagaagatgaagagccagaccggccaggtgggcgagaagcagagcctgaagtgcgaggccgccgccggcaacccccagcccagctacagatggttcaaggacggcaaggagctgaacagaagcagagacatcagaatcaagtacggcaacggcagaaagaacagcagactgcagttcaacaaggtgaaggtggaggacgccggcgagtacgtgtgcgaggccgagaacatcctgggcaaggacaccgtgagaggcagactgtacgtgaacagcgtgagcaccaccctgagcagctggagcggccacgccagaaagtgcaacgagaccgccaagagctactgcgtgaacggcggcgtgtgctactacatcgagggcatcaaccagctgagctgcaagtgccccaacggcttcttcggccagagatgcctggagaagctgcccctgagactgtacatgcccgaccccaagcagagcgtgctgtgggacacccccggcaccggcgtgagcagcagccagtggagcaccagccccagcaccctggacctgaactag

SEQ ID NO: 90683 - DNA, 2559 bp, synthetic construct
  misc_feature 1..2559: note = Description of Artificial Sequence: Synthetic coding sequence
  source 1..2559: mol_type = other DNA
atgagacaggtgtgctgcagcgccctgccccccccccccctggagaagggcagatgcagcagctacagcgacagcagcagcagcagcagcgagagaagcagcagcagcagcagcagcagcagcgagagcggcagcagcagcagaagcagcagcaacaacagcagcatcagcagacccgccgccccccccgagcccagaccccagcagcagccccagcccagaagccccgccgccagaagagccgccgccagaagcagagccgccgccgccggcggcatgagaagagaccccgcccccggcttcagcatgctgctgttcggcgtgagcctggcctgctacagccccagcctgaagagcgtgcaggaccaggcctacaaggcccccgtggtggtggagggcaaggtgcagggcctggtgcccgccggcggcagcagcagcaacagcaccagagagccccccgccagcggcagagtggccctggtgaaggtgctggacaagtggcccctgagaagcggcggcctgcagagagagcaggtgatcagcgtgggcagctgcgtgcccctggagagaaaccagagatacatcttcttcctggagcccaccgagcagcccctggtgttcaagaccgccttcgcccccctggacaccaacggcaagaacctgaagaaggaggtgggcaagatcctgtgcaccgactgcgccaccagacccaagctgaagaagatgaagagccagaccggccaggtgggcgagaagcagagcctgaagtgcgaggccgccgccggcaacccccagcccagctacagatggttcaaggacggcaaggagctgaacagaagcagagacatcagaatcaagtacggcaacggcagaaagaacagcagactgcagttcaacaaggtgaaggtggaggacgccggcgagtacgtgtgcgaggccgagaacatcctgggcaaggacaccgtgagaggcagactgtacgtgaacagcgtgagcaccaccctgagcagctggagcggccacgccagaaagtgcaacgagaccgccaagagctactgcgtgaacggcggcgtgtgctactacatcgagggcatcaaccagctgagctgcaagtgccccgtgggctacaccggcgacagatgccagcagttcgccatggtgaacttcagcaccagactgggcggcgacgtggaggaggccgaggagctgtaccagaagagagtgctgaccatcaccggcatctgcgtggccctgctggtggtgggcatcgtgtgcgtggtggcctactgcaagaccaagaagcagagaaagcagatgcacaaccacctgagacagaacatgtgccccgcccaccagaacagaagcctggccaacggccccagccaccccagactggaccccgaggagatccagatggccgactacatcagcaagaacgtgcccgccaccgaccacgtgatcagaagagagaccgagaccaccttcagcggcagccacagctgcagccccagccaccactgcagcaccgccacccccaccagcagccacagacacgagagccacacctggagcctggagagaagcgagagcctgaccagcgacagccagagcggcatcatgctgagcagcgtgggcaccagcaagtgcaacagccccgcctgcgtggaggccagagccagaagagccgccgcctacaacctggaggagagaagaagagccaccgcccccccctaccacgacagcgtggacagcctgagagacagcccccacagcgagagatacgtgagcgccctgaccacccccgccagactgagccccgtggacttccactacagcctggccacccaggtgcccaccttcgagatcaccagccccaacagcgcccacgccgtgagcctgccccccgccgcccccatcagctacagactggccgagcagcagcccctgctgagacaccccgccccccccggccccggccccggccccggccccggccccggccccggcgccgacatgcagagaagctacgacagctactactaccccgccgccggccccggccccagaagaggcacctgcgccctgggcggcagcctgggcagcctgcccgccagccccttcagaatccccgaggacgacgagtacgagaccacccaggagtgcgcccccccccccccccccagacccagagccagaggcgccagcagaagaaccagcgccggccccagaagatggagaagaagcagactgaacggcctggccgcccagagagccagagccgccagagacagcctgagcctgagcagcggcagcggcggcggcagcgccagcgccagcgacgacgacgccgacgacgccgacggcgccctggccgccgagagcacccccttcctgggcctgagaggcgcccacgacgccctgagaagcgacagcccccccctgtgccccgccgccgacagcagaacctactacagcctggacagccacagcaccagagccagcagcagacacagcagaggccccccccccagagccaagcaggacagcgcccccctgtag

SEQ ID NO: 90684 - DNA, 2535 bp, synthetic construct
  misc_feature 1..2535: note = Description of Artificial Sequence: Synthetic coding sequence
  source 1..2535: mol_type = other DNA
atgagacaggtgtgctgcagcgccctgccccccccccccctggagaagggcagatgcagcagctacagcgacagcagcagcagcagcagcgagagaagcagcagcagcagcagcagcagcagcgagagcggcagcagcagcagaagcagcagcaacaacagcagcatcagcagacccgccgccccccccgagcccagaccccagcagcagccccagcccagaagccccgccgccagaagagccgccgccagaagcagagccgccgccgccggcggcatgagaagagaccccgcccccggcttcagcatgctgctgttcggcgtgagcctggcctgctacagccccagcctgaagagcgtgcaggaccaggcctacaaggcccccgtggtggtggagggcaaggtgcagggcctggtgcccgccggcggcagcagcagcaacagcaccagagagccccccgccagcggcagagtggccctggtgaaggtgctggacaagtggcccctgagaagcggcggcctgcagagagagcaggtgatcagcgtgggcagctgcgtgcccctggagagaaaccagagatacatcttcttcctggagcccaccgagcagcccctggtgttcaagaccgccttcgcccccctggacaccaacggcaagaacctgaagaaggaggtgggcaagatcctgtgcaccgactgcgccaccagacccaagctgaagaagatgaagagccagaccggccaggtgggcgagaagcagagcctgaagtgcgaggccgccgccggcaacccccagcccagctacagatggttcaaggacggcaaggagctgaacagaagcagagacatcagaatcaagtacggcaacggcagaaagaacagcagactgcagttcaacaaggtgaaggtggaggacgccggcgagtacgtgtgcgaggccgagaacatcctgggcaaggacaccgtgagaggcagactgtacgtgaacagcgtgagcaccaccctgagcagctggagcggccacgccagaaagtgcaacgagaccgccaagagctactgcgtgaacggcggcgtgtgctactacatcgagggcatcaaccagctgagctgcaagtgccccgtgggctacaccggcgacagatgccagcagttcgccatggtgaacttcagcaaggccgaggagctgtaccagaagagagtgctgaccatcaccggcatctgcgtggccctgctggtggtgggcatcgtgtgcgtggtggcctactgcaagaccaagaagcagagaaagcagatgcacaaccacctgagacagaacatgtgccccgcccaccagaacagaagcctggccaacggccccagccaccccagactggaccccgaggagatccagatggccgactacatcagcaagaacgtgcccgccaccgaccacgtgatcagaagagagaccgagaccaccttcagcggcagccacagctgcagccccagccaccactgcagcaccgccacccccaccagcagccacagacacgagagccacacctggagcctggagagaagcgagagcctgaccagcgacagccagagcggcatcatgctgagcagcgtgggcaccagcaagtgcaacagccccgcctgcgtggaggccagagccagaagagccgccgcctacaacctggaggagagaagaagagccaccgcccccccctaccacgacagcgtggacagcctgagagacagcccccacagcgagagatacgtgagcgccctgaccacccccgccagactgagccccgtggacttccactacagcctggccacccaggtgcccaccttcgagatcaccagccccaacagcgcccacgccgtgagcctgccccccgccgcccccatcagctacagactggccgagcagcagcccctgctgagacaccccgccccccccggccccggccccggccccggccccggccccggccccggcgccgacatgcagagaagctacgacagctactactaccccgccgccggccccggccccagaagaggcacctgcgccctgggcggcagcctgggcagcctgcccgccagccccttcagaatccccgaggacgacgagtacgagaccacccaggagtgcgcccccccccccccccccagacccagagccagaggcgccagcagaagaaccagcgccggccccagaagatggagaagaagcagactgaacggcctggccgcccagagagccagagccgccagagacagcctgagcctgagcagcggcagcggcggcggcagcgccagcgccagcgacgacgacgccgacgacgccgacggcgccctggccgccgagagcacccccttcctgggcctgagaggcgcccacgacgccctgagaagcgacagcccccccctgtgccccgccgccgacagcagaacctactacagcctggacagccacagcaccagagccagcagcagacacagcagaggccccccccccagagccaagcaggacagcgcccccctgtag

SEQ ID NO: 90685 - DNA, 2577 bp, synthetic construct
  misc_feature 1..2577: note = Description of Artificial Sequence: Synthetic coding sequence
  source 1..2577: mol_type = other DNA
atgagacaggtgtgctgcagcgccctgccccccccccccctggagaagggcagatgcagcagctacagcgacagcagcagcagcagcagcgagagaagcagcagcagcagcagcagcagcagcgagagcggcagcagcagcagaagcagcagcaacaacagcagcatcagcagacccgccgccccccccgagcccagaccccagcagcagccccagcccagaagccccgccgccagaagagccgccgccagaagcagagccgccgccgccggcggcatgagaagagaccccgcccccggcttcagcatgctgctgttcggcgtgagcctggcctgctacagccccagcctgaagagcgtgcaggaccaggcctacaaggcccccgtggtggtggagggcaaggtgcagggcctggtgcccgccggcggcagcagcagcaacagcaccagagagccccccgccagcggcagagtggccctggtgaaggtgctggacaagtggcccctgagaagcggcggcctgcagagagagcaggtgatcagcgtgggcagctgcgtgcccctggagagaaaccagagatacatcttcttcctggagcccaccgagcagcccctggtgttcaagaccgccttcgcccccctggacaccaacggcaagaacctgaagaaggaggtgggcaagatcctgtgcaccgactgcgccaccagacccaagctgaagaagatgaagagccagaccggccaggtgggcgagaagcagagcctgaagtgcgaggccgccgccggcaacccccagcccagctacagatggttcaaggacggcaaggagctgaacagaagcagagacatcagaatcaagtacggcaacggcagaaagaacagcagactgcagttcaacaaggtgaaggtggaggacgccggcgagtacgtgtgcgaggccgagaacatcctgggcaaggacaccgtgagaggcagactgtacgtgaacagcgtgagcaccaccctgagcagctggagcggccacgccagaaagtgcaacgagaccgccaagagctactgcgtgaacggcggcgtgtgctactacatcgagggcatcaaccagctgagctgcaagtgccccaacggcttcttcggccagagatgcctggagaagctgcccctgagactgtacatgcccgaccccaagcagaagcacctgggcttcgagctgaaggaggccgaggagctgtaccagaagagagtgctgaccatcaccggcatctgcgtggccctgctggtggtgggcatcgtgtgcgtggtggcctactgcaagaccaagaagcagagaaagcagatgcacaaccacctgagacagaacatgtgccccgcccaccagaacagaagcctggccaacggccccagccaccccagactggaccccgaggagatccagatggccgactacatcagcaagaacgtgcccgccaccgaccacgtgatcagaagagagaccgagaccaccttcagcggcagccacagctgcagccccagccaccactgcagcaccgccacccccaccagcagccacagacacgagagccacacctggagcctggagagaagcgagagcctgaccagcgacagccagagcggcatcatgctgagcagcgtgggcaccagcaagtgcaacagccccgcctgcgtggaggccagagccagaagagccgccgcctacaacctggaggagagaagaagagccaccgcccccccctaccacgacagcgtggacagcctgagagacagcccccacagcgagagatacgtgagcgccctgaccacccccgccagactgagccccgtggacttccactacagcctggccacccaggtgcccaccttcgagatcaccagccccaacagcgcccacgccgtgagcctgccccccgccgcccccatcagctacagactggccgagcagcagcccctgctgagacaccccgccccccccggccccggccccggccccggccccggccccggccccggcgccgacatgcagagaagctacgacagctactactaccccgccgccggccccggccccagaagaggcacctgcgccctgggcggcagcctgggcagcctgcccgccagccccttcagaatccccgaggacgacgagtacgagaccacccaggagtgcgcccccccccccccccccagacccagagccagaggcgccagcagaagaaccagcgccggccccagaagatggagaagaagcagactgaacggcctggccgcccagagagccagagccgccagagacagcctgagcctgagcagcggcagcggcggcggcagcgccagcgccagcgacgacgacgccgacgacgccgacggcgccctggccgccgagagcacccccttcctgggcctgagaggcgcccacgacgccctgagaagcgacagcccccccctgtgccccgccgccgacagcagaacctactacagcctggacagccacagcaccagagccagcagcagacacagcagaggccccccccccagagccaagcaggacagcgcccccctgtag

SEQ ID NO: 90686 - DNA, 2091 bp, synthetic construct
  misc_feature 1..2091: note = Description of Artificial Sequence: Synthetic coding sequence
  source 1..2091: mol_type = other DNA
atgagcgagggcgccgccgccgccagcccccccggcgccgccagcgccgccgccgccagcgccgaggagggcaccgccgccgccgccgccgccgccgccgccggcggcggccccgacggcggcggcgagggcgccgccgagccccccagagagctgagatgcagcgactgcatcgtgtggaacagacagcagacctggctgtgcgtggtgcccctgttcatcggcttcatcggcctgggcctgagcctgatgctgctgaagtggatcgtggtgggcagcgtgaaggagtacgtgcccaccgacctggtggacagcaagggcatgggccaggaccccttcttcctgagcaagcccagcagcttccccaaggccatggagaccaccaccaccaccaccagcaccaccagccccgccacccccagcgccggcggcgccgccagcagcagaacccccaacagaatcagcaccagactgaccaccatcaccagagcccccaccagattccccggccacagagtgcccatcagagccagccccagaagcaccaccgccagaaacaccgccgcccccgccaccgtgcccagcaccaccgcccccttcttcagcagcagcaccctgggcagcagaccccccgtgcccggcacccccagcacccaggccatgcccagctggcccaccgccgcctacgccaccagcagctacctgcacgacagcacccccagctggaccctgagccccttccaggacgccgccagcagcagcagcagcagcagcagcagcgccaccaccaccacccccgagaccagcaccagccccaagttccacaccaccacctacagcaccgagagaagcgagcacttcaagccctgcagagacaaggacctggcctactgcctgaacgacggcgagtgcttcgtgatcgagaccctgaccggcagccacaagcactgcagatgcaaggagggctaccagggcgtgagatgcgaccagttcctgcccaagaccgacagcatcctgagcgaccccaccgaccacctgggcatcgagttcatggagagcgaggaggtgtaccagagacaggtgctgagcatcagctgcatcatcttcggcatcgtgatcgtgggcatgttctgcgccgccttctacttcaagagcaagaagcaggccaagcagatccaggagcagctgaaggtgccccagaacggcaagagctacagcctgaaggccagcagcaccatggccaagagcgagaacctggtgaagagccacgtgcagctgcagaactacagcaaggtggagagacaccccgtgaccgccctggagaagatgatggagagcagcttcgtgggcccccagagcttccccgaggtgcccagccccgacagaggcagccagagcgtgaagcaccacagaagcctgagcagctgctgcagccccggccagagaagcggcatgctgcacagaaacgccttcagaagaaccccccccagccccagaagcagactgggcggcatcgtgggccccgcctaccagcagctggaggagagcagaatccccgaccaggacaccatcccctgccagggctacagcagcagcggcctgaagacccagagaaacaccagcatcaacatgcagctgcccagcagagagaccaacccctacttcaacagcctggagcagaaggacctggtgggctacagcagcaccagagccagcagcgtgcccatcatccccagcgtgggcctggaggagacctgcctgcagatgcccggcatcagcgaggtgaagagcatcaagtggtgcaagaacagctacagcgccgacgtggtgaacgtgagcatccccgtgagcgactgcctgatcgccgagcagcaggaggtgaagatcctgctggagaccgtgcaggagcagatcagaatcctgaccgacgccagaagaagcgaggactacgagctggccagcgtggagaccgaggacagcgccagcgagaacaccgccttcctgcccctgagccccaccgccaagagcgagagagaggcccagttcgtgctgagaaacgagatccagagagacagcgccctgaccaagtag

SEQ ID NO: 90687 - DNA, 1500 bp, synthetic construct
  misc_feature 1..1500: note = Description of Artificial Sequence: Synthetic coding sequence
  source 1..1500: mol_type = other DNA
atggagtgcggcatcccccccaccctggtgtgcgtgggcagaggcggcggcctgcacaccatcaacatcatcatctggtactacttccccagcgcctggagaacctgcttcaacatcagcagcagcgtgggcctgctgctgaccaacagctacaagttctacaccaccacctacagcaccgagagaagcgagcacttcaagccctgcagagacaaggacctggcctactgcctgaacgacggcgagtgcttcgtgatcgagaccctgaccggcagccacaagcactgcagatgcaaggagggctaccagggcgtgagatgcgaccagttcctgcccaagaccgacagcatcctgagcgaccccaccgaccacctgggcatcgagttcatggagagcgaggaggtgtaccagagacaggtgctgagcatcagctgcatcatcttcggcatcgtgatcgtgggcatgttctgcgccgccttctacttcaagagcaagaagcaggccaagcagatccaggagcagctgaaggtgccccagaacggcaagagctacagcctgaaggccagcagcaccatggccaagagcgagaacctggtgaagagccacgtgcagctgcagaactacagcaaggtggagagacaccccgtgaccgccctggagaagatgatggagagcagcttcgtgggcccccagagcttccccgaggtgcccagccccgacagaggcagccagagcgtgaagcaccacagaagcctgagcagctgctgcagccccggccagagaagcggcatgctgcacagaaacgccttcagaagaaccccccccagccccagaagcagactgggcggcatcgtgggccccgcctaccagcagctggaggagagcagaatccccgaccaggacaccatcccctgccagggcatcgaggtgagaaagaccatcagccacctgcccatccagctgtggtgcgtggagagacccctggacctgaagtacagcagcagcggcctgaagacccagagaaacaccagcatcaacatgcagctgcccagcagagagaccaacccctacttcaacagcctggagcagaaggacctggtgggctacagcagcaccagagccagcagcgtgcccatcatccccagcgtgggcctggaggagacctgcctgcagatgcccggcatcagcgaggtgaagagcatcaagtggtgcaagaacagctacagcgccgacgtggtgaacgtgagcatccccgtgagcgactgcctgatcgccgagcagcaggaggtgaagatcctgctggagaccgtgcaggagcagatcagaatcctgaccgacgccagaagaagcgaggactacgagctggccagcgtggagaccgaggacagcgccagcgagaacaccgccttcctgcccctgagccccaccgccaagagcgagagagaggcccagttcgtgctgagaaacgagatccagagagacagcgccctgaccaagtag

SEQ ID NO: 90688 - DNA, 2163 bp, synthetic construct
  misc_feature 1..2163: note = Description of Artificial Sequence: Synthetic coding sequence
  source 1..2163: mol_type = other DNA
atgagcgagggcgccgccgccgccagcccccccggcgccgccagcgccgccgccgccagcgccgaggagggcaccgccgccgccgccgccgccgccgccgccggcggcggccccgacggcggcggcgagggcgccgccgagccccccagagagctgagatgcagcgactgcatcgtgtggaacagacagcagacctggctgtgcgtggtgcccctgttcatcggcttcatcggcctgggcctgagcctgatgctgctgaagtggatcgtggtgggcagcgtgaaggagtacgtgcccaccgacctggtggacagcaagggcatgggccaggaccccttcttcctgagcaagcccagcagcttccccaaggccatggagaccaccaccaccaccaccagcaccaccagccccgccacccccagcgccggcggcgccgccagcagcagaacccccaacagaatcagcaccagactgaccaccatcaccagagcccccaccagattccccggccacagagtgcccatcagagccagccccagaagcaccaccgccagaaacaccgccgcccccgccaccgtgcccagcaccaccgcccccttcttcagcagcagcaccctgggcagcagaccccccgtgcccggcacccccagcacccaggccatgcccagctggcccaccgccgcctacgccaccagcagctacctgcacgacagcacccccagctggaccctgagccccttccaggacgccgccagcagcagcagcagcagcagcagcagcgccaccaccaccacccccgagaccagcaccagccccaagttccacaccaccacctacagcaccgagagaagcgagcacttcaagccctgcagagacaaggacctggcctactgcctgaacgacggcgagtgcttcgtgatcgagaccctgaccggcagccacaagcactgcagatgcaaggagggctaccagggcgtgagatgcgaccagttcctgcccaagaccgacagcatcctgagcgaccccaccgaccacctgggcatcgagttcatggagagcgaggaggtgtaccagagacaggtgctgagcatcagctgcatcatcttcggcatcgtgatcgtgggcatgttctgcgccgccttctacttcaagagcaagaagcaggccaagcagatccaggagcagctgaaggtgccccagaacggcaagagctacagcctgaaggccagcagcaccatggccaagagcgagaacctggtgaagagccacgtgcagctgcagaactacagcaaggtggagagacaccccgtgaccgccctggagaagatgatggagagcagcttcgtgggcccccagagcttccccgaggtgcccagccccgacagaggcagccagagcgtgaagcaccacagaagcctgagcagctgctgcagccccggccagagaagcggcatgctgcacagaaacgccttcagaagaaccccccccagccccagaagcagactgggcggcatcgtgggccccgcctaccagcagctggaggagagcagaatccccgaccaggacaccatcccctgccagggcatcgaggtgagaaagaccatcagccacctgcccatccagctgtggtgcgtggagagacccctggacctgaagtacagcagcagcggcctgaagacccagagaaacaccagcatcaacatgcagctgcccagcagagagaccaacccctacttcaacagcctggagcagaaggacctggtgggctacagcagcaccagagccagcagcgtgcccatcatccccagcgtgggcctggaggagacctgcctgcagatgcccggcatcagcgaggtgaagagcatcaagtggtgcaagaacagctacagcgccgacgtggtgaacgtgagcatccccgtgagcgactgcctgatcgccgagcagcaggaggtgaagatcctgctggagaccgtgcaggagcagatcagaatcctgaccgacgccagaagaagcgaggactacgagctggccagcgtggagaccgaggacagcgccagcgagaacaccgccttcctgcccctgagccccaccgccaagagcgagagagaggcccagttcgtgctgagaaacgagatccagagagacagcgccctgaccaagtag

SEQ ID NO: 90689 - DNA, 2088 bp, synthetic construct
  misc_feature 1..2088: note = Description of Artificial Sequence: Synthetic coding sequence
  source 1..2088: mol_type = other DNA
atgagcgagggcgccgccgccgccagcccccccggcgccgccagcgccgccgccgccagcgccgaggagggcaccgccgccgccgccgccgccgccgccgccggcggcggccccgacggcggcggcgagggcgccgccgagccccccagagagctgagatgcagcgactgcatcgtgtggaacagacagcagacctggctgtgcgtggtgcccctgttcatcggcttcatcggcctgggcctgagcctgatgctgctgaagtggatcgtggtgggcagcgtgaaggagtacgtgcccaccgacctggtggacagcaagggcatgggccaggaccccttcttcctgagcaagcccagcagcttccccaaggccatggagaccaccaccaccaccaccagcaccaccagccccgccacccccagcgccggcggcgccgccagcagcagaacccccaacagaatcagcaccagactgaccaccatcaccagagcccccaccagattccccggccacagagtgcccatcagagccagccccagaagcaccaccgccagaaacaccgccgcccccgccaccgtgcccagcaccaccgcccccttcttcagcagcagcaccctgggcagcagaccccccgtgcccggcacccccagcacccaggccatgcccagctggcccaccgccgcctacgccaccagcagctacctgcacgacagcacccccagctggaccctgagccccttccaggacgccgccagcagcagcagcagcagcagcagcagcgccaccaccaccacccccgagaccagcaccagccccaagttccacaccaccacctacagcaccgagagaagcgagcacttcaagccctgcagagacaaggacctggcctactgcctgaacgacggcgagtgcttcgtgatcgagaccctgaccggcagccacaagcactgcagatgcaaggagggctaccagggcgtgagatgcgaccagttcctgcccaagaccgacagcatcctgagcgaccccacccacatcggcatcatcttcaccgagagcgaggaggtgtaccagagacaggtgctgagcatcagctgcatcatcttcggcatcgtgatcgtgggcatgttctgcgccgccttctacttcaagagcaagaagcaggccaagcagatccaggagcagctgaaggtgccccagaacggcaagagctacagcctgaaggccagcagcaccatggccaagagcgagaacctggtgaagagccacgtgcagctgcagaactacagcaaggtggagagacaccccgtgaccgccctggagaagatgatggagagcagcttcgtgggcccccagagcttccccgaggtgcccagccccgacagaggcagccagagcgtgaagcaccacagaagcctgagcagctgctgcagccccggccagagaagcggcatgctgcacagaaacgccttcagaagaaccccccccagccccagaagcagactgggcggcatcgtgggccccgcctaccagcagctggaggagagcagaatccccgaccaggacaccatcccctgccagggctacagcagcagcggcctgaagacccagagaaacaccagcatcaacatgcagctgcccagcagagagaccaacccctacttcaacagcctggagcagaaggacctggtgggctacagcagcaccagagccagcagcgtgcccatcatccccagcgtgggcctggaggagacctgcctgcagatgcccggcatcagcgaggtgaagagcatcaagtggtgcaagaacagctacagcgccgacgtggtgaacgtgagcatccccgtgagcgactgcctgatcgccgagcagcaggaggtgaagatcctgctggagaccgtgcaggagcagatcagaatcctgaccgacgccagaagaagcgaggactacgagctggccagcgtggagaccgaggacagcgccagcgagaacaccgccttcctgcccctgagccccaccgccaagagcgagagagaggcccagttcgtgctgagaaacgagatccagagagacagcgccctgaccaagtag

SEQ ID NO: 90690 - DNA, 1041 bp, synthetic construct
  misc_feature 1..1041: note = Description of Artificial Sequence: Synthetic coding sequence
  source 1..1041: mol_type = other DNA
atggagagcgaggaggtgtaccagagacaggtgctgagcatcagctgcatcatcttcggcatcgtgatcgtgggcatgttctgcgccgccttctacttcaagagcaagaagcaggccaagcagatccaggagcagctgaaggtgccccagaacggcaagagctacagcctgaaggccagcagcaccatggccaagagcgagaacctggtgaagagccacgtgcagctgcagaactacagcaaggtggagagacaccccgtgaccgccctggagaagatgatggagagcagcttcgtgggcccccagagcttccccgaggtgcccagccccgacagaggcagccagagcgtgaagcaccacagaagcctgagcagctgctgcagccccggccagagaagcggcatgctgcacagaaacgccttcagaagaaccccccccagccccagaagcagactgggcggcatcgtgggccccgcctaccagcagctggaggagagcagaatccccgaccaggacaccatcccctgccagggctacagcagcagcggcctgaagacccagagaaacaccagcatcaacatgcagctgcccagcagagagaccaacccctacttcaacagcctggagcagaaggacctggtgggctacagcagcaccagagccagcagcgtgcccatcatccccagcgtgggcctggaggagacctgcctgcagatgcccggcatcagcgaggtgaagagcatcaagtggtgcaagaacagctacagcgccgacgtggtgaacgtgagcatccccgtgagcgactgcctgatcgccgagcagcaggaggtgaagatcctgctggagaccgtgcaggagcagatcagaatcctgaccgacgccagaagaagcgaggactacgagctggccagcgtggagaccgaggacagcgccagcgagaacaccgccttcctgcccctgagccccaccgccaagagcgagagagaggcccagttcgtgctgagaaacgagatccagagagacagcgccctgaccaagtag

SEQ ID NO: 90691 - DNA, 1041 bp, synthetic construct; identical to SEQ ID NO: 90690
  misc_feature 1..1041: note = Description of Artificial Sequence: Synthetic coding sequence
  source 1..1041: mol_type = other DNA

SEQ ID NO: 90692 - DNA, 171 bp, synthetic construct
  misc_feature 1..171: note = Description of Artificial Sequence: Synthetic coding sequence
  source 1..171: mol_type = other DNA
atgcccaccgaccacgaggagccctgcggccccagccacaagagcttctgcctgaacggcggcctgtgctacgtgatccccaccatccccagccccttctgcagcctgcacgagaacgagaacgacaacaacgaggacctgtacgacgacctgctgcccctgaacgagtag

SEQ ID NO: 90693 - DNA, 348 bp, synthetic construct
  misc_feature 1..348: note = Description of Artificial Sequence: Synthetic coding sequence
  source 1..348: mol_type = other DNA
atgcccaccgaccacgaggagccctgcggccccagccacaagagcttctgcctgaacggcggcctgtgctacgtgatccccaccatccccagccccttctgcagatgcgtggagaactacaccggcgccagatgcgaggaggtgttcctgcccggcagcagcatccagaccaagagcaacctgttcgaggccttcgtggccctggccgtgctggtgaccctgatcatcggcgccttctacttcctgtgcagaaagggccacttccagagagccagcagcgtgcagtacgacatcaacctggtggagaccagcagcaccagcgcccaccacagccacgagcagcactag

SEQ ID NO: 90694 - DNA, 273 bp, synthetic construct
  misc_feature 1..273: note = Description of Artificial Sequence: Synthetic coding sequence
  source 1..273: mol_type = other DNA
atgcccaccgaccacgaggagccctgcggccccagccacaagagcttctgcctgaacggcggcctgtgctacgtgatccccaccatccccagccccttctgcagatgcgtggagaactacaccggcgccagatgcgaggaggtgttcctgcccggcagcagcatccagaccaagagcaacctgttcgaggccttcgtggccctggccgtgctggtgaccctgatcatcggcgccttctacttcctgtgcagatgcggcaacacctgcatgtag

SEQ ID NO: 90695 - DNA, 615 bp, synthetic construct
  misc_feature 1..615: note = Description of Artificial Sequence: Synthetic coding sequence
  source 1..615: mol_type = other DNA
atgatgcccagctgcaacagaagctgcagctgcagcagaggccccagcgtggaggacggcaagtggtacggcgtgagaagctacctgcacctgttctacgaggactgcgccggcaccgccctgagcgacgaccccgagggcccccccgtgctgtgccccagaagaccctggcccagcctgtgctggaagatcagcctgagcagcggcaccctgctgctgctgctgggcgtggccgccctgaccaccggctacgccgtgccccccaagctggagggcatcggcgagggcgagttcctggtgctggaccagagagccgccgactacaaccaggccctgggcacctgcagactggccggcaccgccctgtgcgtggccgccggcgtgctgctggccatctgcctgttctgggccatgatcggctggctgagccaggacaccaaggccgagcccctggaccccgaggccgacagccacgtggaggtgttcggcgacgagcccgagcagcagctgagccccatcttcagaaacgccagcggccagagctggttcagcccccccgccagccccttcggccagagcagcgtgcagaccatccagcccaagagagacagctag

SEQ ID NO: 90696 - DNA, 615 bp, synthetic construct; identical to SEQ ID NO: 90695
  misc_feature 1..615: note = Description of Artificial Sequence: Synthetic coding sequence
  source 1..615: mol_type = other DNA

SEQ ID NO: 90697 - DNA, 1329 bp, synthetic construct
  misc_feature 1..1329: note = Description of Artificial Sequence: Synthetic coding sequence
  source 1..1329: mol_type = other DNA
atgtaccagagaatgctgagatgcggcgccgagctgggcagccccggcggcggcggcggcggcggcggcggcggcggcgccggcggcagactggccctgctgtggatcgtgcccctgaccctgagcggcctgctgggcgtggcctggggcgccagcagcctgggcgcccaccacatccaccacttccacggcagcagcaagcaccacagcgtgcccatcgccatctacagaagccccgccagcctgagaggcggccacgccggcaccacctacatcttcagcaagggcggcggccagatcacctacaagtggccccccaacgacagacccagcaccagagccgacagactggccatcggcttcagcaccgtgcagaaggaggccgtgctggtgagagtggacagcagcagcggcctgggcgactacctggagctgcacatccaccagggcaagatcggcgtgaagttcaacgtgggcaccgacgacatcgccatcgaggagagcaacgccatcatcaacgacggcaagtaccacgtggtgagattcaccagaagcggcggcaacgccaccctgcaggtggacagctggcccgtgatcgagagataccccgccggcagacagctgaccatcttcaacagccaggccaccatcatcatcggcggcaaggagcagggccagcccttccagggccagctgagcggcctgtactacaacggcctgaaggtgctgaacatggccgccgagaacgacgccaacatcgccatcgtgggcaacgtgagactggtgggcgaggtgcccagcagcatgaccaccgagagcaccgccaccgccatgcagagcgagatgagcaccagcatcatggagaccaccaccaccctggccaccagcaccgccagaagaggcaagccccccaccaaggagcccatcagccagaccaccgacgacatcctggtggccagcgccgagtgccccagcgacgacgaggacatcgacccctgcgagcccagcagcggcggcctggccaaccccaccagagccggcggcagagagccctaccccggcagcgccgaggtgatcagagagagcagcagcaccaccggcatggtggtgggcatcgtggccgccgccgccctgtgcatcctgatcctgctgtacgccatgtacaagtacagaaacagagacgagggcagctaccacgtggacgagagcagaaactacatcagcaacagcgcccagagcaacggcgccgtggtgaaggagaagcagcccagcagcgccaagagcagcaacaagaacaagaagaacaaggacaaggagtactacgtgtag

SEQ ID NO: 90698 - DNA, 4524 bp, synthetic construct
  misc_feature 1..4524: note = Description of Artificial Sequence: Synthetic coding sequence
  source 1..4524: mol_type = other DNA
atgggcaccgccctgctgcagagaggcggctgcttcctgctgtgcctgagcctgctgctgctgggctgctgggccgagctgggcagcggcctggagttccccggcgccgagggccagtggaccagattccccaagtggaacgcctgctgcgagagcgagatgagcttccagctgaagaccagaagcgccagaggcctggtgctgtacttcgacgacgagggcttctgcgacttcctggagctgatcctgaccagaggcggcagactgcagctgagcttcagcatcttctgcgccgagcccgccaccctgctggccgacacccccgtgaacgacggcgcctggcacagcgtgagaatcagaagacagttcagaaacaccaccctgttcatcgaccaggtggaggccaagtgggtggaggtgaagagcaagagaagagacatgaccgtgttcagcggcctgttcgtgggcggcctgccccccgagctgagagccgccgccctgaagctgaccctggccagcgtgagagagagagagcccttcaagggctggatcagagacgtgagagtgaacagcagccaggtgctgcccgtggacagcggcgaggtgaagctggacgacgagccccccaacagcggcggcggcagcccctgcgaggccggcgaggagggcgagggcggcgtgtgcctgaacggcggcgtgtgcagcgtggtggacgaccaggccgtgtgcgactgcagcagaaccggcttcagaggcaaggactgcagccaggaggacaacaacgtggagggcctggcccacctgatgatgggcgaccagggcaagagcaagggcaaggaggagtacatcgccaccttcaagggcagcgagtacttctgctacgacctgagccagaaccccatccagagcagcagcgacgagatcaccctgagcttcaagaccctgcagagaaacggcctgatgctgcacaccggcaagagcgccgactacgtgaacctggccctgaagaacggcgccgtgagcctggtgatcaacctgggcagcggcgccttcgaggccctggtggagcccgtgaacggcaagttcaacgacaacgcctggcacgacgtgaaggtgaccagaaacctgagacagcacagcggcatcggccacgccatggtgaccatcagcgtggacggcatcctgaccaccaccggctacacccaggaggactacaccatgctgggcagcgacgacttcttctacgtgggcggcagccccagcaccgccgacctgcccggcagccccgtgagcaacaacttcatgggctgcctgaaggaggtggtgtacaagaacaacgacgtgagactggagctgagcagactggccaagcagggcgaccccaagatgaagatccacggcgtggtggccttcaagtgcgagaacgtggccaccctggaccccatcaccttcgagacccccgagagcttcatcagcctgcccaagtggaacgccaagaagaccggcagcatcagcttcgacttcagaaccaccgagcccaacggcctgatcctgttcagccacggcaagcccagacaccagaaggacgccaagcacccccagatgatcaaggtggacttcttcgccatcgagatgctggacggccacctgtacctgctgctggacatgggcagcggcaccatcaagatcaaggccctgctgaagaaggtgaacgacggcgagtggtaccacgtggacttccagagagacggcagaagcggcaccatcagcgtgaacaccctgagaaccccctacaccgcccccggcgagagcgagatcctggacctggacgacgagctgtacctgggcggcctgcccgagaacaaggccggcctggtgttccccaccgaggtgtggaccgccctgctgaactacggctacgtgggctgcatcagagacctgttcatcgacggccagagcaaggacatcagacagatggccgaggtgcagagcaccgccggcgtgaagcccagctgcagcaaggagaccgccaagccctgcctgagcaacccctgcaagaacaacggcatgtgcagagacggctggaacagatacgtgtgcgactgcagcggcaccggctacctgggcagaagctgcgagagagaggccaccgtgctgagctacgacggcagcatgttcatgaagatccagctgcccgtggtgatgcacaccgaggccgaggacgtgagcctgagattcagaagccagagagcctacggcatcctgatggccaccaccagcagagacagcgccgacaccctgagactggagctggacgccggcagagtgaagctgaccgtgaacctggactgcatcagaatcaactgcaacagcagcaagggccccgagaccctgttcgccggctacaacctgaacgacaacgagtggcacaccgtgagagtggtgagaagaggcaagagcctgaagctgaccgtggacgaccagcaggccatgaccggccagatggccggcgaccacaccagactggagttccacaacatcgagaccggcatcatcaccgagagaagatacctgagcagcgtgcccagcaacttcatcggccacctgcagagcctgaccttcaacggcatggcctacatcgacctgtgcaagaacggcgacatcgactactgcgagctgaacgccagattcggcttcagaaacatcatcgccgaccccgtgaccttcaagaccaagagcagctacgtggccctggccaccctgcaggcctacaccagcatgcacctgttcttccagttcaagaccaccagcctggacggcctgatcctgtacaacagcggcgacggcaacgacttcatcgtggtggagctggtgaagggctacctgcactacgtgttcgacctgggcaacggcgccaacctgatcaagggcagcagcaacaagcccctgaacgacaaccagtggcacaacgtgatgatcagcagagacaccagcaacctgcacaccgtgaagatcgacaccaagatcaccacccagatcaccgccggcgccagaaacctggacctgaagagcgacctgtacatcggcggcgtggccaaggagacctacaagagcctgcccaagctggtgcacgccaaggagggcttccagggctgcctggccagcgtggacctgaacggcagactgcccgacctgatcagcgacgccctgttctgcaacggccagatcgagagaggctgcgagggccccagcaccacctgccaggaggacagctgcagcaaccagggcgtgtgcctgcagcagtgggacggcttcagctgcgactgcagcatgaccagcttcagcggccccctgtgcaacgaccccggcaccacctacatcttcagcaagggcggcggccagatcacctacaagtggccccccaacgacagacccagcaccagagccgacagactggccatcggcttcagcaccgtgcagaaggaggccgtgctggtgagagtggacagcagcagcggcctgggcgactacctggagctgcacatccaccagggcaagatcggcgtgaagttcaacgtgggcaccgacgacatcgccatcgaggagagcaacgccatcatcaacgacggcaagtaccacgtggtgagattcaccagaagcggcggcaacgccaccctgcaggtggacagctggcccgtgatcgagagataccccgccggcaacaacgacaacgagagactggccatcgccagacagagaatcccctacagactgggcagagtggtggacgagtggctgctggacaagggcagacagctgaccatcttcaacagccaggccaccatcatcatcggcggcaaggagcagggccagcccttccagggccagctgagcggcctgtactacaacggcctgaaggtgctgaacatggccgccgagaacgacgccaacatcgccatcgtgggcaacgtgagactggtgggcgaggtgcccagcagcatgaccaccgagagcaccgccaccgccatgcagagcgagatgagcaccagcatcatggagaccaccaccaccctggccaccagcaccgccagaagaggcaagccccccaccaaggagcccatcagccagaccaccgacgacatcctggtggccagcgccgagtgccccagcgacgacgaggacatcgacccctgcgagcccagcagcggcggcctggccaaccccaccagagccggcggcagagagccctaccccggcagcgccgaggtgatcagagagagcagcagcaccaccggcatggtggtgggcatcgtggccgccgccgccctgtgcatcctgatcctgctgtacgccatgtacaagtacagaaacagagacgagggcagctaccacgtggacgagagcagaaactacatcagcaacagcgcccagagcaacggcgccgtggtgaaggagaagcagcccagcagcgccaagagcagcaacaagaacaagaagaacaaggacaaggagtactacgtgtag

SEQ ID NO: 90699 - DNA, 1488 bp, synthetic construct
  misc_feature 1..1488: note = Description of Artificial Sequence: Synthetic coding sequence
  source 1..1488: mol_type = other DNA
atgatcagcagagacaccagcaacctgcacaccgtgaagatcgacaccaagatcaccacccagatcaccgccggcgccagaaacctggacctgaagagcgacctgtacatcggcggcgtggccaaggagacctacaagagcctgcccaagctggtgcacgccaaggagggcttccagggctgcctggccagcgtggacctgaacggcagactgcccgacctgatcagcgacgccctgttctgcaacggccagatcgagagaggctgcgaggtggccctgatgaaggccgacctgcagggccccagcaccacctgccaggaggacagctgcagcaaccagggcgtgtgcctgcagcagtgggacggcttcagctgcgactgcagcatgaccagcttcagcggccccctgtgcaacgaccccggcaccacctacatcttcagcaagggcggcggccagatcacctacaagtggccccccaacgacagacccagcaccagagccgacagactggccatcggcttcagcaccgtgcagaaggaggccgtgctggtgagagtggacagcagcagcggcctgggcgactacctggagctgcacatccaccagggcaagatcggcgtgaagttcaacgtgggcaccgacgacatcgccatcgaggagagcaacgccatcatcaacgacggcaagtaccacgtggtgagattcaccagaagcggcggcaacgccaccctgcaggtggacagctggcccgtgatcgagagataccccgccggcagacagctgaccatcttcaacagccaggccaccatcatcatcggcggcaaggagcagggccagcccttccagggccagctgagcggcctgtactacaacggcctgaaggtgctgaacatggccgccgagaacgacgccaacatcgccatcgtgggcaacgtgagactggtgggcgaggtgcccagcagcatgaccaccgagagcaccgccaccgccatgcagagcgagatgagcaccagcatcatggagaccaccaccaccctggccaccagcaccgccagaagaggcaagccccccaccaaggagcccatcagccagaccaccgacgacatcctggtggccagcgccgagtgccccagcgacgacgaggacatcgacccctgcgagcccagcagcggcggcctggccaaccccaccagagccggcggcagagagccctaccccggcagcgccgaggtgatcagagagagcagcagcaccaccggcatggtggtgggcatcgtggccgccgccgccctgtgcatcctgatcctgctgtacgccatgtacaagtacagaaacagagacgagggcagctaccacgtggacgagagcagaaactacatcagcaacagcgcccagagcaacggcgccgtggtgaaggagaagcagcccagcagcgccaagagcagcaacaagaacaagaagaacaaggacaaggagtactacgtgtag

SEQ ID NO: 90700 - DNA, 4500 bp, synthetic construct
  misc_feature 1..4500: note = Description of Artificial Sequence: Synthetic coding sequence
  source 1..4500: mol_type = other DNA
atgggcaccgccctgctgcagagaggcggctgcttcctgctgtgcctgagcctgctgctgctgggctgctgggccgagctgggcagcggcctggagttccccggcgccgagggccagtggaccagattccccaagtggaacgcctgctgcgagagcgagatgagcttccagctgaagaccagaagcgccagaggcctggtgctgtacttcgacgacgagggcttctgcgacttcctggagctgatcctgaccagaggcggcagactgcagctgagcttcagcatcttctgcgccgagcccgccaccctgctggccgacacccccgtgaacgacggcgcctggcacagcgtgagaatcagaagacagttcagaaacaccaccctgttcatcgaccaggtggaggccaagtgggtggaggtgaagagcaagagaagagacatgaccgtgttcagcggcctgttcgtgggcggcctgccccccgagctgagagccgccgccctgaagctgaccctggccagcgtgagagagagagagcccttcaagggctggatcagagacgtgagagtgaacagcagccaggtgctgcccgtggacagcggcgaggtgaagctggacgacgagccccccaacagcggcggcggcagcccctgcgaggccggcgaggagggcgagggcggcgtgtgcctgaacggcggcgtgtgcagcgtggtggacgaccaggccgtgtgcgactgcagcagaaccggcttcagaggcaaggactgcagccaggccgacaccaacctggagggcctggcccacctgatgatgggcgaccaggccaagagcaagagaaaggaggagtacatcgccaccttcaagggcagcgagtacttctgctacgacctgagccagaaccccatccagagcagcagcgacgagatcaccctgagcttcaagaccctgcagagaaacggcctgatgctgcacaccggcaagagcgccgactacgtgaacctggccctgaagaacggcgccgtgagcctggtgatcaacctgggcagcggcgccttcgaggccctggtggagcccgtgaacggcaagttcaacgacaacgcctggcacgacgtgaaggtgaccagaaacctgagacaggtgaccatcagcgtggacggcatcctgaccaccaccggctacacccaggaggactacaccatgctgggcagcgacgacttcttctacgtgggcggcagccccagcaccgccgacctgcccggcagccccgtgagcaacaacttcatgggctgcctgaaggaggtggtgtacaagaacaacgacgtgagactggagctgagcagactggccaagcagggcgaccccaagatgaagatccacggcgtggtggccttcaagtgcgagaacgtggccaccctggaccccatcaccttcgagacccccgagagcttcatcagcctgcccaagtggaacgccaagaagaccggcagcatcagcttcgacttcagaaccaccgagcccaacggcctgatcctgttcagccacggcaagcccagacaccagaaggacgccaagcacccccagatgatcaaggtggacttcttcgccatcgagatgctggacggccacctgtacctgctgctggacatgggcagcggcaccatcaagatcaaggccctgctgaagaaggtgaacgacggcgagtggtaccacgtggacttccagagagacggcagaagcggcaccatcagcgtgaacaccctgagaaccccctacaccgcccccggcgagagcgagatcctggacctggacgacgagctgtacctgggcggcctgcccgagaacaaggccggcctggtgttccccaccgaggtgtggaccgccctgctgaactacggctacgtgggctgcatcagagacctgttcatcgacggccagagcaaggacatcagacagatggccgaggtgcagagcaccgccggcgtgaagcccagctgcagcaaggagaccgccaagccctgcctgagcaacccctgcaagaacaacggcatgtgcagagacggctggaacagatacgtgtgcgactgcagcggcaccggctacctgggcagaagctgcgagagagaggccaccgtgctgagctacgacggcagcatgttcatgaagatccagctgcccgtggtgatgcacaccgaggccgaggacgtgagcctgagattcagaagccagagagcctacggcatcctgatggccaccaccagcagagacagcgccgacaccctgagactggagctggacgccggcagagtgaagctgaccgtgaacctggactgcatcagaatcaactgcaacagcagcaagggccccgagaccctgttcgccggctacaacctgaacgacaacgagtggcacaccgtgagagtggtgagaagaggcaagagcctgaagctgaccgtggacgaccagcaggccatgaccggccagatggccggcgaccacaccagactggagttccacaacatcgagaccggcatcatcaccgagagaagatacctgagcagcgtgcccagcaacttcatcggccacctgcagagcctgaccttcaacggcatggcctacatcgacctgtgcaagaacggcgacatcgactactgcgagctgaacgccagattcggcttcagaaacatcatcgccgaccccgtgaccttcaagaccaagagcagctacgtggccctggccaccctgcaggcctacaccagcatgcacctgttcttccagttcaagaccaccagcctggacggcctgatcctgtacaacagcggcgacggcaacgacttcatcgtggtggagctggtgaagggctacctgcactacgtgttcgacctgggcaacggcgccaacctgatcaagggcagcagcaacaagcccctgaacgacaaccagtggcacaacgtgatgatcagcagagacaccagcaacctgcacaccgtgaagatcgacaccaagatcaccacccagatcaccgccggcgccagaaacctggacctgaagagcgacctgtacatcggcggcgtggccaaggagacctacaagagcctgcccaagctggtgcacgccaaggagggcttccagggctgcctggccagcgtggacctgaacggcagactgcccgacctgatcagcgacgccctgttctgcaacggccagatcgagagaggctgcgagggccccagcaccacctgccaggaggacagctgcagcaaccagggcgtgtgcctgcagcagtgggacggcttcagctgcgactgcagcatgaccagcttcagcggccccctgtgcaacgaccccggcaccacctacatcttcagcaagggcggcggccagatcacctacaagtggccccccaacgacagacccagcaccagagccgacagactggccatcggcttcagcaccgtgcagaaggaggccgtgctggtgagagtggacagcagcagcggcctgggcgactacctggagctgcacatccaccagggcaagatcggcgtgaagttcaacgtgggcaccgacgacatcgccatcgaggagagcaacgccatcatcaacgacggcaagtaccacgtggtgagattcaccagaagcggcggcaacgccaccctgcaggtggacagctggcccgtgatcgagagataccccgccggcaacaacgacaacgagagactggccatcgccagacagagaatcccctacagactgggcagagtggtggacgagtggctgctggacaagggcagacagctgaccatcttcaacagccaggccaccatcatcatcggcggcaaggagcagggccagcccttccagggccagctgagcggcctgtactacaacggcctgaaggtgctgaacatggccgccgagaacgacgccaacatcgccatcgtgggcaacgtgagactggtgggcgaggtgcccagcagcatgaccaccgagagcaccgccaccgccatgcagagcgagatgagcaccagcatcatggagaccaccaccaccctggccaccagcaccgccagaagaggcaagccccccaccaaggagcccatcagccagaccaccgacgacatcctggtggccagcgccgagtgccccagcgacgacgaggacatcgacccctgcgagcccagcagcggcggcctggccaaccccaccagagccggcggcagagagccctaccccggcagcgccgaggtgatcagagagagcagcagcaccaccggcatggtggtgggcatcgtggccgccgccgccctgtgcatcctgatcctgctgtacgccatgtacaagtacagaaacagagacgagggcagctaccacgtggacgagagcagaaactacatcagcaacagcgcccagagcaacggcgccgtggtgaaggagaagcagcccagcagcgccaagagcagcaacaagaacaagaagaacaaggacaaggagtactacgtgtag

SEQ ID NO: 90701 - DNA, 4644 bp, synthetic construct
  misc_feature 1..4644: note = Description of Artificial Sequence: Synthetic coding sequence
  source 1..4644: mol_type = other DNA
atgggcaccgccctgctgcagagaggcggctgcttcctgctgtgcctgagcctgctgctgctgggctgctgggccgagctgggcagcggcctggagttccccggcgccgagggccagtggaccagattccccaagtggaacgcctgctgcgagagcgagatgagcttccagctgaagaccagaagcgccagaggcctggtgctgtacttcgacgacgagggcttctgcgacttcctggagctgatcctgaccagaggcggcagactgcagctgagcttcagcatcttctgcgccgagcccgccaccctgctggccgacacccccgtgaacgacggcgcctggcacagcgtgagaatcagaagacagttcagaaacaccaccctgttcatcgaccaggtggaggccaagtgggtggaggtgaagagcaagagaagagacatgaccgtgttcagcggcctgttcgtgggcggcctgccccccgagctgagagccgccgccctgaagctgaccctggccagcgtgagagagagagagcccttcaagggctggatcagagacgtgagagtgaacagcagccaggtgctgcccgtggacagcggcgaggtgaagctggacgacgagccccccaacagcggcggcggcagcccctgcgaggccggcgaggagggcgagggcggcgtgtgcctgaacggcggcgtgtgcagcgtggtggacgaccaggccgtgtgcgactgcagcagaaccggcttcagaggcaaggactgcagccaggagatcaagttcggcctgcagtgcgtgctgcccgtgctgctgcacgacaacgaccagggcaagtactgctgcatcaacaccgccaagcccctgaccgagaaggacaacaacgtggagggcctggcccacctgatgatgggcgaccagggcaagagcaagggcaaggaggagtacatcgccaccttcaagggcagcgagtacttctgctacgacctgagccagaaccccatccagagcagcagcgacgagatcaccctgagcttcaagaccctgcagagaaacggcctgatgctgcacaccggcaagagcgccgactacgtgaacctggccctgaagaacggcgccgtgagcctggtgatcaacctgggcagcggcgccttcgaggccctggtggagcccgtgaacggcaagttcaacgacaacgcctggcacgacgtgaaggtgaccagaaacctgagacagcacagcggcatcggccacgccatggtgaacaagctgcactgcagcgtgaccatcagcgtggacggcatcctgaccaccaccggctacacccaggaggactacaccatgctgggcagcgacgacttcttctacgtgggcggcagccccagcaccgccgacctgcccggcagccccgtgagcaacaacttcatgggctgcctgaaggaggtggtgtacaagaacaacgacgtgagactggagctgagcagactggccaagcagggcgaccccaagatgaagatccacggcgtggtggccttcaagtgcgagaacgtggccaccctggaccccatcaccttcgagacccccgagagcttcatcagcctgcccaagtggaacgccaagaagaccggcagcatcagcttcgacttcagaaccaccgagcccaacggcctgatcctgttcagccacggcaagcccagacaccagaaggacgccaagcacccccagatgatcaaggtggacttcttcgccatcgagatgctggacggccacctgtacctgctgctggacatgggcagcggcaccatcaagatcaaggccctgctgaagaaggtgaacgacggcgagtggtaccacgtggacttccagagagacggcagaagcggcaccatcagcgtgaacaccctgagaaccccctacaccgcccccggcgagagcgagatcctggacctggacgacgagctgtacctgggcggcctgcccgagaacaaggccggcctggtgttccccaccgaggtgtggaccgccctgctgaactacggctacgtgggctgcatcagagacctgttcatcgacggccagagcaaggacatcagacagatggccgaggtgcagagcaccgccggcgtgaagcccagctgcagcaaggagaccgccaagccctgcctgagcaacccctgcaagaacaacggcatgtgcagagacggctggaacagatacgtgtgcgactgcagcggcaccggctacctgggcagaagctgcgagagagaggccaccgtgctgagctacgacggcagcatgttcatgaagatccagctgcccgtggtgatgcacaccgaggccgaggacgtgagcctgagattcagaagccagagagcctacggcatcctgatggccaccaccagcagagacagcgccgacaccctgagactggagctggacgccggcagagtgaagctgaccgtgaacctggactgcatcagaatcaactgcaacagcagcaagggccccgagaccctgttcgccggctacaacctgaacgacaacgagtggcacaccgtgagagtggtgagaagaggcaagagcctgaagctgaccgtggacgaccagcaggccatgaccggccagatggccggcgaccacaccagactggagttccacaacatcgagaccggcatcatcaccgagagaagatacctgagcagcgtgcccagcaacttcatcggccacctgcagagcctgaccttcaacggcatggcctacatcgacctgtgcaagaacggcgacatcgactactgcgagctgaacgccagattcggcttcagaaacatcatcgccgaccccgtgaccttcaagaccaagagcagctacgtggccctggccaccctgcaggcctacaccagcatgcacctgttcttccagttcaagaccaccagcctggacggcctgatcctgtacaacagcggcgacggcaacgacttcatcgtggtggagctggtgaagggctacctgcactacgtgttcgacctgggcaacggcgccaacctgatcaagggcagcagcaacaagcccctgaacgacaaccagtggcacaacgtgatgatcagcagagacaccagcaacctgcacaccgtgaagatcgacaccaagatcaccacccagatcaccgccggcgccagaaacctggacctgaagagcgacctgtacatcggcggcgtggccaaggagacctacaagagcctgcccaagctggtgcacgccaaggagggcttccagggctgcctggccagcgtggacctgaacggcagactgcccgacctgatcagcgacgccctgttctgcaacggccagatcgagagaggctgcgagggccccagcaccacctgccaggaggacagctgcagcaaccagggcgtgtgcctgcagcagtgggacggcttcagctgcgactgcagcatgaccagcttcagcggccccctgtgcaacgaccccggcaccacctacatcttcagcaagggcggcggccagatcacctacaagtggccccccaacgacagacccagcaccagagccgacagactggccatcggcttcagcaccgtgcagaaggaggccgtgctggtgagagtggacagcagcagcggcctgggcgactacctggagctgcacatccaccagggcaagatcggcgtgaagttcaacgtgggcaccgacgacatcgccatcgaggagagcaacgccatcatcaacgacggcaagtaccacgtggtgagattcaccagaagcggcggcaacgccaccctgcaggtggacagctggcccgtgatcgagagataccccgccggcaacaacgacaacgagagactggccatcgccagacagagaatcccctacagactgggcagagtggtggacgagtggctgctggacaagggcagacagctgaccatcttcaacagccaggccaccatcatcatcggcggcaaggagcagggccagcccttccagggccagctgagcggcctgtactacaacggcctgaaggtgctgaacatggccgccgagaacgacgccaacatcgccatcgtgggcaacgtgagactggtgggcgaggtgcccagcagcatgaccaccgagagcaccgccaccgccatgcagagcgagatgagcaccagcatcatggagaccaccaccaccctggccaccagcaccgccagaagaggcaagccccccaccaaggagcccatcagccagaccaccgacgacatcctggtggccagcgccgagtgccccagcgacgacgaggacatcgacccctgcgagcccagcagcggcggcctggccaaccccaccagagccggcggcagagagccctaccccggcagcgccgaggtgatcagagagagcagcagcaccaccggcatggtggtgggcatcgtggccgccgccgccctgtgcatcctgatcctgctgtacgccatgtacaagtacagaaacagagacgagggcagctaccacgtggacgagagcagaaactacatcagcaacagcgcccagagcaacggcgccgtggtgaaggagaagcagcccagcagcgccaagagcagcaacaagaacaagaagaacaaggacaaggagtactacgtgtag

SEQ ID NO: 90702 - DNA, 4434 bp, synthetic construct
  misc_feature 1..4434: note = Description of Artificial Sequence: Synthetic coding sequence
  source 1..4434: mol_type = other DNA
atgggcaccgccctgctgcagagaggcggctgcttcctgctgtgcctgagcctgctgctgctgggctgctgggccgagctgggcagcggcctggagttccccggcgccgagggccagtggaccagattccccaagtggaacgcctgctgcgagagcgagatgagcttccagctgaagaccagaagcgccagaggcctggtgctgtacttcgacgacgagggcttctgcgacttcctggagctgatcctgaccagaggcggcagactgcagctgagcttcagcatcttctgcgccgagcccgccaccctgctggccgacacccccgtgaacgacggcgcctggcacagcgtgagaatcagaagacagttcagaaacaccaccctgttcatcgaccaggtggaggccaagtgggtggaggtgaagagcaagagaagagacatgaccgtgttcagcggcctgttcgtgggcggcctgccccccgagctgagagccgccgccctgaagctgaccctggccagcgtgagagagagagagcccttcaagggctggatcagagacgtgagagtgaacagcagccaggtgctgcccgtggacagcggcgaggtgaagctggacgacgagccccccaacagcggcggcggcagcccctgcgaggccggcgaggagggcgagggcggcgtgtgcctgaacggcggcgtgtgcagcgtggtggacgaccaggccgtgtgcgactgcagcagaaccggcttcagaggcaaggactgcagccaggaggacaacaacgtggagggcctggcccacctgatgatgggcgaccagggcaagagcaagggcaaggaggagtacatcgccaccttcaagggcagcgagtacttctgctacgacctgagccagaaccccatccagagcagcagcgacgagatcaccctgagcttcaagaccctgcagagaaacggcctgatgctgcacaccggcaagagcgccgactacgtgaacctggccctgaagaacggcgccgtgagcctggtgatcaacctgggcagcggcgccttcgaggccctggtggagcccgtgaacggcaagttcaacgacaacgcctggcacgacgtgaaggtgaccagaaacctgagacagcacagcggcatcggccacgccatggtgaccatcagcgtggacggcatcctgaccaccaccggctacacccaggaggactacaccatgctgggcagcgacgacttcttctacgtgggcggcagccccagcaccgccgacctgcccggcagccccgtgagcaacaacttcatgggctgcctgaaggaggtggtgtacaagaacaacgacgtgagactggagctgagcagactggccaagcagggcgaccccaagatgaagatccacggcgtggtggccttcaagtgcgagaacgtggccaccctggaccccatcaccttcgagacccccgagagcttcatcagcctgcccaagtggaacgccaagaagaccggcagcatcagcttcgacttcagaaccaccgagcccaacggcctgatcctgttcagccacggcaagcccagacaccagaaggacgccaagcacccccagatgatcaaggtggacttcttcgccatcgagatgctggacggccacctgtacctgctgctggacatgggcagcggcaccatcaagatcaaggccctgctgaagaaggtgaacgacggcgagtggtaccacgtggacttccagagagacggcagaagcggcaccatcagcgtgaacaccctgagaaccccctacaccgcccccggcgagagcgagatcctggacctggacgacgagctgtacctgggcggcctgcccgagaacaaggccggcctggtgttccccaccgaggtgtggaccgccctgctgaactacggctacgtgggctgcatcagagacctgttcatcgacggccagagcaaggacatcagacagatggccgaggtgcagagcaccgccggcgtgaagcccagctgcagcaaggagaccgccaagccctgcctgagcaacccctgcaagaacaacggcatgtgcagagacggctggaacagatacgtgtgcgactgcagcggcaccggctacctgggcagaagctgcgagagagaggccaccgtgctgagctacgacggcagcatgttcatgaagatccagctgcccgtggtgatgcacaccgaggccgaggacgtgagcctgagattcagaagccagagagcctacggcatcctgatggccaccaccagcagagacagcgccgacaccctgagactggagctggacgccggcagagtgaagctgaccgtgaacctggactgcatcagaatcaactgcaacagcagcaagggccccgagaccctgttcgccggctacaacctgaacgacaacgagtggcacaccgtgagagtggtgagaagaggcaagagcctgaagctgaccgtggacgaccagcaggccatgaccggccagatggccggcgaccacaccagactggagttccacaacatcgagaccggcatcatcaccgagagaagatacctgagcagcgtgcccagcaacttcatcggccacctgcagagcctgaccttcaacggcatggcctacatcgacctgtgcaagaacggcgacatcgactactgcgagctgaacgccagattcggcttcagaaacatcatcgccgaccccgtgaccttcaagaccaagagcagctacgtggccctggccaccctgcaggcctacaccagcatgcacctgttcttccagttcaagaccaccagcctggacggcctgatcctgtacaacagcggcgacggcaacgacttcatcgtggtggagctggtgaagggctacctgcactacgtgttcgacctgggcaacggcgccaacctgatcaagggcagcagcaacaagcccctgaacgacaaccagtggcacaacgtgatgatcagcagagacaccagcaacctgcacaccgtgaagatcgacaccaagatcaccacccagatcaccgccggcgccagaaacctggacctgaagagcgacctgtacatcggcggcgtggccaaggagacctacaagagcctgcccaagctggtgcacgccaaggagggcttccagggctgcctggccagcgtggacctgaacggcagactgcccgacctgatcagcgacgccctgttctgcaacggccagatcgagagaggctgcgagggccccagcaccacctgccaggaggacagctgcagcaaccagggcgtgtgcctgcagcagtgggacggcttcagctgcgactgcagcatgaccagcttcagcggccccctgtgcaacgaccccggcaccacctacatcttcagcaagggcggcggccagatcacctacaagtggccccccaacgacagacccagcaccagagccgacagactggccatcggcttcagcaccgtgcagaaggaggccgtgctggtgagagtggacagcagcagcggcctgggcgactacctggagctgcacatccaccagggcaagatcggcgtgaagttcaacgtgggcaccgacgacatcgccatcgaggagagcaacgccatcatcaacgacggcaagtaccacgtggtgagattcaccagaagcggcggcaacgccaccctgcaggtggacagctggcccgtgatcgagagataccccgccggcagacagctgaccatcttcaacagccaggccaccatcatcatcggcggcaaggagcagggccagcccttccagggccagctgagcggcctgtactacaacggcctgaaggtgctgaacatggccgccgagaacgacgccaacatcgccatcgtgggcaacgtgagactggtgggcgaggtgcccagcagcatgaccaccgagagcaccgccaccgccatgcagagcgagatgagcaccagcatcatggagaccaccaccaccctggccaccagcaccgccagaagaggcaagccccccaccaaggagcccatcagccagaccaccgacgacatcctggtggccagcgccgagtgccccagcgacgacgaggacatcgacccctgcgagcccagcagcggcggcctggccaaccccaccagagccggcggcagagagccctaccccggcagcgccgaggtgatcagagagagcagcagcaccaccggcatggtggtgggcatcgtggccgccgccgccctgtgcatcctgatcctgctgtacgccatgtacaagtacagaaacagagacgagggcagctaccacgtggacgagagcagaaactacatcagcaacagcgcccagagcaacggcgccgtggtgaaggagaagcagcccagcagcgccaagagcagcaacaagaacaagaagaacaaggacaaggagtactacgtgtag

SEQ ID NO: 90703 - DNA, 4434 bp, synthetic construct
  misc_feature 1..4434: note = Description of Artificial Sequence: Synthetic coding sequence
  source 1..4434: mol_type = other DNA
atgggcaccgccctgctgcagagaggcggctgcttcctgctgtgcctgagcctgctgctgctgggctgctgggccgagctgggcagcggcctggagttccccggcgccgagggccagtggaccagattccccaagtggaacgcctgctgcgagagcgagatgagcttccagctgaagaccagaagcgccagaggcctggtgctgtacttcgacgacgagggcttctgcgacttcctggagctgatcctgaccagaggcggcagactgcagctgagcttcagcatcttctgcgccgagcccgccaccctgctggccgacacccccgtgaacgacggcgcctggcacagcgtgagaatcagaagacagttcagaaacaccaccctgttcatcgaccaggtggaggccaagtgggtggaggtgaagagcaagagaagagacatgaccgtgttcagcggcctgttcgtgggcggcctgccccccgagctgagagccgccgccctgaagctgaccctggccagcgtgagagagagagagcccttcaagggctggatcagagacgtgagagtgaacagcagccaggtgctgcccgtggacagcggcgaggtgaagctggacgacgagccccccaacagcggcggcggcagcccctgcgaggccggcgaggagggcgagggcggcgtgtgcctgaacggcggcgtgtgcagcgtggtggacgaccaggccgtgtgcgactgcagcagaaccggcttcagaggcaaggactgcagccaggccgacaccaacctggagggcctggcccacctgatgatgggcgaccaggccaagagcaagagaaaggaggagtacatcgccaccttcaagggcagcgagtacttctgctacgacctgagccagaaccccatccagagcagcagcgacgagatcaccctgagcttcaagaccctgcagagaaacggcctgatgctgcacaccggcaagagcgccgactacgtgaacctggccctgaagaacggcgccgtgagcctggtgatcaacctgggcagcggcgccttcgaggccctggtggagcccgtgaacggcaagttcaacgacaacgcctggcacgacgtgaaggtgaccagaaacctgagacagcacagcggcatcggccacgccatggtgaccatcagcgtggacggcatcctgaccaccaccggctacacccaggaggactacaccatgctgggcagcgacgacttcttctacgtgggcggcagccccagcaccgccgacctgcccggcagccccgtgagcaacaacttcatgggctgcctgaaggaggtggtgtacaagaacaacgacgtgagactggagctgagcagactggccaagcagggcgaccccaagatgaagatccacggcgtggtggccttcaagtgcgagaacgtggccaccctggaccccatcaccttcgagacccccgagagcttcatcagcctgcccaagtggaacgccaagaagaccggcagcatcagcttcgacttcagaaccaccgagcccaacggcctgatcctgttcagccacggcaagcccagacaccagaaggacgccaagcacccccagatgatcaaggtggacttcttcgccatcgagatgctggacggccacctgtacctgctgctggacatgggcagcggcaccatcaagatcaaggccctgctgaagaaggtgaacgacggcgagtggtaccacgtggacttccagagagacggcagaagcggcaccatcagcgtgaacaccctgagaaccccctacaccgcccccggcgagagcgagatcctggacctggacgacgagctgtacctgggcggcctgcccgagaacaaggccggcctggtgttccccaccgaggtgtggaccgccctgctgaactacggctacgtgggctgcatcagagacctgttcatcgacggccagagcaaggacatcagacagatggccgaggtgcagagcaccgccggcgtgaagcccagctgcagcaaggagaccgccaagccctgcctgagcaacccctgcaagaacaacggcatgtgcagagacggctggaacagatacgtgtgcgactgcagcggcaccggctacctgggcagaagctgcgagagagaggccaccgtgctgagctacgacggcagcatgttcatgaagatccagctgcccgtggtgatgcacaccgaggccgaggacgtgagcctgagattcagaagccagagagcctacggcatcctgatggccaccaccagcagagacagcgccgacaccctgagactggagctggacgccggcagagtgaagctgaccgtgaacctggactgcatcagaatcaactgcaacagcagcaagggccccgagaccctgttcgccggctacaacctgaacgacaacgagtggcacaccgtgagagtggtgagaagaggcaagagcctgaagctgaccgtggacgaccagcaggccatgaccggccagatggccggcgaccacaccagactggagttccacaacatcgagaccggcatcatcaccgagagaagatacctgagcagcgtgcccagcaacttcatcggccacctgcagagcctgaccttcaacggcatggcctacatcgacctgtgcaagaacggcgacatcgactactgcgagctgaacgccagattcggcttcagaaacatcatcgccgaccccgtgaccttcaagaccaagagcagctacgtggccctggccaccctgcaggcctacaccagcatgcacctgttcttccagttcaagaccaccagcctggacggcctgatcctgtacaacagcggcgacggcaacgacttcatcgtggtggagctggtgaagggctacctgcactacgtgttcgacctgggcaacggcgccaacctgatcaagggcagcagcaacaagcccctgaacgacaaccagtggcacaacgtgatgatcagcagagacaccagcaacctgcacaccgtgaagatcgacaccaagatcaccacccagatcaccgccggcgccagaaacctggacctgaagagcgacctgtacatcggcggcgtggccaaggagacctacaagagcctgcccaagctggtgcacgccaaggagggcttccagggctgcctggccagcgtggacctgaacggcagactgcccgacctgatcagcgacgccctgttctgcaacggccagatcgagagaggctgcgagggccccagcaccacctgccaggaggacagctgcagcaaccagggcgtgtgcctgcagcagtgggacggcttcagctgcgactgcagcatgaccagcttcagcggccccctgtgcaacgaccccggcaccacctacatcttcagcaagggcggcggccagatcacctacaagtggccccccaacgacagacccagcaccagagccgacagactggccatcggcttcagcaccgtgcagaaggaggccgtgctggtgagagtggacagcagcagcggcctgggcgactacctggagctgcacatccaccagggcaagatcggcgtgaagttcaacgtgggcaccgacgacatcgccatcgaggagagcaacgccatcatcaacgacggcaagtaccacgtggtgagattcaccagaagcggcggcaacgccaccctgcaggtggacagctggcccgtgatcgagagataccccgccggcagacagctgaccatcttcaacagccaggccaccatcatcatcggcggcaaggagcagggccagcccttccagggccagctgagcggcctgtactacaacggcctgaaggtgctgaacatggccgccgagaacgacgccaacatcgccatcgtgggcaacgtgagactggtgggcgaggtgcccagcagcatgaccaccgagagcaccgccaccgccatgcagagcgagatgagcaccagcatcatggagaccaccaccaccctggccaccagcaccgccagaagaggcaagccccccaccaaggagcccatcagccagaccaccgacgacatcctggtggccagcgccgagtgccccagcgacgacgaggacatcgacccctgcgagcccagcagcggcggcctggccaaccccaccagagccggcggcagagagccctaccccggcagcgccgaggtgatcagagagagcagcagcaccaccggcatggtggtgggcatcgtggccgccgccgccctgtgcatcctgatcctgctgtacgccatgtacaagtacagaaacagagacgagggcagctaccacgtggacgagagcagaaactacatcagcaacagcgcccagagcaacggcgccgtggtgaaggagaagcagcccagcagcgccaagagcagcaacaagaacaagaagaacaaggacaaggagtactacgtgtag

SEQ ID NO: 90704 - DNA, 4647 bp, synthetic construct
  misc_feature 1..4647: note = Description of Artificial Sequence: Synthetic coding sequence
  source 1..4647: mol_type = other DNA
atgggcaccgccctgctgcagagaggcggctgcttcctgctgtgcctgagcctgctgctgctgggctgctgggccgagctgggcagcggcctggagttccccggcgccgagggccagtggaccagattccccaagtggaacgcctgctgcgagagcgagatgagcttccagctgaagaccagaagcgccagaggcctggtgctgtacttcgacgacgagggcttctgcgacttcctggagctgatcctgaccagaggcggcagactgcagctgagcttcagcatcttctgcgccgagcccgccaccctgctggccgacacccccgtgaacgacggcgcctggcacagcgtgagaatcagaagacagttcagaaacaccaccctgttcatcgaccaggtggaggccaagtgggtggaggtgaagagcaagagaagagacatgaccgtgttcagcggcctgttcgtgggcggcctgccccccgagctgagagccgccgccctgaagctgaccctggccagcgtgagagagagagagcccttcaagggctggatcagagacgtgagagtgaacagcagccaggtgctgcccgtggacagcggcgaggtgaagctggacgacgagccccccaacagcggcggcggcagcccctgcgaggccggcgaggagggcgagggcggcgtgtgcctgaacggcggcgtgtgcagcgtggtggacgaccaggccgtgtgcgactgcagcagaaccggcttcagaggcaaggactgcagccaggagatcaagttcggcctgcagtgcgtgctgcccgtgctgctgcacgacaacgaccagggcaagtactgctgcatcaacaccgccaagcccctgaccgagaagaaggacaacgacttcgagggcctggcccacctgatgatgggcgaccaggccaagagcaagagaaaggaggagtacatcgccaccttcaagggcagcgagtacttctgctacgacctgagccagaaccccatccagagcagcagcgacgagatcaccctgagcttcaagaccctgcagagaaacggcctgatgctgcacaccggcaagagcgccgactacgtgaacctggccctgaagaacggcgccgtgagcctggtgatcaacctgggcagcggcgccttcgaggccctggtggagcccgtgaacggcaagttcaacgacaacgcctggcacgacgtgaaggtgaccagaaacctgagacagcacagcggcatcggccacgccatggtgaacaagctgcactgcagcgtgaccatcagcgtggacggcatcctgaccaccaccggctacacccaggaggactacaccatgctgggcagcgacgacttcttctacgtgggcggcagccccagcaccgccgacctgcccggcagccccgtgagcaacaacttcatgggctgcctgaaggaggtggtgtacaagaacaacgacgtgagactggagctgagcagactggccaagcagggcgaccccaagatgaagatccacggcgtggtggccttcaagtgcgagaacgtggccaccctggaccccatcaccttcgagacccccgagagcttcatcagcctgcccaagtggaacgccaagaagaccggcagcatcagcttcgacttcagaaccaccgagcccaacggcctgatcctgttcagccacggcaagcccagacaccagaaggacgccaagcacccccagatgatcaaggtggacttcttcgccatcgagatgctggacggccacctgtacctgctgctggacatgggcagcggcaccatcaagatcaaggccctgctgaagaaggtgaacgacggcgagtggtaccacgtggacttccagagagacggcagaagcggcaccatcagcgtgaacaccctgagaaccccctacaccgcccccggcgagagcgagatcctggacctggacgacgagctgtacctgggcggcctgcccgagaacaaggccggcctggtgttccccaccgaggtgtggaccgccctgctgaactacggctacgtgggctgcatcagagacctgttcatcgacggccagagcaaggacatcagacagatggccgaggtgcagagcaccgccggcgtgaagcccagctgcagcaaggagaccgccaagccctgcctgagcaacccctgcaagaacaacggcatgtgcagagacggctggaacagatacgtgtgcgactgcagcggcaccggctacctgggcagaagctgcgagagagaggccaccgtgctgagctacgacggcagcatgttcatgaagatccagctgcccgtggtgatgcacaccgaggccgaggacgtgagcctgagattcagaagccagagagcctacggcatcctgatggccaccaccagcagagacagcgccgacaccctgagactggagctggacgccggcagagtgaagctgaccgtgaacctggactgcatcagaatcaactgcaacagcagcaagggccccgagaccctgttcgccggctacaacctgaacgacaacgagtggcacaccgtgagagtggtgagaagaggcaagagcctgaagctgaccgtggacgaccagcaggccatgaccggccagatggccggcgaccacaccagactggagttccacaacatcgagaccggcatcatcaccgagagaagatacctgagcagcgtgcccagcaacttcatcggccacctgcagagcctgaccttcaacggcatggcctacatcgacctgtgcaagaacggcgacatcgactactgcgagctgaacgccagattcggcttcagaaacatcatcgccgaccccgtgaccttcaagaccaagagcagctacgtggccctggccaccctgcaggcctacaccagcatgcacctgttcttccagttcaagaccaccagcctggacggcctgatcctgtacaacagcggcgacggcaacgacttcatcgtggtggagctggtgaagggctacctgcactacgtgttcgacctgggcaacggcgccaacctgatcaagggcagcagcaacaagcccctgaacgacaaccagtggcacaacgtgatgatcagcagagacaccagcaacctgcacaccgtgaagatcgacaccaagatcaccacccagatcaccgccggcgccagaaacctggacctgaagagcgacctgtacatcggcggcgtggccaaggagacctacaagagcctgcccaagctggtgcacgccaaggagggcttccagggctgcctggccagcgtggacctgaacggcagactgcccgacctgatcagcgacgccctgttctgcaacggccagatcgagagaggctgcgagggccccagcaccacctgccaggaggacagctgcagcaaccagggcgtgtgcctgcagcagtgggacggcttcagctgcgactgcagcatgaccagcttcagcggccccctgtgcaacgaccccggcaccacctacatcttcagcaagggcggcggccagatcacctacaagtggccccccaacgacagacccagcaccagagccgacagactggccatcggcttcagcaccgtgcagaaggaggccgtgctggtgagagtggacagcagcagcggcctgggcgactacctggagctgcacatccaccagggcaagatcggcgtgaagttcaacgtgggcaccgacgacatcgccatcgaggagagcaacgccatcatcaacgacggcaagtaccacgtggtgagattcaccagaagcggcggcaacgccaccctgcaggtggacagctggcccgtgatcgagagataccccgccggcaacaacgacaacgagagactggccatcgccagacagagaatcccctacagactgggcagagtggtggacgagtggctgctggacaagggcagacagctgaccatcttcaacagccaggccaccatcatcatcggcggcaaggagcagggccagcccttccagggccagctgagcggcctgtactacaacggcctgaaggtgctgaacatggccgccgagaacgacgccaacatcgccatcgtgggcaacgtgagactggtgggcgaggtgcccagcagcatgaccaccgagagcaccgccaccgccatgcagagcgagatgagcaccagcatcatggagaccaccaccaccctggccaccagcaccgccagaagaggcaagccccccaccaaggagcccatcagccagaccaccgacgacatcctggtggccagcgccgagtgccccagcgacgacgaggacatcgacccctgcgagcccagcagcggcggcctggccaaccccaccagagccggcggcagagagccctaccccggcagcgccgaggtgatcagagagagcagcagcaccaccggcatggtggtgggcatcgtggccgccgccgccctgtgcatcctgatcctgctgtacgccatgtacaagtacagaaacagagacgagggcagctaccacgtggacgagagcagaaactacatcagcaacagcgcccagagcaacggcgccgtggtgaaggagaagcagcccagcagcgccaagagcagcaacaagaacaagaagaacaaggacaaggagtactacgtgtag

SEQ ID NO: 90705 - DNA, 1191 bp, synthetic construct
  misc_feature 1..1191: note = Description of Artificial Sequence: Synthetic coding sequence
  source 1..1191: mol_type = other DNA
gccctggagatctgggagcagccccccgcccccagactgctgttccccggcctgcccttcagaaccagccccagccccgccgccttctacagaagccccgccagcctgagaggcggccacgccggcaccacctacatcttcagcaagggcggcggccagatcacctacaagtggccccccaacgacagacccagcaccagagccgacagactggccatcggcttcagcaccgtgcagaaggaggccgtgctggtgagagtggacagcagcagcggcctgggcgactacctggagctgcacatccaccagggcaagatcggcgtgaagttcaacgtgggcaccgacgacatcgccatcgaggagagcaacgccatcatcaacgacggcaagtaccacgtggtgagattcaccagaagcggcggcaacgccaccctgcaggtggacagctggcccgtgatcgagagataccccgccggcagacagctgaccatcttcaacagccaggccaccatcatcatcggcggcaaggagcagggccagcccttccagggccagctgagcggcctgtactacaacggcctgaaggtgctgaacatggccgccgagaacgacgccaacatcgccatcgtgggcaacgtgagactggtgggcgaggtgcccagcagcatgaccaccgagagcaccgccaccgccatgcagagcgagatgagcaccagcatcatggagaccaccaccaccctggccaccagcaccgccagaagaggcaagccccccaccaaggagcccatcagccagaccaccgacgacatcctggtggccagcgccgagtgccccagcgacgacgaggacatcgacccctgcgagcccagcagcggcggcctggccaaccccaccagagccggcggcagagagccctaccccggcagcgccgaggtgatcagagagagcagcagcaccaccggcatggtggtgggcatcgtggccgccgccgccctgtgcatcctgatcctgctgtacgccatgtacaagtacagaaacagagacgagggcagctaccacgtggacgagagcagaaactacatcagcaacagcgcccagagcaacggcgccgtggtgaaggagaagcagcccagcagcgccaagagcagcaacaagaacaagaagaacaaggacaaggagtactacgtgtag

SEQ ID NO: 90706 - DNA, 5139 bp, synthetic construct
  misc_feature 1..5139: note = Description of Artificial Sequence: Synthetic coding sequence
  source 1..5139: mol_type = other DNA
atggccagcggcagcagatggagacccacccccccccccctgctgctgctgctgctgctggccctggccgccagagccgacggcctggagttcggcggcggccccggccagtgggccagatacgccagatgggccggcgccgccagcagcggcgagctgagcttcagcctgagaaccaacgccaccagagccctgctgctgtacctggacgacggcggcgactgcgacttcctggagctgctgctggtggacggcagactgagactgagattcaccctgagctgcgccgagcccgccaccctgcagctggacacccccgtggccgacgacagatggcacatggtgctgctgaccagagacgccagaagaaccgccctggccgtggacggcgaggccagagccgccgaggtgagaagcaagagaagagagatgcaggtggccagcgacctgttcgtgggcggcatcccccccgacgtgagactgagcgccctgaccctgagcaccgtgaagtacgagccccccttcagaggcctgctggccaacctgaagctgggcgagagaccccccgccctgctgggcagccagggcctgagaggcgccaccgccgaccccctgtgcgcccccgccagaaacccctgcgccaacggcggcctgtgcaccgtgctggcccccggcgaggtgggctgcgactgcagccacaccggcttcggcggcaagttctgcagcgaggaggagcaccccatggagggccccgcccacctgaccctgaacagcgaggtgggcagcctgctgttcagcgagggcggcgccggcagaggcggcgccggcgacgtgcaccagcccaccaagggcaaggaggagttcgtggccaccttcaagggcaacgagttcttctgctacgacctgagccacaaccccatccagagcagcaccgacgagatcaccctggccttcagaaccctgcagagaaacggcctgatgctgcacaccggcaagagcgccgactacgtgaacctgagcctgaagagcggcgccgtgtggctggtgatcaacctgggcagcggcgccttcgaggccctggtggagcccgtgaacggcaagttcaacgacaacgcctggcacgacgtgagagtgaccagaaacctgagacagcacgccggcatcggccacgccatggtgaacaagctgcactacctggtgaccatcagcgtggacggcatcctgaccaccaccggctacacccaggaggactacaccatgctgggcagcgacgacttcttctacatcggcggcagccccaacaccgccgacctgcccggcagccccgtgagcaacaacttcatgggctgcctgaaggacgtggtgtacaagaacaacgacttcaagctggagctgagcagactggccaaggagggcgaccccaagatgaagctgcagggcgacctgagcttcagatgcgaggacgtggccgccctggaccccgtgaccttcgagagccccgaggccttcgtggccctgcccagatggagcgccaagagaaccggcagcatcagcctggacttcagaaccaccgagcccaacggcctgctgctgttcagccagggcagaagagccggcggcggcgccggcagccacagcagcgcccagagagccgactacttcgccatggagctgctggacggccacctgtacctgctgctggacatgggcagcggcggcatcaagctgagagccagcagcagaaaggtgaacgacggcgagtggtgccacgtggacttccagagagacggcagaaagggcagcatcagcgtgaacagcagaagcacccccttcctggccaccggcgacagcgagatcctggacctggagagcgagctgtacctgggcggcctgcccgagggcggcagagtggacctgcccctgccccccgaggtgtggaccgccgccctgagagccggctacgtgggctgcgtgagagacctgttcatcgacggcagaagcagagacctgagaggcctggccgaggcccagggcgccgtgggcgtggcccccttctgcagcagagagaccctgaagcagtgcgccagcgccccctgcagaaacggcggcgtgtgcagagagggctggaacagattcatctgcgactgcatcggcaccggcttcctgggcagagtgtgcgagagagaggccaccgtgctgagctacgacggcagcatgtacatgaagatcatgctgcccaacgccatgcacaccgaggccgaggacgtgagcctgagattcatgagccagagagcctacggcctgatgatggccaccaccagcagagagagcgccgacaccctgagactggagctggacggcggccagatgaagctgaccgtgaacctggactgcctgagagtgggctgcgcccccagcaagggccccgagaccctgttcgccggccacaagctgaacgacaacgagtggcacaccgtgagagtggtgagaagaggcaagagcctgcagctgagcgtggacaacgtgaccgtggagggccagatggccggcgcccacatgagactggagttccacaacatcgagaccggcatcatgaccgagagaagattcatcagcgtggtgcccagcaacttcatcggccacctgagcggcctggtgttcaacggccagccctacatggaccagtgcaaggacggcgacatcacctactgcgagctgaacgccagattcggcctgagagccatcgtggccgaccccgtgaccttcaagagcagaagcagctacctggccctggccaccctgcaggcctacgccagcatgcacctgttcttccagttcaagaccaccgcccccgacggcctgctgctgttcaacagcggcaacggcaacgacttcatcgtgatcgagctggtgaagggctacatccactacgtgttcgacctgggcaacggccccagcctgatgaagggcaacagcgacaagcccgtgaacgacaaccagtggcacaacgtggtggtgagcagagaccccggcaacgtgcacaccctgaagatcgacagcagaaccgtgacccagcacagcaacggcgccagaaacctggacctgaagggcgagctgtacatcggcggcctgagcaagaacatgttcagcaacctgcccaagctggtggccagcagagacggcttccagggctgcctggccagcgtggacctgaacggcagactgcccgacctgatcgccgacgccctgcacagaatcggccaggtggagagaggctgcgacggccccagcaccacctgcaccgaggagagctgcgccaaccagggcgtgtgcctgcagcagtgggacggcttcacctgcgactgcaccatgaccagctacggcggccccgtgtgcaacgaccccggcaccacctacatcttcggcaagggcggcgccctgatcacctacacctggccccccaacgacagacccagcaccagaatggacagactggccgtgggcttcagcacccaccagagaagcgccgtgctggtgagagtggacagcgccagcggcctgggcgactacctgcagctgcacatcgaccagggcaccgtgggcgtgatcttcaacgtgggcaccgacgacatcaccatcgacgagcccaacgccatcgtgagcgacggcaagtaccacgtggtgagattcaccagaagcggcggcaacgccaccctgcaggtggacagctggcccgtgaacgagagataccccgccggcaacttcgacaacgagagactggccatcgccagacagagaatcccctacagactgggcagagtggtggacgagtggctgctggacaagggcagacagctgaccatcttcaacagccaggccgccatcaagatcggcggcagagaccagggcagacccttccagggccaggtgagcggcctgtactacaacggcctgaaggtgctggccctggccgccgagagcgaccccaacgtgagaaccgagggccacctgagactggtgggcgagggccccagcgtgctgctgagcgccgagaccaccgccaccaccctgctggccgacatggccaccaccatcatggagaccaccaccaccatggccaccaccaccaccagaagaggcagaagccccaccctgagagacagcaccacccagaacaccgacgacctgctggtggccagcgccgagtgccccagcgacgacgaggacctggaggagtgcgagcccagcaccggcggcgagctgatcctgcccatcatcaccgaggacagcctggaccccccccccgtggccaccagaagccccttcgtgccccccccccccaccttctaccccttcctgaccggcgtgggcgccacccaggacaccctgcccccccccgccgccagaagaccccccagcggcggcccctgccaggccgagagagacgacagcgactgcgaggagcccatcgaggccagcggcttcgccagcggcgaggtgttcgacagcagcctgccccccaccgacgacgaggacttctacaccaccttccccctggtgaccgacagaaccaccctgctgagccccagaaagcccgcccccagacccaacctgagaaccgacggcgccaccggcgcccccggcgtgctgttcgcccccagcgcccccgcccccaacctgcccgccggcaagatgaaccacagagaccccctgcagcccctgctggagaacccccccctgggccccggcgcccccaccagcttcgagcccagaagacccccccccctgagacccggcgtgaccagcgcccccggcttcccccacctgcccaccgccaaccccaccggccccggcgagagaggcccccccggcgccgtggaggtgatcagagagagcagcagcaccaccggcatggtggtgggcatcgtggccgccgccgccctgtgcatcctgatcctgctgtacgccatgtacaagtacagaaacagagacgagggcagctaccaggtggaccagagcagaaactacatcagcaacagcgcccagagcaacggcgccgtggtgaaggagaaggcccccgccgcccccaagacccccagcaaggccaagaagaacaaggacaaggagtactacgtgtag

SEQ ID NO: 90707 - DNA, 4929 bp, synthetic construct
  misc_feature 1..4929: note = Description of Artificial Sequence: Synthetic coding sequence
  source 1..4929: mol_type = other DNA
atggccagcggcagcagatggagacccacccccccccccctgctgctgctgctgctgctggccctggccgccagagccgacggcctggagttcggcggcggccccggccagtgggccagatacgccagatgggccggcgccgccagcagcggcgagctgagcttcagcctgagaaccaacgccaccagagccctgctgctgtacctggacgacggcggcgactgcgacttcctggagctgctgctggtggacggcagactgagactgagattcaccctgagctgcgccgagcccgccaccctgcagctggacacccccgtggccgacgacagatggcacatggtgctgctgaccagagacgccagaagaaccgccctggccgtggacggcgaggccagagccgccgaggtgagaagcaagagaagagagatgcaggtggccagcgacctgttcgtgggcggcatcccccccgacgtgagactgagcgccctgaccctgagcaccgtgaagtacgagccccccttcagaggcctgctggccaacctgaagctgggcgagagaccccccgccctgctgggcagccagggcctgagaggcgccaccgccgaccccctgtgcgcccccgccagaaacccctgcgccaacggcggcctgtgcaccgtgctggcccccggcgaggtgggctgcgactgcagccacaccggcttcggcggcaagttctgcagcgaggcccccagccccttccagggccccgcccacctgaccctgaacagcgagggcaaggaggagttcgtggccaccttcaagggcaacgagttcttctgctacgacctgagccacaaccccatccagagcagcaccgacgagatcaccctggccttcagaaccctgcagagaaacggcctgatgctgcacaccggcaagagcgccgactacgtgaacctgagcctgaagagcggcgccgtgtggctggtgatcaacctgggcagcggcgccttcgaggccctggtggagcccgtgaacggcaagttcaacgacaacgcctggcacgacgtgagagtgaccagaaacctgagacagcacgccggcatcggccacgccatggtgaccatcagcgtggacggcatcctgaccaccaccggctacacccaggaggactacaccatgctgggcagcgacgacttcttctacatcggcggcagccccaacaccgccgacctgcccggcagccccgtgagcaacaacttcatgggctgcctgaaggacgtggtgtacaagaacaacgacttcaagctggagctgagcagactggccaaggagggcgaccccaagatgaagctgcagggcgacctgagcttcagatgcgaggacgtggccgccctggaccccgtgaccttcgagagccccgaggccttcgtggccctgcccagatggagcgccaagagaaccggcagcatcagcctggacttcagaaccaccgagcccaacggcctgctgctgttcagccagggcagaagagccggcggcggcgccggcagccacagcagcgcccagagagccgactacttcgccatggagctgctggacggccacctgtacctgctgctggacatgggcagcggcggcatcaagctgagagccagcagcagaaaggtgaacgacggcgagtggtgccacgtggacttccagagagacggcagaaagggcagcatcagcgtgaacagcagaagcacccccttcctggccaccggcgacagcgagatcctggacctggagagcgagctgtacctgggcggcctgcccgagggcggcagagtggacctgcccctgccccccgaggtgtggaccgccgccctgagagccggctacgtgggctgcgtgagagacctgttcatcgacggcagaagcagagacctgagaggcctggccgaggcccagggcgccgtgggcgtggcccccttctgcagcagagagaccctgaagcagtgcgccagcgccccctgcagaaacggcggcgtgtgcagagagggctggaacagattcatctgcgactgcatcggcaccggcttcctgggcagagtgtgcgagagagaggccaccgtgctgagctacgacggcagcatgtacatgaagatcatgctgcccaacgccatgcacaccgaggccgaggacgtgagcctgagattcatgagccagagagcctacggcctgatgatggccaccaccagcagagagagcgccgacaccctgagactggagctggacggcggccagatgaagctgaccgtgaacctgggcaagggccccgagaccctgttcgccggccacaagctgaacgacaacgagtggcacaccgtgagagtggtgagaagaggcaagagcctgcagctgagcgtggacaacgtgaccgtggagggccagatggccggcgcccacatgagactggagttccacaacatcgagaccggcatcatgaccgagagaagattcatcagcgtggtgcccagcaacttcatcggccacctgagcggcctggtgttcaacggccagccctacatggaccagtgcaaggacggcgacatcacctactgcgagctgaacgccagattcggcctgagagccatcgtggccgaccccgtgaccttcaagagcagaagcagctacctggccctggccaccctgcaggcctacgccagcatgcacctgttcttccagttcaagaccaccgcccccgacggcctgctgctgttcaacagcggcaacggcaacgacttcatcgtgatcgagctggtgaagggctacatccactacgtgttcgacctgggcaacggccccagcctgatgaagggcaacagcgacaagcccgtgaacgacaaccagtggcacaacgtggtggtgagcagagaccccggcaacgtgcacaccctgaagatcgacagcagaaccgtgacccagcacagcaacggcgccagaaacctggacctgaagggcgagctgtacatcggcggcctgagcaagaacatgttcagcaacctgcccaagctggtggccagcagagacggcttccagggctgcctggccagcgtggacctgaacggcagactgcccgacctgatcgccgacgccctgcacagaatcggccaggtggagagaggctgcgacggccccagcaccacctgcaccgaggagagctgcgccaaccagggcgtgtgcctgcagcagtgggacggcttcacctgcgactgcaccatgaccagctacggcggccccgtgtgcaacgaccccggcaccacctacatcttcggcaagggcggcgccctgatcacctacacctggccccccaacgacagacccagcaccagaatggacagactggccgtgggcttcagcacccaccagagaagcgccgtgctggtgagagtggacagcgccagcggcctgggcgactacctgcagctgcacatcgaccagggcaccgtgggcgtgatcttcaacgtgggcaccgacgacatcaccatcgacgagcccaacgccatcgtgagcgacggcaagtaccacgtggtgagattcaccagaagcggcggcaacgccaccctgcaggtggacagctggcccgtgaacgagagataccccgccggcagacagctgaccatcttcaacagccaggccgccatcaagatcggcggcagagaccagggcagacccttccagggccaggtgagcggcctgtactacaacggcctgaaggtgctggccctggccgccgagagcgaccccaacgtgagaaccgagggccacctgagactggtgggcgagggccccagcgtgctgctgagcgccgagaccaccgccaccaccctgctggccgacatggccaccaccatcatggagaccaccaccaccatggccaccaccaccaccagaagaggcagaagccccaccctgagagacagcaccacccagaacaccgacgacctgctggtggccagcgccgagtgccccagcgacgacgaggacctggaggagtgcgagcccagcaccggcggcgagctgatcctgcccatcatcaccgaggacagcctggaccccccccccgtggccaccagaagccccttcgtgccccccccccccaccttctaccccttcctgaccggcgtgggcgccacccaggacaccctgcccccccccgccgccagaagaccccccagcggcggcccctgccaggccgagagagacgacagcgactgcgaggagcccatcgaggccagcggcttcgccagcggcgaggtgttcgacagcagcctgccccccaccgacgacgaggacttctacaccaccttccccctggtgaccgacagaaccaccctgctgagccccagaaagcccgcccccagacccaacctgagaaccgacggcgccaccggcgcccccggcgtgctgttcgcccccagcgcccccgcccccaacctgcccgccggcaagatgaaccacagagaccccctgcagcccctgctggagaacccccccctgggccccggcgcccccaccagcttcgagcccagaagacccccccccctgagacccggcgtgaccagcgcccccggcttcccccacctgcccaccgccaaccccaccggccccggcgagagaggcccccccggcgccgtggaggtgatcagagagagcagcagcaccaccggcatggtggtgggcatcgtggccgccgccgccctgtgcatcctgatcctgctgtacgccatgtacaagtacagaaacagagacgagggcagctaccaggtggaccagagcagaaactacatcagcaacagcgcccagagcaacggcgccgtggtgaaggagaaggcccccgccgcccccaagacccccagcaaggccaagaagaacaaggacaaggagtactacgtgtag

SEQ ID NO: 90708 - DNA, 5139 bp, synthetic construct; identical to SEQ ID NO: 90706
  misc_feature 1..5139: note = Description of Artificial Sequence: Synthetic coding sequence
  source 1..5139: mol_type = other DNA

SEQ ID NO: 90709 - DNA, 4929 bp, synthetic construct
  misc_feature 1..4929: note = Description of Artificial Sequence: Synthetic coding sequence
  source 1..4929: mol_type = other DNA
atggccagcggcagcagatggagacccacccccccccccctgctgctgctgctgctgctggccctggccgccagagccgacggcctggagttcggcggcggccccggccagtgggccagatacgccagatgggccggcgccgccagcagcggcgagctgagcttcagcctgagaaccaacgccaccagagccctgctgctgtacctggacgacggcggcgactgcgacttcctggagctgctgctggtggacggcagactgagactgagattcaccctgagctgcgccgagcccgccaccctgcagctggacacccccgtggccgacgacagatggcacatggtgctgctgaccagagacgccagaagaaccgccctggccgtggacggcgaggccagagccgccgaggtgagaagcaagagaagagagatgcaggtggccagcgacctgttcgtgggcggcatcccccccgacgtgagactgagcgccctgaccctgagcaccgtgaagtacgagccccccttcagaggcctgctggccaacctgaagctgggcgagagaccccccgccctgctgggcagccagggcctgagaggcgccaccgccgaccccctgtgcgcccccgccagaaacccctgcgccaacggcggcctgtgcaccgtgctggcccccggcgaggtgggctgcgactgcagccacaccggcttcggcggcaagttctgcagcgaggaggagcaccccatggagggccccgcccacctgaccctgaacagcgagggcaaggaggagttcgtggccaccttcaagggcaacgagttcttctgctacgacctgagccacaaccccatccagagcagcaccgacgagatcaccctggccttcagaaccctgcagagaaacggcctgatgctgcacaccggcaagagcgccgactacgtgaacctgagcctgaagagcggcgccgtgtggctggtgatcaacctgggcagcggcgccttcgaggccctggtggagcccgtgaacggcaagttcaacgacaacgcctggcacgacgtgagagtgaccagaaacctgagacagcacgccggcatcggccacgccatggtgaccatcagcgtggacggcatcctgaccaccaccggctacacccaggaggactacaccatgctgggcagcgacgacttcttctacatcggcggcagccccaacaccgccgacctgcccggcagccccgtgagcaacaacttcatgggctgcctgaaggacgtggtgtacaagaacaacgacttcaagctggagctgagcagactggccaaggagggcgaccccaagatgaagctgcagggcgacctgagcttcagatgcgaggacgtggccgccctggaccccgtgaccttcgagagccccgaggccttcgtggccctgcccagatggagcgccaagagaaccggcagcatcagcctggacttcagaaccaccgagcccaacggcctgctgctgttcagccagggcagaagagccggcggcggcgccggcagccacagcagcgcccagagagccgactacttcgccatggagctgctggacggccacctgtacctgctgctggacatgggcagcggcggcatcaagctgagagccagcagcagaaaggtgaacgacggcgagtggtgccacgtggacttccagagagacggcagaaagggcagcatcagcgtgaacagcagaagcacccccttcctggccaccggcgacagcgagatcctggacctggagagcgagctgtacctgggcggcctgcccgagggcggcagagtggacctgcccctgccccccgaggtgtggaccgccgccctgagagccggctacgtgggctgcgtgagagacctgttcatcgacggcagaagcagagacctgagaggcctggccgaggcccagggcgccgtgggcgtggcccccttctgcagcagagagaccctgaagcagtgcgccagcgccccctgcagaaacggcggcgtgtgcagagagggctggaacagattcatctgcgactgcatcggcaccggcttcctgggcagagtgtgcgagagagaggccaccgtgctgagctacgacggcagcatgtacatgaagatcatgctgcccaacgccatgcacaccgaggccgaggacgtgagcctgagattcatgagccagagagcctacggcctgatgatggccaccaccagcagagagagcgccgacaccctgagactggagctggacggcggccagatgaagctgaccgtgaacctgggcaagggccccgagaccctgttcgccggccacaagctgaacgacaacgagtggcacaccgtgagagtggtgagaagaggcaagagcctgcagctgagcgtggacaacgtgaccgtggagggccagatggccggcgcccacatgagactggagttccacaacatcgagaccggcatcatgaccgagagaagattcatcagcgtggtgcccagcaacttcatcggccacctgagcggcctggtgttcaacggccagccctacatggaccagtgcaaggacggcgacatcacctactgcgagctgaacgccagattcggcctgagagccatcgtggccgaccccgtgaccttcaagagcagaagcagctacctggccctggccaccctgcaggcctacgccagcatgcacctgttcttccagttcaagaccaccgcccccgacggcctgctgctgttcaacagcggcaacggcaacgacttcatcgtgatcgagctggtgaagggctacatccactacgtgttcgacctgggcaacggccccagcctgatgaagggcaacagcgacaagcccgtgaacgacaaccagtggcacaacgtggtggtgagcagagaccccggcaacgtgcacaccctgaagatcgacagcagaaccgtgacccagcacagcaacggcgccagaaacctggacctgaagggcgagctgtacatcggcggcctgagcaagaacatgttcagcaacctgcccaagctggtggccagcagagacggcttccagggctgcctggccagcgtggacctgaacggcagactgcccgacctgatcgccgacgccctgcacagaatcggccaggtggagagaggctgcgacggccccagcaccacctgcaccgaggagagctgcgccaaccagggcgtgtgcctgcagcagtgggacggcttcacctgcgactgcaccatgaccagctacggcggccccgtgtgcaacgaccccggcaccacctacatcttcggcaagggcggcgccctgatcacctacacctggccccccaacgacagacccagcaccagaatggacagactggccgtgggcttcagcacccaccagagaagcgccgtgctggtgagagtggacagcgccagcggcctgggcgactacctgcagctgcacatcgaccagggcaccgtgggcgtgatcttcaacgtgggcaccgacgacatcaccatcgacgagcccaacgccatcgtgagcgacggcaagtaccacgtggtgagattcaccagaagcggcggcaacgccaccctgcaggtggacagctggcccgtgaacgagagataccccgccggcagacagctgaccatcttcaacagccaggccgccatcaagatcggcggcagagaccagggcagacccttccagggccaggtgagcggcctgtactacaacggcctgaaggtgctggccctggccgccgagagcgaccccaacgtgagaaccgagggccacctgagactggtgggcgagggccccagcgtgctgctgagcgccgagaccaccgccaccaccctgctggccgacatggccaccaccatcatggagaccaccaccaccatggccaccaccaccaccagaagaggcagaagccccaccctgagagacagcaccacccagaacaccgacgacctgctggtggccagcgccgagtgccccagcgacgacgaggacctggaggagtgcgagcccagcaccggcggcgagctgatcctgcccatcatcaccgaggacagcctggaccccccccccgtggccaccagaagccccttcgtgccccccccccccaccttctaccccttcctgaccggcgtgggcgccacccaggacaccctgcccccccccgccgccagaagaccccccagcggcggcccctgccaggccgagagagacgacagcgactgcgaggagcccatcgaggccagcggcttcgccagcggcgaggtgttcgacagcagcctgccccccaccgacgacgaggacttctacaccaccttccccctggtgaccgacagaaccaccctgctgagccccagaaagcccgcccccagacccaacctgagaaccgacggcgccaccggcgcccccggcgtgctgttcgcccccagcgcccccgcccccaacctgcccgccggcaagatgaaccacagagaccccctgcagcccctgctggagaacccccccctgggccccggcgcccccaccagcttcgagcccagaagacccccccccctgagacccggcgtgaccagcgcccccggcttcccccacctgcccaccgccaaccccaccggccccggcgagagaggcccccccggcgccgtggaggtgatcagagagagcagcagcaccaccggcatggtggtgggcatcgtggccgccgccgccctgtgcatcctgatcctgctgtacgccatgtacaagtacagaaacagagacgagggcagctaccaggtggaccagagcagaaactacatcagcaacagcgcccagagcaacggcgccgtggtgaaggagaaggcccccgccgcccccaagacccccagcaaggccaagaagaacaaggacaaggagtactacgtgtag

SEQ ID NO: 90710 - DNA, 5118 bp, synthetic construct
  misc_feature 1..5118: note = Description of Artificial Sequence: Synthetic coding sequence
  source 1..5118: mol_type = other DNA
atggccagcggcagcagatggagacccacccccccccccctgctgctgctgctgctgctggccctggccgccagagccgacggcctggagttcggcggcggccccggccagtgggccagatacgccagatgggccggcgccgccagcagcggcgagctgagcttcagcctgagaaccaacgccaccagagccctgctgctgtacctggacgacggcggcgactgcgacttcctggagctgctgctggtggacggcagactgagactgagattcaccctgagctgcgccgagcccgccaccctgcagctggacacccccgtggccgacgacagatggcacatggtgctgctgaccagagacgccagaagaaccgccctggccgtggacggcgaggccagagccgccgaggtgagaagcaagagaagagagatgcaggtggccagcgacctgttcgtgggcggcatcccccccgacgtgagactgagcgccctgaccctgagcaccgtgaagtacgagccccccttcagaggcctgctggccaacctgaagctgggcgagagaccccccgccctgctgggcagccagggcctgagaggcgccaccgccgaccccctgtgcgcccccgccagaaacccctgcgccaacggcggcctgtgcaccgtgctggcccccggcgaggtgggctgcgactgcagccacaccggcttcggcggcaagttctgcagcgaggaggagcaccccatggagggccccgcccacctgaccctgaacagcgaggtgggcagcctgctgttcagcgagggcggcgccggcagaggcggcgccggcgacgtgcaccagcccaccaagggcaaggaggagttcgtggccaccttcaagggcaacgagttcttctgctacgacctgagccacaaccccatccagagcagcaccgacgagatcaccctggccttcagaaccctgcagagaaacggcctgatgctgcacaccggcaagagcgccgactacgtgaacctgagcctgaagagcggcgccgtgtggctggtgatcaacctgggcagcggcgccttcgaggccctggtggagcccgtgaacggcaagttcaacgacaacgcctggcacgacgtgagagtgaccagaaacctgagacagcacgccggcatcggccacgccatggtgaccatcagcgtggacggcatcctgaccaccaccggctacacccaggaggactacaccatgctgggcagcgacgacttcttctacatcggcggcagccccaacaccgccgacctgcccggcagccccgtgagcaacaacttcatgggctgcctgaaggacgtggtgtacaagaacaacgacttcaagctggagctgagcagactggccaaggagggcgaccccaagatgaagctgcagggcgacctgagcttcagatgcgaggacgtggccgccctggaccccgtgaccttcgagagccccgaggccttcgtggccctgcccagatggagcgccaagagaaccggcagcatcagcctggacttcagaaccaccgagcccaacggcctgctgctgttcagccagggcagaagagccggcggcggcgccggcagccacagcagcgcccagagagccgactacttcgccatggagctgctggacggccacctgtacctgctgctggacatgggcagcggcggcatcaagctgagagccagcagcagaaaggtgaacgacggcgagtggtgccacgtggacttccagagagacggcagaaagggcagcatcagcgtgaacagcagaagcacccccttcctggccaccggcgacagcgagatcctggacctggagagcgagctgtacctgggcggcctgcccgagggcggcagagtggacctgcccctgccccccgaggtgtggaccgccgccctgagagccggctacgtgggctgcgtgagagacctgttcatcgacggcagaagcagagacctgagaggcctggccgaggcccagggcgccgtgggcgtggcccccttctgcagcagagagaccctgaagcagtgcgccagcgccccctgcagaaacggcggcgtgtgcagagagggctggaacagattcatctgcgactgcatcggcaccggcttcctgggcagagtgtgcgagagagaggccaccgtgctgagctacgacggcagcatgtacatgaagatcatgctgcccaacgccatgcacaccgaggccgaggacgtgagcctgagattcatgagccagagagcctacggcctgatgatggccaccaccagcagagagagcgccgacaccctgagactggagctggacggcggccagatgaagctgaccgtgaacctggactgcctgagagtgggctgcgcccccagcaagggccccgagaccctgttcgccggccacaagctgaacgacaacgagtggcacaccgtgagagtggtgagaagaggcaagagcctgcagctgagcgtggacaacgtgaccgtggagggccagatggccggcgcccacatgagactggagttccacaacatcgagaccggcatcatgaccgagagaagattcatcagcgtggtgcccagcaacttcatcggccacctgagcggcctggtgttcaacggccagccctacatggaccagtgcaaggacggcgacatcacctactgcgagctgaacgccagattcggcctgagagccatcgtggccgaccccgtgaccttcaagagcagaagcagctacctggccctggccaccctgcaggcctacgccagcatgcacctgttcttccagttcaagaccaccgcccccgacggcctgctgctgttcaacagcggcaacggcaacgacttcatcgtgatcgagctggtgaagggctacatccactacgtgttcgacctgggcaacggccccagcctgatgaagggcaacagcgacaagcccgtgaacgacaaccagtggcacaacgtggtggtgagcagagaccccggcaacgtgcacaccctgaagatcgacagcagaaccgtgacccagcacagcaacggcgccagaaacctggacctgaagggcgagctgtacatcggcggcctgagcaagaacatgttcagcaacctgcccaagctggtggccagcagagacggcttccagggctgcctggccagcgtggacctgaacggcagactgcccgacctgatcgccgacgccctgcacagaatcggccaggtggagagaggctgcgacggccccagcaccacctgcaccgaggagagctgcgccaaccagggcgtgtgcctgcagcagtgggacggcttcacctgcgactgcaccatgaccagctacggcggccccgtgtgcaacgaccccggcaccacctacatcttcggcaagggcggcgccctgatcacctacacctggccccccaacgacagacccagcaccagaatggacagactggccgtgggcttcagcacccaccagagaagcgccgtgctggtgagagtggacagcgccagcggcctgggcgactacctgcagctgcacatcgaccagggcaccgtgggcgtgatcttcaacgtgggcaccgacgacatcaccatcgacgagcccaacgccatcgtgagcgacggcaagtaccacgtggtgagattcaccagaagcggcggcaacgccaccctgcaggtggacagctggcccgtgaacgagagataccccgccggcaacttcgacaacgagagactggccatcgccagacagagaatcccctacagactgggcagagtggtggacgagtggctgctggacaagggcagacagctgaccatcttcaacagccaggccgccatcaagatcggcggcagagaccagggcagacccttccagggccaggtgagcggcctgtactacaacggcctgaaggtgctggccctggccgccgagagcgaccccaacgtgagaaccgagggccacctgagactggtgggcgagggccccagcgtgctgctgagcgccgagaccaccgccaccaccctgctggccgacatggccaccaccatcatggagaccaccaccaccatggccaccaccaccaccagaagaggcagaagccccaccctgagagacagcaccacccagaacaccgacgacctgctggtggccagcgccgagtgccccagcgacgacgaggacctggaggagtgcgagcccagcaccggcggcgagctgatcctgcccatcatcaccgaggacagcctggaccccccccccgtggccaccagaagccccttcgtgccccccccccccaccttctaccccttcctgaccggcgtgggcgccacccaggacaccctgcccccccccgccgccagaagaccccccagcggcggcccctgccaggccgagagagacgacagcgactgcgaggagcccatcgaggccagcggcttcgccagcggcgaggtgttcgacagcagcctgccccccaccgacgacgaggacttctacaccaccttccccctggtgaccgacagaaccaccctgctgagccccagaaagcccgcccccagacccaacctgagaaccgacggcgccaccggcgcccccggcgtgctgttcgcccccagcgcccccgcccccaacctgcccgccggcaagatgaaccacagagaccccctgcagcccctgctggagaacccccccctgggccccggcgcccccaccagcttcgagcccagaagacccccccccctgagacccggcgtgaccagcgcccccggcttcccccacctgcccaccgccaaccccaccggccccggcgagagaggcccccccggcgccgtggaggtgatcagagagagcagcagcaccaccggcatggtggtgggcatcgtggccgccgccgccctgtgcatcctgatcctgctgtacgccatgtacaagtacagaaacagagacgagggcagctaccaggtggaccagagcagaaactacatcagcaacagcgcccagagcaacggcgccgtggtgaaggagaaggcccccgccgcccccaagacccccagcaaggccaagaagaacaaggacaaggagtactacgtgtag

SEQ ID NO: 90711 - DNA, 2001 bp, synthetic construct
  misc_feature 1..2001: note = Description of Artificial Sequence: Synthetic coding sequence
  source 1..2001: mol_type = other DNA
atgccccccggcggcagcggccccggcggctgccccagaagaccccccgccctggccggccccctgccccccccccccccccccccccccccccccctgctgcccctgctgcccctgctgctgctgctgctgctgggcgccgccgagggcgccagagtgagcagcagcctgagcaccacccaccacgtgcaccacttccacagcaagcacggcaccgtgcccatcgccatcaacagaatgcccttcctgaccagaggcggccacgccggcaccacctacatcttcggcaagggcggcgccctgatcacctacacctggccccccaacgacagacccagcaccagaatggacagactggccgtgggcttcagcacccaccagagaagcgccgtgctggtgagagtggacagcgccagcggcctgggcgactacctgcagctgcacatcgaccagggcaccgtgggcgtgatcttcaacgtgggcaccgacgacatcaccatcgacgagcccaacgccatcgtgagcgacggcaagtaccacgtggtgagattcaccagaagcggcggcaacgccaccctgcaggtggacagctggcccgtgaacgagagataccccgccggcaacttcgacaacgagagactggccatcgccagacagagaatcccctacagactgggcagagtggtggacgagtggctgctggacaagggcagacagctgaccatcttcaacagccaggccgccatcaagatcggcggcagagaccagggcagacccttccagggccaggtgagcggcctgtactacaacggcctgaaggtgctggccctggccgccgagagcgaccccaacgtgagaaccgagggccacctgagactggtgggcgagggccccagcgtgctgctgagcgccgagaccaccgccaccaccctgctggccgacatggccaccaccatcatggagaccaccaccaccatggccaccaccaccaccagaagaggcagaagccccaccctgagagacagcaccacccagaacaccgacgacctgctggtggccagcgccgagtgccccagcgacgacgaggacctggaggagtgcgagcccagcaccggcggcgagctgatcctgcccatcatcaccgaggacagcctggaccccccccccgtggccaccagaagccccttcgtgccccccccccccaccttctaccccttcctgaccggcgtgggcgccacccaggacaccctgcccccccccgccgccagaagaccccccagcggcggcccctgccaggccgagagagacgacagcgactgcgaggagcccatcgaggccagcggcttcgccagcggcgaggtgttcgacagcagcctgccccccaccgacgacgaggacttctacaccaccttccccctggtgaccgacagaaccaccctgctgagccccagaaagcccgcccccagacccaacctgagaaccgacggcgccaccggcgcccccggcgtgctgttcgcccccagcgcccccgcccccaacctgcccgccggcaagatgaaccacagagaccccctgcagcccctgctggagaacccccccctgggccccggcgcccccaccagcttcgagcccagaagacccccccccctgagacccggcgtgaccagcgcccccggcttcccccacctgcccaccgccaaccccaccggccccggcgagagaggcccccccggcgccgtggaggtgatcagagagagcagcagcaccaccggcatggtggtgggcatcgtggccgccgccgccctgtgcatcctgatcctgctgtacgccatgtacaagtacagaaacagagacgagggcagctaccaggtggaccagagcagaaactacatcagcaacagcgcccagagcaacggcgccgtggtgaaggagaaggcccccgccgcccccaagacccccagcaaggccaagaagaacaaggacaaggagtactacgtgtag

SEQ ID NO: 90712 - DNA, 1299 bp, synthetic construct
  misc_feature 1..1299: note = Description of Artificial Sequence: Synthetic coding sequence
  source 1..1299: mol_type = other DNA
atgcacctgagaatccacgccagaagaagcccccccagaagacccgcctggaccctgggcatctggttcctgttctggggctgcatcgtgagcagcgtgtggagcagcagcaacgtggccagcagcagcagcaccagcagcagccccggcagccacagccagcacgagcaccacttccacggcagcaagcaccacagcgtgcccatcagcatctacagaagccccgtgagcctgagaggcggccacgccggcgccacctacatcttcggcaagagcggcggcctgatcctgtacacctggcccgccaacgacagacccagcaccagaagcgacagactggccgtgggcttcagcaccaccgtgaaggacggcatcctggtgagaatcgacagcgcccccggcctgggcgacttcctgcagctgcacatcgagcagggcaagatcggcgtggtgttcaacatcggcaccgtggacatcagcatcaaggaggagagaacccccgtgaacgacggcaagtaccacgtggtgagattcaccagaaacggcggcaacgccaccctgcaggtggacaactggcccgtgaacgagcactaccccaccggcagacagctgaccatcttcaacacccaggcccagatcgccatcggcggcaaggacaagggcagactgttccagggccagctgagcggcctgtactacgacggcctgaaggtgctgaacatggccgccgagaacaaccccaacatcaagatcaacggcagcgtgagactggtgggcgaggtgcccagcatcctgggcaccacccagaccaccagcatgccccccgagatgagcaccaccgtgatggagaccaccaccaccatggccaccaccaccaccagaaagaacagaagcaccgccagcatccagcccaccagcgacgacctggtgagcagcgccgagtgcagcagcgacgacgaggacttcgtggagtgcgagcccagcaccggcagaagcgccaaccccaccgagcccggcatcagaagagtgcccggcgccagcgaggtgatcagagagagcagcagcaccaccggcatggtggtgggcatcgtggccgccgccgccctgtgcatcctgatcctgctgtacgccatgtacaagtacagaaacagagacgagggcagctaccaggtggacgagaccagaaactacatcagcaacagcgcccagagcaacggcaccctgatgaaggagaagcagcagagcagcaagagcggccacaagaagcagaagaacaaggacagagagtactacgtgtag

SEQ ID NO: 90713 - DNA, 4932 bp, synthetic construct
  misc_feature 1..4932: note = Description of Artificial Sequence: Synthetic coding sequence
  source 1..4932: mol_type = other DNA
atgagcagcaccctgcacagcgtgttcttcaccctgaaggtgagcatcctgctgggcagcctgctgggcctgtgcctgggcctggagttcatgggcctgcccaaccagtgggccagatacctgagatgggacgccagcaccagaagcgacctgagcttccagttcaagaccaacgtgagcaccggcctgctgctgtacctggacgacggcggcgtgtgcgacttcctgtgcctgagcctggtggacggcagagtgcagctgagattcagcatggactgcgccgagaccgccgtgctgagcaacaagcaggtgaacgacagcagctggcacttcctgatggtgagcagagacagactgagaaccgtgctgatgctggacggcgagggccagagcggcgagctgcagccccagagaccctacatggacgtggtgagcgacctgttcctgggcggcgtgcccaccgacatcagacccagcgccctgaccctggacggcgtgcaggccatgcccggcttcaagggcctgatcctggacctgaagtacggcaacagcgagcccagactgctgggcagcagaggcgtgcagatggacgccgagggcccctgcggcgagagaccctgcgagaacggcggcatctgcttcctgctggacggccaccccacctgcgactgcagcaccaccggctacggcggcaagctgtgcagcgagggcagcagcggcgacccctgcctgagccacctgatgatgagcgagcaggccagagaggagaacgtggccaccttcagaggcagcgagtacctgtgctacgacctgagccagaaccccatccagagcagcagcgacgagatcaccctgagcttcaagacctggcagagaaacggcctgatcctgcacaccggcaagagcgccgactacgtgaacctggccctgaaggacggcgccgtgagcctggtgatcaacctgggcagcggcgccttcgaggccatcgtggagcccgtgaacggcaagttcaacgacaacgcctggcacgacgtgaaggtgaccagaaacctgagacaggtgaccatcagcgtggacggcatcctgaccaccaccggctacacccaggaggactacaccatgctgggcagcgacgacttcttctacgtgggcggcagccccagcaccgccgacctgcccggcagccccgtgagcaacaacttcatgggctgcctgaaggaggtggtgtacaagaacaacgacatcagactggagctgagcagactggccagaatcgccgacaccaagatgaagatctacggcgaggtggtgttcaagtgcgagaacgtggccaccctggaccccatcaacttcgagacccccgaggcctacatcagcctgcccaagtggaacaccaagagaatgggcagcatcagcttcgacttcagaaccaccgagcccaacggcctgatcctgttcacccacggcaagccccaggagagaaaggacgccagaagccagaagaacaccaaggtggacttcttcgccgtggagctgctggacggcaacctgtacctgctgctggacatgggcagcggcaccatcaaggtgaaggccacccagaagaaggccaacgacggcgagtggtaccacgtggacatccagagagacggcagaagcggcaccatcagcgtgaacagcagaagaacccccttcaccgccagcggcgagagcgagatcctggacctggagggcgacatgtacctgggcggcctgcccgagaacagagccggcctgatcctgcccaccgagctgtggaccgccatgctgaactacggctacgtgggctgcatcagagacctgttcatcgacggcagaagcaagaacatcagacagctggccgagatgcagaacgccgccggcgtgaagagcagctgcagcagaatgagcgccaagcagtgcgacagctacccctgcaagaacaacgccgtgtgcaaggacggctggaacagattcatctgcgactgcaccggcaccggctactggggcagaacctgcgagagagaggccagcatcctgagctacgacggcagcatgtacatgaagatcatcatgcccatggtgatgcacaccgaggccgaggacgtgagcttcagattcatgagccagagagcctacggcctgctggtggccaccaccagcagagacagcgccgacaccctgagactggagctggacggcggcagagtgaagctgatggtgaacctggactgcatcagaatcaactgcaacagcagcaagggccccgagaccctgtacgccggccagaagctgaacgacaacgagtggcacaccgtgagagtggtgagaagaggcaagagcctgaagctgaccgtggacgacgacgtggccgagggcaccatggtgggcgaccacaccagactggagttccacaacatcgagaccggcatcatgaccgagaagagatacatcagcgtggtgcccagcagcttcatcggccacctgcagagcctgatgttcaacggcctgctgtacatcgacctgtgcaagaacggcgacatcgactactgcgagctgaaggccagattcggcctgagaaacatcatcgccgaccccgtgaccttcaagaccaagagcagctacctgagcctggccaccctgcaggcctacaccagcatgcacctgttcttccagttcaagaccaccagccccgacggcttcatcctgttcaacagcggcgacggcaacgacttcatcgccgtggagctggtgaagggctacatccactacgtgttcgacctgggcaacggccccaacgtgatcaagggcaacagcgacagacccctgaacgacaaccagtggcacaacgtggtgatcaccagagacaacagcaacacccacagcctgaaggtggacaccaaggtggtgacccaggtgatcaacggcgccaagaacctggacctgaagggcgacctgtacatggccggcctggcccagggcatgtacagcaacctgcccaagctggtggccagcagagacggcttccagggctgcctggccagcgtggacctgaacggcagactgcccgacctgatcaacgacgccctgcacagaagcggccagatcgagagaggctgcgagggccccagcaccacctgccaggaggacagctgcgccaaccagggcgtgtgcatgcagcagtgggagggcttcacctgcgactgcagcatgaccagctacagcggcaaccagtgcaacgaccccggcgccacctacatcttcggcaagagcggcggcctgatcctgtacacctggcccgccaacgacagacccagcaccagaagcgacagactggccgtgggcttcagcaccaccgtgaaggacggcatcctggtgagaatcgacagcgcccccggcctgggcgacttcctgcagctgcacatcgagcagggcaagatcggcgtggtgttcaacatcggcaccgtggacatcagcatcaaggaggagagaacccccgtgaacgacggcaagtaccacgtggtgagattcaccagaaacggcggcaacgccaccctgcaggtggacaactggcccgtgaacgagcactaccccaccggcagacagctgaccatcttcaacacccaggcccagatcgccatcggcggcaaggacaagggcagactgttccagggccagctgagcggcctgtactacgacggcctgaaggtgctgaacatggccgccgagaacaaccccaacatcaagatcaacggcagcgtgagactggtgggcgaggtgcccagcatcctgggcaccacccagaccaccagcatgccccccgagatgagcaccaccgtgatggagaccaccaccaccatggccaccaccaccaccagaaagaacagaagcaccgccagcatccagcccaccagcgacgacctggtgagcagcgccgagtgcagcagcgacgacgaggacttcgtggagtgcgagcccagcaccgccagaggcgagctggtgatccccctgctggtggaggaccccctggccaccccccccatcgccaccagagcccccagcatcaccctgccccccaccttcagacccctgctgaccatcatcgagaccaccaaggacagcctgagcatgaccagcgaggccggcctgccctgcctgagcgaccagggcagcgacggctgcgacgacgacggcctggtgatcagcggctacggcagcggcgagaccttcgacagcaacctgccccccaccgacgacgaggacttctacaccaccttcagcctggtgaccgacaagagcctgagcaccagcatcttcgagggcggctacaaggcccacgcccccaagtgggagagcaaggacttcagacccaacaaggtgagcgagaccagcagaaccaccaccaccagcctgagccccgagctgatcagattcaccgccagcagcagcagcggcatggtgcccaagctgcccgccggcaagatgaacaacagagacctgaagccccagcccgacatcgtgctgctgcccctgcccaccgcctacgagctggacagcaccaagctgaagagccccctgatcaccagccccatgttcagaaacgtgcccaccgccaaccccaccgagcccggcatcagaagagtgcccggcgccagcgaggtgatcagagagagcagcagcaccaccggcatggtggtgggcatcgtggccgccgccgccctgtgcatcctgatcctgctgtacgccatgtacaagtacagaaacagagacgagggcagctaccaggtggacgagaccagaaactacatcagcaacagcgcccagagcaacggcaccctgatgaaggagaagcagcagagcagcaagagcggccacaagaagcagaagaacaaggacagagagtactacgtgtag

SEQ ID NO: 90714 - DNA, 4179 bp, synthetic construct
  misc_feature 1..4179: note = Description of Artificial Sequence: Synthetic coding sequence
  source 1..4179: mol_type = other DNA
atgagcagcaccctgcacagcgtgttcttcaccctgaaggtgagcatcctgctgggcagcctgctgggcctgtgcctgggcctggagttcatgggcctgcccaaccagtgggccagatacctgagatgggacgccagcaccagaagcgacctgagcttccagttcaagaccaacgtgagcaccggcctgctgctgtacctggacgacggcggcgtgtgcgacttcctgtgcctgagcctggtggacggcagagtgcagctgagattcagcatggactgcgccgagaccgccgtgctgagcaacaagcaggtgaacgacagcagctggcacttcctgatggtgagcagagacagactgagaaccgtgctgatgctggacggcgagggccagagcggcgagctgcagccccagagaccctacatggacgtggtgagcgacctgttcctgggcggcgtgcccaccgacatcagacccagcgccctgaccctggacggcgtgcaggccatgcccggcttcaagggcctgatcctggacctgaagtacggcaacagcgagcccagactgctgggcagcagaggcgtgcagatggacgccgagggcccctgcggcgagagaccctgcgagaacggcggcatctgcttcctgctggacggccaccccacctgcgactgcagcaccaccggctacggcggcaagctgtgcagcgagggcctgagccacctgatgatgagcgagcagggcagatggaaggccagagaggagaacgtggccaccttcagaggcagcgagtacctgtgctacgacctgagccagaaccccatccagagcagcagcgacgagatcaccctgagcttcaagacctggcagagaaacggcctgatcctgcacaccggcaagagcgccgactacgtgaacctggccctgaaggacggcgccgtgagcctggtgatcaacctgggcagcggcgccttcgaggccatcgtggagcccgtgaacggcaagttcaacgacaacgcctggcacgacgtgaaggtgaccagaaacctgagacaggtgaccatcagcgtggacggcatcctgaccaccaccggctacacccaggaggactacaccatgctgggcagcgacgacttcttctacgtgggcggcagccccagcaccgccgacctgcccggcagccccgtgagcaacaacttcatgggctgcctgaaggaggtggtgtacaagaacaacgacatcagactggagctgagcagactggccagaatcgccgacaccaagatgaagatctacggcgaggtggtgttcaagtgcgagaacgtggccaccctggaccccatcaacttcgagacccccgaggcctacatcagcctgcccaagtggaacaccaagagaatgggcagcatcagcttcgacttcagaaccaccgagcccaacggcctgatcctgttcacccacggcaagccccaggagagaaaggacgccagaagccagaagaacaccaaggtggacttcttcgccgtggagctgctggacggcaacctgtacctgctgctggacatgggcagcggcaccatcaaggtgaaggccacccagaagaaggccaacgacggcgagtggtaccacgtggacatccagagagacggcagaagcggcaccatcagcgtgaacagcagaagaacccccttcaccgccagcggcgagagcgagatcctggacctggagggcgacatgtacctgggcggcctgcccgagaacagagccggcctgatcctgcccaccgagctgtggaccgccatgctgaactacggctacgtgggctgcatcagagacctgttcatcgacggcagaagcaagaacatcagacagctggccgagatgcagaacgccgccggcgtgaagagcagctgcagcagaatgagcgccaagcagtgcgacagctacccctgcaagaacaacgccgtgtgcaaggacggctggaacagattcatctgcgactgcaccggcaccggctactggggcagaacctgcgagagagaggccagcatcctgagctacgacggcagcatgtacatgaagatcatcatgcccatggtgatgcacaccgaggccgaggacgtgagcttcagattcatgagccagagagcctacggcctgctggtggccaccaccagcagagacagcgccgacaccctgagactggagctggacggcggcagagtgaagctgatggtgaacctgggcaagggccccgagaccctgtacgccggccagaagctgaacgacaacgagtggcacaccgtgagagtggtgagaagaggcaagagcctgaagctgaccgtggacgacgacgtggccgagggcaccatggtgggcgaccacaccagactggagttccacaacatcgagaccggcatcatgaccgagaagagatacatcagcgtggtgcccagcagcttcatcggccacctgcagagcctgatgttcaacggcctgctgtacatcgacctgtgcaagaacggcgacatcgactactgcgagctgaaggccagattcggcctgagaaacatcatcgccgaccccgtgaccttcaagaccaagagcagctacctgagcctggccaccctgcaggcctacaccagcatgcacctgttcttccagttcaagaccaccagccccgacggcttcatcctgttcaacagcggcgacggcaacgacttcatcgccgtggagctggtgaagggctacatccactacgtgttcgacctgggcaacggccccaacgtgatcaagggcaacagcgacagacccctgaacgacaaccagtggcacaacgtggtgatcaccagagacaacagcaacacccacagcctgaaggtggacaccaaggtggtgacccaggtgatcaacggcgccaagaacctggacctgaagggcgacctgtacatggccggcctggcccagggcatgtacagcaacctgcccaagctggtggccagcagagacggcttccagggctgcctggccagcgtggacctgaacggcagactgcccgacctgatcaacgacgccctgcacagaagcggccagatcgagagaggctgcgagggccccagcaccacctgccaggaggacagctgcgccaaccagggcgtgtgcatgcagcagtgggagggcttcacctgcgactgcagcatgaccagctacagcggcaaccagtgcaacgaccccggcgccacctacatcttcggcaagagcggcggcctgatcctgtacacctggcccgccaacgacagacccagcaccagaagcgacagactggccgtgggcttcagcaccaccgtgaaggacggcatcctggtgagaatcgacagcgcccccggcctgggcgacttcctgcagctgcacatcgagcagggcaagatcggcgtggtgttcaacatcggcaccgtggacatcagcatcaaggaggagagaacccccgtgaacgacggcaagtaccacgtggtgagattcaccagaaacggcggcaacgccaccctgcaggtggacaactggcccgtgaacgagcactaccccaccggcaacaccgacaacgagagattccagatggtgaagcagaagatccccttcaagtacaacagacccgtggaggagtggctgcaggagaagggcagacagctgaccatcttcaacacccaggcccagatcgccatcggcggcaaggacaagggcagactgttccagggccagctgagcggcctgtactacgacggcctgaaggtgctgaacatggccgccgagaacaaccccaacatcaagatcaacggcagcgtgagactggtgggcgaggtgcccagcatcctgggcaccacccagaccaccagcatgccccccgagatgagcaccaccgtgatggagaccaccaccaccatggccaccaccaccaccagaaagaacagaagcaccgccagcatccagcccaccagcgacgacctggtgagcagcgccgagtgcagcagcgacgacgaggacttcgtggagtgcgagcccagcaccggcagaagcgccagaagcagcaacgccgccagaagcctgagagccgccctgacctggacctggagactgacctacaccttcacccccatcatcttcatcagctgcgtggtgcacagctag

SEQ ID NO: 90715 - DNA, 3186 bp, synthetic construct
  misc_feature 1..3186: note = Description of Artificial Sequence: Synthetic coding sequence
  source 1..3186: mol_type = other DNA
atgctgggcagcgacgacttcttctacgtgggcggcagccccagcaccgccgacctgcccggcagccccgtgagcaacaacttcatgggctgcctgaaggaggtggtgtacaagaacaacgacatcagactggagctgagcagactggccagaatcgccgacaccaagatgaagatctacggcgaggtggtgttcaagtgcgagaacgtggccaccctggaccccatcaacttcgagacccccgaggcctacatcagcctgcccaagtggaacaccaagagaatgggcagcatcagcttcgacttcagaaccaccgagcccaacggcctgatcctgttcacccacggcaagccccaggagagaaaggacgccagaagccagaagaacaccaaggtggacttcttcgccgtggagctgctggacggcaacctgtacctgctgctggacatgggcagcggcaccatcaaggtgaaggccacccagaagaaggccaacgacggcgagtggtaccacgtggacatccagagagacggcagaagcggcaccatcagcgtgaacagcagaagaacccccttcaccgccagcggcgagagcgagatcctggacctggagggcgacatgtacctgggcggcctgcccgagaacagagccggcctgatcctgcccaccgagctgtggaccgccatgctgaactacggctacgtgggctgcatcagagacctgttcatcgacggcagaagcaagaacatcagacagctggccgagatgcagaacgccgccggcgtgaagagcagctgcagcagaatgagcgccaagcagtgcgacagctacccctgcaagaacaacgccgtgtgcaaggacggctggaacagattcatctgcgactgcaccggcaccggctactggggcagaacctgcgagagagaggccagcatcctgagctacgacggcagcatgtacatgaagatcatcatgcccatggtgatgcacaccgaggccgaggacgtgagcttcagattcatgagccagagagcctacggcctgctggtggccaccaccagcagagacagcgccgacaccctgagactggagctggacggcggcagagtgaagctgatggtgaacctggactgcatcagaatcaactgcaacagcagcaagggccccgagaccctgtacgccggccagaagctgaacgacaacgagtggcacaccgtgagagtggtgagaagaggcaagagcctgaagctgaccgtggacgacgacgtggccgagggcaccatggtgggcgaccacaccagactggagttccacaacatcgagaccggcatcatgaccgagaagagatacatcagcgtggtgcccagcagcttcatcggccacctgcagagcctgatgttcaacggcctgctgtacatcgacctgtgcaagaacggcgacatcgactactgcgagctgaaggccagattcggcctgagaaacatcatcgccgaccccgtgaccttcaagaccaagagcagctacctgagcctggccaccctgcaggcctacaccagcatgcacctgttcttccagttcaagaccaccagccccgacggcttcatcctgttcaacagcggcgacggcaacgacttcatcgccgtggagctggtgaagggctacatccactacgtgttcgacctgggcaacggccccaacgtgatcaagggcaacagcgacagacccctgaacgacaaccagtggcacaacgtggtgatcaccagagacaacagcaacacccacagcctgaaggtggacaccaaggtggtgacccaggtgatcaacggcgccaagaacctggacctgaagggcgacctgtacatggccggcctggcccagggcatgtacagcaacctgcccaagctggtggccagcagagacggcttccagggctgcctggccagcgtggacctgaacggcagactgcccgacctgatcaacgacgccctgcacagaagcggccagatcgagagaggctgcgagggccccagcaccacctgccaggaggacagctgcgccaaccagggcgtgtgcatgcagcagtgggagggcttcacctgcgactgcagcatgaccagctacagcggcaaccagtgcaacgaccccggcgccacctacatcttcggcaagagcggcggcctgatcctgtacacctggcccgccaacgacagacccagcaccagaagcgacagactggccgtgggcttcagcaccaccgtgaaggacggcatcctggtgagaatcgacagcgcccccggcctgggcgacttcctgcagctgcacatcgagcagggcaagatcggcgtggtgttcaacatcggcaccgtggacatcagcatcaaggaggagagaacccccgtgaacgacggcaagtaccacgtggtgagattcaccagaaacggcggcaacgccaccctgcaggtggacaactggcccgtgaacgagcactaccccaccggcagacagctgaccatcttcaacacccaggcccagatcgccatcggcggcaaggacaagggcagactgttccagggccagctgagcggcctgtactacgacggcctgaaggtgctgaacatggccgccgagaacaaccccaacatcaagatcaacggcagcgtgagactggtgggcgaggtgcccagcatcctgggcaccacccagaccaccagcatgccccccgagatgagcaccaccgtgatggagaccaccaccaccatggccaccaccaccaccagaaagaacagaagcaccgccagcatccagcccaccagcgacgacctggtgagcagcgccgagtgcagcagcgacgacgaggacttcgtggagtgcgagcccagcaccgccaaccccaccgagcccggcatcagaagagtgcccggcgccagcgaggtgatcagagagagcagcagcaccaccggcatggtggtgggcatcgtggccgccgccgccctgtgcatcctgatcctgctgtacgccatgtacaagtacagaaacagagacgagggcagctaccaggtggacgagaccagaaactacatcagcaacagcgcccagagcaacggcaccctgatgaaggagaagcagcagagcagcaagagcggccacaagaagcagaagaacaaggacagagagtactacgtgtag

SEQ ID NO: 90716 - DNA, 1380 bp, synthetic construct
  misc_feature 1..1380: note = Description of Artificial Sequence: Synthetic coding sequence
  source 1..1380: mol_type = other DNA
atgcacctgagaatccacgccagaagaagcccccccagaagacccgcctggaccctgggcatctggttcctgttctggggctgcatcgtgagcagcgtgtggagcagcagcaacgtggccagcagcagcagcaccagcagcagccccggcagccacagccagcacgagcaccacttccacggcagcaagcaccacagcgtgcccatcagcatctacagaagccccgtgagcctgagaggcggccacgccggcgccacctacatcttcggcaagagcggcggcctgatcctgtacacctggcccgccaacgacagacccagcaccagaagcgacagactggccgtgggcttcagcaccaccgtgaaggacggcatcctggtgagaatcgacagcgcccccggcctgggcgacttcctgcagctgcacatcgagcagggcaagatcggcgtggtgttcaacatcggcaccgtggacatcagcatcaaggaggagagaacccccgtgaacgacggcaagtaccacgtggtgagattcaccagaaacggcggcaacgccaccctgcaggtggacaactggcccgtgaacgagcactaccccaccggcaacaccgacaacgagagattccagatggtgaagcagaagatccccttcaagtacaacagacccgtggaggagtggctgcaggagaagggcagacagctgaccatcttcaacacccaggcccagatcgccatcggcggcaaggacaagggcagactgttccagggccagctgagcggcctgtactacgacggcctgaaggtgctgaacatggccgccgagaacaaccccaacatcaagatcaacggcagcgtgagactggtgggcgaggtgcccagcatcctgggcaccacccagaccaccagcatgccccccgagatgagcaccaccgtgatggagaccaccaccaccatggccaccaccaccaccagaaagaacagaagcaccgccagcatccagcccaccagcgacgacctggtgagcagcgccgagtgcagcagcgacgacgaggacttcgtggagtgcgagcccagcaccgccaaccccaccgagcccggcatcagaagagtgcccggcgccagcgaggtgatcagagagagcagcagcaccaccggcatggtggtgggcatcgtggccgccgccgccctgtgcatcctgatcctgctgtacgccatgtacaagtacagaaacagagacgagggcagctaccaggtggacgagaccagaaactacatcagcaacagcgcccagagcaacggcaccctgatgaaggagaagcagcagagcagcaagagcggccacaagaagcagaagaacaaggacagagagtactacgtgtag

SEQ ID NO: 90717 - DNA, 3186 bp, synthetic construct; identical to SEQ ID NO: 90715
  misc_feature 1..3186: note = Description of Artificial Sequence: Synthetic coding sequence
  source 1..3186: mol_type = other DNA

SEQ ID NO: 90718 - DNA, 1914 bp, synthetic construct
  misc_feature 1..1914: note = Description of Artificial Sequence: Synthetic coding sequence
  source 1..1914: mol_type = other DNA
atgcacctgagaatccacgccagaagaagcccccccagaagacccgcctggaccctgggcatctggttcctgttctggggctgcatcgtgagcagcgtgtggagcagcagcaacgtggccagcagcagcagcaccagcagcagccccggcagccacagccagcacgagcaccacttccacggcagcaagcaccacagcgtgcccatcagcatctacagaagccccgtgagcctgagaggcggccacgccggcgccacctacatcttcggcaagagcggcggcctgatcctgtacacctggcccgccaacgacagacccagcaccagaagcgacagactggccgtgggcttcagcaccaccgtgaaggacggcatcctggtgagaatcgacagcgcccccggcctgggcgacttcctgcagctgcacatcgagcagggcaagatcggcgtggtgttcaacatcggcaccgtggacatcagcatcaaggaggagagaacccccgtgaacgacggcaagtaccacgtggtgagattcaccagaaacggcggcaacgccaccctgcaggtggacaactggcccgtgaacgagcactaccccaccggcagacagctgaccatcttcaacacccaggcccagatcgccatcggcggcaaggacaagggcagactgttccagggccagctgagcggcctgtactacgacggcctgaaggtgctgaacatggccgccgagaacaaccccaacatcaagatcaacggcagcgtgagactggtgggcgaggtgcccagcatcctgggcaccacccagaccaccagcatgccccccgagatgagcaccaccgtgatggagaccaccaccaccatggccaccaccaccaccagaaagaacagaagcaccgccagcatccagcccaccagcgacgacctggtgagcagcgccgagtgcagcagcgacgacgaggacttcgtggagtgcgagcccagcaccggcggcgagctggtgatccccctgctggtggaggaccccctggccaccccccccatcgccaccagagcccccagcatcaccctgccccccaccttcagacccctgctgaccatcatcgagaccaccaaggacagcctgagcatgaccagcgaggccggcctgccctgcctgagcgaccagggcagcgacggctgcgacgacgacggcctggtgatcagcggctacggcagcggcgagaccttcgacagcaacctgccccccaccgacgacgaggacttctacaccaccttcagcctggtgaccgacaagagcctgagcaccagcatcttcgagggcggctacaaggcccacgcccccaagtgggagagcaaggacttcagacccaacaaggtgagcgagaccagcagaaccaccaccaccagcctgagccccgagctgatcagattcaccgccagcagcagcagcggcatggtgcccaagctgcccgccggcaagatgaacaacagagacctgaagccccagcccgacatcgtgctgctgcccctgcccaccgcctacgagctggacagcaccaagctgaagagccccctgatcaccagccccatgttcagaaacgtgcccaccgccaaccccaccgagcccggcatcagaagagtgcccggcgccagcgaggtgatcagagagagcagcagcaccaccggcatggtggtgggcatcgtggccgccgccgccctgtgcatcctgatcctgctgtacgccatgtacaagtacagaaacagagacgagggcagctaccaggtggacgagaccagaaactacatcagcaacagcgcccagagcaacggcaccctgatgaaggagaagcagcagagcagcaagagcggccacaagaagcagaagaacaaggacagagagtactacgtgtag

SEQ ID NO: 90719 - DNA, 429 bp, synthetic construct
  misc_feature 1..429: note = Description of Artificial Sequence: Synthetic coding sequence
  source 1..429: mol_type = other DNA
atgggcctgaagctgaacggcagatacatcagcctgatcctggccgtgcagatcgcctacctggtgcaggccgtgagagccgccggcaagtgcgacgccgtgttcaagggcttcagcgactgcctgctgaagctgggcgacagcatggccaactacccccagggcctggacgacaagaccaacatcaagaccgtgtgcacctactgggaggacttccacagctgcaccgtgaccgccctgaccgactgccaggagggcgccaaggacatgtgggacaagctgagaaaggagagcaagaacctgaacatccagggcagcctgttcgagctgtgcggcagcggcaacggcgccgccggcagcctgctgcccgccttccccgtgctgctggtgagcctgagcgccgccctggccacctggctgagcttctag

SEQ ID NO: 90720 - DNA, 8841 bp, synthetic construct
  misc_feature 1..8841: note = Description of Artificial Sequence: Synthetic coding sequence
  source 1..8841: mol_type = other DNA
atggccagcgagaagcccggccccggccccggcctggagccccagcccgtgggcctgatcgccgtgggcgccgccggcggcggcggcggcggcagcggcggcggcggcaccggcggcagcggcatgggcgagctgagaggcgccagcggcagcggcagcgtgatgctgcccgccggcatgatcaaccccagcgtgcccatcagaaacatcagaatgaagttcgccgtgctgatcggcctgatccaggtgggcgaggtgagcaacagagacatcgtggagaccgtgctgaacctgctggtgggcggcgagttcgacctggagatgaacttcatcatccaggacgccgagagcatcacctgcatgaccgagctgctggagcactgcgacgtgacctgccaggccgagatctggagcatgttcaccgccatcctgagaaagagcgtgagaaacctgcagaccagcaccgaggtgggcctgatcgagcaggtgctgctgaagatgagcgccgtggacgacatgatcgccgacctgctggtggacatgctgggcgtgctggccagctacagcatcaccgtgaaggagctgaagctgctgttcagcatgctgagaggcgagagcggcatctggcccagacacgccgtgaagctgctgagcgtgctgaaccagatgccccagagacacggccccgacaccttcttcaacttccccggctgcagcgccgccgccatcgccctgccccccatcgccaagtggccctaccagaacggcttcaccctgaacacctggttcagaatggaccccctgaacaacatcaacgtggacaaggacaagccctacctgtactgcttcagaaccagcaagggcgtgggctacagcgcccacttcgtgggcaactgcctgatcgtgaccagcctgaagagcaagggcaagggcttccagcactgcgtgaagtacgacttccagcccagaaagtggtacatgatcagcatcgtgcacatctacaacagatggagaaacagcgagatcagatgctacgtgaacggccagctggtgagctacggcgacatggcctggcacgtgaacaccaacgacagctacgacaagtgcttcctgggcagcagcgagaccgccgacgccaacagagtgttctgcggccagctgggcgccgtgtacgtgttcagcgaggccctgaaccccgcccagatcttcgccatccaccagctgggccccggctacaagagcaccttcaagttcaagagcgagagcgacatccacctggccgagcaccacaagcaggtgctgtacgacggcaagctggccagcagcatcgccttcacctacaacgccaaggccaccgacgcccagctgtgcctggagagcagccccaaggagaacgccagcatcttcgtgcacagcccccacgccctgatgctgcaggacgtgaaggccatcgtgacccacagcatccacagcgccatccacagcatcggcggcatccaggtgctgttccccctgttcgcccagctggacaacagacagctgaacgacagccaggtggagaccaccgtgtgcgccaccctgctggccttcctggtggagctgctgaagagcagcgtggccatgcaggagcagatgctgggcggcaagggcttcctggtgatcggctacctgctggagaagagcagcagagtgcacatcaccagagccgtgctggagcagttcctgagcttcgccaagtacctggacggcctgagccacggcgcccccctgctgaagcagctgtgcgaccacatcctgttcaaccccgccatctggatccacacccccgccaaggtgcagctgagcctgtacacctacctgagcgccgagttcatcggcaccgccaccatctacaccaccatcagaagagtgggcaccgtgctgcagctgatgcacaccctgaagtactactactgggtgatcaaccccgccgacagcagcggcatcacccccaagggcctggacggccccagacccagccagaaggagatcatcagcctgagagccttcatgctgctgttcctgaagcagctgatcctgaaggacagaggcgtgaaggaggacgagctgcagagcatcctgaactacctgctgaccatgcacgaggacgagaacatccacgacgtgctgcagctgctggtggccctgatgagcgagcaccccgccagcatgatccccgccttcgaccagagaaacggcatcagagtgatctacaagctgctggccagcaagagcgagagcatctgggtgcaggccctgaaggtgctgggctacttcctgaagcacctgggccacaagagaaaggtggagatcatgcacacccacagcctgttcaccctgctgggcgagagactgatgctgcacaccaacaccgtgaccgtgaccacctacaacaccctgtacgagatcctgaccgagcaggtgtgcacccaggtggtgcacaagccccaccccgagcccgacagcaccgtgaagatccagaaccccatgatcctgaaggtggtggccaccctgctgaagaacagcacccccagcgccgagctgatggaggtgagaagactgttcctgagcgacatgatcaagctgttcagcaacagcagagagaacagaagatgcctgctgcagtgcagcgtgtggcaggactggatgttcagcctgggctacatcaaccccaagaacagcgaggagcagaagatcaccgagatggtgtacaacatcttcagaatcctgctgtaccacgccatcaagtacgagtggggcggctggagagtgtgggtggacaccctgagcatcgcccacagcaaggtgacctacgaggcccacaaggagtacctggccaagatgtacgaggagtaccagagacaggaggaggagaacatcaagaagggcaagaagggcaacgtgagcaccatcagcggcctgagcagccagaccaccggcgccaagggcggcatggagatcagagagatcgaggacctgagccagagccagagccccgagagcgagaccgactaccccgtgagcaccgacaccagagacctgctgatgagcaccaaggtgagcgacgacatcctgggcaacagcgacagacccggcagcggcgtgcacgtggaggtgcacgacctgctggtggacatcaaggccgagaaggtggaggccaccgaggtgaagctggacgacatggacctgagccccgagaccctggtgggcggcgagaacggcgccctggtggaggtggagagcctgctggacaacgtgtacagcgccgccgtggagaagctgcagaacaacgtgcacggcagcgtgggcatcatcaagaagaacgaggagaaggacaacggccccctgatcaccctggccgacgagaaggaggacctgcccaacagcagcaccagcttcctgttcgacaagatccccaagcaggaggagaagctgctgcccgagctgagcagcaaccacatcatccccaacatccaggacacccaggtgcacctgggcgtgagcgacgacctgggcctgctggcccacatgaccggcagcgtggacctgacctgcaccagcagcatcatcgaggagaaggagttcaagatccacaccaccagcgacggcatgagcagcatcagcgagagagacctggccagcagcaccaagggcctggagtacgccgagatgaccgccaccaccctggagaccgagagcagcagcagcaagatcgtgcccaacatcgacgccggcagcatcatcagcgacaccgagagaagcgacgacggcaaggagagcggcaaggagatcagaaagatccagaccaccaccaccacccaggccgtgcagggcagaagcatcacccagcaggacagagacctgagagtggacctgggcttcagaggcatgcccatgaccgaggagcagagaagacagttcagccccggccccagaaccaccatgttcagaatccccgagttcaagtggagccccatgcaccagagactgctgaccgacctgctgttcgccctggagaccgacgtgcacgtgtggagaagccacagcaccaagagcgtgatggacttcgtgaacagcaacgagaacatcatcttcgtgcacaacaccatccacctgatcagccagatggtggacaacatcatcatcgcctgcggcggcatcctgcccctgctgagcgccgccaccagccccaccgtgagcaagaccgagctggagaacatcgaggtgacccagggcatgagcgccgagaccgccgtgaccttcctgagcagactgatggccatggtggacgtgctggtgttcgccagcagcctgaacttcagcgagatcgaggccgagaagaacatgagcagcggcggcctgatgagacagtgcctgagactggtgtgctgcgtggccgtgagaaactgcctggagtgcagacagagacagagagacagaggcaacaagagcagccacggcagcagcaagccccaggaggtgccccagagcgtgaccgccaccgccgccagcaagacccccctggagaacgtgcccggcaacctgagccccatcaaggaccccgacagactgctgcaggacgtggacatcaacagactgagagccgtggtgttcagagacgtggacgacagcaagcaggcccagttcctggccctggccgtggtgtacttcatcagcgtgctgatggtgagcaagtacagagacatcctggagccccagagagagaccaccagaaccggcagccagcccggcagaaacatcagacaggagatcaacagccccaccagcaccgtggtggtgatccccagcatcccccaccccagcctgaaccacggcttcctggccaagctgatccccgagcagagcttcggccacagcttctacaaggagacccccgccgccttccccgacaccatcaaggagaaggagacccccacccccggcgaggacatccaggtggagagcagcatcccccacaccgacagcggcatcggcgaggagcaggtggccagcatcctgaacggcgccgagctggagaccagcaccggccccgacgccatgagcgagctgctgagcaccctgagcagcgaggtgaagaagagccaggagagcctgaccgagaaccccagcgagaccctgaagcccgccaccagcatcagcagcatcagccagaccaagggcatcaacgtgaaggagatcctgaagagcctggtggccgcccccgtggagatcgccgagtgcggccccgagcccatcccctaccccgaccccgccctgaagagagagacccaggccatcctgcccatgcagttccacagcttcgacagaagcgtggtggtgcccgtgaagaagcccccccccggcagcctggccgtgaccaccgtgggcgccaccaccgccggcagcggcctgcccaccggcagcaccagcaacatcttcgccgccaccggcgccacccccaagagcatgatcaacaccaccggcgccgtggacagcggcagcagcagcagcagcagcagcagcagcttcgtgaacggcgccaccagcaagaacctgcccgccgtgcagaccgtggcccccatgcccgaggacagcgccgagaacatgagcatcaccgccaagctggagagagccctggagaaggtggcccccctgctgagagagatcttcgtggacttcgcccccttcctgagcagaaccctgctgggcagccacggccaggagctgctgatcgagggcctggtgtgcatgaagagcagcaccagcgtggtggagctggtgatgctgctgtgcagccaggagtggcagaacagcatccagaagaacgccggcctggccttcatcgagctgatcaacgagggcagactgctgtgccacgccatgaaggaccacatcgtgagagtggccaacgaggccgagttcatcctgaacagacagagagccgaggacgtgcacaagcacgccgagttcgagagccagtgcgcccagtacgccgccgacagaagagaggaggagaagatgtgcgaccacctgatcagcgccgccaagcacagagaccacgtgaccgccaaccagctgaagcagaagatcctgaacatcctgaccaacaagcacggcgcctggggcgccgtgagccacagccagctgcacgacttctggagactggactactgggaggacgacctgagaagaagaagaagattcgtgagaaacgccttcggcagcacccacgccgaggccctgctgaaggccgccatcgagtacggcaccgaggaggacgtggtgaagagcaagaagaccttcagaagccaggccatcgtgaaccagaacgccgagaccgagctgatgctggagggcgacgacgacgccgtgagcctgctgcaggagaaggagatcgacaacctggccggccccgtggtgctgagcacccccgcccagctgatcgcccccgtggtggtggccaagggcaccctgagcatcaccaccaccgagatctacttcgaggtggacgaggacgacagcgccttcaagaagatcgacaccaaggtgctggcctacaccgagggcctgcacggcaagtggatgttcagcgagatcagagccgtgttcagcagaagatacctgctgcagaacaccgccctggaggtgttcatggccaacagaaccagcgtgatgttcaacttccccgaccaggccaccgtgaagaaggtggtgtacagcctgcccagagtgggcgtgggcaccagctacggcctgccccaggccagaagaatcagcctggccacccccagacagctgtacaagagcagcaacatgacccagagatggcagagaagagagatcagcaacttcgagtacctgatgttcctgaacaccatcgccggcagaacctacaacgacctgaaccagtaccccgtgttcccctgggtgctgaccaactacgagagcgaggagctggacctgaccctgcccggcaacttcagagacctgagcaagcccatcggcgccctgaaccccaagagagccgtgttctacgccgagagatacgagacctgggaggacgaccagagccccccctaccactacaacacccactacagcaccgccaccagcaccctgagctggctggtgagaatcgagcccttcaccaccttcttcctgaacgccaacgacggcaagttcgaccaccccgacagaaccttcagcagcgtggccagaagctggagaaccagccagagagacaccagcgacgtgaaggagctgatccccgagttctactacctgcccgagatgttcgtgaacagcaacggctacaacctgggcgtgagagaggacgaggtggtggtgaacgacgtggacctgcccccctgggccaagaagcccgaggacttcgtgagaatcaacagaatggccctggagagcgagttcgtgagctgccagctgcaccagtggatcgacctgatcttcggctacaagcagagaggccccgaggccgtgagagccctgaacgtgttccactacctgacctacgagggcagcgtgaacctggacagcatcaccgaccccgtgctgagagaggccatggaggcccagatccagaacttcggccagacccccagccagctgctgatcgagccccacccccccagaagcagcgccatgcacctgtgcttcctgccccagagccccctgatgttcaaggaccagatgcagcaggacgtgatcatggtgctgaagttccccagcaacagccccgtgacccacgtggccgccaacaccctgccccacctgaccatccccgccgtggtgaccgtgacctgcagcagactgttcgccgtgaacagatggcacaacaccgtgggcctgagaggcgcccccggctacagcctggaccaggcccaccacctgcccatcgagatggaccccctgatcgccaacaacagcggcgtgaacaagagacagatcaccgacctggtggaccagagcatccagatcaacgcccactgcttcgtggtgaccgccgacaacagatacatcctgatctgcggcttctgggacaagagcttcagagtgtacagcaccgagaccggcaagctgacccagatcgtgttcggccactgggacgtggtgacctgcctggccagaagcgagagctacatcggcggcgactgctacatcgtgagcggcagcagagacgccaccctgctgctgtggtactggagcggcagacaccacatcatcggcgacaaccccaacagcagcgactaccccgcccccagagccgtgctgaccggccacgaccacgaggtggtgtgcgtgagcgtgtgcgccgagctgggcctggtgatcagcggcgccaaggagggcccctgcctggtgcacaccatcaccggcgacctgctgagagccctggagggccccgagaactgcctgttccccagactgatcagcgtgagcagcgagggccactgcatcatctactacgagagaggcagattcagcaacttcagcatcaacggcaagctgctggcccagatggagatcaacgacagcaccagagccatcctgctgagcagcgacggccagaacctggtgaccggcggcgacaacggcgtggtggaggtgtggcaggcctgcgacttcaagcagctgtacatctaccccggctgcgacgccggcatcagagccatggacctgagccacgaccagagaaccctgatcaccggcatggccagcggcagcatcgtggccttcaacatcgacttcaacagatggcactacgagcaccagaacagatactag

SEQ ID NO: 90721 - DNA, 1575 bp, synthetic construct
  misc_feature 1..1575: note = Description of Artificial Sequence: Synthetic coding sequence
  source 1..1575: mol_type = other DNA
atgttcgtgaacagcaacggctacaacctgggcgtgagagaggacgaggtggtggtgaacgacgtggacctgcccccctgggccaagaagcccgaggacttcgtgagaatcaacagaatggccctggagagcgagttcgtgagctgccagctgcaccagtggatcgacctgatcttcggctacaagcagagaggccccgaggccgtgagagccctgaacgtgttccactacctgacctacgagggcagcgtgaacctggacagcatcaccgaccccgtgctgagagagatccccgaggcctacttcatcagagacccccacaccttcctgctgaccaaggacttcatcaaggccatggaggcccagatccagaacttcggccagacccccagccagctgctgatcgagccccacccccccagaagcagcgccatgcacctgtgcttcctgccccagagccccctgatgttcaaggaccagatgcagcaggacgtgatcatggtgctgaagttccccagcaacagccccgtgacccacgtggccgccaacaccctgccccacctgaccatccccgccgtggtgaccgtgacctgcagcagactgttcgccgtgaacagatggcacaacaccgtgggcctgagaggcgcccccggctacagcctggaccaggcccaccacctgcccatcgagatggaccccctgatcgccaacaacagcggcgtgaacaagagacagatcaccgacctggtggaccagagcatccagatcaacgcccactgcttcgtggtgaccgccgacaacagatacatcctgatctgcggcttctgggacaagagcttcagagtgtacagcaccgagaccggcaagctgacccagatcgtgttcggccactgggacgtggtgacctgcctggccagaagcgagagctacatcggcggcgactgctacatcgtgagcggcagcagagacgccaccctgctgctgtggtactggagcggcagacaccacatcatcggcgacaaccccaacagcagcgactaccccgcccccagagccgtgctgaccggccacgaccacgaggtggtgtgcgtgagcgtgtgcgccgagctgggcctggtgatcagcggcgccaaggagggcccctgcctggtgcacaccatcaccggcgacctgctgagagccctggagggccccgagaactgcctgttccccagactgatcagcgtgagcagcgagggccactgcatcatctactacgagagaggcagattcagcaacttcagcatcaacggcaagctgctggcccagatggagatcaacgacagcaccagagccatcctgctgagcagcgacggccagaacctggtgaccggcggcgacaacggcgtggtggaggtgtggcaggcctgcgacttcaagcagctgtacatctaccccggctgcgacgccggcatcagagccatggacctgagccacgaccagagaaccctgatcaccggcatggccagcggcagcatcgtggccttcaacatcgacttcaacagatggcactacgagcaccagaacagatactag

SEQ ID NO: 90722 - DNA, 8832 bp, synthetic construct
  misc_feature 1..8832: note = Description of Artificial Sequence: Synthetic coding sequence
  source 1..8832: mol_type = other DNA
atggccagcgagaagcccggccccggccccggcctggagccccagcccgtgggcctgatcgccgtgggcgccgccggcggcggcggcggcggcagcggcggcggcggcaccggcggcagcggcatgggcgagctgagaggcgccagcggcagcggcagcgtgatgctgcccgccggcatgatcaaccccagcgtgcccatcagaaacatcagaatgaagttcgccgtgctgatcggcctgatccaggtgggcgaggtgagcaacagagacatcgtggagaccgtgctgaacctgctggtgggcggcgagttcgacctggagatgaacttcatcatccaggacgccgagagcatcacctgcatgaccgagctgctggagcactgcgacgtgacctgccaggccgagatctggagcatgttcaccgccatcctgagaaagagcgtgagaaacctgcagaccagcaccgaggtgggcctgatcgagcaggtgctgctgaagatgagcgccgtggacgacatgatcgccgacctgctggtggacatgctgggcgtgctggccagctacagcatcaccgtgaaggagctgaagctgctgttcagcatgctgagaggcgagagcggcatctggcccagacacgccgtgaagctgctgagcgtgctgaaccagatgccccagagacacggccccgacaccttcttcaacttccccggctgcagcgccgccgccatcgccctgccccccatcgccaagtggccctaccagaacggcttcaccctgaacacctggttcagaatggaccccctgaacaacatcaacgtggacaaggacaagccctacctgtactgcttcagaaccagcaagggcgtgggctacagcgcccacttcgtgggcaactgcctgatcgtgaccagcctgaagagcaagggcaagggcttccagcactgcgtgaagtacgacttccagcccagaaagtggtacatgatcagcatcgtgcacatctacaacagatggagaaacagcgagatcagatgctacgtgaacggccagctggtgagctacggcgacatggcctggcacgtgaacaccaacgacagctacgacaagtgcttcctgggcagcagcgagaccgccgacgccaacagagtgttctgcggccagctgggcgccgtgtacgtgttcagcgaggccctgaaccccgcccagatcttcgccatccaccagctgggccccggctacaagagcaccttcaagttcaagagcgagagcgacatccacctggccgagcaccacaagcaggtgctgtacgacggcaagctggccagcagcatcgccttcacctacaacgccaaggccaccgacgcccagctgtgcctggagagcagccccaaggagaacgccagcatcttcgtgcacagcccccacgccctgatgctgcaggacgtgaaggccatcgtgacccacagcatccacagcgccatccacagcatcggcggcatccaggtgctgttccccctgttcgcccagctggacaacagacagctgaacgacagccaggtggagaccaccgtgtgcgccaccctgctggccttcctggtggagctgctgaagagcagcgtggccatgcaggagcagatgctgggcggcaagggcttcctggtgatcggctacctgctggagaagagcagcagagtgcacatcaccagagccgtgctggagcagttcctgagcttcgccaagtacctggacggcctgagccacggcgcccccctgctgaagcagctgtgcgaccacatcctgttcaaccccgccatctggatccacacccccgccaaggtgcagctgagcctgtacacctacctgagcgccgagttcatcggcaccgccaccatctacaccaccatcagaagagtgggcaccgtgctgcagctgatgcacaccctgaagtactactactgggtgatcaaccccgccgacagcagcggcatcacccccaagggcctggacggccccagacccagccagaaggagatcatcagcctgagagccttcatgctgctgttcctgaagcagctgatcctgaaggacagaggcgtgaaggaggacgagctgcagagcatcctgaactacctgctgaccatgcacgaggacgagaacatccacgacgtgctgcagctgctggtggccctgatgagcgagcaccccgccagcatgatccccgccttcgaccagagaaacggcatcagagtgatctacaagctgctggccagcaagagcgagagcatctgggtgcaggccctgaaggtgctgggctacttcctgaagcacctgggccacaagagaaaggtggagatcatgcacacccacagcctgttcaccctgctgggcgagagactgatgctgcacaccaacaccgtgaccgtgaccacctacaacaccctgtacgagatcctgaccgagcaggtgtgcacccaggtggtgcacaagccccaccccgagcccgacagcaccgtgaagatccagaaccccatgatcctgaaggtggtggccaccctgctgaagaacagcacccccagcgccgagctgatggaggtgagaagactgttcctgagcgacatgatcaagctgttcagcaacagcagagagaacagaagatgcctgctgcagtgcagcgtgtggcaggactggatgttcagcctgggctacatcaaccccaagaacagcgaggagcagaagatcaccgagatggtgtacaacatcttcagaatcctgctgtaccacgccatcaagtacgagtggggcggctggagagtgtgggtggacaccctgagcatcgcccacagcaaggtgacctacgaggcccacaaggagtacctggccaagatgtacgaggagtaccagagacaggaggaggagaacatcaagaagggcaagaagggcaacgtgagcaccatcagcggcctgagcagccagaccaccggcgccaagggcggcatggagatcagagagatcgaggacctgagccagagccagagccccgagagcgagaccgactaccccgtgagcaccgacaccagagacctgctgatgagcaccaaggtgagcgacgacatcctgggcaacagcgacagacccggcagcggcgtgcacgtggaggtgcacgacctgctggtggacatcaaggccgagaaggtggaggccaccgaggtgaagctggacgacatggacctgagccccgagaccctggtgggcggcgagaacggcgccctggtggaggtggagagcctgctggacaacgtgtacagcgccgccgtggagaagctgcagaacaacgtgcacggcagcgtgggcatcatcaagaagaacgaggagaaggacaacggccccctgatcaccctggccgacgagaaggaggacctgcccaacagcagcaccagcttcctgttcgacaagatccccaagcaggaggagaagctgctgcccgagctgagcagcaaccacatcatccccaacatccaggacacccaggtgcacctgggcgtgagcgacgacctgggcctgctggcccacatgaccggcagcgtggacctgacctgcaccagcagcatcatcgaggagaaggagttcaagatccacaccaccagcgacggcatgagcagcatcagcgagagagacctggccagcagcaccaagggcctggagtacgccgagatgaccgccaccaccctggagaccgagagcagcagcagcaagatcgtgcccaacatcgacgccggcagcatcatcagcgacaccgagagaagcgacgacggcaaggagagcggcaaggagatcagaaagatccagaccaccaccaccacccaggccgtgcagggcagaagcatcacccagcaggacagagacctgagagtggacctgggcttcagaggcatgcccatgaccgaggagcagagaagacagttcagccccggccccagaaccaccatgttcagaatccccgagttcaagtggagccccatgcaccagagactgctgaccgacctgctgttcgccctggagaccgacgtgcacgtgtggagaagccacagcaccaagagcgtgatggacttcgtgaacagcaacgagaacatcatcttcgtgcacaacaccatccacctgatcagccagatggtggacaacatcatcatcgcctgcggcggcatcctgcccctgctgagcgccgccaccagccccaccaccgagctggagaacatcgaggtgacccagggcatgagcgccgagaccgccgtgaccttcctgagcagactgatggccatggtggacgtgctggtgttcgccagcagcctgaacttcagcgagatcgaggccgagaagaacatgagcagcggcggcctgatgagacagtgcctgagactggtgtgctgcgtggccgtgagaaactgcctggagtgcagacagagacagagagacagaggcaacaagagcagccacggcagcagcaagccccaggaggtgccccagagcgtgaccgccaccgccgccagcaagacccccctggagaacgtgcccggcaacctgagccccatcaaggaccccgacagactgctgcaggacgtggacatcaacagactgagagccgtggtgttcagagacgtggacgacagcaagcaggcccagttcctggccctggccgtggtgtacttcatcagcgtgctgatggtgagcaagtacagagacatcctggagccccagagagagaccaccagaaccggcagccagcccggcagaaacatcagacaggagatcaacagccccaccagcaccgtggtggtgatccccagcatcccccaccccagcctgaaccacggcttcctggccaagctgatccccgagcagagcttcggccacagcttctacaaggagacccccgccgccttccccgacaccatcaaggagaaggagacccccacccccggcgaggacatccaggtggagagcagcatcccccacaccgacagcggcatcggcgaggagcaggtggccagcatcctgaacggcgccgagctggagaccagcaccggccccgacgccatgagcgagctgctgagcaccctgagcagcgaggtgaagaagagccaggagagcctgaccgagaaccccagcgagaccctgaagcccgccaccagcatcagcagcatcagccagaccaagggcatcaacgtgaaggagatcctgaagagcctggtggccgcccccgtggagatcgccgagtgcggccccgagcccatcccctaccccgaccccgccctgaagagagagacccaggccatcctgcccatgcagttccacagcttcgacagaagcgtggtggtgcccgtgaagaagcccccccccggcagcctggccgtgaccaccgtgggcgccaccaccgccggcagcggcctgcccaccggcagcaccagcaacatcttcgccgccaccggcgccacccccaagagcatgatcaacaccaccggcgccgtggacagcggcagcagcagcagcagcagcagcagcagcttcgtgaacggcgccaccagcaagaacctgcccgccgtgcagaccgtggcccccatgcccgaggacagcgccgagaacatgagcatcaccgccaagctggagagagccctggagaaggtggcccccctgctgagagagatcttcgtggacttcgcccccttcctgagcagaaccctgctgggcagccacggccaggagctgctgatcgagggcctggtgtgcatgaagagcagcaccagcgtggtggagctggtgatgctgctgtgcagccaggagtggcagaacagcatccagaagaacgccggcctggccttcatcgagctgatcaacgagggcagactgctgtgccacgccatgaaggaccacatcgtgagagtggccaacgaggccgagttcatcctgaacagacagagagccgaggacgtgcacaagcacgccgagttcgagagccagtgcgcccagtacgccgccgacagaagagaggaggagaagatgtgcgaccacctgatcagcgccgccaagcacagagaccacgtgaccgccaaccagctgaagcagaagatcctgaacatcctgaccaacaagcacggcgcctggggcgccgtgagccacagccagctgcacgacttctggagactggactactgggaggacgacctgagaagaagaagaagattcgtgagaaacgccttcggcagcacccacgccgaggccctgctgaaggccgccatcgagtacggcaccgaggaggacgtggtgaagagcaagaagaccttcagaagccaggccatcgtgaaccagaacgccgagaccgagctgatgctggagggcgacgacgacgccgtgagcctgctgcaggagaaggagatcgacaacctggccggccccgtggtgctgagcacccccgcccagctgatcgcccccgtggtggtggccaagggcaccctgagcatcaccaccaccgagatctacttcgaggtggacgaggacgacagcgccttcaagaagatcgacaccaaggtgctggcctacaccgagggcctgcacggcaagtggatgttcagcgagatcagagccgtgttcagcagaagatacctgctgcagaacaccgccctggaggtgttcatggccaacagaaccagcgtgatgttcaacttccccgaccaggccaccgtgaagaaggtggtgtacagcctgcccagagtgggcgtgggcaccagctacggcctgccccaggccagaagaatcagcctggccacccccagacagctgtacaagagcagcaacatgacccagagatggcagagaagagagatcagcaacttcgagtacctgatgttcctgaacaccatcgccggcagaacctacaacgacctgaaccagtaccccgtgttcccctgggtgctgaccaactacgagagcgaggagctggacctgaccctgcccggcaacttcagagacctgagcaagcccatcggcgccctgaaccccaagagagccgtgttctacgccgagagatacgagacctgggaggacgaccagagccccccctaccactacaacacccactacagcaccgccaccagcaccctgagctggctggtgagaatcgagcccttcaccaccttcttcctgaacgccaacgacggcaagttcgaccaccccgacagaaccttcagcagcgtggccagaagctggagaaccagccagagagacaccagcgacgtgaaggagctgatccccgagttctactacctgcccgagatgttcgtgaacagcaacggctacaacctgggcgtgagagaggacgaggtggtggtgaacgacgtggacctgcccccctgggccaagaagcccgaggacttcgtgagaatcaacagaatggccctggagagcgagttcgtgagctgccagctgcaccagtggatcgacctgatcttcggctacaagcagagaggccccgaggccgtgagagccctgaacgtgttccactacctgacctacgagggcagcgtgaacctggacagcatcaccgaccccgtgctgagagaggccatggaggcccagatccagaacttcggccagacccccagccagctgctgatcgagccccacccccccagaagcagcgccatgcacctgtgcttcctgccccagagccccctgatgttcaaggaccagatgcagcaggacgtgatcatggtgctgaagttccccagcaacagccccgtgacccacgtggccgccaacaccctgccccacctgaccatccccgccgtggtgaccgtgacctgcagcagactgttcgccgtgaacagatggcacaacaccgtgggcctgagaggcgcccccggctacagcctggaccaggcccaccacctgcccatcgagatggaccccctgatcgccaacaacagcggcgtgaacaagagacagatcaccgacctggtggaccagagcatccagatcaacgcccactgcttcgtggtgaccgccgacaacagatacatcctgatctgcggcttctgggacaagagcttcagagtgtacagcaccgagaccggcaagctgacccagatcgtgttcggccactgggacgtggtgacctgcctggccagaagcgagagctacatcggcggcgactgctacatcgtgagcggcagcagagacgccaccctgctgctgtggtactggagcggcagacaccacatcatcggcgacaaccccaacagcagcgactaccccgcccccagagccgtgctgaccggccacgaccacgaggtggtgtgcgtgagcgtgtgcgccgagctgggcctggtgatcagcggcgccaaggagggcccctgcctggtgcacaccatcaccggcgacctgctgagagccctggagggccccgagaactgcctgttccccagactgatcagcgtgagcagcgagggccactgcatcatctactacgagagaggcagattcagcaacttcagcatcaacggcaagctgctggcccagatggagatcaacgacagcaccagagccatcctgctgagcagcgacggccagaacctggtgaccggcggcgacaacggcgtggtggaggtgtggcaggcctgcgacttcaagcagctgtacatctaccccggctgcgacgccggcatcagagccatggacctgagccacgaccagagaaccctgatcaccggcatggccagcggcagcatcgtggccttcaacatcgacttcaacagatggcactacgagcaccagaacagatactag

SEQ ID NO: 90723 - DNA, 8841 bp, synthetic construct
  misc_feature 1..8841: note = Description of Artificial Sequence: Synthetic coding sequence
  source 1..8841: mol_type = other DNA
atggccagcgagaagcccggccccggccccggcctggagccccagcccgtgggcctgatcgccgtgggcgccgccggcggcggcggcggcggcagcggcggcggcggcaccggcggcagcggcatgggcgagctgagaggcgccagcggcagcggcagcgtgatgctgcccgccggcatgatcaaccccagcgtgcccatcagaaacatcagaatgaagttcgccgtgctgatcggcctgatccaggtgggcgaggtgagcaacagagacatcgtggagaccgtgctgaacctgctggtgggcggcgagttcgacctggagatgaacttcatcatccaggacgccgagagcatcacctgcatgaccgagctgctggagcactgcgacgtgacctgccaggccgagatctggagcatgttcaccgccatcctgagaaagagcgtgagaaacctgcagaccagcaccgaggtgggcctgatcgagcaggtgctgctgaagatgagcgccgtggacgacatgatcgccgacctgctggtggacatgctgggcgtgctggccagctacagcatcaccgtgaaggagctgaagctgctgttcagcatgctgagaggcgagagcggcatctggcccagacacgccgtgaagctgctgagcgtgctgaaccagatgccccagagacacggccccgacaccttcttcaacttccccggctgcagcgccgccgccatcgccctgccccccatcgccaagtggccctaccagaacggcttcaccctgaacacctggttcagaatggaccccctgaacaacatcaacgtggacaaggacaagccctacctgtactgcttcagaaccagcaagggcgtgggctacagcgcccacttcgtgggcaactgcctgatcgtgaccagcctgaagagcaagggcaagggcttccagcactgcgtgaagtacgacttccagcccagaaagtggtacatgatcagcatcgtgcacatctacaacagatggagaaacagcgagatcagatgctacgtgaacggccagctggtgagctacggcgacatggcctggcacgtgaacaccaacgacagctacgacaagtgcttcctgggcagcagcgagaccgccgacgccaacagagtgttctgcggccagctgggcgccgtgtacgtgttcagcgaggccctgaaccccgcccagatcttcgccatccaccagctgggccccggctacaagagcaccttcaagttcaagagcgagagcgacatccacctggccgagcaccacaagcaggtgctgtacgacggcaagctggccagcagcatcgccttcacctacaacgccaaggccaccgacgcccagctgtgcctggagagcagccccaaggagaacgccagcatcttcgtgcacagcccccacgccctgatgctgcaggacgtgaaggccatcgtgacccacagcatccacagcgccatccacagcatcggcggcatccaggtgctgttccccctgttcgcccagctggacaacagacagctgaacgacagccaggtggagaccaccgtgtgcgccaccctgctggccttcctggtggagctgctgaagagcagcgtggccatgcaggagcagatgctgggcggcaagggcttcctggtgatcggctacctgctggagaagagcagcagagtgcacatcaccagagccgtgctggagcagttcctgagcttcgccaagtacctggacggcctgagccacggcgcccccctgctgaagcagctgtgcgaccacatcctgttcaaccccgccatctggatccacacccccgccaaggtgcagctgagcctgtacacctacctgagcgccgagttcatcggcaccgccaccatctacaccaccatcagaagagtgggcaccgtgctgcagctgatgcacaccctgaagtactactactgggtgatcaaccccgccgacagcagcggcatcacccccaagggcctggacggccccagacccagccagaaggagatcatcagcctgagagccttcatgctgctgttcctgaagcagctgatcctgaaggacagaggcgtgaaggaggacgagctgcagagcatcctgaactacctgctgaccatgcacgaggacgagaacatccacgacgtgctgcagctgctggtggccctgatgagcgagcaccccgccagcatgatccccgccttcgaccagagaaacggcatcagagtgatctacaagctgctggccagcaagagcgagagcatctgggtgcaggccctgaaggtgctgggctacttcctgaagcacctgggccacaagagaaaggtggagatcatgcacacccacagcctgttcaccctgctgggcgagagactgatgctgcacaccaacaccgtgaccgtgaccacctacaacaccctgtacgagatcctgaccgagcaggtgtgcacccaggtggtgcacaagccccaccccgagcccgacagcaccgtgaagatccagaaccccatgatcctgaaggtggtggccaccctgctgaagaacagcacccccagcgccgagctgatggaggtgagaagactgttcctgagcgacatgatcaagctgttcagcaacagcagagagaacagaagatgcctgctgcagtgcagcgtgtggcaggactggatgttcagcctgggctacatcaaccccaagaacagcgaggagcagaagatcaccgagatggtgtacaacatcttcagaatcctgctgtaccacgccatcaagtacgagtggggcggctggagagtgtgggtggacaccctgagcatcgcccacagcaaggtgacctacgaggcccacaaggagtacctggccaagatgtacgaggagtaccagagacaggaggaggagaacatcaagaagggcaagaagggcaacgtgagcaccatcagcggcctgagcagccagaccaccggcgccaagggcggcatggagatcagagagatcgaggacctgagccagagccagagccccgagagcgagaccgactaccccgtgagcaccgacaccagagacctgctgatgagcaccaaggtgagcgacgacatcctgggcaacagcgacagacccggcagcggcgtgcacgtggaggtgcacgacctgctggtggacatcaaggccgagaaggtggaggccaccgaggtgaagctggacgacatggacctgagccccgagaccctggtgggcggcgagaacggcgccctggtggaggtggagagcctgctggacaacgtgtacagcgccgccgtggagaagctgcagaacaacgtgcacggcagcgtgggcatcatcaagaagaacgaggagaaggacaacggccccctgatcaccctggccgacgagaaggaggacctgcccaacagcagcaccagcttcctgttcgacaagatccccaagcaggaggagaagctgctgcccgagctgagcagcaaccacatcatccccaacatccaggacacccaggtgcacctgggcgtgagcgacgacctgggcctgctggcccacatgaccggcagcgtggacctgacctgcaccagcagcatcatcgaggagaaggagttcaagatccacaccaccagcgacggcatgagcagcatcagcgagagagacctggccagcagcaccaagggcctggagtacgccgagatgaccgccaccaccctggagaccgagagcagcagcagcaagatcgtgcccaacatcgacgccggcagcatcatcagcgacaccgagagaagcgacgacggcaaggagagcggcaaggagatcagaaagatccagaccaccaccaccacccaggccgtgcagggcagaagcatcacccagcaggacagagacctgagagtggacctgggcttcagaggcatgcccatgaccgaggagcagagaagacagttcagccccggccccagaaccaccatgttcagaatccccgagttcaagtggagccccatgcaccagagactgctgaccgacctgctgttcgccctggagaccgacgtgcacgtgtggagaagccacagcaccaagagcgtgatggacttcgtgaacagcaacgagaacatcatcttcgtgcacaacaccatccacctgatcagccagatggtggacaacatcatcatcgcctgcggcggcatcctgcccctgctgagcgccgccaccagccccaccggcagcaagaccgagctggagaacatcgaggtgacccagggcatgagcgccgagaccgccgtgaccttcctgagcagactgatggccatggtggacgtgctggtgttcgccagcagcctgaacttcagcgagatcgaggccgagaagaacatgagcagcggcggcctgatgagacagtgcctgagactggtgtgctgcgtggccgtgagaaactgcctggagtgcagacagagacagagagacagaggcaacaagagcagccacggcagcagcaagccccaggaggtgccccagagcgtgaccgccaccgccgccagcaagacccccctggagaacgtgcccggcaacctgagccccatcaaggaccccgacagactgctgcaggacgtggacatcaacagactgagagccgtggtgttcagagacgtggacgacagcaagcaggcccagttcctggccctggccgtggtgtacttcatcagcgtgctgatggtgagcaagtacagagacatcctggagccccagagagagaccaccagaaccggcagccagcccggcagaaacatcagacaggagatcaacagccccaccagcaccgtggtggtgatccccagcatcccccaccccagcctgaaccacggcttcctggccaagctgatccccgagcagagcttcggccacagcttctacaaggagacccccgccgccttccccgacaccatcaaggagaaggagacccccacccccggcgaggacatccaggtggagagcagcatcccccacaccgacagcggcatcggcgaggagcaggtggccagcatcctgaacggcgccgagctggagaccagcaccggccccgacgccatgagcgagctgctgagcaccctgagcagcgaggtgaagaagagccaggagagcctgaccgagaaccccagcgagaccctgaagcccgccaccagcatcagcagcatcagccagaccaagggcatcaacgtgaaggagatcctgaagagcctggtggccgcccccgtggagatcgccgagtgcggccccgagcccatcccctaccccgaccccgccctgaagagagagacccaggccatcctgcccatgcagttccacagcttcgacagaagcgtggtggtgcccgtgaagaagcccccccccggcagcctggccgtgaccaccgtgggcgccaccaccgccggcagcggcctgcccaccggcagcaccagcaacatcttcgccgccaccggcgccacccccaagagcatgatcaacaccaccggcgccgtggacagcggcagcagcagcagcagcagcagcagcagcttcgtgaacggcgccaccagcaagaacctgcccgccgtgcagaccgtggcccccatgcccgaggacagcgccgagaacatgagcatcaccgccaagctggagagagccctggagaaggtggcccccctgctgagagagatcttcgtggacttcgcccccttcctgagcagaaccctgctgggcagccacggccaggagctgctgatcgagggcctggtgtgcatgaagagcagcaccagcgtggtggagctggtgatgctgctgtgcagccaggagtggcagaacagcatccagaagaacgccggcctggccttcatcgagctgatcaacgagggcagactgctgtgccacgccatgaaggaccacatcgtgagagtggccaacgaggccgagttcatcctgaacagacagagagccgaggacgtgcacaagcacgccgagttcgagagccagtgcgcccagtacgccgccgacagaagagaggaggagaagatgtgcgaccacctgatcagcgccgccaagcacagagaccacgtgaccgccaaccagctgaagcagaagatcctgaacatcctgaccaacaagcacggcgcctggggcgccgtgagccacagccagctgcacgacttctggagactggactactgggaggacgacctgagaagaagaagaagattcgtgagaaacgccttcggcagcacccacgccgaggccctgctgaaggccgccatcgagtacggcaccgaggaggacgtggtgaagagcaagaagaccttcagaagccaggccatcgtgaaccagaacgccgagaccgagctgatgctggagggcgacgacgacgccgtgagcctgctgcaggagaaggagatcgacaacctggccggccccgtggtgctgagcacccccgcccagctgatcgcccccgtggtggtggccaagggcaccctgagcatcaccaccaccgagatctacttcgaggtggacgaggacgacagcgccttcaagaagatcgacaccaaggtgctggcctacaccgagggcctgcacggcaagtggatgttcagcgagatcagagccgtgttcagcagaagatacctgctgcagaacaccgccctggaggtgttcatggccaacagaaccagcgtgatgttcaacttccccgaccaggccaccgtgaagaaggtggtgtacagcctgcccagagtgggcgtgggcaccagctacggcctgccccaggccagaagaatcagcctggccacccccagacagctgtacaagagcagcaacatgacccagagatggcagagaagagagatcagcaacttcgagtacctgatgttcctgaacaccatcgccggcagaacctacaacgacctgaaccagtaccccgtgttcccctgggtgctgaccaactacgagagcgaggagctggacctgaccctgcccggcaacttcagagacctgagcaagcccatcggcgccctgaaccccaagagagccgtgttctacgccgagagatacgagacctgggaggacgaccagagccccccctaccactacaacacccactacagcaccgccaccagcaccctgagctggctggtgagaatcgagcccttcaccaccttcttcctgaacgccaacgacggcaagttcgaccaccccgacagaaccttcagcagcgtggccagaagctggagaaccagccagagagacaccagcgacgtgaaggagctgatccccgagttctactacctgcccgagatgttcgtgaacagcaacggctacaacctgggcgtgagagaggacgaggtggtggtgaacgacgtggacctgcccccctgggccaagaagcccgaggacttcgtgagaatcaacagaatggccctggagagcgagttcgtgagctgccagctgcaccagtggatcgacctgatcttcggctacaagcagagaggccccgaggccgtgagagccctgaacgtgttccactacctgacctacgagggcagcgtgaacctggacagcatcaccgaccccgtgctgagagaggccatggaggcccagatccagaacttcggccagacccccagccagctgctgatcgagccccacccccccagaagcagcgccatgcacctgtgcttcctgccccagagccccctgatgttcaaggaccagatgcagcaggacgtgatcatggtgctgaagttccccagcaacagccccgtgacccacgtggccgccaacaccctgccccacctgaccatccccgccgtggtgaccgtgacctgcagcagactgttcgccgtgaacagatggcacaacaccgtgggcctgagaggcgcccccggctacagcctggaccaggcccaccacctgcccatcgagatggaccccctgatcgccaacaacagcggcgtgaacaagagacagatcaccgacctggtggaccagagcatccagatcaacgcccactgcttcgtggtgaccgccgacaacagatacatcctgatctgcggcttctgggacaagagcttcagagtgtacagcaccgagaccggcaagctgacccagatcgtgttcggccactgggacgtggtgacctgcctggccagaagcgagagctacatcggcggcgactgctacatcgtgagcggcagcagagacgccaccctgctgctgtggtactggagcggcagacaccacatcatcggcgacaaccccaacagcagcgactaccccgcccccagagccgtgctgaccggccacgaccacgaggtggtgtgcgtgagcgtgtgcgccgagctgggcctggtgatcagcggcgccaaggagggcccctgcctggtgcacaccatcaccggcgacctgctgagagccctggagggccccgagaactgcctgttccccagactgatcagcgtgagcagcgagggccactgcatcatctactacgagagaggcagattcagcaacttcagcatcaacggcaagctgctggcccagatggagatcaacgacagcaccagagccatcctgctgagcagcgacggccagaacctggtgaccggcggcgacaacggcgtggtggaggtgtggcaggcctgcgacttcaagcagctgtacatctaccccggctgcgacgccggcatcagagccatggacctgagccacgaccagagaaccctgatcaccggcatggccagcggcagcatcgtggccttcaacatcgacttcaacagatggcactacgagcaccagaacagatactag

SEQ ID NO: 90724 - DNA, 1575 bp, synthetic construct; identical to SEQ ID NO: 90721
  misc_feature 1..1575: note = Description of Artificial Sequence: Synthetic coding sequence
  source 1..1575: mol_type = other DNA

SEQ ID NO: 90725 - DNA, 4728 bp, synthetic construct
  misc_feature 1..4728: note = Description of Artificial Sequence: Synthetic coding sequence
  source 1..4728: mol_type = other DNA
atgcaccagagactgctgaccgacctgctgttcgccctggagaccgacgtgcacgtgtggagaagccacagcaccaagagcgtgatggacttcgtgaacagcaacgagaacatcatcttcgtgcacaacaccatccacctgatcagccagatggtggacaacatcatcatcgcctgcggcggcatcctgcccctgctgagcgccgccaccagccccaccaccgagctggagaacatcgaggtgacccagggcatgagcgccgagaccgccgtgaccttcctgagcagactgatggccatggtggacgtgctggtgttcgccagcagcctgaacttcagcgagatcgaggccgagaagaacatgagcagcggcggcctgatgagacagtgcctgagactggtgtgctgcgtggccgtgagaaactgcctggagtgcagacagagacagagagacagaggcaacaagagcagccacggcagcagcaagccccaggaggtgccccagagcgtgaccgccaccgccgccagcaagacccccctggagaacgtgcccggcaacctgagccccatcaaggaccccgacagactgctgcaggacgtggacatcaacagactgagagccgtggtgttcagagacgtggacgacagcaagcaggcccagttcctggccctggccgtggtgtacttcatcagcgtgctgatggtgagcaagtacagagacatcctggagccccagagagagaccaccagaaccggcagccagcccggcagaaacatcagacaggagatcaacagccccaccagcaccgagacccccgccgccttccccgacaccatcaaggagaaggagacccccacccccggcgaggacatccaggtggagagcagcatcccccacaccgacagcggcatcggcgaggagcaggtggccagcatcctgaacggcgccgagctggagaccagcaccggccccgacgccatgagcgagctgctgagcaccctgagcagcgaggtgaagaagagccaggagagcctgaccgagaaccccagcgagaccctgaagcccgccaccagcatcagcagcatcagccagaccaagggcatcaacgtgaaggagatcctgaagagcctggtggccgcccccgtggagatcgccgagtgcggccccgagcccatcccctaccccgaccccgccctgaagagagagacccaggccatcctgcccatgcagttccacagcttcgacagaagcgtggtggtgcccgtgaagaagcccccccccggcagcctggccgtgaccaccgtgggcgccaccaccgccggcagcggcctgcccaccggcagcaccagcaacatcttcgccgccaccggcgccacccccaagagcatgatcaacaccaccggcgccgtggacagcggcagcagcagcagcagcagcagcagcagcttcgtgaacggcgccaccagcaagaacctgcccgccgtgcagaccgtggcccccatgcccgaggacagcgccgagaacatgagcatcaccgccaagctggagagagccctggagaaggtggcccccctgctgagagagatcttcgtggacttcgcccccttcctgagcagaaccctgctgggcagccacggccaggagctgctgatcgagggcctggtgtgcatgaagagcagcaccagcgtggtggagctggtgatgctgctgtgcagccaggagtggcagaacagcatccagaagaacgccggcctggccttcatcgagctgatcaacgagggcagactgctgtgccacgccatgaaggaccacatcgtgagagtggccaacgaggccgagttcatcctgaacagacagagagccgaggacgtgcacaagcacgccgagttcgagagccagtgcgcccagtacgccgccgacagaagagaggaggagaagatgtgcgaccacctgatcagcgccgccaagcacagagaccacgtgaccgccaaccagctgaagcagaagatcctgaacatcctgaccaacaagcacggcgcctggggcgccgtgagccacagccagctgcacgacttctggagactggactactgggaggacgacctgagaagaagaagaagattcgtgagaaacgccttcggcagcacccacgccgaggccctgctgaaggccgccatcgagtacggcaccgaggaggacgtggtgaagagcaagaagaccttcagaagccaggccatcgtgaaccagaacgccgagaccgagctgatgctggagggcgacgacgacgccgtgagcctgctgcaggagaaggagatcgacaacctggccggccccgtggtgctgagcacccccgcccagctgatcgcccccgtggtggtggccaagggcaccctgagcatcaccaccaccgagatctacttcgaggtggacgaggacgacagcgccttcaagaagatcgacaccaaggtgctggcctacaccgagggcctgcacggcaagtggatgttcagcgagatcagagccgtgttcagcagaagatacctgctgcagaacaccgccctggaggtgttcatggccaacagaaccagcgtgatgttcaacttccccgaccaggccaccgtgaagaaggtggtgtacagcctgcccagagtgggcgtgggcaccagctacggcctgccccaggccagaagaatcagcctggccacccccagacagctgtacaagagcagcaacatgacccagagatggcagagaagagagatcagcaacttcgagtacctgatgttcctgaacaccatcgccggcagaacctacaacgacctgaaccagtaccccgtgttcccctgggtgctgaccaactacgagagcgaggagctggacctgaccctgcccggcaacttcagagacctgagcaagcccatcggcgccctgaaccccaagagagccgtgttctacgccgagagatacgagacctgggaggacgaccagagccccccctaccactacaacacccactacagcaccgccaccagcaccctgagctggctggtgagaatcgagcccttcaccaccttcttcctgaacgccaacgacggcaagttcgaccaccccgacagaaccttcagcagcgtggccagaagctggagaaccagccagagagacaccagcgacgtgaaggagctgatccccgagttctactacctgcccgagatgttcgtgaacagcaacggctacaacctgggcgtgagagaggacgaggtggtggtgaacgacgtggacctgcccccctgggccaagaagcccgaggacttcgtgagaatcaacagaatggccctggagagcgagttcgtgagctgccagctgcaccagtggatcgacctgatcttcggctacaagcagagaggccccgaggccgtgagagccctgaacgtgttccactacctgacctacgagggcagcgtgaacctggacagcatcaccgaccccgtgctgagagaggccatggaggcccagatccagaacttcggccagacccccagccagctgctgatcgagccccacccccccagaagcagcgccatgcacctgtgcttcctgccccagagccccctgatgttcaaggaccagatgcagcaggacgtgatcatggtgctgaagttccccagcaacagccccgtgacccacgtggccgccaacaccctgccccacctgaccatccccgccgtggtgaccgtgacctgcagcagactgttcgccgtgaacagatggcacaacaccgtgggcctgagaggcgcccccggctacagcctggaccaggcccaccacctgcccatcgagatggaccccctgatcgccaacaacagcggcgtgaacaagagacagatcaccgacctggtggaccagagcatccagatcaacgcccactgcttcgtggtgaccgccgacaacagatacatcctgatctgcggcttctgggacaagagcttcagagtgtacagcaccgagaccggcaagctgacccagatcgtgttcggccactgggacgtggtgacctgcctggccagaagcgagagctacatcggcggcgactgctacatcgtgagcggcagcagagacgccaccctgctgctgtggtactggagcggcagacaccacatcatcggcgacaaccccaacagcagcgagtgcgactaccccgcccccagagccgtgctgaccggccacgaccacgaggtggtgtgcgtgagcgtgtgcgccgagctgggcctggtgatcagcggcgccaaggagggcccctgcctggtgcacaccatcaccggcgacctgctgagagccctggagggccccgagaactgcctgttccccagactgatcagcgtgagcagcgagggccactgcatcatctactacgagagaggcagattcagcaacttcagcatcaacggcaagctgctggcccagatggagatcaacgacagcaccagagccatcctgctgagcagcgacggccagaacctggtgaccggcggcgacaacggcgtggtggaggtgtggcaggcctgcgacttcaagcagctgtacatctaccccggctgcgacgccggcatcagagccatggacctgagccacgaccagagaaccctgatcaccggcatggccagcggcagcatcgtggccttcaacatcgacttcaacagatggcactacgagcaccagaacagatactag

SEQ ID NO: 90726 - DNA, 2220 bp, synthetic construct
  misc_feature 1..2220: note = Description of Artificial Sequence: Synthetic coding sequence
  source 1..2220: mol_type = other DNA
atgttcagcgagatcagagccgtgttcagcagaagatacctgctgcagaacaccgccctggaggtgttcatggccaacagaaccagcgtgatgttcaacttccccgaccaggccaccgtgaagaaggtggtgtacagcctgcccagagtgggcgtgggcaccagctacggcctgccccaggccagaagaatcagcctggccacccccagacagctgtacaagagcagcaacatgacccagagatggcagagaagagagatcagcaacttcgagtacctgatgttcctgaacaccatcgccggcagaacctacaacgacctgaaccagtaccccgtgttcccctgggtgctgaccaactacgagagcgaggagctggacctgaccctgcccggcaacttcagagacctgagcaagcccatcggcgccctgaaccccaagagagccgtgttctacgccgagagatacgagacctgggaggacgaccagagccccccctaccactacaacacccactacagcaccgccaccagcaccctgagctggctggtgagaatcgagcccttcaccaccttcttcctgaacgccaacgacggcaagttcgaccaccccgacagaaccttcagcagcgtggccagaagctggagaaccagccagagagacaccagcgacgtgaaggagctgatccccgagttctactacctgcccgagatgttcgtgaacagcaacggctacaacctgggcgtgagagaggacgaggtggtggtgaacgacgtggacctgcccccctgggccaagaagcccgaggacttcgtgagaatcaacagaatggccctggagagcgagttcgtgagctgccagctgcaccagtggatcgacctgatcttcggctacaagcagagaggccccgaggccgtgagagccctgaacgtgttccactacctgacctacgagggcagcgtgaacctggacagcatcaccgaccccgtgctgagagaggccatggaggcccagatccagaacttcggccagacccccagccagctgctgatcgagccccacccccccagaagcagcgccatgcacctgtgcttcctgccccagagccccctgatgttcaaggaccagatgcagcaggacgtgatcatggtgctgaagttccccagcaacagccccgtgacccacgtggccgccaacaccctgccccacctgaccatccccgccgtggtgaccgtgacctgcagcagactgttcgccgtgaacagatggcacaacaccgtgggcctgagaggcgcccccggctacagcctggaccaggcccaccacctgcccatcgagatggaccccctgatcgccaacaacagcggcgtgaacaagagacagatcaccgacctggtggaccagagcatccagatcaacgcccactgcttcgtggtgaccgccgacaacagatacatcctgatctgcggcttctgggacaagagcttcagagtgtacagcaccgagaccggcaagctgacccagatcgtgttcggccactgggacgtggtgacctgcctggccagaagcgagagctacatcggcggcgactgctacatcgtgagcggcagcagagacgccaccctgctgctgtggtactggagcggcagacaccacatcatcggcgacaaccccaacagcagcgactaccccgcccccagagccgtgctgaccggccacgaccacgaggtggtgtgcgtgagcgtgtgcgccgagctgggcctggtgatcagcggcgccaaggagggcccctgcctggtgcacaccatcaccggcgacctgctgagagccctggagggccccgagaactgcctgttccccagactgatcagcgtgagcagcgagggccactgcatcatctactacgagagaggcagattcagcaacttcagcatcaacggcaagctgctggcccagatggagatcaacgacagcaccagagccatcctgctgagcagcgacggccagaacctggtgaccggcggcgacaacggcgtggtggaggtgtggcaggcctgcgacttcaagcagctgtacatctaccccggctgcgacgccggcatcagagccatggacctgagccacgaccagagaaccctgatcaccggcatggccagcggcagcatcgtggccttcaacatcgacttcaacagatggcactacgagcaccagaacagatactag

SEQ ID NO: 90727 - DNA, 8841 bp, synthetic construct; identical to SEQ ID NO: 90720
  misc_feature 1..8841: note = Description of Artificial Sequence: Synthetic coding sequence
  source 1..8841: mol_type = other DNA

SEQ ID NO: 90728 - DNA, 834 bp, synthetic construct
  misc_feature 1..834: note = Description of Artificial Sequence: Synthetic coding sequence
  source 1..834: mol_type = other DNA
atgttcagcgagatcagagccgtgttcagcagaagatacctgctgcagaacaccgccctggaggtgttcatggccaacagaaccagcgtgatgttcaacttccccgaccaggccaccgtgaagaaggtggtgtacagcctgcccagagtgggcgtgggcaccagctacggcctgccccaggccagaagaatcagcctggccacccccagacagctgtacaagagcagcaacatgacccagagatggcagagaagagagatcagcaacttcgagtacctgatgttcctgaacaccatcgccggcagaacctacaacgacctgaaccagtaccccgtgttcccctgggtgctgaccaactacgagagcgaggagctggacctgaccctgcccggcaacttcagagacctgagcaagcccatcggcgccctgaaccccaagagagccgtgttctacgccgagagatacgagacctgggaggacgaccagagccccccctaccactacaacacccactacagcaccgccaccagcaccctgagctggctggtgagaatcgagcccttcaccaccttcttcctgaacgccaacgacggcaagttcgaccaccccgacagaaccttcagcagcgtggccagaagctggagaaccagccagagagacaccagcgacgtgaaggagctgatccccgagttctactacctgcccgagatgttcgtgaacagcaacggctacaacctgggcgtgagagaggacgaggtggtggtgaacgacgtggacctgcccccctgggccaagaacctgaagaccctgtgcggcagcaccggctggccctag

SEQ ID NO: 90729 - DNA, 7815 bp, synthetic construct
  misc_feature 1..7815: note = Description of Artificial Sequence: Synthetic coding sequence
  source 1..7815: mol_type = other DNA
atggccagcagagagagactgttcgagctgtggatgctgtactgcaccaagaaggaccccgactacctgaagctgtggctggacaccttcgtgagcagctacgagcagttcctggacgtggacttcgagaagctgcccaccagagtggacgacatgccccccggcatcagcctgctgcccgacaacatcctgcaggtgctgagaatccagctgctgcagtgcgtgcagaagatggccgacggcctggaggagcagcagcaggccctgagcatcctgctggtgaagttcttcatcatcctgtgcagaaacctgagcaacgtggaggagatcggcacctgcagctacatcaactacgtgatcaccatgaccaccctgtacatccagcagctgaagagcaagaagaaggagaaggagatggccgaccagacctgcatcgaggagttcgtgatccacgccctggccttctgcgagagcctgtacgacccctacagaaactggagacacagaatcagcggcagaatcctgagcaccgtggagaagagcagacagaagtacaagcccgccagcctgaccgtggagttcgtgcccttcttctaccagtgcttccaggagagcgagcacctgaaggagagcctgaagtgctgcctgctgcacctgttcggcgccatcgtggccggcggccagagaaacgccctgcaggccatcagccccgccaccatggaggtgctgatgagagtgctggccgactgcgacagctgggaggacggcgaccccgaggaggtgggcagaaaggccgagctgaccctgaagtgcctgaccgaggtggtgcacatcctgctgagcagcaacagcgaccagagacaggtggagaccagcaccatcctggagaactacttcaagctgctgaacagcgaccacagcgccctgcccaaccagagaagaagcagacagtgggagaacagattcatcgccctgcagatcaagatgctgaacaccatcaccgccatgctggactgcaccgacagacccgtgctgcaggccatcttcctgaacagcaactgcttcgagcacctgatcagactgctgcagaactgcaaggtgttccagggccagctggactgcctggccatcagcaccatccaggccctgaccgccgtgatgaacaagagccccgccgccaaggaggtgttcaaggagagaatcggctacacccacatgctggaggtgctgaagagcctgggccagccccccctggagctgctgaaggagctgatgaacatggccgtggagggcgaccacaccagcgtgggcatcctgggcatcagcaacgtgcagcccctgctgctgctgatccagtggctgcccgagctgcagagccacgacctgcagatcttcatcagcgactggctgaagagaatctgctgcatcaacagacagagcagaaccacctgcgtgaacgccaacatgggcatcagaatcatcgagaccctggacctgcacagcagcctgcaccagacctgcgccgagaacctgatcgccatccacggcagcctgggcagccagagcgtgagcagcgaggagatcagaagactgctgagactgctgagagtggacgagagcgagagcgtgcacccctacgtgacccccgtgaccagagccatcctgaccatggccagaaagctgagcctggagagcgccctgcagtacttcaacctgagccacagcatggccggcatcagcgtgccccccatccagaagtggcccggcagcgccttcagcttcagcgcctggttctgcctggaccaggaccagctgaccctgggcatcgccaacaagggcggcaagagaaagcagctgtacagcttcttcaccggcagcggcatgggcttcgaggccttcatcacccacagcggcatgctggtggtggccgtgtgcaccaagagagagtacgccaccgtgatgctgcccgaccacagcttctgcgacagcctgtggcacaacatcaccgtggtgcacatgcccggcaagagacccttcggccagagcttcgtgtacatctacgacaacggccagcagaaggtgagcgcccccctgagattccccgccatgaacgagcccttcaccagctgctgcatcggcagcgccggccagagaaccaccacccccccccccagccagatccccgacccccccttcagcagccccatcaccccccacagaaccagcttcggcggcatcctgagcagcgccagctggggcggcaccatcgagaagagcaagctgatcaccaagctgatcagcgccggcacccaggacagcgagtggggctgccccaccagcctggagggccagctgggcagcgtgatcatcttctacgagcccctgcagcccccccaggtgaaggccctgtacctggccggccccaactgcctgagcccctggaagtgccaggagagcgacatggccgacctgcccggcaacatcctgctgtactacaccgccaaggcctgcaagaacagcatctgcctggacctgagcaccaactgcctgcacggcagactgaccggcaacaaggtggtgaactgggacatcaaggacatcatcaactgcatcggcggcctgaacgtgctgttccccctgctggagcagatcagccacttcagcgagggccagatccccgaggagaagaacgagagcaccgtgcccgagagcgtgacccccgtggagggcgactggctggtgtggaccagcaccaaggccagcgagagcagactggagagaaacctggtggccaccttcatcctgatcgtgaagcacttcatccagagacaccccatcaaccagggcaacctgatccacagccacggcgtggccaccctgggcgccctgctgcagaaggtgcccagcaccctgatggacgtgaacgtgctgatggccgtgcagctgctgatcgagcaggtgagcctggagaagaacatgcagctgctgcagcagatgtaccagtacctgctgttcgacttcagaatctggaacagaggcgacttccccttcagaatcggccacatccagtacctgagcaccatcatcaaggacagcagaagagtgttcagaaagaagtacggcgtgcagttcctgctggacaccctgagaatctactacggcaacggctgcaagtacaacgagctgagcctggacgacatcagaaccatcagaaccagcctgtacggcctgatcaagtacttcctgtgcaagggcggcagccacgaggagatccagagcatcatgggctacatcgccgccaccaacgaggaggagcagctgttcggcatcctggacgtgctgttcagcctgctgagaaccagccccaccagaggccagctgttcctgctgctgttcgagcccggcaacgccgacatcctgtacgccctgctgctgaaccagaagtacagcgacagactgagagagatcatcttcaagatcatggagcagatgctgaagtgcaccaacgtgtacgagagaagcaagcagcacatcagactgagagaggtgggctacagcggcctgggcctgctgctgaacgaggccctggtgaacaccagcctgatcaagaacctgacccaccagatcatcaacaccgaccccgtgatcaacttcaaggacctgctgagcgtggtgtacatcagccacagagcccacatcaacgtgagagtggccatctgcagaaaggtgctgcagatcctgcagttccagcccgacgccgcccaccagatcagccagcaggtgggctggcaggacaccctggtgagactgttcctgaaggccaagttcgagaacggcaacaccctgcacaagcacagcagagccgtgctgatgaaggacaacgacaagaacatgagcaccgaggacaccaagaagaacagcgacgagaagaccgacgaggagaagatcaccagcttcgccagcgccaacgtgagcagcgaccagtggagcctggaggacagacacagcctggacagcaacacccccctgttccccgaggacagcagcgtgggcgagctgagcttcaagagcgagaaccaggaggagttctggcacagcaaccccagccacctgagcctggacctgagcggcatcgacagctgcgagatgagcgacagcggcagccaggtgcccgacagcctgcccagcacccccagccccgtggagagcaccaagagcttcagcgtgcacagcgacagagagagcagcatcaccaacgacatgggcttcagcgacgacttcagcctgctggagagccaggagagatgcgaggaggagctgctgcagctgctgacccacatcctgaactacgtgatgtgcaagggcctggagaagagcgacgacgacacctggatcgagagaggccaggtgttcagcgccctgagcaagcccggcatcagcagcgagctgctgagacccagcgacgagatcaagctgaccctgctgcagaagatgctggagtgggccatcagcgagaacagagaggccaagaccaaccccgtgaccgccgagaacgccttcagactggtgctgatcatccaggacttcctgcagagcgagggcctggtgaacagcaacatgtggaccgagaagctgctggaggacatgatgctgctgttcgactgcctgagcgtgtgctacagcgagagccccgtgtgggtgaagctgagccagatccagatccagctgctgctgggcttcatcggcagaggcaacctgcaggtgtgcgccatggccagcgccaagctgaacaccctgctgcagaccaaggtgatcgagaaccaggacgaggcctgctacatcctgggcaagctggagcacgtgctgagccagagcatcaaggagcagaccgagatctacagcttcctgatccccctggtgagaaccctggtgagcaagatctacgagctgctgttcatgaacctgcacctgcccagcctgcccttcaccaacggcagcagcagcttcttcgaggacttccaggagtactgcaacagcaacgagtggcaggtgtacatcgagaagtacatcgtgccctacatgaagcagtacgaggcccacaccttctacgacggccacgagaacatggccctgtactggaaggactgctacgaggccctgatggtgaacatgcacaagagagacagagagggcggcgagagcaagctgaagttccaggagctgttcgtggagcccttcaacagaaaggccagacaggagaacctgagatacaacaacatgctgaagcagctgagcagccagcagctggccaccctgagaagatggaaggccatccagctgtacctgacctgcgagagaggcccctgggccaagagaaagcagaaccccatccactggaagctggccaacgtggagaactacagcagaatgagactgaagctggtgcccaactacaacttcaagacccacgaggaggccagcgccctgagagacaacctgggcatccagcacagccagcccagcagcgacaccctgctgctggaggtggtgaagcaggtgaaggtgagcgacatggtggaggacaagctggacctgcccgaggaggacatcaccgccagagtgaacgtggacgagaaggaggagcaggaccagaaggagaagctggtgctgatggaggactgcgagctgatcaccatcatcgacgtgatccccggcagactggagatcaccacccagcacatctacttctacgacggcagcatcgagaaggaggacggcgtgggcttcgacttcaagtggccccacagccagatcagagagatccacctgagaagatacaacctgagaagaagcgccctggagatcttccacgtggaccagagcaactacttcctgaacttcaagaaggaggtgagaaacaagatctacagcagactgctgagcctgcacagccccaacagctactacggcagcagaagcccccaggagctgttcaaggccagcggcctgacccagaagtgggtgaacagagagatcagcaacttcgactacctgatccagatcaacaccatggccggcagaacctacaacgacctggcccagtaccccgtgttcccctggatcctgcaggactacaccagcgaggagctggacctgaacaaccccgccgtgttcagagacctgagcaagcccatcggcgtggtgaacgagaagaacgccaaggccatgagagagaagtacgagaacttcgaggaccccatgggcaccatcgacaagttccactacggcacccactacagcaacagcgccggcgtgatgcactacctgatcagagtggagcccttcaccaccctgcacatccagctgcagagcggcagattcgactgcgccgacagacagttccacagcatccccgccacctggcaggccctgatggacaacccctacgacgtgaaggagctgatccccgagttcttctacttccccgagttcctggagaaccagaaccagttcaacctgggcagactgcagatcagcaaggagctggtgaacgacgtgatcctgcccaagtgggccaagagcgccgaggacttcatctacaagcacagaaaggccctggagagcgagtacgtgagcgcccacctgcacgagtggatcgacctgatcttcggctacaagcagagaggccccgccgccgtggaggccctgaacgtgttctactactgcagctacgagggcgccgtggacctggacgccctgaccgacgagaaggagagaaaggccctggagggcatgatcaacaacttcggccagaccccctgccagctgctgaagatcaccatcagcatgaactacgtgatcggcacccacggctggctgccctacgacagaaacatcagcaactacttcaccttcatcaaggaccagaccgtgaccaaccccaagacccagagaagcatcaacggcagcttcgcccccggcctggagatcaccagcaagctgttcgtggtgagccacgacgccaagctgctgttcagcgccggctactgggacaacagcatccaggtgatgagcctgaccaagggcaagatcatcagccacatcatcagacacatggacatcgtgacctgcctggccaccgactactgcggcatccacctgatcagcggcagcagagacaccacctgcatgatctggcagatcacccagcagggcggcgtgcccgtgggcctggccagcaagcccttccagatcctgtacggccacaccaacgaggtgctgagcgtgggcatcagcaccgagctggacatggccgtgagcggcagcagagacggcaccgtgatcatccacaccatccccaacctggccatcagctgggagggccacatcgtggtgtacagcagcaccgaggagaagaccaccctgaaggacaagaacgccctgcacctgttcagcatcaacggcaagtacctgggcagccagatcctgaaggagcaggtgagcgacatctgcatcatcggcgagcacatcgtgaccggcagcatccagggcttcctgagcatcagagacctgcacagcctgaacctgagcatcaaccccctggccatgagactgcccatccactgcgtgtgcgtgaccaaggagtacagccacatcctggtgggcctggaggacggcaagctgatcgtggtgggcgtgggcaagcccgccgagatgagaagcggccagctgagcagaaagttctggggcagcagcaagagactgagccagatcagcgccggcgagaccgagtacaacacccaggacagcaagtag

SEQ ID NO: 90730 - DNA, 8085 bp, synthetic construct
  misc_feature 1..8085: note = Description of Artificial Sequence: Synthetic coding sequence
  source 1..8085: mol_type = other DNA
atggccagcagagagagactgttcgagctgtggatgctgtactgcaccaagaaggaccccgactacctgaagctgtggctggacaccttcgtgagcagctacgagcagttcctggacgtggacttcgagaagctgcccaccagagtggacgacatgccccccggcatcagcctgctgcccgacaacatcctgcaggtgctgagaatccagctgctgcagtgcgtgcagaagatggccgacggcctggaggagcagcagcaggccctgagcatcctgctggtgaagttcttcatcatcctgtgcagaaacctgagcaacgtggaggagatcggcacctgcagctacatcaactacgtgatcaccatgaccaccctgtacatccagcagctgaagagcaagaagaaggagaaggagatggccgaccagacctgcatcgaggagttcgtgatccacgccctggccttctgcgagagcctgtacgacccctacagaaactggagacacagaatcagcggcagaatcctgagcaccgtggagaagagcagacagaagtacaagcccgccagcctgaccgtggagttcgtgcccttcttctaccagtgcttccaggagagcgagcacctgaaggagagcctgaagtgctgcctgctgcacctgttcggcgccatcgtggccggcggccagagaaacgccctgcaggccatcagccccgccaccatggaggtgctgatgagagtgctggccgactgcgacagctgggaggacggcgaccccgaggaggtgggcagaaaggccgagctgaccctgaagtgcctgaccgaggtggtgcacatcctgctgagcagcaacagcgaccagagacaggtggagaccagcaccatcctggagaactacttcaagctgctgaacagcgaccacagcgccctgcccaaccagagaagaagcagacagtgggagaacagattcatcgccctgcagatcaagatgctgaacaccatcaccgccatgctggactgcaccgacagacccgtgctgcaggccatcttcctgaacagcaactgcttcgagcacctgatcagactgctgcagaactgcaaggtgttccagggccagctggactgcctggccatcagcaccatccaggccctgaccgccgtgatgaacaagagccccgccgccaaggaggtgttcaaggagagaatcggctacacccacatgctggaggtgctgaagagcctgggccagccccccctggagctgctgaaggagctgatgaacatggccgtggagggcgaccacaccagcgtgggcatcctgggcatcagcaacgtgcagcccctgctgctgctgatccagtggctgcccgagctgcagagccacgacctgcagatcttcatcagcgactggctgaagagaatctgctgcatcaacagacagagcagaaccacctgcgtgaacgccaacatgggcatcagaatcatcgagaccctggacctgcacagcagcctgcaccagacctgcgccgagaacctgatcgccatccacggcagcctgggcagccagagcgtgagcagcgaggagatcagaagactgctgagactgctgagagtggacgagagcgagagcgtgcacccctacgtgacccccgtgaccagagccatcctgaccatggccagaaagctgagcctggagagcgccctgcagtacttcaacctgagccacagcatggccggcatcagcgtgccccccatccagaagtggcccggcagcgccttcagcttcagcgcctggttctgcctggaccaggaccagctgaccctgggcatcgccaacaagggcggcaagagaaagcagctgtacagcttcttcaccggcagcggcatgggcttcgaggccttcatcacccacagcggcatgctggtggtggccgtgtgcaccaagagagagtacgccaccgtgatgctgcccgaccacagcttctgcgacagcctgtggcacaacatcaccgtggtgcacatgcccggcaagagacccttcggccagagcttcgtgtacatctacgacaacggccagcagaaggtgagcgcccccctgagattccccgccatgaacgagcccttcaccagctgctgcatcggcagcgccggccagagaaccaccacccccccccccagccagatccccgacccccccttcagcagccccatcaccccccacagaaccagcttcggcggcatcctgagcagcgccagctggggcggcaccatcgagaagagcaagctgatcaccaagctgatcagcgccggcacccaggacagcgagtggggctgccccaccagcctggagggccagctgggcagcgtgatcatcttctacgagcccctgcagcccccccaggtgaaggccctgtacctggccggccccaactgcctgagcccctggaagtgccaggagagcgacatggccgacctgcccggcaacatcctgctgtactacaccgccaaggcctgcaagaacagcatctgcctggacctgagcaccaactgcctgcacggcagactgaccggcaacaaggtggtgaactgggacatcaaggacatcatcaactgcatcggcggcctgaacgtgctgttccccctgctggagcagatcagccacttcagcgagggccagatccccgaggagaagaacgagagcaccgtgcccgagagcgtgacccccgtggagggcgactggctggtgtggaccagcaccaaggccagcgagagcagactggagagaaacctggtggccaccttcatcctgatcgtgaagcacttcatccagagacaccccatcaaccagggcaacctgatccacagccacggcgtggccaccctgggcgccctgctgcagaaggtgcccagcaccctgatggacgtgaacgtgctgatggccgtgcagctgctgatcgagcaggtgagcctggagaagaacatgcagctgctgcagcagatgtaccagtacctgctgttcgacttcagaatctggaacagaggcgacttccccttcagaatcggccacatccagtacctgagcaccatcatcaaggacagcagaagagtgttcagaaagaagtacggcgtgcagttcctgctggacaccctgagaatctactacggcaacggctgcaagtacaacgagctgagcctggacgacatcagaaccatcagaaccagcctgtacggcctgatcaagtacttcctgtgcaagggcggcagccacgaggagatccagagcatcatgggctacatcgccgccaccaacgaggaggagcagctgttcggcatcctggacgtgctgttcagcctgctgagaaccagccccaccagaggccagctgttcctgctgctgttcgagcccggcaacgccgacatcctgtacgccctgctgctgaaccagaagtacagcgacagactgagagagatcatcttcaagatcatggagcagatgctgaagtgcaccaacgtgtacgagagaagcaagcagcacatcagactgagagaggtgggctacagcggcctgggcctgctgctgaacgaggccctggtgaacaccagcctgatcaagaacctgacccaccagatcatcaacaccgaccccgtgatcaacttcaaggacctgctgagcgtggtgtacatcagccacagagcccacatcaacgtgagagtggccatctgcagaaaggtgctgcagatcctgcagttccagcccgacgccgcccaccagatcagccagcaggtgggctggcaggacaccctggtgagactgttcctgaaggccaagttcgagaacggcaacaccctgcacaagcacagcagagccgtgctgatgaaggacaacgacaagaacatgagcaccgaggacaccaagaagaacagcgacgagaagaccgacgaggagaagatcaccagcttcgccagcgccaacgtgagcagcgaccagtggagcctggaggacagacacagcctggacagcaacacccccctgttccccgaggacagcagcgtgggcgagctgagcttcaagagcgagaaccaggaggagttctggcacagcaaccccagccacctgagcctggacctgagcggcatcgacagctgcgagatgagcgacagcggcagccaggtgcccgacagcctgcccagcacccccagccccgtggagagcaccaagagcttcagcgtgcacagcgacagagagagcagcatcaccaacgacatgggcttcagcgacgacttcagcctgctggagagccaggagagatgcgaggaggagctgctgcagctgctgacccacatcctgaactacgtgatgtgcaagggcctggagaagagcgacgacgacacctggatcgagagaggccaggtgttcagcgccctgagcaagcccggcatcagcagcgagctgctgagacccagcgacgagatcaagctgaccctgctgcagaagatgctggagtgggccatcagcgagaacagagaggccaagaccaaccccgtgaccgccgagaacgccttcagactggtgctgatcatccaggacttcctgcagagcgagggcctggtgaacagcaacatgtggaccgagaagctgctggaggacatgatgctgctgttcgactgcctgagcgtgtgctacagcgagagccccgtgtgggtgaagctgagccagatccagatccagctgctgctgggcttcatcggcagaggcaacctgcaggtgtgcgccatggccagcgccaagctgaacaccctgctgcagaccaaggtgatcgagaaccaggacgaggcctgctacatcctgggcaagctggagcacgtgctgagccagagcatcaaggagcagaccgagatctacagcttcctgatccccctggtgagaaccctggtgagcaagatctacgagctgctgttcatgaacctgcacctgcccagcctgcccttcaccaacggcagcagcagcttcttcgaggacttccaggagtactgcaacagcaacgagtggcaggtgtacatcgagaagtacatcgtgccctacatgaagcagtacgaggcccacaccttctacgacggccacgagaacatggccctgtactggaaggactgctacgaggccctgatggtgaacatgcacaagagagacagagagggcggcgagagcaagctgaagttccaggagctgttcgtggagcccttcaacagaaaggccagacaggagaacctgagatacaacaacatgctgaagcagctgagcagccagcagctggccaccctgagaagatggaaggccatccagctgtacctgacctgcgagagaggcccctgggccaagagaaagcagaaccccatccactggaagctggccaacgtggagaactacagcagaatgagactgaagctggtgcccaactacaacttcaagacccacgaggaggccagcgccctgagagacaacctgggcatccagcacagccagcccagcagcgacaccctgctgctggaggtggtgaagcaggtgaaggtgagcgacatggtggaggacaagctggacctgcccgaggaggacatcaccgccagagtgaacgtggacgagaaggaggagcaggaccagaaggagaagctggtgctgatggaggactgcgagctgatcaccatcatcgacgtgatccccggcagactggagatcaccacccagcacatctacttctacgacggcagcatcgagaaggaggacggcgtgggcttcgacttcaagtggccccacagccagatcagagagatccacctgagaagatacaacctgagaagaagcgccctggagatcttccacgtggaccagagcaactacttcctgaacttcaagaaggaggtgagaaacaagatctacagcagactgctgagcctgcacagccccaacagctactacggcagcagaagcccccaggagctgttcaaggccagcggcctgacccagaagtgggtgaacagagagatcagcaacttcgactacctgatccagatcaacaccatggccggcagaacctacaacgacctggcccagtaccccgtgttcccctggatcctgcaggactacaccagcgaggagctggacctgaacaaccccgccgtgttcagagacctgagcaagcccatcggcgtggtgaacgagaagaacgccaaggccatgagagagaagtacgagaacttcgaggaccccatgggcaccatcgacaagttccactacggcacccactacagcaacagcgccggcgtgatgcactacctgatcagagtggagcccttcaccaccctgcacatccagctgcagagcggcagattcgactgcgccgacagacagttccacagcatccccgccacctggcaggccctgatggacaacccctacgacgtgaaggagctgatccccgagttcttctacttccccgagttcctggagaaccagaaccagttcaacctgggcagactgcagatcagcaaggagctggtgaacgacgtgatcctgcccaagtgggccaagagcgccgaggacttcatctacaagcacagaaaggccctggagagcgagtacgtgagcgcccacctgcacgagtggatcgacctgatcttcggctacaagcagagaggccccgccgccgtggaggccctgaacgtgttctactactgcagctacgagggcgccgtggacctggacgccctgaccgacgagaaggagagaaaggccctggagggcatgatcaacaacttcggccagaccccctgccagctgctgaaggagccccacccccccagactgagcgccgaggaggccgtgcagaagcccaccaagatcgacaccagcaccctgaacctgttccagcacctgcccgagctgaagagcttcttcatcgagggcatcagcgacggcatccccctgctgaaggccaccatccccaagaaccagtacagaagcttcatgagccagggcagccccgagctgctgatcaccatcagcatgaactacgtgatcggcacccacggctggctgccctacgacagaaacatcagcaactacttcaccttcatcaaggaccagaccgtgaccaaccccaagacccagagaagcatcaacggcagcttcgcccccggcctggagatcaccagcaagctgttcgtggtgagccacgacgccaagctgctgttcagcgccggctactgggacaacagcatccaggtgatgagcctgaccaagggcaagatcatcagccacatcatcagacacatggacatcgtgacctgcctggccaccgactactgcggcatccacctgatcagcggcagcagagacaccacctgcatgatctggcagatcacccagcagggcggcgtgcccgtgggcctggccagcaagcccttccagatcctgtacggccacaccaacgaggtgctgagcgtgggcatcagcaccgagctggacatggccgtgagcggcagcagagacggcaccgtgatcatccacaccatccagaagggccagtacatgagaaccctgagacccccctgcgagagcagcctgttcctgaccatccccaacctggccatcagctgggagggccacatcgtggtgtacagcagcaccgaggagaagaccaccctgaaggacaagaacgccctgcacctgttcagcatcaacggcaagtacctgggcagccagatcctgaaggagcaggtgagcgacatctgcatcatcggcgagcacatcgtgaccggcagcatccagggcttcctgagcatcagagacctgcacagcctgaacctgagcatcaaccccctggccatgagactgcccatccactgcgtgtgcgtgaccaaggagtacagccacatcctggtgggcctggaggacggcaagctgatcgtggtgggcgtgggcaagcccgccgagatgagaagcggccagctgagcagaaagttctggggcagcagcaagagactgagccagatcagcgccggcgagaccgagtacaacacccaggacagcaagtag

SEQ ID NO: 90731 - DNA, 7713 bp, synthetic construct
  misc_feature 1..7713: note = Description of Artificial Sequence: Synthetic coding sequence
  source 1..7713: mol_type = other DNA
atggccgccagcgagagactgtacgagctgtggctgctgtactacgcccagaaggacctgggctacctgcagcagtggctgaaggccttcgtgggcgccttcaagaagagcatcagcctgagcagcctggagcccagaagacccgaggaggccggcgccgaggtgcccctgctgcccctggacgagctgcacgtgctggccgagcagctgcaccaggccgacctggagcaggccctgctgctgctgaagctgttcatcatcctgtgcagaaacctggagaacatcgaggccggcagaggccaggtgctggtgcccagagtgctggccctgctgaccaagctggtggccgagctgaagggctgcccccccccccagggcagaggcacccagctggagaacgtggccctgcacgccctgctgctgtgcgagggcctgttcgacccctaccagacctggagaagacagagaagcggcgaggtgatcagcagcaaggagaagagcaagtacaagttcccccccgccgccctgccccaggagttcagcgccttcttccaggagagcctgcagaacgccgaccacctgccccccatcctgctgctgagactgatccacctgttctgcgccgtgctggccggcggcaaggagaacggccagatggccgtgagcgacggcagcgtgaagggcctgctgagcgtggtgagaggctggagcagaggccccgcccccgacccctgcctggtgcccctggccctggaggccctggtgggcgccgtgcacgtgctgcacgccagcagagccccccccagaggccccgagctgagagccctgctggagagctacttccacgtgctgaacgccgactggcccgccggcctgagcagcggccccgaggaggccctggtgaccctgagagtgagcatgctggacgccatccccatgatgctggcctgcgaggacagacccgtgctgcaggccaccttcctgagcaacaactgcttcgagcacctgaccagactgatccagaacagcaagctgtacctgcagagcagagccccccccgagggcgacagcgacctggccaccagactgctgaccgagcccgacgtgcagaaggtgctggaccaggacaccgacgccatcgccgtgcacgtggtgagagtgctgacctgcatcatgagcgacagccccagcgccaaggaggtgttcaaggagagaatcggctacccccacctgcaggaggtgctgcagagccacggcccccccacccacagactgctgcaggagctgctgaacatggccgtggagggcgaccacagcatgtgcccccccccccccatcagaaacgagcagcccgtgctggtgctggcccagtggctgcccagcctgcccaccgccgagctgagactgttcctggcccagagactgagatggctgtgcgacagctgccccgccagcagagccacctgcgtgcaggccggcctggtgggctgcctgctggagaccctgagcaccggcctggccctggaggccagatgccaggagcagctgctggccctgctgcaggccctgggcagagtgagcatcagacccatggagctgagacacctgctgagacccagacccggcctggacagcgagcccggcggcgccgaggccggcaaggccagacacgccggcgccgtgatcagaaccctgagcggcatggccagacaccagggccccgccagagccctgagatacttcgacctgacccccagcatggccggcatcatggtgccccccgtgcagagatggcccggccccggcttcaccttccacgcctggctgtgcctgcaccccatggacaccgcccccacccccgcccccaccagacccctgcagagaaagcagctgtacagcttcttcaccagcagcggcagcggcttcgaggccttcttcaccgccgccggcaccctggtggtggccgtgtgcaccagaaaggagtacctgaccatgagcctgcccgaggtgagcttcgccgacagcgcctggcactgcgtggccatcgtgcacgtgcccggcagaagacccttcagccagaacctggtgcacgtgtacaaggacggccacctggtgaagaccgcccccctgagatgccccagcctgagcgagcccttcagcagctgctgcatcggcagcgccggctacagaaccaccaccaccaccaccggcctgcccaccccccccgtgcccgccaccctggcctacacccaccccgccctgaccagaagccagagcgtgcccgccagcaccggcctgggctggggcagcggcctggtggcccccctgcaggagggcagcatcgacagcaccctggccggcacccaggacaccagatggggcagccccaccagcctggagggcgagctgggcgccgtggccatcttccacgaggccctgcaggccaccgccctgagaaccctgtgcaccctgggccccaacgagaccgcccccttcaagcccgagggcgagctgcacgagctgagcaccagactgctgctgcactacagcccccaggcctgcaagaacaacatctgcctggacctgagccccagccacggcctggacggcagactgaccggccacagagtggagacctgggacgtgaaggacgtggtgaactgcgtgggcggcatgggcgccctgctgcccctgctggagagagtggccgcccagcccaaggaggccgaggccggccccgccgagacccacgacctggtgggccccgagctgaccagcggccacaacacccagggcctggtgctgcccctgggcaagagcagcgaggagagaatggagagaaacgccgtggccgccttcctgctgatgctgagaaacttcctgcagggccacatggtgaaccaggagagcctggtgcagtgccagggccccgccatcatcggcgccctgctgagaaaggtgcccagctgggccatggacatgaacgtgctgatgagcgcccagctgctgatggagcaggtggccgccgagggcagcggccccctgctgtacctgctgtaccagcacctgctgttcaacttccacctgtggaccctgagcgacttcgccgtgagactgggccacatccagtacatgagcagcatcgtgagagagcacagacagaagctgagaaagaagtacggcgtgcagttcatcctggacgccctgagaacccactacagcccccagagagagagacccctggccgccgacgacctgagaaccgtgcagaccagcctgctgggcctggccagagagttcctggtgagaagcctgagcgccgacgacgtgcaggtgacccagaccatgctgagcttcctggccgccaccggcgacgacggccagatcctgagaagactgcagcagaacgagagactgcccgagagaagcagacagagactgagactgagagagtgcggcctgcagggcctggtggcctgcctgcccgagggcaccgtgagcccccagctgtgccagggcctgtacaagctgttcctgggcgccggcagcggcaacaccgccggcggcggcggcagcagcggcaccctgacccccgccagccagcccggcacccccagccccctggacggccccagacccttccccgccgcccccggcagacacagcagcagcctgagcaacgtgctggaggacggcagcctgcccgagcccaccatcagcggcgacgacaccagcaacaccagcaacccccagcagaccagcgaggaggagctgtgcaacctgctgaccaacgtgctgttcagcgtgacctggagaggcgtggagggcagcgacgaggccgcctggagagagagaggccaggtgttcagcgtgctgacccagctgggcgccagcgccaccctggtgagaccccccgactgcatcaagagaagcctgctggagatgatgctggagagcgccctgaccgacatcaaggaggcccccgtgggcgtgctggccagcctgacccagcaggccctgtggctgctgagactgctgcaggacttcctgtgcgccgagggccacggcaaccaggagctgtggagcgagaagctgttcgagggcgtgtgcagcctgctggacagactgggcgcctggccccacctggccaacggcaccgccgacctgagagagatggcccagatcggcctgagactggtgctgggctacatcctgctggaggacccccagctgcacgcccaggcctacgtgagactgcacatgctgctgcagaccgccgtgcccgccagaagagaggaggcctgctacgtgctgagcaagctggaggccgccctgggcagagtgctgaacaccagcagcctggagagcgccaccgacgaggccggcagccccctggccgccgccgccgccgccgccgccgccgagagatgcagctggctggtgcccctggtgagaaccctgctggacagagcctacgagcccctgggcctgcagtggggcctgcccagcctgccccccaccaacggcagccccaccttcttcgaggacttccaggccttctgcgccacccccgagtggagacacttcatcgacaagcaggtgcagcccaccatgagccagttcgagatggacacctacgccaagagccacgacctgatgagcggcttctggaacgcctgctacgacatgctgatgagcagcggccagagaagacagtgggagagagcccagagcagaagagccttccaggagctggtgctggagcccgcccagagaagagccagactggagggcctgagatacaccgccgtgctgaagcagcaggccacccagcacagcatggccctgctgcactggggcgccctgtggagacagctggccagcccctgcggcgcctgggccctgagagacacccccatccccagatggaagctgagcagcgccgagacctacagcagaatgagactgaagctggtgcccaaccaccacttcgacccccacctggaggccagcgccctgagagacaacctgggcgaggtgcccctgacccccaccgaggaggccagcctgcccctggccgtgaccaaggaggccaaggtgagcaccccccccgagctgctgcaggaggaccagctgggcgaggacgagctggccgagctggagacccccatggaggccgccgagctggacgagcagagagagaagctggtgctgagcgccgagtgccagctggtgaccgtggtggccgtggtgcccggcctgctggaggtgaccacccagaacgtgtacttctacgacggcagcaccgagagagtggagaccgaggagggcatcggctacgacttcagaagacccctggcccagctgagagaggtgcacctgagaagattcaacctgagaagaagcgccctggagctgttcttcatcgaccaggccaactacttcctgaacttcccctgcaaggtgggcaccacccccgtgagcagccccagccagacccccagaccccagcccggccccatccccccccacacccaggtgagaaaccaggtgtacagctggctgctgagactgagaccccccagccagggctacctgagcagcagaagcccccaggagatgctgagagccagcggcctgacccagaagtgggtgcagagagagatcagcaacttcgagtacctgatgcagctgaacaccatcgccggcagaacctacaacgacctgagccagtaccccgtgttcccctgggtgctgcaggactacgtgagccccaccctggacctgagcaaccccgccgtgttcagagacctgagcaagcccatcggcgtggtgaaccccaagcacgcccagctggtgagagagaagtacgagagcttcgaggaccccgccggcaccatcgacaagttccactacggcacccactacagcaacgccgccggcgtgatgcactacctgatcagagtggagcccttcaccagcctgcacgtgcagctgcagagcggcagattcgactgcagcgacagacagttccacagcgtggccgccgcctggcaggccagactggagagccccgccgacgtgaaggagctgatccccgagttcttctacttccccgacttcctggagaaccagaacggcttcgacctgggctgcctgcagctgaccaacgagaaggtgggcgacgtggtgctgcccccctgggccagcagccccgaggacttcatccagcagcacagacaggccctggagagcgagtacgtgagcgcccacctgcacgagtggatcgacctgatcttcggctacaagcagagaggccccgccgccgaggaggccctgaacgtgttctactactgcacctacgagggcgccgtggacctggaccacgtgaccgacgagagagagagaaaggccctggagggcatcatcagcaacttcggccagaccccctgccagctgctgaaggagccccaccccaccagactgagcgccgaggaggccgcccacagactggccagactggacaccaacagccccagcatcttccagcacctggacgagctgaaggccttcttcgccgaggtggtgagcgacggcgtgcccctggtgctggccctggtgccccacagacagccccacagcttcatcacccagggcagccccgacctgctggtgaccgtgagcgccagcggcctgctgggcacccacagctggctgccctacgacagaaacatcagcaactacttcagcttcagcaaggaccccaccatgggcagccacaagacccagagactgctgagcggcccctgggtgcccggcagcggcgtgagcggccaggccctggccgtggcccccgacggcaagctgctgttcagcggcggccactgggacggcagcctgagagtgaccgccctgcccagaggcaagctgctgagccagctgagctgccacctggacgtggtgacctgcctggccctggacacctgcggcatctacctgatcagcggcagcagagacaccacctgcatggtgtggagactgctgcaccagggcggcctgagcgtgggcctggcccccaagcccgtgcaggtgctgtacggccacggcgccgccgtgagctgcgtggccatcagcaccgagctggacatggccgtgagcggcagcgaggacggcaccgtgatcatccacaccgtgagaagaggccagttcgtggccgccctgagacccctgggcgccaccttccccggccccatcttccacctggccctgggcagcgagggccagatcgtggtgcagagcagcgcctgggagagacccggcgcccaggtgacctacagcctgcacctgtacagcgtgaacggcaagctgagagccagcctgcccctggccgagcagcccaccgccctgaccgtgaccgaggacttcgtgctgctgggcaccgcccagtgcgccctgcacatcctgcagctgaacaccctgctgcccgccgccccccccctgcccatgaaggtggccatcagaagcgtggccgtgaccaaggagagaagccacgtgctggtgggcctggaggacggcaagctgatcgtggtggtggccggccagcccagcgaggtgagaagcagccagttcgccagaaagctgtggagaagcagcagaagaatcagccaggtgagcagcggcgagaccgagtacaaccccaccgaggccagatag

SEQ ID NO: 90732 - DNA, 1848 bp, synthetic construct
  misc_feature 1..1848: note = Description of Artificial Sequence: Synthetic coding sequence
  source 1..1848: mol_type = other DNA
atggagcccgccctgggccccggcgtgcagaaggacctgggctacctgcagcagtggctgaaggccttcgtgggcgccttcaagaagagcatcagcctgagcagcctggagcccagaagacccgaggaggccggcgccgaggtgcccctgctgcccctggacgagctgcacgtgctggccgagcagctgcaccaggccgacctggagcaggccctgctgctgctgaagctgttcatcatcctgtgcagaaacctggagaacatcgaggccggcagaggccaggtgctggtgcccagagtgctggccctgctgaccaagctggtggccgagctgaagggctgcccccccccccagggcagaggcacccagctggagaacgtggccctgcacgccctgctgctgtgcgagggcctgttcgacccctaccagacctggagaagacagagaagcggcgaggtgatcagcagcaaggagaagagcaagtacaagttcccccccgccgccctgccccaggagttcagcgccttcttccaggagagcctgcagaacgccgaccacctgccccccatcctgctgctgagactgatccacctgttctgcgccgtgctggccggcggcaaggagaacggccagatggccgtgagcgacggcagcgtgaagggcctgctgagcgtggtgagaggctggagcagaggccccgcccccgacccctgcctggtgcccctggccctggaggccctggtgggcgccgtgcacgtgctgcacgccagcagagccccccccagaggccccgagctgagagccctgctggagagctacttccacgtgctgaacgccgactggcccgccggcctgagcagcggccccgaggaggccctggtgaccctgagagtgagcatgctggacgccatccccatgatgctggcctgcgaggacagacccgtgctgcaggccaccttcctgagcaacaactgcttcgagcacctgaccagactgatccagaacagcaaggtgctggaccaggacaccgacgccatcgccgtgcacgtggtgagagtgctgacctgcatcatgagcgacagccccagcgccaaggaggtgttcaaggagagaatcggctacccccacctgcaggaggtgctgcagagccacggcccccccacccacagactgctgcaggagctgctgaacatggccgtggagggcgaccacagcatgtgcccccccccccccatcagaaacgagcagcccgtgctggtgctggcccagtggctgcccagcctgcccaccgccgagctgagactgttcctggcccagagactgagatggctgtgcgacagctgccccgccagcagagccacctgcgtgcaggccggcctggtgggctgcctgctggagaccctgagcaccggcctggccctggaggccagatgccaggagcagctgctggccctgctgcaggccctgggcagagtgagcatcagacccatggagctgagacacctgctgagacccagacccggcctggacagcgagcccggcggcgccgaggccggcaaggccagacacgccggcgccgtgatcagaaccctgagcggcatggccagacaccagggccccgccagagccctgagatacttcgacctgacccccagcatggccggcatcatggtgccccccgtgcagagatggcccggccccggcttcaccttccacgcctggctgtgcctgcaccccatggacaccgcccccacccccgccccccccaccctgcccagcagcggcatcggcggcagatgctaccccctgagagactggagagccgaggtgccccccctggccggctag

SEQ ID NO: 90733 - DNA, 3012 bp, synthetic construct
  misc_feature 1..3012: note = Description of Artificial Sequence: Synthetic coding sequence
  source 1..3012: mol_type = other DNA
atgagccagttcgagatggacacctacgccaagagccacgacctgatgagcggcttctggaacgcctgctacgacatgctgatgagcagcggccagagaagacagtgggagagagcccagagcagaagagccttccaggagctggtgctggagcccgcccagagaagagccagactggagggcctgagatacaccgccgtgctgaagcagcaggccacccagcacagcatggccctgctgcactggggcgccctgtggagacagctggccagcccctgcggcgcctgggccctgagagacacccccatccccagatggaagctgagcagcgccgagacctacagcagaatgagactgaagctggtgcccaaccaccacttcgacccccacctggaggccagcgccctgagagacaacctgggcgaggtgcccctgacccccaccgaggaggccagcctgcccctggccgtgaccaaggaggccaaggtgagcaccccccccgagctgctgcaggaggaccagctgggcgaggacgagctggccgagctggagacccccatggaggccgccgagctggacgagcagagagagaagctggtgctgagcgccgagtgccagctggtgaccgtggtggccgtggtgcccggcctgctggaggtgaccacccagaacgtgtacttctacgacggcagcaccgagagagtggagaccgaggagggcatcggctacgacttcagaagacccctggcccagctgagagaggtgcacctgagaagattcaacctgagaagaagcgccctggagctgttcttcatcgaccaggccaactacttcctgaacttcccctgcaaggtgggcaccacccccgtgagcagccccagccagacccccagaccccagcccggccccatccccccccacacccaggtgagaaaccaggtgtacagctggctgctgagactgagaccccccagccagggctacctgagcagcagaagcccccaggagatgctgagagccagcggcctgacccagaagtgggtgcagagagagatcagcaacttcgagtacctgatgcagctgaacaccatcgccggcagaacctacaacgacctgagccagtaccccgtgttcccctgggtgctgcaggactacgtgagccccaccctggacctgagcaaccccgccgtgttcagagacctgagcaagcccatcggcgtggtgaaccccaagcacgcccagctggtgagagagaagtacgagagcttcgaggaccccgccggcaccatcgacaagttccactacggcacccactacagcaacgccgccggcgtgatgcactacctgatcagagtggagcccttcaccagcctgcacgtgcagctgcagagcggcagattcgactgcagcgacagacagttccacagcgtggccgccgcctggcaggccagactggagagccccgccgacgtgaaggagctgatccccgagttcttctacttccccgacttcctggagaaccagaacggcttcgacctgggctgcctgcagctgaccaacgagaaggtgggcgacgtggtgctgcccccctgggccagcagccccgaggacttcatccagcagcacagacaggccctggagagcgagtacgtgagcgcccacctgcacgagtggatcgacctgatcttcggctacaagcagagaggccccgccgccgaggaggccctgaacgtgttctactactgcacctacgagggcgccgtggacctggaccacgtgaccgacgagagagagagaaaggccctggagggcatcatcagcaacttcggccagaccccctgccagctgctgaaggagccccaccccaccagactgagcgccgaggaggccgcccacagactggccagactggacaccaacagccccagcatcttccagcacctggacgagctgaaggccttcttcgccgaggtgaccgtgagcgccagcggcctgctgggcacccacagctggctgccctacgacagaaacatcagcaactacttcagcttcagcaaggaccccaccatgggcagccacaagacccagagactgctgagcggcccctgggtgcccggcagcggcgtgagcggccaggccctggccgtggcccccgacggcaagctgctgttcagcggcggccactgggacggcagcctgagagtgaccgccctgcccagaggcaagctgctgagccagctgagctgccacctggacgtggtgacctgcctggccctggacacctgcggcatctacctgatcagcggcagcagagacaccacctgcatggtgtggagactgctgcaccagggcggcctgagcgtgggcctggcccccaagcccgtgcaggtgctgtacggccacggcgccgccgtgagctgcgtggccatcagcaccgagctggacatggccgtgagcggcagcgaggacggcaccgtgatcatccacaccgtgagaagaggccagttcgtggccgccctgagacccctgggcgccaccttccccggccccatcttccacctggccctgggcagcgagggccagatcgtggtgcagagcagcgcctgggagagacccggcgcccaggtgacctacagcctgcacctgtacagcgtgaacggcaagctgagagccagcctgcccctggccgagcagcccaccgccctgaccgtgaccgaggacttcgtgctgctgggcaccgcccagtgcgccctgcacatcctgcagctgaacaccctgctgcccgccgccccccccctgcccatgaaggtggccatcagaagcgtggccgtgaccaaggagagaagccacgtgctggtgggcctggaggacggcaagctgatcgtggtggtggccggccagcccagcgaggtgagaagcagccagttcgccagaaagctgtggagaagcagcagaagaatcagccaggtgagcagcggcgagaccgagtacaaccccaccgaggccagatag

SEQ ID NO: 90734 - DNA, 2094 bp, synthetic construct
  misc_feature 1..2094: note = Description of Artificial Sequence: Synthetic coding sequence
  source 1..2094: mol_type = other DNA
atgctgagagccagcggcctgacccagaagtgggtgcagagagagatcagcaacttcgagtacctgatgcagctgaacaccatcgccggcagaacctacaacgacctgagccagtaccccgtgttcccctgggtgctgcaggactacgtgagccccaccctggacctgagcaaccccgccgtgttcagagacctgagcaagcccatcggcgtggtgaaccccaagcacgcccagctggtgagagagaagtacgagagcttcgaggaccccgccggcaccatcgacaagttccactacggcacccactacagcaacgccgccggcgtgatgcactacctgatcagagtggagcccttcaccagcctgcacgtgcagctgcagagcggcagattcgactgcagcgacagacagttccacagcgtggccgccgcctggcaggccagactggagagccccgccgacgtgaaggagctgatccccgagttcttctacttccccgacttcctggagaaccagaacggcttcgacctgggctgcctgcagctgaccaacgagaaggtgggcgacgtggtgctgcccccctgggccagcagccccgaggacttcatccagcagcacagacaggccctggagagcgagtacgtgagcgcccacctgcacgagtggatcgacctgatcttcggctacaagcagagaggccccgccgccgaggaggccctgaacgtgttctactactgcacctacgagggcgccgtggacctggaccacgtgaccgacgagagagagagaaaggccctggagggcatcatcagcaacttcggccagaccccctgccagctgctgaaggagccccaccccaccagactgagcgccgaggaggccgcccacagactggccagactggacaccaacagccccagcatcttccagcacctggacgagctgaaggccttcttcgccgaggtggtgagcgacggcgtgcccctggtgctggccctggtgccccacagacagccccacagcttcatcacccagggcagccccgacctgctggtgaccgtgagcgccagcggcctgctgggcacccacagctggctgccctacgacagaaacatcagcaactacttcagcttcagcaaggaccccaccatgggcagccacaagacccagagactgctgagcggcccctgggtgcccggcagcggcgtgagcggccaggccctggccgtggcccccgacggcaagctgctgttcagcggcggccactgggacggcagcctgagagtgaccgccctgcccagaggcaagctgctgagccagctgagctgccacctggacgtggtgacctgcctggccctggacacctgcggcatctacctgatcagcggcagcagagacaccacctgcatggtgtggagactgctgcaccagggcggcctgagcgtgggcctggcccccaagcccgtgcaggtgctgtacggccacggcgccgccgtgagctgcgtggccatcagcaccgagctggacatggccgtgagcggcagcgaggacggcaccgtgatcatccacaccgtgagaagaggccagttcgtggccgccctgagacccctgggcgccaccttccccggccccatcttccacctggccctgggcagcgagggccagatcgtggtgcagagcagcgcctgggagagacccggcgcccaggtgacctacagcctgcacctgtacagcgtgaacggcaagctgagagccagcctgcccctggccgagcagcccaccgccctgaccgtgaccgaggacttcgtgctgctgggcaccgcccagtgcgccctgcacatcctgcagctgaacaccctgctgcccgccgccccccccctgcccatgaaggtggccatcagaagcgtggccgtgaccaaggagagaagccacgtgctggtgggcctggaggacggcaagctgatcgtggtggtggccggccagcccagcgaggtgagaagcagccagttcgccagaaagctgtggagaagcagcagaagaatcagccaggtgagcagcggcgagaccgagtacaaccccaccgaggccagatag

SEQ ID NO: 90735 - DNA, 8265 bp, synthetic construct
  misc_feature 1..8265: note = Description of Artificial Sequence: Synthetic coding sequence
  source 1..8265: mol_type = other DNA
atggccgccagcgagagactgtacgagctgtggctgctgtactacgcccagaaggacctgggctacctgcagcagtggctgaaggccttcgtgggcgccttcaagaagagcatcagcctgagcagcctggagcccagaagacccgaggaggccggcgccgaggtgcccctgctgcccctggacgagctgcacgtgctggccgagcagctgcaccaggccgacctggagcaggccctgctgctgctgaagctgttcatcatcctgtgcagaaacctggagaacatcgaggccggcagaggccaggtgctggtgcccagagtgctggccctgctgaccaagctggtggccgagctgaagggctgcccccccccccagggcagaggcacccagctggagaacgtggccctgcacgccctgctgctgtgcgagggcctgttcgacccctaccagacctggagaagacagagaagcggcgaggtgatcagcagcaaggagaagagcaagtacaagttcccccccgccgccctgccccaggagttcagcgccttcttccaggagagcctgcagaacgccgaccacctgccccccatcctgctgctgagactgatccacctgttctgcgccgtgctggccggcggcaaggagaacggccagatggccgtgagcgacggcagcgtgaagggcctgctgagcgtggtgagaggctggagcagaggccccgcccccgacccctgcctggtgcccctggccctggaggccctggtgggcgccgtgcacgtgctgcacgccagcagagccccccccagaggccccgagctgagagccctgctggagagctacttccacgtgctgaacgccgactggcccgccggcctgagcagcggccccgaggaggccctggtgaccctgagagtgagcatgctggacgccatccccatgatgctggcctgcgaggacagacccgtgctgcaggccaccttcctgagcaacaactgcttcgagcacctgaccagactgatccagaacagcaagctgtacctgcagagcagagccccccccgagggcgacagcgacctggccaccagactgctgaccgagcccgacgtgcagaaggtgctggaccaggacaccgacgccatcgccgtgcacgtggtgagagtgctgacctgcatcatgagcgacagccccagcgccaaggaggtgttcaaggagagaatcggctacccccacctgcaggaggtgctgcagagccacggcccccccacccacagactgctgcaggagctgctgaacatggccgtggagggcgaccacagcatgtgcccccccccccccatcagaaacgagcagcccgtgctggtgctggcccagtggctgcccagcctgcccaccgccgagctgagactgttcctggcccagagactgagatggctgtgcgacagctgccccgccagcagagccacctgcgtgcaggccggcctggtgggctgcctgctggagaccctgagcaccggcctggccctggaggccagatgccaggagcagctgctggccctgctgcaggccctgggcagagtgagcatcagacccatggagctgagacacctgctgagacccagacccggcctggacagcgagcccggcggcgccgaggccggcaaggccagacacgccggcgccgtgatcagaaccctgagcggcatggccagacaccagggccccgccagagccctgagatacttcgacctgacccccagcatggccggcatcatggtgccccccgtgcagagatggcccggccccggcttcaccttccacgcctggctgtgcctgcaccccatggacaccgcccccacccccgcccccaccagacccctgcagagaaagcagctgtacagcttcttcaccagcagcggcagcggcttcgaggccttcttcaccgccgccggcaccctggtggtggccgtgtgcaccagaaaggagtacctgaccatgagcctgcccgaggtgagcttcgccgacagcgcctggcactgcgtggccatcgtgcacgtgcccggcagaagacccttcagccagaacctggtgcacgtgtacaaggacggccacctggtgaagaccgcccccctgagatgccccagcctgagcgagcccttcagcagctgctgcatcggcagcgccggctacagaaccaccaccaccaccaccggcctgcccaccccccccgtgcccgccaccctggcctacacccaccccgccctgaccagaagccagagcgtgcccgccagcaccggcctgggctggggcagcggcctggtggcccccctgcaggagggcagcatcgacagcaccctggccggcacccaggacaccagatggggcagccccaccagcctggagggcgagctgggcgccgtggccatcttccacgaggccctgcaggccaccgccctgagaaccctgtgcaccctgggccccaacgagaccgcccccttcaagcccgagggcgagctgcacgagctgagcaccagactgctgctgcactacagcccccaggcctgcaagaacaacatctgcctggacctgagccccagccacggcctggacggcagactgaccggccacagagtggagacctgggacgtgaaggacgtggtgaactgcgtgggcggcatgggcgccctgctgcccctgctggagagagtggccgcccagcccaaggaggccgaggccggccccgccgagacccacgacctggtgggccccgagctgaccagcggccacaacacccagggcctggtgctgcccctgggcaagagcagcgaggagagaatggagagaaacgccgtggccgccttcctgctgatgctgagaaacttcctgcagggccacatggtgaaccaggagagcctggtgcagtgccagggccccgccatcatcggcgccctgctgagaaaggtgcccagctgggccatggacatgaacgtgctgatgagcgcccagctgctgatggagcaggtggccgccgagggcagcggccccctgctgtacctgctgtaccagcacctgctgttcaacttccacctgtggaccctgagcgacttcgccgtgagactgggccacatccagtacatgagcagcatcgtgagagagcacagacagaagctgagaaagaagtacggcgtgcagttcatcctggacgccctgagaacccactacagcccccagagagagagacccctggccgccgacgacctgagaaccgtgcagaccagcctgctgggcctggccagagagttcctggtgagaagcctgagcgccgacgacgtgcaggtgacccagaccatgctgagcttcctggccgccaccggcgacgacggccaggccgtgggcgccctggacctgctgctggccctgctgcacggcagcctggtgcaggagagcctggccgtgttcctgctggagcccggcaacctggaggtgctgctggccctgctggtgagacccggcagcctgcccctgctgcccgacagagtgtgcaagatcctgagaagactgcagcagaacgagagactgcccgagagaagcagacagagactgagactgagagagtgcggcctgcagggcctggtggcctgcctgcccgagggcaccgtgagcccccagctgtgccagggcctgtacaagctgttcctgggcgccgactgcctgaacctgagcgacctgctggccgtggtgcagctgagcctgcaggccgacctgagcgtgagactggacatctgcagacagctgttccacctgatctacggccagcccgacgtggtgagactgctggccagacaggccggctggcaggacgtgctgaccagactgtacgtgctggaggccgccaccgccggcagccccccccccagcagccccgagagccccaccagccccaagcccgccccccccaagccccccaccgagagccccgccgagcccagcgacgtgttcctgcccagcgaggccccctgccccgaccccgacggcttctaccacgccctgagccccttctgcacccccttcgacctgggcctggagagaagcagcgtgggcagcggcaacaccgccggcggcggcggcagcagcggcaccctgacccccgccagccagcccggcacccccagccccctggacggccccagacccttccccgccgcccccggcagacacagcagcagcctgagcaacgtgctggaggacggcagcctgcccgagcccaccatcagcggcgacgacaccagcaacaccagcaacccccagcagaccagcgaggaggagctgtgcaacctgctgaccaacgtgctgttcagcgtgacctggagaggcgtggagggcagcgacgaggccgcctggagagagagaggccaggtgttcagcgtgctgacccagctgggcgccagcgccaccctggtgagaccccccgactgcatcaagagaagcctgctggagatgatgctggagagcgccctgaccgacatcaaggaggcccccgtgggcgtgctggccagcctgacccagcaggccctgtggctgctgagactgctgcaggacttcctgtgcgccgagggccacggcaaccaggagctgtggagcgagaagctgttcgagggcgtgtgcagcctgctggacagactgggcgcctggccccacctggccaacggcaccgccgacctgagagagatggcccagatcggcctgagactggtgctgggctacatcctgctggaggacccccagctgcacgcccaggcctacgtgagactgcacatgctgctgcagaccgccgtgcccgccagaagagaggaggcctgctacgtgctgagcaagctggaggccgccctgggcagagtgctgaacaccagcagcctggagagcgccaccgacgaggccggcagccccctggccgccgccgccgccgccgccgccgccgagagatgcagctggctggtgcccctggtgagaaccctgctggacagagcctacgagcccctgggcctgcagtggggcctgcccagcctgccccccaccaacggcagccccaccttcttcgaggacttccaggccttctgcgccacccccgagtggagacacttcatcgacaagcaggtgcagcccaccatgagccagttcgagatggacacctacgccaagagccacgacctgatgagcggcttctggaacgcctgctacgacatgctgatgagcagcggccagagaagacagtgggagagagcccagagcagaagagccttccaggagctggtgctggagcccgcccagagaagagccagactggagggcctgagatacaccgccgtgctgaagcagcaggccacccagcacagcatggccctgctgcactggggcgccctgtggagacagctggccagcccctgcggcgcctgggccctgagagacacccccatccccagatggaagctgagcagcgccgagacctacagcagaatgagactgaagctggtgcccaaccaccacttcgacccccacctggaggccagcgccctgagagacaacctgggcgaggtgcccctgacccccaccgaggaggccagcctgcccctggccgtgaccaaggaggccaaggtgagcaccccccccgagctgctgcaggaggaccagctgggcgaggacgagctggccgagctggagacccccatggaggccgccgagctggacgagcagagagagaagctggtgctgagcgccgagtgccagctggtgaccgtggtggccgtggtgcccggcctgctggaggtgaccacccagaacgtgtacttctacgacggcagcaccgagagagtggagaccgaggagggcatcggctacgacttcagaagacccctggcccagctgagagaggtgcacctgagaagattcaacctgagaagaagcgccctggagctgttcttcatcgaccaggccaactacttcctgaacttcccctgcaaggtgggcaccacccccgtgagcagccccagccagacccccagaccccagcccggccccatccccccccacacccaggtgagaaaccaggtgtacagctggctgctgagactgagaccccccagccagggctacctgagcagcagaagcccccaggagatgctgagagccagcggcctgacccagaagtgggtgcagagagagatcagcaacttcgagtacctgatgcagctgaacaccatcgccggcagaacctacaacgacctgagccagtaccccgtgttcccctgggtgctgcaggactacgtgagccccaccctggacctgagcaaccccgccgtgttcagagacctgagcaagcccatcggcgtggtgaaccccaagcacgcccagctggtgagagagaagtacgagagcttcgaggaccccgccggcaccatcgacaagttccactacggcacccactacagcaacgccgccggcgtgatgcactacctgatcagagtggagcccttcaccagcctgcacgtgcagctgcagagcggcagattcgactgcagcgacagacagttccacagcgtggccgccgcctggcaggccagactggagagccccgccgacgtgaaggagctgatccccgagttcttctacttccccgacttcctggagaaccagaacggcttcgacctgggctgcctgcagctgaccaacgagaaggtgggcgacgtggtgctgcccccctgggccagcagccccgaggacttcatccagcagcacagacaggccctggagagcgagtacgtgagcgcccacctgcacgagtggatcgacctgatcttcggctacaagcagagaggccccgccgccgaggaggccctgaacgtgttctactactgcacctacgagggcgccgtggacctggaccacgtgaccgacgagagagagagaaaggccctggagggcatcatcagcaacttcggccagaccccctgccagctgctgaaggagccccaccccaccagactgagcgccgaggaggccgcccacagactggccagactggacaccaacagccccagcatcttccagcacctggacgagctgaaggccttcttcgccgaggtggtgagcgacggcgtgcccctggtgctggccctggtgccccacagacagccccacagcttcatcacccagggcagccccgacctgctggtgaccgtgagcgccagcggcctgctgggcacccacagctggctgccctacgacagaaacatcagcaactacttcagcttcagcaaggaccccaccatgggcagccacaagacccagagactgctgagcggcccctgggtgcccggcagcggcgtgagcggccaggccctggccgtggcccccgacggcaagctgctgttcagcggcggccactgggacggcagcctgagagtgaccgccctgcccagaggcaagctgctgagccagctgagctgccacctggacgtggtgacctgcctggccctggacacctgcggcatctacctgatcagcggcagcagagacaccacctgcatggtgtggagactgctgcaccagggcggcctgagcgtgggcctggcccccaagcccgtgcaggtgctgtacggccacggcgccgccgtgagctgcgtggccatcagcaccgagctggacatggccgtgagcggcagcgaggacggcaccgtgatcatccacaccgtgagaagaggccagttcgtggccgccctgagacccctgggcgccaccttccccggccccatcttccacctggccctgggcagcgagggccagatcgtggtgcagagcagcgcctgggagagacccggcgcccaggtgacctacagcctgcacctgtacagcgtgaacggcaagctgagagccagcctgcccctggccgagcagcccaccgccctgaccgtgaccgaggacttcgtgctgctgggcaccgcccagtgcgccctgcacatcctgcagctgaacaccctgctgcccgccgccccccccctgcccatgaaggtggccatcagaagcgtggccgtgaccaaggagagaagccacgtgctggtgggcctggaggacggcaagctgatcgtggtggtggccggccagcccagcgaggtgagaagcagccagttcgccagaaagctgtggagaagcagcagaagaatcagccaggtgagcagcggcgagaccgagtacaaccccaccgaggccagatag

SEQ ID NO: 90736 - DNA, 7116 bp, synthetic construct
  misc_feature 1..7116: note = Description of Artificial Sequence: Synthetic coding sequence
  source 1..7116: mol_type = other DNA
atggccgcccccgagagcggccccgccctgagccccggcaccgccgagggcgaggaggagaccatcctgtacgacctgctggtgaacaccgagtggccccccgagaccgaggtgcagcccagaggcaaccagaagcacggcgccagcttcatcatcaccaaggccatcagagacagactgctgttcctgagacagtacatctggtacagccccgcccccttcctgctgcccgacggcctggtgagactggtgaacaagcagatcaactggcacctggtgctggccagcaacggcaagctgctggccgccgtgcaggaccagtgcgtggagatcagaagcgccaaggacgacttcaccagcatcatcggcaagtgccaggtgcccaaggaccccaagccccagtggagaagagtggcctggagctacgactgcaccctgctggcctacgccgagagcaccggcaccgtgagagtgttcgacctgatgggcagcgagctgttcgtgatcagccccgccagcagcttcatcggcgacctgagctacgccatcgccggcctgatcttcctggagtacaaggccagcgcccagtggagcgccgagctgctggtgatcaactacagaggcgagctgagaagctacctggtgagcgtgggcaccaaccagagctaccaggagagccactgcttcagcttcagcagccactacccccacggcatcaacaccgccatctaccaccccggccacagactgctgctggtgggcggctgcgagaccgccgaggtgggcatgagcaaggccagcagctgcggcctgagcgcctggagagtgctgagcggcagcccctactacaagcaggtgaccaacggcggcgacggcgtgaccgccgtgcccaagaccctgggcctgctgagaatgctgagcgtgaagttctacagcagacagggccaggagcaggacggcatcttcaagatgagcctgagccccgacggcatgctgctggccgccatccacttcagcggcaagctgagcatctgggccatccccagcctgaagcagcagggcgagtggggccagaacgagcagcccggctacgacgacctgaaccccgactggagactgagcaccgagaagagaaagaagatcaaggacaaggagagcttctaccccctgatcgacgtgaactggtgggccgacagcgccgtgaccctggccagatgcagcggcgccctgaccgtgagcagcgtgaagaccctgaagaacctgctgggcaagagctgcgagtggttcgagcccagcccccaggtgaccgccacccacgacggcggcttcctgagcctggagtgcgagatcaagctggcccccaagagaagcagactggagaccagagccggcgaggaggacgagggcgaggaggacagcgacagcgactacgagatcagcgccaaggccagatacttcggctacatcaagcagggcctgtacctggtgaccgagatggagagattcgccccccccagaaagagacccagaaccatcaccaagaactacagactggtgagcctgagaagcaccacccccgaggagctgtaccagagaaagatcgagagcgaggagtacgaggaggccctgagcctggcccacacctacggcctggacaccgacctggtgtaccagagacagtggagaaagagcgccgtgaacgtggccagcatccagaactacctgagcaagatcaagaagagaagctgggtgctgcacgagtgcctggagagagtgcccgagaacgtggacgccgccaaggagctgctgcagtacggcctgaagggcaccgacctggaggccctgctggccatcggcaagggcgccgacgacggcagattcaccctgcccggcgagatcgacatcgacagcatcagctacgaggagctgagcccccccgacgaggagcccgccaagaacaagaaggagaaggagctgaagaagagacaggagctgctgaagctggtgaacttcagcaagctgaccctggagcagaaggagctgtgcagatgcagaagaaagctgctgacctacctggacagactggccacctacgaggagatcctgggcgtgccccacgccagcgagcagagatacgacgccgagttcttcaagaagttcagaaaccagaacatcgtgctgagcgccagaacctacgcccaggagagcaacgtgcaggccctggagatcctgttcacctaccacggcagcgacctgctgccccacagactggccatcctgagcaacttccccgagaccaccagcccccacgagtacagcgtgctgctgcccgaggcctgcttcaacggcgacagcctgatgatcatcccctggcacgagcacaagcacagagccaaggactggtgcgaggagctggcctgcagaatggtggtggagcccaacctgcaggacgagagcgagttcctgtacgccgcccagcccgagctgctgagattcagaatgacccagctgaccgtggagaaggtgatggactggtaccagaccagagccgaggagatcgagcactacgccagacaggtggactgcgccctgagcctgatcagactgggcatggagagaaacatccccggcctgctggtgctgtgcgacaacctggtgaccctggagaccctggtgtacgaggccagatgcgacgtgaccctgaccctgaaggagctgcagcagatgaaggacatcgagaagctgagactgctgatgaacagctgcagcgaggacaagtacgtgaccagcgcctaccagtggatggtgcccttcctgcacagatgcgagaagcagagccccggcgtggccaacgagctgctgaaggagtacctggtgaccctggccaagggcgacctgaagttccccctgaagatcttccagcacagcaagcccgacctgcagcagaagatcatccccgaccaggaccagctgatggccatcgccctggagtgcatctacacctgcgagagaaacgaccagctgtgcctgtgctacgacctgctggagtgcctgcccgagagaggctacggcgacaagaccgaggccaccaccaagctgcacgacatggtggaccagctggagcagatcctgagcgtgagcgagctgctggagaagcacggcctggagaagcccatcagcttcgtgaagaacacccagagcagcagcgaggaggccagaaagctgatggtgagactgaccagacacaccggcagaaagcagccccccgtgagcgagagccactggagaaccctgctgcaggacatgctgaccatgcagcagaacgtgtacacctgcctggacagcgacgcctgctacgagatcttcaccgagagcctgctgtgcagcagcagactggagaacatccacctggccggccagatgatgcactgcagcgcctgcagcgagaacccccccgccggcatcgcccacaagggcaagccccactacagagtgagctacgagaagagcatcgacctggtgctggccgccagcagagagtacttcaacagcagcaccaacctgaccgacagctgcatggacctggccagatgctgcctgcagctgatcaccgacagaccccccgccatccaggaggagctggacctgatccaggccgtgggctgcctggaggagttcggcgtgaagatcctgcccctgcaggtgagactgtgccccgacagaatcagcctgatcaaggagtgcatcagccagagccccacctgctacaagcagagcaccaagctgctgggcctggccgagctgctgagagtggccggcgagaaccccgaggagagaagaggccaggtgctgatcctgctggtggagcaggccctgagattccacgactacaaggccgccagcatgcactgccaggagctgatggccaccggctaccccaagagctgggacgtgtgcagccagctgggccagagcgagggctaccaggacctggccaccagacaggagctgatggccttcgccctgacccactgcccccccagcagcatcgagctgctgctggccgccagcagcagcctgcagaccgagatcctgtaccagagagtgaacttccagatccaccacgagggcggcgagaacatcagcgccagccccctgaccagcaaggccgtgcaggaggacgaggtgggcgtgcccggcagcaacagcgccgacctgctgagatggaccaccgccaccaccatgaaggtgctgagcaacaccaccaccaccaccaaggccgtgctgcaggccgtgagcgacggccagtggtggaagaagagcctgacctacctgagacccctgcagggccagaagtgcggcggcgcctaccagatcggcaccaccgccaacgaggacctggagaagcagggctgccaccccttctacgagagcgtgatcagcaaccccttcgtggccgagagcgagggcacctacgacacctaccagcacgtgcccgtggagagcttcgccgaggtgctgctgagaaccggcaagctggccgaggccaagaacaagggcgaggtgttccccaccaccgaggtgctgctgcagctggccagcgaggccctgcccaacgacatgaccctggccctggcctacctgctggccctgccccaggtgctggacgccaacagatgcttcgagaagcagagccccagcgccctgagcctgcagctggccgcctactactacagcctgcagatctacgccagactggccccctgcttcagagacaagtgccaccccctgtacagagccgaccccaaggagctgatcaagatggtgaccagacacgtgaccagacacgagcacgaggcctggcccgaggacctgatcagcctgaccaagcagctgcactgctacaacgagagactgctggacttcacccaggcccagatcctgcagggcctgagaaagggcgtggacgtgcagagattcaccgccgacgaccagtacaagagagagaccatcctgggcctggccgagaccctggaggagagcgtgtacagcatcgccatcagcctggcccagagatacagcgtgagcagatgggaggtgttcatgacccacctggagttcctgttcaccgacagcggcctgagcaccctggagatcgagaacagagcccaggacctgcacctgttcgagaccctgaagaccgaccccgaggccttccaccagcacatggtgaagtacatctaccccaccatcggcggcttcgaccacgagagactgcagtactacttcaccctgctggagaactgcggctgcgccgacctgggcaactgcgccatcaagcccgagacccacatcagactgctgaagaagttcaaggtggtggccagcggcctgaactacaagaagctgaccgacgagaacatgagccccctggaggccctggagcccgtgctgagcagccagaacatcctgagcatcagcaagctggtgcccaagatccccgagaaggacggccagatgctgagccccagcagcctgtacaccatctggctgcagaagctgttctggaccggcgacccccacctgatcaagcaggtgcccggcagcagccccgagtggctgcacgcctacgacgtgtgcatgaagtacttcgacagactgcaccccggcgacctgatcaccgtggtggacgccgtgaccttcagccccaaggccgtgaccaagctgagcgtggaggccagaaaggagatgaccagaaaggccatcaagaccgtgaagcacttcatcgagaagcccagaaagagaaacagcgaggacgaggcccaggaggccaaggacagcaaggtgacctacgccgacaccctgaaccacctggagaagagcctggcccacctggagaccctgagccacagcttcatcctgagcctgaagaacagcgagcaggagaccctgcagaagtacagccacctgtacgacctgagcagaagcgagaaggagaagctgcacgacgaggccgtggccatctgcctggacggccagcccctggccatgatccagcagctgctggaggtggccgtgggccccctggacatcagccccaaggacatcgtgcagagcgccatcatgaagatcatcagcgccctgagcggcggcagcgccgacctgggcggccccagagaccccctgaaggtgctggagggcgtggtggccgccgtgcacgccagcgtggacaagggcgaggagctggtgagccccgaggacctgctggagtggctgagacccttctgcgccgacgacgcctggcccgtgagacccagaatccacgtgctgcagatcctgggccagagcttccacctgaccgaggaggacagcaagctgctggtgttcttcagaaccgaggccatcctgaaggccagctggccccagagacaggtggacatcgccgacatcgagaacgaggagaacagatactgcctgttcatggagctgctggagagcagccaccacgaggccgagttccagcacctggtgctgctgctgcaggcctggccccccatgaagagcgagtacgtgatcaccaacaacccctgggtgagactggccaccgtgatgctgaccagatgcaccatggagaacaaggagggcctgggcaacgaggtgctgaagatgtgcagaagcctgtacaacaccaagcagatgctgcccgccgagggcgtgaaggagctgtgcctgctgctgctgaaccagagcctgctgctgcccagcctgaagctgctgctggagagcagagacgagcacctgcacgagatggccctggagcagatcaccgccgtgaccaccgtgaacgacagcaactgcgaccaggagctgctgagcctgctgctggacgccaagctgctggtgaagtgcgtgagcacccccttctaccccagaatcgtggaccacctgctggccagcctgcagcagggcagatgggacgccgaggagctgggcagacacctgagagaggccggccacgaggccgaggccggcagcctgctgctggccgtgagaggcacccaccaggccttcagaaccttcagcaccgccctgagagccgcccagcactgggtgtag

SEQ ID NO: 90737 - DNA, 6756 bp, synthetic construct
  misc_feature 1..6756: note = Description of Artificial Sequence: Synthetic coding sequence
  source 1..6756: mol_type = other DNA
atggccgcccccgagagcggccccgccctgagccccggcaccgccgagggcgaggaggagaccatcctgtacgacctgctggtgaacaccgagtggccccccgagaccgaggtgcagcccagaggcaaccagaagcacggcgccagcttcatcatcaccaaggccatcagagacagactgctgttcctgagacagtacatctggtacagccccgcccccttcctgctgcccgacggcctggtgagactggtgaacaagcagatcaactggcacctggtgctggccagcaacggcaagctgctggccgccgtgcaggaccagtgcgtggagatcagaagcgccaaggacgacttcaccagcatcatcggcaagtgccaggtgcccaaggaccccaagccccagtggagaagagtggcctggagctacgactgcaccctgctggcctacgccgagagcaccggcaccgtgagagtgttcgacctgatgggcagcgagctgttcgtgatcagccccgccagcagcttcatcggcgacctgagctacgccatcgccggcctgatcttcctggagtacaaggccagcgcccagtggagcgccgagctgctggtgatcaactacagaggcgagctgagaagctacctggtgagcgtgggcaccaaccagagctaccaggagagccactgcttcagcttcagcagccactacccccacggcatcaacaccgccatctaccaccccggccacagactgctgctggtgggcggctgcgagaccgccgaggtgggcatgagcaaggccagcagctgcggcctgagcgcctggagagtgctgagcggcagcccctactacaagcaggtgaccaacggcggcgacggcgtgaccgccgtgcccaagaccctgggcctgctgagaatgctgagcgtgaagttctacagcagacagggccaggagcaggacggcatcttcaagatgagcctgagccccgacggcatgctgctggccgccatccacttcagcggcaagctgagcatctgggccatccccagcctgaagcagcagggcgagtggggccagaacgagcagcccggctacgacgacctgaaccccgactggagactgagcaccgagaagagaaagaagatcaaggacaaggagagcttctaccccctgatcgacgtgaactggtgggccgacagcgccgtgaccctggccagatgcagcggcgccctgaccgtgagcagcgtgaagaccctgaagaacctgctgggcaagagctgcgagtggttcgagcccagcccccaggtgaccgccacccacgacggcggcttcctgagcctggagtgcgagatcaagctggcccccaagagaagcagactggagaccagagccggcgaggaggacgagggcgaggaggacagcgacagcgactacgagatcagcgccaaggccagatacttcggctacatcaagcagggcctgtacctggtgaccgagatggagagattcgccccccccagaaagagacccagaaccatcaccaagaactacagactggtgagcctgagaagcaccacccccgaggagctgtaccagagaaagatcgagagcgaggagtacgaggaggccctgagcctggcccacacctacggcctggacaccgacctggtgtaccagagacagtggagaaagagcgccgtgaacgtggccagcatccagaactacctgagcaagatcaagaagagaagctgggtgctgcacgagtgcctggagagagtgcccgagaacgtggacgccgccaaggagctgctgcagtacggcctgaagggcaccgacctggaggccctgctggccatcggcaagggcgccgacgacggcagattcaccctgcccggcgagatcgacatcgacagcatcagctacgaggagctgagcccccccgacgaggagcccgccaagaacaagaaggagaaggagctgaagaagagacaggagctgctgaagctggtgaacttcagcaagctgaccctggagcagaaggagctgtgcagatgcagaagaaagctgctgacctacctggacagactggccacctacgaggagatcctgggcgtgccccacgccagcgagcagagatacgacgccgagttcttcaagaagttcagaaaccagaacatcgtgctgagcgccagaacctacgcccaggagagcaacgtgcaggccctggagatcctgttcacctaccacggcagcgacctgctgccccacagactggccatcctgagcaacttccccgagaccaccagcccccacgagtacagcgtgctgctgcccgaggcctgcttcaacggcgacagcctgatgatcatcccctggcacgagcacaagcacagagccaaggactggtgcgaggagctggcctgcagaatggtggtggagcccaacctgcaggacgagagcgagttcctgtacgccgcccagcccgagctgctgagattcagaatgacccagctgaccgtggagaaggtgatggactggtaccagaccagagccgaggagatcgagcactacgccagacagctgcagcagaagatcatccccgaccaggaccagctgatggccatcgccctggagtgcatctacacctgcgagagaaacgaccagctgtgcctgtgctacgacctgctggagtgcctgcccgagagaggctacggcgacaagaccgaggccaccaccaagctgcacgacatggtggaccagctggagcagatcctgagcgtgagcgagctgctggagaagcacggcctggagaagcccatcagcttcgtgaagaacacccagagcagcagcgaggaggccagaaagctgatggtgagactgaccagacacaccggcagaaagcagccccccgtgagcgagagccactggagaaccctgctgcaggacatgctgaccatgcagcagaacgtgtacacctgcctggacagcgacgcctgctacgagatcttcaccgagagcctgctgtgcagcagcagactggagaacatccacctggccggccagatgatgcactgcagcgcctgcagcgagaacccccccgccggcatcgcccacaagggcaagccccactacagagtgagctacgagaagagcatcgacctggtgctggccgccagcagagagtacttcaacagcagcaccaacctgaccgacagctgcatggacctggccagatgctgcctgcagctgatcaccgacagaccccccgccatccaggaggagctggacctgatccaggccgtgggctgcctggaggagttcggcgtgaagatcctgcccctgcaggtgagactgtgccccgacagaatcagcctgatcaaggagtgcatcagccagagccccacctgctacaagcagagcaccaagctgctgggcctggccgagctgctgagagtggccggcgagaaccccgaggagagaagaggccaggtgctgatcctgctggtggagcaggccctgagattccacgactacaaggccgccagcatgcactgccaggagctgatggccaccggctaccccaagagctgggacgtgtgcagccagctgggccagagcgagggctaccaggacctggccaccagacaggagctgatggccttcgccctgacccactgcccccccagcagcatcgagctgctgctggccgccagcagcagcctgcagaccgagatcctgtaccagagagtgaacttccagatccaccacgagggcggcgagaacatcagcgccagccccctgaccagcaaggccgtgcaggaggacgaggtgggcgtgcccggcagcaacagcgccgacctgctgagatggaccaccgccaccaccatgaaggtgctgagcaacaccaccaccaccaccaaggccgtgctgcaggccgtgagcgacggccagtggtggaagaagagcctgacctacctgagacccctgcagggccagaagtgcggcggcgcctaccagatcggcaccaccgccaacgaggacctggagaagcagggctgccaccccttctacgagagcgtgatcagcaaccccttcgtggccgagagcgagggcacctacgacacctaccagcacgtgcccgtggagagcttcgccgaggtgctgctgagaaccggcaagctggccgaggccaagaacaagggcgaggtgttccccaccaccgaggtgctgctgcagctggccagcgaggccctgcccaacgacatgaccctggccctggcctacctgctggccctgccccaggtgctggacgccaacagatgcttcgagaagcagagccccagcgccctgagcctgcagctggccgcctactactacagcctgcagatctacgccagactggccccctgcttcagagacaagtgccaccccctgtacagagccgaccccaaggagctgatcaagatggtgaccagacacgtgaccagacacgagcacgaggcctggcccgaggacctgatcagcctgaccaagcagctgcactgctacaacgagagactgctggacttcacccaggcccagatcctgcagggcctgagaaagggcgtggacgtgcagagattcaccgccgacgaccagtacaagagagagaccatcctgggcctggccgagaccctggaggagagcgtgtacagcatcgccatcagcctggcccagagatacagcgtgagcagatgggaggtgttcatgacccacctggagttcctgttcaccgacagcggcctgagcaccctggagatcgagaacagagcccaggacctgcacctgttcgagaccctgaagaccgaccccgaggccttccaccagcacatggtgaagtacatctaccccaccatcggcggcttcgaccacgagagactgcagtactacttcaccctgctggagaactgcggctgcgccgacctgggcaactgcgccatcaagcccgagacccacatcagactgctgaagaagttcaaggtggtggccagcggcctgaactacaagaagctgaccgacgagaacatgagccccctggaggccctggagcccgtgctgagcagccagaacatcctgagcatcagcaagctggtgcccaagatccccgagaaggacggccagatgctgagccccagcagcctgtacaccatctggctgcagaagctgttctggaccggcgacccccacctgatcaagcaggtgcccggcagcagccccgagtggctgcacgcctacgacgtgtgcatgaagtacttcgacagactgcaccccggcgacctgatcaccgtggtggacgccgtgaccttcagccccaaggccgtgaccaagctgagcgtggaggccagaaaggagatgaccagaaaggccatcaagaccgtgaagcacttcatcgagaagcccagaaagagaaacagcgaggacgaggcccaggaggccaaggacagcaaggtgacctacgccgacaccctgaaccacctggagaagagcctggcccacctggagaccctgagccacagcttcatcctgagcctgaagaacagcgagcaggagaccctgcagaagtacagccacctgtacgacctgagcagaagcgagaaggagaagctgcacgacgaggccgtggccatctgcctggacggccagcccctggccatgatccagcagctgctggaggtggccgtgggccccctggacatcagccccaaggacatcgtgcagagcgccatcatgaagatcatcagcgccctgagcggcggcagcgccgacctgggcggccccagagaccccctgaaggtgctggagggcgtggtggccgccgtgcacgccagcgtggacaagggcgaggagctggtgagccccgaggacctgctggagtggctgagacccttctgcgccgacgacgcctggcccgtgagacccagaatccacgtgctgcagatcctgggccagagcttccacctgaccgaggaggacagcaagctgctggtgttcttcagaaccgaggccatcctgaaggccagctggccccagagacaggtggacatcgccgacatcgagaacgaggagaacagatactgcctgttcatggagctgctggagagcagccaccacgaggccgagttccagcacctggtgctgctgctgcaggcctggccccccatgaagagcgagtacgtgatcaccaacaacccctgggtgagactggccaccgtgatgctgaccagatgcaccatggagaacaaggagggcctgggcaacgaggtgctgaagatgtgcagaagcctgtacaacaccaagcagatgctgcccgccgagggcgtgaaggagctgtgcctgctgctgctgaaccagagcctgctgctgcccagcctgaagctgctgctggagagcagagacgagcacctgcacgagatggccctggagcagatcaccgccgtgaccaccgtgaacgacagcaactgcgaccaggagctgctgagcctgctgctggacgccaagctgctggtgaagtgcgtgagcacccccttctaccccagaatcgtggaccacctgctggccagcctgcagcagggcagatgggacgccgaggagctgggcagacacctgagagaggccggccacgaggccgaggccggcagcctgctgctggccgtgagaggcacccaccaggccttcagaaccttcagcaccgccctgagagccgcccagcactgggtgtag

SEQ ID NO: 90738 - DNA, 10662 bp, synthetic construct
  misc_feature 1..10662: note = Description of Artificial Sequence: Synthetic coding sequence
  source 1..10662: mol_type = other DNA
atggtggtgagcgccggcccctggagcagcgagaaggccgagatgaacatcctggagatcaacgagaccctgagaccccagctggccgagaagaagcagcagttcagaaacctgaaggagaagtgcttcctgacccagctggccggcttcctggccaacagacagaagaagtacaagtacgaggagtgcaaggacctgatcaagttcatgctgagaaacgagagacagttcaaggaggagaagctggccgagcagctgaagcaggccgaggagctgagacagtacaaggtgctggtgcacagccaggagagagagctgacccagctgagagagaagctgagagagggcagagacgccagcagaagcctgtacgagcacctgcaggccctgctgacccccgacgagcccgacaagagccagggccaggacctgcaggagcagctggccgagggctgcagactggcccagcacctggtgcagaagctgagccccgagaacgacgaggacgaggacgaggacgtgcaggtggaggaggccgagaaggtgctggagagcagcgcccccagagaggtgcagaaggccgaggagagcaaggtgcccgaggacagcctggaggagtgcgccatcacctgcagcaacagccacggcccctgcgacagcaaccagccccacaagaacatcaagatcaccttcgaggaggacgaggtgaacagcaccctggtggtggacagagagagcagccacgacgagtgccaggacgccctgaacatcctgcccgtgcccggccccaccagcagcgccaccaacgtgagcatggtggtgagcgccggccccctgagcagcgagaaggccgagatgaacatcctggagatcaacgagaagctgagaccccagctggccgagaagaagcagcagttcagaaacctgaaggagaagtgcttcctgacccagctgagcggcttcctggccaaccagcagaagaagtacaagtacgaggagtgcaaggacctgatcaagttcatgctgagaaacgagagacagttcaaggaggagaagctggccgagcagctgaagcaggccgaggagctgagacagtacaaggtgctggtgcacgcccaggagagagagctgacccagctgaaggagaagctgagagagggcagagacgccagcagaagcctgaacgagcacctgcaggccctgctgaccccctacgagcccgacaagagccagggccaggacctgcaggagcagctggccgagggctgcagactggcccagcacctggtgcagaagctgagccccgagaacgacaacgacgacgacgaggacgtgcaggtggaggtggccgagaaggtgcagaagagcagcgcccccagagagatgcagaaggccgaggagaaggaggtgcccgaggacagcctggaggagtgcgccatcacctacagcaacagccacggcagctacgacagcaaccagccccacagaaagaccaagatcaccttcgaggaggacaaggtggacagcaccctgatcggcagcagcagccacgtggagtgggaggacgccgtgcacatcatccccgagaacgagagcgacgacgaggaggaggaggagaagggccccgtgagccccagaaacctgcaggagagcgaggaggaggaggtgccccaggagagctgggacgagggctacagcaccctgagcatcccccccgagatgctggccagctaccagagctacagcagcaccttccacagcctggaggagcagcaggtgtgcatggccgtggacatcggcagacacagatgggaccaggtgaagaaggaggaccaggaggccaccggccccagactgagcagagagctgctggacgagaaggagcccgaggtgctgcaggacagcctggacagatgctacagcacccccagcggctacctggagctgcccgacctgggccagccctacagcagcgccgtgtacagcctggaggagcagtacctgggcctggccctggacgtggacagaatcaagaaggaccaggaggaggaggaggaccagggccccccctgccccagactgagcagagagctgctggaggtggtggagcccgaggtgctgcaggacagcctggacagatgctacagcacccccagcagctgcctggagcagcccgacagctgccagccctacggcagcagcttctacgccctggaggagaagcacgtgggcttcagcctggacgtgggcgagatcgagaagaagggcaagggcaagaagagaagaggcagaagaagcaagaaggagagaagaagaggcagaaaggagggcgaggaggaccagaaccccccctgccccagactgagcagagagctgctggacgagaagggccccgaggtgctgcaggacagcctggacagatgctacagcacccccagcggctgcctggagctgaccgacagctgccagccctacagaagcgccttctacgtgctggagcagcagagagtgggcttcgccgtggacatggacgagatcgagaagtaccaggaggtggaggaggaccaggaccccagctgccccagactgagcagagagctgctggacgagaaggagcccgaggtgctgcaggacagcctggacagatgctacagcacccccagcggctacctggagctgcccgacctgggccagccctacagcagcgccgtgtacagcctggaggagcagtacctgggcctggccctggacgtggacagaatcaagaaggaccaggaggaggaggaggaccagggccccccctgccccagactgagcagagagctgctggaggtggtggagcccgaggtgctgcaggacagcctggacagatgctacagcacccccagcagctgcctggagcagcccgacagctgccagccctacggcagcagcttctacgccctggaggagaagcacgtgggcttcagcctggacgtgggcgagatcgagaagaagggcaagggcaagaagagaagaggcagaagaagcaagaaggagagaagaagaggcagaaaggagggcgaggaggaccagaaccccccctgccccagactgagcagagagctgctggacgagaagggccccgaggtgctgcaggacagcctggacagatgctacagcacccccagcggctgcctggagctgaccgacagctgccagccctacagaagcgccttctacgtgctggagcagcagagagtgggcttcgccgtggacatggacgagatcgagaagtaccaggaggtggaggaggaccaggaccccagctgccccagactgagcagagagctgctggacgagaaggagcccgaggtgctgcaggacagcctggacagatgctacagcacccccagcggctacctggagctgcccgacctgggccagccctacagcagcgccgtgtacagcctggaggagcagtacctgggcctggccctggacgtggacagaatcaagaaggacgaggaggaggaggaggaccaggaccccccctgccccagactgagcagagagctgctggaggtggtggcccccgaggtgctgcaggacagcctggacagatgctacagcacccccagcagctgcctggagcagcccgacagctgccagccctacggcagcagcttctacgccctggaggagaagcacgtgggcttcagcctggacgtgggcgagatcgagaagaagggcaagggcaagaagagaagaggcagaagaagcaagaaggagagaagaagaggcagaaaggagggcgaggaggaccagaaccccccctgccccagactgagcagagagctgctggacgagaagggccccgaggtgctgcaggacagcctggacagatgctacagcacccccagcggctgcctggagctgaccgacagctgccagccctacagaagcgccttctacgtgctggagcagcagagagtgggcatggccgtggacatggacgagatcgagaagtaccaggaggtggaggaggaccaggaccccagctgccccagactgagcagagagctgctggacgagaaggagcccgaggtgctgcaggacagcctgaacagatgctacagcacccccagcggctacctggagctgcccgacctgggccagccctacagcagcgccgtgtacagcctggaggagcagtacctgggcctggccctggacgtggacagaatcaagaaggaccaggaggaggaggaggacgaggaccaggaccccccctgccccagactgagcagagagctgctggaggtggtggagcccgaggtgctgcaggacagcctggacagatgctacagcacccccagcagctgcctggagcagcccgacagctgccagccctacggcagcagcttctacgccctggaggagaaccacgtgggcttcagcctggacgtgggcgagatcgagaagaagggcaagggcaagaagagaagaggcagaagaagcaagaaggagagaagaagaggcagaaaggagggcgaggaggaccagaaccccccctgccccagactgagcagagagctgctggacgagaagggccccgaggtgctgcaggacagcctggacagatgctacagcacccccagcggctgcctggagctgaccgacagctgccagccctacagaagcgccttctacgtgctggagcagcagcacgtgggcctggccgtggacatggacgagatcgagaagtaccaggaggtggaggaggaccaggaccccagctgccccagactgagcagagagctgctggacgagaaggagcccgaggtgctgcaggacagcctggacagatgctacagcacccccagcggctacctggagctgcccgacctgggccagccctacagcagcgccgtgtacagcctggaggagcagtacctgggcctggccctggacgtggacagaatcaagaaggaccaggaggaggaggaggaccagggccccccctgccccagactgagcagagagctgctggaggtggtggagcccgaggtgctgcaggacagcctggacagatgctacagcacccccagcagctgcctggagcagcccgacagctgccagccctacggcagcagcttctacgccctggaggagaaccacgtgggcttcagcctggacgtgggcgagatcgagaagaagggcaagggcaagaagagaagaggcagaagaagcaagaaggagagaagaagaggcagaaaggagggcgaggaggaccagaaccccccctgccccagactgagcagagagctgctggacgagaagggccccgaggtgctgcaggacagcctggacagatgctacagcacccccagcggctgcctggagctgaccgacagctgccagccctacagaagcgccttctacgtgctggagcagcagcacgtgggcctggccgtggacatggacgagatcgagaagtaccaggaggtggaggaggaccaggaccccagctgccccagactgagcagagagctgctggacgagaaggagcccgaggtgctgcaggacagcctggacagatgctacagcacccccagcggctacctggagctgcccgacctgggccagccctacagcagcgccgtgtacagcctggaggagcagtacctgggcctggccctggacgtggacagaatcaagaaggaccaggaggaggaggaggaccagggccccccctgccccagactgagcagagagctgctggaggtggtggagcccgaggtgctgcaggacagcctggacagatgctacagcacccccagcagctgcctggagcagcccgacagctgccagccctacggcagcagcttctacgccctggaggagaaccacgtgggcttcagcctggacgtgggcgagatcgagaagaagggcaagggcaagaagagaagaggcagaagaagcaagaaggagagaagaagaggcagaaaggagggcgaggaggaccagaaccccccctgccccagactgagcagagagctgctggacgagaagggccccgaggtgctgcaggacagcctggacagatgctacagcacccccagcggctgcctggagctgaccgacagctgccagccctacagaagcgccttctacgtgctggagcagcagcacgtgggcctggccgtggacatggacgagatcgagaagtaccaggaggtggaggaggaccaggaccccagctgccccagactgagcagagagctgctggacgagaaggagcccgaggtgctgcaggacagcctggacagatgctacagcacccccagcggctacctggagctgcccgacctgggccagccctacagcagcgccgtgtacagcctggaggagcagtacctgggcctggccctggacgtggacagaatcaagaaggaccaggaggaggaggaggaccagggccccccctgccccagactgagcagagagctgctggaggtggtggagcccgaggtgctgcaggacagcctggacagatgctacagcacccccagcagctgcctggagcagcccgacagctgccagccctacggcagcagcttctacgccctggaggagaaccacgtgggcttcagcctggacgtgggcgagatcgagaagaagggcaagggcaagaagagaagaggcagaagaagcaagaaggagagaagaagaggcagaaaggagggcgaggaggaccagaaccccccctgccccagactgagcagagagctgctggacgagaagggccccgaggtgctgcaggacagcctggacagatgctacagcacccccagcggctgcctggagctgaccgacagctgccagccctacagaagcgccttctacgtgctggagcagcagcacgtgggcctggccgtggacatggacgagatcgagaagtaccaggaggtggaggaggaccaggaccccagctgccccagactgagcagagagctgctggacgagaaggagcccgaggtgctgcaggacagcctggacagatgctacagcacccccagcggctacctggagctgcccgacctgggccagccctacagcagcgccgtgtacagcctggaggagcagtacctgggcctggccctggacgtggacagaatcaagaaggaccaggaggaggaggaggaccagggccccccctgccccagactgagcagagagctgctggaggtggtggagcccgaggtgctgcaggacagcctggacagatgctacagcacccccagcagctgcctggagcagcccgacagctgccagccctacggcagcagcttctacgccctggaggagaaccacgtgggcttcagcctggacgtgggcgagatcgagaagaagggcaagggcaagaagagaagaggcagaagaagcaagaaggagagaagaagaggcagaaaggagggcgaggaggaccagaaccccccctgccccagactgagcagagagctgctggacgagaagggccccgaggtgctgcaggacagcctggacagatgctacagcacccccagcggctgcctggagctgaccgacagctgccagccctacagaagcgccttctacgtgctggagcagcagcacgtgggcctggccgtggacatggacgagatcgagaagtaccaggaggtggaggaggaccaggaccccagctgccccagactgagcagagagctgctggacgagaaggagcccgaggtgctgcaggacagcctggacagatgctacagcacccccagcggctacctggagctgcccgacctgggccagccctacagcagcgccgtgtacagcctggaggagcagtacctgggcctggccctggacgtggacagaatcaagaaggaccaggaggaggaggaggaccagggccccccctgccccagactgagcagagagctgctggaggtggtggagcccgaggtgctgcaggacagcctggacagatgctacagcacccccagcagctgcctggagcagcccgacagctgccagccctacggcagcagcttctacgccctggaggagaagcacgtgggcttcagcctggacgtgggcgagatcgagaagaagggcaagggcaagaagagaagaggcagaagaagcaagaaggagagaagaagaggcagaaaggagggcgaggaggaccagaaccccccctgccccagactgagcagagagctgctggacgagaagggccccgaggtgctgcaggacagcctggacagatgctacagcacccccagcggctgcctggagctgaccgacagctgccagccctacagaagcgccttctacgtgctggagcagcagcacgtgggcctggccgtggacatggacgagatcgagaagtaccaggaggtggaggaggaccaggaccccagctgccccagactgagcagagagctgctggacgagaaggagcccgaggtgctgcaggacagcctggacagatgctacagcacccccagcggctacctggagctgcccgacctgggccagccctacagcagcgccgtgtacagcctggaggagcagtacctgggcctggccctggacgtggacagaatcaagaaggaccaggaggaggaggaggaccagggccccccctgccccagactgagcagagagctgctggaggtggtggagcccgaggtgctgcaggacagcctggacagatgctacagcacccccagcagctgcctggagcagcccgacagctgccagccctacggcagcagcttctacgccctggaggagaagcacgtgggcttcagcctggacgtgggcgagatcgagaagaagggcaagggcaagaagagaagaggcagaagaagcaagaaggagagaagaagaggcagaaaggagggcgaggaggaccagaaccccccctgccccagactgagcagagagctgctggacgagaagggccccaaggtgctgcaggacagcctggacagatgctacagcacccccagcggctgcctggagctgtgcgacagctgccagccctacagaagcgccttctacgtgctggagcagcagagagtgggcctggccgtggacatggacgagatcgagaagtaccaggaggtggaggaggaccaggaccccagctgccccagactgagcagagagctgctggacgagaagggccccgaggtgctgcaggacagcctggacagatgctacagcacccccagcggctgcctggagctgtgcgacagctgccagccctacagaagcgccttctacatcctggagcagcagagagtgggcctggccgtggacatggacgagatcgagaagtaccaggaggtggaggaggaccaggaccccagctgccccagactgagcagagagctgctggacgagaaggagcccgaggtgctgcaggacagcctggacagatgctacagcacccccagcggctacctggagctgcccgacctgggccagccctacagcagcgccgtgtacagcctggaggagcagtacctgggcctggccctggacgtggacagaatcaagaaggaccaggaggaggaggaggaccagggccccccctgccccagactgagcagagagctgctggaggtggtggagcccgaggtgctgcaggacagcctggacagatgctacagcacccccagcagctgcctggagcagcccgacagctgccagccctacggcagcagcttctacgccctggaggagaagcacgtgggcttcagcctggacgtgggcgagatcgagaagaagggcaagggcaagaagagaagaggcagaagaagcaagaaggagagaagaagaggcagaaaggagggcgaggaggaccagaaccccccctgccccagactgagcagagagctgctggacgagaagggccccgaggtgctgcaggacagcctggacagatgctacagcacccccagcggctgcctggagctgtgcgacagctgccagccctacagaagcgccttctacgtgctggagcagcagcacgtgggcctggccgtggacatggacgagatcgagaagtaccaggaggtggaggaggaccaggaccccagctgccccagactgagcagagagctgctggacgagaaggagcccgaggtgctgcaggacagcctggacagatgctacagcacccccagcggctacctggagctgcccgacctgggccagccctacagcagcgccgtgtacagcctggaggagcagtacctgggcctggccctggacgtggacaagatcgagaagaagggcaagggcaagaagagaagaggcagaagaagcaagaaggagagaagaagaggcagaaaggagggcgaggaggaccagaaccccccctgccccagactgaacggcgtgctgatggaggtggaggagagagaggtgctgcaggacagcctggacagatgctacagcacccccagcatgtacttcgagctgcccgacagcttccagcactacagaagcgtgttctacagcttcgaggagcagcacatcagcttcgccctgtacgtggacaacagattcttcaccctgaccgtgaccagcctgcacctggtgttccagatgggcgtgatcttcccccagtag

SEQ ID NO: 90739 - DNA, 900 bp, synthetic construct
  misc_feature 1..900: note = Description of Artificial Sequence: Synthetic coding sequence
  source 1..900: mol_type = other DNA
atggtggtgagcgccggccccctgagcagcgagaaggccgagatgaacatcctggagatcaacgagaagctgagaccccagctggccgagaagaagcagcagttcagaaacctgaaggagaagtgcttcctgacccagctgagcggcttcctggccaaccagcagaagaagtacaagtacgaggagtgcaaggacctgatcaagttcatgctgagaaacgagagacagttcaaggaggagaagctggccgagcagctgaagcaggccgaggagctgagacagtacaaggtgctggtgcacgcccaggagagagagctgacccagctgaaggagaagctgagagagggcagagacgccagcagaagcctgaacgagcacctgcaggccctgctgaccccctacgagcccgacaagagccagggccaggacctgcaggagcagctggccgagggctgcagactggcccagcacctggtgcagaagctgagccccgagaacgacaacgacgacgacgaggacgtgcaggtggaggtggccgagaaggtgcagaagagcagcgcccccagagagatgcagaaggccgaggagaaggaggtgcccgaggacagcctggaggagtgcgccatcacctacagcaacagccacggcagctacgacagcaaccagccccacagaaagaccaagatcaccttcgaggaggacaaggtggacagcaccctgatcggcagcagcagccacgtggagtgggaggacgccgtgcacatcatccccgagaacgagagcgacgacgaggaggaggaggagaagggccccgtgagccccagaaccagcgtgggcagcagcgagaagggcggccccagaggcaacagaagccaggcccagcagggcgccgccggctag

SEQ ID NO: 90740 - DNA, 2010 bp, synthetic construct
  misc_feature 1..2010: note = Description of Artificial Sequence: Synthetic coding sequence
  source 1..2010: mol_type = other DNA
atggtggtgagcgccggccccctgagcagcgagaaggccgagatgaacatcctggagatcaacgagaagctgagaccccagctggccgagaagaagcagcagttcagaaacctgaaggagaagtgcttcctgacccagctgagcggcttcctggccaaccagcagaagaagtacaagtacgaggagtgcaaggacctgatcaagttcatgctgagaaacgagagacagttcaaggaggagaagctggccgagcagctgaagcaggccgaggagctgagacagtacaaggtgctggtgcacgcccaggagagagagctgacccagctgaaggagaagctgagagagggcagagacgccagcagaagcctgaacgagcacctgcaggccctgctgaccccctacgagcccgacaagagccagggccaggacctgcaggagcagctggccgagggctgcagactggcccagcacctggtgcagaagctgagccccgagaacgacaacgacgacgacgaggacgtgcaggtggaggtggccgagaaggtgcagaagagcagcgcccccagagagatgcagaaggccgaggagaaggaggtgcccgaggacagcctggaggagtgcgccatcacctacagcaacagccacggcagctacgacagcaaccagccccacagaaagaccaagatcaccttcgaggaggacaaggtggacagcaccctgatcggcagcagcagccacgtggagtgggaggacgccgtgcacatcatccccgagaacgagagcgacgacgaggaggaggaggagaagggccccgtgagccccagaaacctgcaggagagcgaggaggaggaggtgccccaggagagctgggacgagggctacagcaccctgagcatcccccccgagatgctggccagctaccagagctacagcagcaccttccacagcctggaggagcagcaggtgtgcatggccgtggacatcggcagacacagatgggaccaggtgaagaaggaggaccaggaggccaccggccccagcagagagctgctggacgagaagggccccgaggtgttccaggacagccaggacagatgctacagcacccccagcggctgcctggagctgaccgacagctgccagccctacagaagcgccttctacatcctggagcagcagagagtgggcctggccatcgacatggacgagatcgagaagtaccaggaggtggaggaggaccaggaccccagctgccccagactgagcagagagctgctggacgagaaggagcccgaggtgctgcaggacagcctggacagatgctacagcacccccagcggctacctggagctgcccgacctgggccagccctacagcagcgccgtgtacagcctggaggagcagtacctgggcctggccctggacgtggacagaatcaagaaggaccaggaggaggaggaggaccagggccccccctgccccagactgagcagagagctgctggacgagaagggccccgaggtgctgcaggacagcctggacagatgctacagcacccccagcggctgcctggagctgaccgacagctgccagccctacagaagcgccttctacgtgctggagcagcagcacgtgggcctggccgtggacatggacgagatcgagaagaagggcaagggcaagaagagaagaggcagaagaagcaagaaggagagaagaagaggcagaaaggagggcgaggaggaccagaaccccccctgccccagactgaacggcgtgctgatggaggtggaggagagagaggtgctgcaggacagcctggacagatgctacagcacccccagcatgtacttcgagctgcccgacagcttccagcactacagaagcgtgttctacagcttcgaggagcagcacatcagcttcgccctgtacgtggacaacagattcttcaccctgaccgtgaccagcctgcacctggtgttccagatgggcgtgatcttcccccagtag

SEQ ID NO: 90741 - DNA, 2022 bp, synthetic construct
  misc_feature 1..2022: note = Description of Artificial Sequence: Synthetic coding sequence
  source 1..2022: mol_type = other DNA
atggtggtgagcgccggcccctggagcagcgagaaggccgagatgaacatcctggagatcaacgagaccctgagaccccagctggccgagaagaagcagcagttcagaaacctgaaggagaagtgcttcctgacccagctggccggcttcctggccaacagacagaagaagtacaagtacgaggagtgcaaggacctgatcaagttcatgctgagaaacgagagacagttcaaggaggagaagctggccgagcagctgaagcaggccgaggagctgagacagtacaaggtgctggtgcacagccaggagagagagctgacccagctgagagagaagctgagagagggcagagacgccagcagaagcctgtacgagcacctgcaggccctgctgacccccgacgagcccgacaagagccagggccaggacctgcaggagcagctggccgagggctgcagactggcccagcacctggtgcagaagctgagccccgagaacgacgaggacgaggacgaggacgtgcaggtggaggaggccgagaaggtgctggagagcagcgcccccagagaggtgcagaaggccgaggagagcaaggtgcccgaggacagcctggaggagtgcgccatcacctgcagcaacagccacggcccctgcgacagcaaccagccccacaagaacatcaagatcaccttcgaggaggacgaggtgaacagcaccctggtggtggacagagagagcagccacgacgagtgccaggacgccctgaacatcctgcccgagaacgagagcgacgacgaggaggaggaggagaagggccccgtgagccccagaaacctgcaggagagcgaggaggaggaggtgccccaggagagctgggacgagggctacagcaccctgagcatcccccccgagatgctggccagctaccagagctacagcagcaccttccacagcctggaggagcagcaggtgtgcatggccgtggacatcggcagacacagatgggaccaggtgaagaaggaggaccaggaggccaccggccccagactgagcagagagctgctggacgagaagggccccgaggtgctgcaggacagcctggacagatgctacagcacccccagcggctgcctggagctgaccgacagctgccagccctacagaagcgccttctacgtgctggagcagcagagagtgggcttcgccgtggacatggacgagatcgagaagtaccaggaggtggaggaggaccaggaccccagctgccccagactgagcagagagctgctggacgagaaggagcccgaggtgctgcaggacagcctggacagatgctacagcacccccagcggctacctggagctgcccgacctgggccagccctacagcagcgccgtgtacagcctggaggagcagtacctgggcctggccctggacgtggacagaatcaagaaggaccaggaggaggaggaggaccagggccccccctgccccagactgagcagagagctgctggaggtggtggagcccgaggtgctgcaggacagcctggacagatgctacagcacccccagcagctgcctggagcagcccgacagctgccagccctacggcagcagcttctacgccctggaggagaagcacgtgggcttcagcctggacgtgggcgagatcgagaagaagggcaagggcaagaagagaagaggcagaagaagcaagaaggagagaagaagaggcagaaaggagggcgaggaggaccagaaccccccctgccccagactgaacggcgtgctgatggaggtggaggagagagaggtgctgcaggacagcctggacagatgctacagcacccccagcatgtacttcgagctgcccgacagcttccagcactacagaagcgtgttctacagcttcgaggagcagcacatcagcttcgccctgtacgtggacaacagattcttcaccctgaccgtgaccagcctgcacctggtgttccagatgggcgtgatcttcccccagtag

SEQ ID NO: 90742 - DNA, 519 bp, synthetic construct
  misc_feature 1..519: note = Description of Artificial Sequence: Synthetic coding sequence
  source 1..519: mol_type = other DNA
atggccgtggacatcggcagacacagatgggaccaggtgaagaaggaggaccaggaggccaccggccccagcagagagctgctggacgagaagggccccgaggtgttccaggacagccaggacagatgctacagcacccccagcggctgcctggagctgaccgacagctgccagccctacagaagcgccttctacatcctggagcagcagagagtgggcctggccatcgacatggacgagatcgagaagtaccaggaggtggaggaggaccaggaccccagctgccccagactgagcagagagctgctggacgagaaggagcccgaggtgctgcaggacagcctggacagatgctacagcacccccagcggctacctggagctgcccgacctgggccagccctacagcagcgccgtgtacagcctggaggagcagtacctgggcctggccctggacgtggacagaatcaagaaggaccaggaggaggaggaggaccagggccccccctgccccagatag

SEQ ID NO: 90743 - DNA, 2295 bp, synthetic construct
  misc_feature 1..2295: note = Description of Artificial Sequence: Synthetic coding sequence
  source 1..2295: mol_type = other DNA
atgttcagcaacagcaccggcagactgcccggccagcccaccgaggagatccagcagtacaaggtgctggtgcacagccaggagagagagctgacccagctgagagagaagctgagagagggcagagacgccagcagaagcctgtacgagcacctgcaggccctgctgacccccgacgagcccgacaagagccagggccaggacctgcaggagcagctggccgagggctgcagactggcccagcacctggtgcagaagctgagccccgagaacgacgaggacgaggacgaggacgtgcaggtggaggaggccgagaaggtgctggagagcagcgcccccagagaggtgcagaaggccgaggagagcaaggtgcccgaggacagcctggaggagtgcgccatcacctgcagcaacagccacggcccctgcgacagcaaccagccccacaagaacatcaagatcaccttcgaggaggacgaggtgaacagcaccctggtggtggacagagagagcagccacgacgagtgccaggacgccctgaacatcctgcccgtgcccggccccaccagcagcgccaccaacgtgagcatggtggtgagcgccggccccctgagcagcgagaaggccgagatgaacatcctggagatcaacgagaagctgagaccccagctggccgagaagaagcagcagttcagaaacctgaaggagaagtgcttcctgacccagctgagcggcttcctggccaaccagcagaagaagtacaagtacgaggagtgcaaggacctgatcaagttcatgctgagaaacgagagacagttcaaggaggagaagctggccgagcagctgaagcaggccgaggagctgagacagtacaaggtgctggtgcacgcccaggagagagagctgacccagctgaaggagaagctgagagagggcagagacgccagcagaagcctgaacgagcacctgcaggccctgctgaccccctacgagcccgacaagagccagggccaggacctgcaggagcagctggccgagggctgcagactggcccagcacctggtgcagaagctgagccccgagaacgacaacgacgacgacgaggacgtgcaggtggaggtggccgagaaggtgcagaagagcagcgcccccagagagatgcagaaggccgaggagaaggaggtgcccgaggacagcctggaggagtgcgccatcacctacagcaacagccacggcagctacgacagcaaccagccccacagaaagaccaagatcaccttcgaggaggacaaggtggacagcaccctgatcggcagcagcagccacgtggagtgggaggacgccgtgcacatcatccccgagaacgagagcgacgacgaggaggaggaggagaagggccccgtgagccccagaaacctgcaggagagcgaggaggaggaggtgccccaggagagctgggacgagggctacagcaccctgagcatcccccccgagatgctggccagctaccagagctacagcagcaccttccacagcctggaggagcagcaggtgtgcatggccgtggacatcggcagacacagatgggaccaggtgaagaaggaggaccaggaggccaccggccccagactgagcagagagctgctggacgagaagggccccgaggtgctgcaggacagcctggacagatgctacagcacccccagcggctgcctggagctgaccgacagctgccagccctacagaagcgccttctacgtgctggagcagcagcacgtgggcctggccgtggacatggacgagatcgagaagtaccaggaggtggaggaggaccaggaccccagctgccccagactgagcagagagctgctggacgagaaggagcccgaggtgctgcaggacagcctggacagatgctacagcacccccagcggctacctggagctgcccgacctgggccagccctacagcagcgccgtgtacagcctggaggagcagtacctgggcctggccctggacgtggacagaatcaagaaggaccaggaggaggaggaggaccagggccccccctgccccagactgagcagagagctgctggaggtggtggagcccgaggtgctgcaggacagcctggacagatgctacagcacccccagcagctgcctggagcagcccgacagctgccagccctacggcagcagcttctacgccctggaggagaagcacgtgggcttcagcctggacgtgggcgagatcgagaagaagggcaagggcaagaagagaagaggcagatag

SEQ ID NO: 90744 - DNA, 105 bp, synthetic construct
  misc_feature 1..105: note = Description of Artificial Sequence: Synthetic coding sequence
  source 1..105: mol_type = other DNA
atcggcagcagcagccacgtggagtgggaggacgccgtgcacatcatccccgagaacgagagcgacgacgaggaggaggaggagaagggccccgtgagcccctag

SEQ ID NO: 90745 - DNA, 2517 bp, synthetic construct
  misc_feature 1..2517: note = Description of Artificial Sequence: Synthetic coding sequence
  source 1..2517: mol_type = other DNA
atggtggtgagcgccggcccctggagcagcgagaaggccgagatgaacatcctggagatcaacgagaagctgagaccccagctggccgagaacaagcagcagttcagaaacctgaaggagagatgcttcctgacccagctggccggcttcctggccaacagacagaagaagtacaagtacgaggagtgcaaggacctgatcaagttcatgctgagaaacgagagacagttcaaggaggagaagctggccgagcagctgaagcaggccgaggagctgagacagtacaaggtgctggtgcacagccaggagagagagctgacccagctgagagagaagctgagagagggcagagacgccagcagaagcctgaacgagcacctgcaggccctgctgacccccgacgagcccgacaagagccagggccaggacctgcaggagcagctggccgagggctgcagactggcccagcacctggtgcagaagctgagccccgagaacgacgaggacgaggacgaggacgtgcaggtggaggaggacgagaaggtgctggagagcagcgcccccagagaggtgcagaaggccgaggagagcaaggtgcccgaggacagcctggaggagtgcgccatcacctgcagcaacagccacggcccctgcgacagcatccagccccacaagaacatcaagatcaccttcgaggaggacaaggtgaacagcagcctggtggtggacagagagagcagccacgacggctgccaggacgccctgaacatcctgcccgtgcccggccccaccagcagcgccaccaacgtgagcatggtggtgagcgccggccccctgagcagcgagaaggccgagatgaacatcctggagatcaacgagaagctgtgcccccagctggccgagaagaagcagcagttcagaagcctgaaggagaagtgcttcgtgacccaggtggcctgcttcctggccaagcagcagaacaagtacaagtacgaggagtgcaaggacctgatcaagagcatgctgagaaacgagagacagttcaaggaggagaagctggccgagcagctgaagcaggccgaggagctgagacagtacaaggtgctggtgcacagccaggagagagagctgacccagctgagagagaagctgagagagggcagagacgccagcagaagcctgaacgagcacctgcaggccctgctgacccccgacgagcccgacaagagccagggccaggacctgcaggagcagctggccgagggctgcagactggcccagcacctggtgcagaagctgagccccgagaacgacaacgacgacgacgaggacgtgcaggtggaggtggccgagaaggtgcagaagagcagcagccccagagagatgcagaaggccgaggagaaggaggtgcccgaggacagcctggaggagtgcgccatcacctgcagcaacagccacggcccctacgacagcaaccagccccacagaaagcccaagagccacctgagaaagaccaagagcacccagctgagcctggcccaccccctgatgctgaacggcagaatgctgtacaccctgagccagaagatgaaggtgatgatgagaaagagaaagaagaagggccagtgcctgcccggcatctgcagaagcctgaagagaagaaagagccccagaagccccggcatgaaggtgatcagactgagccagttcctgctgaagggccacagatgggaccaggtgaagaaggaggaccaggaggccaccggccccagactgagcagagagctgctggacgagaaggagcccgaggtgctgcaggacagcctggacagatgctacagcacccccagcgtgtacctgggcctgaccgacagctgccagccctacagaagcgccttctacgtgctggagcagcagagaatcggcctggccgtggacatggacgagatcgagaagtaccaggaggtggaggaggaccaggaccccagctgccccagactgagcagagagctgctggccgagaaggagcccgaggtgctgcaggacagcctggacagatgctacagcacccccagcggctacctggagctgcccgacctgggccagccctacagaagcgccgtgtacagcctggaggagcagtacctgggcctggccctggacgtggacagaatcaagaaggaccaggaggaggaggaggaccagggccccccctgccccagactgagcagagagctgctggaggtggtggagcccgaggtgctgcaggacagcctggacgtgatccagctgctgcccgtggtgctgaacagcctgacccccgccagccccaccgaggtgcccttcatgcactggagaaagaacatgctggccttcctgctgacctgggagaagctgaagagaagaggcagaggcagaaaggagggcgaggaggaccagagaagaaaggaggagggcgaggagaagaagggcaagaagatcaagacccaccacgcccccggcagcgccgcctgctag

SEQ ID NO: 90746 - DNA, 2373 bp, synthetic construct
  misc_feature 1..2373: note = Description of Artificial Sequence: Synthetic coding sequence
  source 1..2373: mol_type = other DNA
atgttcagcaacagcaccggcagactgcccggccagcccaccgaggagatccagcagtacaaggtgctggtgcacagccaggagagagagctgacccagctgagagagaagctgagagagggcagagacgccagcagaagcctgaacgagcacctgcaggccctgctgacccccgacgagcccgacaagagccagggccaggacctgcaggagcagctggccgagggctgcagactggcccagcacctggtgcagaagctgagccccgagaacgacgaggacgaggacgaggacgtgcaggtggaggaggacgagaaggtgctggagagcagcgcccccagagaggtgcagaaggccgaggagagcaaggtgcccgaggacagcctggaggagtgcgccatcacctgcagcaacagccacggcccctgcgacagcatccagccccacaagaacatcaagatcaccttcgaggaggacaaggtgaacagcagcctggtggtggacagagagagcagccacgacggctgccaggacgccctgaacatcctgcccgtgcccggccccaccagcagcgccaccaacgtgagcatggtggtgagcgccggccccctgagcagcgagaaggccgagatgaacatcctggagatcaacgagaagctgtgcccccagctggccgagaagaagcagcagttcagaagcctgaaggagaagtgcttcgtgacccaggtggcctgcttcctggccaagcagcagaacaagtacaagtacgaggagtgcaaggacctgatcaagagcatgctgagaaacgagagacagttcaaggaggagaagctggccgagcagctgaagcaggccgaggagctgagacagtacaaggtgctggtgcacagccaggagagagagctgacccagctgagagagaagctgagagagggcagagacgccagcagaagcctgaacgagcacctgcaggccctgctgacccccgacgagcccgacaagagccagggccaggacctgcaggagcagctggccgagggctgcagactggcccagcacctggtgcagaagctgagccccgagaacgacaacgacgacgacgaggacgtgcaggtggaggtggccgagaaggtgcagaagagcagcagccccagagagatgcagaaggccgaggagaaggaggtgcccgaggacagcctggaggagtgcgccatcacctgcagcaacagccacggcccctacgacagcaaccagccccacagaaagaccaagatcaccttcgaggaggacaaggtggacagcaccctgatcggcagcagcagccacgtggagtgggaggacgccgtgcacatcatccccgagaacgagagcgacgacgaggaggaggaggagaagggccccgtgagccccagaaacctgcaggagagcgaggaggaggaggtgccccaggagagctgggacgagggctacagcaccctgagcatcccccccgagagactggccagctaccagagctacagcagcaccttccacagcctggaggagcagcaggtgtgcatggccgtggacatcggcagacacagatgggaccaggtgaagaaggaggaccaggaggccaccggccccagactgagcagagagctgctggacgagaaggagcccgaggtgctgcaggacagcctggacagatgctacagcacccccagcgtgtacctgggcctgaccgacagctgccagccctacagaagcgccttctacgtgctggagcagcagagaatcggcctggccgtggacatggacgagatcgagaagtaccaggaggtggaggaggaccaggaccccagctgccccagactgagcagagagctgctggccgagaaggagcccgaggtgctgcaggacagcctggacagatgctacagcacccccagcggctacctggagctgcccgacctgggccagccctacagaagcgccgtgtacagcctggaggagcagtacctgggcctggccctggacgtggacagaatcaagaaggaccaggaggaggaggaggaccagggccccccctgccccagactgagcagagagctgctggaggtggtggagcccgaggtgctgcaggacagcctggacgtgatccagctgctgcccgtggtgctgaacagcctgacccccgccagccccaccgaggtgcccttcatgcactggagaaagaacatgctggccttcctgctgacctgggagaagctgaagagaagaggcagaggcagaaaggagggcgaggaggaccagagaagaaaggaggagggcgaggagaagaagggcaagaagatcaagacccaccacgcccccggcagcgccgcctgctag

SEQ ID NO: 90747 - DNA, 258 bp, synthetic construct
  misc_feature 1..258: note = Description of Artificial Sequence: Synthetic coding sequence
  source 1..258: mol_type = other DNA
gagatgcagaaggccgaggagaaggaggtgcccgaggacagcctggaggagtgcgccatcacctgcagcaacagccacggcccctacgacagcaaccagccccacagaaagaccaagatcaccttcgaggaggacaaggtggacagcaccctgatcggcagcagcagccacgtggagtgggaggacgccgtgcacatcatccccgagaacgagagcgacgacgaggaggaggaggagaagggccccgtgagcccctag

SEQ ID NO: 90748 - DNA, 1101 bp, synthetic construct
  misc_feature 1..1101: note = Description of Artificial Sequence: Synthetic coding sequence
  source 1..1101: mol_type = other DNA
ctggccagctaccagagctacagcagcaccttccacagcctggaggagcagcaggtgtgcatggccgtggacatcggcagacacagatgggaccaggtgaagaaggaggaccaggaggccaccggccccagactgagcagagagctgctggacgagaaggagcccgaggtgctgcaggacagcctggacagatgctacagcacccccagcgtgtacctgggcctgaccgacagctgccagccctacagaagcgccttctacgtgctggagcagcagagaatcggcctggccgtggacatggacgagatcgagaagtaccaggaggtggaggaggaccaggaccccagctgccccagactgagcagagagctgctggccgagaaggagcccgaggtgctgcaggacagcctggacagatgctacagcacccccagcggctacctggagctgcccgacctgggccagccctacagaagcgccgtgtacagcctggaggagcagtacctgggcctggccctggacgtggacagaatcaagaaggaccaggaggaggaggaggaccagggccccccctgccccagactgagcagagagctgctggaggtggtggagcccgaggtgctgcaggacagcctgtgctacagcacccccagcagctgcctggagcagcccgacagctgccagccctacggcagcagcttctacgccctggaggagaagcacgtgggcttcagcctggacgtgggcgagatcgagaagaagggcaagggcaagaagagaagaggcagaagaagcaagaagaagagaagaagaggcagaaaggagggcgaggaggaccagaaccccccctgccccagactgagcagcgtgctgatggaggtggaggtgcccgaggtgctgcaggacagcctggacagatactacagcacccccagcatgtacttcgagctgcccgacagcttccagcactacagaagcgtgttctacagcttcgaggagcagcacatcagcttcgccctggacatggacaacagattcttcaccctgaccgtgagaagcctgcacctggtgttccagatgggcgtgatcttcccccagtag

SEQ ID NO: 90749 - DNA, 2598 bp, synthetic construct
  misc_feature 1..2598: note = Description of Artificial Sequence: Synthetic coding sequence
  source 1..2598: mol_type = other DNA
atggtggtgagcgccggcccctggagcagcgagaaggccgagatgaacatcctggagatcaacgagaagctgagaccccagctggccgagaacaagcagcagttcagaaacctgaaggagagatgcttcctgacccagctggccggcttcctggccaacagacagaagaagtacaagtacgaggagtgcaaggacctgatcaagttcatgctgagaaacgagagacagttcaaggaggagaagctggccgagcagctgaagcaggccgaggagctgagacagtacaaggtgctggtgcacagccaggagagagagctgacccagctgagagagaagctgagagagggcagagacgccagcagaagcctgaacgagcacctgcaggccctgctgacccccgacgagcccgacaagagccagggccaggacctgcaggagcagctggccgagggctgcagactggcccagcacctggtgcagaagctgagccccgagaacgacgaggacgaggacgaggacgtgcaggtggaggaggacgagaaggtgctggagagcagcgcccccagagaggtgcagaaggccgaggagagcaaggtgcccgaggacagcctggaggagtgcgccatcacctgcagcaacagccacggcccctgcgacagcatccagccccacaagaacatcaagatcaccttcgaggaggacaaggtgaacagcagcctggtggtggacagagagagcagccacgacggctgccaggacgccctgaacatcctgcccgtgcccggccccaccagcagcgccaccaacgtgagcatggtggtgagcgccggccccctgagcagcgagaaggccgagatgaacatcctggagatcaacgagaagctgtgcccccagctggccgagaagaagcagcagttcagaagcctgaaggagaagtgcttcgtgacccaggtggcctgcttcctggccaagcagcagaacaagtacaagtacgaggagtgcaaggacctgatcaagagcatgctgagaaacgagagacagttcaaggaggagaagctggccgagcagctgaagcaggccgaggagctgagacagtacaaggtgctggtgcacagccaggagagagagctgacccagctgagagagaagctgagagagggcagagacgccagcagaagcctgaacgagcacctgcaggccctgctgacccccgacgagcccgacaagagccagggccaggacctgcaggagcagctggccgagggctgcagactggcccagcacctggtgcagaagctgagccccgagaacgacaacgacgacgacgaggacgtgcaggtggaggtggccgagaaggtgcagaagagcagcagccccagagagatgcagaaggccgaggagaaggaggtgcccgaggacagcctggaggagtgcgccatcacctgcagcaacagccacggcccctacgacagcaaccagccccacagaaagaccaagatcaccttcgaggaggacaaggtggacagcaccctgatcggcagcagcagccacgtggagtgggaggacgccgtgcacatcatccccgagaacgagagcgacgacgaggaggaggaggagaagggccccgtgagccccagaaacctgcaggagagcgaggaggaggaggtgccccaggagagctgggacgagggctacagcaccctgagcatcccccccgagagactggccagctaccagagctacagcagcaccttccacagcctggaggagcagcaggtgtgcatggccgtggacatcggcagacacagatgggaccaggtgaagaaggaggaccaggaggccaccggccccagactgagcagagagctgctggacgagaaggagcccgaggtgctgcaggacagcctggacagatgctacagcacccccagcgtgtacctgggcctgaccgacagctgccagccctacagaagcgccttctacgtgctggagcagcagagaatcggcctggccgtggacatggacgagatcgagaagtaccaggaggtggaggaggaccaggaccccagctgccccagactgagcagagagctgctggccgagaaggagcccgaggtgctgcaggacagcctggacagatgctacagcacccccagcggctacctggagctgcccgacctgggccagccctacagaagcgccgtgtacagcctggaggagcagtacctgggcctggccctggacgtggacagaatcaagaaggaccaggaggaggaggaggaccagggccccccctgccccagactgagcagagagctgctggaggtggtggagcccgaggtgctgcaggacagcctggacgtgatccagctgctgcccgtggtgctgaacagcctgacccccgccagccccaccgaggtgcccttcatgcactggagaaagaacatgctggccttcctgctgacctgggagaagctgaagagaagaggcagaggcagaaaggagggcgaggaggaccagagaagaaaggaggagggcgaggagaagaagggcaagaagatcaagacccaccacgcccccggcagcgccgcctgctag

SEQ ID NO: 90750 - DNA, 2373 bp, synthetic construct
  misc_feature 1..2373: note = Description of Artificial Sequence: Synthetic coding sequence
  source 1..2373: mol_type = other DNA
atgttcagcaacagcaccggcagactgcccggccagcccaccgaggagatccagcagtacaaggtgctggtgcacagccaggagagagagctgacccagctgagagagaagctgagagagggcagagacgccagcagaagcctgaacgagcacctgcaggccctgctgacccccgacgagcccgacaagagccagggccaggacctgcaggagcagctggccgagggctgcagactggcccagcagctggtgcagaagctgagccccgagaacgacgaggacgaggacgaggacgtgcaggtggaggaggacgagaaggtgctggagagcagcgcccccagagaggtgcagaaggccgaggagagcaaggtgcccgaggacagcctggaggagtgcgccatcacctgcagcaacagccacggcccctgcgacagcaaccagccccacaagaacatcaagatcaccttcgaggaggacaaggtgaacagcagcctggtggtggacagagagtacagccacgacgagtgccaggacgccctgaacatcctgcccgtgcccggccccaccagcagcgccaccaacgtgagcatggtggtgagcgccggccccctgagcagcgagaaggccgagatgaacatcctggagatcaacgagaagctgagaccccagctggccgagaagaagcagcagttcagaagcctgaaggagaagtgcttcgtgacccaggtggcctgcttcctggccaagcagcagaacaagtacaagtacgaggagtgcaaggacctgatcaagagcatgctgagaaacgagctgcagttcaaggaggagaagctggccgagcagctgaagcaggccgaggagctgagacagtacaaggtgctggtgcacagccaggagagagagctgacccagctgagagagaagctgagagagggcagagacgccagcagaagcctgaacgagcacctgcaggccctgctgacccccgacgagcccgacaagagccagggccaggacctgcaggagcagctggccgagggctgcagactggcccagcacctggtgcagaagctgagccccgagaacgacaacgacgacgacgaggacgtgcaggtggaggtggccgagaaggtgcagaagagcagcagccccagagagatgcagaaggccgaggagaaggaggtgcccgaggacagcctggaggagtgcgccatcacctgcagcaacagccacggcccctacgacagcaaccagccccacagaaagaccaagatcaccttcgaggaggacaaggtggacagcaccctgatcggcagcagcagccacgtggagtgggaggacgccgtgcacatcatccccgagaacgagagcgacgacgaggaggaggaggagaagggccccgtgagccccagaaacctgcaggagagcgaggaggaggaggtgccccaggagagctgggacgagggctacagcaccctgagcatcccccccgagagactggccagctaccagagctacagcagcaccttccacagcctggaggagcagcaggtgtgcatggccgtggacatcggcagacacagatgggaccaggtgaagaaggaggaccaggaggccaccggccccagactgagcagagagctgctggccgagaaggagcccgaggtgctgcaggacagcctggacagatgctacagcacccccagcgtgtacctgggcctgaccgacagctgccagccctacagaagcgccttctacgtgctggagcagcagagagtgggcctggccgtggacatggacgagatcgagaagtaccaggaggtggaggaggaccaggaccccagctgccccagactgagcagagagctgctggccgagaaggagcccgaggtgctgcaggacagcctggacagatgctacagcacccccagcggctacctggagctgcccgacctgggccagccctacagaagcgccgtgtacagcctggaggagcagtacctgggcctggccctggacgtggacagaatcaagaaggaccaggaggaggaggaggaccagggccccccctgccccagactgagcagagagctgctggaggtggtggagcccgaggtgctgcaggacagcctggacgtgatccagctgctgcccgtggtgctgaacagcctgacccccgccagccccaccgaggtgcccttcatgcactggagaaagaacatgctggccttcctgctgacctgggagaagctgaagagaagaggcagaggcagaaaggagggcgaggaggaccagagaagaaaggaggagggcgaggagaagaagggcaagaagatcaagacccaccacgcccccggcagcaccgcctgctag

SEQ ID NO: 90751 - DNA, 234 bp, synthetic construct
  misc_feature 1..234: note = Description of Artificial Sequence: Synthetic coding sequence
  source 1..234: mol_type = other DNA
atggacgagatcgagaagtaccaggaggtggaggaggaccaggaccccagctgccccagactgagcagagagctgctggccgagaaggagcccgaggtgctgcaggacagcctggacagatgctacagcacccccagcggctacctggagctgcccgacctgggccagccctacagaagcgccgtgtacagcctggaggagcagtacctgggcctggccctggacgtggactag

SEQ ID NO: 90752 - DNA, 234 bp, synthetic construct
  misc_feature 1..234: note = Description of Artificial Sequence: Synthetic coding sequence
  source 1..234: mol_type = other DNA
atggacgagatcgagaagtaccaggaggtggaggaggaccaggaccccagctgccccagactgagcagagagctgctggccgagaaggagcccgaggtgctgcaggacagcctggacagatggtacagcacccccagcggctacctggagctgcccgacctgggccagccctacagaagcgccgtgtacagcctggaggagcagtacctgggcctggccctggacgtggactag

SEQ ID NO: 90753 - DNA, 234 bp, synthetic construct; identical to SEQ ID NO: 90751
  misc_feature 1..234: note = Description of Artificial Sequence: Synthetic coding sequence
  source 1..234: mol_type = other DNA

SEQ ID NO: 90754 - DNA, 207 bp, synthetic construct
  misc_feature 1..207: note = Description of Artificial Sequence: Synthetic coding sequence
  source 1..207: mol_type = other DNA
gagatgcagaaggccgaggagaaggaggtgcccgaggacagcctggaggagtgcgccatcacctgcagcaacagccacggcccctacgacagcaaccagccccacagaaagaccaagatcaccttcgaggaggacaaggtggacagcaccctgatcggcagcagcagccacgtggagtgggaggacgccgtgcacatcatcccctag

SEQ ID NO: 90755 - DNA, 9996 bp, synthetic construct
  misc_feature 1..9996: note = Description of Artificial Sequence: Synthetic coding sequence
  source 1..9996: mol_type = other DNA
atggtggtgagcgccggcccctggagcagcgagaaggccgagatgaacatcctggagatcaacgagaagctgagaccccagctggccgagaacaagcagcagttcagaaacctgaaggagagatgcttcctgacccagctggccggcttcctggccaacagacagaagaagtacaagtacgaggagtgcaaggacctgatcaagttcatgctgagaaacgagagacagttcaaggaggagaagctggccgagcagctgaagcaggccgaggagctgagacagtacaaggtgctggtgcacagccaggagagagagctgacccagctgagagagaagctgagagagggcagagacgccagcagaagcctgaacgagcacctgcaggccctgctgacccccgacgagcccgacaagagccagggccaggacctgcaggagcagctggccgagggctgcagactggcccagcagctggtgcagaagctgagccccgagaacgacgaggacgaggacgaggacgtgcaggtggaggaggacgagaaggtgctggagagcagcgcccccagagaggtgcagaaggccgaggagagcaaggtgcccgaggacagcctggaggagtgcgccatcacctgcagcaacagccacggcccctgcgacagcaaccagccccacaagaacatcaagatcaccttcgaggaggacaaggtgaacagcaccgtggtggtggacagaaagagcagccacgacgagtgccaggacgccctgaacatcctgcccgtgcccggccccaccagcagcgccaccaacgtgagcatggtggtgagcgccggccccctgagcagcgagaaggccgagatgaacatcctggagatcaacgagaagctgagaccccagctggccgagaagaagcagcagttcagaagcctgaaggagaagtgcttcgtgacccagctggccggcttcctggccaagcagcagaacaagtacaagtacgaggagtgcaaggacctgatcaagagcatgctgagaaacgagctgcagttcaaggaggagaagctggccgagcagctgaagcaggccgaggagctgagacagtacaaggtgctggtgcacagccaggagagagagctgacccagctgagagagaagctgagagagggcagagacgccagcagaagcctgaacgagcacctgcaggccctgctgacccccgacgagcccgacaagagccagggccaggacctgcaggagcagctggccgagggctgcagactggcccagcacctggtgcagaagctgagccccgagaacgacgaggacgaggacgaggacgtgcaggtggaggaggacgagaaggtgctggagagcagcagccccagagagatgcagaaggccgaggagagcaaggtgcccgaggacagcctggaggagtgcgccatcacctgcagcaacagccacggcccctgcgacagcaaccagccccacaagaacatcaagatcaccttcgaggaggacaaggtgaacagcagcctggtggtggacagagagtacagccacgacgagtgccaggacgccctgaacatcctgcccgtgcccggccccaccagcagcgccaccaacgtgagcatggtggtgagcgccggccccctgagcagcgagaaggccgagatgaacatcctggagatcaacgagaagctgagaccccagctggccgagaagaagcagcagttcagaagcctgaaggagaagtgcttcgtgacccaggtggcctgcttcctggccaagcagcagaacaagtacaagtacgaggagtgcaaggacctgatcaagagcatgctgagaaacgagctgcagttcaaggaggagaagctggccgagcagctgaagcaggccgaggagctgagacagtacaaggtgctggtgcacagccaggagagagagctgacccagctgagagagaagctgagagagggcagagacgccagcagaagcctgaacgagcacctgcaggccctgctgacccccgacgagcccgacaagagccagggccaggacctgcaggagcagctggccgagggctgcagactggcccagcacctggtgcagaagctgagccccgagaacgacaacgacgacgacgaggacgtgcaggtggaggtggccgagaaggtgcagaagagcagcagccccagagagatgcagaaggccgaggagaaggaggtgcccgaggacagcctggaggagtgcgccatcacctgcagcaacagccacggcccctacgacagcaaccagccccacagaaagaccaagatcaccttcgaggaggacaaggtggacagcaccctgatcggcagcagcagccacgtggagtgggaggacgccgtgcacatcatccccgagaacgagagcgacgacgaggaggaggaggagaagggccccgtgagccccagaaacctgcaggagagcgaggaggaggaggtgccccaggagagctgggacgagggctacagcaccctgagcatcccccccgagagactggccagctaccagagctacagcagcaccttccacagcctggaggagcagcaggtgtgcatggccgtggacatcggcagcgagtacagcatcgtgaaggtgatcaagctgcagttcatggcccagagccaggccatgcccgtgcccacctggaccgactgccacgacatcgagctgaaggccggccacagatgggaccaggtgaagaaggaggaccaggaggccaccggccccagactgagcagagagctgctggccgagaaggagcccgaggtgctgcaggacagcctggacagatgctacagcacccccagcgtgtacctgggcctgaccgacagctgccagccctacagaagcgccttctacgtgctggagcagcagagagtgggcctggccgtggacatggacgagatcgagaagtaccaggaggtggaggaggaccaggaccccagctgccccagactgagcagagagctgctggccgagaaggagcccgaggtgctgcaggacagcctggacagatggtacagcacccccagcggctacctggagctgcccgacctgggccagccctacagaagcgccgtgtacagcctggaggagcagtacctgggcctggccctggacgtggacagaatcaagaaggaccaggaggaggaggaggaccagggccccccctgccccagactgagcagagagctgctggaggtggtggagcccgaggtgctgcaggacagcctggacagatgctacagcacccccagcagctgcctggagcagcccgacagctgccagccctacagaagcagcttctacgccctggaggagaagcacgtgggcttcagcctggacgtgggcgagatcgagaagaagggcaagggcaagaagagaagaggcagaagaagcaagaagaagagaagaagaggcagaaaggagggcgaggaggaccagaaccccccctgccccagactgagcagagagctgctggccgagaaggagcccgaggtgctgcaggacagcctggacagatggtacagcacccccagcgtgtacctgggcctgaccgacccctgccagccctacagaagcgccttctacgtgctggagcagcagagagtgggcctggccgtggacatggacgagatcgagaagtaccaggaggtggaggaggaccaggaccccagctgccccagactgagcagagagctgctggccgagaaggagcccgaggtgctgcaggacagcctggacagatggtacagcacccccagcggctacctggagctgcccgacctgggccagccctacagaagcgccgtgtacagcctggaggagcagtacctgggcctggccctggacgtggacagaatcaagaaggaccaggaggaggaggaggaccagggccccccctgccccagactgagcagagagctgctggaggtggtggagcccgaggtgctgcaggacagcctggacagatgctacagcacccccagcagctgcctggagcagcccgacagctgccagccctacagaagcagcttctacgccctggaggagaagcacgtgggcttcagcctggacgtgggcgagatcgagaagaagggcaagggcaagaagagaagaggcagaagaagcaagaagaagagaagaagaggcagaaaggagggcgaggaggaccagaaccccccctgccccagactgagcagagagctgctggccgagaaggagcccgaggtgctgcaggacagcctggacagatggtacagcacccccagcgtgtacctgggcctgaccgacccctgccagccctacagaagcgccttctacgtgctggagcagcagagagtgggcctggccgtggacatggacgagatcgagaagtaccaggaggtggaggaggaccaggaccccagctgccccagactgagcagagagctgctggccgagaaggagcccgaggtgctgcaggacagcctggacagatggtacagcacccccagcggctacctggagctgcccgacctgggccagccctacagaagcgccgtgtacagcctggaggagcagtacctgggcctggccctggacgtggacagaatcaagaaggaccaggaggaggaggaggaccagggccccccctgccccagactgagcagagagctgctggaggtggtggagcccgaggtgctgcaggacagcctggacagatgctacagcacccccagcagctgcctggagcagcccgacagctgccagccctacagaagcagcttctacgccctggaggagaagcacgtgggcttcagcctggacgtgggcgagatcgagaagaagggcaagggcaagaagagaagaggcagaagaagcaagaagaagagaagaagaggcagaaaggagggcgaggaggaccagaaccccccctgccccagactgagcagagagctgctggccgagaaggagcccgaggtgctgcaggacagcctggacagatggtacagcacccccagcgtgtacctgggcctgaccgacccctgccagccctacagaagcgccttctacgtgctggagcagcagagagtgggcctggccgtggacatggacgagatcgagaagtaccaggaggtggaggaggaccaggaccccagctgccccagactgagcagagagctgctggccgagaaggagcccgaggtgctgcaggacagcctggacagatggtacagcacccccagcggctacctggagctgcccgacctgggccagccctacagaagcgccgtgtacagcctggaggagcagtacctgggcctggccctggacgtggacagaatcaagaaggaccaggaggaggaggaggaccagggccccccctgccccagactgagcagagagctgctggaggtggtggagcccgaggtgctgcaggacagcctggacagatgctacagcacccccagcagctgcctggagcagcccgacagctgccagccctacagaagcagcttctacgccctggaggagaagcacgtgggcttcagcctggacgtgggcgagatcgagaagaagggcaagggcaagaagagaagaggcagaagaagcaagaagaagagaagaagaggcagaaaggagggcgaggaggaccagaaccccccctgccccagactgagcagagagctgctggccgagaaggagcccgaggtgctgcaggacagcctggacagatggtacagcacccccagcgtgtacctgggcctgaccgacccctgccagccctacagaagcgccttctacgtgctggagcagcagagagtgggcctggccgtggacatggacgagatcgagaagtaccaggaggtggaggaggaccaggaccccagctgccccagactgagcagagagctgctggccgagaaggagcccgaggtgctgcaggacagcctggacagatggtacagcacccccagcggctacctggagctgcccgacctgggccagccctacagaagcgccgtgtacagcctggaggagcagtacctgggcctggccctggacgtggacaagatcgagaagtaccaggaggtggaggaggaccaggaccccagctgccccagactgagcagagagctgctggccgagaaggagcccgaggtgctgcaggacagcctggacagatggtacagcacccccagcgtgtacctgggcctgaccgacccctgccagccctacagaagcgccttctacgtgctggagcagcagagagtgggcctggccgtggacatggacgagatcgagaagtaccaggaggtggaggaggaccaggaccccagctgccccagactgagcagagagctgctggccgagaaggagcccgaggtgctgcaggacagcctggacagatgctacagcacccccagcggctacctggagctgcccgacctgggccagccctacagaagcgccgtgtacagcctggaggagcagtacctgggcctggccctggacgtggacagaatcaagaaggaccaggaggaggaggaggaccagggccccccctgccccagactgagcagagagctgctggaggtggtggagcccgaggtgctgcaggacagcctggacagatgctacagcacccccagcagctgcctggagcagcccgacagctgccagccctacagaagcagcttctacgccctggaggagaagcacgtgggcttcagcctggacgtgggcgagatcgagaagtaccaggaggtggaggaggaccaggaccccagctgccccagactgagcagagagctgctggccgagaaggagcccgaggtgctgcaggacagcctggacagatggtacagcacccccagcgtgtacctgggcctgaccgacccctgccagccctacagaagcgccttctacgtgctggagcagcagagagtgggcctggccgtggacatggacgagatcgagaagtaccaggaggtggaggaggaccaggaccccagctgccccagactgagcagagagctgctggccgagaaggagcccgaggtgctgcaggacagcctggacagatgctacagcacccccagcggctacctggagctgcccgacctgggccagccctacagaagcgccgtgtacagcctggaggagcagtacctgggcctggccctggacgtggacagaatcaagaaggaccaggaggaggaggaggaccagggccccccctgccccagactgagcagagagctgctggaggtggtggagcccgaggtgctgcaggacagcctggacagatgctacagcacccccagcagctgcctggagcagcccgacagctgccagccctacagaagcagcttctacgccctggaggagaagcacgtgggcttcagcctggacgtgggcgagatcgagaagaagggcaagggcaagaagagaagaggcagaagaagcaagaagaagagaagaagaggcagaaaggagggcgaggaggaccagaaccccccctgccccagactgagcagagagctgctggccgagaaggagcccgaggtgctgcaggacagcctggacagatggtacagcacccccagcgtgtacctgggcctgaccgacccctgccagccctacagaagcgccttctacgtgctggagcagcagagagtgggcctggccgtggacatggacgagatcgagaagtaccaggaggtggaggaggaccaggaccccagctgccccagactgagcagagagctgctggccgagaaggagcccgaggtgctgcaggacagcctggacagatggtacagcacccccagcggctacctggagctgcccgacctgggccagccctacagaagcgccgtgtacagcctggaggagcagtacctgggcctggccctggacgtggacagaatcaagaaggaccaggaggaggaggaggaccagggccccccctgccccagactgagcagagagctgctggaggtggtggagcccgaggtgctgcaggacagcctggacagatgctacagcacccccagcagctgcctggagcagcccgacagctgccagccctacagaagcagcttctacgccctggaggagaagcacgtgggcttcagcctggacgtgggcgagatcgagaagaagggcaagggcaagaagagaagaggcagaagaagcaagaagaagagaagaagaggcagaaaggagggcgaggaggaccagaaccccccctgccccagactgagcagagagctgctggccgagaaggagcccgaggtgctgcaggacagcctggacagatggtacagcacccccagcgtgtacctgggcctgaccgacccctgccagccctacagaagcgccttctacgtgctggagcagcagagagtgggcctggccgtggacatggacgagatcgagaagtaccaggaggtggaggaggaccaggaccccagctgccccagactgagcagagagctgctggccgagaaggagcccgaggtgctgcaggacagcctggacagatgctacagcacccccagcggctacctggagctgcccgacctgggccagccctacagaagcgccgtgtacagcctggaggagcagtacctgggcctggccctggacgtggacagaatcaagaaggaccaggaggaggaggaggaccagggccccccctgccccagactgagcagagagctgctggaggtggtggagcccgaggtgctgcaggacagcctggacagatgctacagcacccccagcagctgcctggagcagcccgacagctgccagccctacagaagcagcttctacgccctggaggagaagcacgtgggcttcagcctggacgtgggcgagatcgagaagaagggcaagggcaagaagagaagaggcagaagaagcaagaagaagagaagaagaggcagaaaggagggcgaggaggaccagaaccccccctgccccagactgagcagagagctgctggccgagaaggagcccgaggtgctgcaggacagcctggacagatggtacagcacccccagcgtgtacctgggcctgaccgacccctgccagccctgcagaagcgccttctacgtgctggagcagcagagagtgggcctggccgtggacatggacgagatcgagaagtaccaggaggtggaggaggaccaggaccccagctgccccagactgagcagagagctgctggccgagaaggagcccgaggtgctgcaggacagcctggacagatgctacagcacccccagcggctacctggagctgcccgacctgggccagccctacagaagcgccgtgtacagcctggaggagcagtacctgggcctggccctggacgtggacagaatcaagaaggaccaggaggaggaggaggaccagggccccccctgccccagactgagcagagagctgctggaggtggtggagcccgaggtgctgcaggacagcctggacagatgctacagcacccccagcagctgcctggagcagcccgacagctgccagccctacagaagcagcttctacgccctggaggagaagcacgtgggcttcagcctggacgtgggcgagatcgagaagaagggcaagggcaagaagagaagaggcagaagaagcaagaagaagagaagaagaggcagaaaggagggcgaggaggaccagaaccccccctgccccagactgaacagcgtgctgatggaggtggaggagcccgaggtgctgcaggacagcctggacagatgctacagcacccccagcatgtacttcgagctgcccgacagcttccagcactacagaagcgtgttctacagcttcgaggagcagcacatcaccttcgccctggacatggacaacagcttcttcaccctgaccgtgaccagcctgcacctggtgttccagatgggcgtgatcttcccccagtag

SEQ ID NO: 90756 - DNA, 234 bp, synthetic construct; identical to SEQ ID NO: 90751
  misc_feature 1..234: note = Description of Artificial Sequence: Synthetic coding sequence
  source 1..234: mol_type = other DNA

SEQ ID NO: 90757 - DNA, 2517 bp, synthetic construct
  misc_feature 1..2517: note = Description of Artificial Sequence: Synthetic coding sequence
  source 1..2517: mol_type = other DNA
atggtggtgagcgccggcccctggagcagcgagaaggccgagatgaacatcctggagatcaacgagaagctgagaccccagctggccgagaacaagcagcagttcagaaacctgaaggagagatgcttcctgacccagctggccggcttcctggccaacagacagaagaagtacaagtacgaggagtgcaaggacctgatcaagttcatgctgagaaacgagagacagttcaaggaggagaagctggccgagcagctgaagcaggccgaggagctgagacagtacaaggtgctggtgcacagccaggagagagagctgacccagctgagagagaagctgagagagggcagagacgccagcagaagcctgaacgagcacctgcaggccctgctgacccccgacgagcccgacaagagccagggccaggacctgcaggagcagctggccgagggctgcagactggcccagcagctggtgcagaagctgagccccgagaacgacgaggacgaggacgaggacgtgcaggtggaggaggacgagaaggtgctggagagcagcgcccccagagaggtgcagaaggccgaggagagcaaggtgcccgaggacagcctggaggagtgcgccatcacctgcagcaacagccacggcccctgcgacagcaaccagccccacaagaacatcaagatcaccttcgaggaggacaaggtgaacagcagcctggtggtggacagagagtacagccacgacgagtgccaggacgccctgaacatcctgcccgtgcccggccccaccagcagcgccaccaacgtgagcatggtggtgagcgccggccccctgagcagcgagaaggccgagatgaacatcctggagatcaacgagaagctgagaccccagctggccgagaagaagcagcagttcagaagcctgaaggagaagtgcttcgtgacccaggtggcctgcttcctggccaagcagcagaacaagtacaagtacgaggagtgcaaggacctgatcaagagcatgctgagaaacgagctgcagttcaaggaggagaagctggccgagcagctgaagcaggccgaggagctgagacagtacaaggtgctggtgcacagccaggagagagagctgacccagctgagagagaagctgagagagggcagagacgccagcagaagcctgaacgagcacctgcaggccctgctgacccccgacgagcccgacaagagccagggccaggacctgcaggagcagctggccgagggctgcagactggcccagcacctggtgcagaagctgagccccgagaacgacaacgacgacgacgaggacgtgcaggtggaggtggccgagaaggtgcagaagagcagcagccccagagagatgcagaaggccgaggagaaggaggtgcccgaggacagcctggaggagtgcgccatcacctgcagcaacagccacggcccctacgacagcaaccagccccacagaaagcccaagagccacctgagaaagaccaagagcacccagctgagcctggcccaccccctgatgctgaacggcagaatgctgtacaccctgagccagaagatgaaggtgatgatgagaaagagaaagaagaagggccagtgcctgcccggcatctgcagaagcctgaagagaagaaagagccccagaagccccggcatgaaggtgatcagactgagccagttcctgctgaagggccacagatgggaccaggtgaagaaggaggaccaggaggccaccggccccagactgagcagagagctgctggccgagaaggagcccgaggtgctgcaggacagcctggacagatgctacagcacccccagcgtgtacctgggcctgaccgacagctgccagccctacagaagcgccttctacgtgctggagcagcagagagtgggcctggccgtggacatggacgagatcgagaagtaccaggaggtggaggaggaccaggaccccagctgccccagactgagcagagagctgctggccgagaaggagcccgaggtgctgcaggacagcctggacagatgctacagcacccccagcggctacctggagctgcccgacctgggccagccctacagaagcgccgtgtacagcctggaggagcagtacctgggcctggccctggacgtggacagaatcaagaaggaccaggaggaggaggaggaccagggccccccctgccccagactgagcagagagctgctggaggtggtggagcccgaggtgctgcaggacagcctggacgtgatccagctgctgcccgtggtgctgaacagcctgacccccgccagccccaccgaggtgcccttcatgcactggagaaagaacatgctggccttcctgctgacctgggagaagctgaagagaagaggcagaggcagaaaggagggcgaggaggaccagagaagaaaggaggagggcgaggagaagaagggcaagaagatcaagacccaccacgcccccggcagcaccgcctgctag

SEQ ID NO: 90758 - DNA, 288 bp, synthetic construct
  misc_feature 1..288: note = Description of Artificial Sequence: Synthetic coding sequence
  source 1..288: mol_type = other DNA
atcgccgagatcgagaagtaccaggaggtggaggaggaccaggaccccagctgccccagactgagcagagagctgctggccgagaaggagcccgaggtgctgcaggacagcctggacagatggtacagcacccccagcggctacctggagctgcccgacctgggccagccctacagaagcgccgtgtacagcctggaggagcagtacctgggcctggccctggacgtggacaagatcgagaagtaccaggaggtggaggaggaccaggaccccagctgccccagatag

SEQ ID NO: 90759 - DNA, 234 bp, synthetic construct; identical to SEQ ID NO: 90751
  misc_feature 1..234: note = Description of Artificial Sequence: Synthetic coding sequence
  source 1..234: mol_type = other DNA

SEQ ID NO: 90760 - DNA, 2784 bp, synthetic construct
  misc_feature 1..2784: note = Description of Artificial Sequence: Synthetic coding sequence
  source 1..2784: mol_type = other DNA
tgagacctgatcaagagcatgctgagaaacgagagacagttcaaggaggagaagctggccgagcagctgaagcaggccgaggagctgagacagtacaaggtgctggtgcacgcccaggagagagagctgacccagctgagagagaagctgagagagggcagagacgccagcagaagcctgaacgagcacctgcaggccctgctgacccccgacgagcccgacaagagccagggccaggacctgcaggagcagctggccgagggctgcagactggcccagcacctggtgcagaagctgagccccgagaacgacaacgacgacgacgaggacgtgcaggtggaggtggccgagaaggtgcagaagagcagcgcccccagagagatgcagaaggccgaggagaaggaggtgcccgaggacagcctggaggagtgcgccatcacctgcagcaacagccacggcccctacgacagcaaccagccccacagaaagaccaagatcaccttcgaggaggacaaggtggacagcaccctgatcggcagcagcagccacgtggagtgggaggacgccgtgcacatcatccccgagaacgagagcgacgacgaggaggaggaggagaagggccccgtgagccccagaaacctgcaggagagcgaggaggaggaggtgccccaggagagctgggacgagggctacagcaccctgagcatcccccccgagatgctggccagctacaagagctacagcagcaccttccacagcctggaggagcagcaggtgtgcatggccgtggacatcggcagacacagatgggaccaggtgaagaaggaggaccacgaggccaccggccccagactgagcagagagctgctggacgagaagggccccgaggtgctgcaggacagcctggacagatgctacagcacccccagcggctgcctggagctgaccgacagctgccagccctacagaagcgccttctacgtgctggagcagcagagagtgggcctggccgtgaacatggacgagatcgagaagtaccaggaggtggaggaggaccaggaccccagctgccccagactgagcagagagctgctggacgagaaggagcccgaggtgctgcaggacagcctgggcagatgctacagcacccccagcggctacctggagctgcccgacctgggccagccctacagcagcgccgtgtacagcctggaggagcagtacctgggcctggccctggacgtggacagaatcaagaaggaccaggaggaggaggaggaccagggccccccctgccccagactgagcagagagctgctggaggtggtggagcccgaggtgctgcaggacagcctggacagatgctacagcacccccagcagctgcctggagcagcccgacagctgccagccctacggcagcagcttctacgccctggaggagaagcacgtgggcttcagcctggacgtgggcgagatcgagaagaagggcaagggcaagaagagaagaggcagaagaagcaagaaggagagaagaagaggcagaaaggagggcgaggaggaccagaaccccccctgccccagactgagcagagagctgctggacgagaagggccccgaggtgctgcaggacagcctggacagatgctacagcacccccagcggctgcctggagctgaccgacagctgccagccctacagaagcgccttctacatcctggagcagcagagagtgggcctggccgtggacatggacgagatcgagaagtaccaggaggtggaggaggaccaggaccccagctgccccagactgagcggcgagctgctggacgagaaggagcccgaggtgctgcaggagagcctggacagatgctacagcacccccagcggctgcctggagctgaccgacagctgccagccctacagaagcgccttctacatcctggagcagcagagagtgggcctggccgtggacatggacgagatcgagaagtaccaggaggtggaggaggaccaggaccccagctgccccagactgagcagagagctgctggacgagaaggagcccgaggtgctgcaggacagcctgggcagatgctacagcacccccagcggctacctggagctgcccgacctgggccagccctacagcagcgccgtgtacagcctggaggagcagtacctgggcctggccctggacgtggacagaatcaagaaggaccaggaggaggaggaggaccagggccccccctgccccagactgagcagagagctgctggaggtggtggagcccgaggtgctgcaggacagcctggacagatgctacagcacccccagcagctgcctggagcagcccgacagctgccagccctacggcagcagcttctacgccctggaggagaagcacgtgggcttcagcctggacgtgggcgagatcgagaagaagggcaagggcaagaagagaagaggcagaagaagcaagaaggagagaagaagaggcagaaaggagggcgaggaggaccagaaccccccctgccccagactgaacagcatgctgatggaggtggaggagcccgaggtgctgcaggacagcctggacatctgctacagcacccccagcatgtacttcgagctgcccgacagcttccagcactacagaagcgtgttctacagcttcgaggaggagcacatcagcttcgccctgtacgtggacaacagattcttcaccctgaccgtgaccagcctgcacctggtgttccagatgggcgtgatcttcccccagtag

SEQ ID NO: 90761 - DNA, 2766 bp, synthetic construct
  misc_feature 1..2766: note = Description of Artificial Sequence: Synthetic coding sequence
  source 1..2766: mol_type = other DNA
atgctgagaaacgagagacagttcaaggaggagaagctggccgagcagctgaagcaggccgaggagctgagacagtacaaggtgctggtgcacgcccaggagagagagctgacccagctgagagagaagctgagagagggcagagacgccagcagaagcctgaacgagcacctgcaggccctgctgacccccgacgagcccgacaagagccagggccaggacctgcaggagcagctggccgagggctgcagactggcccagcacctggtgcagaagctgagccccgagaacgacaacgacgacgacgaggacgtgcaggtggaggtggccgagaaggtgcagaagagcagcgcccccagagagatgcagaaggccgaggagaaggaggtgcccgaggacagcctggaggagtgcgccatcacctgcagcaacagccacggcccctacgacagcaaccagccccacagaaagaccaagatcaccttcgaggaggacaaggtggacagcaccctgatcggcagcagcagccacgtggagtgggaggacgccgtgcacatcatccccgagaacgagagcgacgacgaggaggaggaggagaagggccccgtgagccccagaaacctgcaggagagcgaggaggaggaggtgccccaggagagctgggacgagggctacagcaccctgagcatcccccccgagatgctggccagctacaagagctacagcagcaccttccacagcctggaggagcagcaggtgtgcatggccgtggacatcggcagacacagatgggaccaggtgaagaaggaggaccacgaggccaccggccccagactgagcagagagctgctggacgagaagggccccgaggtgctgcaggacagcctggacagatgctacagcacccccagcggctgcctggagctgaccgacagctgccagccctacagaagcgccttctacgtgctggagcagcagagagtgggcctggccgtgaacatggacgagatcgagaagtaccaggaggtggaggaggaccaggaccccagctgccccagactgagcagagagctgctggacgagaaggagcccgaggtgctgcaggacagcctgggcagatgctacagcacccccagcggctacctggagctgcccgacctgggccagccctacagcagcgccgtgtacagcctggaggagcagtacctgggcctggccctggacgtggacagaatcaagaaggaccaggaggaggaggaggaccagggccccccctgccccagactgagcagagagctgctggaggtggtggagcccgaggtgctgcaggacagcctggacagatgctacagcacccccagcagctgcctggagcagcccgacagctgccagccctacggcagcagcttctacgccctggaggagaagcacgtgggcttcagcctggacgtgggcgagatcgagaagaagggcaagggcaagaagagaagaggcagaagaagcaagaaggagagaagaagaggcagaaaggagggcgaggaggaccagaaccccccctgccccagactgagcagagagctgctggacgagaagggccccgaggtgctgcaggacagcctggacagatgctacagcacccccagcggctgcctggagctgaccgacagctgccagccctacagaagcgccttctacatcctggagcagcagagagtgggcctggccgtggacatggacgagatcgagaagtaccaggaggtggaggaggaccaggaccccagctgccccagactgagcggcgagctgctggacgagaaggagcccgaggtgctgcaggagagcctggacagatgctacagcacccccagcggctgcctggagctgaccgacagctgccagccctacagaagcgccttctacatcctggagcagcagagagtgggcctggccgtggacatggacgagatcgagaagtaccaggaggtggaggaggaccaggaccccagctgccccagactgagcagagagctgctggacgagaaggagcccgaggtgctgcaggacagcctgggcagatgctacagcacccccagcggctacctggagctgcccgacctgggccagccctacagcagcgccgtgtacagcctggaggagcagtacctgggcctggccctggacgtggacagaatcaagaaggaccaggaggaggaggaggaccagggccccccctgccccagactgagcagagagctgctggaggtggtggagcccgaggtgctgcaggacagcctggacagatgctacagcacccccagcagctgcctggagcagcccgacagctgccagccctacggcagcagcttctacgccctggaggagaagcacgtgggcttcagcctggacgtgggcgagatcgagaagaagggcaagggcaagaagagaagaggcagaagaagcaagaaggagagaagaagaggcagaaaggagggcgaggaggaccagaaccccccctgccccagactgaacagcatgctgatggaggtggaggagcccgaggtgctgcaggacagcctggacatctgctacagcacccccagcatgtacttcgagctgcccgacagcttccagcactacagaagcgtgttctacagcttcgaggaggagcacatcagcttcgccctgtacgtggacaacagattcttcaccctgaccgtgaccagcctgcacctggtgttccagatgggcgtgatcttcccccagtag

SEQ ID NO: 90762 - DNA, 810 bp, synthetic construct
  misc_feature 1..810: note = Description of Artificial Sequence: Synthetic coding sequence
  source 1..810: mol_type = other DNA
atggacgagatcgagaagtaccaggaggtggaggaggaccaggaccccagctgccccagactgagcagagagctgctggacgagaaggagcccgaggtgctgcaggacagcctgggcagatgctacagcacccccagcggctacctggagctgcccgacctgggccagccctacagcagcgccgtgtacagcctggaggagcagtacctgggcctggccctggacgtggacagaatcaagaaggaccaggaggaggaggaggaccagggccccccctgccccagactgagcagagagctgctggaggtggtggagcccgaggtgctgcaggacagcctggacagatgctacagcacccccagcagctgcctggagcagcccgacagctgccagccctacggcagcagcttctacgccctggaggagaagcacgtgggcttcagcctggacgtgggcgagatcgagaagaagggcaagggcaagaagagaagaggcagaagaagcaagaaggagagaagaagaggcagaaaggagggcgaggaggaccagaaccccccctgccccagactgaacagcatgctgatggaggtggaggagcccgaggtgctgcaggacagcctggacatctgctacagcacccccagcatgtacttcgagctgcccgacagcttccagcactacagaagcgtgttctacagcttcgaggaggagcacatcagcttcgccctgtacgtggacaacagattcttcaccctgaccgtgaccagcctgcacctggtgttccagatgggcgtgatcttcccccagtag

SEQ ID NO: 90763 - DNA, 1539 bp, synthetic construct
  misc_feature 1..1539: note = Description of Artificial Sequence: Synthetic coding sequence
  source 1..1539: mol_type = other DNA
tgatacgaggagtgcaaggacctgatcaagagcatgctgagaaacgagagacagttcaaggaggagaagctggccgagcagctgaagcaggccgaggagctgagacagtacaaggtgctggtgcacgcccaggagagagagctgacccagctgagagagaagctgagagagggcagagacgccagcagaagcctgaacgagcacctgcaggccctgctgacccccgacgagcccgacaagagccagggccaggacctgcaggagcagctggccgagggctgcagactggcccagcacctggtgcagaagctgagccccgagaacgacaacgacgacgacgaggacgtgcaggtggaggtggccgagaaggtgcagaagagcagcgcccccagagagatgcagaaggccgaggagaaggaggtgcccgaggacagcctggaggagtgcgccatcacctgcagcaacagccacggcccctacgacagcaaccagccccacagaaagaccaagatcaccttcgaggaggacaaggtggacagcaccctgatcggcagcagcagccacgtggagtgggaggacgccgtgcacatcatccccgagaacgagagcgacgacgaggaggaggaggagaagggccccgtgagccccagaaacctgcaggagagcgaggaggaggaggtgccccaggagagctgggacgagggctacagcaccctgagcatcccccccgagatgctggccagctacaagagctacagcagcaccttccacagcctggaggagcagcaggtgtgcatggccgtggacatcggcagacacagatgggaccaggtgaagaaggaggaccacgaggccaccggccccagactgagcagagagctgctggacgagaagggccccgaggtgctgcaggacagcctggacagatgctacagcacccccagcggctgcctggagctgaccgacagctgccagccctacagaagcgccttctacgtgctggagcagcagagagtgggcctggccgtgaacatggacgagatcgagaagtaccaggaggtggaggaggaccaggaccccagctgccccagactgagcagagagctgctggacgagaaggagcccgaggtgctgcaggacagcctgggcagatgctacagcacccccagcggctacctggagctgcccgacctgggccagccctacagcagcgccgtgtacagcctggaggagcagtacctgggcctggccctggacgtggacagaatcaagaaggaccaggaggaggaggaggaccagggccccccctgccccagactgagcagagagctgctggaggtggtggagcccgaggtgctgcaggacagcctggacagatgctacagcacccccagcagctgcctggagcagcccgacagctgccagccctacggcagcagcttctacgccctggaggagaagcacgtgggcttcagcctggacgtgggcgagatcgagaagaagggcaagggcaagaagagaagaggcagaagaagctag

SEQ ID NO: 90764 - DNA, 567 bp, synthetic construct
  misc_feature 1..567: note = Description of Artificial Sequence: Synthetic coding sequence
  source 1..567: mol_type = other DNA
atggacgagatcgagaagtaccaggaggtggaggaggaccaggaccccagctgccccagactgagcagagagctgctggacgagaaggagcccgaggtgctgcaggacagcctgggcagatgctacagcacccccagcggctacctggagctgcccgacctgggccagccctacagcagcgccgtgtacagcctggaggagcagtacctgggcctggccctggacgtggacagaatcaagaaggaccaggaggaggaggaggaccagggccccccctgccccagactgagcagagagctgctggaggtggtggagcccgaggtgctgcaggacagcctggacagatgctacagcacccccagcagctgcctggagcagcccgacagctgccagccctacggcagcagcttctacgccctggaggagaagcacgtgggcttcagcctggacgtgggcgagatcgagaagaagggcaagggcaagaagagaagaggcagaagaagcaagaaggagagaagaagaggcagaaaggagggcgaggaggaccagaaccccccctgcccctag

SEQ ID NO: 90765 - DNA, 1539 bp, synthetic construct; identical to SEQ ID NO: 90763
  misc_feature 1..1539: note = Description of Artificial Sequence: Synthetic coding sequence
  source 1..1539: mol_type = other DNA

SEQ ID NO: 90766 - DNA, 1539 bp, synthetic construct; identical to SEQ ID NO: 90763
  misc_feature 1..1539: note = Description of Artificial Sequence: Synthetic coding sequence
  source 1..1539: mol_type = other DNA

SEQ ID NO: 90767 - DNA, 753 bp, synthetic construct
  misc_feature 1..753: note = Description of Artificial Sequence: Synthetic coding sequence
  source 1..753: mol_type = other DNA
gagatcgagaagtaccaggaggtggaggaggaccaggaccccagctgccccagactgagcagagagctgctggacgagaaggagcccgaggtgctgcaggacagcctgggcagatgctacagcacccccagcggctacctggagctgcccgacctgggccagccctacagcagcgccgtgtacagcctggaggagcagtacctgggcctggccctggacgtggacagaatcaagaaggaccaggaggaggaggaggaccagggccccccctgccccagactgagcagagagctgctggaggtggtggagcccgaggtgctgcaggacagcctggacagatgctacagcacccccagcagctgcctggagcagcccgacagctgccagccctacggcagcagcttctacgccctggaggagaagcacgtgggcttcagcctggacgtgggcgagatcgagaagaagggcaagggcaagaagagaagaggcagaagaagcaagaaggagagaagaagaggcagaaaggagggcgaggaggaccagaaccccccctgccccagactgagcggcgagctgctggacgagaaggagcccgaggtgctgcaggagagcctggacagatgctacagcacccccagcggctgcctggagctgaccgacagctgccagccctacagaagcgccttctacatcctggagcagcagagagtgggcctggccgtggacatggacggcgagtacctgagcatgtag

SEQ ID NO: 90768 - DNA, 1539 bp, synthetic construct; identical to SEQ ID NO: 90763
  misc_feature 1..1539: note = Description of Artificial Sequence: Synthetic coding sequence
  source 1..1539: mol_type = other DNA

SEQ ID NO: 90769 - DNA, 1539 bp, synthetic construct; identical to SEQ ID NO: 90763
  misc_feature 1..1539: note = Description of Artificial Sequence: Synthetic coding sequence
  source 1..1539: mol_type = other DNA

SEQ ID NO: 90770 - DNA, 1539 bp, synthetic construct; identical to SEQ ID NO: 90763
  misc_feature 1..1539: note = Description of Artificial Sequence: Synthetic coding sequence
  source 1..1539: mol_type = other DNA

SEQ ID NO: 90771 - DNA, 1539 bp, synthetic construct; identical to SEQ ID NO: 90763
  misc_feature 1..1539: note = Description of Artificial Sequence: Synthetic coding sequence
  source 1..1539: mol_type = other DNA

SEQ ID NO: 90772 - DNA, 2013 bp, synthetic construct
  misc_feature 1..2013: note = Description of Artificial Sequence: Synthetic coding sequence
  source 1..2013: mol_type = other DNA
atggtggtgagcgccggccccctgagcagcgagaaggccgagatgaacatcctggagatcaacgagaagctgagaccccagctggccgagaagaagcagcagttcagaaacctgaaggagaagtgcttcctgacccagctggccggcttcctggccaacagacagaagaagtacaagtacgaggagtgcaaggacctgatcaagttcatgctgagaaacgagagacagttcaaggaggagaagctggccgagcagctgaagcaggccgaggagctgagacagtacaaggtgctggtgcacgcccaggagagagagctgacccagctgagagagaagctgagagagggcagagacgccagcagaagcctgaacgagcacctgcaggccctgctgacccccgacgagcccgacaagagccagggccaggacctgcaggagcagctggccgagggctgcagactgacccagcacctggtgcagaagctgagccccgagaacgacaacgacgacgacgaggacgtgcaggtggaggtggccgagaaggtgcagaagagcagcgcccccagagagatgcagaaggccgaggagaaggaggtgcccgaggacagcctggaggagtgcgccatcacctgcagcaacagccacggcccctacgacagcaaccagccccacaagaagaccaagatcaccttcgaggaggacaaggtggacagcaccctgatcggcagcagcagccacgtggagtgggaggacgccgtgcacatcatccccgagaacgagagcgacgacgaggaggaggaggagaagggccccgtgagccccagaaacctgcaggagagcgaggaggaggaggtgccccaggagagctgggacgagggctacagcaccctgagcatcccccccgagatgctggccagctaccagagctacagcagcaccttccacagcctggaggagcagcaggtgtgcatggccgtggacatcggcagacacagatgggaccaggtgaagaaggaggaccaggaggccaccggccccagactgagcagagagctgctggacgagaaggagcccgaggtgctgcaggacagcctggacagatgctacagcacccccagcggctgcctggagctgaccgacagctgccagccctacagaagcgccttctacgtgctggagcagcagagagtgggcctggccatcgacatggacgagatcgagaagtaccaggaggtggaggaggaccaggaccccagctgccccagactgagcagagagctgctggacgagaaggagcccgaggtgctgcaggacagcctggacagatgctacagcacccccagcgactacctggagctgcccgacctgggccagccctacagcagcgccgtgtacagcctggaggagcagtacctgggcctggccctggacgtggacagaatcaagaaggaccaggaggaggaggaggaccagggccccccctgccccagactgagcagagagctgctggaggtggtggagcccgaggtgctgcaggacagcctggacagatgctacagcacccccagcagctgcctggagcagcccgacagctgccagccctacggcagcagcttctacgccctggaggagaagcacgtgggcttcagcctggacgtgggcgagatcgagaagaagggcaagggcaagaagagaagaggcagaagaagcaagaagaagagaagaagaggcagaaaggagggcgaggacgacaaccccccctgccccagactgtacggcgtgctgatggaggtggaggagcccgaggtgctgcaggacagcctggacagatgctacagcacccccagcatgtacttcgagcagcccgacagcttccagcactacagaagcgtgttctacagcttcgaggaggagcacatcagcttcgccctgtacgtggacaacagattcttcaccctgaccgtgaccagcctgcacctggtgttccagatgggcgtgatcttcccccagtag

SEQ ID NO: 90773 - DNA, 2013 bp, synthetic construct; identical to SEQ ID NO: 90772
  misc_feature 1..2013: note = Description of Artificial Sequence: Synthetic coding sequence
  source 1..2013: mol_type = other DNA

SEQ ID NO: 90774 - DNA, 2013 bp, synthetic construct
  misc_feature 1..2013: note = Description of Artificial Sequence: Synthetic coding sequence
  source 1..2013: mol_type = other DNA
atggtggtgagcgccggccccctgagcagcgagaaggccgagatgaacatcctggagatcaacgagaagctgagaccccagctggccgagaagaagcagcagttcagaaacctgaaggagaagtgcttcctgacccagctggccggcttcctggccaacagacagaagaagtacaagtacgaggagtgcaaggacctgatcaagttcatgctgagaaacgagagacagttcaaggaggagaagctggccgagcagctgaagcaggccgaggagctgagacagtacaaggtgctggtgcacgcccaggagagagagctgacccagctgagagagaagctgagagagggcagagacgccagcagaagcctgaacgagcacctgcaggccctgctgacccccgacgagcccgacaagagccagggccaggacctgcaggagcagctggccgagggctgcagactgacccagcacctggtgcagaagctgagccccgagaacgacaacgacgacgacgaggacgtgcaggtggaggtggccgagaaggtgcagaagagcagcgcccccagagagatgcagaaggccgaggagaaggaggtgcccgaggacagcctggaggagtgcgccatcacctgcagcaacagccacggcccctacgacagcaaccagccccacaagaagaccaagatcaccttcgaggaggacaaggtggacagcaccctgatcggcagcagcagccacgtggagtgggaggacgccgtgcacatcatccccgagaacgagagcgacgacgaggaggaggaggagaagggccccgtgagccccagaaacctgcaggagagcgaggaggaggaggtgccccaggagagctgggacgagggctacagcaccctgagcatcccccccgagatgctggccagctaccagagctacagcagcaccttccacagcctggaggagcagcaggtgtgcatggccgtggacatcggcagacacagatgggaccaggtgaagaaggaggaccaggaggccaccggccccagactgagcagagagctgctggacgagaaggagcccgaggtgctgcaggacagcctggacagatgctacagcacccccagcggctgcctggagctgaccgacagctgccagccctacagaagcgccttctacgtgctggagcagcagagagtgggcctggccatcgacatggacgagatcgagaagtaccaggaggtggaggaggaccaggaccccagctgccccagactgagcagagagctgctggacgagaaggagcccgaggtgctgcaggacagcctggacagatgctacagcacccccagcgactacctggagctgcccgacctgggccagccctacagcagcgccgtgtacagcctggaggagcagtacctgggcctggccctggacgtggacagaatcaagaaggaccaggaggaggaggaggaccagggccccccctgccccagactgagcagagagctgctggaggtggtggagcccgaggtgctgcaggacagcctggacagatactacagcacccccagcagctgcctggagcagcccgacagctgccagccctacggcagcagcttctacgccctggaggagaagcacgtgggcttcagcctggacgtgggcgagatcgagaagaagggcaagggcaagaagagaagaggcagaagaagcaagaagaagagaagaagaggcagaaaggagggcgaggacgacaaccccccctgccccagactgaacggcgtgctgatggaggtggaggagcccgaggtgctgcaggacagcctggacagatgctacagcacccagagcatgtacttcgagctgcccgacagcttccagcactacagaagcgtgttctacagcttcgaggaggagcacatcagcttcgccctgtacgtggacaacagattcttcaccctgaccgtgaccagcctgcacctggtgttccagatgggcgtgatcttcccccagtag

SEQ ID NO: 90775 - DNA, 2013 bp, synthetic construct; identical to SEQ ID NO: 90774
  misc_feature 1..2013: note = Description of Artificial Sequence: Synthetic coding sequence
  source 1..2013: mol_type = other DNA

SEQ ID NO: 90776 - DNA, 2526 bp, synthetic construct
  misc_feature 1..2526: note = Description of Artificial Sequence: Synthetic coding sequence
  source 1..2526: mol_type = other DNA
atggtggtgagcgccggcccctggagcagcgagaaggccgagatgaacatcctggagatcaacgagaagctgagaccccagctggccgagaacaagcagcagttcggcaacctgaaggagagatgcttcgtgacccagctggccggcttcctggccaaccagcagaagaagtacaactacgaggagtgcaaggacctgatcaagttcatgctgagaaacgagagacagttcaaggaggagaagctggccgagcagctgaagcaggccgaggagctgagacagtacaaggtgctggtgcacagccaggagagagagctgacccagctgagagagaagctgagagagggcagagacgccagcagaagcctgaacgagcacctgcaggccctgctgaccctggacgagcccgacaagagccagggccaggacctgcaggagcagctggccgagggctgcagactggcccagcacctggtgcagaagctgagccccgagaacgacgaggacgaggacgaggacgtgcaggtggaggaggccgagaaggtgcagaagagcagcgcccccagagaggtgcagaagaccgaggagagcaaggtgcccgaggacagcctggaggagtgcgccatcacctgcagcaacagccacggcccctgcgacagcaaccagccccacaagaacatcaagatcaccttcgaggaggacgaggtgaacagcaccctggtggtggacagagagagcagccacgacgagtgccaggacgccctgaacatcctgcccgtgcccggccccaccagcagcgccaccaacgtgagcatggtggtgagcgccggccccctgagcagcgagaaggccgagatgaacatcctggagatcaacgagaagctgcacccccagctggccgagaagaagcagcagttcagaaacctgaaggagagatgcttcgtgacccagctggccggcttcctggccaaccagcagaagaagtacaagtacgaggagtgcaaggacctgatcaagagcatgctgagaaacgagagacagttcaaggaggagaagctggccgagcagctgaagcaggccgaggagctgagacagtacaaggtgctggtgcacgcccaggagagagagctgacccagctgagagagaagctgagagagggcagagacgccagcagaagcctgaacgagcacctgcaggccctgctgacccccgacgagcccgacaagagccagggccaggacctgcaggagcagctggccgagggctgcagactggcccagcacctggtgcagaagctgagccccgagaacgacaacgacgacgacgaggacgtgcaggtggagctggccgagaaggtgcagaagagcagcgcccccagagagatgcagaaggccgaggagaaggaggtgcccgaggacagccaggaggagtgcgccatcacctacagcaacagccacggcccctacgacagcaaccagccccacagaaagaccaagatcaccttcgaggaggacaaggtggacagcaccctgatcggcagcagcagccacgtggagtgggaggacgccgtgcacatcatccccgagaacgagagcgacgacgaggaggaggaggagaagggccccgtgagccccagaaacctgcaggagagcgaggaggaggaggtgccccaggagagctgggacgagggctacagcaccctgagcatcccccccgagatgctggccagctaccagagctacagcagcaccttccacagcctggaggagcagcaggtgtgcatggccgtggacatcggcagacacagatgggaccaggtgaagaaggaggaccaggaggccaccggccccagactgagcagagagctgctggacgagaagggccccgaggtgctgcaggacagcctggacagatgctacagcacccccagcggctgcctggagctgaccgacagctgccagccctacagaagcgccttctacgtgctggagcagcagagagtgggcctggccgtggacatggacgagatcgagaagtaccaggaggtggaggaggaccaggaccccagctgccccagactgagcagagagctgctggacgagaaggagcccgaggtgctgcaggacagcctggacagatgctacagcacccccagcggctacctggagctgcccgacctgggccagccctacagcagcgccgtgtacagcctggaggagcagtacctgggcctggccctggacgtggacagaaccaagaaggaccaggaggaggaggaggaccagggccccccctgccccagactgagcagagagctgctggaggtggtggagcccgaggtgctgcaggacagcctggacagatgctacagcacccccagcagctgcctggagcagcccgacagctgccagccctacggcagcagcttctacgccctggaggagaagcacgtgggcttcagcctggacgtgggcgagatcgagaagaagggcaagggcaagaagagaagaggcagaagaagctag

SEQ ID NO: 90777 - DNA, 13866 bp, synthetic construct
  misc_feature 1..13866: note = Description of Artificial Sequence: Synthetic coding sequence
  source 1..13866: mol_type = other DNA
atggtggtgagcgccggcccctggagcagcgagaaggccgagatgaacatcctggagatcaacgagaagctgagaccccagctggccgagaacaagcagcagttcggcaacctgaaggagagatgcttcgtgacccagctggccggcttcctggccaaccagcagaagaagtacaactacgaggagtgcaaggacctgatcaagttcatgctgagaaacgagagacagttcaaggaggagaagctggccgagcagctgaagcaggccgaggagctgagacagtacaaggtgctggtgcacagccaggagagagagctgacccagctgagagagaagctgagagagggcagagacgccagcagaagcctgaacgagcacctgcaggccctgctgaccctggacgagcccgacaagagccagggccaggacctgcaggagcagctggccgagggctgcagactggcccagcacctggtgcagaagctgagccccgagaacgacgaggacgaggacgaggacgtgcaggtggaggaggccgagaaggtgcagaagagcagcgcccccagagaggtgcagaagaccgaggagagcaaggtgcccgaggacagcctggaggagtgcgccatcacctgcagcaacagccacggcccctgcgacagcaaccagccccacaagaacatcaagatcaccttcgaggaggacgaggtgaacagcaccctggtggtggacagagagagcagccacgacgagtgccaggacgccctgaacatcctgcccgtgcccggccccaccagcagcgccaccaacgtgagcatggtggtgagcgccggccccctgagcagcgagaaggccgagatgaacatcctggagatcaacgagaagctgcacccccagctggccgagaagaagcagcagttcagaaacctgaaggagagatgcttcgtgacccagctggccggcttcctggccaaccagcagaagaagtacaagtacgaggagtgcaaggacctgatcaagagcatgctgagaaacgagagacagttcaaggaggagaagctggccgagcagctgaagcaggccgaggagctgagacagtacaaggtgctggtgcacgcccaggagagagagctgacccagctgagagagaagctgagagagggcagagacgccagcagaagcctgaacgagcacctgcaggccctgctgacccccgacgagcccgacaagagccagggccaggacctgcaggagcagctggccgagggctgcagactggcccagcacctggtgcagaagctgagccccgagaacgacaacgacgacgacgaggacgtgcaggtggagctggccgagaaggtgcagaagagcagcgcccccagagagatgcagaaggccgaggagaaggaggtgcccgaggacagccaggaggagtgcgccatcacctacagcaacagccacggcccctacgacagcaaccagccccacagaaagaccaagatcaccttcgaggaggacaaggtggacagcaccctgatcggcagcagcagccacgtggagtgggaggacgccgtgcacatcatccccgagaacgagagcgacgacgaggaggaggaggagaagggccccgtgagccccagaaacctgcaggagagcgaggaggaggaggtgccccaggagagctgggacgagggctacagcaccctgagcatcccccccgagatgctggccagctaccagagctacagcagcaccttccacagcctggaggagcagcaggtgtgcatggccgtggacatcggcagacacagatgggaccaggtgaagaaggaggaccaggaggccaccggccccagactgagcagagagctgctggacgagaagggccccgaggtgctgcaggacagcctggacagatgctacagcacccccagcggctgcctggagctgaccgacagctgccagccctacagaagcgccttctacgtgctggagcagcagagaatcggcctggccgtggacatggacgagatcgagaagtaccaggaggtggaggaggaccaggaccccagctgccccagactgagcagagagctgctggacgagaaggagcccgaggtgctgcaggacagcctggacagatgctacagcacccccagcggctacctggagctgcccgacctgggccagccctacagcagcgccgtgtacagcctggaggagcagtacctgggcctggccctggacgtggacagaaccaagaaggaccaggaggaggaggaggaccagggccccccctgccccagactgagcagagagctgctggaggtggtggagcccgaggtgctgcaggacagcctggacagatgctacagcacccccagcagctgcctggagcagcccgacagctgccagccctacggcagcagcttctacgccctggaggagaagcacgtgggcttcagcctggacgtgggcgagatcgagaagaagggcaagggcaagaagagaagaggcagaagaagcaagaaggagagaagaagaggcagaaaggagggcgaggaggaccagaaccccccctgccccagactgagcagagagctgctggacgagaagggccccgaggtgctgcaggacagcctggacagaagctacagcacccccagcggctgcctggagctgaccgacagctgccagccctacagaagcgccttctacgtgctggagcagcagagagtgggcctggccgtggacatggacgagatcgagaagtaccaggaggtggaggaggaccaggaccccagctgccccagactgagcagagagctgctggacgagaaggagcccgaggtgctgcaggacagcctggacagatgctacagcacccccagcggctacctggagctgcccgacctgggccagccctacagcagcgccgtgtacagcctggaggagcagtacctgggcctggccctggacgtggacagaaccaagaaggaccaggaggaggaggaggaccagggccccccctgccccagactgagcagagagctgctggaggtggtggagcccgaggtgctgcaggacagcctggacagatgctacagcacccccagcagctgcctggagcagcccgacagctgccagccctacggcagcagcttctacgccctggaggagaagcacgtgggcttcagcctggacgtgggcgagatcgagaagaagggcaagggcaagaagagaagaggcagaagaagcaagaaggagagaagaagaggcagaaaggagggcgaggaggaccagaaccccccctgccccagactgagcagagagctgctggacgagaagggccccgaggtgctgcaggacagcctggacagatgctacagcacccccagcggctgcctggagctgaccgacagctgccagccctacagaagcgccttctacgtgctggagcagcagagagtgggcctggccgtggacatggacgagatcgagaagtaccaggaggtggaggaggaccaggaccccagctgccccagactgagcagagagctgctggacgagaaggagcccgaggtgctgcaggacagcctggacagatgctacagcacccccagcggctacctggagctgcccgacctgggccagccctacagcagcgccgtgtacagcctggaggagcagtacctgggcctggccctggacgtggacagaaccaagaaggaccaggaggaggaggaggaccagggccccccctgccccagactgagcagagagctgctggaggtggtggagcccgaggtgctgcaggacagcctggacagatgctacagcacccccagcagctgcctggagcagcccgacagctgccagccctacggcagcagcttctacgccctggaggagaagcacgtgggcttcagcctggacgtgggcgagatcgagaagaagggcaagggcaagaagagaagaggcagaagaagcaagaaggagagaagaagaggcagaaaggagggcgaggaggaccagaaccccccctgccccagactgagcagagagctgctggacgagaagggccccgaggtgctgcaggacagcctggacagaagctacagcacccccagcggctgcctggagctgaccgacagctgccagccctacagaagcgccttctacgtgctggagcagcagagagtgggcctggccgtggacatggacgagatcgagaagtaccaggaggtggaggaggaccaggaccccagctgccccagactgagcagagagctgctggacgagaaggagcccgaggtgctgcaggacagcctggacagatgctacagcacccccagcggctacctggagctgcccgacctgggccagccctacagcagcgccgtgtacagcctggaggagcagtacctgggcctggccctggacgtggacagaaccaagaaggaccaggaggaggaggaggaccagggccccccctgccccagactgagcagagagctgctggaggtggtggagcccgaggtgctgcaggacagcctggacagatgctacagcacccccagcagctgcctggagcagcccgacagctgccagccctacggcagcagcttctacgccctggaggagaagcacgtgggcttcagcctggacgtgggcgagatcgagaagaagggcaagggcaagaagagaagaggcagaagaagcaagaaggagagaagaagaggcagaaaggagggcgaggaggaccagaaccccccctgccccagactgagcagagagctgctggacgagaagggccccgaggtgctgcaggacagcctggacagatgctacagcacccccagcggctgcctggagctgaccgacagctgccagccctacagaagcgccttctacgtgctggagcagcagagagtgggcctggccgtggacatggacgagatcgagaagtaccaggaggtggaggaggaccaggaccccagctgccccagactgagcagagagctgctggacgagaaggagcccgaggtgctgcaggacagcctggacagatgctacagcacccccagcggctacctggagctgcccgacctgggccagccctacagcagcgccgtgtacagcctggaggagcagtacctgggcctggccctggacgtggacagaaccaagaaggaccaggaggaggaggaggaccagggccccccctgccccagactgagcagagagctgctggaggtggtggagcccgaggtgctgcaggacagcctggacagatgctacagcacccccagcagctgcctggagcagcccgacagctgccagccctacggcagcagcttctacgccctggaggagaagcacgtgggcttcagcctggacgtgggcgagatcgagaagaagggcaagggcaagaagagaagaggcagaagaagcaagaaggagagaagaagaggcagaaaggagggcgaggaggaccagaaccccccctgccccagactgagcagagagctgctggacgagaagggccccgaggtgctgcaggacagcctggacagaagctacagcacccccagcggctgcctggagctgaccgacagctgccagccctacagaagcgccttctacgtgctggagcagcagagagtgggcctggccgtggacatggacgagatcgagaagtaccaggaggtggaggaggaccaggaccccagctgccccagactgagcagagagctgctggacgagaaggagcccgaggtgctgcaggacagcctggacagatgctacagcacccccagcggctacctggagctgcccgacctgggccagccctacagcagcgccgtgtacagcctggaggagcagtacctgggcctggccctggacgtggacagaaccaagaaggaccaggaggaggaggaggaccagggccccccctgccccagactgagcagagagctgctggaggtggtggagcccgaggtgctgcaggacagcctggacagatgctacagcacccccagcagctgcctggagcagcccgacagctgccagccctacggcagcagcttctacgccctggaggagaagcacgtgggcttcagcctggacgtgggcgagatcgagaagaagggcaagggcaagaagagaagaggcagaagaagcaagaaggagagaagaagaggcagaaaggagggcgaggaggaccagaaccccccctgccccagactgagcagagagctgctggacgagaagggccccgaggtgctgcaggacagcctggacagaagctacagcacccccagcggctgcctggagctgaccgacagctgccagccctacagaagcgccttctacgtgctggagcagcagagagtgggcctggccgtggacatggacgagatcgagaagtaccaggaggtggaggaggaccaggaccccagctgccccagactgagcagagagctgctggacgagaaggagcccgaggtgctgcaggacagcctggacagatgctacagcacccccagcggctacctggagctgcccgacctgggccagccctacagcagcgccgtgtacagcctggaggagcagtacctgggcctggccctggacgtggacagaaccaagaaggaccaggaggaggaggaggaccagggccccccctgccccagactgagcagagagctgctggaggtggtggagcccgaggtgctgcaggacagcctggacagatgctacagcacccccagcagctgcctggagcagcccgacagctgccagccctacggcagcagcttctacgccctggaggagaagcacgtgggcttcagcctggacgtgggcgagatcgagaagaagggcaagggcaagaagagaagaggcagaagaagcaagaaggagagaagaagaggcagaaaggagggcgaggaggaccagaaccccccctgccccagactgagcagagagctgctggacgagaagggccccgaggtgctgcaggacagcctggacagaagctacagcacccccagcggctgcctggagctgaccgacagctgccagccctacagaagcgccttctacgtgctggagcagcagagagtgggcctggccgtggacatggacgagatcgagaagtaccaggaggtggaggaggaccaggaccccagctgccccagactgagcagagagctgctggacgagaaggagcccgaggtgctgcaggacagcctggacagatgctacagcacccccagcggctacctggagctgcccgacctgggccagccctacagcagcgccgtgtacagcctggaggagcagtacctgggcctggccctggacgtggacagaaccaagaaggaccaggaggaggaggaggaccagggccccccctgccccagactgagcagagagctgctggaggtggtggagcccgaggtgctgcaggacagcctggacagatgctacagcacccccagcagctgcctggagcagcccgacagctgccagccctacggcagcagcttctacgccctggaggagaagcacgtgggcttcagcctggacgtgggcgagatcgagaagaagggcaagggcaagaagagaagaggcagaagaagcaagaaggagagaagaagaggcagaaaggagggcgaggaggaccagaaccccccctgccccagactgagcagagagctgctggacgagaagggccccgaggtgctgcaggacagcctggacagaagctacagcacccccagcggctgcctggagctgaccgacagctgccagccctacagaagcgccttctacgtgctggagcagcagagagtgggcctggccgtggacatggacgagatcgagaagtaccaggaggtggaggaggaccaggaccccagctgccccagactgagcagagagctgctggacgagaaggagcccgaggtgctgcaggacagcctggacagatgctacagcacccccagcggctacctggagctgcccgacctgggccagccctacagcagcgccgtgtacagcctggaggagcagtacctgggcctggccctggacgtggacagaaccaagaaggaccaggaggaggaggaggaccagggccccccctgccccagactgagcagagagctgctggaggtggtggagcccgaggtgctgcaggacagcctggacagatgctacagcacccccagcagctgcctggagcagcccgacagctgccagccctacggcagcagcttctacgccctggaggagaagcacgtgggcttcagcctggacgtgggcgagatcgagaagaagggcaagggcaagaagagaagaggcagaagaagcaagaaggagagaagaagaggcagaaaggagggcgaggaggaccagaaccccccctgccccagactgagcagagagctgctggacgagaaggagcccgaggtgctgcaggacagcctggacagatgctacagcacccccagcggctacctggagctgcccgacctgggccagccctacagcagcgccgtgtacagcctggaggagcagtacctgggcctggccctggacgtggacagaaccaagaaggaccaggaggaggaggaggaccagggccccccctgccccagactgagcagagagctgctggaggtggtggagcccgaggtgctgcaggacagcctggacagatgctacagcacccccagcagctgcctggagcagcccgacagctgccagccctacggcagcagcttctacgccctggaggagaagcacgtgggcttcagcctggacgtgggcgagatcgagaagaagggcaagggcaagaagagaagaggcagaagaagcaagaaggagagaagaagaggcagaaaggagggcgaggaggaccagaaccccccctgccccagactgagcagagagctgctggacgagaaggagcccgaggtgctgcaggacagcctggacagatgctacagcacccccagcggctacctggagctgcccgacctgggccagccctacagcagcgccgtgtacagcctggaggagcagtacctgggcctggccctggacgtggacagaaccaagaaggaccaggaggaggaggaggaccagggccccccctgccccagactgagcagagagctgctggaggtggtggagcccgaggtgctgcaggacagcctggacagatgctacagcacccccagcagctgcctggagcagcccgacagctgccagccctacggcagcagcttctacgccctggaggagaagcacgtgggcttcagcctggacgtgggcgagatcgagaagaagggcaagggcaagaagagaagaggcagaagaagcaagaaggagagaagaagaggcagaaaggagggcgaggaggaccagaaccccccctgccccagactgagcagagagctgctggacgagaaggagcccgaggtgctgcaggacagcctggacagatgctacagcacccccagcggctacctggagctgcccgacctgggccagccctacagcagcgccgtgtacagcctggaggagcagtacctgggcctggccctggacgtggacagaaccaagaaggaccaggaggaggaggaggaccagggccccccctgccccagactgagcagagagctgctggaggtggtggagcccgaggtgctgcaggacagcctggacagatgctacagcacccccagcagctgcctggagcagcccgacagctgccagccctacggcagcagcttctacgccctggaggagaagcacgtgggcttcagcctggacgtgggcgagatcgagaagaagggcaagggcaagaagagaagaggcagaagaagcaagaaggagagaagaagaggcagaaaggagggcgaggaggaccagaaccccccctgccccagactgagcagagagctgctggacgagaagggccccgaggtgctgcaggacagcctggacagatgctacagcacccccagcggctgcctggagctgaccgacagctgccagccctacagaagcgccttctacgtgctggagcagcagagagtgggcctggccgtggacatggacgagatcgagaagtaccaggaggtggaggaggaccaggaccccagctgccccagactgagcagagagctgctggacgagaaggagcccgaggtgctgcaggacagcctggacagatgctacagcacccccagcggctacctggagctgcccgacctgggccagccctacagcagcgccgtgtacagcctggaggagcagtacctgggcctggccctggacgtggacagaaccaagaaggaccaggaggaggaggaggaccagggccccccctgccccagactgagcagagagctgctggaggtggtggagcccgaggtgctgcaggacagcctggacagatgctacagcacccccagcagctgcctggagcagcccgacagctgccagccctacggcagcagcttctacgccctggaggagaagcacgtgggcttcagcctggacgtgggcgagatcgagaagaagggcaagggcaagaagagaagaggcagaagaagcaagaaggagagaagaagaggcagaaaggagggcgaggaggaccagaaccccccctgccccagactgagcagagagctgctggacgagaagggccccgaggtgctgcaggacagcctggacagatgctacagcacccccagcggctgcctggagctgaccgacagctgccagccctacagaagcgccttctacgtgctggagcagcagagagtgggcctggccgtggacatggacgagatcgagaagtaccaggaggtggaggaggaccaggaccccagctgccccagactgagcagagagctgctggacgagaaggagcccgaggtgctgcaggacagcctggacagatgctacagcacccccagcggctacctggagctgcccgacctgggccagccctacagcagcgccgtgtacagcctggaggagcagtacctgggcctggccctggacgtggacagaaccaagaaggaccaggaggaggaggaggaccagggccccccctgccccagactgagcagagagctgctggaggtggtggagcccgaggtgctgcaggacagcctggacagatgctacagcacccccagcagctgcctggagcagcccgacagctgccagccctacggcagcagcttctacgccctggaggagaagcacgtgggcttcagcctggacgtgggcgagatcgagaagaagggcaagggcaagaagagaagaggcagaagaagcaagaaggagagaagaagaggcagaaaggagggcgaggaggaccagaaccccccctgccccagactgagcagagagctgctggacgagaagggccccgaggtgctgcaggacagcctggacagatgctacagcacccccagcggctgcctggagctgaccgacagctgccagccctacagaagcgccttctacgtgctggagcagcagagagtgggcctggccgtggacatggacgagatcgagaagtaccaggaggtggaggaggaccaggaccccagctgccccagactgagcagagagctgctggacgagaaggagcccgaggtgctgcaggacagcctggacagatgctacagcacccccagcggctacctggagctgcccgacctgggccagccctacagcagcgccgtgtacagcctggaggagcagtacctgggcctggccctggacgtggacagaaccaagaaggaccaggaggaggaggaggaccagggccccccctgccccagactgagcagagagctgctggaggtggtggagcccgaggtgctgcaggacagcctggacagatgctacagcacccccagcagctgcctggagcagcccgacagctgccagccctacggcagcagcttctacgccctggaggagaagcacgtgggcttcagcctggacgtgggcgagatcgagaagaagggcaagggcaagaagagaagaggcagaagaagcaagaaggagagaagaagaggcagaaaggagggcgaggaggaccagacccccccctgccccagactgagcagagagctgctggacgagaagggccccgaggtgctgcaggacagcctggacagatgctacagcacccccagcggctgcctggagctgaccgacagctgccagccctacagaagcgccttctacgtgctggagcagcagagagtgggcctggccgtggacatggacgagatcgagaagtaccaggaggtggaggaggaccaggaccccagctgccccagactgagcagagagctgctggacgagaaggagcccgaggtgctgcaggacagcctggacagatgctacagcacccccagcggctacctggagctgcccgacctgggccagccctacagcagcgccgtgtacagcctggaggagcagtacctgggcctggccctggacgtggacagaaccaagaaggaccaggaggaggaggaggaccagggccccccctgccccagactgagcagagagctgctggaggtggtggagcccgaggtgctgcaggacagcctggacagatgctacagcacccccagcagctgcctggagcagcccgacagctgccagccctacggcagcagcttctacgccctggaggagaagcacgtgggcttcagcctggacgtgggcgagatcgagaagaagggcaagggcaagaagagaagaggcagaagaagcaagaaggagagaagaagaggcagaaaggagggcgaggaggaccagaaccccccctgccccagactgagcagagagctgctggacgagaagggccccgaggtgctgcaggacagcctggacagatgctacagcacccccagcggctgcctggagctgaccgacagctgccagccctacagaagcgccttctacgtgctggagcagcagagagtgggcctggccgtggacatggacgagatcgagaagtaccaggaggtggaggaggaccaggaccccagctgccccagactgagcagagagctgctggacgagaaggagcccgaggtgctgcaggacagcctggacagatgctacagcacccccagcggctacctggagctgcccgacctgggccagccctacagcagcgccgtgtacagcctggaggagcagtacctgggcctggccctggacgtggacagaaccaagaaggaccaggaggaggaggaggaccagggccccccctgccccagactgagcagagagctgctggaggtggtggagcccgaggtgctgcaggacagcctggacagatgctacagcacccccagcagctgcctggagcagcccgacagctgccagccctacggcagcagcttctacgccctggaggagaagcacgtgggcttcagcctggacgtgggcgagatcgagaagaagggcaagggcaagaagagaagaggcagaagaagcaagaagaagagaagaagaggcagaaaggagggcgaggaggaccagaaccccccctgccccagactgaacggcgtgctgatggaggtggaggagcccgaggtgctgcaggacagcctggacggctgctacagcacccccagcatgtacttcgagctgcccgacagcttccagcactacagaagcgtgttctacagcttcgaggagcagcacatcagcttcgccctgtacgtggacaacagattcttcaccctgaccgtgaccagcctgcacctggtgttccagatgggcgtgatcttcccccagtag

SEQ ID NO: 90778 - DNA, 780 bp, synthetic construct
  misc_feature 1..780: note = Description of Artificial Sequence: Synthetic coding sequence
  source 1..780: mol_type = other DNA
atggtggtgagcgccggcccctggagcagcgagaaggccgagatgaacatcctggagatcaacgagaagctgagaccccagctggccgagaacaagcagcagttcggcaacctgaaggagagatgcttcgtgacccagctggccggcttcctggccaaccagcagaagaagtacaactacgaggagtgcaaggacctgatcaagttcatgctgagaaacgagagacagttcaaggaggagaagctggccgagcagctgaagcaggccgaggagctgagacagtacaaggtgctggtgcacagccaggagagagagctgacccagctgagagagaagctgagagagggcagagacgccagcagaagcctgaacgagcacctgcaggccctgctgaccctggacgagcccgacaagagccagggccaggacctgcaggagcagctggccgagggctgcagactggcccagcacctggtgcagaagctgagccccgagaacgacgaggacgaggacgaggacgtgcaggtggaggaggccgagaaggtgcagaagagcagcgcccccagagaggtgcagaagaccgaggagagcaaggtgcccgaggacagcctggaggagtgcgccatcacctgcagcaacagccacggcccctgcgacagcaaccagccccacaagaacatcaagatcaccttcgaggaggacgaggtgaacagcaccctggtggtggacagagagagcagccacgacgagtgccaggacgccctgaacatcctgccctag

SEQ ID NO: 90779 - DNA, 456 bp, synthetic construct
  misc_feature 1..456: note = Description of Artificial Sequence: Synthetic coding sequence
  source 1..456: mol_type = other DNA
ctgagcagagagctgctggaggtggtggagcccgaggtgctgcaggacagcctggacagatgctacagcacccccagcagctgcctggagcagcccgacagctgccagccctacggcagcagcttctacgccctggaggagaagcacgtgggcttcagcctggacgtgggcgagatcgagaagaagggcaagggcaagaagagaagaggcagaagaagcaagaaggagagaagaagaggcagaaaggagggcgaggaggaccagacccccccctgccccagactgagcagagagctgctggacgagaagggccccgaggtgctgcaggacagcctggacagatgctacagcacccccagcggctgcctggagctgaccgacagctgccagccctacagaagcgccttctacgtgctggagcagcagagagtgggcctggccgtggacatggactag

SEQ ID NO: 90780 - DNA, 456 bp, synthetic construct
  misc_feature 1..456: note = Description of Artificial Sequence: Synthetic coding sequence
  source 1..456: mol_type = other DNA
ctgagcagagagctgctggaggtggtggagcccgaggtgctgcaggacagcctggacagatgctacagcacccccagcagctgcctggagcagcccgacagctgccagccctacggcagcagcttctacgccctggaggagaagcacgtgggcttcagcctggacgtgggcgagatcgagaagaagggcaagggcaagaagagaagaggcagaagaagcaagaaggagagaagaagaggcagaaaggagggcgaggaggaccagaaccccccctgccccagactgagcagagagctgctggacgagaagggccccgaggtgctgcaggacagcctggacagatgctacagcacccccagcggctgcctggagctgaccgacagctgccagccctacagaagcgccttctacgtgctggagcagcagagagtgggcctggccgtggacatggactag

SEQ ID NO: 90781 - DNA, 456 bp, synthetic construct
  misc_feature 1..456: note = Description of Artificial Sequence: Synthetic coding sequence
  source 1..456: mol_type = other DNA
ctgagcagagagctgctggaggtggtggagcccgaggtgctgcaggacagcctggacagatgctacagcacccccagcagctgcctggagcagcccgacagctgccagccctacggcagcagcttctacgccctggaggagaagcacgtgggcttcagcctggacgtgggcgagatcgagaagaagggcaagggcaagaagagaagaggcagaagaagcaagaaggagagaagaagaggcagaaaggagggcgaggaggaccagaaccccccctgccccagactgagcagagagctgctggacgagaagggccccgaggtgctgcaggacagcctggacagaagctacagcacccccagcggctgcctggagctgaccgacagctgccagccctacagaagcgccttctacgtgctggagcagcagagagtgggcctggccgtggacatggactag

SEQ ID NO: 90782 - DNA, 456 bp, synthetic construct; identical to SEQ ID NO: 90780
  misc_feature 1..456: note = Description of Artificial Sequence: Synthetic coding sequence
  source 1..456: mol_type = other DNA

SEQ ID NO: 90783 - DNA, 2016 bp, synthetic construct
  misc_feature 1..2016: note = Description of Artificial Sequence: Synthetic coding sequence
  source 1..2016: mol_type = other DNA
atggtggtgagcgccggccccctgagcagcgagaaggccgagatgaacatcctggagatcaacgagaagctgcacccccagctggccgagaagaagcagcagttcagaaacctgaaggagagatgcttcgtgacccagctggccggcttcctggccaaccagcagaagaagtacaagtacgaggagtgcaaggacctgatcaagagcatgctgagaaacgagagacagttcaaggaggagaagctggccgagcagctgaagcaggccgaggagctgagacagtacaaggtgctggtgcacgcccaggagagagagctgacccagctgagagagaagctgagagagggcagagacgccagcagaagcctgaacgagcacctgcaggccctgctgacccccgacgagcccgacaagagccagggccaggacctgcaggagcagctggccgagggctgcagactggcccagcacctggtgcagaagctgagccccgagaacgacaacgacgacgacgaggacgtgcaggtggagctggccgagaaggtgcagaagagcagcgcccccagagagatgcagaaggccgaggagaaggaggtgcccgaggacagccaggaggagtgcgccatcacctacagcaacagccacggcccctacgacagcaaccagccccacagaaagaccaagatcaccttcgaggaggacaaggtggacagcaccctgatcggcagcagcagccacgtggagtgggaggacgccgtgcacatcatccccgagaacgagagcgacgacgaggaggaggaggagaagggccccgtgagccccagaaacctgcaggagagcgaggaggaggaggtgccccaggagagctgggacgagggctacagcaccctgagcatcccccccgagatgctggccagctaccagagctacagcagcaccttccacagcctggaggagcagcaggtgtgcatggccgtggacatcggcagacacagatgggaccaggtgaagaaggaggaccaggaggccaccggccccagactgagcagagagctgctggacgagaagggccccgaggtgctgcaggacagcctggacagatgctacagcacccccagcggctgcctggagctgaccgacagctgccagccctacagaagcgccttctacgtgctggagcagcagagagtgggcctggccgtggacatggacgagatcgagaagtaccaggaggtggaggaggaccaggaccccagctgccccagactgagcagagagctgctggacgagaaggagcccgaggtgctgcaggacagcctggacagatgctacagcacccccagcggctacctggagctgcccgacctgggccagccctacagcagcgccgtgtacagcctggaggagcagtacctgggcctggccctggacgtggacagaaccaagaaggaccaggaggaggaggaggaccagggccccccctgccccagactgagcagagagctgctggaggtggtggagcccgaggtgctgcaggacagcctggacagatgctacagcacccccagcagctgcctggagcagcccgacagctgccagccctacggcagcagcttctacgccctggaggagaagcacgtgggcttcagcctggacgtgggcgagatcgagaagaagggcaagggcaagaagagaagaggcagaagaagcaagaagaagagaagaagaggcagaaaggagggcgaggaggaccagaaccccccctgccccagactgaacggcgtgctgatggaggtggaggagcccgaggtgctgcaggacagcctggacggctgctacagcacccccagcatgtacttcgagctgcccgacagcttccagcactacagaagcgtgttctacagcttcgaggagcagcacatcagcttcgccctgtacgtggacaacagattcttcaccctgaccgtgaccagcctgcacctggtgttccagatgggcgtgatcttcccccagtag

SEQ ID NO: 90784 - DNA, 474 bp, synthetic construct
  misc_feature 1..474: note = Description of Artificial Sequence: Synthetic coding sequence
  source 1..474: mol_type = other DNA
ctgagcagagagctgctggaggtggtggagcccgaggtgctgcaggacagcctggacagatgctacagcacccccagcagctgcctggagcagcccgacagctgccagccctacggcagcagcttctacgccctggaggagaagcacgtgggcttcagcctggacgtgggcgagatcgagaagaagggcaagggcaagaagagaagaggcagaagaagcaagaaggagagaagaagaggcagaaaggagggcgaggaggaccagaaccccccctgccccagactgagcagagagctgctggacgagaagggccccgaggtgctgcaggacagcctggacagatgctacagcacccccagcggctgcctggagctgaccgacagctgccagccctacagaagcgccttctacgtgctggagcagcagagagtgggcctggccgtggacatggacggcgagtacctgagcatgtag

SEQ ID NO: 90785 - DNA, 681 bp, synthetic construct
  misc_feature 1..681: note = Description of Artificial Sequence: Synthetic coding sequence
  source 1..681: mol_type = other DNA
ctgagcagagagctgctggaggtggtggagcccgaggtgctgcaggacagcctggacagatgctacagcacccccagcagctgcctggagcagcccgacagctgccagccctacggcagcagcttctacgccctggaggagaagcacgtgggcttcagcctggacgtgggcgagatcgagaagaagggcaagggcaagaagagaagaggcagaagaagcaagaaggagagaagaagaggcagaaaggagggcgaggaggaccagaaccccccctgccccagactgagcagagagctgctggacgagaagggccccgaggtgctgcaggacagcctggacagatgctacagcacccccagcggctgcctggagctgaccgacagctgccagccctacagaagcgccttctacgtgctggagcagcagagagtgggcctggccgtggacatggacgagatcgagaagtaccaggaggtggaggaggaccaggaccccagctgccccagactgagcagagagctgctggacgagaaggagcccgaggtgctgcaggacagcctggacagatgctacagcacccccagcggctacctggagctgcccgacctgggccagccctacagcagcgccgtgtacagcctggaggagcagtacctgggcctggccctggacgtggactag

SEQ ID NO: 90786 - DNA, 810 bp, synthetic construct
  misc_feature 1..810: note = Description of Artificial Sequence: Synthetic coding sequence
  source 1..810: mol_type = other DNA
atggacgagatcgagaagtaccaggaggtggaggaggaccaggaccccagctgccccagactgagcagagagctgctggacgagaaggagcccgaggtgctgcaggacagcctggacagatgctacagcacccccagcggctacctggagctgcccgacctgggccagccctacagcagcgccgtgtacagcctggaggagcagtacctgggcctggccctggacgtggacagaaccaagaaggaccaggaggaggaggaggaccagggccccccctgccccagactgagcagagagctgctggaggtggtggagcccgaggtgctgcaggacagcctggacagatgctacagcacccccagcagctgcctggagcagcccgacagctgccagccctacggcagcagcttctacgccctggaggagaagcacgtgggcttcagcctggacgtgggcgagatcgagaagaagggcaagggcaagaagagaagaggcagaagaagcaagaagaagagaagaagaggcagaaaggagggcgaggaggaccagaaccccccctgccccagactgaacggcgtgctgatggaggtggaggagcccgaggtgctgcaggacagcctggacggctgctacagcacccccagcatgtacttcgagctgcccgacagcttccagcactacagaagcgtgttctacagcttcgaggagcagcacatcagcttcgccctgtacgtggacaacagattcttcaccctgaccgtgaccagcctgcacctggtgttccagatgggcgtgatcttcccccagtag

SEQ ID NO: 90787 - DNA, 474 bp, synthetic construct; identical to SEQ ID NO: 90784
  misc_feature 1..474: note = Description of Artificial Sequence: Synthetic coding sequence
  source 1..474: mol_type = other DNA

SEQ ID NO: 90788 - DNA, 525 bp, synthetic construct
  misc_feature 1..525: note = Description of Artificial Sequence: Synthetic coding sequence
  source 1..525: mol_type = other DNA
ctgagcagagagctgctggaggtggtggagcccgaggtgctgcaggacagcctggacagatgctacagcacccccagcagctgcctggagcagcccgacagctgccagccctacggcagcagcttctacgccctggaggagaagcacgtgggcttcagcctggacgtgggcgagatcgagaagaagggcaagggcaagaagagaagaggcagaagaagcaagaagaagagaagaagaggcagaaaggagggcgaggaggaccagaaccccccctgccccagactgaacggcgtgctgatggaggtggaggagcccgaggtgctgcaggacagcctggacggctgctacagcacccccagcatgtacttcgagctgcccgacagcttccagcactacagaagcgtgttctacagcttcgaggagcagcacatcagcttcgccctgtacgtggacaacagattcttcaccctgaccgtgaccagcctgcacctggtgttccagatgggcgtgatcttcccccagtag

SEQ ID NO: 90789 - DNA, 456 bp, synthetic construct; identical to SEQ ID NO: 90781
  misc_feature 1..456: note = Description of Artificial Sequence: Synthetic coding sequence
  source 1..456: mol_type = other DNA

SEQ ID NO: 90790 - DNA, 759 bp, synthetic construct
  misc_feature 1..759: note = Description of Artificial Sequence: Synthetic coding sequence
  source 1..759: mol_type = other DNA
atggacgagatcgagaagtaccaggaggtggaggaggaccaggaccccagctgccccagactgagcagagagctgctggacgagaaggagcccgaggtgctgcaggacagcctggacagatgctacagcacccccagcggctacctggagctgcccgacctgggccagccctacagcagcgccgtgtacagcctggaggagcagtacctgggcctggccctggacgtggacagaaccaagaaggaccaggaggaggaggaggaccagggccccccctgccccagactgagcagagagctgctggaggtggtggagcccgaggtgctgcaggacagcctggacagatgctacagcacccccagcagctgcctggagcagcccgacagctgccagccctacggcagcagcttctacgccctggaggagaagcacgtgggcttcagcctggacgtgggcgagatcgagaagaagggcaagggcaagaagagaagaggcagaagaagcaagaaggagagaagaagaggcagaaaggagggcgaggaggaccagaaccccccctgccccagactgagcagagagctgctggacgagaagggccccgaggtgctgcaggacagcctggacagatgctacagcacccccagcggctgcctggagctgaccgacagctgccagccctacagaagcgccttctacgtgctggagcagcagagagtgggcctggccgtggacatggacggcgagtacctgagcatgtag

SEQ ID NO: 90791 - DNA, 1734 bp, synthetic construct
  misc_feature 1..1734: note = Description of Artificial Sequence: Synthetic coding sequence
  source 1..1734: mol_type = other DNA
atggtggtgagcgccggcccctggagcggcgagaaggccgagatgaacatcctggagatcaacaagaagagcagaccccagctggccgagaacaagcagcagttcagaaacctgaagcagaagtgcctggtgacccaggtggcctacttcctggccaacagacagaacaactacgactacgaggactgcaaggacctgatcaagagcatgctgagagacgagagactgctgaccgaggagaagctggccgaggagctgggccaggccgaggagctgagacagtacaaggtgctggtgcacagccaggagagagagctgacccagctgagagagaagctgcaggagggcagagacgccagcagaagcctgaaccagcacctgcaggccctgctgacccccgacgagcccgacaacagccagggcagagacctgagagagcagctggccgagggctgcagactggcccagcacctggtgcagaagctgagccccgagaacgacgacgacgaggacgaggacgtgaaggtggaggaggccgagaaggtgcaggagctgtacgcccccagagaggtgcagaaggccgaggagaaggaggtgcccgaggacagcctggaggagtgcgccatcacctgcagcaacagccaccacccctgcgagagcaaccagccctacggcaacaccagaatcaccttcgaggaggaccaggtggacagcaccctgatcgacagcagcagccacgacgagtggctggacgccgtgtgcatcatccccgagaacgagagcgaccacgagcaggaggaggagaagggccccgtgagccccagaaacctgcaggagagcgaggaggaggaggccccccaggagagctgggacgagggcgactggaccctgagcatcccccccgacatgagcgccagctaccagagcgacagaagcaccttccacagcgtggaggagcagcaggtgggcctggccctggacatcggcagacactggtgcgaccaggtgaagaaggaggaccaggaggccaccagccccagactgagcagagagctgctggacgagaaggagcccgaggtgctgcaggacagcctggacagattctacagcacccccttcgagtacctggagctgcccgacctgtgccagccctacagaagcgacttctacagcctgcaggagcagcacctgggcctggccctggacctggacagaatgaagaaggaccaggaggaggaggaggaccagggccccccctgccccagactgagcagagagctgcccgaggtggtggagcccgaggacctgcaggacagcctggacagatggtacagcacccccttcagctaccccgagctgcccgacagctgccagccctacggcagctgcttctacagcctggaggaggagcacgtgggcttcagcctggacgtggacgagatcgagaagtaccaggagggcgaggaggaccagaagcccccctgccccagactgaacgaggtgctgatggaggccgaggagcccgaggtgctgcaggacagcctggacagatgctacagcaccaccagcacctacttccagctgcacgccagcttccagcagtacagaagcgccttctacagcttcgaggagcaggacgtgagcctggccctggacgtggacaacagattcttcaccctgaccgtgatcagacaccacctggccttccagatgggcgtgatcttcccccactag

SEQ ID NO: 90792 - DNA, 1902 bp, synthetic construct
  misc_feature 1..1902: note = Description of Artificial Sequence: Synthetic coding sequence
  source 1..1902: mol_type = other DNA
atgcccctgacccccaccgtgcagggcttccagtggaccctgagaggccccgacgtggagaccagccccttcggcgcccccagagccgccagccacggcgtgggcagacaccaggagctgagagaccccaccgtgcccggccccaccagcagcgccaccaacgtgagcatggtggtgagcgccggcccctggagcggcgagaaggccgagatgaacatcctggagatcaacaagaagagcagaccccagctggccgagaacaagcagcagttcagaaacctgaagcagaagtgcctggtgacccaggtggcctacttcctggccaacagacagaacaactacgactacgaggactgcaaggacctgatcaagagcatgctgagagacgagagactgctgaccgaggagaagctggccgaggagctgggccaggccgaggagctgagacagtacaaggtgctggtgcacagccaggagagagagctgacccagctgagagagaagctgcaggagggcagagacgccagcagaagcctgaaccagcacctgcaggccctgctgacccccgacgagcccgacaacagccagggcagagacctgagagagcagctggccgagggctgcagactggcccagcacctggtgcagaagctgagccccgagaacgacgacgacgaggacgaggacgtgaaggtggaggaggccgagaaggtgcaggagctgtacgcccccagagaggtgcagaaggccgaggagaaggaggtgcccgaggacagcctggaggagtgcgccatcacctgcagcaacagccaccacccctgcgagagcaaccagccctacggcaacaccagaatcaccttcgaggaggaccaggtggacagcaccctgatcgacagcagcagccacgacgagtggctggacgccgtgtgcatcatccccgagaacgagagcgaccacgagcaggaggaggagaagggccccgtgagccccagaaacctgcaggagagcgaggaggaggaggccccccaggagagctgggacgagggcgactggaccctgagcatcccccccgacatgagcgccagctaccagagcgacagaagcaccttccacagcgtggaggagcagcaggtgggcctggccctggacatcggcagacactggtgcgaccaggtgaagaaggaggaccaggaggccaccagccccagactgagcagagagctgctggacgagaaggagcccgaggtgctgcaggacagcctggacagattctacagcacccccttcgagtacctggagctgcccgacctgtgccagccctacagaagcgacttctacagcctgcaggagcagcacctgggcctggccctggacctggacagaatgaagaaggaccaggaggaggaggaggaccagggccccccctgccccagactgagcagagagctgcccgaggtggtggagcccgaggacctgcaggacagcctggacagatggtacagcacccccttcagctaccccgagctgcccgacagctgccagccctacggcagctgcttctacagcctggaggaggagcacgtgggcttcagcctggacgtggacgagatcgagaagtaccaggagggcgaggaggaccagaagcccccctgccccagactgaacgaggtgctgatggaggccgaggagcccgaggtgctgcaggacagcctggacagatgctacagcaccaccagcacctacttccagctgcacgccagcttccagcagtacagaagcgccttctacagcttcgaggagcaggacgtgagcctggccctggacgtggacaacagattcttcaccctgaccgtgatcagacaccacctggccttccagatgggcgtgatcttcccccactag

SEQ ID NO: 90793 - DNA, 1866 bp, synthetic construct
  misc_feature 1..1866: note = Description of Artificial Sequence: Synthetic coding sequence
  source 1..1866: mol_type = other DNA
atgcccctgacccccaccgtgcagggcttccagtggaccctgagaggccccgacgtggagaccagccccttcggcgcccccagagccgccagccacggcgtgggcagacaccaggagctgagagaccccaccgtgcccggccccaccagcagcgccaccaacgtgagcatggtggtgagcgccggcccctggagcggcgagaaggccgagatgaacatcctggagatcaacaagaagagcagaccccagctggccgagaacaagcagcagttcagaaacctgaagcagaagtgcctggtgacccaggtggcctacttcctggccaacagacagaacaactacgactacgaggactgcaaggacctgatcaagagcatgctgagagacgagagactgctgaccgaggagaagctggccgaggagctgggccaggccgaggagctgagacagtacaaggtgctggtgcacagccaggagagagagctgacccagctgagagagaagctgcaggagggcagagacgccagcagaagcctgaaccagcacctgcaggccctgctgacccccgacgagcccgacaacagccagggcagagacctgagagagcagctggccgagggctgcagactggcccagcacctggtgcagaagctgagccccgagaacgacgacgacgaggacgaggacgtgaaggtggaggaggccgagaaggtgcaggagctgtacgcccccagagaggtgcagaaggccgaggagaaggaggtgcccgaggacagcctggaggagtgcgccatcacctgcagcaacagccaccacccctgcgagagcaaccagccctacggcaacaccagaatcaccttcgaggaggaccaggtggacagcaccctgatcgacagcagcagccacgacgagtggctggacgccgtgtgcatcatccccgagaacgagagcgaccacgagcaggaggaggagaagggccccgtgagccccagaagcagcggcagattctgctgcctgatcagcgtgggctacatcttctgccacccctgccccgcctggctgatcagaaacctgcaggagagcgaggaggaggaggccccccaggagagctgggacgagggccactggtgcgaccaggtgaagaaggaggaccaggaggccaccagccccagactgagcagagagctgctggacgagaaggagcccgaggtgctgcaggacagcctggacagattctacagcacccccttcgagtacctggagctgcccgacctgtgccagccctacagaagcgacttctacagcctgcaggagcagcacctgggcctggccctggacctggacagaatgaagaaggaccaggaggaggaggaggaccagggccccccctgccccagactgagcagagagctgcccgaggtggtggagcccgaggacctgcaggacagcctggacagatggtacagcacccccttcagctaccccgagctgcccgacagctgccagccctacggcagctgcttctacagcctggaggaggagcacgtgggcttcagcctggacgtggacgagatcgagaagtaccaggagggcgaggaggaccagaagcccccctgccccagactgaacgaggtgctgatggaggccgaggagcccgaggtgctgcaggacagcctggacagatgctacagcaccaccagcacctacttccagctgcacgccagcttccagcagtacagaagcgccttctacagcttcgaggagcaggacgtgagcctggccctggacgtggacaacagattcttcaccctgaccgtgatcagacaccacctggccttccagatgggcgtgatcttcccccactag

SEQ ID NO: 90794 - DNA, 1062 bp, synthetic construct
  misc_feature 1..1062: note = Description of Artificial Sequence: Synthetic coding sequence
  source 1..1062: mol_type = other DNA
atggtggtgagcgccggcccctggagcggcgagaaggccgagatgaacatcctggagatcaacaagaagagcagaccccagctggccgagaacaagcagcagttcagaaacctgaagcagaagtgcctggtgacccaggtggcctacttcctggccaacagacagaacaactacgactacgaggactgcaaggacctgatcaagagcatgctgagagacgagagactgctgaccgaggagaagctggccgaggagctgggccaggccgaggagctgagacagtacaaggtgctggtgcacagccaggagagagagctgacccagctgagagagaagctgcaggagggcagagacgccagcagaagcctgaaccagcacctgcaggccctgctgacccccgacgagcccgacaacagccagggcagagacctgagagagcagctggccgagggctgcagactggcccagcacctggtgcagaagctgagccccgagaacgacgacgacgaggacgaggacgtgaaggtggaggaggccgagaaggtgcaggagctgtacgcccccagagaggtgcagaaggccgaggagaaggaggtgcccgaggacagcctggaggagtgcgccatcacctgcagcaacagccaccacccctgcgagagcaaccagccctacggcaacaccagaatcaccttcgaggaggaccaggtggacagcaccctgatcgacagcagcagccacgacgagtggctggacgccgtgtgcatcatccccgagaacgagagcgaccacgagcaggaggaggagaagggccccgtgagccccagaaacctgcaggagagcgaggaggaggaggccccccaggagagctgggacgagggcgactggaccctgagcatcccccccgacatgagcgccagctaccagagcgacagaagcaccttccacagcgtggaggagcagcaggtgggcctggccctggacatcggcagacactggtgcgaccaggagaagggcggccccagaggccacaagagccaggcccagcagggcgccgccggctag

SEQ ID NO: 90795 - DNA, 1668 bp, synthetic construct
  misc_feature 1..1668: note = Description of Artificial Sequence: Synthetic coding sequence
  source 1..1668: mol_type = other DNA
atggtggtgagcgccggcccctggagcggcgagaaggccgagatgaacatcctggagatcaacaagaagagcagaccccagctggccgagaacaagcagcagttcagaaacctgaagcagaagtgcctggtgacccaggtggcctacttcctggccaacagacagaacaactacgactacgaggactgcaaggacctgatcaagagcatgctgagagacgagagactgctgaccgaggagaagctggccgaggagctgggccaggccgaggagctgagacagtacaaggtgctggtgcacagccaggagagagagctgacccagctgagagagaagctgcaggagggcagagacgccagcagaagcctgaaccagcacctgcaggccctgctgacccccgacgagcccgacaacagccagggcagagacctgagagagcagctggccgagggctgcagactggcccagcacctggtgcagaagctgagccccgagaacgacgacgacgaggacgaggacgtgaaggtggaggaggccgagaaggtgcaggagctgtacgcccccagagaggtgcagaaggccgaggagaaggaggtgcccgaggacagcctggaggagtgcgccatcacctgcagcaacagccaccacccctgcgagagcaaccagccctacggcaacaccagaatcaccttcgaggaggaccaggtggacagcaccctgatcgacagcagcagccacgacgagtggctggacgccgtgtgcatcatccccgagaacgagagcgaccacgagcaggaggaggagaagggccccgtgagccccagaaacctgcaggagagcgaggaggaggaggccccccaggagagctgggacgagggcgactggaccctgagcatcccccccgacatgagcgccagctaccagagcgacagaagcaccttccacagcgtggaggagcagcaggtgggcctggccctggacatcggcagacactggtgcgaccaggtgaagaaggaggaccaggaggccaccagccccagactgagcagagagctgctggacgagaaggagcccgaggtgctgcaggacagcctggacagattctacagcacccccttcgagtacctggagctgcccgacctgtgccagccctacagaagcgacttctacagcctgcaggagcagcacctgggcctggccctggacctggacagaatgaagaaggaccaggaggaggaggaggaccagggccccccctgccccagactgagcagagagctgcccgaggtggtggagcccgaggacctgcaggacagcctggacagatggtacagcacccccttcagctaccccgagctgcccgacagctgccagccctacggcagctgcttctacagcctggaggaggagcacgtgggcttcagcctggacgtggacgagatcgagaagtaccaggagggcgaggaggaccagaagcccccctgccccagactgaacgaggtgctgatggaggccgaggagcccgaggtgctgcaggacagcctggacagatgctacagcaccaccagcacctacttccagctgcacgccagcttccagcagtacagaagcgccttctacagcttcgaggagcaggacgtgagcctggccctggacgtggacaactag

SEQ ID NO: 90796 - DNA, 1692 bp, synthetic construct
  misc_feature 1..1692: note = Description of Artificial Sequence: Synthetic coding sequence
  source 1..1692: mol_type = other DNA
atgcccctgacccccaccgtgcagggcttccagtggaccctgagaggccccgacgtggagaccagccccttcggcgcccccagagccgccagccacggcgtgggcagacaccaggagctgagagaccccaccgactacgaggactgcaaggacctgatcaagagcatgctgagagacgagagactgctgaccgaggagaagctggccgaggagctgggccaggccgaggagctgagacagtacaaggtgctggtgcacagccaggagagagagctgacccagctgagagagaagctgcaggagggcagagacgccagcagaagcctgaaccagcacctgcaggccctgctgacccccgacgagcccgacaacagccagggcagagacctgagagagcagctggccgagggctgcagactggcccagcacctggtgcagaagctgagccccgagaacgacgacgacgaggacgaggacgtgaaggtggaggaggccgagaaggtgcaggagctgtacgcccccagagaggtgcagaaggccgaggagaaggaggtgcccgaggacagcctggaggagtgcgccatcacctgcagcaacagccaccacccctgcgagagcaaccagccctacggcaacaccagaatcaccttcgaggaggaccaggtggacagcaccctgatcgacagcagcagccacgacgagtggctggacgccgtgtgcatcatccccgagaacgagagcgaccacgagcaggaggaggagaagggccccgtgagccccagaaacctgcaggagagcgaggaggaggaggccccccaggagagctgggacgagggcgactggaccctgagcatcccccccgacatgagcgccagctaccagagcgacagaagcaccttccacagcgtggaggagcagcaggtgggcctggccctggacatcggcagacactggtgcgaccaggtgaagaaggaggaccaggaggccaccagccccagactgagcagagagctgctggacgagaaggagcccgaggtgctgcaggacagcctggacagattctacagcacccccttcgagtacctggagctgcccgacctgtgccagccctacagaagcgacttctacagcctgcaggagcagcacctgggcctggccctggacctggacagaatgaagaaggaccaggaggaggaggaggaccagggccccccctgccccagactgagcagagagctgcccgaggtggtggagcccgaggacctgcaggacagcctggacagatggtacagcacccccttcagctaccccgagctgcccgacagctgccagccctacggcagctgcttctacagcctggaggaggagcacgtgggcttcagcctggacgtggacgagatcgagaagtaccaggagggcgaggaggaccagaagcccccctgccccagactgaacgaggtgctgatggaggccgaggagcccgaggtgctgcaggacagcctggacagatgctacagcaccaccagcacctacttccagctgcacgccagcttccagcagtacagaagcgccttctacagcttcgaggagcaggacgtgagcctggccctggacgtggacaacagattcttcaccctgaccgtgatcagacaccacctggccttccagatgggcgtgatcttcccccactag

SEQ ID NO: 90797 - DNA, 1917 bp, synthetic construct
  misc_feature 1..1917: note = Description of Artificial Sequence: Synthetic coding sequence
  source 1..1917: mol_type = other DNA
atggtggtgagcgccgaccccctgagcagcgagagagccgagatgaacatcctggagatcaaccaggagctgagaagccagctggccgagagcaaccagcagttcagagacctgaaggagaagttcctgatcacccaggccaccgcctacagcctggccaaccagctgaagaagtacaagtgcgaggagtacaaggacatcatcgacagcgtgctgagagacgagctgcagagcatggagaagctggccgagaagctgagacaggccgaggagctgagacagtacaaggccctggtgcacagccaggccaaggagctgacccagctgagagagaagctgagagagggcagagacgccagcagatggctgaacaagcacctgaagaccctgctgacccccgacgaccccgacaagagccagggccaggacctgagagagcagctggccgagggccacagactggccgagcacctggtgcacaagctgagccccgagaacgacgaggacgaggacgaggacgaggacgacaaggacgaggaggtggagaaggtgcaggagagccccgcccccagagaggtgcagaagaccgaggagaaggaggtgccccaggacagcctggaggagtgcgccgtgacctgcagcaacagccacaaccccagcaacagcaaccagccccacagaagcaccaagatcaccttcaaggagcacgaggtggacagcgccctggtggtggagagcgagcacccccacgacgaggaggaggaggccctgaacatcccccccgagaaccagaacgaccacgaggaggaggagggcaaggcccccgtgccccccagacaccacgacaagagcaacagctacagacacagagaggtgagcttcctggccctggacgagcagaaggtgtgcagcgcccaggacgtggccagagactacagcaaccccaagtgggacgagaccagcctgggcttcctggagaagcagagcgacctggaggaggtgaagggccaggagaccgtggcccccagactgagcagaggccccctgagagtggacaagcacgagatcccccaggagagcctggacggctgctgcctgacccccagcatcctgcccgacctgacccccagctaccacccctactggagcaccctgtacagcttcgaggacaagcaggtgagcctggccctggtggacaagatcaagaaggaccaggaggagatcgaggaccagagccccccctgccccagactgagccaggagctgcccgaggtgaaggagcaggaggtgcccgaggacagcgtgaacgaggtgtacctgacccccagcgtgcaccacgacgtgagcgactgccaccagccctacagcagcaccctgagcagcctggaggaccagctggcctgcagcgccctggacgtggccagccccaccgaggccgcctgcccccagggcacctggagcggcgacctgagccaccaccagagcgaggtgcaggtgagccaggcccagctggagcccagcaccctggtgcccagctgcctgagactgcagctggaccagggcttccactgcggcaacggcctggcccagagaggcctgagcagcaccacctgcagcttcagcgccaacgccgacagcggcaaccagtggcccttccaggagctggtgctggagcccagcctgggcatgaagaaccccccccagctggaggacgacgccctggagggcagcgccagcaacacccagggcagacaggtgaccggcagaatcagagccagcctggtgctgatcctgaagaccatcagaagaagactgcccttcagcaagtggagactggccttcagattcgccggcccccacgccgagagcgccgagatccccaacaccgccggcagaacccagagaatggccggctag

SEQ ID NO: 90798 - DNA, 1917 bp, synthetic construct; identical to SEQ ID NO: 90797
  misc_feature 1..1917: note = Description of Artificial Sequence: Synthetic coding sequence
  source 1..1917: mol_type = other DNA

SEQ ID NO: 90799 - DNA, 1722 bp, synthetic construct
  misc_feature 1..1722: note = Description of Artificial Sequence: Synthetic coding sequence
  source 1..1722: mol_type = other DNA
atggtggtgagcgccgaccccctgagcagcgagagagccgagatgaacatcctggagatcaaccaggagctgagaagccagctggccgagagcaaccagcagttcagagacctgaaggagaagttcctgatcacccaggccaccgcctacagcctggccaaccagctgaagaagtacaagtgcgaggagtacaaggacatcatcgacagcgtgctgagagacgagctgcagagcatggagaagctggccgagaagctgagacaggccgaggagctgagacagtacaaggccctggtgcacagccaggccaaggagctgacccagctgagagagaagctgagagagggcagagacgccagcagatggctgaacaagcacctgaagaccctgctgacccccgacgaccccgacaagagccagggccaggacctgagagagcagctggccgagggccacagactggccgagcacctggtgcacaagctgagccccgagaacgacgaggacgaggacgaggacgaggacgacaaggacgaggaggtggagaaggtgcaggagagccccgcccccagagaggtgcagaagaccgaggagaaggaggtgccccaggacagcctggaggagtgcgccgtgacctgcagcaacagccacaaccccagcaacagcaaccagccccacagaagcaccaagatcaccttcaaggagcacgaggtggacagcgccctggtggtggagagcgagcacccccacgacgaggaggaggaggccctgaacatcccccccgagaaccagaacgaccacgaggaggaggagggcaaggcccccgtgccccccagaaacagacagagcctggagcccggcgagctgaccaacctgagagacttcctgatcagccccgtggtgagccacgtggccaaccccggccaccacgacaagagcaacagctacagacacagagaggtgagcttcctggccctggacgagcagaaggtgtgcagcgcccaggacgtggccagagactacagcaaccccaagtgggacgagaccagcctgggcttcctggagaagcagagcgacctggaggaggtgaagggccaggagaccgtggcccccagactgagcagaggccccctgagagtggacaagcacgagatcccccaggagagcctggacggctgctgcctgacccccagcatcctgcccgacctgacccccagctaccacccctactggagcaccctgtacagcttcgaggacaagcaggtgagcctggccctggtggacaagatcaagaaggaccaggaggagatcgaggaccagagccccccctgccccagactgagccaggagctgcccgaggtgaaggagcaggaggtgcccgaggacagcgtgaacgaggtgtacctgacccccagcgtgcaccacgacgtgagcgactgccaccagccctacagcagcaccctgagcagcctggaggaccagctggcctgcagcgccctggacgtggccagccccaccgaggccgcctgcccccagggcacctggagcggcgacctgagccaccaccagagcgaggtgcaggtgagccaggcccagctggagcccagcaccctggtgcccagctgcctgagactgcagctggaccagggcttccactgcggcaacggcctggcccagagaggcctgagcagcaccacctgcagcttcagcgccaacgcctag

SEQ ID NO: 90800 - DNA, 372 bp, synthetic construct
  misc_feature 1..372: note = Description of Artificial Sequence: Synthetic coding sequence
  source 1..372: mol_type = other DNA
atggtggtgagcgccgaccccctgagcagcgagagagccgagatgaacatcctggagatcaaccaggagctgagaagccagctggccgagagcaaccagcagttcagagacctgaaggagaagttcctgatcacccaggccaccgcctacagcctggccaaccagctgaagaagtacagctgcctgaagtacagaaaccacctgccccccgagagatgcagaagactgaagaagagaaagagcctgagaacccactggagaaacgtgctgagcctggtgcagatcgtgaccaccctgctgacccccaccagcctgaccggcgcccccaagagccacctgagaaacaccaagagcaccctgctgtggctgtag

SEQ ID NO: 90801 - DNA, 2004 bp, synthetic construct
  misc_feature 1..2004: note = Description of Artificial Sequence: Synthetic coding sequence
  source 1..2004: mol_type = other DNA
atggtggtgagcgccgaccccctgagcagcgagagagccgagatgaacatcctggagatcaaccaggagctgagaagccagctggccgagagcaaccagcagttcagagacctgaaggagaagttcctgatcacccaggccaccgcctacagcctggccaaccagctgaagaagtacaagtgcgaggagtacaaggacatcatcgacagcgtgctgagagacgagctgcagagcatggagaagctggccgagaagctgagacaggccgaggagctgagacagtacaaggccctggtgcacagccaggccaaggagctgacccagctgagagagaagctgagagagggcagagacgccagcagatggctgaacaagcacctgaagaccctgctgacccccgacgaccccgacaagagccagggccaggacctgagagagcagctggccgagggccacagactggccgagcacctggtgcacaagctgagccccgagaacgacgaggacgaggacgaggacgaggacgacaaggacgaggaggtggagaaggtgcaggagagccccgcccccagagaggtgcagaagaccgaggagaaggaggtgccccaggacagcctggaggagtgcgccgtgacctgcagcaacagccacaaccccagcaacagcaaccagccccacagaagcaccaagatcaccttcaaggagcacgaggtggacagcgccctggtggtggagagcgagcacccccacgacgaggaggaggaggccctgaacatcccccccgagaaccagaacgaccacgaggaggaggagggcaaggcccccgtgccccccagaaacagacagagcctggagcccggcgagctgaccaacctgagagacttcctgatcagccccgtggtgagccacgtggccaaccccggccaccacgacaagagcaacagctacagacacagagaggtgagcttcctggccctggacgagcagaaggtgtgcagcgcccaggacgtggccagagactacagcaaccccaagtgggacgagaccagcctgggcttcctggagaagcagagcgacctggaggaggtgaagggccaggagaccgtggcccccagactgagcagaggccccctgagagtggacaagcacgagatcccccaggagagcctggacggctgctgcctgacccccagcatcctgcccgacctgacccccagctaccacccctactggagcaccctgtacagcttcgaggacaagcaggtgagcctggccctggtggacaagatcaagaaggaccaggaggagatcgaggaccagagccccccctgccccagactgagccaggagctgcccgaggtgaaggagcaggaggtgcccgaggacagcgtgaacgaggtgtacctgacccccagcgtgcaccacgacgtgagcgactgccaccagccctacagcagcaccctgagcagcctggaggaccagctggcctgcagcgccctggacgtggccagccccaccgaggccgcctgcccccagggcacctggagcggcgacctgagccaccacagaagcgaggtgcagatcagccaggcccagctggagcccagcaccctggtgcccagctgcctgagactgcagctggaccagggcttccactgcggcaacggcctggcccagagaggcctgagcagcaccacctgcagcttcagcgccaacgccgacagcggcaaccagtggcccttccaggagctggtgctggagcccagcctgggcatgaagaaccccccccagctggaggacgacgccctggagggcagcgccagcaacacccagggcagacaggtgaccggcagaatcagagccagcctggtgctgatcctgaagaccatcagaagaagactgcccttcagcaagtggagactggccttcagattcgccggcccccacgccgagagcgccgagatccccaacaccgccgagagaatgcagagaatgatcggctag

SEQ ID NO: 90802 - DNA, 1722 bp, synthetic construct
  misc_feature 1..1722: note = Description of Artificial Sequence: Synthetic coding sequence
  source 1..1722: mol_type = other DNA
atggtggtgagcgccgaccccctgagcagcgagagagccgagatgaacatcctggagatcaaccaggagctgagaagccagctggccgagagcaaccagcagttcagagacctgaaggagaagttcctgatcacccaggccaccgcctacagcctggccaaccagctgaagaagtacaagtgcgaggagtacaaggacatcatcgacagcgtgctgagagacgagctgcagagcatggagaagctggccgagaagctgagacaggccgaggagctgagacagtacaaggccctggtgcacagccaggccaaggagctgacccagctgagagagaagctgagagagggcagagacgccagcagatggctgaacaagcacctgaagaccctgctgacccccgacgaccccgacaagagccagggccaggacctgagagagcagctggccgagggccacagactggccgagcacctggtgcacaagctgagccccgagaacgacgaggacgaggacgaggacgaggacgacaaggacgaggaggtggagaaggtgcaggagagccccgcccccagagaggtgcagaagaccgaggagaaggaggtgccccaggacagcctggaggagtgcgccgtgacctgcagcaacagccacaaccccagcaacagcaaccagccccacagaagcaccaagatcaccttcaaggagcacgaggtggacagcgccctggtggtggagagcgagcacccccacgacgaggaggaggaggccctgaacatcccccccgagaaccagaacgaccacgaggaggaggagggcaaggcccccgtgccccccagaaacagacagagcctggagcccggcgagctgaccaacctgagagacttcctgatcagccccgtggtgagccacgtggccaaccccggccaccacgacaagagcaacagctacagacacagagaggtgagcttcctggccctggacgagcagaaggtgtgcagcgcccaggacgtggccagagactacagcaaccccaagtgggacgagaccagcctgggcttcctggagaagcagagcgacctggaggaggtgaagggccaggagaccgtggcccccagactgagcagaggccccctgagagtggacaagcacgagatcccccaggagagcctggacggctgctgcctgacccccagcatcctgcccgacctgacccccagctaccacccctactggagcaccctgtacagcttcgaggacaagcaggtgagcctggccctggtggacaagatcaagaaggaccaggaggagatcgaggaccagagccccccctgccccagactgagccaggagctgcccgaggtgaaggagcaggaggtgcccgaggacagcgtgaacgaggtgtacctgacccccagcgtgcaccacgacgtgagcgactgccaccagccctacagcagcaccctgagcagcctggaggaccagctggcctgcagcgccctggacgtggccagccccaccgaggccgcctgcccccagggcacctggagcggcgacctgagccaccacagaagcgaggtgcagatcagccaggcccagctggagcccagcaccctggtgcccagctgcctgagactgcagctggaccagggcttccactgcggcaacggcctggcccagagaggcctgagcagcaccacctgcagcttcagcgccaacgcctag

SEQ ID NO: 90803 - DNA, 1917 bp, synthetic construct
  misc_feature 1..1917: note = Description of Artificial Sequence: Synthetic coding sequence
  source 1..1917: mol_type = other DNA
atggtggtgagcgccgaccccctgagcagcgagagagccgagatgaacatcctggagatcaaccaggagctgagaagccagctggccgagagcaaccagcagttcagagacctgaaggagaagttcctgatcacccaggccaccgcctacagcctggccaaccagctgaagaagtacaagtgcgaggagtacaaggacatcatcgacagcgtgctgagagacgagctgcagagcatggagaagctggccgagaagctgagacaggccgaggagctgagacagtacaaggccctggtgcacagccaggccaaggagctgacccagctgagagagaagctgagagagggcagagacgccagcagatggctgaacaagcacctgaagaccctgctgacccccgacgaccccgacaagagccagggccaggacctgagagagcagctggccgagggccacagactggccgagcacctggtgcacaagctgagccccgagaacgacgaggacgaggacgaggacgaggacgacaaggacgaggaggtggagaaggtgcaggagagccccgcccccagagaggtgcagaagaccgaggagaaggaggtgccccaggacagcctggaggagtgcgccgtgacctgcagcaacagccacaaccccagcaacagcaaccagccccacagaagcaccaagatcaccttcaaggagcacgaggtggacagcgccctggtggtggagagcgagcacccccacgacgaggaggaggaggccctgaacatcccccccgagaaccagaacgaccacgaggaggaggagggcaaggcccccgtgccccccagacaccacgacaagagcaacagctacagacacagagaggtgagcttcctggccctggacgagcagaaggtgtgcagcgcccaggacgtggccagagactacagcaaccccaagtgggacgagaccagcctgggcttcctggagaagcagagcgacctggaggaggtgaagggccaggagaccgtggcccccagactgagcagaggccccctgagagtggacaagcacgagatcccccaggagagcctggacggctgctgcctgacccccagcatcctgcccgacctgacccccagctaccacccctactggagcaccctgtacagcttcgaggacaagcaggtgagcctggccctggtggacaagatcaagaaggaccaggaggagatcgaggaccagagccccccctgccccagactgagccaggagctgcccgaggtgaaggagcaggaggtgcccgaggacagcgtgaacgaggtgtacctgacccccagcgtgcaccacgacgtgagcgactgccaccagccctacagcagcaccctgagcagcctggaggaccagctggcctgcagcgccctggacgtggccagccccaccgaggccgcctgcccccagggcacctggagcggcgacctgagccaccacagaagcgaggtgcagatcagccaggcccagctggagcccagcaccctggtgcccagctgcctgagactgcagctggaccagggcttccactgcggcaacggcctggcccagagaggcctgagcagcaccacctgcagcttcagcgccaacgccgacagcggcaaccagtggcccttccaggagctggtgctggagcccagcctgggcatgaagaaccccccccagctggaggacgacgccctggagggcagcgccagcaacacccagggcagacaggtgaccggcagaatcagagccagcctggtgctgatcctgaagaccatcagaagaagactgcccttcagcaagtggagactggccttcagattcgccggcccccacgccgagagcgccgagatccccaacaccgccgagagaatgcagagaatgatcggctag

SEQ ID NO: 90804 - DNA, 1917 bp, synthetic construct; identical to SEQ ID NO: 90803
  misc_feature 1..1917: note = Description of Artificial Sequence: Synthetic coding sequence
  source 1..1917: mol_type = other DNA

SEQ ID NO: 90805 - DNA, 624 bp, synthetic construct
  misc_feature 1..624: note = Description of Artificial Sequence: Synthetic coding sequence
  source 1..624: mol_type = other DNA
atgctggccagctacaagagctacagcagcaccttccacagcctggaggagcagcaggtgtgcatggccgtggacatcggcagacacagatgggaccaggtgaagaaggaggaccaggaggccaccggccccagactgagcagagagctgctggacgagaagggccccgaggtgctgcaggacagcctgtacagatgctacagcacccccagcggctgcctggagctgaccgacagctgccagccctacagaagcgccttctacgtgctggagcagcagagagtgggcctggccgtggacatggacgagatcgagaagtaccaggaggtggaggaggaccagggcagatgggaggaggaccagaaccccccctgccccagactgaacggcgtgctgatggaggtggaggagcccgaggtgctgcaggacagcctggacggctgctacagcacccccagcatgtacttcgagctgcccgacagcttccagcactacagaagcgtgttctacagcttcgaggagcagcacatcagcttcgccctgtacgtggacaacagattcttcaccctgaccgtgaccagcctgcacctggtgttccagatggaggtgatcttcccccagtag

SEQ ID NO: 90806 - DNA, 1830 bp, synthetic construct
  misc_feature 1..1830: note = Description of Artificial Sequence: Synthetic coding sequence
  source 1..1830: mol_type = other DNA
cccgtgcccggccccaccagcagcgccaccaacgtgagcatggtggtgagcgccggccccctgagcagcgagaaggccgagatgaacatcctggagatcaacgagaagctgagaccccagctggccgagaagaagcagcagttcagaaacctgaaggagaagtgcttcctgacccagctgagcggcttcctggccaaccagcagaacaagtacaagtacgaggagtgcaaggacctgatcaagttcatgctgagaaacgagagacagttcaaggaggagaagctggccgagcagctgaagcaggccgaggagctgagacagtacaaggtgctggtgcacgcccaggagagagagctgacccagctgagagagaagctgagagagggcagagacgccagcagaagcctgaacgagcacctgcaggccctgctgacccccgacgagcccgacaagagccagggccaggacctgcaggagcagctggccgagggctgcagactggcccagcacctggtgcagaagctgagccccgagaacgacaacgacgacaacgaggacgtgcaggtggaggtggccgagaaggtgcagaagagcagcgcccccagagagatgcagaaggccgaggagaaggaggtgcccgaggacagcctggaggagtgcgccatcacctacagcaacagccacggcccctacgacagcaaccagccccacagaaagaccaagatcaccttcgaggaggacaaggtggacagcaccctgatcggcagcagcagccacgtggagagagaggacgccgtgcacatcatccccgagaacgagagcgacgacgaggaggaggaggagaagggccccgtgagccccagaaacctgcaggagagcgaggaggaggaggtgccccaggagagctgggacgagggctacagcacccccagcatcccccccgagatgctggccagctacaagagctacagcagcaccttccacagcctggaggagcagcaggtgtgcatggccgtggacatcggcagacacagatgggaccaggtgaagaaggaggaccaggaggccaccggccccagactgagcagagagctgctggacgagaagggccccgaggtgctgcaggacagcctgtacagatgctacagcacccccagcggctacctggagctgcccgacctgggccagccctacagcagcgccgtgtacagcctggaggagcagtacctgggcctggccctggacctggacagaatcaagaaggaccaggaggaggaggaggaccagggccccccctgccccagactgagcagagagctgctggaggtggtggagcccgaggtgctgcaggacagcctggacagatgctacagcacccccagcagctgcctggagcagcccgacagctgccagccctacggcagcagcttctacgccctggaggagaagcacgtgggcttcagcctggacgtgggcgagatcgagaagaagggcaagggcaagaagagaagaggcagaagaagcaagaaggagagaagaagaggcagaaaggagggcgaggaggaccagaaccccccctgccccagactgaacggcgtgctgatggaggtggaggagcccgaggtgctgcaggacagcctggacggctgctacagcacccccagcatgtacttcgagctgcccgacagcttccagcactacagaagcgtgttctacagcttcgaggagcagcacatcagcttcgccctgtacgtggacaacagattcttcaccctgaccgtgaccagcctgcacctggtgttccagatggaggtgatcttcccccagtag

SEQ ID NO: 90807 - DNA, 2052 bp, synthetic construct
  misc_feature 1..2052: note = Description of Artificial Sequence: Synthetic coding sequence
  source 1..2052: mol_type = other DNA
tgacccggccccaccagcagcgccaccaacgtgagcatggtggtgagcgccggccccctgagcagcgagaaggccgagatgaacatcctggagatcaacgagaagctgagaccccagctggccgagaagaagcagcagttcagaaacctgaaggagaagtgcttcctgacccagctgagcggcttcctggccaaccagcagaacaagtacaagtacgaggagtgcaaggacctgatcaagttcatgctgagaaacgagagacagttcaaggaggagaagctggccgagcagctgaagcaggccgaggagctgagacagtacaaggtgctggtgcacgcccaggagagagagctgacccagctgagagagaagctgagagagggcagagacgccagcagaagcctgaacgagcacctgcaggccctgctgacccccgacgagcccgacaagagccagggccaggacctgcaggagcagctggccgagggctgcagactggcccagcacctggtgcagaagctgagccccgagaacgacaacgacgacaacgaggacgtgcaggtggaggtggccgagaaggtgcagaagagcagcgcccccagagagatgcagaaggccgaggagaaggaggtgcccgaggacagcctggaggagtgcgccatcacctacagcaacagccacggcccctacgacagcaaccagccccacagaaagaccaagatcaccttcgaggaggacaaggtggacagcaccctgatcggcagcagcagccacgtggagagagaggacgccgtgcacatcatccccgagaacgagagcgacgacgaggaggaggaggagaagggccccgtgagccccagaaacctgcaggagagcgaggaggaggaggtgccccaggagagctgggacgagggctacagcacccccagcatcccccccgagatgctggccagctacaagagctacagcagcaccttccacagcctggaggagcagcaggtgtgcatggccgtggacatcggcagacacagatgggaccaggtgaagaaggaggaccaggaggccaccggccccagactgagcagagagctgctggacgagaagggccccgaggtgctgcaggacagcctgtacagatgctacagcacccccagcggctgcctggagctgaccgacagctgccagccctacagaagcgccttctacgtgctggagcagcagagagtgggcctggccgtggacatggacgagatcgagaagtaccaggaggtggaggaggaccaggaccccagctgccccagactgagcagagagctgctggacgagaaggagcccgaggtgctgcaggacagcctgggcagatggtacagcacccccagcggctacctggagctgcccgacctgggccagccctacagcagcgccgtgtacagcctggaggagcagtacctgggcctggccctggacctggacagaatcaagaaggaccaggaggaggaggaggaccagggccccccctgccccagactgagcagagagctgctggaggtggtggagcccgaggtgctgcaggacagcctggacagatgctacagcacccccagcagctgcctggagcagcccgacagctgccagccctacggcagcagcttctacgccctggaggagaagcacgtgggcttcagcctggacgtgggcgagatcgagaagaagggcaagggcaagaagagaagaggcagaagaagcaagaaggagagaagaagaggcagaaaggagggcgaggaggaccagaaccccccctgccccagactgaacggcgtgctgatggaggtggaggagcccgaggtgctgcaggacagcctggacggctgctacagcacccccagcatgtacttcgagctgcccgacagcttccagcactacagaagcgtgttctacagcttcgaggagcagcacatcagcttcgccctgtacgtggacaacagattcttcaccctgaccgtgaccagcctgcacctggtgttccagatggaggtgatcttcccccagtag

SEQ ID NO: 90808 - DNA, 1824 bp, synthetic construct
  misc_feature 1..1824: note = Description of Artificial Sequence: Synthetic coding sequence
  source 1..1824: mol_type = other DNA
cccgtgcccggccccaccagcagcgccaccaacgtgagcatggtggtgagcgccggccccctgagcagcgagaaggccgagatgaacatcctggagatcaacgagaagctgagaccccagctggccgagaagaagcagcagttcagaaacctgaaggagaagtgcttcctgacccagctgagcggcttcctggccaaccagcagaacaagtacaagtacgaggagtgcaaggacctgatcaagttcatgctgagaaacgagagacagttcaaggaggagaagctggccgagcagctgaagcaggccgaggagctgagacagtacaaggtgctggtgcacgcccaggagagagagctgacccagctgagagagaagctgagagagggcagagacgccagcagaagcctgaacgagcacctgcaggccctgctgacccccgacgagcccgacaagagccagggccaggacctgcaggagcagctggccgagggctgcagactggcccagcacctggtgcagaagctgagccccgagaacgacaacgacgacaacgaggacgtgcaggtggaggtggccgagaaggtgcagaagagcagcgcccccagagagatgcagaaggccgaggagaaggaggtgcccgaggacagcctggaggagtgcgccatcacctacagcaacagccacggcccctacgacagcaaccagccccacagaaagaccaagatcaccttcgaggaggacaaggtggacagcaccctgatcggcagcagcagccacgtggagagagaggacgccgtgcacatcatccccgagaacgagagcgacgacgaggaggaggaggagaagggccccgtgagccccagaaacctgcaggagagcgaggaggaggaggtgccccaggagagctgggacgagggctacagcacccccagcatcccccccgagatgctggccagctacaagagctacagcagcaccttccacagcctggaggagcagcaggtgtgcatggccgtggacatcggcagacacagatgggaccaggtgaagaaggaggaccaggaggccaccggccccagactgagcagagagctgctggacgagaagggccccgaggtgctgcaggacagcctgtacagatgctacagcacccccagcggctgcctggagctgaccgacagctgccagccctacagaagcgccttctacgtgctggagcagcagagagtgggcctggccgtggacatggacgagatcgagaagtaccaggaggtggaggaggaccaggaccccagctgccccagactgagcagagagctgctggacgagaaggagcccgaggtgctgcaggacagcctgggcagatggtacagcacccccagcggctacctggagctgcccgacctgggccagccctacagcagcgccgtgtacagcctggaggagcagtacctgggcctggccctggacctggacagaatcaagaaggaccaggaggaggaggaggaccagggccccccctgccccagactgagcagagagctgctggaggtggtggagcccgaggtgctgcaggacagcctggacgtgatccagctgctgcccgtggtgctgaacagcctgacccccgccagccccatggaggtgcccttcatgcactggagaaagaacatgctggccttcctgctgacctgggagaagctgaagagaagaggcagaggcagaaaggagggcgaggaggaccagagaagaaaggaggagggcgaggagaagaagggcaagaagatcaagacccaccacgcccccggcagcaccgcctgctag

SEQ ID NO: 90809 - DNA, 396 bp, synthetic construct
  misc_feature 1..396: note = Description of Artificial Sequence: Synthetic coding sequence
  source 1..396: mol_type = other DNA
atggccgacgtggtggtgggcaaggacaagggcggcgagcagagactgatcagcctgcccctgagcagaatcagagtgatcatgaagagcagccccgaggtgagcagcatcaaccaggaggccctggtgctgaccgccaaggccaccgagctgttcgtgcagtgcctggccacctacagctacagacacggcagcggcaaggagaagaaggtgctgacctacagcgacctggccaacaccgcccagcagagcgagaccttccagttcctggccgacatcctgcccaagaagatcctggccagcaagtacctgaagatgctgaaggaggagaagagagaggaggacgaggagaacgacaacgacaacgagagcgaccacgacgaggccgacagctag

SEQ ID NO: 90810 - DNA, 582 bp, synthetic construct; identical to SEQ ID NO: 83459
  misc_feature 1..582: note = Description of Artificial Sequence: Synthetic coding sequence
  source 1..582: mol_type = other DNA

SEQ ID NO: 90811 - DNA, 582 bp, synthetic construct; identical to SEQ ID NO: 83459
  misc_feature 1..582: note = Description of Artificial Sequence: Synthetic coding sequence
  source 1..582: mol_type = other DNA

SEQ ID NO: 90812 - DNA, 582 bp, synthetic construct; identical to SEQ ID NO: 83459
  misc_feature 1..582: note = Description of Artificial Sequence: Synthetic coding sequence
  source 1..582: mol_type = other DNA

SEQ ID NO: 90813 - DNA, 582 bp, synthetic construct; identical to SEQ ID NO: 83459
  misc_feature 1..582: note = Description of Artificial Sequence: Synthetic coding sequence
  source 1..582: mol_type = other DNA

SEQ ID NO: 90814 - DNA, 3966 bp, synthetic construct
  misc_feature 1..3966: note = Description of Artificial Sequence: Synthetic coding sequence
  source 1..3966: mol_type = other DNA
atgggcgcccccttcgtgtgggccctgggcctgctgatgctgcagatgctgctgttcgtggccggcgagcagggcacccaggacatcaccgacgccagcgagagaggcctgcacatgcagaagctgggcagcggcagcgtgcaggccgccctggccgagctggtggccctgccctgcctgttcaccctgcagcccagacccagcgccgccagagacgcccccagaatcaagtggaccaaggtgagaaccgccagcggccagagacaggacctgcccatcctggtggccaaggacaacgtggtgagagtggccaagagctggcagggcagagtgagcctgcccagctaccccagaagaagagccaacgccaccctgctgctgggccccctgagagccagcgacagcggcctgtacagatgccaggtggtgagaggcatcgaggacgagcaggacctggtgcccctggaggtgaccggcgtggtgttccactacagaagcgccagagacagatacgccctgaccttcgccgaggcccaggaggcctgcagactgagcagcgccatcatcgccgcccccagacacctgcaggccgccttcgaggacggcttcgacaactgcgacgccggctggctgagcgacagaaccgtgagataccccatcacccagagcagacccggctgctacggcgacagaagcagcctgcccggcgtgagaagctacggcagaagaaacccccaggagctgtacgacgtgtactgcttcgccagagagctgggcggcgaggtgttctacgtgggccccgccagaagactgaccctggccggcgccagagcccagtgcagaagacagggcgccgccctggccagcgtgggccagctgcacctggcctggcacgagggcctggaccagtgcgaccccggctggctggccgacggcagcgtgagataccccatccagacccccagaagaagatgcggcggccccgcccccggcgtgagaaccgtgtacagattcgccaacagaaccggcttccccagccccgccgagagattcgacgcctactgcttcagagcccaccaccccaccagccagcacggcgacctggagacccccagcagcggcgacgagggcgagatcctgagcgccgagggcccccccgtgagagagctggagcccaccctggaggaggaggaggtggtgacccccgacttccaggagcccctggtgagcagcggcgaggaggagaccctgatcctggaggagaagcaggagagccagcagaccctgagccccacccccggcgaccccatgctggccagctggcccaccggcgaggtgtggctgagcaccgtggcccccagccccagcgacatgggcgccggcaccgccgccagcagccacaccgaggtggcccccaccgaccccatgcccagaagaagaggcagattcaagggcctgaacggcagatacttccagcagcaggagcccgagcccggcctgcagggcggcatggaggccagcgcccagccccccaccagcgaggccgccgtgaaccagatggagccccccctggccatggccgtgaccgagatgctgggcagcggccagagcagaagcccctgggccgacctgaccaacgaggtggacatgcccggcgccggcagcgccggcggcaagagcagccccgagccctggctgtggccccccaccatggtgccccccagcatcagcggccacagcagagcccccgtgctggagctggagaaggccgagggccccagcgccagacccgccacccccgacctgttctggagccccctggaggccaccgtgagcgcccccagccccgccccctgggaggccttccccgtggccaccagccccgacctgcccatgatggccatgctgagaggccccaaggagtggatgctgccccaccccacccccatcagcaccgaggccaacagagtggaggcccacggcgaggccaccgccaccgccccccccagccccgccgccgagaccaaggtgtacagcctgcccctgagcctgacccccaccggccagggcggcgaggccatgcccaccacccccgagagccccagagccgacttcagagagaccggcgagaccagccccgcccaggtgaacaaggccgagcacagcagcagcagcccctggcccagcgtgaacagaaacgtggccgtgggcttcgtgcccaccgagaccgccaccgagcccaccggcctgagaggcatccccggcagcgagagcggcgtgttcgacaccgccgagagccccaccagcggcctgcaggccaccgtggacgaggtgcaggacccctggcccagcgtgtacagcaagggcctggacgccagcagccccagcgcccccctgggcagccccggcgtgttcctggtgcccaaggtgacccccaacctggagccctgggtggccaccgacgagggccccaccgtgaaccccatggacagcaccgtgacccccgcccccagcgacgccagcggcatctgggagcccggcagccaggtgttcgaggaggccgagagcaccaccctgagcccccaggtggccctggacaccagcatcgtgacccccctgaccaccctggagcagggcgacaaggtgggcgtgcccgccatgagcaccctgggcagcagcagcagccagccccaccccgagcccgaggaccaggtggagacccagggcaccagcggcgccagcgtgcccccccaccagagcagccccctgggcaagcccgccgtgccccccggcacccccaccgccgccagcgtgggcgagagcgccagcgtgagcagcggcgagcccaccgtgccctgggaccccagcagcaccctgctgcccgtgaccctgggcatcgaggacttcgagctggaggtgctggccggcagccccggcgtggagagcttctgggaggaggtggccagcggcgaggagcccgccctgcccggcacccccatgaacgccggcgccgaggaggtgcacagcgacccctgcgagaacaacccctgcctgcacggcggcacctgcaacgccaacggcaccatgtacggctgcagctgcgaccagggcttcgccggcgagaactgcgagatcgacatcgacgactgcctgtgcagcccctgcgagaacggcggcacctgcatcgacgaggtgaacggcttcgtgtgcctgtgcctgcccagctacggcggcagcttctgcgagaaggacaccgagggctgcgacagaggctggcacaagttccagggccactgctacagatacttcgcccacagaagagcctgggaggacgccgagaaggactgcagaagaagaagcggccacctgaccagcgtgcacagccccgaggagcacagcttcatcaacagcttcggccacgagaacacctggatcggcctgaacgacagaatcgtggagagagacttccagtggaccgacaacaccggcctgcagttcgagaactggagagagaaccagcccgacaacttcttcgccggcggcgaggactgcgtggtgatggtggcccacgagagcggcagatggaacgacgtgccctgcaactacaacctgccctacgtgtgcaagaagggcaccgtgctgtgcggccccccccccgccgtggagaacgccagcctgatcggcgccagaaaggccaagtacaacgtgcacgccaccgtgagataccagtgcaacgagggcttcgcccagcaccacgtggccaccatcagatgcagaagcaacggcaagtgggacagaccccagatcgtgtgcaccaagcccagaagaagccacagaatgagaagacaccaccaccaccaccagcaccaccaccagcaccaccaccacaagagcagaaaggagagaagaaagcacaagaagcaccccaccgaggactgggagaaggacgagggcaacttctgctag

SEQ ID NO: 90815 - DNA, 2319 bp, synthetic construct
  misc_feature 1..2319: note = Description of Artificial Sequence: Synthetic coding sequence
  source 1..2319: mol_type = other DNA
atgcccggcgccggcagcgccggcggcaagagcagccccgagccctggctgtggccccccaccatggtgccccccagcatcagcggccacagcagagcccccgtgctggagctggagaaggccgagggccccagcgccagacccgccacccccgacctgttctggagccccctggaggccaccgtgagcgcccccagccccgccccctgggaggccttccccgtggccaccagccccgacctgcccatgatggccatgctgagaggccccaaggagtggatgctgccccaccccacccccatcagcaccgaggccaacagagtggaggcccacggcgaggccaccgccaccgccccccccagccccgccgccgagaccaaggtgtacagcctgcccctgagcctgacccccaccggccagggcggcgaggccatgcccaccacccccgagagccccagagccgacttcagagagaccggcgagaccagccccgcccaggtgaacaaggccgagcacagcagcagcagcccctggcccagcgtgaacagaaacgtggccgtgggcttcgtgcccaccgagaccgccaccgagcccaccggcctgagaggcatccccggcagcgagagcggcgtgttcgacaccgccgagagccccaccagcggcctgcaggccaccgtggacgaggtgcaggacccctggcccagcgtgtacagcaagggcctggacgccagcagccccagcgcccccctgggcagccccggcgtgttcctggtgcccaaggtgacccccaacctggagccctgggtggccaccgacgagggccccaccgtgaaccccatggacagcaccgtgacccccgcccccagcgacgccagcggcatctgggagcccggcagccaggtgttcgaggaggccgagagcaccaccctgagcccccaggtggccctggacaccagcatcgtgacccccctgaccaccctggagcagggcgacaaggtgggcgtgcccgccatgagcaccctgggcagcagcagcagccagccccaccccgagcccgaggaccaggtggagacccagggcaccagcggcgccagcgtgcccccccaccagagcagccccctgggcaagcccgccgtgccccccggcacccccaccgccgccagcgtgggcgagagcgccagcgtgagcagcggcgagcccaccgtgccctgggaccccagcagcaccctgctgcccgtgaccctgggcatcgaggacttcgagctggaggtgctggccggcagccccggcgtggagagcttctgggaggaggtggccagcggcgaggagcccgccctgcccggcacccccatgaacgccggcgccgaggaggtgcacagcgacccctgcgagaacaacccctgcctgcacggcggcacctgcaacgccaacggcaccatgtacggctgcagctgcgaccagggcttcgccggcgagaactgcgagatcgacatcgacgactgcctgtgcagcccctgcgagaacggcggcacctgcatcgacgaggtgaacggcttcgtgtgcctgtgcctgcccagctacggcggcagcttctgcgagaaggacaccgagggctgcgacagaggctggcacaagttccagggccactgctacagatacttcgcccacagaagagcctgggaggacgccgagaaggactgcagaagaagaagcggccacctgaccagcgtgcacagccccgaggagcacagcttcatcaacagcttcggccacgagaacacctggatcggcctgaacgacagaatcgtggagagagacttccagtggaccgacaacaccggcctgcagttcgagaactggagagagaaccagcccgacaacttcttcgccggcggcgaggactgcgtggtgatggtggcccacgagagcggcagatggaacgacgtgccctgcaactacaacctgccctacgtgtgcaagaagggcaccgtgctgtgcggccccccccccgccgtggagaacgccagcctgatcggcgccagaaaggccaagtacaacgtgcacgccaccgtgagataccagtgcaacgagggcttcgcccagcaccacgtggccaccatcagatgcagaagcaacggcaagtgggacagaccccagatcgtgtgcaccaagcccagaagaagccacagaatgagaagacaccaccaccaccaccagcaccaccaccagcaccaccaccacaagagcagaaaggagagaagaaagcacaagaagcaccccaccgaggactgggagaaggacgagggcaacttctgctag

SEQ ID NO: 90816 - DNA, 4008 bp, synthetic construct
  misc_feature 1..4008: note = Description of Artificial Sequence: Synthetic coding sequence
  source 1..4008: mol_type = other DNA
agaccccccagagacgccagcgagctgggcgccagaagcagaatgggcgcccccttcgtgtgggccctgggcctgctgatgctgcagatgctgctgttcgtggccggcgagcagggcacccaggacatcaccgacgccagcgagagaggcctgcacatgcagaagctgggcagcggcagcgtgcaggccgccctggccgagctggtggccctgccctgcctgttcaccctgcagcccagacccagcgccgccagagacgcccccagaatcaagtggaccaaggtgagaaccgccagcggccagagacaggacctgcccatcctggtggccaaggacaacgtggtgagagtggccaagagctggcagggcagagtgagcctgcccagctaccccagaagaagagccaacgccaccctgctgctgggccccctgagagccagcgacagcggcctgtacagatgccaggtggtgagaggcatcgaggacgagcaggacctggtgcccctggaggtgaccggcgtggtgttccactacagaagcgccagagacagatacgccctgaccttcgccgaggcccaggaggcctgcagactgagcagcgccatcatcgccgcccccagacacctgcaggccgccttcgaggacggcttcgacaactgcgacgccggctggctgagcgacagaaccgtgagataccccatcacccagagcagacccggctgctacggcgacagaagcagcctgcccggcgtgagaagctacggcagaagaaacccccaggagctgtacgacgtgtactgcttcgccagagagctgggcggcgaggtgttctacgtgggccccgccagaagactgaccctggccggcgccagagcccagtgcagaagacagggcgccgccctggccagcgtgggccagctgcacctggcctggcacgagggcctggaccagtgcgaccccggctggctggccgacggcagcgtgagataccccatccagacccccagaagaagatgcggcggccccgcccccggcgtgagaaccgtgtacagattcgccaacagaaccggcttccccagccccgccgagagattcgacgcctactgcttcagagcccaccaccccaccagccagcacggcgacctggagacccccagcagcggcgacgagggcgagatcctgagcgccgagggcccccccgtgagagagctggagcccaccctggaggaggaggaggtggtgacccccgacttccaggagcccctggtgagcagcggcgaggaggagaccctgatcctggaggagaagcaggagagccagcagaccctgagccccacccccggcgaccccatgctggccagctggcccaccggcgaggtgtggctgagcaccgtggcccccagccccagcgacatgggcgccggcaccgccgccagcagccacaccgaggtggcccccaccgaccccatgcccagaagaagaggcagattcaagggcctgaacggcagatacttccagcagcaggagcccgagcccggcctgcagggcggcatggaggccagcgcccagccccccaccagcgaggccgccgtgaaccagatggagccccccctggccatggccgtgaccgagatgctgggcagcggccagagcagaagcccctgggccgacctgaccaacgaggtggacatgcccggcgccggcagcgccggcggcaagagcagccccgagccctggctgtggccccccaccatggtgccccccagcatcagcggccacagcagagcccccgtgctggagctggagaaggccgagggccccagcgccagacccgccacccccgacctgttctggagccccctggaggccaccgtgagcgcccccagccccgccccctgggaggccttccccgtggccaccagccccgacctgcccatgatggccatgctgagaggccccaaggagtggatgctgccccaccccacccccatcagcaccgaggccaacagagtggaggcccacggcgaggccaccgccaccgccccccccagccccgccgccgagaccaaggtgtacagcctgcccctgagcctgacccccaccggccagggcggcgaggccatgcccaccacccccgagagccccagagccgacttcagagagaccggcgagaccagccccgcccaggtgaacaaggccgagcacagcagcagcagcccctggcccagcgtgaacagaaacgtggccgtgggcttcgtgcccaccgagaccgccaccgagcccaccggcctgagaggcatccccggcagcgagagcggcgtgttcgacaccgccgagagccccaccagcggcctgcaggccaccgtggacgaggtgcaggacccctggcccagcgtgtacagcaagggcctggacgccagcagccccagcgcccccctgggcagccccggcgtgttcctggtgcccaaggtgacccccaacctggagccctgggtggccaccgacgagggccccaccgtgaaccccatggacagcaccgtgacccccgcccccagcgacgccagcggcatctgggagcccggcagccaggtgttcgaggaggccgagagcaccaccctgagcccccaggtggccctggacaccagcatcgtgacccccctgaccaccctggagcagggcgacaaggtgggcgtgcccgccatgagcaccctgggcagcagcagcagccagccccaccccgagcccgaggaccaggtggagacccagggcaccagcggcgccagcgtgcccccccaccagagcagccccctgggcaagcccgccgtgccccccggcacccccaccgccgccagcgtgggcgagagcgccagcgtgagcagcggcgagcccaccgtgccctgggaccccagcagcaccctgctgcccgtgaccctgggcatcgaggacttcgagctggaggtgctggccggcagccccggcgtggagagcttctgggaggaggtggccagcggcgaggagcccgccctgcccggcacccccatgaacgccggcgccgaggaggtgcacagcgacccctgcgagaacaacccctgcctgcacggcggcacctgcaacgccaacggcaccatgtacggctgcagctgcgaccagggcttcgccggcgagaactgcgagatcgacatcgacgactgcctgtgcagcccctgcgagaacggcggcacctgcatcgacgaggtgaacggcttcgtgtgcctgtgcctgcccagctacggcggcagcttctgcgagaaggacaccgagggctgcgacagaggctggcacaagttccagggccactgctacagatacttcgcccacagaagagcctgggaggacgccgagaaggactgcagaagaagaagcggccacctgaccagcgtgcacagccccgaggagcacagcttcatcaacagcttcggccacgagaacacctggatcggcctgaacgacagaatcgtggagagagacttccagtggaccgacaacaccggcctgcagttcgagaactggagagagaaccagcccgacaacttcttcgccggcggcgaggactgcgtggtgatggtggcccacgagagcggcagatggaacgacgtgccctgcaactacaacctgccctacgtgtgcaagaagggcaccgtgctgtgcggccccccccccgccgtggagaacgccagcctgatcggcgccagaaaggccaagtacaacgtgcacgccaccgtgagataccagtgcaacgagggcttcgcccagcaccacgtggccaccatcagatgcagaagcaacggcaagtgggacagaccccagatcgtgtgcaccaagcccagaagaagccacagaatgagaagacaccaccaccaccaccagcaccaccaccagcaccaccaccacaagagcagaaaggagagaagaaagcacaagaagcaccccaccgaggactgggagaaggacgagggcaacttctgctag

SEQ ID NO: 90817 - DNA, 2190 bp, synthetic construct
  misc_feature 1..2190: note = Description of Artificial Sequence: Synthetic coding sequence
  source 1..2190: mol_type = other DNA
atgagctgctgcgacctggccgccgccggccagctgggcaaggccagcatcatggccagcgactgcgagcccgccctgaaccaggccgagggcagaaaccccaccctggagagatacctgggcgccctgagagaggccaagaacgacagcgagcagttcgccgccctgctgctggtgaccaaggccgtgaaggccggcgacatcgacgccaagaccagaagaagaatcttcgacgccgtgggcttcaccttccccaacagactgctgaccaccaaggaggcccccgacggctgccccgaccacgtgctgagagccctgggcgtggccctgctggcctgcttctgcagcgaccccgagctggccgcccacccccaggtgctgaacaagatccccatcctgagcaccttcctgaccgccagaggcgaccccgacgacgccgccagaagaagcatgatcgacgacacctaccagtgcctgaccgccgtggccggcacccccagaggccccagacacctgatcgccggcggcaccgtgagcgccctgtgccaggcctacctgggccacggctacggcttcgaccaggccctggccctgctggtgggcctgctggccgccgccgagacccagtgctggaaggaggccgagcccgacctgctggccgtgctgagaggcctgagcgaggacttccagaaggccgaggacgccagcaagttcgagctgtgccagctgctgcccctgttcctgccccccaccaccgtgccccccgagtgctacagagacctgcaggccggcctggccagaatcctgggcagcaagctgagcagctggcagagaaaccccgccctgaagctggccgccagactggcccacgcctgcggcagcgactggatccccgccggcagcagcggcagcaagttcctggccctgctggtgaacctggcctgcgtggaggtgagactggccctggaggagaccggcaccgaggtgaaggaggacgtggtgaccgcctgctacgccctgatggagctgggcatccaggagtgcaccagatgcgagcagagcctgctgaaggagccccagaaggtgcagctggtgagcgtgatgaaggaggccatcggcgccgtgatccactacctgctgcaggtgggcagcgagaagcagaaggagcccttcgtgttcgccagcgtgagaatcctgggcgcctggctggccgaggagaccagcagcctgagaaaggaggtgtgccagctgctgcccttcctggtgagatacgccaagaccctgtacgaggaggccgaggaggccaacgacctgagccagcaggtggccaacctggccatcagccccaccacccccggccccacctggcccggcgacgccctgagactgctgctgcccggctggtgccacctgaccgtggaggacggccccagagagatcctgatcaaggagggcgcccccagcctgctgtgcaagtacttcctgcagcagtgggagctgaccagccccggccacgacaccagcgtgctgcccgacagcgtggagatcggcctgcagacctgctgccacatcttcctgaacctggtggtgaccgcccccggcctgatcaagagagacgcctgcttcaccagcctgatgaacaccctgatgaccagcctgcccgccctggtgcagcagcagggcagactgctgctggccgccaacgtggccaccctgggcctgctgatggccagactgctgagcaccagccccgccctgcagggcacccccgccagcagaggcttcttcgccgccgccatcctgttcctgagccagagccacgtggccagagccacccccggcagcgaccaggccgtgctggccctgagccccgagtacgagggcatctgggccgacctgcaggagctgtggttcctgggcatgcaggccttcaccggctgcgtgcccctgctgccctggctggcccccgccgccctgagaagcagatggccccaggagctgctgcagctgctgggcagcgtgagccccaacagcgtgaagcccgagatggtggccgcctaccagggcgtgctggtggagctggccagagccaacagactgtgcagagaggccatgagactgcaggccggcgaggagaccgccagccactacagaatggccgccctggagcagtgcctgagcgagccctag

SEQ ID NO: 90818 - DNA, 2190 bp, synthetic construct; identical to SEQ ID NO: 90817
  misc_feature 1..2190: note = Description of Artificial Sequence: Synthetic coding sequence
  source 1..2190: mol_type = other DNA

SEQ ID NO: 90819 - DNA, 2139 bp, synthetic construct
  misc_feature 1..2139: note = Description of Artificial Sequence: Synthetic coding sequence
  source 1..2139: mol_type = other DNA
atggccagcgactgcgagcccgccctgaaccaggccgagggcagaaaccccaccctggagagatacctgggcgccctgagagaggccaagaacgacagcgagcagttcgccgccctgctgctggtgaccaaggccgtgaaggccggcgacatcgacgccaagaccagaagaagaatcttcgacgccgtgggcttcaccttccccaacagactgctgaccaccaaggaggcccccgacggctgccccgaccacgtgctgagagccctgggcgtggccctgctggcctgcttctgcagcgaccccgagctggccgcccacccccaggtgctgaacaagatccccatcctgagcaccttcctgaccgccagaggcgaccccgacgacgccgccagaagaagcatgatcgacgacacctaccagtgcctgaccgccgtggccggcacccccagaggccccagacacctgatcgccggcggcaccgtgagcgccctgtgccaggcctacctgggccacggctacggcttcgaccaggccctggccctgctggtgggcctgctggccgccgccgagacccagtgctggaaggaggccgagcccgacctgctggccgtgctgagaggcctgagcgaggacttccagaaggccgaggacgccagcaagttcgagctgtgccagctgctgcccctgttcctgccccccaccaccgtgccccccgagtgctacagagacctgcaggccggcctggccagaatcctgggcagcaagctgagcagctggcagagaaaccccgccctgaagctggccgccagactggcccacgcctgcggcagcgactggatccccgccggcagcagcggcagcaagttcctggccctgctggtgaacctggcctgcgtggaggtgagactggccctggaggagaccggcaccgaggtgaaggaggacgtggtgaccgcctgctacgccctgatggagctgggcatccaggagtgcaccagatgcgagcagagcctgctgaaggagccccagaaggtgcagctggtgagcgtgatgaaggaggccatcggcgccgtgatccactacctgctgcaggtgggcagcgagaagcagaaggagcccttcgtgttcgccagcgtgagaatcctgggcgcctggctggccgaggagaccagcagcctgagaaaggaggtgtgccagctgctgcccttcctggtgagatacgccaagaccctgtacgaggaggccgaggaggccaacgacctgagccagcaggtggccaacctggccatcagccccaccacccccggccccacctggcccggcgacgccctgagactgctgctgcccggctggtgccacctgaccgtggaggacggccccagagagatcctgatcaaggagggcgcccccagcctgctgtgcaagtacttcctgcagcagtgggagctgaccagccccggccacgacaccagcgtgctgcccgacagcgtggagatcggcctgcagacctgctgccacatcttcctgaacctggtggtgaccgcccccggcctgatcaagagagacgcctgcttcaccagcctgatgaacaccctgatgaccagcctgcccgccctggtgcagcagcagggcagactgctgctggccgccaacgtggccaccctgggcctgctgatggccagactgctgagcaccagccccgccctgcagggcacccccgccagcagaggcttcttcgccgccgccatcctgttcctgagccagagccacgtggccagagccacccccggcagcgaccaggccgtgctggccctgagccccgagtacgagggcatctgggccgacctgcaggagctgtggttcctgggcatgcaggccttcaccggctgcgtgcccctgctgccctggctggcccccgccgccctgagaagcagatggccccaggagctgctgcagctgctgggcagcgtgagccccaacagcgtgaagcccgagatggtggccgcctaccagggcgtgctggtggagctggccagagccaacagactgtgcagagaggccatgagactgcaggccggcgaggagaccgccagccactacagaatggccgccctggagcagtgcctgagcgagccctag

SEQ ID NO: 90820 - DNA, 531 bp, synthetic construct
  misc_feature 1..531: note = Description of Artificial Sequence: Synthetic coding sequence
  source 1..531: mol_type = other DNA
atgccccacagcttcagatacctggccgccctgcagggcacccccgccagcagaggcttcttcgccgccgccatcctgttcctgagccagagccacgtggccagagccacccccggcagcgaccaggccgtgctggccctgagccccgagtacgagggcatctgggccgacctgcaggagctgtggttcctgggcatgcaggccttcaccggctgcgtgcccctgctgccctggctggcccccgccgccctgagaagcagatggccccaggagctgctgcagctgctgggcagccagccccagctgtgccaggccagagacggcggcagactgagcggctgccccggcggcgccggcgccggccagcccgccgtgcccggcggccacgaggccgccggcggcagaggcgacggccagcccctgccccacggctgcctgggcgccgtgcccgtgagagccctgagaggcgtgcacagaggccagacccagggcagagccgagagagagggcggcagaagacacctgccctag

SEQ ID NO: 90821 - DNA, 582 bp, synthetic construct
  misc_feature 1..582: note = Description of Artificial Sequence: Synthetic coding sequence
  source 1..582: mol_type = other DNA
tgaagcagcctgagaaaggaggtgtgccagctgctgcccttcctggtgagatacgccaagaccctgtacgaggaggccgaggaggccaacgacctgagccagcaggtggccaacctggccatcagccccaccacccccggccccacctggcccggcgacgccctgagactgctgctgcccggctggtgccacctgaccgtggaggacggccccagagagatcctgatcaaggagggcgcccccagcctgctgtgcaagtacttcctgcagcagtgggagctgaccagccccggccacgacaccagcgtgctgcccgacagcgtggagatcggcctgcagacctgctgccacatcttcctgaacctggtggtgaccgcccccggcctgatcaagagagacgcctgcttcaccagcctgatgaacaccctgatgaccagcctgcccgccctggtgcagcagcagggcagactgctgctggccgccaacgtggccaccctgggcctgctgatggccagactgctgagcaccagccccggcagcatcagcagccagctgcccggcgccgagcacatgccctgctag

SEQ ID NO: 90822 - DNA, 735 bp, synthetic construct
  misc_feature 1..735: note = Description of Artificial Sequence: Synthetic coding sequence
  source 1..735: mol_type = other DNA
atggccagcgactgcgagcccgccctgaaccaggccgagggcagaaaccccaccctggagagatacctgggcgccctgagagaggccaagaacgacagcgagcagttcgccgccctgctgctggtgaccaaggccgtgaaggccggcgacatcgacgccaagaccagaagaagaatcttcgacgccgtgggcttcaccttccccaacagactgctgaccaccaaggaggcccccgacggctgccccgaccacgtgctgagagccctgggcgtggccctgctggcctgcttctgcagcgaccccgagctggccgcccacccccaggtgctgaacaagatccccatcctgagcaccttcctgaccgccagaggcgaccccgacgacgccgccagaagaagcatgatcgacgacacctaccagtgcctgaccgccgtggccggcacccccagaggccccagacacctgatcgccggcggcaccgtgagcgccctgtgccaggcctacctgggccacggctacggcttcgaccaggccctggccctgctggtgggcctgctggccgccgccgagacccagtgctggaaggaggccgagcccgacctgctggccgtgctgagaggcctgagcgaggacttccagaaggccgaggacgccagcaagttcgagctgtgccagctgctgcccctgttcctgccccccaccaccgtgccccccgagtgctacagagacctgtag

SEQ ID NO: 90823 - DNA, 1791 bp, synthetic construct
  misc_feature 1..1791: note = Description of Artificial Sequence: Synthetic coding sequence
  source 1..1791: mol_type = other DNA
atggagcccgagctggccgcccagaagcagcccagacccagaagaagaagcagaagagccagcggcctgagcaccgagggcgccaccggccccagcgccgacaccagcggcagcgagctggacggcagatgcagcctgagaagaggcagcagcttcaccttcctgacccccggccccaactgggacttcaccctgaagagaaagagaagagagaaggacgacgacgtggtgagcctgagcagcctggacctgaaggagcccagcaacaagagagtgagacccctggccagagtgaccagcctggccaacctgatcagccccgtgagaaacggcgccgtgagaagattcggccagaccatccagagcttcaccctgagaggcgaccacagaagccccgccagcgcccagaagttcagcagcagaagcaccgtgcccacccccgccaagagaagaagcagcgccctgtggagcgagatgctggacatcaccatgaaggagagcctgaccaccagagagatcagaagacaggaggccatctacgagatgagcagaggcgagcaggacctgatcgaggacctgaagctggccagaaaggcctaccacgaccccatgctgaagctgagcatcatgagcgaggaggagctgacccacatcttcggcgacctggacagctacatccccctgcacgaggacctgctgaccagaatcggcgaggccaccaagcccgacggcaccgtggagcagatcggccacatcctggtgagctggctgcccagactgaacgcctacagaggctactgcagcaaccagctggccgccaaggccctgctggaccagaagaagcaggaccccagagtgcaggacttcctgcagagatgcctggagagccccttcagcagaaagctggacctgtggagcttcctggacatccccagaagcagactggtgaagtaccccctgctgctgaaggagatcctgaagcacacccccaaggagcaccccgacgtgcagctgctggaggacgccatcctgatcatccagggcgtgctgagcgacatcaacctgaagaagggcgagagcgagtgccagtactacatcgacaagctggagtacctggacgagaagcagagagaccccagaatcgaggccagcaaggtgctgctgtgccacggcgagctgagaagcaagagcggccacaagctgtacatcttcctgttccaggacatcctggtgctgaccagacccgtgaccagaaacgagagacacagctaccaggtgtacagacagcccatccccgtgcaggagctggtgctggaggacctgcaggacggcgacgtgagaatgggcggcagcttcagaggcgccttcagcaacagcgagaaggccaagaacatcttcagaatcagattccacgaccccagccccgcccagagccacaccctgcaggccaacgacgtgttccacaagcagcagtggttcaactgcatcagagccgccatcgcccccttccagagcgccggcagcccccccgagctgcagggcctgcccgagctgcacgaggagtgcgagggcaaccaccccagcgccagaaagctgaccgcccagagaagagccagcaccgtgagcagcgtgacccaggtggaggtggacgagaacgcctacagatgcggcagcggcatgcagatggccgaggacagcaagagcctgaagacccaccagacccagcccggcatcagaagagccagagacaaggccctgagcggcggcaagagaaaggagaccctggtgtag

SEQ ID NO: 90824 - DNA, 483 bp, synthetic construct
  misc_feature 1..483: note = Description of Artificial Sequence: Synthetic coding sequence
  source 1..483: mol_type = other DNA
atggtggcccacgacgagaccggcggcctgctgcccatcaagagaaccatcagagtgctggacgtgaacaaccagagcttcagagagcaggaggagctgacccacatcttcggcgacctggacagctacatccccctgcacgaggacctgctgaccagaatcggcgaggccaccaagcccgacggcaccgtggagcagatcggccacatcctggtgagctggctgcccagactgaacgcctacagaggctactgcagcaaccagctggccgccaaggccctgctggaccagaagaagcaggaccccagagtgcaggacttcctgcagagatgcctggagagccccttcagcagaaagctggacctgtggagcttcctggacatccccagaagcagactggtgaagtaccccctgctgctgaaggagatcctgaagcacacccccaaggagcaccccgacgtgcagctgctggaggacgcctag

SEQ ID NO: 90825 - DNA, 1629 bp, synthetic construct
  misc_feature 1..1629: note = Description of Artificial Sequence: Synthetic coding sequence
  source 1..1629: mol_type = other DNA
atggtggcccacgacgagaccggcggcctgctgcccatcaagagaaccatcagagtgctggacgtgaacaaccagagcttcagagagcaggaggagcccagcaacaagagagtgagacccctggccagagtgaccagcctggccaacctgatcagccccgtgagaaacggcgccgtgagaagattcggccagaccatccagagcttcaccctgagaggcgaccacagaagccccgccagcgcccagaagttcagcagcagaagcaccgtgcccacccccgccaagagaagaagcagcgccctgtggagcgagatgctggacatcaccatgaaggagagcctgaccaccagagagatcagaagacaggaggccatctacgagatgagcagaggcgagcaggacctgatcgaggacctgaagctggccagaaaggcctaccacgaccccatgctgaagctgagcatcatgagcgaggaggagctgacccacatcttcggcgacctggacagctacatccccctgcacgaggacctgctgaccagaatcggcgaggccaccaagcccgacggcaccgtggagcagatcggccacatcctggtgagctggctgcccagactgaacgcctacagaggctactgcagcaaccagctggccgccaaggccctgctggaccagaagaagcaggaccccagagtgcaggacttcctgcagagatgcctggagagccccttcagcagaaagctggacctgtggagcttcctggacatccccagaagcagactggtgaagtaccccctgctgctgaaggagatcctgaagcacacccccaaggagcaccccgacgtgcagctgctggaggacgccatcctgatcatccagggcgtgctgagcgacatcaacctgaagaagggcgagagcgagtgccagtactacatcgacaagctggagtacctggacgagaagcagagagaccccagaatcgaggccagcaaggtgctgctgtgccacggcgagctgagaagcaagagcggccacaagctgtacatcttcctgttccaggacatcctggtgctgaccagacccgtgaccagaaacgagagacacagctaccaggtgtacagacagcccatccccgtgcaggagctggtgctggaggacctgcaggacggcgacgtgagaatgggcggcagcttcagaggcgccttcagcaacagcgagaaggccaagaacatcttcagaatcagattccacgaccccagccccgcccagagccacaccctgcaggccaacgacgtgttccacaagcagcagtggttcaactgcatcagagccgccatcgcccccttccagagcgccggcagcccccccgagctgcagggcctgcccgagctgcacgaggagtgcgagggcaaccaccccagcgccagaaagctgaccgcccagagaagagccagcaccgtgagcagcgtgacccaggtggaggtggacgagaacgcctacagatgcggcagcggcatgcagatggccgaggacagcaagagcctgaagacccaccagacccagcccggcatcagaagagccagagacaaggccctgagcggcggcaagagaaaggagaccctggtgtag

SEQ ID NO: 90826 - DNA, 483 bp, synthetic construct; identical to SEQ ID NO: 90824
  misc_feature 1..483: note = Description of Artificial Sequence: Synthetic coding sequence
  source 1..483: mol_type = other DNA

SEQ ID NO: 90827 - DNA, 1248 bp, synthetic construct
  misc_feature 1..1248: note = Description of Artificial Sequence: Synthetic coding sequence
  source 1..1248: mol_type = other DNA
atgagcagaggcgagcaggacctgatcgaggacctgaagctggccagaaaggcctaccacgaccccatgctgaagctgagcatcatgagcgaggaggagctgacccacatcttcggcgacctggacagctacatccccctgcacgaggacctgctgaccagaatcggcgaggccaccaagcccgacggcaccgtggagcagatcggccacatcctggtgagctggctgcccagactgaacgcctacagaggctactgcagcaaccagctggccgccaaggccctgctggaccagaagaagcaggaccccagagtgcaggacttcctgcagagatgcctggagagccccttcagcagaaagctggacctgtggagcttcctggacatccccagaagcagactggtgaagtaccccctgctgctgaaggagatcctgaagcacacccccaaggagcaccccgacgtgcagctgctggaggacgccatcctgatcatccagggcgtgctgagcgacatcaacctgaagaagggcgagagcgagtgccagtactacatcgacaagctggagtacctggacgagaagcagagagaccccagaatcgaggccagcaaggtgctgctgtgccacggcgagctgagaagcaagagcggccacaagctgtacatcttcctgttccaggacatcctggtgctgaccagacccgtgaccagaaacgagagacacagctaccaggtgtacagacagcccatccccgtgcaggagctggtgctggaggacctgcaggacggcgacgtgagaatgggcggcagcttcagaggcgccttcagcaacagcgagaaggccaagaacatcttcagaatcagattccacgaccccagccccgcccagagccacaccctgcaggccaacgacgtgttccacaagcagcagtggttcaactgcatcagagccgccatcgcccccttccagagcgccggcagcccccccgagctgcagggcctgcccgagctgcacgaggagtgcgagggcaaccaccccagcgccagaaagctgaccgcccagagaagagccagcaccgtgagcagcgtgacccaggtggaggtggacgagaacgcctacagatgcggcagcggcatgcagatggccgaggacagcaagagcctgaagacccaccagacccagcccggcatcagaagagccagagacaaggccctgagcggcggcaagagaaaggagaccctggtgtag

SEQ ID NO: 90828 - DNA, 3063 bp, synthetic construct
  misc_feature 1..3063: note = Description of Artificial Sequence: Synthetic coding sequence
  source 1..3063: mol_type = other DNA
atgatgagcttcggcggcgccgacgccctgctgggcgcccccttcgcccccctgcacggcggcggcagcctgcactacgccctggccagaaagggcggcgccggcggcaccagaagcgccgccggcagcagcagcggcttccacagctggaccagaaccagcgtgagcagcgtgagcgccagccccagcagattcagaggcgccggcgccgccagcagcaccgacagcctggacaccctgagcaacggccccgagggctgcatggtggccgtggccaccagcagaagcgagaaggagcagctgcaggccctgaacgacagattcgccggctacatcgacaaggtgagacagctggaggcccacaacagaagcctggagggcgaggccgccgccctgagacagcagcaggccggcagaagcgccatgggcgagctgtacgagagagaggtgagagagatgagaggcgccgtgctgagactgggcgccgccagaggccagctgagactggagcaggagcacctgctggaggacatcgcccacgtgagacagagactggacgacgaggccagacagagagaggaggccgaggccgccgccagagccctggccagattcgcccaggaggccgaggccgccagagtggacctgcagaagaaggcccaggccctgcaggaggagtgcggctacctgagaagacaccaccaggaggaggtgggcgagctgctgggccagatccagggcagcggcgccgcccaggcccagatgcaggccgagaccagagacgccctgaagtgcgacgtgaccagcgccctgagagagatcagagcccagctggagggccacgccgtgcagagcaccctgcagagcgaggagtggttcagagtgagactggacagactgagcgaggccgccaaggtgaacaccgacgccatgagaagcgcccaggaggagatcaccgagtacagaagacagctgcaggccagaaccaccgagctggaggccctgaagagcaccaaggacagcctggagagacagagaagcgagctggaggacagacaccaggccgacatcgccagctaccaggaggccatccagcagctggacgccgagctgagaaacaccaagtgggagatggccgcccagctgagagagtaccaggacctgctgaacgtgaagatggccctggacatcgagatcgccgcctacagaaagctgctggagggcgaggagtgcagaatcggcttcggccccatccccttcagcctgcccgagggcctgcccaagatccccagcgtgagcacccacatcaaggtgaagagcgaggagaagatcaaggtggtggagaagagcgagaaggagaccgtgatcgtggaggagcagaccgaggagacccaggtgaccgaggaggtgaccgaggaggaggagaaggaggccaaggaggaggagggcaaggaggaggagggcggcgaggaggaggaggccgagggcggcgaggaggagaccaagagcccccccgccgaggaggccgccagccccgagaaggaggccaagagccccgtgaaggaggaggccaagagccccgccgaggccaagagccccgagaaggaggaggccaagagccccgccgaggtgaagagccccgagaaggccaagagccccgccaaggaggaggccaagagcccccccgaggccaagagccccgagaaggaggaggccaagagccccgccgaggtgaagagccccgagaaggccaagagccccgccaaggaggaggccaagagccccgccgaggccaagagccccgagaaggccaagagccccgtgaaggaggaggccaagagccccgccgaggccaagagccccgtgaaggaggaggccaagagccccgccgaggtgaagagccccgagaaggccaagagccccaccaaggaggaggccaagagccccgagaaggccaagagccccgagaaggaggaggccaagagccccgagaaggccaagagccccgtgaaggccgaggccaagagccccgagaaggccaagagccccgtgaaggccgaggccaagagccccgagaaggccaagagccccgtgaaggaggaggccaagagccccgagaaggccaagagccccgtgaaggaggaggccaagagccccgagaaggccaagagccccgtgaaggaggaggccaagacccccgagaaggccaagagccccgtgaaggaggaggccaagagccccgagaaggccaagagccccgagaaggccaagaccctggacgtgaagagccccgaggccaagacccccgccaaggaggaggccagaagccccgccgacaagttccccgagaaggccaagagccccgtgaaggaggaggtgaagagccccgagaaggccaagagccccctgaaggaggacgccaaggcccccgagaaggagatccccaagaaggaggaggtgaagagccccgtgaaggaggaggagaagccccaggaggtgaaggtgaaggagccccccaagaaggccgaggaggagaaggcccccgccacccccaagaccgaggagaagaaggacagcaagaaggaggaggcccccaagaaggaggcccccaagcccaaggtggaggagaagaaggagcccgccgtggagaagcccaaggagagcaaggtggaggccaagaaggaggaggccgaggacaagaagaaggtgcccacccccgagaaggaggcccccgccaaggtggaggtgaaggaggacgccaagcccaaggagaagaccgaggtggccaagaaggagcccgacgacgccaaggccaaggagcccagcaagcccgccgagaagaaggaggccgcccccgagaagaaggacaccaaggaggagaaggccaagaagcccgaggagaagcccaagaccgaggccaaggccaaggaggacgacaagaccctgagcaaggagcccagcaagcccaaggccgagaaggccgagaagagcagcagcaccgaccagaaggacagcaagccccccgagaaggccaccgaggacaaggccgccaagggcaagtag

SEQ ID NO: 90829 - DNA, 2916 bp, synthetic construct
  misc_feature 1..2916: note = Description of Artificial Sequence: Synthetic coding sequence
  source 1..2916: mol_type = other DNA
atgatgagcttcggcggcgccgacgccctgctgggcgcccccttcgcccccctgcacggcggcggcagcctgcactacgccctggccagaaagggcggcgccggcggcaccagaagcgccgccggcagcagcagcggcttccacagctggaccagaaccagcgtgagcagcgtgagcgccagccccagcagattcagaggcgccggcgccgccagcagcaccgacagcctggacaccctgagcaacggccccgagggctgcatggtggccgtggccaccagcagaagcgagaaggagcagctgcaggccctgaacgacagattcgccggctacatcgacaaggtgagacagctggaggcccacaacagaagcctggagggcgaggccgccgccctgagacagcagcaggccggcagaagcgccatgggcgagctgtacgagagagaggtgagagagatgagaggcgccgtgctgagactgggcgccgccagaggccagctgagactggagcaggagcacctgctggaggacatcgcccacgtgagacagagactggacgacgaggccagacagagagaggaggccgaggccgccgccagagccctggccagattcgcccaggaggccgaggccgccagagtggacctgcagaagaaggcccaggccctgcaggaggagtgcggctacctgagaagacaccaccaggaggaggtgggcgagctgctgggccagatccagggcagcggcgccgcccaggcccagatgcaggccgagaccagagacgccctgaagtgcgacgtgaccagcgccctgagagagatcagagcccagctggagggccacgccgtgcagagcaccctgcagagcgaggagtggttcagagtgagactggacagactgagcgaggccgccaaggtgaacaccgacgccatgagaagcgcccaggaggagatcaccgagtacagaagacagctgcaggccagaaccaccgagctggaggccctgaagagcaccaaggacagcctggagagacagagaagcgagctggaggacagacaccaggccgacatcgccagctaccaggaggccatccagcagctggacgccgagctgagaaacaccaagtgggagatggccgcccagctgagagagtaccaggacctgctgaacgtgaagatggccctggacatcgagatcgccgcctacagaaagctgctggagggcgaggagtgcagaatcggcttcggccccatccccttcagcctgcccgagggcctgcccaagatccccagcgtgagcacccacatcaaggtgaagagcgaggagaagatcaaggtggtggagaagagcgagaaggagaccgtgatcgtggaggagcagaccgaggagacccaggtgaccgaggaggtgaccgaggaggaggagaaggaggccaaggaggaggagggcaaggaggaggagggcggcgaggaggaggaggccgagggcggcgaggaggagaccaagagcccccccgccgaggaggccgccagccccgagaaggaggccaagagccccgtgaaggaggaggccaagagccccgccgaggccaagagccccgagaaggaggaggccaagagccccgccgaggtgaagagccccgagaaggccaagagccccgccaaggaggaggccaagagcccccccgaggccaagagccccgagaaggaggaggccaagagccccgccgaggtgaagagccccgagaaggccaagagccccgccaaggaggaggccaagagccccgccgaggccaagagccccgagaaggccaagagccccgtgaaggaggaggccaagagccccgccgaggccaagagccccgtgaaggaggaggccaagagccccgccgaggtgaagagccccgagaaggccaagagccccaccaaggaggaggccaagagccccgagaaggccaagagccccgagaaggaggaggccaagagccccgagaaggccaagagccccgtgaaggccgaggccaagagccccgagaaggccaagagccccgtgaaggccgaggccaagagccccgagaaggccaagagccccgtgaaggaggaggccaagagccccgagaaggccaagagccccgtgaaggaggaggccaagagccccgagaaggccaagagccccgtgaaggaggaggccaagacccccgagaaggccaagagccccgtgaaggaggaggccaagagccccgagaaggccaagagccccctgaaggaggacgccaaggcccccgagaaggagatccccaagaaggaggaggtgaagagccccgtgaaggaggaggagaagccccaggaggtgaaggtgaaggagccccccaagaaggccgaggaggagaaggcccccgccacccccaagaccgaggagaagaaggacagcaagaaggaggaggcccccaagaaggaggcccccaagcccaaggtggaggagaagaaggagcccgccgtggagaagcccaaggagagcaaggtggaggccaagaaggaggaggccgaggacaagaagaaggtgcccacccccgagaaggaggcccccgccaaggtggaggtgaaggaggacgccaagcccaaggagaagaccgaggtggccaagaaggagcccgacgacgccaaggccaaggagcccagcaagcccgccgagaagaaggaggccgcccccgagaagaaggacaccaaggaggagaaggccaagaagcccgaggagaagcccaagaccgaggccaaggccaaggaggacgacaagaccctgagcaaggagcccagcaagcccaaggccgagaaggccgagaagagcagcagcaccgaccagaaggacagcaagccccccgagaaggccaccgaggacaaggccgccaagggcaagtag

SEQ ID NO: 90830 - DNA, 930 bp, synthetic construct
  misc_feature 1..930: note = Description of Artificial Sequence: Synthetic coding sequence
  source 1..930: mol_type = other DNA
atggacgacaaggccttcaccaaggagctggaccagtgggtggagcagctgaacgagtgcaagcagctgaacgagaaccaggtgagaaccctgtgcgagaaggccaaggagatcctgaccaaggagagcaacgtgcaggaggtgagatgccccgtgaccgtgtgcggcgacgtgcacggccagttccacgacctgatggagctgttcagaatcggcggcaagagccccgacaccaactacctgttcatgggcgactacgtggacagaggctactacagcgtggagaccgtgaccctgctggtggccctgaaggtgagataccccgagagaatcaccatcctgagaggcaaccacgagagcagacagatcacccaggtgtacggcttctacgacgagtgcctgagaaagtacggcaacgccaacgtgtggaagtacttcaccgacctgttcgactacctgcccctgaccgccctggtggacggccagatcttctgcctgcacggcggcctgagccccagcatcgacaccctggaccacatcagagccctggacagactgcaggaggtgccccacgagggccccatgtgcgacctgctgtggagcgaccccgacgacagaggcggctggggcatcagccccagaggcgccggctacaccttcggccaggacatcagcgagaccttcaaccacgccaacggcctgaccctggtgagcagagcccaccagctggtgatggagggctacaactggtgccacgacagaaacgtggtgaccatcttcagcgcccccaactactgctacagatgcggcaaccaggccgccatcatggagctggacgacaccctgaagtacagcttcctgcagttcgaccccgcccccagaagaggcgagccccacgtgaccagaagaacccccgactacttcctgtag

SEQ ID NO: 90831 - DNA, 1623 bp, synthetic construct
  misc_feature 1..1623: note = Description of Artificial Sequence: Synthetic coding sequence
  source 1..1623: mol_type = other DNA
atggccagacacctgagagagtaccaggacctgctgaacgtgaagatggccctggacatcgagatcgccgcctacagaaagctgctggagggcgaggagaccagattcagcaccttcgccggcagcatcaccggccccctgtacacccacagaccccccatcaccatcagcagcaagatccagaagcccaaggtggaggcccccaagctgaaggtgcagcacaagttcgtggaggagatcatcgaggagaccaaggtggaggacgagaagagcgagatggaggaggccctgaccgccatcaccgaggagctggccgtgagcatgaaggaggagaagaaggaggccgccgaggagaaggaggaggagcccgaggccgaggaggaggaggtggccgccaagaagagccccgtgaaggccaccgcccccgaggtgaaggaggaggagggcgagaaggaggaggaggagggccaggaggaggaggaggaggaggacgagggcgccaagagcgaccaggccgaggagggcggcagcgagaaggagggcagcagcgagaaggaggagggcgagcaggaggagggcgagaccgaggccgaggccgagggcgaggaggccgaggccaaggaggagaagaaggtggaggagaagagcgaggaggtggccaccaaggaggagctggtggccgacgccaaggtggagaagcccgagaaggccaagagccccgtgcccaagagccccgtggaggagaagggcaagagccccgtgcccaagagccccgtggaggagaagggcaagagccccgtgcccaagagccccgtggaggagaagggcaagagccccgtgcccaagagccccgtggaggagaagggcaagagccccgtgagcaagagccccgtggaggagaaggccaagagccccgtgcccaagagccccgtggaggaggccaagagcaaggccgaggtgggcaagggcgagcagaaggaggaggaggagaaggaggtgaaggaggcccccaaggaggagaaggtggagaagaaggaggagaagcccaaggacgtgcccgagaagaagaaggccgagagccccgtgaaggaggaggccgtggccgaggtggtgaccatcaccaagagcgtgaaggtgcacctggagaaggagaccaaggaggagggcaagcccctgcagcaggagaaggagaaggagaaggccggcggcgagggcggcagcgaggaggagggcagcgacaagggcgccaagggcagcagaaaggaggacatcgccgtgaacggcgaggtggagggcaaggaggaggtggagcaggagaccaaggagaagggcagcggcagagaggaggagaagggcgtggtgaccaacggcctggacctgagccccgccgacgagaagaagggcggcgacaagagcgaggagaaggtggtggtgaccaagaccgtggagaagatcaccagcgagggcggcgacggcgccaccaagtacatcaccaagagcgtgaccgtgacccagaaggtggaggagcacgaggagaccttcgaggagaagctggtgagcaccaagaaggtggagaaggtgaccagccacgccatcgtgaaggaggtgacccagagcgactag

SEQ ID NO: 90832 - DNA, 2634 bp, synthetic construct
  misc_feature 1..2634: note = Description of Artificial Sequence: Synthetic coding sequence
  source 1..2634: mol_type = other DNA
atgagctacaccctggacagcctgggcaaccccagcgcctacagaagagtgaccgagaccagaagcagcttcagcagagtgagcggcagccccagcagcggcttcagaagccagagctggagcagaggcagccccagcaccgtgagcagcagctacaagagaagcatgctggcccccagactggcctacagcagcgccatgctgagcagcgccgagagcagcctggacttcagccagagcagcagcctgctgaacggcggcagcggccccggcggcgactacaagctgagcagaagcaacgagaaggagcagctgcagggcctgaacgacagattcgccggctacatcgagaaggtgcactacctggagcagcagaacaaggagatcgaggccgagatccaggccctgagacagaagcaggccagccacgcccagctgggcgacgcctacgaccaggagatcagagagctgagagccaccctggagatggtgaaccacgagaaggcccaggtgcagctggacagcgaccacctggaggaggacatccacagactgaaggagagattcgaggaggaggccagactgagagacgacaccgaggccgccatcagagccctgagaaaggacatcgaggaggccagcctggtgaaggtggagctggacaagaaggtgcagagcctgcaggacgaggtggccttcctgagaagcaaccacgaggaggaggtggccgacctgctggcccagatccaggccagccacatcaccgtggagagaaaggactacctgaagaccgacatcagcaccgccctgaaggagatcagaagccagctggagagccacagcgaccagaacatgcaccaggccgaggagtggttcaagtgcagatacgccaagctgaccgaggccgccgagcagaacaaggaggccatcagaagcgccaaggaggagatcgccgagtacagaagacagctgcagagcaagagcatcgagctggagagcgtgagaggcaccaaggagagcctggagagacagctgagcgacatcgaggagagacacaaccacgacctgagcagctaccaggacaccatccagcagctggagaacgagctgagaggcaccaagtgggagatggccagacacctgagagagtaccaggacctgctgaacgtgaagatggccctggacatcgagatcgccgcctacagaaagctgctggagggcgaggagaccagattcagcaccttcgccggcagcatcaccggccccctgtacacccacagaccccccatcaccatcagcagcaagatccagaagcccaaggtggaggcccccaagctgaaggtgcagcacaagttcgtggaggagatcatcgaggagaccaaggtggaggacgagaagagcgagatggaggaggccctgaccgccatcaccgaggagctggccgtgagcatgaaggaggagaagaaggaggccgccgaggagaaggaggaggagcccgaggccgaggaggaggaggtggccgccaagaagagccccgtgaaggccaccgcccccgaggtgaaggaggaggagggcgagaaggaggaggaggagggccaggaggaggaggaggaggaggacgagggcgccaagagcgaccaggccgaggagggcggcagcgagaaggagggcagcagcgagaaggaggagggcgagcaggaggagggcgagaccgaggccgaggccgagggcgaggaggccgaggccaaggaggagaagaaggtggaggagaagagcgaggaggtggccaccaaggaggagctggtggccgacgccaaggtggagaagcccgagaaggccaagagccccgtgcccaagagccccgtggaggagaagggcaagagccccgtgagcaagagccccgtggaggagaaggccaagagccccgtgcccaagagccccgtggaggaggccaagagcaaggccgaggtgggcaagggcgagcagaaggaggaggaggagaaggaggtgaaggaggcccccaaggaggagaaggtggagaagaaggaggagaagcccaaggacgtgcccgagaagaagaaggccgagagccccgtgaaggaggaggccgtggccgaggtggtgaccatcaccaagagcgtgaaggtgcacctggagaaggagaccaaggaggagggcaagcccctgcagcaggagaaggagaaggagaaggccggcggcgagggcggcagcgaggaggagggcagcgacaagggcgccaagggcagcagaaaggaggacatcgccgtgaacggcgaggtggagggcaaggaggaggtggagcaggagaccaaggagaagggcagcggcagagaggaggagaagggcgtggtgaccaacggcctggacctgagccccgccgacgagaagaagggcggcgacaagagcgaggagaaggtggtggtgaccaagaccgtggagaagatcaccagcgagggcggcgacggcgccaccaagtacatcaccaagagcgtgaccgtgacccagaaggtggaggagcacgaggagaccttcgaggagaagctggtgagcaccaagaaggtggagaaggtgaccagccacgccatcgtgaaggaggtgacccagagcgactag

SEQ ID NO: 90833 - DNA, 1071 bp, synthetic construct
  misc_feature 1..1071: note = Description of Artificial Sequence: Synthetic coding sequence
  source 1..1071: mol_type = other DNA
atgaccaagagctacagcgagagcggcctgatgggcgagccccagccccagggcccccccagctggaccgacgagtgcctgagcagccaggacgaggagcacgaggccgacaagaaggaggacgacctggagaccatgaacgccgaggaggacagcctgagaaacggcggcgaggaggaggacgaggacgaggacctggaggaggaggaggaggaggaggaggaggacgacgaccagaagcccaagagaagaggccccaagaagaagaagatgaccaaggccagactggagagattcaagctgagaagaatgaaggccaacgccagagagagaaacagaatgcacggcctgaacgccgccctggacaacctgagaaaggtggtgccctgctacagcaagacccagaagctgagcaagatcgagaccctgagactggccaagaactacatctgggccctgagcgagatcctgagaagcggcaagagccccgacctggtgagcttcgtgcagaccctgtgcaagggcctgagccagcccaccaccaacctggtggccggctgcctgcagctgaaccccagaaccttcctgcccgagcagaaccaggacatgcccccccacctgcccaccgccagcgccagcttccccgtgcacccctacagctaccagagccccggcctgcccagccccccctacggcaccatggacagcagccacgtgttccacgtgaagccccccccccacgcctacagcgccgccctggagcccttcttcgagagccccctgaccgactgcaccagccccagcttcgacggccccctgagcccccccctgagcatcaacggcaacttcagcttcaagcacgagcccagcgccgagttcgagaagaactacgccttcaccatgcactaccccgccgccaccctggccggcgcccagagccacggcagcatcttcagcggcaccgccgcccccagatgcgagatccccatcgacaacatcatgagcttcgacagccacagccaccacgagagagtgatgagcgcccagctgaacgccatcttccacgactag

SEQ ID NO: 90834 - DNA, 1149 bp, synthetic construct
  misc_feature 1..1149: note = Description of Artificial Sequence: Synthetic coding sequence
  source 1..1149: mol_type = other DNA
atgctgaccagactgttcagcgagcccggcctgctgagcgacgtgcccaagttcgccagctggggcgacggcgaggacgacgagcccagaagcgacaagggcgacgccccccccccccccccccccgcccccggccccggcgcccccggccccgccagagccgccaagcccgtgcccctgagaggcgaggagggcaccgaggccaccctggccgaggtgaaggaggagggcgagctgggcggcgaggaggaggaggaggaggaggaggaggagggcctggacgaggccgagggcgagagacccaagaagagaggccccaagaagagaaagatgaccaaggccagactggagagaagcaagctgagaagacagaaggccaacgccagagagagaaacagaatgcacgacctgaacgccgccctggacaacctgagaaaggtggtgccctgctacagcaagacccagaagctgagcaagatcgagaccctgagactggccaagaactacatctgggccctgagcgagatcctgagaagcggcaagagacccgacctggtgagctacgtgcagaccctgtgcaagggcctgagccagcccaccaccaacctggtggccggctgcctgcagctgaacagcagaaacttcctgaccgagcagggcgccgacggcgccggcagattccacggcagcggcggccccttcgccatgcacccctacccctacccctgcagcagactggccggcgcccagtgccaggccgccggcggcctgggcggcggcgccgcccacgccctgagaacccacggctactgcgccgcctacgagaccctgtacgccgccgccggcggcggcggcgccagccccgactacaacagcagcgagtacgagggccccctgagcccccccctgtgcctgaacggcaacttcagcctgaagcaggacagcagccccgaccacgagaagagctaccactacagcatgcactacagcgccctgcccggcagcagacccaccggccacggcctggtgttcggcagcagcgccgtgagaggcggcgtgcacagcgagaacctgctgagctacgacatgcacctgcaccacgacagaggccccatgtacgaggagctgaacgccttcttccacaactag

SEQ ID NO: 90835 - DNA, 996 bp, synthetic construct
  misc_feature 1..996: note = Description of Artificial Sequence: Synthetic coding sequence
  source 1..996: mol_type = other DNA
atgagcaagaccttcgtgaagagcaaggagatgggcgagctggtgaacacccccagctggatggacaagggcctgggcagccagaacgaggtgaaggaggaggagagcagacccggcacctacggcatgctgagcagcctgaccgaggagcacgacagcatcgaggaggaggaggaggaggaggaggacggcgagaagcccaagagaagaggccccaagaagaagaagatgaccaaggccagactggagagattcagagccagaagagtgaaggccaacgccagagagagaaccagaatgcacggcctgaacgacgccctggacaacctgagaagagtgatgccctgctacagcaagacccagaagctgagcaagatcgagaccctgagactggccagaaactacatctgggccctgagcgaggtgctggagaccggccagacccccgagggcaagggcttcgtggagatgctgtgcaagggcctgagccagcccaccagcaacctggtggccggctgcctgcagctgggcccccagagcgtgctgctggagaagcacgaggacaagagccccatctgcgacagcgccatcagcgtgcacaacttcaactaccagagccccggcctgcccagccccccctacggccacatggagacccacctgctgcacctgaagccccaggtgttcaagagcctgggcgagagcagcttcggcagccacctgcccgactgcagcacccccccctacgagggccccctgaccccccccctgagcatcagcggcaacttcagcctgaagcaggacggcagccccgacctggagaagagctacagcttcatgccccactaccccagcagcagcctgagcagcggccacgtgcacagcacccccttccaggccggcacccccagatacgacgtgcccatcgacatgagctacgacagctacccccaccacggcatcggcacccagctgaacaccgtgttcaccgagtag

SEQ ID NO: 90836 - DNA, 1014 bp, synthetic construct
  misc_feature 1..1014: note = Description of Artificial Sequence: Synthetic coding sequence
  source 1..1014: mol_type = other DNA
atgctgaccctgcccttcgacgagagcgtggtgatgcccgagagccagatgtgcagaaagttcagcagagagtgcgaggaccagaagcagatcaagaagcccgagagcttcagcaagcagatcgtgctgagaggcaagagcatcaagagagcccccggcgaggagaccgagaaggaggaggaggaggaggacagagaggaggaggacgagaacggcctgcccagaagaagaggcctgagaaagaagaagaccaccaagctgagactggagagagtgaagttcagaagacaggaggccaacgccagagagagaaacagaatgcacggcctgaacgacgccctggacaacctgagaaaggtggtgccctgctacagcaagacccagaagctgagcaagatcgagaccctgagactggccaagaactacatctgggccctgagcgagatcctgagaatcggcaagagacccgacctgctgaccttcgtgcagaacctgtgcaagggcctgagccagcccaccaccaacctggtggccggctgcctgcagctgaacgccagaagcttcctgatgggccagggcggcgaggccgcccaccacaccagaagcccctacagcaccttctaccccccctaccacagccccgagctgaccaccccccccggccacggcaccctggacaacagcaagagcatgaagccctacaactactgcagcgcctacgagagcttctacgagagcaccagccccgagtgcgccagcccccagttcgagggccccctgagccccccccccatcaactacaacggcatcttcagcctgaagcaggaggagaccctggactacggcaagaactacaactacggcatgcactactgcgccgtgccccccagaggccccctgggccagggcgccatgttcagactgcccaccgacagccacttcccctacgacctgcacctgagaagccagagcctgaccatgcaggacgagctgaacgccgtgttccacaactag

SEQ ID NO: 90837 - DNA, 714 bp, synthetic construct
  misc_feature 1..714: note = Description of Artificial Sequence: Synthetic coding sequence
  source 1..714: mol_type = other DNA
atgcccgccagactggagacctgcatcagcgacctggactgcgccagcagcagcggcagcgacctgagcggcttcctgaccgacgaggaggactgcgccagactgcagcaggccgccagcgccagcggcccccccgcccccgccagaagaggcgcccccaacatcagcagagccagcgaggtgcccggcgcccaggacgacgagcaggagagaagaagaagaagaggcagaaccagagtgagaagcgaggccctgctgcacagcctgagaagaagcagaagagtgaaggccaacgacagagagagaaacagaatgcacaacctgaacgccgccctggacgccctgagaagcgtgctgcccagcttccccgacgacaccaagctgaccaagatcgagaccctgagattcgcctacaactacatctgggccctggccgagaccctgagactggccgaccagggcctgcccggcggcggcgccagagagagactgctgcccccccagtgcgtgccctgcctgcccggcccccccagccccgccagcgacgccgagagctggggcagcggcgccgccgccgccagccccctgagcgaccccagcagccccgccgccagcgaggacttcacctacagacccggcgaccccgtgttcagcttccccagcctgcccaaggacctgctgcacaccaccccctgcttcatcccctaccactag

SEQ ID NO: 90838 - DNA, 645 bp, synthetic construct
  misc_feature 1..645: note = Description of Artificial Sequence: Synthetic coding sequence
  source 1..645: mol_type = other DNA
atgaccccccagcccagcggcgcccccaccgtgcaggtgaccagagagaccgagagaagcttccccagagccagcgaggacgaggtgacctgccccaccagcgccccccccagccccaccagaaccagaggcaactgcgccgaggccgaggagggcggctgcagaggcgcccccagaaagctgagagccagaagaggcggcagaagcagacccaagagcgagctggccctgagcaagcagagaagaagcagaagaaagaaggccaacgacagagagagaaacagaatgcacaacctgaacagcgccctggacgccctgagaggcgtgctgcccaccttccccgacgacgccaagctgaccaagatcgagaccctgagattcgcccacaactacatctgggccctgacccagaccctgagaatcgccgaccacagcctgtacgccctggagccccccgccccccactgcggcgagctgggcagccccggcggcagccccggcgactggggcagcctgtacagccccgtgagccaggccggcagcctgagccccgccgccagcctggaggagagacccggcctgctgggcgccaccttcagcgcctgcctgagccccggcagcctggccttcagcgacttcctgtag

SEQ ID NO: 90839 - DNA, 456 bp, synthetic construct
  misc_feature 1..456: note = Description of Artificial Sequence: Synthetic coding sequence
  source 1..456: mol_type = other DNA
atggagagacccgagcccgagctgatcagacagagctggagagccgtgagcagaagccccctggagcacggcaccgtgctgttcgccagactgttcgccctggagcccgacctgctgcccctgttccagtacaactgcagacagttcagcagccccgaggactgcctgagcagccccgagttcctggaccacatcagaaaggtgatgctggtgatcgacgccgccgtgaccaacgtggaggacctgagcagcctggaggagtacctggccagcctgggcagaaagcacagagccgtgggcgtgaagctgagcagcttcagcaccgtgggcgagagcctgctgtacatgctggagaagtgcctgggccccgccttcacccccgccaccagagccgcctggagccagctgtacggcgccgtggtgcaggccatgagcagaggctgggacggcgagtag

SEQ ID NO: 90840 - DNA, 237 bp, synthetic construct
  misc_feature 1..237: note = Description of Artificial Sequence: Synthetic coding sequence
  source 1..237: mol_type = other DNA
atggactgctgcaccgagaacgcctgcagcaagcccgacgacgacatcctggacatccccctggacgaccccggcgccaacgccgccgccgccaagatccaggccagcttcagaggccacatggccagaaagaagatcaagagcggcgagagaggcagaaagggccccggccccggcggccccggcggcgccggcgtggccagaggcggcgccggcggcggccccagcggcgactag

SEQ ID NO: 90841 - DNA, 237 bp, synthetic construct; identical to SEQ ID NO: 90840
  misc_feature 1..237: note = Description of Artificial Sequence: Synthetic coding sequence
  source 1..237: mol_type = other DNA

SEQ ID NO: 90842 - DNA, 237 bp, synthetic construct; identical to SEQ ID NO: 90840
  misc_feature 1..237: note = Description of Artificial Sequence: Synthetic coding sequence
  source 1..237: mol_type = other DNA

SEQ ID NO: 90843 - DNA, 936 bp, synthetic construct
  misc_feature 1..936: note = Description of Artificial Sequence: Synthetic coding sequence
  source 1..936: mol_type = other DNA
atggccgccctgggcgtgctggagagcgacctgcccagcgccgtgaccctgctgaagaacctgcaggagcaggtgatggccgtgaccgcccaggtgaagagcctgacccagaaggtgcaggccggcgcctaccccaccgagaagggcctgagcttcctggaggtgaaggaccagctgctgctgatgtacctgatggacctgacccacctgatcctggacaaggccagcggcggcagcctgcagggccacgacgccgtgctgagactggtggagatcagaaccgtgctggagaagctgagacccctggaccagaagctgaagtaccagatcgacaagctgatcaagaccgccgtgaccggcagcctgagcgagaacgaccccctgagattcaagccccaccccagcaacatgatgagcaagctgagcagcgaggacgaggaggaggacgaggccgaggacgaccagagcgaggccagcggcaagaagagcgtgaagggcgtgagcaagaagtacgtgccccccagactggtgcccgtgcactacgacgagaccgaggccgagagagagaagaagagactggagagagccaagagaagagccctgagcagcagcgtgatcagagagctgaaggagcagtacagcgacgcccccgaggagatcagagacgccagacacccccacgtgaccagacagagccaggaggaccagcacagaatcaactacgaggagagcatgatggtgagactgagcgtgagcaagagagagaagggcagaagaaagagagccaacgtgatgagcagccagctgcacagcctgacccacttcagcgacatcagcgccctgaccggcggcaccgtgcacctggacgaggaccagaaccccatcaagaagagaaagaagatcccccagaagggcagaaagaagaagggccagtag

SEQ ID NO: 90844 - DNA, 948 bp, synthetic construct
  misc_feature 1..948: note = Description of Artificial Sequence: Synthetic coding sequence
  source 1..948: mol_type = other DNA
atggccgccctgggcgtgctggagagcgacctgcccagcgccgtgaccctgctgaagaacctgcaggagcaggtgatggccgtgaccgcccaggtgaagagcctgacccagaaggtgcaggccggcgcctaccccaccgagaagggcctgagcttcctggaggtgaaggaccagctgctgctgatgtacctgatggacctgacccacctgatcctggacaaggccagcggcggcagcctgcagggccacgacgccgtgctgagactggtggagatcagaaccgtgctggagaagctgagacccctggaccagaagctgaagtaccagatcgacaagctgatcaagaccgccgtgaccggcagcctgagcgagaacgaccccctgagattcaagccccaccccagcaacatgatgagcaagctgagcagcgaggacgaggaggaggacgaggccgaggacgaccagagcgaggccagcggcaagaagagcgtgaagggcgtgagcaagaagtacgtgccccccagactggtgcccgtgcactacgacgagaccgaggccgagagagagaagaagagactggagagagccaagagaagagccctgagcagcagcgtgatcagagagctgaaggagcagtacagcgacgcccccgaggagatcagagacgccagacacccccacgtgaccagacagagccaggaggaccagcacagaatcaactacgaggagagcatgatggtgagactgagcgtgagcaagagagagaagggcagaagaaagagagccaacgtgatgagcagccagctgcacagcctgacccacttcagcgacatcagcgccctgaccggcggcaccgtgcacctggacgaggaccagaaccccatcaagaagagaaagaagatcccccagaagggcagaaagaagaagggcttcagaagaagaagatag

SEQ ID NO: 90845 - DNA, 2472 bp, synthetic construct
  misc_feature 1..2472: note = Description of Artificial Sequence: Synthetic coding sequence
  source 1..2472: mol_type = other DNA
atggccctgcccagatgcacctggcccaactacgtgtggagagccgtgatggcctgcctggtgcacagaggcctgggcgcccccctgaccctgtgcatgctgggctgcctgctgcaggccggccacgtgctgagccagaagctggacgacgtggaccccctggtggccaccaacttcggcaagatcagaggcatcaagaaggagctgaacaacgagatcctgggccccgtgatccagttcctgggcgtgccctacgccgccccccccaccggcgagagaagattccagccccccgagccccccagcccctggagcgacatcagaaacgccacccagttcgcccccgtgtgcccccagaacatcatcgacggcagactgcccgaggtgatgctgcccgtgtggttcaccaacaacctggacgtggtgagcagctacgtgcaggaccagagcgaggactgcctgtacctgaacatctacgtgcccaccgaggacgacatcagagacagcggcggccccaagcccgtgatggtgtacatccacggcggcagctacatggagggcaccggcaacctgtacgacggcagcgtgctggccagctacggcaacgtgatcgtgatcaccgtgaactacagactgggcgtgctgggcttcctgagcaccggcgaccaggccgccaagggcaactacggcctgctggacctgatccaggccctgagatggaccagcgagaacatcggcttcttcggcggcgaccccctgagaatcaccgtgttcggcagcggcgccggcggcagctgcgtgaacctgctgaccctgagccactacagcgagggcaacagatggagcaacagcaccaagggcctgttccagagagccatcgcccagagcggcaccgccctgagcagctgggccgtgagcttccagcccgccaagtacgccagaatgctggccaccaaggtgggctgcaacgtgagcgacaccgtggagctggtggagtgcctgcagaagaagccctacaaggagctggtggaccaggacatccagcccgccagataccacatcgccttcggccccgtgatcgacggcgacgtgatccccgacgacccccagatcctgatggagcagggcgagttcctgaactacgacatcatgctgggcgtgaaccagggcgagggcctgaagttcgtggagaacatcgtggacagcgacgacggcatcagcgccagcgacttcgacttcgccgtgagcaacttcgtggacaacctgtacggctaccccgagggcaaggacgtgctgagagagaccatcaagttcatgtacaccgactgggccgacagacacaaccccgagaccagaagaaagaccctgctggccctgttcaccgaccaccagtgggtggcccccgccgtggccaccgccgacctgcacagcaacttcggcagccccacctacttctacgccttctaccaccactgccagaccgaccaggtgcccgcctgggccgacgccgcccacggcgacgaggtgccctacgtgctgggcatccccatgatcggccccaccgagctgttcccctgcaacttcagcaagaacgacgtgatgctgagcgccgtggtgatgacctactggaccaacttcgccaagaccggcgaccccaaccagcccgtgccccaggacaccaagttcatccacaccaagcccaacagattcgaggaggtggcctggaccagatacagccagaaggaccagctgtacctgcacatcggcctgaagcccagagtgaaggagcactacagagccaacaaggtgaacctgtggctggagctggtgccccacctgcacaacctgaacgacatcagccagtacaccagcaccaccaccaaggtgcccagcaccgacatcaccttcagacccaccagaaagaacagcgtgcccgtgaccagcgccttccccaccgccaagcaggacgaccccaagcagcagcccagccccttcagcgtggaccagagagactacagcaccgagctgagcgtgaccatcgccgtgggcgccagcctgctgttcctgaacatcctggccttcgccgccctgtactacaagaaggacaagagaagacacgacgtgcacagaagatgcagcccccagagaaccaccaccaacgacctgacccacgcccaggaggaggagatcatgagcctgcagatgaagcacaccgacctggaccacgagtgcgagagcatccacccccacgaggtggtgctgagaaccgcctgcccccccgactacaccctggccatgagaagaagccccgacgacgtgcccctgatgacccccaacaccatcaccatgatccccaacaccatccccggcatccagcccctgcacaccttcaacaccttcaccggcggccagaacaacaccctgccccacccccacccccacccccacagccacagcaccaccagagtgtag

SEQ ID NO: 90846 - DNA, 2592 bp, synthetic construct
  misc_feature 1..2592: note = Description of Artificial Sequence: Synthetic coding sequence
  source 1..2592: mol_type = other DNA
atggccctgcccagatgcacctggcccaactacgtgtggagagccgtgatggcctgcctggtgcacagaggcctgggcgcccccctgaccctgtgcatgctgggctgcctgctgcaggccggccacgtgctgagccagaagctggacgacgtggaccccctggtggccaccaacttcggcaagatcagaggcatcaagaaggagctgaacaacgagatcctgggccccgtgatccagttcctgggcgtgccctacgccgccccccccaccggcgagagaagattccagccccccgagccccccagcccctggagcgacatcagaaacgccacccagttcgcccccgtgtgcccccagaacatcatcgacggcagactgcccgaggtgatgctgcccgtgtggttcaccaacaacctggacgtggtgagcagctacgtgcaggaccagagcgaggactgcctgtacctgaacatctacgtgcccaccgaggacgtgaagagaatcagcaaggagtgcgccagaaagcccggcaagaagatctgcagaaagggcggccccctgaccaagaagcagaccgacgacctgggcgacaacgacggcgccgaggacgaggacatcagagacagcggcggccccaagcccgtgatggtgtacatccacggcggcagctacatggagggcaccggcaacctgtacgacggcagcgtgctggccagctacggcaacgtgatcgtgatcaccgtgaactacagactgggcgtgctgggcttcctgagcaccggcgaccaggccgccaagggcaactacggcctgctggacctgatccaggccctgagatggaccagcgagaacatcggcttcttcggcggcgaccccctgagaatcaccgtgttcggcagcggcgccggcggcagctgcgtgaacctgctgaccctgagccactacagcgagggcaacagatggagcaacagcaccaagggcctgttccagagagccatcgcccagagcggcaccgccctgagcagctgggccgtgagcttccagcccgccaagtacgccagaatgctggccaccaaggtgggctgcaacgtgagcgacaccgtggagctggtggagtgcctgcagaagaagccctacaaggagctggtggaccaggacatccagcccgccagataccacatcgccttcggccccgtgatcgacggcgacgtgatccccgacgacccccagatcctgatggagcagggcgagttcctgaactacgacatcatgctgggcgtgaaccagggcgagggcctgaagttcgtggagaacatcgtggacagcgacgacggcatcagcgccagcgacttcgacttcgccgtgagcaacttcgtggacaacctgtacggctaccccgagggcaaggacgtgctgagagagaccatcaagttcatgtacaccgactgggccgacagacacaaccccgagaccagaagaaagaccctgctggccctgttcaccgaccaccagtgggtggcccccgccgtggccaccgccgacctgcacagcaacttcggcagccccacctacttctacgccttctaccaccactgccagaccgaccaggtgcccgcctgggccgacgccgcccacggcgacgaggtgccctacgtgctgggcatccccatgatcggccccaccgagctgttcccctgcaacttcagcaagaacgacgtgatgctgagcgccgtggtgatgacctactggaccaacttcgccaagaccggcgaccccaaccagcccgtgccccaggacaccaagttcatccacaccaagcccaacagattcgaggaggtggcctggaccagatacagccagaaggaccagctgtacctgcacatcggcctgaagcccagagtgaaggagcactacagagccaacaaggtgaacctgtggctggagctggtgccccacctgcacaacctgaacgacatcagccagtacaccagcaccaccaccaaggtgcccagcaccgacatcaccttcagacccaccagaaagaacagcgtgcccgtgaccagcgccttccccaccgccaagcaggacgaccccaagcagcagcccagccccttcagcgtggaccagagagactacagcaccgagctgagcgtgaccatcgccgtgggcgccagcctgctgttcctgaacatcctggccttcgccgccctgtactacaagaaggacaagagaagacacgacgtgcacagaagatgcagcccccagagaaccaccaccaacgacctgacccacgcccaggaggaggagatcatgagcctgcagatgaagcacaccgacctggaccacgagtgcgagagcatccacccccacgaggtggtgctgagaaccgcctgcccccccgactacaccctggccatgagaagaagccccgacgacgtgcccctgatgacccccaacaccatcaccatgatccccaacaccatccccggcatccagcccctgcacaccttcaacaccttcaccggcggccagaacaacaccctgccccacccccacccccacccccacagccacagcaccaccagagtgtag

SEQ ID NO: 90847 - DNA, 33 bp, synthetic construct
  misc_feature 1..33: note = Description of Artificial Sequence: Synthetic coding sequence
  source 1..33: mol_type = other DNA
atggccctgcccagatgcacctggcccaactag

SEQ ID NO: 90848 - DNA, 42 bp, synthetic construct
  misc_feature 1..42: note = Description of Artificial Sequence: Synthetic coding sequence
  source 1..42: mol_type = other DNA
atggccctgcccagatgcacctggcccaactacgtgtggtag

SEQ ID NO: 90849 - DNA, 2472 bp, synthetic construct; identical to SEQ ID NO: 90845
  misc_feature 1..2472: note = Description of Artificial Sequence: Synthetic coding sequence
  source 1..2472: mol_type = other DNA

SEQ ID NO: 90850 - DNA, 2472 bp, synthetic construct; identical to SEQ ID NO: 90845
  misc_feature 1..2472: note = Description of Artificial Sequence: Synthetic coding sequence
  source 1..2472: mol_type = other DNA

SEQ ID NO: 90851 - DNA, 2508 bp, synthetic construct
  misc_feature 1..2508: note = Description of Artificial Sequence: Synthetic coding sequence
  source 1..2508: mol_type = other DNA
atgtggctgctggccctgtgcctggtgggcctggccggcgcccagagaggcggcggcggccccggcggcggcgcccccggcggccccggcctgggcctgggcagcctgggcgaggagagattccccgtggtgaacaccgcctacggcagagtgagaggcgtgagaagagagctgaacaacgagatcctgggccccgtggtgcagttcctgggcgtgccctacgccaccccccccctgggcgccagaagattccagccccccgaggcccccgccagctggcccggcgtgagaaacgccaccaccctgccccccgcctgcccccagaacctgcacggcgccctgcccgccatcatgctgcccgtgtggttcaccgacaacctggaggccgccgccacctacgtgcagaaccagagcgaggactgcctgtacctgaacctgtacgtgcccaccgaggacggccccctgaccaagaagagagacgaggccaccctgaacccccccgacaccgacatcagagaccccggcaagaagcccgtgatgctgttcctgcacggcggcagctacatggagggcaccggcaacatgttcgacggcagcgtgctggccgcctacggcaacgtgatcgtggccaccctgaactacagactgggcgtgctgggcttcctgagcaccggcgaccaggccgccaagggcaactacggcctgctggaccagatccaggccctgagatggctgagcgagaacatcgcccacttcggcggcgaccccgagagaatcaccatcttcggcagcggcgccggcgccagctgcgtgaacctgctgatcctgagccaccacagcgagggcctgttccagaaggccatcgcccagagcggcaccgccatcagcagctggagcgtgaactaccagcccctgaagtacaccagactgctggccgccaaggtgggctgcgacagagaggacagcgccgaggccgtggagtgcctgagaagaaagcccagcagagagctggtggaccaggacgtgcagcccgccagataccacatcgccttcggccccgtggtggacggcgacgtggtgcccgacgaccccgagatcctgatgcagcagggcgagttcctgaactacgacatgctgatcggcgtgaaccagggcgagggcctgaagttcgtggaggacagcgccgagagcgaggacggcgtgagcgccagcgccttcgacttcaccgtgagcaacttcgtggacaacctgtacggctaccccgagggcaaggacgtgctgagagagaccatcaagttcatgtacaccgactgggccgacagagacaacggcgagatgagaagaaagaccctgctggccctgttcaccgaccaccagtgggtggcccccgccgtggccaccgccaagctgcacgccgactaccagagccccgtgtacttctacaccttctaccaccactgccaggccgagggcagacccgagtgggccgacgccgcccacggcgacgagctgccctacgtgttcggcgtgcccatggtgggcgccaccgacctgttcccctgcaacttcagcaagaacgacgtgatgctgagcgccgtggtgatgacctactggaccaacttcgccaagaccggcgaccccaaccagcccgtgccccaggacaccaagttcatccacaccaagcccaacagattcgaggaggtggtgtggagcaagttcaacagcaaggagaagcagtacctgcacatcggcctgaagcccagagtgagagacaactacagagccaacaaggtggccttctggctggagctggtgccccacctgcacaacctgcacaccgagctgttcaccaccaccaccagactgcccccctacgccaccagatggccccccagaccccccgccggcgcccccggcaccagaagaccccccccccccgccaccctgccccccgagcccgagcccgagcccggccccagagcctacgacagattccccggcgacagcagagactacagcaccgagctgagcgtgaccgtggccgtgggcgccagcctgctgttcctgaacatcctggccttcgccgccctgtactacaagagagacagaagacaggagctgagatgcagaagactgagcccccccggcggcagcggcagcggcgtgcccggcggcggccccctgctgcccgccgccggcagagagctgccccccgaggaggagctggtgagcctgcagctgaagagaggcggcggcgtgggcgccgaccccgccgaggccctgagacccgcctgcccccccgactacaccctggccctgagaagagcccccgacgacgtgcccctgctggcccccggcgccctgaccctgctgcccagcggcctgggcccccccccccccccccccccccccagcctgcaccccttcggccccttccccccccccccccccaccgccaccagccacaacaacaccctgccccacccccacagcaccaccagagtgtag

SEQ ID NO: 90852 - DNA, 2547 bp, synthetic construct
  misc_feature 1..2547: note = Description of Artificial Sequence: Synthetic coding sequence
  source 1..2547: mol_type = other DNA
atgtggctgagactgggcccccccagcctgagcctgagccccaagcccaccgtgggcagaagcctgtgcctgaccctgtggttcctgagcctggccctgagagccagcacccaggcccccgcccccaccgtgaacacccacttcggcaagctgagaggcgccagagtgcccctgcccagcgagatcctgggccccgtggaccagtacctgggcgtgccctacgccgccccccccatcggcgagaagagattcctgccccccgagcccccccccagctggagcggcatcagaaacgccacccacttcccccccgtgtgcccccagaacatccacaccgccgtgcccgaggtgatgctgcccgtgtggttcaccgccaacctggacatcgtggccacctacatccaggagcccaacgaggactgcctgtacctgaacgtgtacgtgcccaccgaggacgtgaagagaatcagcaaggagtgcgccagaaagcccaacaagaagatctgcagaaagggcggcagcggcgccaagaagcagggcgaggacctggccgacaacgacggcgacgaggacgaggacatcagagacagcggcgccaagcccgtgatggtgtacatccacggcggcagctacatggagggcaccggcaacatgatcgacggcagcatcctggccagctacggcaacgtgatcgtgatcaccctgaactacagagtgggcgtgctgggcttcctgagcaccggcgaccaggccgccaagggcaactacggcctgctggaccagatccaggccctgagatgggtgagcgagaacatcgccttcttcggcggcgaccccagaagaatcaccgtgttcggcagcggcatcggcgccagctgcgtgagcctgctgaccctgagccaccacagcgagggcctgttccagagagccatcatccagagcggcagcgccctgagcagctgggccgtgaactaccagcccgtgaagtacaccagcctgctggccgacaaggtgggctgcaacgtgctggacaccgtggacatggtggactgcctgagacagaagagcgccaaggagctggtggagcaggacatccagcccgccagataccacgtggccttcggccccgtgatcgacggcgacgtgatccccgacgaccccgagatcctgatggagcagggcgagttcctgaactacgacatcatgctgggcgtgaaccagggcgagggcctgaagttcgtggagggcgtggtggaccccgaggacggcgtgagcggcaccgacttcgactacagcgtgagcaacttcgtggacaacctgtacggctaccccgagggcaaggacaccctgagagagaccatcaagttcatgtacaccgactgggccgacagagacaaccccgagaccagaagaaagaccctggtggccctgttcaccgaccaccagtgggtggagcccagcgtggtgaccgccgacctgcacgccagatacggcagccccacctacttctacgccttctaccaccactgccagagcctgatgaagcccgcctggagcgacgccgcccacggcgacgaggtgccctacgtgttcggcgtgcccatggtgggccccaccgacctgttcccctgcaacttcagcaagaacgacgtgatgctgagcgccgtggtgatgacctactggaccaacttcgccaagaccggcgaccccaacaagcccgtgccccaggacaccaagttcatccacaccaaggccaacagattcgaggaggtggcctggagcaagtacaaccccagagaccagctgtacctgcacatcggcctgaagcccagagtgagagaccactacagagccaccaaggtggccttctggaagcacctggtgccccacctgtacaacctgcacgacatgttccactacaccagcaccaccaccaaggtgcccccccccgacaccacccacagcagccacatcaccagaagacccaacggcaagacctggagcaccaagagacccgccatcagccccgcctacagcaacgagaacgcccagggcagctggaacggcgaccaggacgccggccccctgctggtggagaaccccagagactacagcaccgagctgagcgtgaccatcgccgtgggcgccagcctgctgttcctgaacgtgctggccttcgccgccctgtactacagaaaggacaagagaagacaggagcccctgagacagcccagcccccagagaggcgccggcgcccccgagctgggcgccgcccccgaggaggagctggccgccctgcagctgggccccacccaccacgagtgcgaggccggccccccccacgacaccctgagactgaccgccctgcccgactacaccctgaccctgagaagaagccccgacgacatccccctgatgacccccaacaccatcaccatgatccccaacagcctggtgggcctgcagaccctgcacccctacaacaccttcgccgccggcttcaacagcaccggcctgccccacagccacagcaccaccagagtgtag

SEQ ID NO: 90853 - DNA, 2487 bp, synthetic construct
  misc_feature 1..2487: note = Description of Artificial Sequence: Synthetic coding sequence
  source 1..2487: mol_type = other DNA
atgtggctgagactgggcccccccagcctgagcctgagccccaagcccaccgtgggcagaagcctgtgcctgaccctgtggttcctgagcctggccctgagagccagcacccaggcccccgcccccaccgtgaacacccacttcggcaagctgagaggcgccagagtgcccctgcccagcgagatcctgggccccgtggaccagtacctgggcgtgccctacgccgccccccccatcggcgagaagagattcctgccccccgagcccccccccagctggagcggcatcagaaacgccacccacttcccccccgtgtgcccccagaacatccacaccgccgtgcccgaggtgatgctgcccgtgtggttcaccgccaacctggacatcgtggccacctacatccaggagcccaacgaggactgcctgtacctgaacgtgtacgtgcccaccgaggacggcagcggcgccaagaagcagggcgaggacctggccgacaacgacggcgacgaggacgaggacatcagagacagcggcgccaagcccgtgatggtgtacatccacggcggcagctacatggagggcaccggcaacatgatcgacggcagcatcctggccagctacggcaacgtgatcgtgatcaccctgaactacagagtgggcgtgctgggcttcctgagcaccggcgaccaggccgccaagggcaactacggcctgctggaccagatccaggccctgagatgggtgagcgagaacatcgccttcttcggcggcgaccccagaagaatcaccgtgttcggcagcggcatcggcgccagctgcgtgagcctgctgaccctgagccaccacagcgagggcctgttccagagagccatcatccagagcggcagcgccctgagcagctgggccgtgaactaccagcccgtgaagtacaccagcctgctggccgacaaggtgggctgcaacgtgctggacaccgtggacatggtggactgcctgagacagaagagcgccaaggagctggtggagcaggacatccagcccgccagataccacgtggccttcggccccgtgatcgacggcgacgtgatccccgacgaccccgagatcctgatggagcagggcgagttcctgaactacgacatcatgctgggcgtgaaccagggcgagggcctgaagttcgtggagggcgtggtggaccccgaggacggcgtgagcggcaccgacttcgactacagcgtgagcaacttcgtggacaacctgtacggctaccccgagggcaaggacaccctgagagagaccatcaagttcatgtacaccgactgggccgacagagacaaccccgagaccagaagaaagaccctggtggccctgttcaccgaccaccagtgggtggagcccagcgtggtgaccgccgacctgcacgccagatacggcagccccacctacttctacgccttctaccaccactgccagagcctgatgaagcccgcctggagcgacgccgcccacggcgacgaggtgccctacgtgttcggcgtgcccatggtgggccccaccgacctgttcccctgcaacttcagcaagaacgacgtgatgctgagcgccgtggtgatgacctactggaccaacttcgccaagaccggcgaccccaacaagcccgtgccccaggacaccaagttcatccacaccaaggccaacagattcgaggaggtggcctggagcaagtacaaccccagagaccagctgtacctgcacatcggcctgaagcccagagtgagagaccactacagagccaccaaggtggccttctggaagcacctggtgccccacctgtacaacctgcacgacatgttccactacaccagcaccaccaccaaggtgcccccccccgacaccacccacagcagccacatcaccagaagacccaacggcaagacctggagcaccaagagacccgccatcagccccgcctacagcaacgagaacgcccagggcagctggaacggcgaccaggacgccggccccctgctggtggagaaccccagagactacagcaccgagctgagcgtgaccatcgccgtgggcgccagcctgctgttcctgaacgtgctggccttcgccgccctgtactacagaaaggacaagagaagacaggagcccctgagacagcccagcccccagagaggcgccggcgcccccgagctgggcgccgcccccgaggaggagctggccgccctgcagctgggccccacccaccacgagtgcgaggccggccccccccacgacaccctgagactgaccgccctgcccgactacaccctgaccctgagaagaagccccgacgacatccccctgatgacccccaacaccatcaccatgatccccaacagcctggtgggcctgcagaccctgcacccctacaacaccttcgccgccggcttcaacagcaccggcctgccccacagccacagcaccaccagagtgtag

SEQ ID NO: 90854 - DNA, 1542 bp, synthetic construct
  misc_feature 1..1542: note = Description of Artificial Sequence: Synthetic coding sequence
  source 1..1542: mol_type = other DNA
atgtggctgagactgggcccccccagcctgagcctgagccccaagcccaccgtgggcagaagcctgtgcctgaccctgtggttcctgagcctggccctgagagccagcacccaggcccccgcccccaccgtgaacacccacttcggcaagctgagaggcgccagagtgcccctgcccagcgagatcctgggccccgtggaccagtacctgggcgtgccctacgccgccccccccatcggcgagaagagattcctgccccccgagcccccccccagctggagcggcatcagaaacgccacccacttcccccccgtgtgcccccagaacatccacaccgccgtgcccgaggtgatgctgcccgtgtggttcaccgccaacctggacatcgtggccacctacatccaggagcccaacgaggactgcctgtacctgaacgtgtacgtgcccaccgaggacgacatcagagacagcggcgccaagcccgtgatggtgtacatccacggcggcagctacatggagggcaccggcaacatgatcgacggcagcatcctggccagctacggcaacgtgatcgtgatcaccctgaactacagagtgggcgtgctgggcttcctgagcaccggcgaccaggccgccaagggcaactacggcctgctggaccagatccaggccctgagatgggtgagcgagaacatcgccttcttcggcggcgaccccagaagaatcaccgtgttcggcagcggcatcggcgccagctgcgtgagcctgctgaccctgagccaccacagcgagggcctgttccagagagccatcatccagagcggcagcgccctgagcagctgggccgtgaactaccagcccgtgaagtacaccagcctgctggccgacaaggtgggctgcaacgtgctggacaccgtggacatggtggactgcctgagacagaagagcgccaaggagctggtggagcaggacatccagcccgccagataccacgtggccttcggccccgtgatcgacggcgacgtgatccccgacgaccccgagatcctgatggagcagggcgagttcctgaactacgacatcatgctgggcgtgaaccagggcgagggcctgaagttcgtggagggcgtggtggaccccgaggacggcgtgagcggcaccgacttcgactacagcgtgagcaacttcgtggacaacctgtacggctaccccgagggcaaggacaccctgagagagaccatcaagttcatgtacaccgactgggccgacagagacaaccccgagaccagaagaaagaccctggtggccctgttcaccgaccaccagtgggtggagcccagcgtggtgaccgccgacctgcacgccagatacggcagccccacctacttctacgccttctaccaccactgccagagcctgatgaagcccgcctggagcgacgccgcccacggcgacgaggtgccctacgtgttcggcgtgcccatggtgggccccaccgacctgttcccctgcaacttcagcaagaacgacgtgatgctgtag

SEQ ID NO: 90855 - DNA, 2427 bp, synthetic construct
  misc_feature 1..2427: note = Description of Artificial Sequence: Synthetic coding sequence
  source 1..2427: mol_type = other DNA
atgtggctgagactgggcccccccagcctgagcctgagccccaagcccaccgtgggcagaagcctgtgcctgaccctgtggttcctgagcctggccctgagagccagcacccaggcccccgcccccaccgtgaacacccacttcggcaagctgagaggcgccagagtgcccctgcccagcgagatcctgggccccgtggaccagtacctgggcgtgccctacgccgccccccccatcggcgagaagagattcctgccccccgagcccccccccagctggagcggcatcagaaacgccacccacttcccccccgtgtgcccccagaacatccacaccgccgtgcccgaggtgatgctgcccgtgtggttcaccgccaacctggacatcgtggccacctacatccaggagcccaacgaggactgcctgtacctgaacgtgtacgtgcccaccgaggacgacatcagagacagcggcgccaagcccgtgatggtgtacatccacggcggcagctacatggagggcaccggcaacatgatcgacggcagcatcctggccagctacggcaacgtgatcgtgatcaccctgaactacagagtgggcgtgctgggcttcctgagcaccggcgaccaggccgccaagggcaactacggcctgctggaccagatccaggccctgagatgggtgagcgagaacatcgccttcttcggcggcgaccccagaagaatcaccgtgttcggcagcggcatcggcgccagctgcgtgagcctgctgaccctgagccaccacagcgagggcctgttccagagagccatcatccagagcggcagcgccctgagcagctgggccgtgaactaccagcccgtgaagtacaccagcctgctggccgacaaggtgggctgcaacgtgctggacaccgtggacatggtggactgcctgagacagaagagcgccaaggagctggtggagcaggacatccagcccgccagataccacgtggccttcggccccgtgatcgacggcgacgtgatccccgacgaccccgagatcctgatggagcagggcgagttcctgaactacgacatcatgctgggcgtgaaccagggcgagggcctgaagttcgtggagggcgtggtggaccccgaggacggcgtgagcggcaccgacttcgactacagcgtgagcaacttcgtggacaacctgtacggctaccccgagggcaaggacaccctgagagagaccatcaagttcatgtacaccgactgggccgacagagacaaccccgagaccagaagaaagaccctggtggccctgttcaccgaccaccagtgggtggagcccagcgtggtgaccgccgacctgcacgccagatacggcagccccacctacttctacgccttctaccaccactgccagagcctgatgaagcccgcctggagcgacgccgcccacggcgacgaggtgccctacgtgttcggcgtgcccatggtgggccccaccgacctgttcccctgcaacttcagcaagaacgacgtgatgctgagcgccgtggtgatgacctactggaccaacttcgccaagaccggcgaccccaacaagcccgtgccccaggacaccaagttcatccacaccaaggccaacagattcgaggaggtggcctggagcaagtacaaccccagagaccagctgtacctgcacatcggcctgaagcccagagtgagagaccactacagagccaccaaggtggccttctggaagcacctggtgccccacctgtacaacctgcacgacatgttccactacaccagcaccaccaccaaggtgcccccccccgacaccacccacagcagccacatcaccagaagacccaacggcaagacctggagcaccaagagacccgccatcagccccgcctacagcaacgagaacgcccagggcagctggaacggcgaccaggacgccggccccctgctggtggagaaccccagagactacagcaccgagctgagcgtgaccatcgccgtgggcgccagcctgctgttcctgaacgtgctggccttcgccgccctgtactacagaaaggacaagagaagacaggagcccctgagacagcccagcccccagagaggcgccggcgcccccgagctgggcgccgcccccgaggaggagctggccgccctgcagctgggccccacccaccacgagtgcgaggccggccccccccacgacaccctgagactgaccgccctgcccgactacaccctgaccctgagaagaagccccgacgacatccccctgatgacccccaacaccatcaccatgatccccaacagcctggtgggcctgcagaccctgcacccctacaacaccttcgccgccggcttcaacagcaccggcctgccccacagccacagcaccaccagagtgtag

SEQ ID NO: 90856 - DNA, 1056 bp, synthetic construct
  misc_feature 1..1056: note = Description of Artificial Sequence: Synthetic coding sequence
  source 1..1056: mol_type = other DNA
atgctgcccgtgtggttcaccgccaacctggacatcgtggccacctacatccaggagcccaacgaggactgcctgtacctgaacgtgtacgtgcccaccgaggacggcagcggcgccaagaagcagggcgaggacctggccgacaacgacggcgacgaggacgaggacatcagagacagcggcgccaagcccgtgatggtgtacatccacggcggcagctacatggagggcaccggcaacatgatcgacggcagcatcctggccagctacggcaacgtgatcgtgatcaccctgaactacagagtgggcgtgctgggcttcctgagcaccggcgaccaggccgccaagggcaactacggcctgctggaccagatccaggccctgagatgggtgagcgagaacatcgccttcttcggcggcgaccccagaagaatcaccgtgttcggcagcggcatcggcgccagctgcgtgagcctgctgaccctgagccaccacagcgagggcctgttccagagagccatcatccagagcggcagcgccctgagcagctgggccgtgaactaccagcccgtgaagtacaccagcctgctggccgacaaggtgggctgcaacgtgctggacaccgtggacatggtggactgcctgagacagaagagcgccaaggagctggtggagcaggacatccagcccgccagataccacgtggccttcggccccgtgatcgacggcgacgtgatccccgacgaccccgagatcctgatggagcagggcgagttcctgaactacgacatcatgctgggcgtgaaccagggcgagggcctgaagttcgtggagggcgtggtggaccccgaggacggcgtgagcggcaccgacttcgactacagcgtgagcatcctgtggaccatctgcatggccatcctgagagtgagaaccccctgcgagagacccagcagcagctgcatccagaccggccagaccgtgaccaccctgagacccgccgtgaagcactggtggcacagcagcctgaccaccagcggctggagcccccagtggtag

SEQ ID NO: 90857 - DNA, 771 bp, synthetic construct
  misc_feature 1..771: note = Description of Artificial Sequence: Synthetic coding sequence
  source 1..771: mol_type = other DNA
atgctgagaccccagggcctgctgtggctgcccctgctgttcaccagcgtgtgcgtgatgctgaacagcaacgtgctgctgtggatcaccgccctggccatcaagttcaccctgatcgacagccaggcccagtaccccgtggtgaacaccaactacggcaagatccagggcctgagaacccccctgcccagcgagatcctgggccccgtggagcagtacctgggcgtgccctacgccagcccccccaccggcgagagaagattccagccccccgagagccccagcagctggaccggcatcagaaacgccacccagttcagcgccgtgtgcccccagcacctggacgagagattcctgctgcacgacatgctgcccatctggttcaccaccagcctggacaccctgatgacctacgtgcaggaccagaacgaggactgcctgtacctgaacatctacgtgcccatggaggacggcaccaacatcaagagaaacgccgacgacatcaccagcaacgaccacggcgaggacaaggacatccacgagcagaacagcaagaagcccgtgatggtgtacatccacggcggcagctacatggagggcaccggcaacatgatcgacggcagcatcctggccagctacggcaacgtgatcgtgatcaccatcaactacagactgggcatcctgggcatgcaggaggccagactgtgcggcagcagcaagatgttcaactacttcaagagccccttcaccaacctgatcaacttcttctag

SEQ ID NO: 90858 - DNA, 2451 bp, synthetic construct
  misc_feature 1..2451: note = Description of Artificial Sequence: Synthetic coding sequence
  source 1..2451: mol_type = other DNA
atgctgagaccccagggcctgctgtggctgcccctgctgttcaccagcgtgtgcgtgatgctgaacagcaacgtgctgctgtggatcaccgccctggccatcaagttcaccctgatcgacagccaggcccagtaccccgtggtgaacaccaactacggcaagatccagggcctgagaacccccctgcccagcgagatcctgggccccgtggagcagtacctgggcgtgccctacgccagcccccccaccggcgagagaagattccagccccccgagagccccagcagctggaccggcatcagaaacgccacccagttcagcgccgtgtgcccccagcacctggacgagagattcctgctgcacgacatgctgcccatctggttcaccaccagcctggacaccctgatgacctacgtgcaggaccagaacgaggactgcctgtacctgaacatctacgtgcccatggaggacgacatccacgagcagaacagcaagaagcccgtgatggtgtacatccacggcggcagctacatggagggcaccggcaacatgatcgacggcagcatcctggccagctacggcaacgtgatcgtgatcaccatcaactacagactgggcatcctgggcttcctgagcaccggcgaccaggccgccaagggcaactacggcctgctggaccagatccaggccctgagatggatcgaggagaacgtgggcgccttcggcggcgaccccaagagagtgaccatcttcggcagcggcgccggcgccagctgcgtgagcctgctgaccctgagccactacagcgagggcctgttccagaaggccatcatccagagcggcaccgccctgagcagctgggccgtgaactaccagcccgccaagtacaccagaatcctggccgacaaggtgggctgcaacatgctggacaccaccgacatggtggagtgcctgaagaacaagaactacaaggagctgatccagcagaccatcacccccgccacctaccacatcgccttcggccccgtgatcgacggcgacgtgatccccgacgacccccagatcctgatggagcagggcgagttcctgaactacgacatcatgctgggcgtgaaccagggcgagggcctgaagttcgtggacggcatcgtggacaacgaggacggcgtgacccccaacgacttcgacttcagcgtgagcaacttcgtggacaacctgtacggctaccccgagggcaaggacaccctgagagagaccatcaagttcatgtacaccgactgggccgacaaggagaaccccgagaccagaagaaagaccctggtggccctgttcaccgaccaccagtgggtggcccccgccgtggccaccgccgacctgcacgcccagtacggcagccccacctacttctacgccttctaccaccactgccagagcgagatgaagcccagctgggccgacagcgcccacggcgacgaggtgccctacgtgttcggcatccccatgatcggccccaccgagctgttcagctgcaacttcagcaagaacgacgtgatgctgagcgccgtggtgatgacctactggaccaacttcgccaagaccggcgaccccaaccagcccgtgccccaggacaccaagttcatccacaccaagcccaacagattcgaggaggtggcctggagcaagtacaaccccaaggaccagctgtacctgcacatcggcctgaagcccagagtgagagaccactacagagccaccaaggtggccttctggctggagctggtgccccacctgcacaacctgaacgagatcttccagtacgtgagcaccaccaccaaggtgcccccccccgacatgaccagcttcccctacggcaccagaagaagccccgccaagatctggcccaccaccaagagacccgccatcacccccgccaacaaccccaagcacagcaaggacccccacaagaccggccccgaggacaccaccgtgctgatcgagaccaagagagactacagcaccgagctgagcgtgaccatcgccgtgggcgccagcctgctgttcctgaacatcctggccttcgccgccctgtactacaagaaggacaagagaagacacgagacccacagacaccccagcccccagagaaacaccaccaacgacatcacccacatccagaacgaggagatcatgagcctgcagatgaagcagctggagcacgaccacgagtgcgagagcctgcaggcccacgacaccctgagactgacctgcccccccgactacaccctgaccctgagaagaagccccgacgacatccccttcatgacccccaacaccatcaccatgatccccaacaccctgatgggcatgcagcccctgcacaccttcaagaccttcagcggcggccagaacagcaccaacctgccccacggccacagcaccaccagagtgtag

SEQ ID NO: 90859 - DNA, 2451 bp, synthetic construct; identical to SEQ ID NO: 90858
  misc_feature 1..2451: note = Description of Artificial Sequence: Synthetic coding sequence
  source 1..2451: mol_type = other DNA

SEQ ID NO: 90860 - DNA, 2622 bp, synthetic construct
  misc_feature 1..2622: note = Description of Artificial Sequence: Synthetic coding sequence
  source 1..2622: mol_type = other DNA
atgctgagaccccagggcctgctgtggctgcccctgctgttcaccagcgtgtgcgtgatgctgaacagcaacgtgctgctgtggatcaccgccctggccatcaagttcaccctgatcgacagccaggcccagtaccccgtggtgaacaccaactacggcaagatccagggcctgagaacccccctgcccagcgagatcctgggccccgtggagcagtacctgggcgtgccctacgccagcccccccaccggcgagagaagattccagccccccgagagccccagcagctggaccggcatcagaaacgccacccagttcagcgccgtgtgcccccagcacctggacgagagattcctgctgcacgacatgctgcccatctggttcaccaccagcctggacaccctgatgacctacgtgcaggaccagaacgaggactgcctgtacctgaacatctacgtgcccatggaggacggcaccaacatcaagagaaacgccgacgacatcaccagcaacgaccacggcgaggacaaggacatccacgagcagaacagcaagaagcccgtgatggtgtacatccacggcggcagctacatggagggcaccggcaacatgatcgacggcagcatcctggccagctacggcaacgtgatcgtgatcaccatcaactacagactgggcatcctggcccagaacaccctggcccacggcaactgcaagcacagatgccagctgcacctgcaggcccccagagactgcaagagcgcctaccccttcagaaacgaggacgagatcagaggcttcctgagcaccggcgaccaggccgccaagggcaactacggcctgctggaccagatccaggccctgagatggatcgaggagaacgtgggcgccttcggcggcgaccccaagagagtgaccatcttcggcagcggcgccggcgccagctgcgtgagcctgctgaccctgagccactacagcgagggcctgttccagaaggccatcatccagagcggcaccgccctgagcagctgggccgtgaactaccagcccgccaagtacaccagaatcctggccgacaaggtgggctgcaacatgctggacaccaccgacatggtggagtgcctgaagaacaagaactacaaggagctgatccagcagaccatcacccccgccacctaccacatcgccttcggccccgtgatcgacggcgacgtgatccccgacgacccccagatcctgatggagcagggcgagttcctgaactacgacatcatgctgggcgtgaaccagggcgagggcctgaagttcgtggacggcatcgtggacaacgaggacggcgtgacccccaacgacttcgacttcagcgtgagcaacttcgtggacaacctgtacggctaccccgagggcaaggacaccctgagagagaccatcaagttcatgtacaccgactgggccgacaaggagaaccccgagaccagaagaaagaccctggtggccctgttcaccgaccaccagtgggtggcccccgccgtggccaccgccgacctgcacgcccagtacggcagccccacctacttctacgccttctaccaccactgccagagcgagatgaagcccagctgggccgacagcgcccacggcgacgaggtgccctacgtgttcggcatccccatgatcggccccaccgagctgttcagctgcaacttcagcaagaacgacgtgatgctgagcgccgtggtgatgacctactggaccaacttcgccaagaccggcgaccccaaccagcccgtgccccaggacaccaagttcatccacaccaagcccaacagattcgaggaggtggcctggagcaagtacaaccccaaggaccagctgtacctgcacatcggcctgaagcccagagtgagagaccactacagagccaccaaggtggccttctggctggagctggtgccccacctgcacaacctgaacgagatcttccagtacgtgagcaccaccaccaaggtgcccccccccgacatgaccagcttcccctacggcaccagaagaagccccgccaagatctggcccaccaccaagagacccgccatcacccccgccaacaaccccaagcacagcaaggacccccacaagaccggccccgaggacaccaccgtgctgatcgagaccaagagagactacagcaccgagctgagcgtgaccatcgccgtgggcgccagcctgctgttcctgaacatcctggccttcgccgccctgtactacaagaaggacaagagaagacacgagacccacagacaccccagcccccagagaaacaccaccaacgacatcacccacatccagaacgaggagatcatgagcctgcagatgaagcagctggagcacgaccacgagtgcgagagcctgcaggcccacgacaccctgagactgacctgcccccccgactacaccctgaccctgagaagaagccccgacgacatccccttcatgacccccaacaccatcaccatgatccccaacaccctgatgggcatgcagcccctgcacaccttcaagaccttcagcggcggccagaacagcaccaacctgccccacggccacagcaccaccagagtgtag

SEQ ID NO: 90861 - DNA, 1947 bp, synthetic construct
  misc_feature 1..1947: note = Description of Artificial Sequence: Synthetic coding sequence
  source 1..1947: mol_type = other DNA
atggtgtacatccacggcggcagctacatggagggcaccggcaacatgatcgacggcagcatcctggccagctacggcaacgtgatcgtgatcaccatcaactacagactgggcatcctgggcttcctgagcaccggcgaccaggccgccaagggcaactacggcctgctggaccagatccaggccctgagatggatcgaggagaacgtgggcgccttcggcggcgaccccaagagagtgaccatcttcggcagcggcgccggcgccagctgcgtgagcctgctgaccctgagccactacagcgagggcctgttccagaaggccatcatccagagcggcaccgccctgagcagctgggccgtgaactaccagcccgccaagtacaccagaatcctggccgacaaggtgggctgcaacatgctggacaccaccgacatggtggagtgcctgaagaacaagaactacaaggagctgatccagcagaccatcacccccgccacctaccacatcgccttcggccccgtgatcgacggcgacgtgatccccgacgacccccagatcctgatggagcagggcgagttcctgaactacgacatcatgctgggcgtgaaccagggcgagggcctgaagttcgtggacggcatcgtggacaacgaggacggcgtgacccccaacgacttcgacttcagcgtgagcaacttcgtggacaacctgtacggctaccccgagggcaaggacaccctgagagagaccatcaagttcatgtacaccgactgggccgacaaggagaaccccgagaccagaagaaagaccctggtggccctgttcaccgaccaccagtgggtggcccccgccgtggccaccgccgacctgcacgcccagtacggcagccccacctacttctacgccttctaccaccactgccagagcgagatgaagcccagctgggccgacagcgcccacggcgacgaggtgccctacgtgttcggcatccccatgatcggccccaccgagctgttcagctgcaacttcagcaagaacgacgtgatgctgagcgccgtggtgatgacctactggaccaacttcgccaagaccggcgaccccaaccagcccgtgccccaggacaccaagttcatccacaccaagcccaacagattcgaggaggtggcctggagcaagtacaaccccaaggaccagctgtacctgcacatcggcctgaagcccagagtgagagaccactacagagccaccaaggtggccttctggctggagctggtgccccacctgcacaacctgaacgagatcttccagtacgtgagcaccaccaccaaggtgcccccccccgacatgaccagcttcccctacggcaccagaagaagccccgccaagatctggcccaccaccaagagacccgccatcacccccgccaacaaccccaagcacagcaaggacccccacaagaccggccccgaggacaccaccgtgctgatcgagaccaagagagactacagcaccgagctgagcgtgaccatcgccgtgggcgccagcctgctgttcctgaacatcctggccttcgccgccctgtactacaagaaggacaagagaagacacgagacccacagacaccccagcccccagagaaacaccaccaacgacatcacccacatccagaacgaggagatcatgagcctgcagatgaagcagctggagcacgaccacgagtgcgagagcctgcaggcccacgacaccctgagactgacctgcccccccgactacaccctgaccctgagaagaagccccgacgacatccccttcatgacccccaacaccatcaccatgatccccaacaccctgatgggcatgcagcccctgcacaccttcaagaccttcagcggcggccagaacagcaccaacctgccccacggccacagcaccaccagagtgtag

SEQ ID NO: 90862 - DNA, 711 bp, synthetic construct
  misc_feature 1..711: note = Description of Artificial Sequence: Synthetic coding sequence
  source 1..711: mol_type = other DNA
tgaaacagcaacgtgctgctgtggatcaccgccctggccatcaagttcaccctgatcgacagccaggcccagtaccccgtggtgaacaccaactacggcaagatccagggcctgagaacccccctgcccagcgagatcctgggccccgtggagcagtacctgggcgtgccctacgccagcccccccaccggcgagagaagattccagccccccgagagccccagcagctggaccggcatcagaaacgccacccagttcagcgccgtgtgcccccagcacctggacgagagattcctgctgcacgacatgctgcccatctggttcaccaccagcctggacaccctgatgacctacgtgcaggaccagaacgaggactgcctgtacctgaacatctacgtgcccatggaggacggcaccaacatcaagagaaacgccgacgacatcaccagcaacgaccacggcgaggacaaggacatccacgagcagaacagcaagaagcccgtgatggtgtacatccacggcggcagctacatggagggcaccggcaacatgatcgacggcagcatcctggccagctacggcaacgtgatcgtgatcaccatcaactacagactgggcatcctgggcatgcaggaggccagactgtgcggcagcagcaagatgttcaactacttcaagagccccttcaccaacctgatcaacttcttctag

SEQ ID NO: 90863 - DNA, 2511 bp, synthetic construct
  misc_feature 1..2511: note = Description of Artificial Sequence: Synthetic coding sequence
  source 1..2511: mol_type = other DNA
atgctgagaccccagggcctgctgtggctgcccctgctgttcaccagcgtgtgcgtgatgctgaacagcaacgtgctgctgtggatcaccgccctggccatcaagttcaccctgatcgacagccaggcccagtaccccgtggtgaacaccaactacggcaagatccagggcctgagaacccccctgcccagcgagatcctgggccccgtggagcagtacctgggcgtgccctacgccagcccccccaccggcgagagaagattccagccccccgagagccccagcagctggaccggcatcagaaacgccacccagttcagcgccgtgtgcccccagcacctggacgagagattcctgctgcacgacatgctgcccatctggttcaccaccagcctggacaccctgatgacctacgtgcaggaccagaacgaggactgcctgtacctgaacatctacgtgcccatggaggacggcaccaacatcaagagaaacgccgacgacatcaccagcaacgaccacggcgaggacaaggacatccacgagcagaacagcaagaagcccgtgatggtgtacatccacggcggcagctacatggagggcaccggcaacatgatcgacggcagcatcctggccagctacggcaacgtgatcgtgatcaccatcaactacagactgggcatcctgggcttcctgagcaccggcgaccaggccgccaagggcaactacggcctgctggaccagatccaggccctgagatggatcgaggagaacgtgggcgccttcggcggcgaccccaagagagtgaccatcttcggcagcggcgccggcgccagctgcgtgagcctgctgaccctgagccactacagcgagggcctgttccagaaggccatcatccagagcggcaccgccctgagcagctgggccgtgaactaccagcccgccaagtacaccagaatcctggccgacaaggtgggctgcaacatgctggacaccaccgacatggtggagtgcctgaagaacaagaactacaaggagctgatccagcagaccatcacccccgccacctaccacatcgccttcggccccgtgatcgacggcgacgtgatccccgacgacccccagatcctgatggagcagggcgagttcctgaactacgacatcatgctgggcgtgaaccagggcgagggcctgaagttcgtggacggcatcgtggacaacgaggacggcgtgacccccaacgacttcgacttcagcgtgagcaacttcgtggacaacctgtacggctaccccgagggcaaggacaccctgagagagaccatcaagttcatgtacaccgactgggccgacaaggagaaccccgagaccagaagaaagaccctggtggccctgttcaccgaccaccagtgggtggcccccgccgtggccaccgccgacctgcacgcccagtacggcagccccacctacttctacgccttctaccaccactgccagagcgagatgaagcccagctgggccgacagcgcccacggcgacgaggtgccctacgtgttcggcatccccatgatcggccccaccgagctgttcagctgcaacttcagcaagaacgacgtgatgctgagcgccgtggtgatgacctactggaccaacttcgccaagaccggcgaccccaaccagcccgtgccccaggacaccaagttcatccacaccaagcccaacagattcgaggaggtggcctggagcaagtacaaccccaaggaccagctgtacctgcacatcggcctgaagcccagagtgagagaccactacagagccaccaaggtggccttctggctggagctggtgccccacctgcacaacctgaacgagatcttccagtacgtgagcaccaccaccaaggtgcccccccccgacatgaccagcttcccctacggcaccagaagaagccccgccaagatctggcccaccaccaagagacccgccatcacccccgccaacaaccccaagcacagcaaggacccccacaagaccggccccgaggacaccaccgtgctgatcgagaccaagagagactacagcaccgagctgagcgtgaccatcgccgtgggcgccagcctgctgttcctgaacatcctggccttcgccgccctgtactacaagaaggacaagagaagacacgagacccacagacaccccagcccccagagaaacaccaccaacgacatcacccacatccagaacgaggagatcatgagcctgcagatgaagcagctggagcacgaccacgagtgcgagagcctgcaggcccacgacaccctgagactgacctgcccccccgactacaccctgaccctgagaagaagccccgacgacatccccttcatgacccccaacaccatcaccatgatccccaacaccctgatgggcatgcagcccctgcacaccttcaagaccttcagcggcggccagaacagcaccaacctgccccacggccacagcaccaccagagtgtag

SEQ ID NO: 90864 - DNA, 1824 bp, synthetic construct
  misc_feature 1..1824: note = Description of Artificial Sequence: Synthetic coding sequence
  source 1..1824: mol_type = other DNA
atgatcgccagatgcctgctggccgtgagaagcctgagaagagtgggcggcagcagaatcctgctgagaatgaccctgggcagagaggtgatgagccccctgcaggccatgagcagctacaccgtggccggcagaaacgtgctgagatgggacctgagccccgagcagatcaagaccagaaccgaggagctgatcgtgcagaccaagcaggtgtacgacgccgtgggcatgctgggcatcgaggaggtgacctacgagaactgcctgcaggccctggccgacgtggaggtgaagtacatcgtggagagaaccatgctggacttcccccagcacgtgagcagcgacaaggaggtgagagccgccagcaccgaggccgacaagagactgagcagattcgacatcgagatgagcatgagaggcgacatcttcgagagaatcgtgcacctgcaggagacctgcgacctgggcaagatcaagcccgaggccagaagatacctggagaagagcatcaagatgggcaagagaaacggcctgcacctgcccgagcaggtgcagaacgagatcaagagcatgaagaagagaatgagcgagctgtgcatcgacttcaacaagaacctgaacgaggacgacaccttcctggtgttcagcaaggccgagctgggcgccctgcccgacgacttcatcgacagcctggagaagaccgacgacgacaagtacaagatcaccctgaagtacccccactacttccccgtgatgaagaagtgctgcatccccgagaccagaagaagaatggagatggccttcaacaccagatgcaaggaggagaacaccatcatcctgcagcagctgctgcccctgagaaccaaggtggccaagctgctgggctacagcacccacgccgacttcgtgctggagatgaacaccgccaagagcaccagcagagtgaccgccttcctggacgacctgagccagaagctgaagcccctgggcgaggccgagagagagttcatcctgaacctgaagaagaaggagtgcaaggacagaggcttcgagtacgacggcaagatcaacgcctgggacctgtactactacatgacccagaccgaggagctgaagtacagcatcgaccaggagttcctgaaggagtacttccccatcgaggtggtgaccgagggcctgctgaacacctaccaggagctgctgggcctgagcttcgagcagatgaccgacgcccacgtgtggaacaagagcgtgaccctgtacaccgtgaaggacaaggccaccggcgaggtgctgggccagttctacctggacctgtaccccagagagggcaagtacaaccacgccgcctgcttcggcctgcagcccggctgcctgctgcccgacggcagcagaatgatggccgtggccgccctggtggtgaacttcagccagcccgtggccggcagacccagcctgctgagacacgacgaggtgagaacctacttccacgagttcggccacgtgatgcaccagatctgcgcccagaccgacttcgccagattcagcggcaccaacgtggagaccgacttcgtggaggtgcccagccagatgctggagaactgggtgtgggacgtggacagcctgagaagactgagcaagcactacaaggacggcagccccatcgccgacgacctgctggagaagctggtggccagcagactggtgaacaccggcctgctgaccctgagacagatcgtgctgagcaaggtggaccagagcctgcacaccaacaccagcctggacgccgccagcaacatgcccaacaccgcccagaagtactag

SEQ ID NO: 90865 - DNA, 2115 bp, synthetic construct
  misc_feature 1..2115: note = Description of Artificial Sequence: Synthetic coding sequence
  source 1..2115: mol_type = other DNA
atgatcgccagatgcctgctggccgtgagaagcctgagaagagtgggcggcagcagaatcctgctgagaatgaccctgggcagagaggtgatgagccccctgcaggccatgagcagctacaccgtggccggcagaaacgtgctgagatgggacctgagccccgagcagatcaagaccagaaccgaggagctgatcgtgcagaccaagcaggtgtacgacgccgtgggcatgctgggcatcgaggaggtgacctacgagaactgcctgcaggccctggccgacgtggaggtgaagtacatcgtggagagaaccatgctggacttcccccagcacgtgagcagcgacaaggaggtgagagccgccagcaccgaggccgacaagagactgagcagattcgacatcgagatgagcatgagaggcgacatcttcgagagaatcgtgcacctgcaggagacctgcgacctgggcaagatcaagcccgaggccagaagatacctggagaagagcatcaagatgggcaagagaaacggcctgcacctgcccgagcaggtgcagaacgagatcaagagcatgaagaagagaatgagcgagctgtgcatcgacttcaacaagaacctgaacgaggacgacaccttcctggtgttcagcaaggccgagctgggcgccctgcccgacgacttcatcgacagcctggagaagaccgacgacgacaagtacaagatcaccctgaagtacccccactacttccccgtgatgaagaagtgctgcatccccgagaccagaagaagaatggagatggccttcaacaccagatgcaaggaggagaacaccatcatcctgcagcagctgctgcccctgagaaccaaggtggccaagctgctgggctacagcacccacgccgacttcgtgctggagatgaacaccgccaagagcaccagcagagtgaccgccttcctggacgacctgagccagaagctgaagcccctgggcgaggccgagagagagttcatcctgaacctgaagaagaaggagtgcaaggacagaggcttcgagtacgacggcaagatcaacgcctgggacctgtactactacatgacccagaccgaggagctgaagtacagcatcgaccaggagttcctgaaggagtacttccccatcgaggtggtgaccgagggcctgctgaacacctaccaggagctgctgggcctgagcttcgagcagatgaccgacgcccacgtgtggaacaagagcgtgaccctgtacaccgtgaaggacaaggccaccggcgaggtgctgggccagttctacctggacctgtaccccagagagggcaagtacaaccacgccgcctgcttcggcctgcagcccggctgcctgctgcccgacggcagcagaatgatggccgtggccgccctggtggtgaacttcagccagcccgtggccggcagacccagcctgctgagacacgacgaggtgagaacctacttccacgagttcggccacgtgatgcaccagatctgcgcccagaccgacttcgccagattcagcggcaccaacgtggagaccgacttcgtggaggtgcccagccagatgctggagaactgggtgtgggacgtggacagcctgagaagactgagcaagcactacaaggacggcagccccatcgccgacgacctgctggagaagctggtggccagcagactggtgaacaccggcctgctgaccctgagacagatcgtgctgagcaaggtggaccagagcctgcacaccaacaccagcctggacgccgccagcgagtacgccaagtactgcagcgagatcctgggcgtggccgccacccccggcaccaacatgcccgccaccttcggccacctggccggcggctacgacggccagtactacggctacctgtggagcgaggtgttcagcatggacatgttctacagctgcttcaagaaggagggcatcatgaaccccgaggtgggcatgaagtacagaaacctgatcctgaagcccggcggcagcctggacggcatggacatgctgcacaacttcctgaagagagagcccaaccagaaggccttcctgatgagcagaggcctgcacgccccctag

SEQ ID NO: 90866 - DNA, 1803 bp, synthetic construct
  misc_feature 1..1803: note = Description of Artificial Sequence: Synthetic coding sequence
  source 1..1803: mol_type = other DNA
atgctggacttcccccagcacgtgagcagcgacaaggaggtgagagccgccagcaccgaggccgacaagagactgagcagattcgacatcgagatgagcatgagaggcgacatcttcgagagaatcgtgcacctgcaggagacctgcgacctgggcaagatcaagcccgaggccagaagatacctggagaagagcatcaagatgggcaagagaaacggcctgcacctgcccgagcaggtgcagaacgagatcaagagcatgaagaagagaatgagcgagctgtgcatcgacttcaacaagaacctgaacgaggacgacaccttcctggtgttcagcaaggccgagctgggcgccctgcccgacgacttcatcgacagcctggagaagaccgacgacgacaagtacaagatcaccctgaagtacccccactacttccccgtgatgaagaagtgctgcatccccgagaccagaagaagaatggagatggccttcaacaccagatgcaaggaggagaacaccatcatcctgcagcagctgctgcccctgagaaccaaggtggccaagctgctgggctacagcacccacgccgacttcgtgctggagatgaacaccgccaagagcaccagcagagtgaccgccttcctggacgacctgagccagaagctgaagcccctgggcgaggccgagagagagttcatcctgaacctgaagaagaaggagtgcaaggacagaggcttcgagtacgacggcaagatcaacgcctgggacctgtactactacatgacccagaccgaggagctgaagtacagcatcgaccaggagttcctgaaggagtacttccccatcgaggtggtgaccgagggcctgctgaacacctaccaggagctgctgggcctgagcttcgagcagatgaccgacgcccacgtgtggaacaagagcgtgaccctgtacaccgtgaaggacaaggccaccggcgaggtgctgggccagttctacctggacctgtaccccagagagggcaagtacaaccacgccgcctgcttcggcctgcagcccggctgcctgctgcccgacggcagcagaatgatggccgtggccgccctggtggtgaacttcagccagcccgtggccggcagacccagcctgctgagacacgacgaggtgagaacctacttccacgagttcggccacgtgatgcaccagatctgcgcccagaccgacttcgccagattcagcggcaccaacgtggagaccgacttcgtggaggtgcccagccagatgctggagaactgggtgtgggacgtggacagcctgagaagactgagcaagcactacaaggacggcagccccatcgccgacgacctgctggagaagctggtggccagcagactggtgaacaccggcctgctgaccctgagacagatcgtgctgagcaaggtggaccagagcctgcacaccaacaccagcctggacgccgccagcgagtacgccaagtactgcagcgagatcctgggcgtggccgccacccccggcaccaacatgcccgccaccttcggccacctggccggcggctacgacggccagtactacggctacctgtggagcgaggtgttcagcatggacatgttctacagctgcttcaagaaggagggcatcatgaaccccgaggtgggcatgaagtacagaaacctgatcctgaagcccggcggcagcctggacggcatggacatgctgcacaacttcctgaagagagagcccaaccagaaggccttcctgatgagcagaggcctgcacgccccctag

SEQ ID NO: 90867 - DNA, 366 bp, synthetic construct
  misc_feature 1..366: note = Description of Artificial Sequence: Synthetic coding sequence
  source 1..366: mol_type = other DNA
atggccagaagagccggcggcgccagaatgttcggcagcctgctgctgttcgccctgctggccgccggcgtggcccccctgagctgggacctgcccgagcccagaagcagagccagcaagatcagagtgcacagcagaggcaacctgtgggccaccggccacttcatgggcaagaagagcctggagcccagcagccccagccccctgggcaccgccccccacaccagcctgagagaccagagactgcagctgagccacgacctgctgggcatcctgctgctgaagaaggccctgggcgtgagcctgagcagacccgccccccagatccagtacagaagactgctggtgcagatcctgcagaagtag

SEQ ID NO: 90868 - DNA, 465 bp, synthetic construct
  misc_feature 1..465: note = Description of Artificial Sequence: Synthetic coding sequence
  source 1..465: mol_type = other DNA
atggccagaagagccggcggcgccagaatgttcggcagcctgctgctgttcgccctgctggccgccggcgtggcccccctgagctgggacctgcccgagcccagaagcagagccagcaagatcagagtgcacagcagaggcaacctgtgggccaccggccacttcatgggcaagaagagcctggagcccagcagccccagccccctgggcaccgccccccacaccagcctgagagaccagagactgcagctgagccacgacctgctgggcatcctgctgctgaagaaggccctgggcgtgagcctgagcagacccgccccccagatccaggaggccgccggcaccaacaccgccgagatgacccccatcatgggccagacccagcagagaggcctggactgcgcccaccccggcaaggtgctgaacggcaccctgctgatggcccccagcggctgcaagagctag

SEQ ID NO: 90869 - DNA, 1173 bp, synthetic construct
  misc_feature 1..1173: note = Description of Artificial Sequence: Synthetic coding sequence
  source 1..1173: mol_type = other DNA
atgcccagcaagagcctgagcaacctgagcgtgaccaccggcgccaacgagagcggcagcgtgcccgagggctgggagagagacttcctgcccgccagcgacggcaccaccaccgagctggtgatcagatgcgtgatccccagcctgtacctgctgatcatcaccgtgggcctgctgggcaacatcatgctggtgaagatcttcatcaccaacagcgccatgagaagcgtgcccaacatcttcatcagcaacctggccgccggcgacctgctgctgctgctgacctgcgtgcccgtggacgccagcagatacttcttcgacgagtggatgttcggcaaggtgggctgcaagctgatccccgtgatccagctgaccagcgtgggcgtgagcgtgttcaccctgaccgccctgagcgccgacagatacagagccatcgtgaaccccatggacatgcagaccagcggcgccctgctgagaacctgcgtgaaggccatgggcatctgggtggtgagcgtgctgctggccgtgcccgaggccgtgttcagcgaggtggccagaatcagcagcctggacaacagcagcttcaccgcctgcatcccctacccccagaccgacgagctgcaccccaagatccacagcgtgctgatcttcctggtgtacttcctgatccccctggccatcatcagcatctactactaccacatcgccaagaccctgatcaagagcgcccacaacctgcccggcgagtacaacgagcacaccaagaagcagatggagaccagaaagagactggccaagatcgtgctggtgttcgtgggctgcttcatcttctgctggttccccaaccacatcctgtacatgtacagaagcttcaactacaacgagatcgaccccagcctgggccacatgatcgtgaccctggtggccagagtgctgagcttcggcaacagctgcgtgaaccccttcgccctgtacctgctgagcgagagcttcagaagacacttcaacagccagctgtgctgcggcagaaagagctaccaggagagaggcaccagctacctgctgagcagcagcgccgtgagaatgaccagcctgaagagcaacgccaagaacatggtgaccaacagcgtgctgctgaacggccacagcatgaagcaggagatggccctgtag

SEQ ID NO: 90870 - DNA, 1281 bp, synthetic construct
  misc_feature 1..1281: note = Description of Artificial Sequence: Synthetic coding sequence
  source 1..1281: mol_type = other DNA
atgacccccctgtgcctgaactgcagcgtgctgcccggcgacctgtaccccggcggcgccagaaaccccatggcctgcaacggcagcgccgccagaggccacttcgaccccgaggacctgaacctgaccgacgaggccctgagactgaagtacctgggcccccagcagaccgagctgttcatgcccatctgcgccacctacctgctgatcttcgtggtgggcgccgtgggcaacggcctgacctgcctggtgatcctgagacacaaggccatgagaacccccaccaactactacctgttcagcctggccgtgagcgacctgctggtgctgctggtgggcctgcccctggagctgtacgagatgtggcacaactaccccttcctgctgggcgtgggcggctgctacttcagaaccctgctgttcgagatggtgtgcctggccagcgtgctgaacgtgaccgccctgagcgtggagagatacgtggccgtggtgcaccccctgcaggccagaagcatggtgaccagagcccacgtgagaagagtgctgggcgccgtgtggggcctggccatgctgtgcagcctgcccaacaccagcctgcacggcatcagacagctgcacgtgccctgcagaggccccgtgcccgacagcgccgtgtgcatgctggtgagacccagagccctgtacaacatggtggtgcagaccaccgccctgctgttcttctgcctgcccatggccatcatgagcgtgctgtacctgctgatcggcctgagactgagaagagagagactgctgctgatgcaggaggccaagggcagaggcagcgccgccgccagaagcagatacacctgcagactgcagcagcacgacagaggcagaagacaggtgaccaagatgctgttcgtgctggtggtggtgttcggcatctgctgggcccccttccacgccgacagagtgatgtggagcgtggtgagccagtggaccgacggcctgcacctggccttccagcacgtgcacgtgatcagcggcatcttcttctacctgggcagcgccgccaaccccgtgctgtacagcctgatgagcagcagattcagagagaccttccaggaggccctgtgcctgggcgcctgctgccacagactgagacccagacacagcagccacagcctgagcagaatgaccaccggcagcaccctgtgcgacgtgggcagcctgggcagctgggtgcaccccctggccggcaacgacggccccgaggcccagcaggagaccgaccccagctag

SEQ ID NO: 90871 - DNA, 1248 bp, synthetic construct
  misc_feature 1..1248: note = Description of Artificial Sequence: Synthetic coding sequence
  source 1..1248: mol_type = other DNA
atgagcggcatggagaagctgcagaacgccagctggatctaccagcagaagctggaggaccccttccagaagcacctgaacagcaccgaggagtacctggccttcctgtgcggccccagaagaagccacttcttcctgcccgtgagcgtggtgtacgtgcccatcttcgtggtgggcgtgatcggcaacgtgctggtgtgcctggtgatcctgcagcaccaggccatgaagacccccaccaactactacctgttcagcctggccgtgagcgacctgctggtgctgctgctgggcatgcccctggaggtgtacgagatgtggagaaactaccccttcctgttcggccccgtgggctgctacttcaagaccgccctgttcgagaccgtgtgcttcgccagcatcctgagcatcaccaccgtgagcgtggagagatacgtggccatcctgcaccccttcagagccaagctgcagagcaccagaagaagagccctgagaatcctgggcatcgtgtggggcttcagcgtgctgttcagcctgcccaacaccagcatccacggcatcaagttccactacttccccaacggcagcctggtgcccggcagcgccacctgcaccgtgatcaagcccatgtggatctacaacttcatcatccaggtgaccagcttcctgttctacctgctgcccatgaccgtgatcagcgtgctgtactacctgatggccctgagactgaagaaggacaagagcctggaggccgacgagggcaacgccaacatccagagaccctgcagaaagagcgtgaacaagatgctgttcgtgctggtgctggtgttcgccatctgctgggcccccttccacatcgacagactgttcttcagcttcgtggaggagtggagcgagagcctggccgccgtgttcaacctggtgcacgtggtgagcggcgtgttcttctacctgagcagcgccgtgaaccccatcatctacaacctgctgagcagaagattccaggccgccttccagaacgtgatcagcagcttccacaagcagtggcacagccagcacgacccccagctgccccccgcccagagaaacatcttcctgaccgagtgccacttcgtggagctgaccgaggacatcggcccccagttcccctgccagagcagcatgcacaacagccacctgcccgccgccctgagcagcgagcagatgagcagaaccaactaccagagcttccacttcaacaagacctag

SEQ ID NO: 90872 - DNA, 5625 bp, synthetic construct
  misc_feature 1..5625: note = Description of Artificial Sequence: Synthetic coding sequence
  source 1..5625: mol_type = other DNA
atgctgggcagcagcgtgaagagcgtgcagcccgaggtggagctgagcagcggcggcggcgacgagggcgccgacgagcccagaggcgccggcagaaaggccgccgccgccgacggcagaggcatgctgcccaagagagccaaggcccccggcggcggcggcggcatggccaaggccagcgccgccgagctgaaggtgttcaagagcggcagcgtggacagcagagtgcccggcggcccccccgccagcaacctgagaaagcagaagagcctgaccaacctgagcttcctgaccgacagcgagaagaagctgcagctgtacgagcccgagtggagcgacgacatggccaaggcccccaagggcctgggcaaggtgggcagcaagggcagagaggcccccctgatgagcaagaccctgagcaagagcgagcacagcctgttccaggccaagggcagccccgccggcggcgccaagacccccctggcccccctggcccccaacctgggcaagcccagcagaatccccagaggcccctacgccgaggtgaagcccctgagcaaggcccccgaggccgccgtgagcgaggacggcaagagcgacgacgagctgctgagcagcaaggccaaggcccagaagagcagcggccccgtgcccagcgccaagggccaggaggagagagccttcctgaaggtggaccccgagctggtggtgaccgtgctgggcgacctggagcagctgctgttcagccagatgctggaccccgagagccagagaaagagaaccgtgcagaacgtgctggacctgagacagaacctggaggagaccatgagcagcctgagaggcagccaggtgacccacagcagcctggagatgacctgctacgacagcgacgacgccaaccccagaagcgtgagcagcctgagcaacagaagcagccccctgagctggagatacggccagagcagccccagactgcaggccggcgacgcccccagcgtgggcggcagctgcagaagcgagggcacccccgcctggtacatgcacggcgagagagcccactacagccacaccatgcccatgagaagccccagcaagctgagccacatcagcagactggagctggtggagagcctggacagcgacgaggtggacctgaagagcggctacatgagcgacagcgacctgatgggcaagaccatgaccgaggacgacgacatcaccaccggctgggacgagagcagcagcatcagcagcggcctgagcgacgccagcgacaacctgagcagcgaggagttcaacgccagcagcagcctgaacagcctgcccagcacccccaccgccagcagaagaaacagcaccatcgtgctgagaaccgacagcgagaagagaagcctggccgagagcggcctgagctggttcagcgagagcgaggagaaggcccccaagaagctggagtacgacagcggcagcctgaagatggagcccggcaccagcaagtggagaagagagagacccgagagctgcgacgacagcagcaagggcggcgagctgaagaagcccatcagcctgggccaccccggcagcctgaagaagggcaagaccccccccgtggccgtgaccagccccatcacccacaccgcccagagcgccctgaaggtggccggcaagcccgagggcaaggccaccgacaagggcaagctggccgtgaagaacaccggcctgcagagaagcagcagcgacgccggcagagacagactgagcgacgccaagaagccccccagcggcatcgccagacccagcaccagcggcagcttcggctacaagaagcccccccccgccaccggcaccgccaccgtgatgcagaccggcggcagcgccaccctgagcaagatccagaagagcagcggcatccccgtgaagcccgtgaacggcagaaagaccagcctggacgtgagcaacagcgccgagcccggcttcctggcccccggcgccagaagcaacatccagtacagaagcctgcccagacccgccaagagcagcagcatgagcgtgaccggcggcagaggcggccccagacccgtgagcagcagcatcgaccccagcctgctgagcaccaagcagggcggcctgacccccagcagactgaaggagcccaccaaggtggccagcggcagaaccacccccgcccccgtgaaccagaccgacagagagaaggagaaggccaaggccaaggccgtggccctggacagcgacaacatcagcctgaagagcatcggcagccccgagagcacccccaagaaccaggccagccaccccaccgccaccaagctggccgagctgccccccacccccctgagagccaccgccaagagcttcgtgaagccccccagcctggccaacctggacaaggtgaacagcaacagcctggacctgcccagcagcagcgacaccacccacgccagcaaggtgcccgacctgcacgccaccagcagcgccagcggcggccccctgcccagctgcttcacccccagccccgcccccatcctgaacatcaacagcgccagcttcagccagggcctggagctgatgagcggcttcagcgtgcccaaggagaccagaatgtaccccaagctgagcggcctgcacagaagcatggagagcctgcagatgcccatgagcctgcccagcgccttccccagcagcacccccgtgcccaccccccccgccccccccgccgcccccaccgaggaggagaccgaggagctgacctggagcggcagccccagagccggccagctggacagcaaccagagagacagaaacaccctgcccaagaagggcctgagataccagctgcagagccaggaggagaccaaggagagaagacacagccacaccatcggcggcctgcccgagagcgacgaccagagcgagctgcccagcccccccgccctgcccatgagcctgagcgccaagggccagctgaccaacatcgtgagccccaccgccgccaccacccccagaatcaccagaagcaacagcatccccacccacgaggccgccttcgagctgtacagcggcagccagatgggcagcaccctgagcctggccgagagacccaagggcatgatcagaagcggcagcttcagagaccccaccgacgacgtgcacggcagcgtgctgagcctggccagcagcgccagcagcacctacagcagcgccgaggagagaatgcagagcgagcagatcagaaagctgagaagagagctggagagcagccaggagaaggtggccaccctgaccagccagctgagcgccaacgccaacctggtggccgccttcgagcagagcctggtgaacatgaccagcagactgagacacctggccgagaccgccgaggagaaggacaccgagctgctggacctgagagagaccatcgacttcctgaagaagaagaacagcgaggcccaggccgtgatccagggcgccctgaacgccagcgagaccacccccaaggagctgagaatcaagagacagaacagcagcgacagcatcagcagcctgaacagcatcaccagccacagcagcatcggcagcagcaaggacgccgacgccaagaagaagaagaagaagagctggctgagaagcagcttcaacaaggccttcagcatcaagaagggccccaagagcgccagcagctacagcgacatcgaggagatcgccacccccgacagcagcgcccccagcagccccaagctgcagcacggcagcaccgagaccgccagccccagcatcaagagcagcaccagcagcagcgtgggcaccgacgtgaccgagggccccgcccaccccgccccccacaccagactgttccacgccaacgaggaggaggagcccgagaagaaggaggtgagcgagctgagaagcgagctgtgggagaaggagatgaagctgaccgacatcagactggaggccctgaacagcgcccaccagctggaccagctgagagagaccatgcacaacatgcagctggaggtggacctgctgaaggccgagaacgacagactgaaggtggcccccggccccagcagcggcagcacccccggccaggtgcccggcagcagcgccctgagcagccccagaagaagcctgggcctggccctgacccacagcttcggccccagcctggccgacaccgacctgagccccatggacggcatcagcacctgcggccccaaggaggaggtgaccctgagagtggtggtgagaatgcccccccagcacatcatcaagggcgacctgaagcagcaggagttcttcctgggctgcagcaaggtgagcggcaaggtggactggaagatgctggacgaggccgtgttccaggtgttcaaggactacatcagcaagatggaccccgccagcaccctgggcctgagcaccgagagcatccacggctacagcatcagccacgtgaagagagtgctggacgccgagccccccgagatgcccccctgcagaagaggcgtgaacaacatcagcgtgagcctgaagggcctgaaggagaagtgcgtggacagcctggtgttcgagaccctgatccccaagcccatgatgcagcactacatcagcctgctgctgaagcacagaagactggtgctgagcggccccagcggcaccggcaagacctacctgaccaacagactggccgagtacctggtggagagaagcggcagagaggtgaccgagggcatcgtgagcaccttcaacatgcaccagcagagctgcaaggacctgcagctgtacctgagcaacctggccaaccagatcgacagagagaccggcatcggcgacgtgcccctggtgatcctgctggacgacctgagcgaggccggcagcatcagcgagctggtgaacggcgccctgacctgcaagtaccacaagtgcccctacatcatcggcaccaccaaccagcccgtgaagatgacccccaaccacggcctgcacctgagcttcagaatgctgaccttcagcaacaacgtggagcccgccaacggcttcctggtgagatacctgagaagaaagctggtggagagcgacagcgacatcaacgccaacaaggaggagctgctgagagtgctggactgggtgcccaagctgtggtaccacctgcacaccttcctggagaagcacagcaccagcgacttcctgatcggcccctgcttcttcctgagctgccccatcggcatcgaggacttcagaacctggttcatcgacctgtggaacaacagcatcatcccctacctgcaggagggcgccaaggacggcatcaaggtgcacggccagaaggccgcctgggaggaccccgtggagtgggtgagagacaccctgccctggcccagcgcccagcaggaccagagcaagctgtaccacctgcccccccccaccgtgggcccccacagcatcgccagcccccccgaggacagaaccgtgaaggacagcacccccagcagcctggacagcgaccccctgatggccatgctgctgaagctgcaggaggccgccaactacatcgagagccccgacagagagaccatcctggaccccaacctgcaggccaccctgtag

SEQ ID NO: 90873 - DNA, 5634 bp, synthetic construct
  misc_feature 1..5634: note = Description of Artificial Sequence: Synthetic coding sequence
  source 1..5634: mol_type = other DNA
atgctgggcagcagcgtgaagagcgtgcagcccgaggtggagctgagcagcggcggcggcgacgagggcgccgacgagcccagaggcgccggcagaaaggccgccgccgccgacggcagaggcatgctgcccaagagagccaaggcccccggcggcggcggcggcatggccaaggccagcgccgccgagctgaaggtgttcaagagcggcagcgtggacagcagagtgcccggcggcccccccgccagcaacctgagaaagcagaagagcctgaccaacctgagcttcctgaccgacagcgagaagaagctgcagctgtacgagcccgagtggagcgacgacatggccaaggcccccaagggcctgggcaaggtgggcagcaagggcagagaggcccccctgatgagcaagaccctgagcaagagcgagcacagcctgttccaggccaagggcagccccgccggcggcgccaagacccccctggcccccctggcccccaacctgggcaagcccagcagaatccccagaggcccctacgccgaggtgaagcccctgagcaaggcccccgaggccgccgtgagcgaggacggcaagagcgacgacgagctgctgagcagcaaggccaaggcccagaagagcagcggccccgtgcccagcgccaagggccaggaggagagagccttcctgaaggtggaccccgagctggtggtgaccgtgctgggcgacctggagcagctgctgttcagccagatgctggaccccgagagccagagaaagagaaccgtgcagaacgtgctggacctgagacagaacctggaggagaccatgagcagcctgagaggcagccaggtgacccacagcagcctggagatgacctgctacgacagcgacgacgccaaccccagaagcgtgagcagcctgagcaacagaagcagccccctgagctggagatacggccagagcagccccagactgcaggccggcgacgcccccagcgtgggcggcagctgcagaagcgagggcacccccgcctggtacatgcacggcgagagagcccactacagccacaccatgcccatgagaagccccagcaagctgagccacatcagcagactggagctggtggagagcctggacagcgacgaggtggacctgaagagcggctacatgagcgacagcgacctgatgggcaagaccatgaccgaggacgacgacatcaccaccggctgggacgagagcagcagcatcagcagcggcctgagcgacgccagcgacaacctgagcagcgaggagttcaacgccagcagcagcctgaacagcctgcccagcacccccaccgccagcagaagaaacagcaccatcgtgctgagaaccgacagcgagaagagaagcctggccgagagcggcctgagctggttcagcgagagcgaggagaaggcccccaagaagctggagtacgacagcggcagcctgaagatggagcccggcaccagcaagtggagaagagagagacccgagagctgcgacgacagcagcaagggcggcgagctgaagaagcccatcagcctgggccaccccggcagcctgaagaagggcaagaccccccccgtggccgtgaccagccccatcacccacaccgcccagagcgccctgaaggtggccggcaagcccgagggcaaggccaccgacaagggcaagctggccgtgaagaacaccggcctgcagagaagcagcagcgacgccggcagagacagactgagcgacgccaagaagccccccagcggcatcgccagacccagcaccagcggcagcttcggctacaagaagcccccccccgccaccggcaccgccaccgtgatgcagaccggcggcagcgccaccctgagcaagatccagaagagcagcggcatccccgtgaagcccgtgaacggcagaaagaccagcctggacgtgagcaacagcgccgagcccggcttcctggcccccggcgccagaagcaacatccagtacagaagcctgcccagacccgccaagagcagcagcatgagcgtgaccggcggcagaggcggccccagacccgtgagcagcagcatcgaccccagcctgctgagcaccaagcagggcggcctgacccccagcagactgaaggagcccaccaaggtggccagcggcagaaccacccccgcccccgtgaaccagaccgacagagagaaggagaaggccaaggccaaggccgtggccctggacagcgacaacatcagcctgaagagcatcggcagccccgagagcacccccaagaaccaggccagccaccccaccgccaccaagctggccgagctgccccccacccccctgagagccaccgccaagagcttcgtgaagccccccagcctggccaacctggacaaggtgaacagcaacagcctggacctgcccagcagcagcgacaccacccacgccagcaaggtgcccgacctgcacgccaccagcagcgccagcggcggccccctgcccagctgcttcacccccagccccgcccccatcctgaacatcaacagcgccagcttcagccagggcctggagctgatgagcggcttcagcgtgcccaaggagaccagaatgtaccccaagctgagcggcctgcacagaagcatggagagcctgcagatgcccatgagcctgcccagcgccttccccagcagcacccccgtgcccaccccccccgccccccccgccgcccccaccgaggaggagaccgaggagctgacctggagcggcagccccagagccggccagctggacagcaaccagagagacagaaacaccctgcccaagaagggcctgagataccagctgcagagccaggaggagaccaaggagagaagacacagccacaccatcggcggcctgcccgagagcgacgaccagagcgagctgcccagcccccccgccctgcccatgagcctgagcgccaagggccagctgaccaacatcgtgagccccaccgccgccaccacccccagaatcaccagaagcaacagcatccccacccacgaggccgccttcgagctgtacagcggcagccagatgggcagcaccctgagcctggccgagagacccaagggcatgatcagaagcggcagcttcagagaccccaccgacgacgtgcacggcagcgtgctgagcctggccagcagcgccagcagcacctacagcagcgccgaggagagaatgcagagcgagcagatcagaaagctgagaagagagctggagagcagccaggagaaggtggccaccctgaccagccagctgagcgccaacgccaacctggtggccgccttcgagcagagcctggtgaacatgaccagcagactgagacacctggccgagaccgccgaggagaaggacaccgagctgctggacctgagagagaccatcgacttcctgaagaagaagaacagcgaggcccaggccgtgatccagggcgccctgaacgccagcgagaccacccccaaggagctgagaatcaagagacagaacagcagcgacagcatcagcagcctgaacagcatcaccagccacagcagcatcggcagcagcaaggacgccgacgccaagaagaagaagaagaagagctgggtgtacgagctgagaagcagcttcaacaaggccttcagcatcaagaagggccccaagagcgccagcagctacagcgacatcgaggagatcgccacccccgacagcagcgcccccagcagccccaagctgcagcacggcagcaccgagaccgccagccccagcatcaagagcagcaccagcagcagcgtgggcaccgacgtgaccgagggccccgcccaccccgccccccacaccagactgttccacgccaacgaggaggaggagcccgagaagaaggaggtgagcgagctgagaagcgagctgtgggagaaggagatgaagctgaccgacatcagactggaggccctgaacagcgcccaccagctggaccagctgagagagaccatgcacaacatgcagctggaggtggacctgctgaaggccgagaacgacagactgaaggtggcccccggccccagcagcggcagcacccccggccaggtgcccggcagcagcgccctgagcagccccagaagaagcctgggcctggccctgacccacagcttcggccccagcctggccgacaccgacctgagccccatggacggcatcagcacctgcggccccaaggaggaggtgaccctgagagtggtggtgagaatgcccccccagcacatcatcaagggcgacctgaagcagcaggagttcttcctgggctgcagcaaggtgagcggcaaggtggactggaagatgctggacgaggccgtgttccaggtgttcaaggactacatcagcaagatggaccccgccagcaccctgggcctgagcaccgagagcatccacggctacagcatcagccacgtgaagagagtgctggacgccgagccccccgagatgcccccctgcagaagaggcgtgaacaacatcagcgtgagcctgaagggcctgaaggagaagtgcgtggacagcctggtgttcgagaccctgatccccaagcccatgatgcagcactacatcagcctgctgctgaagcacagaagactggtgctgagcggccccagcggcaccggcaagacctacctgaccaacagactggccgagtacctggtggagagaagcggcagagaggtgaccgagggcatcgtgagcaccttcaacatgcaccagcagagctgcaaggacctgcagctgtacctgagcaacctggccaaccagatcgacagagagaccggcatcggcgacgtgcccctggtgatcctgctggacgacctgagcgaggccggcagcatcagcgagctggtgaacggcgccctgacctgcaagtaccacaagtgcccctacatcatcggcaccaccaaccagcccgtgaagatgacccccaaccacggcctgcacctgagcttcagaatgctgaccttcagcaacaacgtggagcccgccaacggcttcctggtgagatacctgagaagaaagctggtggagagcgacagcgacatcaacgccaacaaggaggagctgctgagagtgctggactgggtgcccaagctgtggtaccacctgcacaccttcctggagaagcacagcaccagcgacttcctgatcggcccctgcttcttcctgagctgccccatcggcatcgaggacttcagaacctggttcatcgacctgtggaacaacagcatcatcccctacctgcaggagggcgccaaggacggcatcaaggtgcacggccagaaggccgcctgggaggaccccgtggagtgggtgagagacaccctgccctggcccagcgcccagcaggaccagagcaagctgtaccacctgcccccccccaccgtgggcccccacagcatcgccagcccccccgaggacagaaccgtgaaggacagcacccccagcagcctggacagcgaccccctgatggccatgctgctgaagctgcaggaggccgccaactacatcgagagccccgacagagagaccatcctggaccccaacctgcaggccaccctgtag

SEQ ID NO: 90874 - DNA, 5610 bp, synthetic construct
  misc_feature 1..5610: note = Description of Artificial Sequence: Synthetic coding sequence
  source 1..5610: mol_type = other DNA
atgctgggcagcagcgtgaagagcgtgcagcccgaggtggagctgagcagcggcggcggcgacgagggcgccgacgagcccagaggcgccggcagaaaggccgccgccgccgacggcagaggcatgctgcccaagagagccaaggcccccggcggcggcggcggcatggccaaggccagcgccgccgagctgaaggtgttcaagagcggcagcgtggacagcagagtgcccggcggcccccccgccagcaacctgagaaagcagaagagcctgaccaacctgagcttcctgaccgacagcgagaagaagctgcagctgtacgagcccgagtggagcgacgacatggccaaggcccccaagggcctgggcaaggtgggcagcaagggcagagaggcccccctgatgagcaagaccctgagcaagagcgagcacagcctgttccaggccaagggcagccccgccggcggcgccaagacccccctggcccccctggcccccaacctgggcaagcccagcagaatccccagaggcccctacgccgaggtgaagcccctgagcaaggcccccgaggccgccgtgagcgaggacggcaagagcgacgacgagctgctgagcagcaaggccaaggcccagaagagcagcggccccgtgcccagcgccaagggccaggaggagagagccttcctgaaggtggaccccgagctggtggtgaccgtgctgggcgacctggagcagctgctgttcagccagatgctggaccccgagagccagagaaagagaaccgtgcagaacgtgctggacctgagacagaacctggaggagaccatgagcagcctgagaggcagccaggtgacccacagcagcctggagatgacctgctacgacagcgacgacgccaaccccagaagcgtgagcagcctgagcaacagaagcagccccctgagctggagatacggccagagcagccccagactgcaggccggcgacgcccccagcgtgggcggcagctgcagaagcgagggcacccccgcctggtacatgcacggcgagagagcccactacagccacaccatgcccatgagaagccccagcaagctgagccacatcagcagactggagctggtggagagcctggacagcgacgaggtggacctgaagagcggctacatgagcgacagcgacctgatgggcaagaccatgaccgaggacgacgacatcaccaccggctgggacgagagcagcagcatcagcagcggcctgagcgacgccagcgacaacctgagcagcgaggagttcaacgccagcagcagcctgaacagcctgcccagcacccccaccgccagcagaagaaacagcaccatcgtgctgagaaccgacagcgagaagagaagcctggccgagagcggcctgagctggttcagcgagagcgaggagaaggcccccaagaagctggagtacgacagcggcagcctgaagatggagcccggcaccagcaagtggagaagagagagacccgagagctgcgacgacagcagcaagggcggcgagctgaagaagcccatcagcctgggccaccccggcagcctgaagaagggcaagaccccccccgtggccgtgaccagccccatcacccacaccgcccagagcgccctgaaggtggccggcaagcccgagggcaaggccaccgacaagggcaagctggccgtgaagaacaccggcctgcagagaagcagcagcgacgccggcagagacagactgagcgacgccaagaagccccccagcggcatcgccagacccagcaccagcggcagcttcggctacaagaagcccccccccgccaccggcaccgccaccgtgatgcagaccggcggcagcgccaccctgagcaagatccagaagagcagcggcatccccgtgaagcccgtgaacggcagaaagaccagcctggacgtgagcaacagcgccgagcccggcttcctggcccccggcgccagaagcaacatccagtacagaagcctgcccagacccgccaagagcagcagcatgagcgtgaccggcggcagaggcggccccagacccgtgagcagcagcatcgaccccagcctgctgagcaccaagcagggcggcctgacccccagcagactgaaggagcccaccaaggtggccagcggcagaaccacccccgcccccgtgaaccagaccgacagagagaaggagaaggccaaggccaaggccgtggccctggacagcgacaacatcagcctgaagagcatcggcagccccgagagcacccccaagaaccaggccagccaccccaccgccaccaagctggccgagctgccccccacccccctgagagccaccgccaagagcttcgtgaagccccccagcctggccaacctggacaaggtgaacagcaacagcctggacctgcccagcagcagcgacaccacccacgccagcaaggtgcccgacctgcacgccaccagcagcgccagcggcggccccctgcccagctgcttcacccccagccccgcccccatcctgaacatcaacagcgccagcttcagccagggcctggagctgatgagcggcttcagcgtgcccaaggagaccagaatgtaccccaagctgagcggcctgcacagaagcatggagagcctgcagatgcccatgagcctgcccagcgccttccccagcagcacccccgtgcccaccccccccgccccccccgccgcccccaccgaggaggagaccgaggagctgacctggagcggcagccccagagccggccagctggacagcaaccagagagacagaaacaccctgcccaagaagggcctgagataccagctgcagagccaggaggagaccaaggagagaagacacagccacaccatcggcggcctgcccgagagcgacgaccagagcgagctgcccagcccccccgccctgcccatgagcctgagcgccaagggccagctgaccaacatcgtgagccccaccgccgccaccacccccagaatcaccagaagcaacagcatccccacccacgaggccgccttcgagctgtacagcggcagccagatgggcagcaccctgagcctggccgagagacccaagggcatgatcagaagcggcagcttcagagaccccaccgacgacgtgcacggcagcgtgctgagcctggccagcagcgccagcagcacctacagcagccagatcagaaagctgagaagagagctggagagcagccaggagaaggtggccaccctgaccagccagctgagcgccaacgccaacctggtggccgccttcgagcagagcctggtgaacatgaccagcagactgagacacctggccgagaccgccgaggagaaggacaccgagctgctggacctgagagagaccatcgacttcctgaagaagaagaacagcgaggcccaggccgtgatccagggcgccctgaacgccagcgagaccacccccaaggagctgagaatcaagagacagaacagcagcgacagcatcagcagcctgaacagcatcaccagccacagcagcatcggcagcagcaaggacgccgacgccaagaagaagaagaagaagagctgggtgtacgagctgagaagcagcttcaacaaggccttcagcatcaagaagggccccaagagcgccagcagctacagcgacatcgaggagatcgccacccccgacagcagcgcccccagcagccccaagctgcagcacggcagcaccgagaccgccagccccagcatcaagagcagcaccagcagcagcgtgggcaccgacgtgaccgagggccccgcccaccccgccccccacaccagactgttccacgccaacgaggaggaggagcccgagaagaaggaggtgagcgagctgagaagcgagctgtgggagaaggagatgaagctgaccgacatcagactggaggccctgaacagcgcccaccagctggaccagctgagagagaccatgcacaacatgcagctggaggtggacctgctgaaggccgagaacgacagactgaaggtggcccccggccccagcagcggcagcacccccggccaggtgcccggcagcagcgccctgagcagccccagaagaagcctgggcctggccctgacccacagcttcggccccagcctggccgacaccgacctgagccccatggacggcatcagcacctgcggccccaaggaggaggtgaccctgagagtggtggtgagaatgcccccccagcacatcatcaagggcgacctgaagcagcaggagttcttcctgggctgcagcaaggtgagcggcaaggtggactggaagatgctggacgaggccgtgttccaggtgttcaaggactacatcagcaagatggaccccgccagcaccctgggcctgagcaccgagagcatccacggctacagcatcagccacgtgaagagagtgctggacgccgagccccccgagatgcccccctgcagaagaggcgtgaacaacatcagcgtgagcctgaagggcctgaaggagaagtgcgtggacagcctggtgttcgagaccctgatccccaagcccatgatgcagcactacatcagcctgctgctgaagcacagaagactggtgctgagcggccccagcggcaccggcaagacctacctgaccaacagactggccgagtacctggtggagagaagcggcagagaggtgaccgagggcatcgtgagcaccttcaacatgcaccagcagagctgcaaggacctgcagctgtacctgagcaacctggccaaccagatcgacagagagaccggcatcggcgacgtgcccctggtgatcctgctggacgacctgagcgaggccggcagcatcagcgagctggtgaacggcgccctgacctgcaagtaccacaagtgcccctacatcatcggcaccaccaaccagcccgtgaagatgacccccaaccacggcctgcacctgagcttcagaatgctgaccttcagcaacaacgtggagcccgccaacggcttcctggtgagatacctgagaagaaagctggtggagagcgacagcgacatcaacgccaacaaggaggagctgctgagagtgctggactgggtgcccaagctgtggtaccacctgcacaccttcctggagaagcacagcaccagcgacttcctgatcggcccctgcttcttcctgagctgccccatcggcatcgaggacttcagaacctggttcatcgacctgtggaacaacagcatcatcccctacctgcaggagggcgccaaggacggcatcaaggtgcacggccagaaggccgcctgggaggaccccgtggagtgggtgagagacaccctgccctggcccagcgcccagcaggaccagagcaagctgtaccacctgcccccccccaccgtgggcccccacagcatcgccagcccccccgaggacagaaccgtgaaggacagcacccccagcagcctggacagcgaccccctgatggccatgctgctgaagctgcaggaggccgccaactacatcgagagccccgacagagagaccatcctggaccccaacctgcaggccaccctgtag

SEQ ID NO: 90875 - DNA, 5454 bp, synthetic construct
  misc_feature 1..5454: note = Description of Artificial Sequence: Synthetic coding sequence
  source 1..5454: mol_type = other DNA
atgctgggcagcagcgtgaagagcgtgcagcccgaggtggagctgagcagcggcggcggcgacgagggcgccgacgagcccagaggcgccggcagaaaggccgccgccgccgacggcagaggcatgctgcccaagagagccaaggcccccggcggcggcggcggcatggccaaggccagcgccgccgagctgaaggtgttcaagagcggcagcgtggacagcagagtgcccggcggcccccccgccagcaacctgagaaagcagaagagcctgaccaacctgagcttcctgaccgacagcgagaagaagctgcagctgtacgagcccgagtggagcgacgacatggccaaggcccccaagggcctgggcaaggtgggcagcaagggcagagaggcccccctgatgagcaagaccctgagcaagagcgagcacagcctgttccaggccaagggcagccccgccggcggcgccaagacccccctggcccccctggcccccaacctgggcaagcccagcagaatccccagaggcccctacgccgaggtgaagcccctgagcaaggcccccgaggccgccgtgagcgaggacggcaagagcgacgacgagctgctgagcagcaaggccaaggcccagaagagcagcggccccgtgcccagcgccaagggccaggaggagagagccttcctgaaggtggaccccgagctggtggtgaccgtgctgggcgacctggagcagctgctgttcagccagatgctggaccccgagagccagagaaagagaaccgtgcagaacgtgctggacctgagacagaacctggaggagaccatgagcagcctgagaggcagccaggtgacccacagcagcctggagatgacctgctacgacagcgacgacgccaaccccagaagcgtgagcagcctgagcaacagaagcagccccctgagctggagatacggccagagcagccccagactgcaggccggcgacgcccccagcgtgggcggcagctgcagaagcgagggcacccccgcctggtacatgcacggcgagagagcccactacagccacaccatgcccatgagaagccccagcaagctgagccacatcagcagactggagctggtggagagcctggacagcgacgaggtggacctgaagagcggctacatgagcgacagcgacctgatgggcaagaccatgaccgaggacgacgacatcaccaccggctgggacgagagcagcagcatcagcagcggcctgagcgacgccagcgacaacctgagcagcgaggagttcaacgccagcagcagcctgaacagcctgcccagcacccccaccgccagcagaagaaacagcaccatcgtgctgagaaccgacagcgagaagagaagcctggccgagagcggcctgagctggttcagcgagagcgaggagaaggcccccaagaagctggagtacgacagcggcagcctgaagatggagcccggcaccagcaagtggagaagagagagacccgagagctgcgacgacagcagcaagggcggcgagctgaagaagcccatcagcctgggccaccccggcagcctgaagaagggcaagaccccccccgtggccgtgaccagccccatcacccacaccgcccagagcgccctgaaggtggccggcaagcccgagggcaaggccaccgacaagggcaagctggccgtgaagaacaccggcctgcagagaagcagcagcgacgccggcagagacagactgagcgacgccaagaagccccccagcggcatcgccagacccagcaccagcggcagcttcggctacaagaagcccccccccgccaccggcaccgccaccgtgatgcagaccggcggcagcgccaccctgagcaagatccagaagagcagcggcatccccgtgaagcccgtgaacggcagaaagaccagcctggacgtgagcaacagcgccgagcccggcttcctggcccccggcgccagaagcaacatccagtacagaagcctgcccagacccgccaagagcagcagcatgagcgtgaccggcggcagaggcggccccagacccgtgagcagcagcatcgaccccagcctgctgagcaccaagcagggcggcctgacccccagcagactgaaggagcccaccaaggtggccagcggcagaaccacccccgcccccgtgaaccagaccgacagagagaaggagaaggccaaggccaaggccgtggccctggacagcgacaacatcagcctgaagagcatcggcagccccgagagcacccccaagaaccaggccagccaccccaccgccaccaagctggccgagctgccccccacccccctgagagccaccgccaagagcttcgtgaagccccccagcctggccaacctggacaaggtgaacagcaacagcctggacctgcccagcagcagcgacaccacccacgccagcaaggtgcccgacctgcacgccaccagcagcgccagcggcggccccctgcccagctgcttcacccccagccccgcccccatcctgaacatcaacagcgccagcttcagccagggcctggagctgatgagcggcttcagcgtgcccaaggagaccagaatgtaccccaagctgagcggcctgcacagaagcatggagagcctgcagatgcccatgagcctgcccagcgccttccccagcagcacccccgtgcccaccccccccgccccccccgccgcccccaccgaggaggagaccgaggagctgacctggagcggcagccccagagccggccagctggacagcaaccagagagacagaaacaccctgcccaagaagggcctgagataccagctgcagagccaggaggagaccaaggagagaagacacagccacaccatcggcggcctgcccgagagcgacgaccagagcgagctgcccagcccccccgccctgcccatgagcctgagcgccaagggccagctgaccaacatcgtgcacggcagcgtgctgagcctggccagcagcgccagcagcacctacagcagcgccgaggagagaatgcagagcgagcagatcagaaagctgagaagagagctggagagcagccaggagaaggtggccaccctgaccagccagctgagcgccaacgccaacctggtggccgccttcgagcagagcctggtgaacatgaccagcagactgagacacctggccgagaccgccgaggagaaggacaccgagctgctggacctgagagagaccatcgacttcctgaagaagaagaacagcgaggcccaggccgtgatccagggcgccctgaacgccagcgagaccacccccaaggagctgagaatcaagagacagaacagcagcgacagcatcagcagcctgaacagcatcaccagccacagcagcatcggcagcagcaaggacgccgacgccaagaagaagaagaagaagagctggctgagaagcagcttcaacaaggccttcagcatcaagaagggccccaagagcgccagcagctacagcgacatcgaggagatcgccacccccgacagcagcgcccccagcagccccaagctgcagcacggcagcaccgagaccgccagccccagcatcaagagcagcaccagcagcagcgtgggcaccgacgtgaccgagggccccgcccaccccgccccccacaccagactgttccacgccaacgaggaggaggagcccgagaagaaggaggtgagcgagctgagaagcgagctgtgggagaaggagatgaagctgaccgacatcagactggaggccctgaacagcgcccaccagctggaccagctgagagagaccatgcacaacatgcagctggaggtggacctgctgaaggccgagaacgacagactgaaggtggcccccggccccagcagcggcagcacccccggccaggtgcccggcagcagcgccctgagcagccccagaagaagcctgggcctggccctgacccacagcttcggccccagcctggccgacaccgacctgagccccatggacggcatcagcacctgcggccccaaggaggaggtgaccctgagagtggtggtgagaatgcccccccagcacatcatcaagggcgacctgaagcagcaggagttcttcctgggctgcagcaaggtgagcggcaaggtggactggaagatgctggacgaggccgtgttccaggtgttcaaggactacatcagcaagatggaccccgccagcaccctgggcctgagcaccgagagcatccacggctacagcatcagccacgtgaagagagtgctggacgccgagccccccgagatgcccccctgcagaagaggcgtgaacaacatcagcgtgagcctgaagggcctgaaggagaagtgcgtggacagcctggtgttcgagaccctgatccccaagcccatgatgcagcactacatcagcctgctgctgaagcacagaagactggtgctgagcggccccagcggcaccggcaagacctacctgaccaacagactggccgagtacctggtggagagaagcggcagagaggtgaccgagggcatcgtgagcaccttcaacatgcaccagcagagctgcaaggacctgcagctgtacctgagcaacctggccaaccagatcgacagagagaccggcatcggcgacgtgcccctggtgatcctgctggacgacctgagcgaggccggcagcatcagcgagctggtgaacggcgccctgacctgcaagtaccacaagtgcccctacatcatcggcaccaccaaccagcccgtgaagatgacccccaaccacggcctgcacctgagcttcagaatgctgaccttcagcaacaacgtggagcccgccaacggcttcctggtgagatacctgagaagaaagctggtggagagcgacagcgacatcaacgccaacaaggaggagctgctgagagtgctggactgggtgcccaagctgtggtaccacctgcacaccttcctggagaagcacagcaccagcgacttcctgatcggcccctgcttcttcctgagctgccccatcggcatcgaggacttcagaacctggttcatcgacctgtggaacaacagcatcatcccctacctgcaggagggcgccaaggacggcatcaaggtgcacggccagaaggccgcctgggaggaccccgtggagtgggtgagagacaccctgccctggcccagcgcccagcaggaccagagcaagctgtaccacctgcccccccccaccgtgggcccccacagcatcgccagcccccccgaggacagaaccgtgaaggacagcacccccagcagcctggacagcgaccccctgatggccatgctgctgaagctgcaggaggccgccaactacatcgagagccccgacagagagaccatcctggaccccaacctgcaggccaccctgtag

SEQ ID NO: 90876 - DNA, 783 bp, synthetic construct
  misc_feature 1..783: note = Description of Artificial Sequence: Synthetic coding sequence
  source 1..783: mol_type = other DNA
atgcaccagcagagctgcaaggacctgcagctgtacctgagcaacctggccaaccagatcgacagagagaccggcatcggcgacgtgcccctggtgatcctgctggacgacctgagcgaggccggcagcatcagcgagctggtgaacggcgccctgacctgcaagtaccacaagtgcccctacatcatcggcaccaccaaccagcccgtgaagatgacccccaaccacggcctgcacctgagcttcagcagaatgctgaccttcagcaacaacgtggagcccgccaacggcttcctggtgagatacctgagaagaaagctggtggagagcgacagcgacatcaacgccaacaaggaggagctgctgagagtgctggactgggtgcccaagctgtggtaccacctgcacaccttcctggagaagcacagcaccagcgacttcctgatcggcagcccctgcttcttcctgagctgccccatcggcatcgaggacttcagaacctggttcatcgacctgtggaacaacagcatcatcccctacctgcaggagggcgccaaggacggcatcaaggtgcacggccagaaggccgcctgggaggaccccgtggagtgggtgagagacaccctgccctggcccagcgcccagcaggacgacagcacccccagcagcctggacagcgaccccctgatggccatgctgctgaagctgcaggaggccgccaactacatcgagagccccgacagagagaccatcctggaccccaacctgcaggccaccctgtag

SEQ ID NO: 90877 - DNA, 2193 bp, synthetic construct
  misc_feature 1..2193: note = Description of Artificial Sequence: Synthetic coding sequence
  source 1..2193: mol_type = other DNA
atggagcccggcaccagcaagtggagaagagagagacccgagagctgcgacgacagcagcaagggcggcgagctgaagaagcccatcagcctgggccaccccggcagcctgaagaagggcaagaccccccccgtggccgtgaccagccccatcacccacaccgcccagagcgccctgaaggtggccggcaagcccgagggcaaggccaccgacaagggcaagctggccgtgaagaacaccggcctgcagagaagcagcagcgacgccggcagagacagactgagcgacgccaagaagccccccagcggcatcgccagacccagcaccagcggcagcttcggctacaagaagcccccccccgccaccggcaccgccaccgtgatgcagaccggcggcagcgccaccctgagcaagatccagaagagcagcggcatccccgtgaagcccgtgaacggcagaaagaccagcctggacgtgagcaacagcgccgagcccggcttcctggcccccggcgccagaagcaacatccagtacagaagcctgcccagacccgccaagagcagcagcatgagcgtgaccggcggcagaggcggccccagacccgtgagcagcagcatcgaccccagcctgctgagcaccaagcagggcggcctgacccccagcagactgaaggagcccaccaaggtggccagcggcagaaccacccccgcccccgtgaaccagaccgacagagagaaggagaaggccaaggccaaggccgtggccctggacagcgacaacatcagcctgaagagcatcggcagccccgagagcacccccaagaaccaggccagccaccccaccgccaccaagctggccgagctgccccccacccccctgagagccaccgccaagagcttcgtgaagccccccagcctggccaacctggacaaggtgaacagcaacagcctggacctgcccagcagcagcgacaccacccacgccagcaaggtgcccgacctgcacgccaccagcagcgccagcggcggccccctgcccagctgcttcacccccagccccgcccccatcctgaacatcaacagcgccagcttcagccagggcctggagctgatgagcggcttcagcgtgcccaaggagaccagaatgtaccccaagctgagcggcctgcacagaagcatggagagcctgcagatgcccatgagcctgcccagcgccttccccagcagcacccccgtgcccaccccccccgccccccccgccgcccccaccgaggaggagaccgaggagctgacctggagcggcagccccagagccggccagctggacagcaaccagagagacagaaacaccctgcccaagaagggcctgagataccagctgcagagccaggaggagaccaaggagagaagacacagccacaccatcggcggcctgcccgagagcgacgaccagagcgagctgcccagcccccccgccctgcccatgagcctgagcgccaagggccagctgaccaacatcgtgagccccaccgccgccaccacccccagaatcaccagaagcaacagcatccccacccacgaggccgccttcgagctgtacagcggcagccagatgggcagcaccctgagcctggccgagagacccaagggcatgatcagaagcggcagcttcagagaccccaccgacgacgtgcacggcagcgtgctgagcctggccagcagcgccagcagcacctacagcagccagatcagaaagctgagaagagagctggagagcagccaggagaaggtggccaccctgaccagccagctgagcgccaacgccaacctggtggccgccttcgagcagagcctggtgaacatgaccagcagactgagacacctggccgagaccgccgaggagaagatggagttcagaagctgccaccccggctggagcgccctggccagaagctggctgaccgccaacagcgccagccaggacaccgagctgctggacctgagagagaccatcgacttcctgaagaagaagaacagcgaggcccaggccgtgatccagggcgccctgaacgccagcgagaccacccccaaggagctgagaatcaagagacagaacagcagcgacagcatcagcagcctgaacagcatcaccagccacagcagcatcggcagcagcaaggacgccgacgcctag

SEQ ID NO: 90878 - DNA, 4452 bp, synthetic construct
  misc_feature 1..4452: note = Description of Artificial Sequence: Synthetic coding sequence
  source 1..4452: mol_type = other DNA
atgctgcacctgcccctgcccagaagcggcagaaccgtgaacttccccagaagctgggacgagagcagcagcatcagcagcggcctgagcgacgccagcgacaacctgagcagcgaggagttcaacgccagcagcagcctgaacagcctgcccagcacccccaccgccagcagaagaaacagcaccatcgtgctgagaaccgacagcgagaagagaagcctggccgagagcggcctgagctggttcagcgagagcgaggagaaggcccccaagaagctggagtacgacagcggcagcctgaagatggagcccggcaccagcaagtggagaagagagagacccgagagctgcgacgacagcagcaagggcggcgagctgaagaagcccatcagcctgggccaccccggcagcctgaagaagggcaagaccccccccgtggccgtgaccagccccatcacccacaccgcccagagcgccctgaaggtggccggcaagcccgagggcaaggccaccgacaagggcaagctggccgtgaagaacaccggcctgcagagaagcagcagcgacgccggcagagacagactgagcgacgccaagaagccccccagcggcatcgccagacccagcaccagcggcagcttcggctacaagaagcccccccccgccaccggcaccgccaccgtgatgcagaccggcggcagcgccaccctgagcaagatccagaagagcagcggcatccccgtgaagcccgtgaacggcagaaagaccagcctggacgtgagcaacagcgccgagcccggcttcctggcccccggcgccagaagcaacatccagtacagaagcctgcccagacccgccaagagcagcagcatgagcgtgaccggcggcagaggcggccccagacccgtgagcagcagcatcgaccccagcctgctgagcaccaagcagggcggcctgacccccagcagactgaaggagcccaccaaggtggccagcggcagaaccacccccgcccccgtgaaccagaccgacagagagaaggagaaggccaaggccaaggccgtggccctggacagcgacaacatcagcctgaagagcatcggcagccccgagagcacccccaagaaccaggccagccaccccaccgccaccaagctggccgagctgccccccacccccctgagagccaccgccaagagcttcgtgaagccccccagcctggccaacctggacaaggtgaacagcaacagcctggacctgcccagcagcagcgacaccacccacgccagcaaggtgcccgacctgcacgccaccagcagcgccagcggcggccccctgcccagctgcttcacccccagccccgcccccatcctgaacatcaacagcgccagcttcagccagggcctggagctgatgagcggcttcagcgtgcccaaggagaccagaatgtaccccaagctgagcggcctgcacagaagcatggagagcctgcagatgcccatgagcctgcccagcgccttccccagcagcacccccgtgcccaccccccccgccccccccgccgcccccaccgaggaggagaccgaggagctgacctggagcggcagccccagagccggccagctggacagcaaccagagagacagaaacaccctgcccaagaagggcctgagataccagctgcagagccaggaggagaccaaggagagaagacacagccacaccatcggcggcctgcccgagagcgacgaccagagcgagctgcccagcccccccgccctgcccatgagcctgagcgccaagggccagctgaccaacatcgtgagccccaccgccgccaccacccccagaatcaccagaagcaacagcatccccacccacgaggccgccttcgagctgtacagcggcagccagatgggcagcaccctgagcctggccgagagacccaagggcatgatcagaagcggcagcttcagagaccccaccgacgacgtgcacggcagcgtgctgagcctggccagcagcgccagcagcacctacagcagcgccgaggagagaatgcagagcgagcagatcagaaagctgagaagagagctggagagcagccaggagaaggtggccaccctgaccagccagctgagcgccaacgccaacctggtggccgccttcgagcagagcctggtgaacatgaccagcagactgagacacctggccgagaccgccgaggagaaggacaccgagctgctggacctgagagagaccatcgacttcctgaagaagaagaacagcgaggcccaggccgtgatccagggcgccctgaacgccagcgagaccacccccaaggagctgagaatcaagagacagaacagcagcgacagcatcagcagcctgaacagcatcaccagccacagcagcatcggcagcagcaaggacgccgacgccaagaagaagaagaagaagagctggctgagaagcagcttcaacaaggccttcagcatcaagaagggccccaagagcgccagcagctacagcgacatcgaggagatcgccacccccgacagcagcgcccccagcagccccaagctgcagcacggcagcaccgagaccgccagccccagcatcaagagcagcaccagcagcagcgtgggcaccgacgtgaccgagggccccgcccaccccgccccccacaccagactgttccacgccaacgaggaggaggagcccgagaagaaggaggtgagcgagctgagaagcgagctgtgggagaaggagatgaagctgaccgacatcagactggaggccctgaacagcgcccaccagctggaccagctgagagagaccatgcacaacatgcagctggaggtggacctgctgaaggccgagaacgacagactgaaggtggcccccggccccagcagcggcagcacccccggccaggtgcccggcagcagcgccctgagcagccccagaagaagcctgggcctggccctgacccacagcttcggccccagcctggccgacaccgacctgagccccatggacggcatcagcacctgcggccccaaggaggaggtgaccctgagagtggtggtgagaatgcccccccagcacatcatcaagggcgacctgaagcagcaggagttcttcctgggctgcagcaaggtgagcggcaaggtggactggaagatgctggacgaggccgtgttccaggtgttcaaggactacatcagcaagatggaccccgccagcaccctgggcctgagcaccgagagcatccacggctacagcatcagccacgtgaagagagtgctggacgccgagccccccgagatgcccccctgcagaagaggcgtgaacaacatcagcgtgagcctgaagggcctgaaggagaagtgcgtggacagcctggtgttcgagaccctgatccccaagcccatgatgcagcactacatcagcctgctgctgaagcacagaagactggtgctgagcggccccagcggcaccggcaagacctacctgaccaacagactggccgagtacctggtggagagaagcggcagagaggtgaccgagggcatcgtgagcaccttcaacatgcaccagcagagctgcaaggacctgcagctgtacctgagcaacctggccaaccagatcgacagagagaccggcatcggcgacgtgcccctggtgatcctgctggacgacctgagcgaggccggcagcatcagcgagctggtgaacggcgccctgacctgcaagtaccacaagtgcccctacatcatcggcaccaccaaccagcccgtgaagatgacccccaaccacggcctgcacctgagcttcagaatgctgaccttcagcaacaacgtggagcccgccaacggcttcctggtgagatacctgagaagaaagctggtggagagcgacagcgacatcaacgccaacaaggaggagctgctgagagtgctggactgggtgcccaagctgtggtaccacctgcacaccttcctggagaagcacagcaccagcgacttcctgatcggcccctgcttcttcctgagctgccccatcggcatcgaggacttcagaacctggttcatcgacctgtggaacaacagcatcatcccctacctgcaggagggcgccaaggacggcatcaaggtgcacggccagaaggccgcctgggaggaccccgtggagtgggtgagagacaccctgccctggcccagcgcccagcaggaccagagcaagctgtaccacctgcccccccccaccgtgggcccccacagcatcgccagcccccccgaggacagaaccgtgaaggacagcacccccagcagcctggacagcgaccccctgatggccatgctgctgaagctgcaggaggccgccaactacatcgagagccccgacagagagaccatcctggaccccaacctgcaggccaccctgtag

SEQ ID NO: 90879 - DNA, 4482 bp, synthetic construct
  misc_feature 1..4482: note = Description of Artificial Sequence: Synthetic coding sequence
  source 1..4482: mol_type = other DNA
atgctgtggcccagaaacctgaccagctgggacgacagcagcagcgtgagcagcggcatcagcgacaccatcgacaacctgagcaccgacgacatcaacaccagcagcagcatcagcagctacgccaacacccccgccagcagcagaaagaacctggacgtgcagaccgacgccgagaagcacagccaggtggagagaaacagcctgtggagcggcgacgacgtgaagaagagcgacggcggcagcgacagcggcatcaagatggagcccggcagcaagtggagaagaaaccccagcgacgtgagcgacgagagcgacaagagcaccagcggcaagaagaaccccgtgatcagccagaccggcagctggagaagaggcatgaccgcccaggtgggcatcaccatgcccagaaccaagcccagcgcccccgccggcgccctgaagacccccggcaccggcaagaccgacgacgccaaggtgagcgagaagggcagactgagccccaaggccagccaggtgaagagaagccccagcgacgccggcagaagcagcggcgacgagagcaagaagcccctgcccagcagcagcagaacccccaccgccaacgccaacagcttcggcttcaagaagcagagcggcagcgccgccggcctggccatgatcaccgccagcggcgtgaccgtgaccagcagaagcgccaccctgggcaagatccccaagagcagcgccctggtgagcagaagcgccggcagaaagagcagcatggacggcgcccagaaccaggacgacggctacctggccctgagcagcagaaccaacctgcagtacagaagcctgcccagacccagcaagagcaacagcagaaacggcgccggcaacagaagcagcaccagcagcatcgacagcaacatcagcagcaagagcgccggcctgcccgtgcccaagctgagagagcccagcaagaccgccctgggcagcagcctgcccggcctggtgaaccagaccgacaaggagaagggcatcagcagcgacaacgagagcgtggccagctgcaacagcgtgaaggtgaaccccgccgcccagcccgtgagcagccccgcccagaccagcctgcagcccggcgccaagtaccccgacgtggccagccccaccctgagaagactgttcggcggcaagcccaccaagcaggtgcccatcgccaccgccgagaacatgaagaacagcgtggtgatcagcaacccccacgccaccatgacccagcagggcaacctggacagccccagcggcagcggcgtgctgagcagcggcagcagcagccccctgtacagcaagaacgtggacctgaaccagagccccctggccagcagccccagcagcgcccacagcgcccccagcaacagcctgacctggggcaccaacgccagcagcagcagcgccgtgagcaaggacggcctgggcttccagagcgtgagcagcctgcacaccagctgcgagagcatcgacatcagcctgagcagcggcggcgtgcccagccacaacagcagcaccggcctgatcgccagcagcaaggacgacagcctgacccccttcgtgagaaccaacagcgtgaagaccaccctgagcgagagcgacccccacctggacagaaacaccctgcccaagaagggcctgagatacacccccaccagccagctgagaacccaggaggacgccaaggagtggctgagaagccacagcgccggcggcctgcaggacaccgccgccaacagccccttcagcagcggcagcagcgtgaccagccccagcggcaccagattcaacttcagccagctggccagccccaccaccgtgacccagatgagcctgagcaaccccaccatgctgagaacccacagcctgagcaacgccgacggccagtacgacccctacaccgacagcagattcagaaacagcagcatgagcctggacgagaagagcagaaccatgagcagaagcggcagcttcagagacggcttcgaggaggtgcacggcagcagcctgagcctggtgagcagcaccagcagcgtgtacagcacccccgaggagaagtgccagagcgagatcagaaagctgagaagagagctggacgccagccaggagaaggtgagcgccctgaccacccagctgaccgccaacgcccacctggtggccgccttcgagcagagcctgggcaacatgaccatcagactgcagagcctgaccatgaccgccgagcagaaggacagcgagctgaacgagctgagaaagaccatcgagctgctgaagaagcagaacgccgccgcccaggccgccatcaacggcgtgatcaacacccccgagctgaactgcaagggcaacggcaccgcccagagcgccgacctgagaatcagaagacagcacagcagcgacagcgtgagcagcatcaacagcgccaccagccacagcagcgtgggcagcaacatcgagagcgacagcaagaagaagaagagaaagaactggctgagaagcagcttcaagcaggccttcggcaagaagaagagccccaagagcgccagcagccacagcgacatcgaggagatgaccgacagcagcctgcccagcagccccaagctgccccacaacggcagcaccggcagcacccccctgctgagaaacagccacagcaacagcctgatcagcgagtgcatggacagcgaggccgagaccgtgatgcagctgagaaacgagctgagagacaaggagatgaagctgaccgacatcagactggaggccctgagcagcgcccaccagctggaccagctgagagaggccatgaacagaatgcagagcgagatcgagaagctgaaggccgagaacgacagactgaagagcgagagccagggcagcggctgcagcagagcccccagccaggtgagcatcagcgccagccccagacagagcatgggcctgagccagcacagcctgaacctgaccgagagcaccagcctggacatgctgctggacgacaccggcgagtgcagcgccagaaaggagggcggcagacacgtgaagatcgtggtgagcttccaggaggagatgaagtggaaggaggacagcagaccccacctgttcctgatcggctgcatcggcgtgagcggcaagaccaagtgggacgtgctggacggcgtggtgagaagactgttcaaggagtacatcatccacgtggaccccgtgagccagctgggcctgaacagcgacagcgtgctgggctacagcatcggcgagatcaagagaagcaacaccagcgagacccccgagctgctgccctgcggctacctggtgggcgagaacaccaccatcagcgtgaccgtgaagggcctggccgagaacagcctggacagcctggtgttcgagagcctgatccccaagcccatcctgcagagatacgtgagcctgctgatcgagcacagaagaatcatcctgagcggccccagcggcaccggcaagacctacctggccaacagactgagcgagtacatcgtgctgagagagggcagagagctgaccgacggcgtgatcgccaccttcaacgtggaccacaagagcagcaaggagctgagacagtacctgagcaacctggccgaccagtgcaacagcgagaacaacgccgtggacatgcccctggtgatcatcctggacaacctgcaccacgtgagcagcctgggcgagatcttcaacggcctgctgaactgcaagtaccacaagtgcccctacatcatcggcaccatgaaccaggccaccagcagcacccccaacctgcagctgcaccacaacttcagatgggtgctgtgcgccaaccacaccgagcccgtgaagggcttcctgggcagattcctgagaagaaagctgatggagaccgagatcagcggcagagtgagaaacatggagctggtgaagatcatcgactggatccccaaggtgtggcaccacctgaacagattcctggaggcccacagcagcagcgacgtgaccatcggccccagactgttcctgagctgccccatcgacgtggacggcagcagagtgtggttcaccgacctgtggaactacagcatcatcccctacctgctggaggccgtgagagagggcctgcagctgtacggcagaagagccccctgggaggaccccgccaagtgggtgatggacacctacccctgggccgccagcccccagcagcacgagtggccccccctgctgcagctgagacccgaggacgtgggcttcgacggctacagcatgcccagagagggcagcaccagcaagcagatgccccccagcgacgccgagggcgaccccctgatgaacatgctgatgagactgcaggaggccgccaactacagcagcccccagagctacgacagcgacagcaacagcaacagccaccacgacgacatcctggacagcagcctggagagcaccctgtag

SEQ ID NO: 90880 - DNA, 7290 bp, synthetic construct
  misc_feature 1..7290: note = Description of Artificial Sequence: Synthetic coding sequence
  source 1..7290: mol_type = other DNA
atgcccgccatcctggtggccagcaagatgaagagcggcctgcccaagcccgtgcacagcgccgcccccatcctgcacgtgccccccgccagagccggcccccagccctgctacctgaagctgggcagcaaggtggaggtgagcaagaccacctaccccagccagatccccctgaagagccaggtgctgcagggcctgcaggagcccgccggcgagggcctgcccctgagaaagagcggcagcgtggagaacggcttcgacacccagatctacaccgactgggccaaccactacctggccaagagcggccacaagagactgatcagagacctgcagcaggacgtgaccgacggcgtgctgctggcccagatcatccaggtggtggccaacgagaagatcgaggacatcaacggctgccccaagaacagaagccagatgatcgagaacatcgacgcctgcctgaacttcctggccgccaagggcatcaacatccagggcctgagcgccgaggagatcagaaacggcaacctgaaggccatcctgggcctgttcttcagcctgagcagatacaagcagcagcagcagcagccccagaagcagcacctgagcagccccctgccccccgccgtgagccaggtggccggcgcccccagccagtgccaggccggcaccccccagcagcaggtgcccgtgaccccccaggccccctgccagccccaccagcccgccccccaccagcagagcaaggcccaggccgagatgcagagcagactgcccggccccaccgccagagtgagcgccgccggcagcgaggccaagaccagaggcggcagcaccaccgccaacaacagaagaagccagagcttcaacaactacgacaagagcaagcccgtgaccagccccccccccccccccagcagccacgagaaggagcccctggccagcagcgccagcagccaccccggcatgagcgacaacgcccccgccagcctggagagcggcagcagcagcacccccaccaactgcagcaccagcagcgccatcccccagcccggcgccgccaccaagccctggagaagcaagagcctgagcgtgaagcacagcgccaccgtgagcatgctgagcgtgaagccccccggccccgaggcccccagacccacccccgaggccatgaagcccgcccccaacaaccagaagagcatgctggagaagctgaagctgttcaacagcaagggcggcagcaaggccggcgagggccccggcagcagagacaccagctgcgagagactggagaccctgcccagcttcgaggagagcgaggagctggaggccgccagcagaatgctgaccaccgtgggccccgccagcagcagccccaagatcgccctgaagggcatcgcccagagaaccttcagcagagccctgaccaacaagaagagcagcctgaagggcaacgagaaggagaaggagaagcagcagagagagaaggacaaggagaagagcaaggacctggccaagagagccagcgtgaccgagagactggacctgaaggaggagcccaaggaggaccccagcggcgccgccgtgcccgagatgcccaagaagagcagcaagatcgccagcttcatccccaagggcggcaagctgaacagcgccaagaaggagcccatggcccccagccacagcggcatccccaagcccggcatgaagagcatgcccggcaagagccccagcgcccccgcccccagcaaggagggcgagagaagcagaagcggcaagctgagcagcggcctgccccagcagaagccccagctggacggcagacacagcagcagcagcagcagcctggccagcagcgagggcaagggccccggcggcaccaccctgaaccacagcatcagcagccagaccgtgagcggcagcgtgggcaccacccagaccaccggcagcaacaccgtgagcgtgcagctgccccagccccagcagcagtacaaccaccccaacaccgccaccgtggcccccttcctgtacagaagccagaccgacaccgagggcaacgtgaccgccgagagcagcagcaccggcgtgagcgtggagcccagccacttcaccaagaccggccagcccgccctggaggagctgaccggcgaggaccccgaggccagaagactgagaaccgtgaagaacatcgccgacctgagacagaacctggaggagaccatgagcagcctgagaggcacccaggtgacccacagcaccctggagaccaccttcgacaccaacgtgaccaccgagatgagcggcagaagcatcctgagcctgaccggcagacccacccccctgagctggagactgggccagagcagccccagactgcaggccggcgacgcccccagcatgggcaacggctacccccccagagccaacgccagcagattcatcaacaccgagagcggcagatacgtgtacagcgcccccctgagaagacagctggccagcagaggcagcagcgtgtgccacgtggacgtgagcgacaaggccggcgacgagatggacctggagggcatcagcatggacgcccccggctacatgagcgacggcgacgtgctgagcaagaacatcagaaccgacgacatcaccagcggctacatgaccgacggcggcctgggcctgtacaccagaagactgaacagactgcccgacggcatggccgtggtgagagagaccctgcagagaaacaccagcctgggcctgggcgacgccgacagctgggacgacagcagcagcgtgagcagcggcatcagcgacaccatcgacaacctgagcaccgacgacatcaacaccagcagcagcatcagcagctacgccaacacccccgccagcagcagaaagaacctggacgtgcagaccgacgccgagaagcacagccaggtggagagaaacagcctgtggagcggcgacgacgtgaagaagagcgacggcggcagcgacagcggcatcaagatggagcccggcagcaagtggagaagaaaccccagcgacgtgagcgacgagagcgacaagagcaccagcggcaagaagaaccccgtgatcagccagaccggcagctggagaagaggcatgaccgcccaggtgggcatcaccatgcccagaaccaagcccagcgcccccgccggcgccctgaagacccccggcaccggcaagaccgacgacgccaaggtgagcgagaagggcagactgagccccaaggccagccaggtgaagagaagccccagcgacgccggcagaagcagcggcgacgagagcaagaagcccctgcccagcagcagcagaacccccaccgccaacgccaacagcttcggcttcaagaagcagagcggcagcgccgccggcctggccatgatcaccgccagcggcgtgaccgtgaccagcagaagcgccaccctgggcaagatccccaagagcagcgccctggtgagcagaagcgccggcagaaagagcagcatggacggcgcccagaaccaggacgacggctacctggccctgagcagcagaaccaacctgcagtacagaagcctgcccagacccagcaagagcaacagcagaaacggcgccggcaacagaagcagcaccagcagcatcgacagcaacatcagcagcaagagcgccggcctgcccgtgcccaagctgagagagcccagcaagaccgccctgggcagcagcctgcccggcctggtgaaccagaccgacaaggagaagggcatcagcagcgacaacgagagcgtggccagctgcaacagcgtgaaggtgaaccccgccgcccagcccgtgagcagccccgcccagaccagcctgcagcccggcgccaagtaccccgacgtggccagccccaccctgagaagactgttcggcggcaagcccaccaagcaggtgcccatcgccaccgccgagaacatgaagaacagcgtggtgatcagcaacccccacgccaccatgacccagcagggcaacctggacagccccagcggcagcggcgtgctgagcagcggcagcagcagccccctgtacagcaagaacgtggacctgaaccagagccccctggccagcagccccagcagcgcccacagcgcccccagcaacagcctgacctggggcaccaacgccagcagcagcagcgccgtgagcaaggacggcctgggcttccagagcgtgagcagcctgcacaccagctgcgagagcatcgacatcagcctgagcagcggcggcgtgcccagccacaacagcagcaccggcctgatcgccagcagcaaggacgacagcctgacccccttcgtgagaaccaacagcgtgaagaccaccctgagcgagagccccctgagcagccccgccgccagccccaagttctgcagaagcaccctgcccagaaagcaggacagcgacccccacctggacagaaacaccctgcccaagaagggcctgagatacacccccaccagccagctgagaacccaggaggacgccaaggagtggctgagaagccacagcgccggcggcctgcaggacaccgccgccaacagccccttcagcagcggcagcagcgtgaccagccccagcggcaccagattcaacttcagccagctggccagccccaccaccgtgacccagatgagcctgagcaaccccaccatgctgagaacccacagcctgagcaacgccgacggccagtacgacccctacaccgacagcagattcagaaacagcagcatgagcctggacgagaagagcagaaccatgagcagaagcggcagcttcagagacggcttcgaggaggtgcacggcagcagcctgagcctggtgagcagcaccagcagcgtgtacagcacccccgaggagaagtgccagagcgagatcagaaagctgagaagagagctggacgccagccaggagaaggtgagcgccctgaccacccagctgaccgccaacgcccacctggtggccgccttcgagcagagcctgggcaacatgaccatcagactgcagagcctgaccatgaccgccgagcagaaggacagcgagctgaacgagctgagaaagaccatcgagctgctgaagaagcagaacgccgccgcccaggccgccatcaacggcgtgatcaacacccccgagctgaactgcaagggcaacggcaccgcccagagcgccgacctgagaatcagaagacagcacagcagcgacagcgtgagcagcatcaacagcgccaccagccacagcagcgtgggcagcaacatcgagagcgacagcaagaagaagaagagaaagaactggctgagaagcagcttcaagcaggccttcggcaagaagaagagccccaagagcgccagcagccacagcgacatcgaggagatgaccgacagcagcctgcccagcagccccaagctgccccacaacggcagcaccggcagcacccccctgctgagaaacagccacagcaacagcctgatcagcgagtgcatggacagcgaggccgagaccgtgatgcagctgagaaacgagctgagagacaaggagatgaagctgaccgacatcagactggaggccctgagcagcgcccaccagctggaccagctgagagaggccatgaacagaatgcagagcgagatcgagaagctgaaggccgagaacgacagactgaagagcgagagccagggcagcggctgcagcagagcccccagccaggtgagcatcagcgccagccccagacagagcatgggcctgagccagcacagcctgaacctgaccgagagcaccagcctggacatgctgctggacgacaccggcgagtgcagcgccagaaaggagggcggcagacacgtgaagatcgtggtgagcttccaggaggagatgaagtggaaggaggacagcagaccccacctgttcctgatcggctgcatcggcgtgagcggcaagaccaagtgggacgtgctggacggcgtggtgagaagactgttcaaggagtacatcatccacgtggaccccgtgagccagctgggcctgaacagcgacagcgtgctgggctacagcatcggcgagatcaagagaagcaacaccagcgagacccccgagctgctgccctgcggctacctggtgggcgagaacaccaccatcagcgtgaccgtgaagggcctggccgagaacagcctggacagcctggtgttcgagagcctgatccccaagcccatcctgcagagatacgtgagcctgctgatcgagcacagaagaatcatcctgagcggccccagcggcaccggcaagacctacctggccaacagactgagcgagtacatcgtgctgagagagggcagagagctgaccgacggcgtgatcgccaccttcaacgtggaccacaagagcagcaaggagctgagacagtacctgagcaacctggccgaccagtgcaacagcgagaacaacgccgtggacatgcccctggtgatcatcctggacaacctgcaccacgtgagcagcctgggcgagatcttcaacggcctgctgaactgcaagtaccacaagtgcccctacatcatcggcaccatgaaccaggccaccagcagcacccccaacctgcagctgcaccacaacttcagatgggtgctgtgcgccaaccacaccgagcccgtgaagggcttcctgggcagattcctgagaagaaagctgatggagaccgagatcagcggcagagtgagaaacatggagctggtgaagatcatcgactggatccccaaggtgtggcaccacctgaacagattcctggaggcccacagcagcagcgacgtgaccatcggccccagactgttcctgagctgccccatcgacgtggacggcagcagagtgtggttcaccgacctgtggaactacagcatcatcccctacctgctggaggccgtgagagagggcctgcagctgtacggcagaagagccccctgggaggaccccgccaagtgggtgatggacacctacccctgggccgccagcccccagcagcacgagtggccccccctgctgcagctgagacccgaggacgtgggcttcgacggctacagcatgcccagagagggcagcaccagcaagcagatgccccccagcgacgccgagggcgaccccctgatgaacatgctgatgagactgcaggaggccgccaactacagcagcccccagagctacgacagcgacagcaacagcaacagccaccacgacgacatcctggacagcagcctggagagcaccctgtag

SEQ ID NO: 90881 - DNA, 7299 bp, synthetic construct
  misc_feature 1..7299: note = Description of Artificial Sequence: Synthetic coding sequence
  source 1..7299: mol_type = other DNA
atgcccgccatcctggtggccagcaagatgaagagcggcctgcccaagcccgtgcacagcgccgcccccatcctgcacgtgccccccgccagagccggcccccagccctgctacctgaagctgggcagcaaggtggaggtgagcaagaccacctaccccagccagatccccctgaagagccaggtgctgcagggcctgcaggagcccgccggcgagggcctgcccctgagaaagagcggcagcgtggagaacggcttcgacacccagatctacaccgactgggccaaccactacctggccaagagcggccacaagagactgatcagagacctgcagcaggacgtgaccgacggcgtgctgctggcccagatcatccaggtggtggccaacgagaagatcgaggacatcaacggctgccccaagaacagaagccagatgatcgagaacatcgacgcctgcctgaacttcctggccgccaagggcatcaacatccagggcctgagcgccgaggagatcagaaacggcaacctgaaggccatcctgggcctgttcttcagcctgagcagatacaagcagcagcagcagcagccccagaagcagcacctgagcagccccctgccccccgccgtgagccaggtggccggcgcccccagccagtgccaggccggcaccccccagcagcaggtgcccgtgaccccccaggccccctgccagccccaccagcccgccccccaccagcagagcaaggcccaggccgagatgcagagcagactgcccggccccaccgccagagtgagcgccgccggcagcgaggccaagaccagaggcggcagcaccaccgccaacaacagaagaagccagagcttcaacaactacgacaagagcaagcccgtgaccagccccccccccccccccagcagccacgagaaggagcccctggccagcagcgccagcagccaccccggcatgagcgacaacgcccccgccagcctggagagcggcagcagcagcacccccaccaactgcagcaccagcagcgccatcccccagcccggcgccgccaccaagccctggagaagcaagagcctgagcgtgaagcacagcgccaccgtgagcatgctgagcgtgaagccccccggccccgaggcccccagacccacccccgaggccatgaagcccgcccccaacaaccagaagagcatgctggagaagctgaagctgttcaacagcaagggcggcagcaaggccggcgagggccccggcagcagagacaccagctgcgagagactggagaccctgcccagcttcgaggagagcgaggagctggaggccgccagcagaatgctgaccaccgtgggccccgccagcagcagccccaagatcgccctgaagggcatcgcccagagaaccttcagcagagccctgaccaacaagaagagcagcctgaagggcaacgagaaggagaaggagaagcagcagagagagaaggacaaggagaagagcaaggacctggccaagagagccagcgtgaccgagagactggacctgaaggaggagcccaaggaggaccccagcggcgccgccgtgcccgagatgcccaagaagagcagcaagatcgccagcttcatccccaagggcggcaagctgaacagcgccaagaaggagcccatggcccccagccacagcggcatccccaagcccggcatgaagagcatgcccggcaagagccccagcgcccccgcccccagcaaggagggcgagagaagcagaagcggcaagctgagcagcggcctgccccagcagaagccccagctggacggcagacacagcagcagcagcagcagcctggccagcagcgagggcaagggccccggcggcaccaccctgaaccacagcatcagcagccagaccgtgagcggcagcgtgggcaccacccagaccaccggcagcaacaccgtgagcgtgcagctgccccagccccagcagcagtacaaccaccccaacaccgccaccgtggcccccttcctgtacagaagccagaccgacaccgagggcaacgtgaccgccgagagcagcagcaccggcgtgagcgtggagcccagccacttcaccaagaccggccagcccgccctggaggagctgaccggcgaggaccccgaggccagaagactgagaaccgtgaagaacatcgccgacctgagacagaacctggaggagaccatgagcagcctgagaggcacccaggtgacccacagcaccctggagaccaccttcgacaccaacgtgaccaccgagatgagcggcagaagcatcctgagcctgaccggcagacccacccccctgagctggagactgggccagagcagccccagactgcaggccggcgacgcccccagcatgggcaacggctacccccccagagccaacgccagcagattcatcaacaccgagagcggcagatacgtgtacagcgcccccctgagaagacagctggccagcagaggcagcagcgtgtgccacgtggacgtgagcgacaaggccggcgacgagatggacctggagggcatcagcatggacgcccccggctacatgagcgacggcgacgtgctgagcaagaacatcagaaccgacgacatcaccagcggctacatgaccgacggcggcctgggcctgtacaccagaagactgaacagactgcccgacggcatggccgtggtgagagagaccctgcagagaaacaccagcctgggcctgggcgacgccgacagctgggacgacagcagcagcgtgagcagcggcatcagcgacaccatcgacaacctgagcaccgacgacatcaacaccagcagcagcatcagcagctacgccaacacccccgccagcagcagaaagaacctggacgtgcagaccgacgccgagaagcacagccaggtggagagaaacagcctgtggagcggcgacgacgtgaagaagagcgacggcggcagcgacagcggcatcaagatggagcccggcagcaagtggagaagaaaccccagcgacgtgagcgacgagagcgacaagagcaccagcggcaagaagaaccccgtgatcagccagaccggcagctggagaagaggcatgaccgcccaggtgggcatcaccatgcccagaaccaagcccagcgcccccgccggcgccctgaagacccccggcaccggcaagaccgacgacgccaaggtgagcgagaagggcagactgagccccaaggccagccaggtgaagagaagccccagcgacgccggcagaagcagcggcgacgagagcaagaagcccctgcccagcagcagcagaacccccaccgccaacgccaacagcttcggcttcaagaagcagagcggcagcgccgccggcctggccatgatcaccgccagcggcgtgaccgtgaccagcagaagcgccaccctgggcaagatccccaagagcagcgccctggtgagcagaagcgccggcagaaagagcagcatggacggcgcccagaaccaggacgacggctacctggccctgagcagcagaaccaacctgcagtacagaagcctgcccagacccagcaagagcaacagcagaaacggcgccggcaacagaagcagcaccagcagcatcgacagcaacatcagcagcaagagcgccggcctgcccgtgcccaagctgagagagcccagcaagaccgccctgggcagcagcctgcccggcctggtgaaccagaccgacaaggagaagggcatcagcagcgacaacgagagcgtggccagctgcaacagcgtgaaggtgaaccccgccgcccagcccgtgagcagccccgcccagaccagcctgcagcccggcgccaagtaccccgacgtggccagccccaccctgagaagactgttcggcggcaagcccaccaagcaggtgcccatcgccaccgccgagaacatgaagaacagcgtggtgatcagcaacccccacgccaccatgacccagcagggcaacctggacagccccagcggcagcggcgtgctgagcagcggcagcagcagccccctgtacagcaagaacgtggacctgaaccagagccccctggccagcagccccagcagcgcccacagcgcccccagcaacagcctgacctggggcaccaacgccagcagcagcagcgccgtgagcaaggacggcctgggcttccagagcgtgagcagcctgcacaccagctgcgagagcatcgacatcagcctgagcagcggcggcgtgcccagccacaacagcagcaccggcctgatcgccagcagcaaggacgacagcctgacccccttcgtgagaaccaacagcgtgaagaccaccctgagcgagagccccctgagcagccccgccgccagccccaagttctgcagaagcaccctgcccagaaagcaggacagcgacccccacctggacagaaacaccctgcccaagaagggcctgagatacacccccaccagccagctgagaacccaggaggacgccaaggagtggctgagaagccacagcgccggcggcctgcaggacaccgccgccaacagccccttcagcagcggcagcagcgtgaccagccccagcggcaccagattcaacttcagccagctggccagccccaccaccgtgacccagatgagcctgagcaaccccaccatgctgagaacccacagcctgagcaacgccgacggccagtacgacccctacaccgacagcagattcagaaacagcagcatgagcctggacgagaagagcagaaccatgagcagaagcggcagcttcagagacggcttcgaggaggtgcacggcagcagcctgagcctggtgagcagcaccagcagcgtgtacagcacccccgaggagaagtgccagagcgagatcagaaagctgagaagagagctggacgccagccaggagaaggtgagcgccctgaccacccagctgaccgccaacgcccacctggtggccgccttcgagcagagcctgggcaacatgaccatcagactgcagagcctgaccatgaccgccgagcagaaggacagcgagctgaacgagctgagaaagaccatcgagctgctgaagaagcagaacgccgccgcccaggccgccatcaacggcgtgatcaacacccccgagctgaactgcaagggcaacggcaccgcccagagcgccgacctgagaatcagaagacagcacagcagcgacagcgtgagcagcatcaacagcgccaccagccacagcagcgtgggcagcaacatcgagagcgacagcaagaagaagaagagaaagaactgggtgaacgagctgagaagcagcttcaagcaggccttcggcaagaagaagagccccaagagcgccagcagccacagcgacatcgaggagatgaccgacagcagcctgcccagcagccccaagctgccccacaacggcagcaccggcagcacccccctgctgagaaacagccacagcaacagcctgatcagcgagtgcatggacagcgaggccgagaccgtgatgcagctgagaaacgagctgagagacaaggagatgaagctgaccgacatcagactggaggccctgagcagcgcccaccagctggaccagctgagagaggccatgaacagaatgcagagcgagatcgagaagctgaaggccgagaacgacagactgaagagcgagagccagggcagcggctgcagcagagcccccagccaggtgagcatcagcgccagccccagacagagcatgggcctgagccagcacagcctgaacctgaccgagagcaccagcctggacatgctgctggacgacaccggcgagtgcagcgccagaaaggagggcggcagacacgtgaagatcgtggtgagcttccaggaggagatgaagtggaaggaggacagcagaccccacctgttcctgatcggctgcatcggcgtgagcggcaagaccaagtgggacgtgctggacggcgtggtgagaagactgttcaaggagtacatcatccacgtggaccccgtgagccagctgggcctgaacagcgacagcgtgctgggctacagcatcggcgagatcaagagaagcaacaccagcgagacccccgagctgctgccctgcggctacctggtgggcgagaacaccaccatcagcgtgaccgtgaagggcctggccgagaacagcctggacagcctggtgttcgagagcctgatccccaagcccatcctgcagagatacgtgagcctgctgatcgagcacagaagaatcatcctgagcggccccagcggcaccggcaagacctacctggccaacagactgagcgagtacatcgtgctgagagagggcagagagctgaccgacggcgtgatcgccaccttcaacgtggaccacaagagcagcaaggagctgagacagtacctgagcaacctggccgaccagtgcaacagcgagaacaacgccgtggacatgcccctggtgatcatcctggacaacctgcaccacgtgagcagcctgggcgagatcttcaacggcctgctgaactgcaagtaccacaagtgcccctacatcatcggcaccatgaaccaggccaccagcagcacccccaacctgcagctgcaccacaacttcagatgggtgctgtgcgccaaccacaccgagcccgtgaagggcttcctgggcagattcctgagaagaaagctgatggagaccgagatcagcggcagagtgagaaacatggagctggtgaagatcatcgactggatccccaaggtgtggcaccacctgaacagattcctggaggcccacagcagcagcgacgtgaccatcggccccagactgttcctgagctgccccatcgacgtggacggcagcagagtgtggttcaccgacctgtggaactacagcatcatcccctacctgctggaggccgtgagagagggcctgcagctgtacggcagaagagccccctgggaggaccccgccaagtgggtgatggacacctacccctgggccgccagcccccagcagcacgagtggccccccctgctgcagctgagacccgaggacgtgggcttcgacggctacagcatgcccagagagggcagcaccagcaagcagatgccccccagcgacgccgagggcgaccccctgatgaacatgctgatgagactgcaggaggccgccaactacagcagcccccagagctacgacagcgacagcaacagcaacagccaccacgacgacatcctggacagcagcctggagagcaccctgtag

SEQ ID NO: 90882 - DNA, 7467 bp, synthetic construct
  misc_feature 1..7467: note = Description of Artificial Sequence: Synthetic coding sequence
  source 1..7467: mol_type = other DNA
atgcccgccatcctggtggccagcaagatgaagagcggcctgcccaagcccgtgcacagcgccgcccccatcctgcacgtgccccccgccagagccggcccccagccctgctacctgaagctgggcagcaaggtggaggtgagcaagaccacctaccccagccagatccccctgaagagccaggtgctgcagggcctgcaggagcccgccggcgagggcctgcccctgagaaagagcggcagcgtggagaacggcttcgacacccagatctacaccgactgggccaaccactacctggccaagagcggccacaagagactgatcagagacctgcagcaggacgtgaccgacggcgtgctgctggcccagatcatccaggtggtggccaacgagaagatcgaggacatcaacggctgccccaagaacagaagccagatgatcgagaacatcgacgcctgcctgaacttcctggccgccaagggcatcaacatccagggcctgagcgccgaggagatcagaaacggcaacctgaaggccatcctgggcctgttcttcagcctgagcagatacaagcagcagcagcagcagccccagaagcagcacctgagcagccccctgccccccgccgtgagccaggtggccggcgcccccagccagtgccaggccggcaccccccagcagcaggtgcccgtgaccccccaggccccctgccagccccaccagcccgccccccaccagcagagcaaggcccaggccgagatgcagagcagcgccagcagcaaggacagcagccagagcaagatcatcagattcaccctgggccagaagaagatcagcagactgcccggccccaccgccagagtgagcgccgccggcagcgaggccaagaccagaggcggcagcaccaccgccaacaacagaagaagccagagcttcaacaactacgacaagagcaagcccgtgaccagccccccccccccccccagcagccacgagaaggagcccctggccagcagcgccagcagccaccccggcatgagcgacaacgcccccgccagcctggagagcggcagcagcagcacccccaccaactgcagcaccagcagcgccatcccccagcccggcgccgccaccaagccctggagaagcaagagcctgagcgtgaagcacagcgccaccgtgagcatgctgagcgtgaagccccccggccccgaggcccccagacccacccccgaggccatgaagcccgcccccaacaaccagaagagcatgctggagaagctgaagctgttcaacagcaagggcggcagcaaggccggcgagggccccggcagcagagacaccagctgcgagagactggagaccctgcccagcttcgaggagagcgaggagctggaggccgccagcagaatgctgaccaccgtgggccccgccagcagcagccccaagatcgccctgaagggcatcgcccagagaaccttcagcagagccctgaccaacaagaagagcagcctgaagggcaacgagaaggagaaggagaagcagcagagagagaaggacaaggagaagagcaaggacctggccaagagagccagcgtgaccgagagactggacctgaaggaggagcccaaggaggaccccagcggcgccgccgtgcccgagatgcccaagaagagcagcaagatcgccagcttcatccccaagggcggcaagctgaacagcgccaagaaggagcccatggcccccagccacagcggcatccccaagcccggcatgaagagcatgcccggcaagagccccagcgcccccgcccccagcaaggagggcgagagaagcagaagcggcaagctgagcagcggcctgccccagcagaagccccagctggacggcagacacagcagcagcagcagcagcctggccagcagcgagggcaagggccccggcggcaccaccctgaaccacagcatcagcagccagaccgtgagcggcagcgtgggcaccacccagaccaccggcagcaacaccgtgagcgtgcagctgccccagccccagcagcagtacaaccaccccaacaccgccaccgtggcccccttcctgtacagaagccagaccgacaccgagggcaacgtgaccgccgagagcagcagcaccggcgtgagcgtggagcccagccacttcaccaagaccggccagcccgccctggaggagctgaccggcgaggaccccgaggccagaagactgagaaccgtgaagaacatcgccgacctgagacagaacctggaggagaccatgagcagcctgagaggcacccaggtgacccacagcaccctggagaccaccttcgacaccaacgtgaccaccgagatgagcggcagaagcatcctgagcctgaccggcagacccacccccctgagctggagactgggccagagcagccccagactgcaggccggcgacgcccccagcatgggcaacggctacccccccagagccaacgccagcagattcatcaacaccgagagcggcagatacgtgtacagcgcccccctgagaagacagctggccagcagaggcagcagcgtgtgccacgtggacgtgagcgacaaggccggcgacgagatggacctggagggcatcagcatggacgcccccggctacatgagcgacggcgacgtgctgagcaagaacatcagaaccgacgacatcaccagcggctacatgaccgacggcggcctgggcctgtacaccagaagactgaacagactgcccgacggcatggccgtggtgagagagaccctgcagagaaacaccagcctgggcctgggcgacgccgacagctgggacgacagcagcagcgtgagcagcggcatcagcgacaccatcgacaacctgagcaccgacgacatcaacaccagcagcagcatcagcagctacgccaacacccccgccagcagcagaaagaacctggacgtgcagaccgacgccgagaagcacagccaggtggagagaaacagcctgtggagcggcgacgacgtgaagaagagcgacggcggcagcgacagcggcatcaagatggagcccggcagcaagtggagaagaaaccccagcgacgtgagcgacgagagcgacaagagcaccagcggcaagaagaaccccgtgatcagccagaccggcagctggagaagaggcatgaccgcccaggtgggcatcaccatgcccagaaccaagcccagcgcccccgccggcgccctgaagacccccggcaccggcaagaccgacgacgccaaggtgagcgagaagggcagactgagccccaaggccagccaggtgaagagaagccccagcgacgccggcagaagcagcggcgacgagagcaagaagcccctgcccagcagcagcagaacccccaccgccaacgccaacagcttcggcttcaagaagcagagcggcagcgccgccggcctggccatgatcaccgccagcggcgtgaccgtgaccagcagaagcgccaccctgggcaagatccccaagagcagcgccctggtgagcagaagcgccggcagaaagagcagcatggacggcgcccagaaccaggacgacggctacctggccctgagcagcagaaccaacctgcagtacagaagcctgcccagacccagcaagagcaacagcagaaacggcgccggcaacagaagcagcaccagcagcatcgacagcaacatcagcagcaagagcgccggcctgcccgtgcccaagctgagagagcccagcaagaccgccctgggcagcagcctgcccggcctggtgaaccagaccgacaaggagaagggcatcagcagcgacaacgagagcgtggccagctgcaacagcgtgaaggtgaaccccgccgcccagcccgtgagcagccccgcccagaccagcctgcagcccggcgccaagtaccccgacgtggccagccccaccctgagaagactgttcggcggcaagcccaccaagcaggtgcccatcgccaccgccgagaacatgaagaacagcgtggtgatcagcaacccccacgccaccatgacccagcagggcaacctggacagccccagcggcagcggcgtgctgagcagcggcagcagcagccccctgtacagcaagaacgtggacctgaaccagagccccctggccagcagccccagcagcgcccacagcgcccccagcaacagcctgacctggggcaccaacgccagcagcagcagcgccgtgagcaaggacggcctgggcttccagagcgtgagcagcctgcacaccagctgcgagagcatcgacatcagcctgagcagcggcggcgtgcccagccacaacagcagcaccggcctgatcgccagcagcaaggacgacagcctgacccccttcgtgagaaccaacagcgtgaagaccaccctgagcgagagccccctgagcagccccgccgccagccccaagttctgcagaagcaccctgcccagaaagcaggacagcgacccccacctggacagaaacaccctgcccaagaagggcctgagatacacccccaccagccagctgagaacccaggaggacgccaaggagtggctgagaagccacagcgccggcggcctgcaggacaccgccgccaacagccccttcagcagcggcagcagcgtgaccagccccagcggcaccagattcaacttcagccagctggccagccccaccaccgtgacccagatgagcctgagcaaccccaccatgctgagaacccacagcctgagcaacgccgacggccagtacgacccctacaccgacagcagattcagaaacagcagcatgagcctggacgagaagagcagaaccatgagcagaagcggcagcttcagagacggcttcgaggaggagagctgggagaagagcagcgtggacaacttcgtgagcagactgcacagcagcctgcacttcagcctgcccctgttccaccacgccagatacgagctggtgcacggcagcagcctgagcctggtgagcagcaccagcagcgtgtacagcacccccgaggagaagtgccagagcgagatcagaaagctgagaagagagctggacgccagccaggagaaggtgagcgccctgaccacccagctgaccgccaacgcccacctggtggccgccttcgagcagagcctgggcaacatgaccatcagactgcagagcctgaccatgaccgccgagcagaaggacagcgagctgaacgagctgagaaagaccatcgagctgctgaagaagcagaacgccgccgcccaggccgccatcaacggcgtgatcaacacccccgagctgaactgcaagggcaacggcaccgcccagagcgccgacctgagaatcagaagacagcacagcagcgacagcgtgagcagcatcaacagcgccaccagccacagcagcgtgggcagcaacatcgagagcgacagcaagaagaagaagagaaagaactgggtgaacgagctgagaagcagcttcaagcaggccttcggcaagaagaagagccccaagagcgccagcagccacagcgacatcgaggagatgaccgacagcagcctgcccagcagccccaagctgccccacaacggcagcaccggcagcacccccctgctgagaaacagccacagcaacagcctgatcagcgagtgcatggacagcgaggccgagaccgtgatgcagctgagaaacgagctgagagacaaggagatgaagctgaccgacatcagactggaggccctgagcagcgcccaccagctggaccagctgagagaggccatgaacagaatgcagagcgagatcgagaagctgaaggccgagaacgacagactgaagagcgagagccagggcagcggctgcagcagagcccccagccaggtgagcatcagcgccagccccagacagagcatgggcctgagccagcacagcctgaacctgaccgagagcaccagcctggacatgctgctggacgacaccggcgagtgcagcgccagaaaggagggcggcagacacgtgaagatcgtggtgagcttccaggaggagatgaagtggaaggaggacagcagaccccacctgttcctgatcggctgcatcggcgtgagcggcaagaccaagtgggacgtgctggacggcgtggtgagaagactgttcaaggagtacatcatccacgtggaccccgtgagccagctgggcctgaacagcgacagcgtgctgggctacagcatcggcgagatcaagagaagcaacaccagcgagacccccgagctgctgccctgcggctacctggtgggcgagaacaccaccatcagcgtgaccgtgaagggcctggccgagaacagcctggacagcctggtgttcgagagcctgatccccaagcccatcctgcagagatacgtgagcctgctgatcgagcacagaagaatcatcctgagcggccccagcggcaccggcaagacctacctggccaacagactgagcgagtacatcgtgctgagagagggcagagagctgaccgacggcgtgatcgccaccttcaacgtggaccacaagagcagcaaggagctgagacagtacctgagcaacctggccgaccagtgcaacagcgagaacaacgccgtggacatgcccctggtgatcatcctggacaacctgcaccacgtgagcagcctgggcgagatcttcaacggcctgctgaactgcaagtaccacaagtgcccctacatcatcggcaccatgaaccaggccaccagcagcacccccaacctgcagctgcaccacaacttcagatgggtgctgtgcgccaaccacaccgagcccgtgaagggcttcctgggcagattcctgagaagaaagctgatggagaccgagatcagcggcagagtgagaaacatggagctggtgaagatcatcgactggatccccaaggtgtggcaccacctgaacagattcctggaggcccacagcagcagcgacgtgaccatcggccccagactgttcctgagctgccccatcgacgtggacggcagcagagtgtggttcaccgacctgtggaactacagcatcatcccctacctgctggaggccgtgagagagggcctgcagctgtacggcagaagagccccctgggaggaccccgccaagtgggtgatggacacctacccctgggccgccagcccccagcagcacgagtggccccccctgctgcagctgagacccgaggacgtgggcttcgacggctacagcatgcccagagagggcagcaccagcaagcagatgccccccagcgacgccgagggcgaccccctgatgaacatgctgatgagactgcaggaggccgccaactacagcagcccccagagctacgacagcgacagcaacagcaacagccaccacgacgacatcctggacagcagcctggagagcaccctgtag

SEQ ID NO: 90883 - DNA, 7254 bp, synthetic construct
  misc_feature 1..7254: note = Description of Artificial Sequence: Synthetic coding sequence
  source 1..7254: mol_type = other DNA
atgagcgtgatgctgtggagatgggagcagaacaacaccaccatgaagctgcagatctacaccgactgggccaaccactacctggccaagagcggccacaagagactgatcagagacctgcagcaggacgtgaccgacggcgtgctgctggcccagatcatccaggtggtggccaacgagaagatcgaggacatcaacggctgccccaagaacagaagccagatgatcgagaacatcgacgcctgcctgaacttcctggccgccaagggcatcaacatccagggcctgagcgccgaggagatcagaaacggcaacctgaaggccatcctgggcctgttcttcagcctgagcagatacaagcagcagcagcagcagccccagaagcagcacctgagcagccccctgccccccgccgtgagccaggtggccggcgcccccagccagtgccaggccggcaccccccagcagcaggtgcccgtgaccccccaggccccctgccagccccaccagcccgccccccaccagcagagcaaggcccaggccgagatgcagagcagcgccagcagcaaggacagcagccagagcaagatcatcagattcaccctgggccagaagaagatcagcagactgcccggccccaccgccagagtgagcgccgccggcagcgaggccaagaccagaggcggcagcaccaccgccaacaacagaagaagccagagcttcaacaactacgacaagagcaagcccgtgaccagccccccccccccccccagcagccacgagaaggagcccctggccagcagcgccagcagccaccccggcatgagcgacaacgcccccgccagcctggagagcggcagcagcagcacccccaccaactgcagcaccagcagcgccatcccccagcccggcgccgccaccaagccctggagaagcaagagcctgagcgtgaagcacagcgccaccgtgagcatgctgagcgtgaagccccccggccccgaggcccccagacccacccccgaggccatgaagcccgcccccaacaaccagaagagcatgctggagaagctgaagctgttcaacagcaagggcggcagcaaggccggcgagggccccggcagcagagacaccagctgcgagagactggagaccctgcccagcttcgaggagagcgaggagctggaggccgccagcagaatgctgaccaccgtgggccccgccagcagcagccccaagatcgccctgaagggcatcgcccagagaaccttcagcagagccctgaccaacaagaagagcagcctgaagggcaacgagaaggagaaggagaagcagcagagagagaaggacaaggagaagagcaaggacctggccaagagagccagcgtgaccgagagactggacctgaaggaggagcccaaggaggaccccagcggcgccgccgtgcccgagatgcccaagaagagcagcaagatcgccagcttcatccccaagggcggcaagctgaacagcgccaagaaggagcccatggcccccagccacagcggcatccccaagcccggcatgaagagcatgcccggcaagagccccagcgcccccgcccccagcaaggagggcgagagaagcagaagcggcaagctgagcagcggcctgccccagcagaagccccagctggacggcagacacagcagcagcagcagcagcctggccagcagcgagggcaagggccccggcggcaccaccctgaaccacagcatcagcagccagaccgtgagcggcagcgtgggcaccacccagaccaccggcagcaacaccgtgagcgtgcagctgccccagccccagcagcagtacaaccaccccaacaccgccaccgtggcccccttcctgtacagaagccagaccgacaccgagggcaacgtgaccgccgagagcagcagcaccggcgtgagcgtggagcccagccacttcaccaagaccggccagcccgccctggaggagctgaccggcgaggaccccgaggccagaagactgagaaccgtgaagaacatcgccgacctgagacagaacctggaggagaccatgagcagcctgagaggcacccaggtgacccacagcaccctggagaccaccttcgacaccaacgtgaccaccgagatgagcggcagaagcatcctgagcctgaccggcagacccacccccctgagctggagactgggccagagcagccccagactgcaggccggcgacgcccccagcatgggcaacggctacccccccagagccaacgccagcagattcatcaacaccgagagcggcagatacgtgtacagcgcccccctgagaagacagctggccagcagaggcagcagcgtgtgccacgtggacgtgagcgacaaggccggcgacgagatggacctggagggcatcagcatggacgcccccggctacatgagcgacggcgacgtgctgagcaagaacatcagaaccgacgacatcaccagcggctacatgaccgacggcggcctgggcctgtacaccagaagactgaacagactgcccgacggcatggccgtggtgagagagaccctgcagagaaacaccagcctgggcctgggcgacgccgacagctgggacgacagcagcagcgtgagcagcggcatcagcgacaccatcgacaacctgagcaccgacgacatcaacaccagcagcagcatcagcagctacgccaacacccccgccagcagcagaaagaacctggacgtgcagaccgacgccgagaagcacagccaggtggagagaaacagcctgtggagcggcgacgacgtgaagaagagcgacggcggcagcgacagcggcatcaagatggagcccggcagcaagtggagaagaaaccccagcgacgtgagcgacgagagcgacaagagcaccagcggcaagaagaaccccgtgatcagccagaccggcagctggagaagaggcatgaccgcccaggtgggcatcaccatgcccagaaccaagcccagcgcccccgccggcgccctgaagacccccggcaccggcaagaccgacgacgccaaggtgagcgagaagggcagactgagccccaaggccagccaggtgaagagaagccccagcgacgccggcagaagcagcggcgacgagagcaagaagcccctgcccagcagcagcagaacccccaccgccaacgccaacagcttcggcttcaagaagcagagcggcagcgccgccggcctggccatgatcaccgccagcggcgtgaccgtgaccagcagaagcgccaccctgggcaagatccccaagagcagcgccctggtgagcagaagcgccggcagaaagagcagcatggacggcgcccagaaccaggacgacggctacctggccctgagcagcagaaccaacctgcagtacagaagcctgcccagacccagcaagagcaacagcagaaacggcgccggcaacagaagcagcaccagcagcatcgacagcaacatcagcagcaagagcgccggcctgcccgtgcccaagctgagagagcccagcaagaccgccctgggcagcagcctgcccggcctggtgaaccagaccgacaaggagaagggcatcagcagcgacaacgagagcgtggccagctgcaacagcgtgaaggtgaaccccgccgcccagcccgtgagcagccccgcccagaccagcctgcagcccggcgccaagtaccccgacgtggccagccccaccctgagaagactgttcggcggcaagcccaccaagcaggtgcccatcgccaccgccgagaacatgaagaacagcgtggtgatcagcaacccccacgccaccatgacccagcagggcaacctggacagccccagcggcagcggcgtgctgagcagcggcagcagcagccccctgtacagcaagaacgtggacctgaaccagagccccctggccagcagccccagcagcgcccacagcgcccccagcaacagcctgacctggggcaccaacgccagcagcagcagcgccgtgagcaaggacggcctgggcttccagagcgtgagcagcctgcacaccagctgcgagagcatcgacatcagcctgagcagcggcggcgtgcccagccacaacagcagcaccggcctgatcgccagcagcaaggacgacagcctgacccccttcgtgagaaccaacagcgtgaagaccaccctgagcgagagccccctgagcagccccgccgccagccccaagttctgcagaagcaccctgcccagaaagcaggacagcgacccccacctggacagaaacaccctgcccaagaagggcctgagatacacccccaccagccagctgagaacccaggaggacgccaaggagtggctgagaagccacagcgccggcggcctgcaggacaccgccgccaacagccccttcagcagcggcagcagcgtgaccagccccagcggcaccagattcaacttcagccagctggccagccccaccaccgtgacccagatgagcctgagcaaccccaccatgctgagaacccacagcctgagcaacgccgacggccagtacgacccctacaccgacagcagattcagaaacagcagcatgagcctggacgagaagagcagaaccatgagcagaagcggcagcttcagagacggcttcgaggaggagagctgggagaagagcagcgtggacaacttcgtgagcagactgcacagcagcctgcacttcagcctgcccctgttccaccacgccagatacgagctggtgcacggcagcagcctgagcctggtgagcagcaccagcagcgtgtacagcacccccgaggagaagtgccagagcgagatcagaaagctgagaagagagctggacgccagccaggagaaggtgagcgccctgaccacccagctgaccgccaacgcccacctggtggccgccttcgagcagagcctgggcaacatgaccatcagactgcagagcctgaccatgaccgccgagcagaaggacagcgagctgaacgagctgagaaagaccatcgagctgctgaagaagcagaacgccgccgcccaggccgccatcaacggcgtgatcaacacccccgagctgaactgcaagggcaacggcaccgcccagagcgccgacctgagaatcagaagacagcacagcagcgacagcgtgagcagcatcaacagcgccaccagccacagcagcgtgggcagcaacatcgagagcgacagcaagaagaagaagagaaagaactgggtgaacgagctgagaagcagcttcaagcaggccttcggcaagaagaagagccccaagagcgccagcagccacagcgacatcgaggagatgaccgacagcagcctgcccagcagccccaagctgccccacaacggcagcaccggcagcacccccctgctgagaaacagccacagcaacagcctgatcagcgagtgcatggacagcgaggccgagaccgtgatgcagctgagaaacgagctgagagacaaggagatgaagctgaccgacatcagactggaggccctgagcagcgcccaccagctggaccagctgagagaggccatgaacagaatgcagagcgagatcgagaagctgaaggccgagaacgacagactgaagagcgagagccagggcagcggctgcagcagagcccccagccaggtgagcatcagcgccagccccagacagagcatgggcctgagccagcacagcctgaacctgaccgagagcaccagcctggacatgctgctggacgacaccggcgagtgcagcgccagaaaggagggcggcagacacgtgaagatcgtggtgagcttccaggaggagatgaagtggaaggaggacagcagaccccacctgttcctgatcggctgcatcggcgtgagcggcaagaccaagtgggacgtgctggacggcgtggtgagaagactgttcaaggagtacatcatccacgtggaccccgtgagccagctgggcctgaacagcgacagcgtgctgggctacagcatcggcgagatcaagagaagcaacaccagcgagacccccgagctgctgccctgcggctacctggtgggcgagaacaccaccatcagcgtgaccgtgaagggcctggccgagaacagcctggacagcctggtgttcgagagcctgatccccaagcccatcctgcagagatacgtgagcctgctgatcgagcacagaagaatcatcctgagcggccccagcggcaccggcaagacctacctggccaacagactgagcgagtacatcgtgctgagagagggcagagagctgaccgacggcgtgatcgccaccttcaacgtggaccacaagagcagcaaggagctgagacagtacctgagcaacctggccgaccagtgcaacagcgagaacaacgccgtggacatgcccctggtgatcatcctggacaacctgcaccacgtgagcagcctgggcgagatcttcaacggcctgctgaactgcaagtaccacaagtgcccctacatcatcggcaccatgaaccaggccaccagcagcacccccaacctgcagctgcaccacaacttcagatgggtgctgtgcgccaaccacaccgagcccgtgaagggcttcctgggcagattcctgagaagaaagctgatggagaccgagatcagcggcagagtgagaaacatggagctggtgaagatcatcgactggatccccaaggtgtggcaccacctgaacagattcctggaggcccacagcagcagcgacgtgaccatcggccccagactgttcctgagctgccccatcgacgtggacggcagcagagtgtggttcaccgacctgtggaactacagcatcatcccctacctgctggaggccgtgagagagggcctgcagctgtacggcagaagagccccctgggaggaccccgccaagtgggtgatggacacctacccctgggccgccagcccccagcagcacgagtggccccccctgctgcagctgagacccgaggacgtgggcttcgacggctacagcatgcccagagagggcagcaccagcaagcagatgccccccagcgacgccgagggcgaccccctgatgaacatgctgatgagactgcaggaggccgccaactacagcagcccccagagctacgacagcgacagcaacagcaacagccaccacgacgacatcctggacagcagcctggagagcaccctgtag

SEQ ID NO: 90884 - DNA, 4482 bp, synthetic construct; identical to SEQ ID NO: 90879
  misc_feature 1..4482: note = Description of Artificial Sequence: Synthetic coding sequence
  source 1..4482: mol_type = other DNA

SEQ ID NO: 90885 - DNA, 2451 bp, synthetic construct
  misc_feature 1..2451: note = Description of Artificial Sequence: Synthetic coding sequence
  source 1..2451: mol_type = other DNA
atgctgtggcccagaaacctgaccagctgggacgacagcagcagcgtgagcagcggcatcagcgacaccatcgacaacctgagcaccgacgacatcaacaccagcagcagcatcagcagctacgccaacacccccgccagcagcagaaagaacctggacgtgcagaccgacgccgagaagcacagccaggtggagagaaacagcctgtggagcggcgacgacgtgaagaagagcgacggcggcagcgacagcggcatcaagatggagcccggcagcaagtggagaagaaaccccagcgacgtgagcgacgagagcgacaagagcaccagcggcaagaagaaccccgtgatcagccagaccggcagctggagaagaggcatgaccgcccaggtgggcatcaccatgcccagaaccaagcccagcgcccccgccggcgccctgaagacccccggcaccggcaagaccgacgacgccaaggtgagcgagaagggcagactgagccccaaggccagccaggtgaagagaagccccagcgacgccggcagaagcagcggcgacgagagcaagaagcccctgcccagcagcagcagaacccccaccgccaacgccaacagcttcggcttcaagaagcagagcggcagcgccgccggcctggccatgatcaccgccagcggcgtgaccgtgaccagcagaagcgccaccctgggcaagatccccaagagcagcgccctggtgagcagaagcgccggcagaaagagcagcatggacggcgcccagaaccaggacgacggctacctggccctgagcagcagaaccaacctgcagtacagaagcctgcccagacccagcaagagcaacagcagaaacggcgccggcaacagaagcagcaccagcagcatcgacagcaacatcagcagcaagagcgccggcctgcccgtgcccaagctgagagagcccagcaagaccgccctgggcagcagcctgcccggcctggtgaaccagaccgacaaggagaagggcatcagcagcgacaacgagagcgtggccagctgcaacagcgtgaaggtgaaccccgccgcccagcccgtgagcagccccgcccagaccagcctgcagcccggcgccaagtaccccgacgtggccagccccaccctgagaagactgttcggcggcaagcccaccaagcaggtgcccatcgccaccgccgagaacatgaagaacagcgtggtgatcagcaacccccacgccaccatgacccagcagggcaacctggacagccccagcggcagcggcgtgctgagcagcggcagcagcagccccctgtacagcaagaacgtggacctgaaccagagccccctggccagcagccccagcagcgcccacagcgcccccagcaacagcctgacctggggcaccaacgccagcagcagcagcgccgtgagcaaggacggcctgggcttccagagcgtgagcagcctgcacaccagctgcgagagcatcgacatcagcctgagcagcggcggcgtgcccagccacaacagcagcaccggcctgatcgccagcagcaaggacgacagcctgacccccttcgtgagaaccaacagcgtgaagaccaccctgagcgagagatacacccccaccagccagctgagaacccaggaggacgccaaggagtggctgagaagccacagcgccggcggcctgcaggacaccgccgccaacagccccttcagcagcggcagcagcgtgaccagccccagcggcaccagattcaacttcagccagctggccagccccaccaccgtgacccagatgagcctgagcaaccccaccatgctgagaacccacagcctgagcaacgccgacggccagtacgacccctacaccgacagcagattcagaaacagcagcatgagcctggacgagaagagcagaaccatgagcagaagcggcagcttcagagacggcttcgaggaggtgcacggcagcagcctgagcctggtgagcagcaccagcagcgtgtacagcacccccgaggagaagtgccagagcgagatcagaaagctgagaagagagctggacgccagccaggagaaggtgagcgccctgaccacccagctgaccgccaacgcccacctggtggccgccttcgagcagagcctgggcaacatgaccatcagactgcagagcctgaccatgaccgccgagcagaaggacagcgagctgaacgagctgagaaagaccatcgagctgctgaagaagcagaacgccgccgcccaggccgccatcaacggcgtgatcaacacccccgagctgaactgcaagggcaacggcaccgcccagagcgccgacctgagaatcagaagacagcacagcagcgacagcgtgagcagcatcaacagcgccaccagccacagcagcgtgggcagcaacatcgagagcgacagctag

SEQ ID NO: 90886 - DNA, 7260 bp, synthetic construct
  misc_feature 1..7260: note = Description of Artificial Sequence: Synthetic coding sequence
  source 1..7260: mol_type = other DNA
atggccatcgacctgtactgcggcctggcctgcctgtggggcatccacgagcccagacagatctacaccgactgggccaaccactacctggccaagagcggccacaagagactgatcagagacctgcagcaggacgtgaccgacggcgtgctgctggcccagatcatccaggtggtggccaacgagaagatcgaggacatcaacggctgccccaagaacagaagccagatgatcgagaacatcgacgcctgcctgaacttcctggccgccaagggcatcaacatccagggcctgagcgccgaggagatcagaaacggcaacctgaaggccatcctgggcctgttcttcagcctgagcagatacaagcagcagcagcagcagccccagaagcagcacctgagcagccccctgccccccgccgtgagccaggtggccggcgcccccagccagtgccaggccggcaccccccagcagcaggtgcccgtgaccccccaggccccctgccagccccaccagcccgccccccaccagcagagcaaggcccaggccgagatgcagagcagcgccagcagcaaggacagcagccagagcaagatcatcagattcaccctgggccagaagaagatcagcagactgcccggccccaccgccagagtgagcgccgccggcagcgaggccaagaccagaggcggcagcaccaccgccaacaacagaagaagccagagcttcaacaactacgacaagagcaagcccgtgaccagccccccccccccccccagcagccacgagaaggagcccctggccagcagcgccagcagccaccccggcatgagcgacaacgcccccgccagcctggagagcggcagcagcagcacccccaccaactgcagcaccagcagcgccatcccccagcccggcgccgccaccaagccctggagaagcaagagcctgagcgtgaagcacagcgccaccgtgagcatgctgagcgtgaagccccccggccccgaggcccccagacccacccccgaggccatgaagcccgcccccaacaaccagaagagcatgctggagaagctgaagctgttcaacagcaagggcggcagcaaggccggcgagggccccggcagcagagacaccagctgcgagagactggagaccctgcccagcttcgaggagagcgaggagctggaggccgccagcagaatgctgaccaccgtgggccccgccagcagcagccccaagatcgccctgaagggcatcgcccagagaaccttcagcagagccctgaccaacaagaagagcagcctgaagggcaacgagaaggagaaggagaagcagcagagagagaaggacaaggagaagagcaaggacctggccaagagagccagcgtgaccgagagactggacctgaaggaggagcccaaggaggaccccagcggcgccgccgtgcccgagatgcccaagaagagcagcaagatcgccagcttcatccccaagggcggcaagctgaacagcgccaagaaggagcccatggcccccagccacagcggcatccccaagcccggcatgaagagcatgcccggcaagagccccagcgcccccgcccccagcaaggagggcgagagaagcagaagcggcaagctgagcagcggcctgccccagcagaagccccagctggacggcagacacagcagcagcagcagcagcctggccagcagcgagggcaagggccccggcggcaccaccctgaaccacagcatcagcagccagaccgtgagcggcagcgtgggcaccacccagaccaccggcagcaacaccgtgagcgtgcagctgccccagccccagcagcagtacaaccaccccaacaccgccaccgtggcccccttcctgtacagaagccagaccgacaccgagggcaacgtgaccgccgagagcagcagcaccggcgtgagcgtggagcccagccacttcaccaagaccggccagcccgccctggaggagctgaccggcgaggaccccgaggccagaagactgagaaccgtgaagaacatcgccgacctgagacagaacctggaggagaccatgagcagcctgagaggcacccaggtgacccacagcaccctggagaccaccttcgacaccaacgtgaccaccgagatgagcggcagaagcatcctgagcctgaccggcagacccacccccctgagctggagactgggccagagcagccccagactgcaggccggcgacgcccccagcatgggcaacggctacccccccagagccaacgccagcagattcatcaacaccgagagcggcagatacgtgtacagcgcccccctgagaagacagctggccagcagaggcagcagcgtgtgccacgtggacgtgagcgacaaggccggcgacgagatggacctggagggcatcagcatggacgcccccggctacatgagcgacggcgacgtgctgagcaagaacatcagaaccgacgacatcaccagcggctacatgaccgacggcggcctgggcctgtacaccagaagactgaacagactgcccgacggcatggccgtggtgagagagaccctgcagagaaacaccagcctgggcctgggcgacgccgacagctgggacgacagcagcagcgtgagcagcggcatcagcgacaccatcgacaacctgagcaccgacgacatcaacaccagcagcagcatcagcagctacgccaacacccccgccagcagcagaaagaacctggacgtgcagaccgacgccgagaagcacagccaggtggagagaaacagcctgtggagcggcgacgacgtgaagaagagcgacggcggcagcgacagcggcatcaagatggagcccggcagcaagtggagaagaaaccccagcgacgtgagcgacgagagcgacaagagcaccagcggcaagaagaaccccgtgatcagccagaccggcagctggagaagaggcatgaccgcccaggtgggcatcaccatgcccagaaccaagcccagcgcccccgccggcgccctgaagacccccggcaccggcaagaccgacgacgccaaggtgagcgagaagggcagactgagccccaaggccagccaggtgaagagaagccccagcgacgccggcagaagcagcggcgacgagagcaagaagcccctgcccagcagcagcagaacccccaccgccaacgccaacagcttcggcttcaagaagcagagcggcagcgccgccggcctggccatgatcaccgccagcggcgtgaccgtgaccagcagaagcgccaccctgggcaagatccccaagagcagcgccctggtgagcagaagcgccggcagaaagagcagcatggacggcgcccagaaccaggacgacggctacctggccctgagcagcagaaccaacctgcagtacagaagcctgcccagacccagcaagagcaacagcagaaacggcgccggcaacagaagcagcaccagcagcatcgacagcaacatcagcagcaagagcgccggcctgcccgtgcccaagctgagagagcccagcaagaccgccctgggcagcagcctgcccggcctggtgaaccagaccgacaaggagaagggcatcagcagcgacaacgagagcgtggccagctgcaacagcgtgaaggtgaaccccgccgcccagcccgtgagcagccccgcccagaccagcctgcagcccggcgccaagtaccccgacgtggccagccccaccctgagaagactgttcggcggcaagcccaccaagcaggtgcccatcgccaccgccgagaacatgaagaacagcgtggtgatcagcaacccccacgccaccatgacccagcagggcaacctggacagccccagcggcagcggcgtgctgagcagcggcagcagcagccccctgtacagcaagaacgtggacctgaaccagagccccctggccagcagccccagcagcgcccacagcgcccccagcaacagcctgacctggggcaccaacgccagcagcagcagcgccgtgagcaaggacggcctgggcttccagagcgtgagcagcctgcacaccagctgcgagagcatcgacatcagcctgagcagcggcggcgtgcccagccacaacagcagcaccggcctgatcgccagcagcaaggacgacagcctgacccccttcgtgagaaccaacagcgtgaagaccaccctgagcgagagccccctgagcagccccgccgccagccccaagttctgcagaagcaccctgcccagaaagcaggacagcgacccccacctggacagaaacaccctgcccaagaagggcctgagatacacccccaccagccagctgagaacccaggaggacgccaaggagtggctgagaagccacagcgccggcggcctgcaggacaccgccgccaacagccccttcagcagcggcagcagcgtgaccagccccagcggcaccagattcaacttcagccagctggccagccccaccaccgtgacccagatgagcctgagcaaccccaccatgctgagaacccacagcctgagcaacgccgacggccagtacgacccctacaccgacagcagattcagaaacagcagcatgagcctggacgagaagagcagaaccatgagcagaagcggcagcttcagagacggcttcgaggaggagagctgggagaagagcagcgtggacaacttcgtgagcagactgcacagcagcctgcacttcagcctgcccctgttccaccacgccagatacgagctggtgcacggcagcagcctgagcctggtgagcagcaccagcagcgtgtacagcacccccgaggagaagtgccagagcgagatcagaaagctgagaagagagctggacgccagccaggagaaggtgagcgccctgaccacccagctgaccgccaacgcccacctggtggccgccttcgagcagagcctgggcaacatgaccatcagactgcagagcctgaccatgaccgccgagcagaaggacagcgagctgaacgagctgagaaagaccatcgagctgctgaagaagcagaacgccgccgcccaggccgccatcaacggcgtgatcaacacccccgagctgaactgcaagggcaacggcaccgcccagagcgccgacctgagaatcagaagacagcacagcagcgacagcgtgagcagcatcaacagcgccaccagccacagcagcgtgggcagcaacatcgagagcgacagcaagaagaagaagagaaagaactgggtgaacgagctgagaagcagcttcaagcaggccttcggcaagaagaagagccccaagagcgccagcagccacagcgacatcgaggagatgaccgacagcagcctgcccagcagccccaagctgccccacaacggcagcaccggcagcacccccctgctgagaaacagccacagcaacagcctgatcagcgagtgcatggacagcgaggccgagaccgtgatgcagctgagaaacgagctgagagacaaggagatgaagctgaccgacatcagactggaggccctgagcagcgcccaccagctggaccagctgagagaggccatgaacagaatgcagagcgagatcgagaagctgaaggccgagaacgacagactgaagagcgagagccagggcagcggctgcagcagagcccccagccaggtgagcatcagcgccagccccagacagagcatgggcctgagccagcacagcctgaacctgaccgagagcaccagcctggacatgctgctggacgacaccggcgagtgcagcgccagaaaggagggcggcagacacgtgaagatcgtggtgagcttccaggaggagatgaagtggaaggaggacagcagaccccacctgttcctgatcggctgcatcggcgtgagcggcaagaccaagtgggacgtgctggacggcgtggtgagaagactgttcaaggagtacatcatccacgtggaccccgtgagccagctgggcctgaacagcgacagcgtgctgggctacagcatcggcgagatcaagagaagcaacaccagcgagacccccgagctgctgccctgcggctacctggtgggcgagaacaccaccatcagcgtgaccgtgaagggcctggccgagaacagcctggacagcctggtgttcgagagcctgatccccaagcccatcctgcagagatacgtgagcctgctgatcgagcacagaagaatcatcctgagcggccccagcggcaccggcaagacctacctggccaacagactgagcgagtacatcgtgctgagagagggcagagagctgaccgacggcgtgatcgccaccttcaacgtggaccacaagagcagcaaggagctgagacagtacctgagcaacctggccgaccagtgcaacagcgagaacaacgccgtggacatgcccctggtgatcatcctggacaacctgcaccacgtgagcagcctgggcgagatcttcaacggcctgctgaactgcaagtaccacaagtgcccctacatcatcggcaccatgaaccaggccaccagcagcacccccaacctgcagctgcaccacaacttcagatgggtgctgtgcgccaaccacaccgagcccgtgaagggcttcctgggcagattcctgagaagaaagctgatggagaccgagatcagcggcagagtgagaaacatggagctggtgaagatcatcgactggatccccaaggtgtggcaccacctgaacagattcctggaggcccacagcagcagcgacgtgaccatcggccccagactgttcctgagctgccccatcgacgtggacggcagcagagtgtggttcaccgacctgtggaactacagcatcatcccctacctgctggaggccgtgagagagggcctgcagctgtacggcagaagagccccctgggaggaccccgccaagtgggtgatggacacctacccctgggccgccagcccccagcagcacgagtggccccccctgctgcagctgagacccgaggacgtgggcttcgacggctacagcatgcccagagagggcagcaccagcaagcagatgccccccagcgacgccgagggcgaccccctgatgaacatgctgatgagactgcaggaggccgccaactacagcagcccccagagctacgacagcgacagcaacagcaacagccaccacgacgacatcctggacagcagcctggagagcaccctgtag

SEQ ID NO: 90887 - DNA, 7098 bp, synthetic construct
  misc_feature 1..7098: note = Description of Artificial Sequence: Synthetic coding sequence
  source 1..7098: mol_type = other DNA
atggagagcgtgagcgagagcagccagcagcagaagagaaagcccgtgatccacggcctggaggaccagaagagaatctacaccgactgggccaaccactacctggccaagagcggccacaagagactgatcagagacctgcagcaggacgtgaccgacggcgtgctgctggcccagatcatccaggtggtggccaacgagaagatcgaggacatcaacggctgccccaagaacagaagccagatgatcgagaacatcgacgcctgcctgaacttcctggccgccaagggcatcaacatccagggcctgagcgccgaggagatcagaaacggcaacctgaaggccatcctgggcctgttcttcagcctgagcagatacaagcagcagcagcagcagccccagaagcagcacctgagcagccccctgccccccgccgtgagccaggtggccggcgcccccagccagtgccaggccggcaccccccagcagcaggtgcccgtgaccccccaggccccctgccagccccaccagcccgccccccaccagcagagcaaggcccaggccgagatgcagagcagactgcccggccccaccgccagagtgagcgccgccggcagcgaggccaagaccagaggcggcagcaccaccgccaacaacagaagaagccagagcttcaacaactacgacaagagcaagcccgtgaccagccccccccccccccccagcagccacgagaaggagcccctggccagcagcgccagcagccaccccggcatgagcgacaacgcccccgccagcctggagagcggcagcagcagcacccccaccaactgcagcaccagcagcgccatcccccagcccggcgccgccaccaagccctggagaagcaagagcctgagcgtgaagcacagcgccaccgtgagcatgctgagcgtgaagccccccggccccgaggcccccagacccacccccgaggccatgaagcccgcccccaacaaccagaagagcatgctggagaagctgaagctgttcaacagcaagggcggcagcaaggccggcgagggccccggcagcagagacaccagctgcgagagactggagaccctgcccagcttcgaggagagcgaggagctggaggccgccagcagaatgctgaccaccgtgggccccgccagcagcagccccaagatcgccctgaagggcatcgcccagagaaccttcagcagagccctgaccaacaagaagagcagcctgaagggcaacgagaaggagaaggagaagcagcagagagagaaggacaaggagaagagcaaggacctggccaagagagccagcgtgaccgagagactggacctgaaggaggagcccaaggaggaccccagcggcgccgccgtgcccgagatgcccaagaagagcagcaagatcgccagcttcatccccaagggcggcaagctgaacagcgccaagaaggagcccatggcccccagccacagcggcatccccaagcccggcatgaagagcatgcccggcaagagccccagcgcccccgcccccagcaaggagggcgagagaagcagaagcggcaagctgagcagcggcctgccccagcagaagccccagctggacggcagacacagcagcagcagcagcagcctggccagcagcgagggcaagggccccggcggcaccaccctgaaccacagcatcagcagccagaccgtgagcggcagcgtgggcaccacccagaccaccggcagcaacaccgtgagcgtgcagctgccccagccccagcagcagtacaaccaccccaacaccgccaccgtggcccccttcctgtacagaagccagaccgacaccgagggcaacgtgaccgccgagagcagcagcaccggcgtgagcgtggagcccagccacttcaccaagaccggccagcccgccctggaggagctgaccggcgaggaccccgaggccagaagactgagaaccgtgaagaacatcgccgacctgagacagaacctggaggagaccatgagcagcctgagaggcacccaggtgacccacagcaccctggagaccaccttcgacaccaacgtgaccaccgagatgagcggcagaagcatcctgagcctgaccggcagacccacccccctgagctggagactgggccagagcagccccagactgcaggccggcgacgcccccagcatgggcaacggctacccccccagagccaacgccagcagattcatcaacaccgagagcggcagatacgtgtacagcgcccccctgagaagacagctggccagcagaggcagcagcgtgtgccacgtggacgtgagcgacaaggccggcgacgagatggacctggagggcatcagcatggacgcccccggctacatgagcgacggcgacgtgctgagcaagaacatcagaaccgacgacatcaccagcggctacatgaccgacggcggcctgggcctgtacaccagaagactgaacagactgcccgacggcatggccgtggtgagagagaccctgcagagaaacaccagcctgggcctgggcgacgccgacagctgggacgacagcagcagcgtgagcagcggcatcagcgacaccatcgacaacctgagcaccgacgacatcaacaccagcagcagcatcagcagctacgccaacacccccgccagcagcagaaagaacctggacgtgcagaccgacgccgagaagcacagccaggtggagagaaacagcctgtggagcggcgacgacgtgaagaagagcgacggcggcagcgacagcggcatcaagatggagcccggcagcaagtggagaagaaaccccagcgacgtgagcgacgagagcgacaagagcaccagcggcaagaagaaccccgtgatcagccagaccggcagctggagaagaggcatgaccgcccaggtgggcatcaccatgcccagaaccaagcccagcgcccccgccggcgccctgaagacccccggcaccggcaagaccgacgacgccaaggtgagcgagaagggcagactgagccccaaggccagccaggtgaagagaagccccagcgacgccggcagaagcagcggcgacgagagcaagaagcccctgcccagcagcagcagaacccccaccgccaacgccaacagcttcggcttcaagaagcagagcggcagcgccgccggcctggccatgatcaccgccagcggcgtgaccgtgaccagcagaagcgccaccctgggcaagatccccaagagcagcgccctggtgagcagaagcgccggcagaaagagcagcatggacggcgcccagaaccaggacgacggctacctggccctgagcagcagaaccaacctgcagtacagaagcctgcccagacccagcaagagcaacagcagaaacggcgccggcaacagaagcagcaccagcagcatcgacagcaacatcagcagcaagagcgccggcctgcccgtgcccaagctgagagagcccagcaagaccgccctgggcagcagcctgcccggcctggtgaaccagaccgacaaggagaagggcatcagcagcgacaacgagagcgtggccagctgcaacagcgtgaaggtgaaccccgccgcccagcccgtgagcagccccgcccagaccagcctgcagcccggcgccaagtaccccgacgtggccagccccaccctgagaagactgttcggcggcaagcccaccaagcaggtgcccatcgccaccgccgagaacatgaagaacagcgtggtgatcagcaacccccacgccaccatgacccagcagggcaacctggacagccccagcggcagcggcgtgctgagcagcggcagcagcagccccctgtacagcaagaacgtggacctgaaccagagccccctggccagcagccccagcagcgcccacagcgcccccagcaacagcctgacctggggcaccaacgccagcagcagcagcgccgtgagcaaggacggcctgggcttccagagcgtgagcagcctgcacaccagctgcgagagcatcgacatcagcctgagcagcggcggcgtgcccagccacaacagcagcaccggcctgatcgccagcagcaaggacgacagcctgacccccttcgtgagaaccaacagcgtgaagaccaccctgagcgagagccccctgagcagccccgccgccagccccaagttctgcagaagcaccctgcccagaaagcaggacagcgacccccacctggacagaaacaccctgcccaagaagggcctgagatacacccccaccagccagctgagaacccaggaggacgccaaggagtggctgagaagccacagcgccggcggcctgcaggacaccgccgccaacagccccttcagcagcggcagcagcgtgaccagccccagcggcaccagattcaacttcagccagctggccagccccaccaccgtgacccagatgagcctgagcaaccccaccatgctgagaacccacagcctgagcaacgccgacggccagtacgacccctacaccgacagcagattcagaaacagcagcatgagcctggacgagaagagcagaaccatgagcagaagcggcagcttcagagacggcttcgaggaggtgcacggcagcagcctgagcctggtgagcagcaccagcagcgtgtacagcacccccgaggagaagtgccagagcgagatcagaaagctgagaagagagctggacgccagccaggagaaggtgagcgccctgaccacccagctgaccgccaacgcccacctggtggccgccttcgagcagagcctgggcaacatgaccatcagactgcagagcctgaccatgaccgccgagcagaaggacagcgagctgaacgagctgagaaagaccatcgagctgctgaagaagcagaacgccgccgcccaggccgccatcaacggcgtgatcaacacccccgagctgaactgcaagggcaacggcaccgcccagagcgccgacctgagaatcagaagacagcacagcagcgacagcgtgagcagcatcaacagcgccaccagccacagcagcgtgggcagcaacatcgagagcgacagcaagaagaagaagagaaagaactggctgagaagcagcttcaagcaggccttcggcaagaagaagagccccaagagcgccagcagccacagcgacatcgaggagatgaccgacagcagcctgcccagcagccccaagctgccccacaacggcagcaccggcagcacccccctgctgagaaacagccacagcaacagcctgatcagcgagtgcatggacagcgaggccgagaccgtgatgcagctgagaaacgagctgagagacaaggagatgaagctgaccgacatcagactggaggccctgagcagcgcccaccagctggaccagctgagagaggccatgaacagaatgcagagcgagatcgagaagctgaaggccgagaacgacagactgaagagcgagagccagggcagcggctgcagcagagcccccagccaggtgagcatcagcgccagccccagacagagcatgggcctgagccagcacagcctgaacctgaccgagagcaccagcctggacatgctgctggacgacaccggcgagtgcagcgccagaaaggagggcggcagacacgtgaagatcgtggtgagcttccaggaggagatgaagtggaaggaggacagcagaccccacctgttcctgatcggctgcatcggcgtgagcggcaagaccaagtgggacgtgctggacggcgtggtgagaagactgttcaaggagtacatcatccacgtggaccccgtgagccagctgggcctgaacagcgacagcgtgctgggctacagcatcggcgagatcaagagaagcaacaccagcgagacccccgagctgctgccctgcggctacctggtgggcgagaacaccaccatcagcgtgaccgtgaagggcctggccgagaacagcctggacagcctggtgttcgagagcctgatccccaagcccatcctgcagagatacgtgagcctgctgatcgagcacagaagaatcatcctgagcggccccagcggcaccggcaagacctacctggccaacagactgagcgagtacatcgtgctgagagagggcagagagctgaccgacggcgtgatcgccaccttcaacgtggaccacaagagcagcaaggagctgagacagtacctgagcaacctggccgaccagtgcaacagcgagaacaacgccgtggacatgcccctggtgatcatcctggacaacctgcaccacgtgagcagcctgggcgagatcttcaacggcctgctgaactgcaagtaccacaagtgcccctacatcatcggcaccatgaaccaggccaccagcagcacccccaacctgcagctgcaccacaacttcagatgggtgctgtgcgccaaccacaccgagcccgtgaagggcttcctgggcagattcctgagaagaaagctgatggagaccgagatcagcggcagagtgagaaacatggagctggtgaagatcatcgactggatccccaaggtgtggcaccacctgaacagattcctggaggcccacagcagcagcgacgtgaccatcggccccagactgttcctgagctgccccatcgacgtggacggcagcagagtgtggttcaccgacctgtggaactacagcatcatcccctacctgctggaggccgtgagagagggcctgcagctgtacggcagaagagccccctgggaggaccccgccaagtgggtgatggacacctacccctgggccgccagcccccagcagcacgagtggccccccctgctgcagctgagacccgaggacgtgggcttcgacggctacagcatgcccagagagggcagcaccagcaagcagatgccccccagcgacgccgagggcgaccccctgatgaacatgctgatgagactgcaggaggccgccaactacagcagcccccagagctacgacagcgacagcaacagcaacagccaccacgacgacatcctggacagcagcctggagagcaccctgtag

SEQ ID NO: 90888 - DNA, 1089 bp, synthetic construct
  misc_feature 1..1089: note = Description of Artificial Sequence: Synthetic coding sequence
  source 1..1089: mol_type = other DNA
atgttcagcagcgtggcccacctggccagagccaaccccttcaacaccccccacctgcagctggtgcacgacggcctgggcgacctgagaagcagcagccccggccccaccggccagcccagaagacccagaaacctggccgccgccgccgtggaggagcagtacagctgcgactacggcagcggcagattcttcatcctgtgcggcctgggcggcatcatcagctgcggcaccacccacaccgccctggtgcccctggacctggtgaagtgcagaatgcaggtggacccccagaagtacaagggcatcttcaacggcttcagcgtgaccctgaaggaggacggcgtgagaggcctggccaagggctgggcccccaccttcctgggctacagcatgcagggcctgtgcaagttcggcttctacgaggtgttcaaggtgctgtacagcaacatgctgggcgaggagaacacctacctgtggagaaccagcctgtacctggccgccagcgccagcgccgagttcttcgccgacatcgccctggcccccatggaggccgccaaggtgagaatccagacccagcccggctacgccaacaccctgagagacgccgcccccaagatgtacaaggaggagggcctgaaggccttctacaagggcgtggcccccctgtggatgagacagatcccctacaccatgatgaagttcgcctgcttcgagagaaccgtggaggccctgtacaagttcgtggtgcccaagcccagaagcgagtgcagcaagcccgagcagctggtggtgaccttcgtggccggctacatcgccggcgtgttctgcgccatcgtgagccaccccgccgacagcgtggtgagcgtgctgaacaaggagaagggcagcagcgccagcctggtgctgaagagactgggcttcaagggcgtgtggaagggcctgttcgccagaatcatcatgatcggcaccctgaccgccctgcagtggttcatctacgacagcgtgaaggtgtacttcagactgcccagaccccccccccccgagatgcccgagagcctgaagaagaagctgggcctgacccagtag

SEQ ID NO: 90889 - DNA, 6561 bp, synthetic construct
  misc_feature 1..6561: note = Description of Artificial Sequence: Synthetic coding sequence
  source 1..6561: mol_type = other DNA
atgcccgtgctgggcgtggccagcaagctgagacagcccgccgtgggcagcaagcccgtgcacaccgccctgcccatccccaacctgggcaccaccggcagccagcactgcagcagcagacccctggagctgaccgagaccgagagcagcatgctgagctgccagctggccctgaagagcacctgcgagttcggcgagaagaagcccctgcagggcaaggccaaggagaaggaggacagcaagatctacaccgactgggccaaccactacctggccaagagcggccacaagagactgatcaaggacctgcagcaggacatcgccgacggcgtgctgctggccgagatcatccagatcatcgccaacgagaaggtggaggacatcaacggctgccccagaagccagagccagatgatcgagaacgtggacgtgtgcctgagcttcctggccgccagaggcgtgaacgtgcagggcctgagcgccgaggagatcagaaacggcaacctgaaggccatcctgggcctgttcttcagcctgagcagatacaagcagcagcagcaccaccagcagcagtactaccagagcctggtggagctgcagcagagagtgacccacgccagcccccccagcgaggccagccaggccaagacccagcaggacatgcagagcagcctggccgccagatacgccacccagagcaaccacagcggcatcgccaccagccagaagaagcccaccagactgcccggccccagcagagtgcccgccgccggcagcagcagcaaggtgcagggcgccagcaacctgaacagaagaagccagagcttcaacagcatcgacaagaacaagccccccaactacgccaacggcaacgagaaggacagcagcaagggcccccagagcagcagcggcgtgaacggcaacgtgcagccccccagcaccgccggccagccccccgccagcgccatccccagccccagcgccagcaagccctggagaagcaagagcatgaacgtgaagcacagcgccaccagcaccatgctgaccgtgaagcagagcagcaccgccaccagccccacccccagcagcgacagactgaagccccccgtgagcgagggcgtgaagaccgcccccagcggccagaagagcatgctggagaagttcaagctggtgaacgccagaaccgccctgagacccccccagccccccagcagcggccccagcgacggcggcaaggacgacgacgccttcagcgagagcggcgagatggagggcttcaacagcggcctgaacagcggcggcagcaccaacagcagccccaaggtgagccccaagctggccccccccaaggccggcagcaagaacctgagcaacaagaagagcctgctgcagcccaaggagaaggaggagaagaacagagacaagaacaaggtgtgcaccgagaagcccgtgaaggaggagaaggaccaggtgaccgagatggcccccaagaagaccagcaagatcgccagcctgatccccaagggcagcaagaccaccgccgccaagaaggagagcctgatccccagcagcagcggcatccccaagcccggcagcaaggtgcccaccgtgaagcagaccatcagccccggcagcaccgccagcaaggagagcgagaagttcagaaccaccaagggcagccccagccagagcctgagcaagcccatcaccatggagaaggccagcgccagcagctgccccgcccccctggagggcagagaggccggccaggccagccccagcggcagctgcaccatgaccgtggcccagagcagcggccagagcaccggcaacggcgccgtgcagctgccccagcagcagcagcacagccaccccaacaccgccaccgtggcccccttcatctacagagcccacagcgagaacgagggcaccgccctgcccagcgccgacagctgcaccagccccaccaagatggacctgagctacagcaagaccgccaagcagtgcctggaggagatcagcggcgaggaccccgagaccagaagaatgagaaccgtgaagaacatcgccgacctgagacagaacctggaggagaccatgagcagcctgagaggcacccagatcagccacagcaccctggagaccaccttcgacagcaccgtgaccaccgaggtgaacggcagaaccatccccaacctgaccagcagacccacccccatgacctggagactgggccaggcctgccccagactgcaggccggcgacgcccccagcctgggcgccggctaccccagaagcggcaccagcagattcatccacaccgaccccagcagattcatgtacaccacccccctgagaagagccgccgtgagcagactgggcaacatgagccagatcgacatgagcgagaaggccagcagcgacctggacatgagcagcgaggtggacgtgggcggctacatgagcgacggcgacatcctgggcaagagcctgagaaccgacgacatcaacagcggctacatgaccgacggcggcctgaacctgtacaccagaagcctgaacagaatccccgacaccgccaccagcagagacatcatccagagaggcgtgcacgacgtgaccgtggacgccgacagctgggacgacagcagcagcgtgagcagcggcctgagcgacaccctggacaacatcagcaccgacgacctgaacaccaccagcagcgtgagcagctacagcaacatcaccgtgcccagcagaaagaacacccagctgagaaccgacagcgagaagagaagcaccaccgacgagacctgggacagccccgaggagctgaagaagcccgaggaggacttcgacagccacggcgacgccggcggcaagtggaagaccgtgagcagcggcctgcccgaggaccccgagaaggccggccagaaggccagcctgagcgtgagccagaccggcagctggagaagaggcatgagcgcccagggcggcgcccccagcagacagaaggccggcaccagcgccctgaagacccccggcaagaccgacgacgccaaggccagcgagaagggcaaggcccccctgaagggcagcagcctgcagagaagccccagcgacgccggcaagagcagcggcgacgagggcaagaagccccccagcggcatcggcagaagcaccgccaccagcagcttcggcttcaagaagcccagcggcgtgggcagcagcgccatgatcaccagcagcggcgccaccatcaccagcggcagcgccaccctgggcaagatccccaagagcgccgccatcggcggcaagagcaacgccggcagaaagaccagcctggacggcagccagaaccaggacgacgtggtgctgcacgtgagcagcaagaccaccctgcagtacagaagcctgcccagacccagcaagagcagcaccagcggcatccccggcagaggcggccacagaagcagcaccagcagcatcgacagcaacgtgagcagcaagagcgccggcgccaccaccagcaagctgagagagcccaccaagatcggcagcggcagaagcagccccgtgaccgtgaaccagaccgacaaggagaaggagaaggtggccgtgagcgacagcgagagcgtgagcctgagcggcagccccaagagcagccccaccagcgccagcgcctgcggcgcccagggcctgagacagcccggcagcaagtaccccgacatcgccagccccaccttcagaagatacacccccagcagcagacaggccaaccaggaggagggcaaggagtggctgagaagccacagcaccggcggcctgcaggacaccggcaaccagagccccctggtgagccccagcgccatgagcagcagcgccgccggcaagtaccacttcagcaacctggtgagccccaccaacctgagccagttcaacctgcccggccccagcatgatgagaagcaacagcatccccgcccaggacagcagcttcgacctgtacgacgacagccagctgtgcggcagcgccaccagcctggaggagagacccagagccatcagccacagcggcagcttcagagacagcatggaggaggtgcacggcagcagcctgagcctggtgagcagcaccagcagcctgtacagcaccgccgaggccggcggcagcctggagcagatccacaagctgagaagagagctggtggccagccaggagaaggtggccaccctgaccagccagctgagcgccaacgcccacctggtggccgccttcgagaagagcctgggcaacatgaccggcagactgcagagcctgaccatgaccgccgagcagaaggagagcgagctgatcgagctgagagagaccatcgagatgctgaaggcccagaacagcgccgcccaggccgccatccagggcgccctgaacggccccgaccacccccccaaggacctgagaatcagaagacagcacagcagcgagagcgtgagcagcatcaacagcgccaccagccacagcagcatcggcagcggcaacgacgccgacagcaagaagaagaagaagaagaactgggtgaacagcagaggcagcgagctgagaagcagcttcaagcaggccttcggcaagaagaagagcaccaagccccccagcagccacagcgacatcgaggagctgaccgacagcagcctgcccgccagccccaagctgccccacaacgccggcgactgcggcagcgccagcatgaagcccagccagagcgccagcgccatctgcgagtgcaccgaggccgaggccgagatcatcctgcagctgaagagcgagctgagagagaaggagctgaagctgaccgacatcagactggaggccctgagcagcgcccaccacctggaccagatcagagaggccatgaacagaatgcagaacgagatcgagatcctgaaggccgagaacgacagactgaaggccgagaccggcaacaccgccaagcccaccagaccccccagcgagagcagcagcagcaccagcagcagcagcagcagacagagcctgggcctgagcctgaacaacctgaacatcaccgaggccgtgagcagcgacatcctgctggacgacgccggcgacgccaccggccacaaggacggcagaagcgtgaagatcatcgtgagcatcagcaagggctacggcagagccaaggaccagaagagccaggcctacctgatcggcagcatcggcgtgagcggcaagaccaagtgggacgtgctggacggcgtgatcagaagactgttcaaggagtacgtgttcagaatcgacaccagcaccagcctgggcctgagcagcgactgcatcgccagctactgcatcggcgacctgatcagaagccacaacctggaggtgcccgagctgctgccctgcggctacctggtgggcgacaacaacatcatcaccgtgaacctgaagggcgtggaggagaacagcctggacagcttcgtgttcgacaccctgatccccaagcccatcacccagagatacttcaacctgctgatggagcaccacagaatcatcctgagcggccccagcggcaccggcaagacctacctggccaacaagctggccgagtacgtgatcaccaagagcggcagaaagaagaccgaggacgccatcgccaccttcaacgtggaccacaagagcagcaaggagctgcagcagtacctggccaacctggccgagcagtgcagcgccgacaacaacggcgtggagctgcccgtggtgatcatcctggacaacctgcaccacgtgggcagcctgagcgacatcttcaacggcttcctgaactgcaagtacaacaagtgcccctacatcatcggcaccatgaaccagggcgtgagcagcagccccaacctggagctgcaccacaacttcagatgggtgctgtgcgccaaccacaccgagcccgtgaagggcttcctgggcagatacctgagaagaaagctgatcgagatcgagatcgagagaaacatcagaaacaacgacctggtgaagatcatcgactggatccccaagacctggcaccacctgaacagcttcctggagacccacagcagcagcgacgtgaccatcggccccagactgttcctgccctgccccatggacgtggagggcagcagagtgtggttcatggacctgtggaactacagcctggtgccctacatcctggaggccgtgagagagggcctgcagatgtacggcaagagaaccccctgggaggaccccagcaagtgggtgctggacacctacccctggagcagcgccaccctgccccaggagagccccgccctgctgcagctgagacccgaggacgtgggctacgagagctgcaccagcaccaaggaggccaccaccagcaagcacatcccccagaccgacaccgagggcgaccccctgatgaacatgctgatgaagctgcaggaggccgccaactacagcagcacccagagctgcgacagcgagagcaccagccaccacgaggacatcctggacagcagcctggagagcaccctgtag

SEQ ID NO: 90890 - DNA, 2376 bp, synthetic construct
  misc_feature 1..2376: note = Description of Artificial Sequence: Synthetic coding sequence
  source 1..2376: mol_type = other DNA
atgaccagcctgcacaccagcagcgagagcatcgacctgcccctgagccaccacggcagcctgagcggcctgaccaccggcacccacgaggtgcagagcctgctgatgagaaccggcagcgtgagaagcaccctgagcgagagatacacccccagcagcagacaggccaaccaggaggagggcaaggagtggctgagaagccacagcaccggcggcctgcaggacaccggcaaccagagccccctggtgagccccagcgccatgagcagcagcgccgccggcaagtaccacttcagcaacctggtgagccccaccaacctgagccagttcaacctgcccggccccagcatgatgagaagcaacagcatccccgcccaggacagcagcttcgacctgtacgacgacagccagctgtgcggcagcgccaccagcctggaggagagacccagagccatcagccacagcggcagcttcagagacagcatggaggaggtgcacggcagcagcctgagcctggtgagcagcaccagcagcctgtacagcaccgccatccagaagcccaacatccagcagatccacaagctgagaagagagctggtggccagccaggagaaggtggccaccctgaccagccagctgagcgccaacgcccacctggtggccgccttcgagaagagcctgggcaacatgaccggcagactgcagagcctgaccatgaccgccgagcagaaggagagcgagctgatcgagctgagagagaccatcgagatgctgaaggcccagaacagcgccgcccaggccgccatccagggcgccctgaacggccccgaccacccccccaaggacctgagaatcagaagacagcacagcagcgagagcgtgagcagcatcaacagcgccaccagccacagcagcatcggcagcggcaacgacgccgacagcaagaagaagaagaagaagaactggctgagaagcagcttcaagcaggccttcggcaagaagaagagcaccaagccccccagcagccacagcgacatcgaggagctgaccgacagcagcctgcccgccagccccaagctgccccacaacgccggcgactgcggcagcgccagcatgaagcccagccagagcgccagcgccatctgcgagtgcaccgaggccgaggccgagatcatcctgcagctgaagagcgagctgagagagaaggagctgaagctgaccgacatcagactggaggccctgagcagcgcccaccacctggaccagatcagagaggccatgaacagaatgcagaacgagatcgagatcctgaaggccgagaacgacagactgaaggccgagaccggcaacaccgccaagcccaccagaccccccagcgagagcagcagcagcaccagcagcagcagcagcagacagagcctgggcctgagcctgaacaacctgaacatcaccgaggccgtgagcagcgacatcctgctggacgacgccggcgacgccaccggccacaaggacggcagaagcgtgaagatcatcgtgagcatcagcaagggctacggcagagccaaggaccagaagagccaggcctacctgatcggcagcatcggcgtgagcggcaagaccaagtgggacgtgctggacggcgtgatcagaagactgttcaaggagtacgtgttcagaatcgacaccagcaccagcctgggcctgagcagcgactgcatcgccagctactgcatcggcgacctgatcagaagccacaacctggaggtgcccgagctgctgccctgcggctacctggtgggcgacaacaacatcatcaccgtgaacctgaagggcgtggaggagaacagcctggacagcttcgtgttcgacaccctgatccccaagcccatcacccagagatacttcaacctgctgatggagcaccacagaatcatcctgagcggccccagcggcaccggcaagacctacctggccaacaagctggccgagtacgtgatcaccaagagcggcagaaagaagaccgaggacgccatcgccaccttcaacgtggaccacaagagcagcaaggagctgcagcagtacctggccaacctggccgagcagtgcagcgccgacaacaacggcgtggagctgcccgtggtgatcatcctggacaacctgcaccacgtgggcagcctgagcgacatcttcaacggcttcctgaactgcaagtacaacaagtgcccctacatcatcggcaccatgaaccagggcgtgagcagcagccccaacctggagctgcaccacaacttcagatgggtgctgtgcgccaaccacaccgagcccgtgaagggcttcctgggcagatacctgagaagaaagctgatcgagatctag

SEQ ID NO: 90891 - DNA, 7158 bp, synthetic construct
  misc_feature 1..7158: note = Description of Artificial Sequence: Synthetic coding sequence
  source 1..7158: mol_type = other DNA
atgcccgtgctgggcgtggccagcaagctgagacagcccgccgtgggcagcaagcccgtgcacaccgccctgcccatccccaacctgggcaccaccggcagccagcactgcagcagcagacccctggagctgaccgagaccgagagcagcatgctgagctgccagctggccctgaagagcacctgcgagttcggcgagaagaagcccctgcagggcaaggccaaggagaaggaggacagcaagatctacaccgactgggccaaccactacctggccaagagcggccacaagagactgatcaaggacctgcagcaggacatcgccgacggcgtgctgctggccgagatcatccagatcatcgccaacgagaaggtggaggacatcaacggctgccccagaagccagagccagatgatcgagaacgtggacgtgtgcctgagcttcctggccgccagaggcgtgaacgtgcagggcctgagcgccgaggagatcagaaacggcaacctgaaggccatcctgggcctgttcttcagcctgagcagatacaagcagcagcagcaccaccagcagcagtactaccagagcctggtggagctgcagcagagagtgacccacgccagcccccccagcgaggccagccaggccaagacccagcaggacatgcagagcagcctggccgccagatacgccacccagagcaaccacagcggcatcgccaccagccagaagaagcccaccagactgcccggccccagcagagtgcccgccgccggcagcagcagcaaggtgcagggcgccagcaacctgaacagaagaagccagagcttcaacagcatcgacaagaacaagccccccaactacgccaacggcaacgagaaggacagcagcaagggcccccagagcagcagcggcgtgaacggcaacgtgcagccccccagcaccgccggccagccccccgccagcgccatccccagccccagcgccagcaagccctggagaagcaagagcatgaacgtgaagcacagcgccaccagcaccatgctgaccgtgaagcagagcagcaccgccaccagccccacccccagcagcgacagactgaagccccccgtgagcgagggcgtgaagaccgcccccagcggccagaagagcatgctggagaagttcaagctggtgaacgccagaaccgccctgagacccccccagccccccagcagcggccccagcgacggcggcaaggacgacgacgccttcagcgagagcggcgagatggagggcttcaacagcggcctgaacagcggcggcagcaccaacagcagccccaaggtgagccccaagctggccccccccaaggccggcagcaagaacctgagcaacaagaagagcctgctgcagcccaaggagaaggaggagaagaacagagacaagaacaaggtgtgcaccgagaagcccgtgaaggaggagaaggaccaggtgaccgagatggcccccaagaagaccagcaagatcgccagcctgatccccaagggcagcaagaccaccgccgccaagaaggagagcctgatccccagcagcagcggcatccccaagcccggcagcaaggtgcccaccgtgaagcagaccatcagccccggcagcaccgccagcaaggagagcgagaagttcagaaccaccaagggcagccccagccagagcctgagcaagcccatcaccatggagaaggccagcgccagcagctgccccgcccccctggagggcagagaggccggccaggccagccccagcggcagctgcaccatgaccgtggcccagagcagcggccagagcaccggcaacggcgccgtgcagctgccccagcagcagcagcacagccaccccaacaccgccaccgtggcccccttcatctacagagcccacagcgagaacgagggcaccgccctgcccagcgccgacagctgcaccagccccaccaagatggacctgagctacagcaagaccgccaagcagtgcctggaggagatcagcggcgaggaccccgagaccagaagaatgagaaccgtgaagaacatcgccgacctgagacagaacctggaggagaccatgagcagcctgagaggcacccagatcagccacagcaccctggagaccaccttcgacagcaccgtgaccaccgaggtgaacggcagaaccatccccaacctgaccagcagacccacccccatgacctggagactgggccaggcctgccccagactgcaggccggcgacgcccccagcctgggcgccggctaccccagaagcggcaccagcagattcatccacaccgaccccagcagattcatgtacaccacccccctgagaagagccgccgtgagcagactgggcaacatgagccagatcgacatgagcgagaaggccagcagcgacctggacatgagcagcgaggtggacgtgggcggctacatgagcgacggcgacatcctgggcaagagcctgagaaccgacgacatcaacagcggctacatgaccgacggcggcctgaacctgtacaccagaagcctgaacagaatccccgacaccgccaccagcagagacatcatccagagaggcgtgcacgacgtgaccgtggacgccgacagctgggacgacagcagcagcgtgagcagcggcctgagcgacaccctggacaacatcagcaccgacgacctgaacaccaccagcagcgtgagcagctacagcaacatcaccgtgcccagcagaaagaacacccagctgagaaccgacagcgagaagagaagcaccaccgacgagacctgggacagccccgaggagctgaagaagcccgaggaggacttcgacagccacggcgacgccggcggcaagtggaagaccgtgagcagcggcctgcccgaggaccccgagaaggccggccagaaggccagcctgagcgtgagccagaccggcagctggagaagaggcatgagcgcccagggcggcgcccccagcagacagaaggccggcaccagcgccctgaagacccccggcaagaccgacgacgccaaggccagcgagaagggcaaggcccccctgaagggcagcagcctgcagagaagccccagcgacgccggcaagagcagcggcgacgagggcaagaagccccccagcggcatcggcagaagcaccgccaccagcagcttcggcttcaagaagcccagcggcgtgggcagcagcgccatgatcaccagcagcggcgccaccatcaccagcggcagcgccaccctgggcaagatccccaagagcgccgccatcggcggcaagagcaacgccggcagaaagaccagcctggacggcagccagaaccaggacgacgtggtgctgcacgtgagcagcaagaccaccctgcagtacagaagcctgcccagacccagcaagagcagcaccagcggcatccccggcagaggcggccacagaagcagcaccagcagcatcgacagcaacgtgagcagcaagagcgccggcgccaccaccagcaagctgagagagcccaccaagatcggcagcggcagaagcagccccgtgaccgtgaaccagaccgacaaggagaaggagaaggtggccgtgagcgacagcgagagcgtgagcctgagcggcagccccaagagcagccccaccagcgccagcgcctgcggcgcccagggcctgagacagcccggcagcaagtaccccgacatcgccagccccaccttcagaagactgttcggcgccaaggccggcggcaagagcgccagcgcccccaacaccgagggcgtgaagagcagcagcgtgatgcccagccccagcaccaccctggccagacagggcagcctggagagccccagcagcggcaccggcagcatgggcagcgccggcggcctgagcggcagcagcagccccctgttcaacaagcccagcgacctgaccaccgacgtgatcagcctgagccacagcctggccagcagccccgccagcgtgcacagcttcaccagcggcggcctggtgtgggccgccaacatgagcagcagcagcgccggcagcaaggacacccccagctaccagagcatgaccagcctgcacaccagcagcgagagcatcgacctgcccctgagccaccacggcagcctgagcggcctgaccaccggcacccacgaggtgcagagcctgctgatgagaaccggcagcgtgagaagcaccctgagcgagagcatgcagctggacagaaacaccctgcccaagaagggcctgagatacacccccagcagcagacaggccaaccaggaggagggcaaggagtggctgagaagccacagcaccggcggcctgcaggacaccggcaaccagagccccctggtgagccccagcgccatgagcagcagcgccgccggcaagtaccacttcagcaacctggtgagccccaccaacctgagccagttcaacctgcccggccccagcatgatgagaagcaacagcatccccgcccaggacagcagcttcgacctgtacgacgacagccagctgtgcggcagcgccaccagcctggaggagagacccagagccatcagccacagcggcagcttcagagacagcatggaggaggtgcacggcagcagcctgagcctggtgagcagcaccagcagcctgtacagcaccgccgaggagaaggcccacagcgagcagatccacaagctgagaagagagctggtggccagccaggagaaggtggccaccctgaccagccagctgagcgccaacgcccacctggtggccgccttcgagaagagcctgggcaacatgaccggcagactgcagagcctgaccatgaccgccgagcagaaggagagcgagctgatcgagctgagagagaccatcgagatgctgaaggcccagaacagcgccgcccaggccgccatccagggcgccctgaacggccccgaccacccccccaaggacctgagaatcagaagacagcacagcagcgagagcgtgagcagcatcaacagcgccaccagccacagcagcatcggcagcggcaacgacgccgacagcaagaagaagaagaagaagaactgggtgaacagcagaggcagcgagctgagaagcagcttcaagcaggccttcggcaagaagaagagcaccaagccccccagcagccacagcgacatcgaggagctgaccgacagcagcctgcccgccagccccaagctgccccacaacgccggcgactgcggcagcgccagcatgaagcccagccagagcgccagcgccagccccctggtgtggccccccaagaagagacagaacggccccgtgatctacaagcacagaagcagaatctgcgagtgcaccgaggccgaggccgagatcatcctgcagctgaagagcgagctgagagagaaggagctgaagctgaccgacatcagactggaggccctgagcagcgcccaccacctggaccagatcagagaggccatgaacagaatgcagaacgagatcgagatcctgaaggccgagaacgacagactgaaggccgagaccggcaacaccgccaagcccaccagaccccccagcgagagcagcagcagcaccagcagcagcagcagcagacagagcctgggcctgagcctgaacaacctgaacatcaccgaggccgtgagcagcgacatcctgctggacgacgccggcgacgccaccggccacaaggacggcagaagcgtgaagatcatcgtgagcatcagcaagggctacggcagagccaaggaccagaagagccaggcctacctgatcggcagcatcggcgtgagcggcaagaccaagtgggacgtgctggacggcgtgatcagaagactgttcaaggagtacgtgttcagaatcgacaccagcaccagcctgggcctgagcagcgactgcatcgccagctactgcatcggcgacctgatcagaagccacaacctggaggtgcccgagctgctgccctgcggctacctggtgggcgacaacaacatcatcaccgtgaacctgaagggcgtggaggagaacagcctggacagcttcgtgttcgacaccctgatccccaagcccatcacccagagatacttcaacctgctgatggagcaccacagaatcatcctgagcggccccagcggcaccggcaagacctacctggccaacaagctggccgagtacgtgatcaccaagagcggcagaaagaagaccgaggacgccatcgccaccttcaacgtggaccacaagagcagcaaggagctgcagcagtacctggccaacctggccgagcagtgcagcgccgacaacaacggcgtggagctgcccgtggtgatcatcctggacaacctgcaccacgtgggcagcctgagcgacatcttcaacggcttcctgaactgcaagtacaacaagtgcccctacatcatcggcaccatgaaccagggcgtgagcagcagccccaacctggagctgcaccacaacttcagatgggtgctgtgcgccaaccacaccgagcccgtgaagggcttcctgggcagatacctgagaagaaagctgatcgagatcgagatcgagagaaacatcagaaacaacgacctggtgaagatcatcgactggatccccaagacctggcaccacctgaacagcttcctggagacccacagcagcagcgacgtgaccatcggccccagactgttcctgccctgccccatggacgtggagggcagcagagtgtggttcatggacctgtggaactacagcctggtgccctacatcctggaggccgtgagagagggcctgcagatgtacggcaagagaaccccctgggaggaccccagcaagtgggtgctggacacctacccctggagcagcgccaccctgccccaggagagccccgccctgctgcagctgagacccgaggacgtgggctacgagagctgcaccagcaccaaggaggccaccaccagcaagcacatcccccagaccgacaccgagggcgaccccctgatgaacatgctgatgaagctgcaggaggccgccaactacagcagcacccagagctgcgacagcgagagcaccagccaccacgaggacatcctggacagcagcctggagagcaccctgtag

SEQ ID NO: 90892 - DNA, 7092 bp, synthetic construct
  misc_feature 1..7092: note = Description of Artificial Sequence: Synthetic coding sequence
  source 1..7092: mol_type = other DNA
atgcccgtgctgggcgtggccagcaagctgagacagcccgccgtgggcagcaagcccgtgcacaccgccctgcccatccccaacctgggcaccaccggcagccagcactgcagcagcagacccctggagctgaccgagaccgagagcagcatgctgagctgccagctggccctgaagagcacctgcgagttcggcgagaagaagcccctgcagggcaaggccaaggagaaggaggacagcaagatctacaccgactgggccaaccactacctggccaagagcggccacaagagactgatcaaggacctgcagcaggacatcgccgacggcgtgctgctggccgagatcatccagatcatcgccaacgagaaggtggaggacatcaacggctgccccagaagccagagccagatgatcgagaacgtggacgtgtgcctgagcttcctggccgccagaggcgtgaacgtgcagggcctgagcgccgaggagatcagaaacggcaacctgaaggccatcctgggcctgttcttcagcctgagcagatacaagcagcagcagcaccaccagcagcagtactaccagagcctggtggagctgcagcagagagtgacccacgccagcccccccagcgaggccagccaggccaagacccagcaggacatgcagagcagcctggccgccagatacgccacccagagcaaccacagcggcatcgccaccagccagaagaagcccaccagactgcccggccccagcagagtgcccgccgccggcagcagcagcaaggtgcagggcgccagcaacctgaacagaagaagccagagcttcaacagcatcgacaagaacaagccccccaactacgccaacggcaacgagaaggacagcagcaagggcccccagagcagcagcggcgtgaacggcaacgtgcagccccccagcaccgccggccagccccccgccagcgccatccccagccccagcgccagcaagccctggagaagcaagagcatgaacgtgaagcacagcgccaccagcaccatgctgaccgtgaagcagagcagcaccgccaccagccccacccccagcagcgacagactgaagccccccgtgagcgagggcgtgaagaccgcccccagcggccagaagagcatgctggagaagttcaagctggtgaacgccagaaccgccctgagacccccccagccccccagcagcggccccagcgacggcggcaaggacgacgacgccttcagcgagagcggcgagatggagggcttcaacagcggcctgaacagcggcggcagcaccaacagcagccccaaggtgagccccaagctggccccccccaaggccggcagcaagaacctgagcaacaagaagagcctgctgcagcccaaggagaaggaggagaagaacagagacaagaacaaggtgtgcaccgagaagcccgtgaaggaggagaaggaccaggtgaccgagatggcccccaagaagaccagcaagatcgccagcctgatccccaagggcagcaagaccaccgccgccaagaaggagagcctgatccccagcagcagcggcatccccaagcccggcagcaaggtgcccaccgtgaagcagaccatcagccccggcagcaccgccagcaaggagagcgagaagttcagaaccaccaagggcagccccagccagagcctgagcaagcccatcaccatggagaaggccagcgccagcagctgccccgcccccctggagggcagagaggccggccaggccagccccagcggcagctgcaccatgaccgtggcccagagcagcggccagagcaccggcaacggcgccgtgcagctgccccagcagcagcagcacagccaccccaacaccgccaccgtggcccccttcatctacagagcccacagcgagaacgagggcaccgccctgcccagcgccgacagctgcaccagccccaccaagatggacctgagctacagcaagaccgccaagcagtgcctggaggagatcagcggcgaggaccccgagaccagaagaatgagaaccgtgaagaacatcgccgacctgagacagaacctggaggagaccatgagcagcctgagaggcacccagatcagccacagcaccctggagaccaccttcgacagcaccgtgaccaccgaggtgaacggcagaaccatccccaacctgaccagcagacccacccccatgacctggagactgggccaggcctgccccagactgcaggccggcgacgcccccagcctgggcgccggctaccccagaagcggcaccagcagattcatccacaccgaccccagcagattcatgtacaccacccccctgagaagagccgccgtgagcagactgggcaacatgagccagatcgacatgagcgagaaggccagcagcgacctggacatgagcagcgaggtggacgtgggcggctacatgagcgacggcgacatcctgggcaagagcctgagaaccgacgacatcaacagcggctacatgaccgacggcggcctgaacctgtacaccagaagcctgaacagaatccccgacaccgccaccagcagagacatcatccagagaggcgtgcacgacgtgaccgtggacgccgacagctgggacgacagcagcagcgtgagcagcggcctgagcgacaccctggacaacatcagcaccgacgacctgaacaccaccagcagcgtgagcagctacagcaacatcaccgtgcccagcagaaagaacacccagctgagaaccgacagcgagaagagaagcaccaccgacgagacctgggacagccccgaggagctgaagaagcccgaggaggacttcgacagccacggcgacgccggcggcaagtggaagaccgtgagcagcggcctgcccgaggaccccgagaaggccggccagaaggccagcctgagcgtgagccagaccggcagctggagaagaggcatgagcgcccagggcggcgcccccagcagacagaaggccggcaccagcgccctgaagacccccggcaagaccgacgacgccaaggccagcgagaagggcaaggcccccctgaagggcagcagcctgcagagaagccccagcgacgccggcaagagcagcggcgacgagggcaagaagccccccagcggcatcggcagaagcaccgccaccagcagcttcggcttcaagaagcccagcggcgtgggcagcagcgccatgatcaccagcagcggcgccaccatcaccagcggcagcgccaccctgggcaagatccccaagagcgccgccatcggcggcaagagcaacgccggcagaaagaccagcctggacggcagccagaaccaggacgacgtggtgctgcacgtgagcagcaagaccaccctgcagtacagaagcctgcccagacccagcaagagcagcaccagcggcatccccggcagaggcggccacagaagcagcaccagcagcatcgacagcaacgtgagcagcaagagcgccggcgccaccaccagcaagctgagagagcccaccaagatcggcagcggcagaagcagccccgtgaccgtgaaccagaccgacaaggagaaggagaaggtggccgtgagcgacagcgagagcgtgagcctgagcggcagccccaagagcagccccaccagcgccagcgcctgcggcgcccagggcctgagacagcccggcagcaagtaccccgacatcgccagccccaccttcagaagactgttcggcgccaaggccggcggcaagagcgccagcgcccccaacaccgagggcgtgaagagcagcagcgtgatgcccagccccagcaccaccctggccagacagggcagcctggagagccccagcagcggcaccggcagcatgggcagcgccggcggcctgagcggcagcagcagccccctgttcaacaagcccagcgacctgaccaccgacgtgatcagcctgagccacagcctggccagcagccccgccagcgtgcacagcttcaccagcggcggcctggtgtgggccgccaacatgagcagcagcagcgccggcagcaaggacacccccagctaccagagcatgaccagcctgcacaccagcagcgagagcatcgacctgcccctgagccaccacggcagcctgagcggcctgaccaccggcacccacgaggtgcagagcctgctgatgagaaccggcagcgtgagaagcaccctgagcgagagcatgcagctggacagaaacaccctgcccaagaagggcctgagatacacccccagcagcagacaggccaaccaggaggagggcaaggagtggctgagaagccacagcaccggcggcctgcaggacaccggcaaccagagccccctggtgagccccagcgccatgagcagcagcgccgccggcaagtaccacttcagcaacctggtgagccccaccaacctgagccagttcaacctgcccggccccagcatgatgagaagcaacagcatccccgcccaggacagcagcttcgacctgtacgacgacagccagctgtgcggcagcgccaccagcctggaggagagacccagagccatcagccacagcggcagcttcagagacagcatggaggaggtgcacggcagcagcctgagcctggtgagcagcaccagcagcctgtacagcaccgccgaggagaaggcccacagcgagcagatccacaagctgagaagagagctggtggccagccaggagaaggtggccaccctgaccagccagctgagcgccaacgcccacctggtggccgccttcgagaagagcctgggcaacatgaccggcagactgcagagcctgaccatgaccgccgagcagaaggagagcgagctgatcgagctgagagagaccatcgagatgctgaaggcccagaacagcgccgcccaggccgccatccagggcgccctgaacggccccgaccacccccccaaggacctgagaatcagaagacagcacagcagcgagagcgtgagcagcatcaacagcgccaccagccacagcagcatcggcagcggcaacgacgccgacagcaagaagaagaagaagaagaactgggtgaacagcagaggcagcgagctgagaagcagcttcaagcaggccttcggcaagaagaagagcaccaagccccccagcagccacagcgacatcgaggagctgaccgacagcagcctgcccgccagccccaagctgccccacaacgccggcgactgcggcagcgccagcatgaagcccagccagagcgccagcgccatctgcgagtgcaccgaggccgaggccgagatcatcctgcagctgaagagcgagctgagagagaaggagctgaagctgaccgacatcagactggaggccctgagcagcgcccaccacctggaccagatcagagaggccatgaacagaatgcagaacgagatcgagatcctgaaggccgagaacgacagactgaaggccgagaccggcaacaccgccaagcccaccagaccccccagcgagagcagcagcagcaccagcagcagcagcagcagacagagcctgggcctgagcctgaacaacctgaacatcaccgaggccgtgagcagcgacatcctgctggacgacgccggcgacgccaccggccacaaggacggcagaagcgtgaagatcatcgtgagcatcagcaagggctacggcagagccaaggaccagaagagccaggcctacctgatcggcagcatcggcgtgagcggcaagaccaagtgggacgtgctggacggcgtgatcagaagactgttcaaggagtacgtgttcagaatcgacaccagcaccagcctgggcctgagcagcgactgcatcgccagctactgcatcggcgacctgatcagaagccacaacctggaggtgcccgagctgctgccctgcggctacctggtgggcgacaacaacatcatcaccgtgaacctgaagggcgtggaggagaacagcctggacagcttcgtgttcgacaccctgatccccaagcccatcacccagagatacttcaacctgctgatggagcaccacagaatcatcctgagcggccccagcggcaccggcaagacctacctggccaacaagctggccgagtacgtgatcaccaagagcggcagaaagaagaccgaggacgccatcgccaccttcaacgtggaccacaagagcagcaaggagctgcagcagtacctggccaacctggccgagcagtgcagcgccgacaacaacggcgtggagctgcccgtggtgatcatcctggacaacctgcaccacgtgggcagcctgagcgacatcttcaacggcttcctgaactgcaagtacaacaagtgcccctacatcatcggcaccatgaaccagggcgtgagcagcagccccaacctggagctgcaccacaacttcagatgggtgctgtgcgccaaccacaccgagcccgtgaagggcttcctgggcagatacctgagaagaaagctgatcgagatcgagatcgagagaaacatcagaaacaacgacctggtgaagatcatcgactggatccccaagacctggcaccacctgaacagcttcctggagacccacagcagcagcgacgtgaccatcggccccagactgttcctgccctgccccatggacgtggagggcagcagagtgtggttcatggacctgtggaactacagcctggtgccctacatcctggaggccgtgagagagggcctgcagatgtacggcaagagaaccccctgggaggaccccagcaagtgggtgctggacacctacccctggagcagcgccaccctgccccaggagagccccgccctgctgcagctgagacccgaggacgtgggctacgagagctgcaccagcaccaaggaggccaccaccagcaagcacatcccccagaccgacaccgagggcgaccccctgatgaacatgctgatgaagctgcaggaggccgccaactacagcagcacccagagctgcgacagcgagagcaccagccaccacgaggacatcctggacagcagcctggagagcaccctgtag

SEQ ID NO: 90893 - DNA, 648 bp, synthetic construct
  misc_feature 1..648: note = Description of Artificial Sequence: Synthetic coding sequence
  source 1..648: mol_type = other DNA
atgaagagatgggtgctgtgcgccaaccacaccgagcccgtgaagggcttcctgggcagatacctgagaagaaagctgatcgagatcgagatcgagagaaacatcagaaacaacgacctggtgaagatcatcgactggatccccaagacctggcaccacctgaacagcttcctggagacccacagcagcagcgacgtgaccatcggccccagactgttcctgccctgccccatggacgtggagggcagcagagtgtggttcatggacctgtggaactacagcctggtgccctacatcctggaggccgtgagagagggcctgcagatgtacggcaagagaaccccctgggaggaccccagcaagtgggtgctggacacctacccctggagcagcgccaccctgccccaggagagccccgccctgctgcagctgagacccgaggacgtgggctacgagagctgcaccagcaccaaggaggccaccaccagcaagcacatcccccagaccgacaccgagggcgaccccctgatgaacatgctgatgaagctgcaggaggccgccaactacagcagcacccagagctgcgacagcgagagcaccagccaccacgaggacatcctggacagcagcctggagagcaccctgtag

SEQ ID NO: 90894 - DNA, 573 bp, synthetic construct
  misc_feature 1..573: note = Description of Artificial Sequence: Synthetic coding sequence
  source 1..573: mol_type = other DNA
atgggcaagagcaacagcaagctgaagcccgaggtggtggaggagctgaccagaaagacctacttcaccgagaaggaggtgcagcagtggtacaagggcttcatcaaggactgccccagcggccagctggacgccgccggcttccagaagatctacaagcagttcttccccttcggcgaccccaccaagttcgccaccttcgtgttcaacgtgttcgacgagaacaaggacggcagaatcgagttcagcgagttcatccaggccctgagcgtgaccagcagaggcaccctggacgagaagctgagatgggccttcaagctgtacgacctggacaacgacggctacatcaccagaaacgagatgctggacatcgtggacgccatctaccagatggtgggcaacaccgtggagctgcccgaggaggagaacacccccgagaagagagtggacagaatcttcgccatgatggacaagaacgccgacggcaagctgaccctgcaggagttccaggagggcagcaaggccgaccccagcatcgtgcaggccctgagcctgtacgacggcctggtgtag

SEQ ID NO: 90895 - DNA, 519 bp, synthetic construct
  misc_feature 1..519: note = Description of Artificial Sequence: Synthetic coding sequence
  source 1..519: mol_type = other DNA
atggccaccatcaccgagaaggaggtgcagcagtggtacaagggcttcatcaaggactgccccagcggccagctggacgccgccggcttccagaagatctacaagcagttcttccccttcggcgaccccaccaagttcgccaccttcgtgttcaacgtgttcgacgagaacaaggacggcagaatcgagttcagcgagttcatccaggccctgagcgtgaccagcagaggcaccctggacgagaagctgagatgggccttcaagctgtacgacctggacaacgacggctacatcaccagaaacgagatgctggacatcgtggacgccatctaccagatggtgggcaacaccgtggagctgcccgaggaggagaacacccccgagaagagagtggacagaatcttcgccatgatggacaagaacgccgacggcaagctgaccctgcaggagttccaggagggcagcaaggccgaccccagcatcgtgcaggccctgagcctgtacgacggcctggtgtag

SEQ ID NO: 90896 - DNA, 3552 bp, synthetic construct
  misc_feature 1..3552: note = Description of Artificial Sequence: Synthetic coding sequence
  source 1..3552: mol_type = other DNA
atgcagctgaagatcatgcccaagaagaagagactgagcgccggcagagtgcccctgatcctgttcctgtgccagatgatcagcgccctggaggtgcccctggacctggtgcagccccccaccatcacccagcagagccccaaggactacatcatcgaccccagagagaacatcgtgatccagtgcgaggccaagggcaagcccccccccagcttcagctggaccagaaacggcacccacttcgacatcgacaaggaccccctggtgaccatgaagcccggcaccggcaccctgatcatcaacatcatgagcgagggcaaggccgagacctacgagggcgtgtaccagtgcaccgccagaaacgagagaggcgccgccgtgagcaacaacatcgtggtgagacccagcagaagccccctgtggaccaaggagaagctggagcccatcaccctgcagagcggccagagcctggtgctgccctgcagaccccccatcggcctgcccccccccatcatcttctggatggacaacagcttccagagactgccccagagcgagagagtgagccagggcctgaacggcgacctgtacttcagcaacgtgctgcccgaggacaccagagaggactacatctgctacgccagattcaaccacacccagaccatccagcagaagcagcccatcagcgtgaaggtgatcagcgtggacgagctgaacgacaccatcgccgccaacctgagcgacaccgagttctacggcgccaagagcagcagagagagaccccccaccttcctgacccccgagggcaacgccagcaacaaggaggagctgagaggcaacgtgctgagcctggagtgcatcgccgagggcctgcccacccccatcatctactgggccaaggaggacggcatgctgcccaagaacagaaccgtgtacaagaacttcgagaagaccctgcagatcatccacgtgagcgaggccgacagcggcaactaccagtgcatcgccaagaacgccctgggcgccatccaccacaccatcagcgtgagagtgaaggccgccccctactggatcaccgccccccagaacctggtgctgagccccggcgaggacggcaccctgatctgcagagccaacggcaaccccaagcccagaatcagctggctgaccaacggcgtgcccatcgagatcgcccccgacgaccccagcagaaagatcgacggcgacaccatcatcttcagcaacgtgcaggagagaagcagcgccgtgtaccagtgcaacgccagcaacgagtacggctacctgctggccaacgccttcgtgaacgtgctggccgagccccccagaatcctgacccccgccaacaccctgtaccaggtgatcgccaacagacccgccctgctggactgcgccttcttcggcagccccctgcccaccatcgagtggttcaagggcgccaagggcagcgccctgcacgaggacatctacgtgctgcacgagaacggcaccctggagatccccgtggcccagaaggacagcaccggcacctacacctgcgtggccagaaacaagctgggcatggccaagaacgaggtgcacctggagatcaaggaccccacctggatcgtgaagcagcccgagtacgccgtggtgcagagaggcagcatggtgagcttcgagtgcaaggtgaagcacgaccacaccctgagcctgaccgtgctgtggctgaaggacaacagagagctgcccagcgacgagagattcaccgtggacaaggaccacctggtggtggccgacgtgagcgacgacgacagcggcacctacacctgcgtggccaacaccaccctggacagcgtgagcgccagcgccgtgctgagcgtggtggacgtgcccaacccccccttcgacctggagctgaccgaccagctggacaagagcgtgcagctgagctggacccccggcgacgacaacaacagccccatcaccaagttcatcatcgagtacgaggacgccatgcacaagcccggcctgtggcaccaccagaccgaggtgagcggcacccagaccaccgcccagctgaagctgagcccctacgtgaactacagcttcagagtgatggccgtgaacagcatcggcaagagcctgcccagcgaggccagcgagcagtacctgaccaaggccagcgagcccgacaagaaccccaccgccgtggagggcctgggcagcgagcccgacaacctggtgatcacctggaagcccctgaacggcttcgagagcaacggccccggcctgcagtacaaggtgagctggagacagaaggacggcgacgacgagtggaccagcgtggtggtggccaacgtgagcaagtacatcgtgagcggcacccccaccttcgtgccctacctgatcaaggtgcaggccctgaacgacatgggcttcgcccccgagcccgccgtggtgatgggccacagcggcgaggacctgcccatggtggcccccggcaacgtgagagtgaacgtggtgaacagcaccctggccgaggtgcactgggaccccgtgcccctgaagagcatcagaggccacctgcagggctacagaatctactactggaagacccagagcagcagcaagagaaacagaagacacatcgagaagaagatcctgaccttccagggcagcaagacccacggcatgctgcccggcctggagcccttcagccactacaccctgaacgtgagagtggtgaacggcaagggcgagggccccgccagccccgacagagtgttcaacacccccgagggcgtgcccagcgcccccagcagcctgaagatcgtgaaccccaccctggacagcctgaccctggagtgggacccccccagccaccccaacggcatcctgaccgagtacaccctgaagtaccagcccatcaacagcacccacgagctgggccccctggtggacctgaagatccccgccaacaagaccagatggaccctgaagaacctgaacttcagcaccagatacaagttctacttctacgcccagaccagcgccggcagcggcagccagatcaccgaggaggccgtgaccaccgtggacgaggccatggccagcagacaggtggacatcgccacccagggctggttcatcggcctgatgtgcgccgtggccctgctgatcctgatcctgctgatcgtgtgcttcatcagaagaaacaagggcggcaagtaccccgtgaaggagaaggaggacgcccacgccgaccccgagatccagcccatgaaggaggacgacggcaccttcggcgagtacagcgacgccgaggaccacaagcccctgaagaagggcagcagaacccccagcgacagaaccgtgaagaaggaggacagcgacgacagcctggtggactacggcgagggcgtgaacggccagttcaacgaggacggcagcttcatcggccagtacagcggcaagaaggagaaggagcccgccgagggcaacgagagcagcgaggcccccagccccgtgaacgccatgaacagcttcgtgtag

SEQ ID NO: 90897 - DNA, 3711 bp, synthetic construct
  misc_feature 1..3711: note = Description of Artificial Sequence: Synthetic coding sequence
  source 1..3711: mol_type = other DNA
atgcagctgaagatcatgcccaagaagaagagactgagcgccggcagagtgcccctgatcctgttcctgtgccagatgatcagcgccctggaggtgcccctggaccagaagagcaccgaggtgatggtgcagccccccaccatcacccagcagagccccaaggactacatcatcgaccccagagagaacatcgtgatccagtgcgaggccaagggcaagcccccccccagcttcagctggaccagaaacggcacccacttcgacatcgacaaggaccccctggtgaccatgaagcccggcaccggcaccctgatcatcaacatcatgagcgagggcaaggccgagacctacgagggcgtgtaccagtgcaccgccagaaacgagagaggcgccgccgtgagcaacaacatcgtggtgagacccagcagaagccccctgtggaccaaggagaagctggagcccatcaccctgcagagcggccagagcctggtgctgccctgcagaccccccatcggcctgcccccccccatcatcttctggatggacaacagcttccagagactgccccagagcgagagagtgagccagggcctgaacggcgacctgtacttcagcaacgtgctgcccgaggacaccagagaggactacatctgctacgccagattcaaccacacccagaccatccagcagaagcagcccatcagcgtgaaggtgatcagcgtggacgagctgaacgacaccatcgccgccaacctgagcgacaccgagttctacggcgccaagagcagcagagagagaccccccaccttcctgacccccgagggcaacgccagcaacaaggaggagctgagaggcaacgtgctgagcctggagtgcatcgccgagggcctgcccacccccatcatctactgggccaaggaggacggcatgctgcccaagaacagaaccgtgtacaagaacttcgagaagaccctgcagatcatccacgtgagcgaggccgacagcggcaactaccagtgcatcgccaagaacgccctgggcgccatccaccacaccatcagcgtgagagtgaaggccgccccctactggatcaccgccccccagaacctggtgctgagccccggcgaggacggcaccctgatctgcagagccaacggcaaccccaagcccagaatcagctggctgaccaacggcgtgcccatcgagatcgcccccgacgaccccagcagaaagatcgacggcgacaccatcatcttcagcaacgtgcaggagagaagcagcgccgtgtaccagtgcaacgccagcaacgagtacggctacctgctggccaacgccttcgtgaacgtgctggccgagccccccagaatcctgacccccgccaacaccctgtaccaggtgatcgccaacagacccgccctgctggactgcgccttcttcggcagccccctgcccaccatcgagtggttcaagggcgccaagggcagcgccctgcacgaggacatctacgtgctgcacgagaacggcaccctggagatccccgtggcccagaaggacagcaccggcacctacacctgcgtggccagaaacaagctgggcatggccaagaacgaggtgcacctggagatcaaggaccccacctggatcgtgaagcagcccgagtacgccgtggtgcagagaggcagcatggtgagcttcgagtgcaaggtgaagcacgaccacaccctgagcctgaccgtgctgtggctgaaggacaacagagagctgcccagcgacgagagattcaccgtggacaaggaccacctggtggtggccgacgtgagcgacgacgacagcggcacctacacctgcgtggccaacaccaccctggacagcgtgagcgccagcgccgtgctgagcgtggtggcccccacccccacccccgcccccgtgtacgacgtgcccaacccccccttcgacctggagctgaccgaccagctggacaagagcgtgcagctgagctggacccccggcgacgacaacaacagccccatcaccaagttcatcatcgagtacgaggacgccatgcacaagcccggcctgtggcaccaccagaccgaggtgagcggcacccagaccaccgcccagctgaagctgagcccctacgtgaactacagcttcagagtgatggccgtgaacagcatcggcaagagcctgcccagcgaggccagcgagcagtacctgaccaaggccagcgagcccgacaagaaccccaccgccgtggagggcctgggcagcgagcccgacaacctggtgatcacctggaagcccctgaacggcttcgagagcaacggccccggcctgcagtacaaggtgagctggagacagaaggacggcgacgacgagtggaccagcgtggtggtggccaacgtgagcaagtacatcgtgagcggcacccccaccttcgtgccctacctgatcaaggtgcaggccctgaacgacatgggcttcgcccccgagcccgccgtggtgatgggccacagcggcgaggacctgcccatggtggcccccggcaacgtgagagtgaacgtggtgaacagcaccctggccgaggtgcactgggaccccgtgcccctgaagagcatcagaggccacctgcagggctacagaatctactactggaagacccagagcagcagcaagagaaacagaagacacatcgagaagaagatcctgaccttccagggcagcaagacccacggcatgctgcccggcctggagcccttcagccactacaccctgaacgtgagagtggtgaacggcaagggcgagggccccgccagccccgacagagtgttcaacacccccgagggcgtgcccagcgcccccagcagcctgaagatcgtgaaccccaccctggacagcctgaccctggagtgggacccccccagccaccccaacggcatcctgaccgagtacaccctgaagtaccagcccatcaacagcacccacgagctgggccccctggtggacctgaagatccccgccaacaagaccagatggaccctgaagaacctgaacttcagcaccagatacaagttctacttctacgcccagaccagcgccggcagcggcagccagatcaccgaggaggccgtgaccaccgtggacgaggccggcatcctgccccccgacgtgggcgccggcaaggtgcaggccgtgaaccccagaatcagcaacctgaccgccgccgccgccgagacctacgccaacatcagctgggagtacgagggccccgagcacgtgaacttctacgtggagtacggcgtggccggcagcaaggaggagtggagaaaggagatcgtgaacggcagcagaagcttcttcggcctgaagggcctgatgcccggcaccgcctacaaggtgagagtgggcgccgtgggcgacagcggcttcgtgagcagcgaggacgtgttcgagaccggccccgccatggccagcagacaggtggacatcgccacccagggctggttcatcggcctgatgtgcgccgtggccctgctgatcctgatcctgctgatcgtgtgcttcatcagaagaaacaagggcggcaagtaccccgtgaaggagaaggaggacgcccacgccgaccccgagatccagcccatgaaggaggacgacggcaccttcggcgagtacagactgttcagcttcgtgagcagcgccagcttctag

SEQ ID NO: 90898 - DNA, 3579 bp, synthetic construct
  misc_feature 1..3579: note = Description of Artificial Sequence: Synthetic coding sequence
  source 1..3579: mol_type = other DNA
atgcagctgaagatcatgcccaagaagaagagactgagcgccggcagagtgcccctgatcctgttcctgtgccagatgatcagcgccctggaggtgcccctggaccccaagctgctggaggacctggtgcagccccccaccatcacccagcagagccccaaggactacatcatcgaccccagagagaacatcgtgatccagtgcgaggccaagggcaagcccccccccagcttcagctggaccagaaacggcacccacttcgacatcgacaaggaccccctggtgaccatgaagcccggcaccggcaccctgatcatcaacatcatgagcgagggcaaggccgagacctacgagggcgtgtaccagtgcaccgccagaaacgagagaggcgccgccgtgagcaacaacatcgtggtgagacccagcagaagccccctgtggaccaaggagaagctggagcccatcaccctgcagagcggccagagcctggtgctgccctgcagaccccccatcggcctgcccccccccatcatcttctggatggacaacagcttccagagactgccccagagcgagagagtgagccagggcctgaacggcgacctgtacttcagcaacgtgctgcccgaggacaccagagaggactacatctgctacgccagattcaaccacacccagaccatccagcagaagcagcccatcagcgtgaaggtgatcagcgccaagagcagcagagagagaccccccaccttcctgacccccgagggcaacgccagcaacaaggaggagctgagaggcaacgtgctgagcctggagtgcatcgccgagggcctgcccacccccatcatctactgggccaaggaggacggcatgctgcccaagaacagaaccgtgtacaagaacttcgagaagaccctgcagatcatccacgtgagcgaggccgacagcggcaactaccagtgcatcgccaagaacgccctgggcgccatccaccacaccatcagcgtgagagtgaaggccgccccctactggatcaccgccccccagaacctggtgctgagccccggcgaggacggcaccctgatctgcagagccaacggcaaccccaagcccagaatcagctggctgaccaacggcgtgcccatcgagatcgcccccgacgaccccagcagaaagatcgacggcgacaccatcatcttcagcaacgtgcaggagagaagcagcgccgtgtaccagtgcaacgccagcaacgagtacggctacctgctggccaacgccttcgtgaacgtgctggccgagccccccagaatcctgacccccgccaacaccctgtaccaggtgatcgccaacagacccgccctgctggactgcgccttcttcggcagccccctgcccaccatcgagtggttcaagggcgccaagggcagcgccctgcacgaggacatctacgtgctgcacgagaacggcaccctggagatccccgtggcccagaaggacagcaccggcacctacacctgcgtggccagaaacaagctgggcatggccaagaacgaggtgcacctggagatcaaggaccccacctggatcgtgaagcagcccgagtacgccgtggtgcagagaggcagcatggtgagcttcgagtgcaaggtgaagcacgaccacaccctgagcctgaccgtgctgtggctgaaggacaacagagagctgcccagcgacgagagattcaccgtggacaaggaccacctggtggtggccgacgtgagcgacgacgacagcggcacctacacctgcgtggccaacaccaccctggacagcgtgagcgccagcgccgtgctgagcgtggtggcccccacccccacccccgcccccgtgtacgacgtgcccaacccccccttcgacctggagctgaccgaccagctggacaagagcgtgcagctgagctggacccccggcgacgacaacaacagccccatcaccaagttcatcatcgagtacgaggacgccatgcacaagcccggcctgtggcaccaccagaccgaggtgagcggcacccagaccaccgcccagctgaagctgagcccctacgtgaactacagcttcagagtgatggccgtgaacagcatcggcaagagcctgcccagcgaggccagcgagcagtacctgaccaaggccagcgagcccgacaagaaccccaccgccgtggagggcctgggcagcgagcccgacaacctggtgatcacctggaagcccctgaacggcttcgagagcaacggccccggcctgcagtacaaggtgagctggagacagaaggacggcgacgacgagtggaccagcgtggtggtggccaacgtgagcaagtacatcgtgagcggcacccccaccttcgtgccctacctgatcaaggtgcaggccctgaacgacatgggcttcgcccccgagcccgccgtggtgatgggccacagcggcgaggacctgcccatggtggcccccggcaacgtgagagtgaacgtggtgaacagcaccctggccgaggtgcactgggaccccgtgcccctgaagagcatcagaggccacctgcagggctacagaatctactactggaagacccagagcagcagcaagagaaacagaagacacatcgagaagaagatcctgaccttccagggcagcaagacccacggcatgctgcccggcctggagcccttcagccactacaccctgaacgtgagagtggtgaacggcaagggcgagggccccgccagccccgacagagtgttcaacacccccgagggcgtgcccagcgcccccagcagcctgaagatcgtgaaccccaccctggacagcctgaccctggagtgggacccccccagccaccccaacggcatcctgaccgagtacaccctgaagtaccagcccatcaacagcacccacgagctgggccccctggtggacctgaagatccccgccaacaagaccagatggaccctgaagaacctgaacttcagcaccagatacaagttctacttctacgcccagaccagcgccggcagcggcagccagatcaccgaggaggccgtgaccaccgtggacgaggccggcatcctgccccccgacgtgggcgccggcaaggccatggccagcagacaggtggacatcgccacccagggctggttcatcggcctgatgtgcgccgtggccctgctgatcctgatcctgctgatcgtgtgcttcatcagaagaaacaagggcggcaagtaccccgtgaaggagaaggaggacgcccacgccgaccccgagatccagcccatgaaggaggacgacggcaccttcggcgagtacagcgacgccgaggaccacaagcccctgaagaagggcagcagaacccccagcgacagaaccgtgaagaaggaggacagcgacgacagcctggtggactacggcgagggcgtgaacggccagttcaacgaggacggcagcttcatcggccagtacagcggcaagaaggagaaggagcccgccgagggcaacgagagcagcgaggcccccagccccgtgaacgccatgaacagcttcgtgtag

SEQ ID NO: 90899 - DNA, 3915 bp, synthetic construct
  misc_feature 1..3915: note = Description of Artificial Sequence: Synthetic coding sequence
  source 1..3915: mol_type = other DNA
atgcagctgaagatcatgcccaagaagaagagactgagcgccggcagagtgcccctgatcctgttcctgtgccagatgatcagcgccctggaggtgcccctggaccccaagctgctggaggacctggtgcagccccccaccatcacccagcagagccccaaggactacatcatcgaccccagagagaacatcgtgatccagtgcgaggccaagggcaagcccccccccagcttcagctggaccagaaacggcacccacttcgacatcgacaaggaccccctggtgaccatgaagcccggcaccggcaccctgatcatcaacatcatgagcgagggcaaggccgagacctacgagggcgtgtaccagtgcaccgccagaaacgagagaggcgccgccgtgagcaacaacatcgtggtgagacccagcagaagccccctgtggaccaaggagaagctggagcccatcaccctgcagagcggccagagcctggtgctgccctgcagaccccccatcggcctgcccccccccatcatcttctggatggacaacagcttccagagactgccccagagcgagagagtgagccagggcctgaacggcgacctgtacttcagcaacgtgctgcccgaggacaccagagaggactacatctgctacgccagattcaaccacacccagaccatccagcagaagcagcccatcagcgtgaaggtgatcagcgtggacgagctgaacgacaccatcgccgccaacctgagcgacaccgagttctacggcgccaagagcagcagagagagaccccccaccttcctgacccccgagggcaacgccagcaacaaggaggagctgagaggcaacgtgctgagcctggagtgcatcgccgagggcctgcccacccccatcatctactgggccaaggaggacggcatgctgcccaagaacagaaccgtgtacaagaacttcgagaagaccctgcagatcatccacgtgagcgaggccgacagcggcaactaccagtgcatcgccaagaacgccctgggcgccatccaccacaccatcagcgtgagagtgaaggccgccccctactggatcaccgccccccagaacctggtgctgagccccggcgaggacggcaccctgatctgcagagccaacggcaaccccaagcccagaatcagctggctgaccaacggcgtgcccatcgagatcgcccccgacgaccccagcagaaagatcgacggcgacaccatcatcttcagcaacgtgcaggagagaagcagcgccgtgtaccagtgcaacgccagcaacgagtacggctacctgctggccaacgccttcgtgaacgtgctggccgagccccccagaatcctgacccccgccaacaccctgtaccaggtgatcgccaacagacccgccctgctggactgcgccttcttcggcagccccctgcccaccatcgagtggttcaagggcgccaagggcagcgccctgcacgaggacatctacgtgctgcacgagaacggcaccctggagatccccgtggcccagaaggacagcaccggcacctacacctgcgtggccagaaacaagctgggcatggccaagaacgaggtgcacctggagatcaaggaccccacctggatcgtgaagcagcccgagtacgccgtggtgcagagaggcagcatggtgagcttcgagtgcaaggtgaagcacgaccacaccctgagcctgaccgtgctgtggctgaaggacaacagagagctgcccagcgacgagagattcaccgtggacaaggaccacctggtggtggccgacgtgagcgacgacgacagcggcacctacacctgcgtggccaacaccaccctggacagcgtgagcgccagcgccgtgctgagcgtggtggcccccacccccacccccgcccccgtgtacgacgtgcccaacccccccttcgacctggagctgaccgaccagctggacaagagcgtgcagctgagctggacccccggcgacgacaacaacagccccatcaccaagttcatcatcgagtacgaggacgccatgcacaagcccggcctgtggcaccaccagaccgaggtgagcggcacccagaccaccgcccagctgaagctgagcccctacgtgaactacagcttcagagtgatggccgtgaacagcatcggcaagagcctgcccagcgaggccagcgagcagtacctgaccaaggccagcgagcccgacaagaaccccaccgccgtggagggcctgggcagcgagcccgacaacctggtgatcacctggaagcccctgaacggcttcgagagcaacggccccggcctgcagtacaaggtgagctggagacagaaggacggcgacgacgagtggaccagcgtggtggtggccaacgtgagcaagtacatcgtgagcggcacccccaccttcgtgccctacctgatcaaggtgcaggccctgaacgacatgggcttcgcccccgagcccgccgtggtgatgggccacagcggcgaggacctgcccatggtggcccccggcaacgtgagagtgaacgtggtgaacagcaccctggccgaggtgcactgggaccccgtgcccctgaagagcatcagaggccacctgcagggctacagaatctactactggaagacccagagcagcagcaagagaaacagaagacacatcgagaagaagatcctgaccttccagggcagcaagacccacggcatgctgcccggcctggagcccttcagccactacaccctgaacgtgagagtggtgaacggcaagggcgagggccccgccagccccgacagagtgttcaacacccccgagggcgtgcccagcgcccccagcagcctgaagatcgtgaaccccaccctggacagcctgaccctggagtgggacccccccagccaccccaacggcatcctgaccgagtacaccctgaagtaccagcccatcaacagcacccacgagctgggccccctggtggacctgaagatccccgccaacaagaccagatggaccctgaagaacctgaacttcagcaccagatacaagttctacttctacgcccagaccagcgccggcagcggcagccagatcaccgaggaggccgtgaccaccgtggacgaggccggcatcctgccccccgacgtgggcgccggcaaggtgcaggccgtgaaccccagaatcagcaacctgaccgccgccgccgccgagacctacgccaacatcagctgggagtacgagggccccgagcacgtgaacttctacgtggagtacggcgtggccggcagcaaggaggagtggagaaaggagatcgtgaacggcagcagaagcttcttcggcctgaagggcctgatgcccggcaccgcctacaaggtgagagtgggcgccgtgggcgacagcggcttcgtgagcagcgaggacgtgttcgagaccggccccgccatggccagcagacaggtggacatcgccacccagggctggttcatcggcctgatgtgcgccgtggccctgctgatcctgatcctgctgatcgtgtgcttcatcagaagaaacaagggcggcaagtaccccgtgaaggagaaggaggacgcccacgccgaccccgagatccagcccatgaaggaggacgacggcaccttcggcgagtacagcgacgccgaggaccacaagcccctgaagaagggcagcagaacccccagcgacagaaccgtgaagaaggaggacagcgacgacagcctggtggactacggcgagggcgtgaacggccagttcaacgaggacggcagcttcatcggccagtacagcggcaagaaggagaaggagcccgccgagggcaacgagagcagcgaggcccccagccccgtgaacgccatgaacagcttcgtgtag

SEQ ID NO: 90900 - DNA, 3927 bp, synthetic construct
  misc_feature 1..3927: note = Description of Artificial Sequence: Synthetic coding sequence
  source 1..3927: mol_type = other DNA
atgcagctgaagatcatgcccaagaagaagagactgagcgccggcagagtgcccctgatcctgttcctgtgccagatgatcagcgccctggaggtgcccctggaccagaagagcaccgaggtgatggtgcagccccccaccatcacccagcagagccccaaggactacatcatcgaccccagagagaacatcgtgatccagtgcgaggccaagggcaagcccccccccagcttcagctggaccagaaacggcacccacttcgacatcgacaaggaccccctggtgaccatgaagcccggcaccggcaccctgatcatcaacatcatgagcgagggcaaggccgagacctacgagggcgtgtaccagtgcaccgccagaaacgagagaggcgccgccgtgagcaacaacatcgtggtgagacccagcagaagccccctgtggaccaaggagaagctggagcccatcaccctgcagagcggccagagcctggtgctgccctgcagaccccccatcggcctgcccccccccatcatcttctggatggacaacagcttccagagactgccccagagcgagagagtgagccagggcctgaacggcgacctgtacttcagcaacgtgctgcccgaggacaccagagaggactacatctgctacgccagattcaaccacacccagaccatccagcagaagcagcccatcagcgtgaaggtgatcagcgtggacgagctgaacgacaccatcgccgccaacctgagcgacaccgagttctacggcgccaagagcagcagagagagaccccccaccttcctgacccccgagggcaacgccagcaacaaggaggagctgagaggcaacgtgctgagcctggagtgcatcgccgagggcctgcccacccccatcatctactgggccaaggaggacggcatgctgcccaagaacagaaccgtgtacaagaacttcgagaagaccctgcagatcatccacgtgagcgaggccgacagcggcaactaccagtgcatcgccaagaacgccctgggcgccatccaccacaccatcagcgtgagagtgaaggccgccccctactggatcaccgccccccagaacctggtgctgagccccggcgaggacggcaccctgatctgcagagccaacggcaaccccaagcccagaatcagctggctgaccaacggcgtgcccatcgagatcgcccccgacgaccccagcagaaagatcgacggcgacaccatcatcttcagcaacgtgcaggagagaagcagcgccgtgtaccagtgcaacgccagcaacgagtacggctacctgctggccaacgccttcgtgaacgtgctggccgagccccccagaatcctgacccccgccaacaccctgtaccaggtgatcgccaacagacccgccctgctggactgcgccttcttcggcagccccctgcccaccatcgagtggttcaagggcgccaagggcagcgccctgcacgaggacatctacgtgctgcacgagaacggcaccctggagatccccgtggcccagaaggacagcaccggcacctacacctgcgtggccagaaacaagctgggcatggccaagaacgaggtgcacctggagatcaaggaccccacctggatcgtgaagcagcccgagtacgccgtggtgcagagaggcagcatggtgagcttcgagtgcaaggtgaagcacgaccacaccctgagcctgaccgtgctgtggctgaaggacaacagagagctgcccagcgacgagagattcaccgtggacaaggaccacctggtggtggccgacgtgagcgacgacgacagcggcacctacacctgcgtggccaacaccaccctggacagcgtgagcgccagcgccgtgctgagcgtggtggcccccacccccacccccgcccccgtgtacgacgtgcccaacccccccttcgacctggagctgaccgaccagctggacaagagcgtgcagctgagctggacccccggcgacgacaacaacagccccatcaccaagttcatcatcgagtacgaggacgccatgcacaagcccggcctgtggcaccaccagaccgaggtgagcggcacccagaccaccgcccagctgaagctgagcccctacgtgaactacagcttcagagtgatggccgtgaacagcatcggcaagagcctgcccagcgaggccagcgagcagtacctgaccaaggccagcgagcccgacaagaaccccaccgccgtggagggcctgggcagcgagcccgacaacctggtgatcacctggaagcccctgaacggcttcgagagcaacggccccggcctgcagtacaaggtgagctggagacagaaggacggcgacgacgagtggaccagcgtggtggtggccaacgtgagcaagtacatcgtgagcggcacccccaccttcgtgccctacctgatcaaggtgcaggccctgaacgacatgggcttcgcccccgagcccgccgtggtgatgggccacagcggcgaggacctgcccatggtggcccccggcaacgtgagagtgaacgtggtgaacagcaccctggccgaggtgcactgggaccccgtgcccctgaagagcatcagaggccacctgcagggctacagaatctactactggaagacccagagcagcagcaagagaaacagaagacacatcgagaagaagatcctgaccttccagggcagcaagacccacggcatgctgcccggcctggagcccttcagccactacaccctgaacgtgagagtggtgaacggcaagggcgagggccccgccagccccgacagagtgttcaacacccccgagggcgtgcccagcgcccccagcagcctgaagatcgtgaaccccaccctggacagcctgaccctggagtgggacccccccagccaccccaacggcatcctgaccgagtacaccctgaagtaccagcccatcaacagcacccacgagctgggccccctggtggacctgaagatccccgccaacaagaccagatggaccctgaagaacctgaacttcagcaccagatacaagttctacttctacgcccagaccagcgccggcagcggcagccagatcaccgaggaggccgtgaccaccgtggacgaggccggcatcctgccccccgacgtgggcgccggcaaggtgcaggccgtgaaccccagaatcagcaacctgaccgccgccgccgccgagacctacgccaacatcagctgggagtacgagggccccgagcacgtgaacttctacgtggagtacggcgtggccggcagcaaggaggagtggagaaaggagatcgtgaacggcagcagaagcttcttcggcctgaagggcctgatgcccggcaccgcctacaaggtgagagtgggcgccgtgggcgacagcggcttcgtgagcagcgaggacgtgttcgagaccggccccgccatggccagcagacaggtggacatcgccacccagggctggttcatcggcctgatgtgcgccgtggccctgctgatcctgatcctgctgatcgtgtgcttcatcagaagaaacaagggcggcaagtaccccgtgaaggagaaggaggacgcccacgccgaccccgagatccagcccatgaaggaggacgacggcaccttcggcgagtacagcagcctgaagaacgacgccgaggaccacaagcccctgaagaagggcagcagaacccccagcgacagaaccgtgaagaaggaggacagcgacgacagcctggtggactacggcgagggcgtgaacggccagttcaacgaggacggcagcttcatcggccagtacagcggcaagaaggagaaggagcccgccgagggcaacgagagcagcgaggcccccagccccgtgaacgccatgaacagcttcgtgtag

SEQ ID NO: 90901 - DNA, 3543 bp, synthetic construct
  misc_feature 1..3543: note = Description of Artificial Sequence: Synthetic coding sequence
  source 1..3543: mol_type = other DNA
atgcagctgaagatcatgcccaagaagaagagactgagcgccggcagagtgcccctgatcctgttcctgtgccagatgatcagcgccctggaggtgcccctggaccagaagagcaccgaggtgatggtgcagccccccaccatcacccagcagagccccaaggactacatcatcgaccccagagagaacatcgtgatccagtgcgaggccaagggcaagcccccccccagcttcagctggaccagaaacggcacccacttcgacatcgacaaggaccccctggtgaccatgaagcccggcaccggcaccctgatcatcaacatcatgagcgagggcaaggccgagacctacgagggcgtgtaccagtgcaccgccagaaacgagagaggcgccgccgtgagcaacaacatcgtggtgagacccagcagaagccccctgtggaccaaggagaagctggagcccatcaccctgcagagcggccagagcctggtgctgccctgcagaccccccatcggcctgcccccccccatcatcttctggatggacaacagcttccagagactgccccagagcgagagagtgagccagggcctgaacggcgacctgtacttcagcaacgtgctgcccgaggacaccagagaggactacatctgctacgccagattcaaccacacccagaccatccagcagaagcagcccatcagcgtgaaggtgatcagcgccaagagcagcagagagagaccccccaccttcctgacccccgagggcaacgccagcaacaaggaggagctgagaggcaacgtgctgagcctggagtgcatcgccgagggcctgcccacccccatcatctactgggccaaggaggacggcatgctgcccaagaacagaaccgtgtacaagaacttcgagaagaccctgcagatcatccacgtgagcgaggccgacagcggcaactaccagtgcatcgccaagaacgccctgggcgccatccaccacaccatcagcgtgagagtgaaggccgccccctactggatcaccgccccccagaacctggtgctgagccccggcgaggacggcaccctgatctgcagagccaacggcaaccccaagcccagaatcagctggctgaccaacggcgtgcccatcgagatcgcccccgacgaccccagcagaaagatcgacggcgacaccatcatcttcagcaacgtgcaggagagaagcagcgccgtgtaccagtgcaacgccagcaacgagtacggctacctgctggccaacgccttcgtgaacgtgctggccgagccccccagaatcctgacccccgccaacaccctgtaccaggtgatcgccaacagacccgccctgctggactgcgccttcttcggcagccccctgcccaccatcgagtggttcaagggcgccaagggcagcgccctgcacgaggacatctacgtgctgcacgagaacggcaccctggagatccccgtggcccagaaggacagcaccggcacctacacctgcgtggccagaaacaagctgggcatggccaagaacgaggtgcacctggagatcaaggaccccacctggatcgtgaagcagcccgagtacgccgtggtgcagagaggcagcatggtgagcttcgagtgcaaggtgaagcacgaccacaccctgagcctgaccgtgctgtggctgaaggacaacagagagctgcccagcgacgagagattcaccgtggacaaggaccacctggtggtggccgacgtgagcgacgacgacagcggcacctacacctgcgtggccaacaccaccctggacagcgtgagcgccagcgccgtgctgagcgtggtggcccccacccccacccccgcccccgtgtacgacgtgcccaacccccccttcgacctggagctgaccgaccagctggacaagagcgtgcagctgagctggacccccggcgacgacaacaacagccccatcaccaagttcatcatcgagtacgaggacgccatgcacaagcccggcctgtggcaccaccagaccgaggtgagcggcacccagaccaccgcccagctgaagctgagcccctacgtgaactacagcttcagagtgatggccgtgaacagcatcggcaagagcctgcccagcgaggccagcgagcagtacctgaccaaggccagcgagcccgacaagaaccccaccgccgtggagggcctgggcagcgagcccgacaacctggtgatcacctggaagcccctgaacggcttcgagagcaacggccccggcctgcagtacaaggtgagctggagacagaaggacggcgacgacgagtggaccagcgtggtggtggccaacgtgagcaagtacatcgtgagcggcacccccaccttcgtgccctacctgatcaaggtgcaggccctgaacgacatgggcttcgcccccgagcccgccgtggtgatgggccacagcggcgaggacctgcccatggtggcccccggcaacgtgagagtgaacgtggtgaacagcaccctggccgaggtgcactgggaccccgtgcccctgaagagcatcagaggccacctgcagggctacagaatctactactggaagacccagagcagcagcaagagaaacagaagacacatcgagaagaagatcctgaccttccagggcagcaagacccacggcatgctgcccggcctggagcccttcagccactacaccctgaacgtgagagtggtgaacggcaagggcgagggccccgccagccccgacagagtgttcaacacccccgagggcgtgcccagcgcccccagcagcctgaagatcgtgaaccccaccctggacagcctgaccctggagtgggacccccccagccaccccaacggcatcctgaccgagtacaccctgaagtaccagcccatcaacagcacccacgagctgggccccctggtggacctgaagatccccgccaacaagaccagatggaccctgaagaacctgaacttcagcaccagatacaagttctacttctacgcccagaccagcgccggcagcggcagccagatcaccgaggaggccgtgaccaccgtggacgaggccatggccagcagacaggtggacatcgccacccagggctggttcatcggcctgatgtgcgccgtggccctgctgatcctgatcctgctgatcgtgtgcttcatcagaagaaacaagggcggcaagtaccccgtgaaggagaaggaggacgcccacgccgaccccgagatccagcccatgaaggaggacgacggcaccttcggcgagtacagcgacgccgaggaccacaagcccctgaagaagggcagcagaacccccagcgacagaaccgtgaagaaggaggacagcgacgacagcctggtggactacggcgagggcgtgaacggccagttcaacgaggacggcagcttcatcggccagtacagcggcaagaaggagaaggagcccgccgagggcaacgagagcagcgaggcccccagccccgtgaacgccatgaacagcttcgtgtag

SEQ ID NO: 90902 - DNA, 1296 bp, synthetic construct
  misc_feature 1..1296: note = Description of Artificial Sequence: Synthetic coding sequence
  source 1..1296: mol_type = other DNA
atgcagctgaagatcatgcccaagaagaagagactgagcgccggcagagtgcccctgatcctgttcctgtgccagatgatcagcgccctggaggtgcccctggacctggtgcagccccccaccatcacccagcagagccccaaggactacatcatcgaccccagagagaacatcgtgatccagtgcgaggccaagggcaagcccccccccagcttcagctggaccagaaacggcacccacttcgacatcgacaaggaccccctggtgaccatgaagcccggcaccggcaccctgatcatcaacatcatgagcgagggcaaggccgagacctacgagggcgtgtaccagtgcaccgccagaaacgagagaggcgccgccgtgagcaacaacatcgtggtgagacccagcagaagccccctgtggaccaaggagaagctggagcccatcaccctgcagagcggccagagcctggtgctgccctgcagaccccccatcggcctgcccccccccatcatcttctggatggacaacagcttccagagactgccccagagcgagagagtgagccagggcctgaacggcgacctgtacttcagcaacgtgctgcccgaggacaccagagaggactacatctgctacgccagattcaaccacacccagaccatccagcagaagcagcccatcagcgtgaaggtgatcagcgtggacgagctgaacgacaccatcgccgccaacctgagcgacaccgagttctacggcgccaagagcagcagagagagaccccccaccttcctgacccccgagggcaacgccagcaacaaggaggagctgagaggcaacgtgctgagcctggagtgcatcgccgagggcctgcccacccccatcatctactgggccaaggaggacggcatgctgcccaagaacagaaccgtgtacaagaacttcgagaagaccctgcagatcatccacgtgagcgaggccgacagcggcaactaccagtgcatcgccaagaacgccctgggcgccatccaccacaccatcagcgtgagagtgaaggccgccccctactggatcaccgccccccagaacctggtgctgagccccggcgaggacggcaccctgatctgcagagccaacggcaaccccaagcccagaatcagctggctgaccaacggcgtgcccatcgagatcgcccccgacgaccccagcagaaagatcgacggcgacaccatcatcttcagcaacgtgcaggagagaagcagcgccgtgtaccagtgcaacgccagcaacgagtag

SEQ ID NO: 90903 - DNA, 186 bp, synthetic construct
  misc_feature 1..186: note = Description of Artificial Sequence: Synthetic coding sequence
  source 1..186: mol_type = other DNA
atgcagctgaagatcatgcccaagaagaagagactgagcgccggcagagtgcccctgatcctgttcctgtgccagatgatcagcgccctggaggtgcccctggaccccaagctgctggaggacctggtgcagccccccaccatcacccagcagagccccaaggactacatcatcgaccccagatag

SEQ ID NO: 90904 - DNA, 321 bp, synthetic construct
  misc_feature 1..321: note = Description of Artificial Sequence: Synthetic coding sequence
  source 1..321: mol_type = other DNA
atgcagctgaagatcatgcccaagaagaagagactgagcgccggcagagtgcccctgatcctgttcctgtgccagatgatcagcgccctggaggtgcccctggacctggtgcagccccccaccatcacccagcagagccccaaggactacatcatcgaccccagagagaacatcgtgatccagtgcgaggccaagggcaagcccccccccagcttcagctggaccagaaacggcacccacttcgacatcgacaaggaccccctggtgaccatgaagcccggcaccggcaccctgatcatcaacatcatgagcgagggctag

SEQ ID NO: 90905 - DNA, 3915 bp, synthetic construct; identical to SEQ ID NO: 90899
  misc_feature 1..3915: note = Description of Artificial Sequence: Synthetic coding sequence
  source 1..3915: mol_type = other DNA

SEQ ID NO: 90906 - DNA, 447 bp, synthetic construct
  misc_feature 1..447: note = Description of Artificial Sequence: Synthetic coding sequence
  source 1..447: mol_type = other DNA
atggccagcagacaggtggacatcgccacccagggctggttcatcggcctgatgtgcgccgtggccctgctgatcctgatcctgctgatcgtgtgcttcatcagaagaaacaagggcggcaagtaccccgtgaaggagaaggaggacgcccacgccgaccccgagatccagcccatgaaggaggacgacggcaccttcggcgagtacagcgacgccgaggaccacaagcccctgaagaagggcagcagaacccccagcgacagaaccgtgaagaaggaggacagcgacgacagcctggtggactacggcgagggcgtgaacggccagttcaacgaggacggcagcttcatcggccagtacagcggcaagaaggagaaggagcccgccgagggcaacgagagcagcgaggcccccagccccgtgaacgccatgaacagcttcgtgtag

SEQ ID NO: 90907 - DNA, 357 bp, synthetic construct
  misc_feature 1..357: note = Description of Artificial Sequence: Synthetic coding sequence
  source 1..357: mol_type = other DNA
atgcagctgaagatcatgcccaagaagaagagactgagcgccggcagagtgcccctgatcctgttcctgtgccagatgatcagcgccctggaggtgcccctggaccccaagctgctggaggacctggtgcagccccccaccatcacccagcagagccccaaggactacatcatcgaccccagagagaacatcgtgatccagtgcgaggccaagggcaagcccccccccagcttcagctggaccagaaacggcacccacttcgacatcgacaaggaccccctggtgaccatgaagcccggcaccggcaccctgatcatcaacatcatgagcgagggcaaggccgagacctacgagtag

SEQ ID NO: 90908 - DNA, 2316 bp, synthetic construct
  misc_feature 1..2316: note = Description of Artificial Sequence: Synthetic coding sequence
  source 1..2316: mol_type = other DNA
atgcagctgaagatcatgcccaagaagaagagactgagcgccggcagagtgcccctgatcctgttcctgtgccagatgatcagcgccctggaggtgcccctggacctggtgcagccccccaccatcacccagcagagccccaaggactacatcatcgaccccagagagaacatcgtgatccagtgcgaggccaagggcaagcccccccccagcttcagctggaccagaaacggcacccacttcgacatcgacaaggaccccctggtgaccatgaagcccggcaccggcaccctgatcatcaacatcatgagcgagggcaaggccgagacctacgagggcgtgtaccagtgcaccgccagaaacgagagaggcgccgccgtgagcaacaacatcgtggtgagacccagcagaagccccctgtggaccaaggagaagctggagcccatcaccctgcagagcggccagagcctggtgctgccctgcagaccccccatcggcctgcccccccccatcatcttctggatggacaacagcttccagagactgccccagagcgagagagtgagccagggcctgaacggcgacctgtacttcagcaacgtgctgcccgaggacaccagagaggactacatctgctacgccagattcaaccacacccagaccatccagcagaagcagcccatcagcgtgaaggtgatcagcgtggacgagctgaacgacaccatcgccgccaacctgagcgacaccgagttctacggcgccaagagcagcagagagagaccccccaccttcctgacccccgagggcaacgccagcaacaaggaggagctgagaggcaacgtgctgagcctggagtgcatcgccgagggcctgcccacccccatcatctactgggccaaggaggacggcatgctgcccaagaacagaaccgtgtacaagaacttcgagaagaccctgcagatcatccacgtgagcgaggccgacagcggcaactaccagtgcatcgccaagaacgccctgggcgccatccaccacaccatcagcgtgagagtgaaggccgccccctactggatcaccgccccccagaacctggtgctgagccccggcgaggacggcaccctgatctgcagagccaacggcaaccccaagcccagaatcagctggctgaccaacggcgtgcccatcgagatcgcccccgacgaccccagcagaaagatcgacggcgacaccatcatcttcagcaacgtgcaggagagaagcagcgccgtgtaccagtgcaacgccagcaacgagtacggctacctgctggccaacgccttcgtgaacgtgctggccgagccccccagaatcctgacccccgccaacaccctgtaccaggtgatcgccaacagacccgccctgctggactgcgccttcttcggcagccccctgcccaccatcgagtggttcaagggcgccaagggcagcgccctgcacgaggacatctacgtgctgcacgagaacggcaccctggagatccccgtggcccagaaggacagcaccggcacctacacctgcgtggccagaaacaagctgggcatggccaagaacgaggtgcacctggagatcaaggaccccacctggatcgtgaagcagcccgagtacgccgtggtgcagagaggcagcatggtgagcttcgagtgcaaggtgaagcacgaccacaccctgagcctgaccgtgctgtggctgaaggacaacagagagctgcccagcgacgagagattcaccgtggacaaggaccacctggtggtggccgacgtgagcgacgacgacagcggcacctacacctgcgtggccaacaccaccctggacagcgtgagcgccagcgccgtgctgagcgtggtggacgtgcccaacccccccttcgacctggagctgaccgaccagctggacaagagcgtgcagctgagctggacccccggcgacgacaacaacagccccatcaccaagttcatcatcgagtacgaggacgccatgcacaagcccggcctgtggcaccaccagaccgaggtgagcggcacccagaccaccgcccagctgaagctgagcccctacgtgaactacagcttcagagtgatggccgtgaacagcatcggcaagagcctgcccagcgaggccagcgagcagtacctgaccaaggccagcgagcccgacaagaaccccaccgccgtggagggcctgggcagcgagcccgacaacctggtgatcacctggaagcccctgaacggcttcgagagcaacggccccggcctgcagaccagcaccgccagcttctag

SEQ ID NO: 90909 - DNA, 321 bp, synthetic construct; identical to SEQ ID NO: 90904
  misc_feature 1..321: note = Description of Artificial Sequence: Synthetic coding sequence
  source 1..321: mol_type = other DNA

SEQ ID NO: 90910 - DNA, 3462 bp, synthetic construct
  misc_feature 1..3462: note = Description of Artificial Sequence: Synthetic coding sequence
  source 1..3462: mol_type = other DNA
atgcagctgaagatcatgcccaagaagaagagactgagcgccggcagagtgcccctgatcctgttcctgtgccagatgatcagcgccctggaggtgcccctggaccagaagagcaccgaggtgatggtgcagccccccaccatcacccagcagagccccaaggactacatcatcgaccccagagagaacatcgtgatccagtgcgaggccaagggcaagcccccccccagcttcagctggaccagaaacggcacccacttcgacatcgacaaggaccccctggtgaccatgaagcccggcaccggcaccctgatcatcaacatcatgagcgagggcaaggccgagacctacgagggcgtgtaccagtgcaccgccagaaacgagagaggcgccgccgtgagcaacaacatcgtggtgagacccagcagaagccccctgtggaccaaggagaagctggagcccatcaccctgcagagcggccagagcctggtgctgccctgcagaccccccatcggcctgcccccccccatcatcttctggatggacaacagcttccagagactgccccagagcgagagagtgagccagggcctgaacggcgacctgtacttcagcaacgtgctgcccgaggacaccagagaggactacatctgctacgccagattcaaccacacccagaccatccagcagaagcagcccatcagcgtgaaggtgatcagcgtggacgagctgaacgacaccatcgccgccaacctgagcgacaccgagttctacggcgccaagagcagcagagagagaccccccaccttcctgacccccgagggcaacgccagcaacaaggaggagctgagaggcaacgtgctgagcctggagtgcatcgccgagggcctgcccacccccatcatctactgggccaaggaggacggcatgctgcccaagaacagaaccgtgtacaagaacttcgagaagaccctgcagatcatccacgtgagcgaggccgacagcggcaactaccagtgcatcgccaagaacgccctgggcgccatccaccacaccatcagcgtgagagtgaaggccgccccctactggatcaccgccccccagaacctggtgctgagccccggcgaggacggcaccctgatctgcagagccaacggcaaccccaagcccagaatcagctggctgaccaacggcgtgcccatcgagatcgcccccgacgaccccagcagaaagatcgacggcgacaccatcatcttcagcaacgtgcaggagagaagcagcgccgtgtaccagtgcaacgccagcaacgagtacggctacctgctggccaacgccttcgtgaacgtgctggccgagccccccagaatcctgacccccgccaacaccctgtaccaggtgatcgccaacagacccgccctgctggactgcgccttcttcggcagccccctgcccaccatcgagtggttcaagggcgccaagggcagcgccctgcacgaggacatctacgtgctgcacgagaacggcaccctggagatccccgtggcccagaaggacagcaccggcacctacacctgcgtggccagaaacaagctgggcatggccaagaacgaggtgcacctggagatcaaggaccccacctggatcgtgaagcagcccgagtacgccgtggtgcagagaggcagcatggtgagcttcgagtgcaaggtgaagcacgaccacaccctgagcctgaccgtgctgtggctgaaggacaacagagagctgcccagcgacgagagattcaccgtggacaaggaccacctggtggtggccgacgtgagcgacgacgacagcggcacctacacctgcgtggccaacaccaccctggacagcgtgagcgccagcgccgtgctgagcgtggtggcccccacccccacccccgcccccgtgtacgacgtgcccaacccccccttcgacctggagctgaccgaccagctggacaagagcgtgcagctgagctggacccccggcgacgacaacaacagccccatcaccaagttcatcatcgagtacgaggacgccatgcacaagcccggcctgtggcaccaccagaccgaggtgagcggcacccagaccaccgcccagctgaagctgagcccctacgtgaactacagcttcagagtgatggccgtgaacagcatcggcaagagcctgcccagcgaggccagcgagcagtacctgaccaaggccagcgagcccgacaagaaccccaccgccgtggagggcctgggcagcgagcccgacaacctggtgatcacctggaagcccctgaacggcttcgagagcaacggccccggcctgcagtacaaggtgagctggagacagaaggacggcgacgacgagtggaccagcgtggtggtggccaacgtgagcaagtacatcgtgagcggcacccccaccttcgtgccctacctgatcaaggtgcaggccctgaacgacatgggcttcgcccccgagcccgccgtggtgatgggccacagcggcgaggacctgcccatggtggcccccggcaacgtgagagtgaacgtggtgaacagcaccctggccgaggtgcactgggaccccgtgcccctgaagagcatcagaggccacctgcagggctacagaatctactactggaagacccagagcagcagcaagagaaacagaagacacatcgagaagaagatcctgaccttccagggcagcaagacccacggcatgctgcccggcctggagcccttcagccactacaccctgaacgtgagagtggtgaacggcaagggcgagggccccgccagccccgacagagtgttcaacacccccgagggcgtgcccagcgcccccagcagcctgaagatcgtgaaccccaccctggacagcctgaccctggagtgggacccccccagccaccccaacggcatcctgaccgagtacaccctgaagtaccagcccatcaacagcacccacgagctgggccccctggtggacctgaagatccccgccaacaagaccagatggaccctgaagaacctgaacttcagcaccagatacaagttctacttctacgcccagaccagcgccggcagcggcagccagatcaccgaggaggccgtgaccaccgtggacgaggccggcatcctgccccccgacgtgggcgccggcaaggccatggccagcagacaggtggacatcgccacccagggctggttcatcggcctgatgtgcgccgtggccctgctgatcctgatcctgctgatcgtgtgcttcatcagaagaaacaagggcggcaagtaccccgtgaaggagaaggaggacgcccacgccgaccccgagatccagcccatgaaggaggacgacggcaccttcggcgagtacagcgacgccgaggaccacaagcccctgaagaagggcagcagaacccccagcgacagaaccgtgtag

SEQ ID NO: 90911 - DNA, 681 bp, synthetic construct
  misc_feature 1..681: note = Description of Artificial Sequence: Synthetic coding sequence
  source 1..681: mol_type = other DNA
atgcaggtgcacctgaccgtgcaggtgccccccaagatctacgacatcagcaacgacatgaccgtgaacgagggcaccaacgtgaccctgacctgcctggccaccggcaagcccgagcccagcatcagctggagacacatcagccccagcgccaagcccttcgagaacggccagtacctggacatctacggcatcaccagagaccaggccggcgagtacgagtgcagcgccgagaacgacgtgagcttccccgacgtgagaaaggtgaaggtggtggtgaacttcgcccccaccatccaggagatcaagagcggcaccgtgacccccggcagaagcggcctgatcagatgcgagggcgccggcgtgcccccccccgccttcgagtggtacaagggcgagaagaagctgttcaacggccagcagggcatcatcatccagaacttcagcaccagaagcatcctgaccgtgaccaacgtgacccaggagcacttcggcaactacacctgcgtggccgccaacaagctgggcaccaccaacgccagcctgcccctgaacccccccagcaccgcccagtacggcatcaccggcagcgccgacgtgctgttcagctgctggtacctggtgctgaccctgagcagcttcaccagcatcttctacctgaagaacgccatcctgcagtag

SEQ ID NO: 90912 - DNA, 1065 bp, synthetic construct
  misc_feature 1..1065: note = Description of Artificial Sequence: Synthetic coding sequence
  source 1..1065: mol_type = other DNA
atggacatgatgctgctggtgcagggcgcctgctgcagcaaccagtggctggccgccgtgctgctgagcctgtgctgcctgctgcccagctgcctgcccgccggccagagcgtggacttcccctgggccgccgtggacaacatgatggtgagaaagggcgacaccgccgtgctgagatgctacctggaggacggcgccagcaagggcgcctggctgaacagaagcagcatcatcttcgccggcggcgacaagtggagcgtggaccccagagtgagcatcagcaccctgaacaagagagactacagcctgcagatccagaacgtggacgtgaccgacgacggcccctacacctgcagcgtgcagacccagcacacccccagaaccatgcaggtgcacctgaccgtgcaggtgccccccaagatctacgacatcagcaacgacatgaccgtgaacgagggcaccaacgtgaccctgacctgcctggccaccggcaagcccgagcccagcatcagctggagacacatcagccccagcgccaagcccttcgagaacggccagtacctggacatctacggcatcaccagagaccaggccggcgagtacgagtgcagcgccgagaacgacgtgagcttccccgacgtgagaaaggtgaaggtggtggtgaacttcgcccccaccatccaggagatcaagagcggcaccgtgacccccggcagaagcggcctgatcagatgcgagggcgccggcgtgcccccccccgccttcgagtggtacaagggcgagaagaagctgttcaacggccagcagggcatcatcatccagaacttcagcaccagaagcatcctgaccgtgaccaacgtgacccaggagcacttcggcaactacacctgcgtggccgccaacaagctgggcaccaccaacgccagcctgcccctgaacccccccagcaccgcccagtacggcatcaccggcagcgccgacgtgctgttcagctgctggtacctggtgctgaccctgagcagcttcaccagcatcttctacctgaagaacgccatcctgcagtag

SEQ ID NO: 90913 - DNA, 927 bp, synthetic construct
  misc_feature 1..927: note = Description of Artificial Sequence: Synthetic coding sequence
  source 1..927: mol_type = other DNA
atgatgctgctggtgcagggcgcctgctgcagcaaccagtggctggccgccgtgctgctgagcctgtgctgcctgctgcccagctgcctgcccgccggccagagcgtggacttcccctgggccgccgtggacaacatgatggtgagaaagggcgacaccgccgtgctgagatgctacctggaggacggcgccagcaagggcgcctggctgaacagaagcagcatcatcttcgccggcggcgacaagtggagcgtggaccccagagtgagcatcagcaccctgaacaagagagactacagcctgcagatccagaacgtggacgtgaccgacgacggcccctacacctgcagcgtgcagacccagcacacccccagaaccatgcaggtgcacctgaccgtgcaggtgccccccaagatctacgacatcagcaacgacatgaccgtgaacgagggcaccaacgtgaccctgacctgcctggccaccggcaagcccgagcccagcatcagctggagacacatcagccccagcgtggcccccaccatccaggagatcaagagcggcaccgtgacccccggcagaagcggcctgatcagatgcgagggcgccggcgtgcccccccccgccttcgagtggtacaagggcgagaagaagctgttcaacggccagcagggcatcatcatccagaacttcagcaccagaagcatcctgaccgtgaccaacgtgacccaggagcacttcggcaactacacctgcgtggccgccaacaagctgggcaccaccaacgccagcctgcccctgaacccccccagcaccgcccagtacggcatcaccggcagcgccgacgtgctgttcagctgctggtacctggtgctgaccctgagcagcttcaccagcatcttctacctgaagaacgccatcctgcagtag

SEQ ID NO: 90914 - DNA, 2133 bp, synthetic construct
  misc_feature 1..2133: note = Description of Artificial Sequence: Synthetic coding sequence
  source 1..2133: mol_type = other DNA
atggagaccagagagagcgaggacctggagaagaccagaagaaagagcgccagcgaccagtggaacaccgacaacgagcccgccaaggtgaagcccgagctgctgcccgagaaggaggagaccagccaggccgaccaggacatccaggacaaggagccccactgccacatccccatcaagagaaacagcatcttcaacagaagcatcagaagaaagagcaaggccaaggccagagacaaccccgagagaaacgccagctgcctggccgacagccaggacaacggcaagagcgtgaacgagcccctgaccctgaacatcccctggagcagaatgcccccctgcagaaccgccatgcagaccgaccccggcgcccaggagatgagcgagagcagcagcacccccggcaacggcgccacccccgaggagtggcccgccctggccgacagccccaccaccctgaccgaggccctgagaatgatccaccccatccccgccgacagctggagaaacctgatcgagcagatcggcctgctgtaccaggagtacagagacaagagcaccctgcaggagatcgagaccagaagacagcaggacgccgagatcgaggacaacaccaacggcagccccgccagcgaggacacccccgaggaggaggaggaggaggaggaggaggaggagcccgccagcccccccgagagaaagaccctgccccagatctgcctgctgagcaacccccacagcagattcaacctgtggcaggacctgcccgagatcagaagcagcggcgtgctggagatcctgcagcccgaggagatcaagctgcaggaggccatgttcgagctggtgaccagcgaggccagctactacaagagcctgaacctgctggtgagccacttcatggagaacgagagaatcagaaagatcctgcaccccagcgaggcccacatcctgttcagcaacgtgctggacgtgctggccgtgagcgagagattcctgctggagctggagcacagaatggaggagaacatcgtgatcagcgacgtgtgcgacatcgtgtacagatacgccgccgaccacttcagcgtgtacatcacctacgtgagcaaccagacctaccaggagagaacctacaagcagctgctgcaggagaaggccgccttcagagagctgatcgcccagctggagctggaccccaagtgcagaggcctgcccttcagcagcttcctgatcctgcccttccagagaatcaccagactgaagctgctggtgcagaacatcctgaagagagtggaggagagaagcgagagagagtgcaccgccctggacgcccacaaggagctggagatggtggtgaaggcctgcaacgagggcgtgagaaagatgagcagaaccgagcagatgatcagcatccagaagaagatggagttcaagatcaagagcgtgcccatcatcagccacagcagatggctgctgaagcagggcgagctgcagcagatgagcggccccaagaccagcagaaccctgagaaccaagaagctgttccacgagatctacctgttcctgttcaacgacctgctggtgatctgcagacagatccccggcgacaagtaccaggtgttcgacagcgcccccagaggcctgctgagagtggaggagctggaggaccagggccagaccctggccaacgtgttcatcctgagactgctggagaacgccgacgacagagaggccacctacatgctgaaggccagcagccagagcgagatgaagagatggatgaccagcctggcccccaacagaagaaccaagttcgtgagcttcaccagcagactgctggactgcccccaggtgcagtgcgtgcacccctacgtggcccagcagcccgacgagctgaccctggagctggccgacatcctgaacatcctggacaagaccgacgacggctggatcttcggcgagagactgcacgaccaggagagaggctggttccccagcagcatgaccgaggagatcctgaaccccaagatcagaagccagaacctgaaggagtgcttcagagtgcacaagatggacgacccccagagaagccagaacaaggacagaagaaagctgggcagcagaaacagacagtag

SEQ ID NO: 90915 - DNA, 1857 bp, synthetic construct
  misc_feature 1..1857: note = Description of Artificial Sequence: Synthetic coding sequence
  source 1..1857: mol_type = other DNA
atggagctgctggccgccgccttcagcgccgcctgcgccgtggaccacgacagcagcaccagcgagagcgacgccagagacagcgccgccggccacctgcccggcagcgagagcagcagcacccccggcaacggcgccacccccgaggagtggcccgccctggccgacagccccaccaccctgaccgaggccctgagaatgatccaccccatccccgccgacagctggagaaacctgatcgagcagatcggcctgctgtaccaggagtacagagacaagagcaccctgcaggagatcgagaccagaagacagcaggacgccgagatcgaggacaacaccaacggcagccccgccagcgaggacacccccgaggaggaggaggaggaggaggaggaggaggagcccgccagcccccccgagagaaagaccctgccccagatctgcctgctgagcaacccccacagcagattcaacctgtggcaggacctgcccgagatcagaagcagcggcgtgctggagatcctgcagcccgaggagatcaagctgcaggaggccatgttcgagctggtgaccagcgaggccagctactacaagagcctgaacctgctggtgagccacttcatggagaacgagagaatcagaaagatcctgcaccccagcgaggcccacatcctgttcagcaacgtgctggacgtgctggccgtgagcgagagattcctgctggagctggagcacagaatggaggagaacatcgtgatcagcgacgtgtgcgacatcgtgtacagatacgccgccgaccacttcagcgtgtacatcacctacgtgagcaaccagacctaccaggagagaacctacaagcagctgctgcaggagaaggccgccttcagagagctgatcgcccagctggagctggaccccaagtgcagaggcctgcccttcagcagcttcctgatcctgcccttccagagaatcaccagactgaagctgctggtgcagaacatcctgaagagagtggaggagagaagcgagagagagtgcaccgccctggacgcccacaaggagctggagatggtggtgaaggcctgcaacgagggcgtgagaaagatgagcagaaccgagcagatgatcagcatccagaagaagatggagttcaagatcaagagcgtgcccatcatcagccacagcagatggctgctgaagcagggcgagctgcagcagatgagcggccccaagaccagcagaaccctgagaaccaagaagctgttccacgagatctacctgttcctgttcaacgacctgctggtgatctgcagacagatccccggcgacaagtaccaggtgttcgacagcgcccccagaggcctgctgagagtggaggagctggaggaccagggccagaccctggccaacgtgttcatcctgagactgctggagaacgccgacgacagagaggccacctacatgctgaaggccagcagccagagcgagatgaagagatggatgaccagcctggcccccaacagaagaaccaagttcgtgagcttcaccagcagactgctggactgcccccaggtgcagtgcgtgcacccctacgtggcccagcagcccgacgagctgaccctggagctggccgacatcctgaacatcctggacaagaccgacgacggctggatcttcggcgagagactgcacgaccaggagagaggctggttccccagcagcatgaccgaggagatcctgaaccccaagatcagaagccagaacctgaaggagtgcttcagagtgcacaagatggacgacccccagagaagccagaacaaggacagaagaaagctgggcagcagaaacagacagtag

SEQ ID NO: 90916 - DNA, 717 bp, synthetic construct
  misc_feature 1..717: note = Description of Artificial Sequence: Synthetic coding sequence
  source 1..717: mol_type = other DNA
atggagctgctggccgccgccttcagcgccgcctgcgccgtggaccacgacagcagcaccagcgagagcgacgccagagacagcgccgccggccacctgcccggcagcgagagcagcagcacccccggcaacggcgccacccccgaggagtggcccgccctggccgacagccccaccaccctgaccgaggccctgagaatgatccaccccatccccgccgacagctggagaaacctgatcgagcagatcggcctgctgtaccaggagtacagagacaagagcaccctgcaggagatcgagaccagaagacagcaggacgccgagatcgaggacaacaccaacggcagccccgccagcgaggacacccccgaggaggaggaggaggaggaggaggaggaggagcccgccagcccccccgagagaaagaccctgccccagatctgcctgctgagcaacccccacagcagattcaacctgtggcaggacctgcccgagatcagaagcagcggcgtgctggagatcctgcagcccgaggagatcaagctgcaggaggccatgttcgagctggtgaccagcgaggccagctactacaagagcctgaacctgctggtgagccacttcatggagaacgagagaatcagaaagatcctgcaccccagcgaggcccacatcctgttcagcaacgtgctggacgtgctggccgtgagcgagagatag

SEQ ID NO: 90917 - DNA, 1302 bp, synthetic construct
  misc_feature 1..1302: note = Description of Artificial Sequence: Synthetic coding sequence
  source 1..1302: mol_type = other DNA
atgttcgagctggtgaccagcgaggccagctactacaagagcctgaacctgctggtgagccacttcatggagaacgagagaatcagaaagatcctgcaccccagcgaggcccacatcctgttcagcaacgtgctggacgtgctggccgtgagcgagagattcctgctggagctggagcacagaatggaggagaacatcgtgatcagcgacgtgtgcgacatcgtgtacagatacgccgccgaccacttcagcgtgtacatcacctacgtgagcaaccagacctaccaggagagaacctacaagcagctgctgcaggagaaggccgccttcagagagctgatcgcccagctggagctggaccccaagtgcagaggcctgcccttcagcagcttcctgatcctgcccttccagagaatcaccagactgaagctgctggtgcagaacatcctgaagagagtggaggagagaagcgagagagagtgcaccgccctggacgcccacaaggagctggagatggtggtgaaggcctgcaacgagggcgtgagaaagatgagcagaaccgagcagatgatcagcatccagaagaagatggagttcaagatcaagagcgtgcccatcatcagccacagcagatggctgctgaagcagggcgagctgcagcagatgagcggccccaagaccagcagaaccctgagaaccaagaagctgttccacgagatctacctgttcctgttcaacgacctgctggtgatctgcagacagatccccggcgacaagtaccaggtgttcgacagcgcccccagaggcctgctgagagtggaggagctggaggaccagggccagaccctggccaacgtgttcatcctgagactgctggagaacgccgacgacagagaggccacctacatgctgaaggccagcagccagagcgagatgaagagatggatgaccagcctggcccccaacagaagaaccaagttcgtgagcttcaccagcagactgctggactgcccccaggtgcagtgcgtgcacccctacgtggcccagcagcccgacgagctgaccctggagctggccgacatcctgaacatcctggacaagaccgacgacggctggatcttcggcgagagactgcacgaccaggagagaggctggttccccagcagcatgaccgaggagatcctgaaccccaagatcagaagccagaacctgaaggagtgcttcagagtgcacaagatggacgacccccagagaagccagaacaaggacagaagaaagctgggcagcagaaacagacagtag

SEQ ID NO: 90918 - DNA, 1803 bp, synthetic construct
  misc_feature 1..1803: note = Description of Artificial Sequence: Synthetic coding sequence
  source 1..1803: mol_type = other DNA
atgcccccctgcagaaccgccatgcagaccgaccccggcgcccaggagatgagcgagagcagcagcacccccggcaacggcgccacccccgaggagtggcccgccctggccgacagccccaccaccctgaccgaggccctgagaatgatccaccccatccccgccgacagctggagaaacctgatcgagcagatcggcctgctgtaccaggagtacagagacaagagcaccctgcaggagatcgagaccagaagacagcaggacgccgagatcgaggacaacaccaacggcagccccgccagcgaggacacccccgaggaggaggaggaggaggaggaggaggaggagcccgccagcccccccgagagaaagaccctgccccagatctgcctgctgagcaacccccacagcagattcaacctgtggcaggacctgcccgagatcagaagcagcggcgtgctggagatcctgcagcccgaggagatcaagctgcaggaggccatgttcgagctggtgaccagcgaggccagctactacaagagcctgaacctgctggtgagccacttcatggagaacgagagaatcagaaagatcctgcaccccagcgaggcccacatcctgttcagcaacgtgctggacgtgctggccgtgagcgagagattcctgctggagctggagcacagaatggaggagaacatcgtgatcagcgacgtgtgcgacatcgtgtacagatacgccgccgaccacttcagcgtgtacatcacctacgtgagcaaccagacctaccaggagagaacctacaagcagctgctgcaggagaaggccgccttcagagagctgatcgcccagctggagctggaccccaagtgcagaggcctgcccttcagcagcttcctgatcctgcccttccagagaatcaccagactgaagctgctggtgcagaacatcctgaagagagtggaggagagaagcgagagagagtgcaccgccctggacgcccacaaggagctggagatggtggtgaaggcctgcaacgagggcgtgagaaagatgagcagaaccgagcagatgatcagcatccagaagaagatggagttcaagatcaagagcgtgcccatcatcagccacagcagatggctgctgaagcagggcgagctgcagcagatgagcggccccaagaccagcagaaccctgagaaccaagaagctgttccacgagatctacctgttcctgttcaacgacctgctggtgatctgcagacagatccccggcgacaagtaccaggtgttcgacagcgcccccagaggcctgctgagagtggaggagctggaggaccagggccagaccctggccaacgtgttcatcctgagactgctggagaacgccgacgacagagaggccacctacatgctgaaggccagcagccagagcgagatgaagagatggatgaccagcctggcccccaacagaagaaccaagttcgtgagcttcaccagcagactgctggactgcccccaggtgcagtgcgtgcacccctacgtggcccagcagcccgacgagctgaccctggagctggccgacatcctgaacatcctggacaagaccgacgacggctggatcttcggcgagagactgcacgaccaggagagaggctggttccccagcagcatgaccgaggagatcctgaaccccaagatcagaagccagaacctgaaggagtgcttcagagtgcacaagatggacgacccccagagaagccagaacaaggacagaagaaagctgggcagcagaaacagacagtag

SEQ ID NO: 90919 - DNA, 705 bp, synthetic construct
  misc_feature 1..705: note = Description of Artificial Sequence: Synthetic coding sequence
  source 1..705: mol_type = other DNA
atgaccggcagcagcgtgttcgactacatccaccccggcgaccacagcgaggtgctggagcagctgggcctgagaacccccacccccggcccccccaccccccccagcgtgagcagcagcagcagcagcagcagcagcctggccgacacccccgagatcgaggccagcctgaccaaggtgccccccagcagcctggtgcaggagagaagcttcttcgtgagaatgaagagcaccctgaccaagagaggcctgcacgtgaaggccagcggctacaaggtgatccacgtgaccggcagactgagagcccacgccctgggcctggtggccctgggccacaccctgccccccgcccccctggccgagctgcccctgcacggccacatgatcgtgttcagactgagcctgggcctgaccatcctggcctgcgagagcagagtgagcgaccacatggacctgggccccagcgagctggtgggcagaagctgctaccagttcgtgcacggccaggacgccaccagaatcagacagagccacgtggacagctgcagaggcctgagagtggccgccgtgtgcggccacagcggctgggagagagaggagcccagaggcgccccctgcgccctgggccagcccagagcccagcccagcagaggctggcccaacagcttcggctgcctgcccgccagcagccagagaggcctgtag

SEQ ID NO: 90920 - DNA, 1773 bp, synthetic construct
  misc_feature 1..1773: note = Description of Artificial Sequence: Synthetic coding sequence
  source 1..1773: mol_type = other DNA
atggccgccccctaccccggcagcggcggcggcagcgaggtgaagtgcgtgggcggcagaggcgccagcgtgccctgggacttcctgcccggcctgatggtgaaggcccccagcggcccctgcctgcaggcccagagaaaggagaagagcagaaacgccgccagaagcagaagaggcaaggagaacctggagttcttcgagctggccaagctgctgcccctgcccggcgccatcagcagccagctggacaaggccagcatcgtgagactgagcgtgacctacctgagactgagaagattcgccgccctgggcgcccccccctggggcctgagagccgccggcccccccgccggcctggcccccggcagaagaggccccgccgccctggtgagcgaggtgttcgagcagcacctgggcggccacatcctgcagagcctggacggcttcgtgttcgccctgaaccaggagggcaagttcctgtacatcagcgagaccgtgagcatctacctgggcctgagccaggtggagatgaccggcagcagcgtgttcgactacatccaccccggcgaccacagcgaggtgctggagcagctgggcctgagaacccccacccccggcccccccaccccccccagcgtgagcagcagcagcagcagcagcagcagcctggccgacacccccgagatcgaggccagcctgaccaaggtgccccccagcagcctggtgcaggagagaagcttcttcgtgagaatgaagagcaccctgaccaagagaggcctgcacgtgaaggccagcggctacaaggtgatccacgtgaccggcagactgagagcccacgccctgggcctggtggccctgggccacaccctgccccccgcccccctggccgagctgcccctgcacggccacatgatcgtgttcagactgagcctgggcctgaccatcctggcctgcgagagcagagtgagcgaccacatggacctgggccccagcgagctggtgggcagaagctgctaccagttcgtgcacggccaggacgccaccagaatcagacagagccacgtggacctgctggacaagggccaggtgatgaccggctactacagatggctgcagagagccggcggcttcgtgtggctgcagagcgtggccaccgtggccggcagcggcaagagccccggcgagcaccacgtgctgtgggtgagccacgtgctgagccaggccgagggcggccagacccccctggacgccttccagctgcccgccagcgtggcctgcgaggaggccagcagccccggccccgagcccaccgagcccgagccccccaccgagggcaagcaggccgcccccgccgagaacgaggccccccagacccagggcaagagaatcaaggtggagcccggccccagagagaccaagggcagcgaggacagcggcgacgaggaccccagcagccaccccgccacccccagacccgagttcaccagcgtgatcagagccggcgtgctgaagcaggaccccgtgagaccctggggcctggccccccccggcgaccccccccccaccctgctgcacgccggcttcctgccccccgtggtgagaggcctgtgcacccccggcaccatcagatacggccccgccgagctgggcctggtgtacccccacctgcagagactgggccccggccccgccctgcccgaggccttctacccccccctgggcctgccctaccccggccccgccggcaccagactgcccagaaagggcgactag

SEQ ID NO: 90921 - DNA, 2475 bp, synthetic construct
  misc_feature 1..2475: note = Description of Artificial Sequence: Synthetic coding sequence
  source 1..2475: mol_type = other DNA
atggacgaggacgagaaggacagagccaagagagccagcagaaacaagagcgagaagaagagaagagaccagttcaacgtgctgatcaaggagctgagcagcatgctgcccggcaacaccagaaagatggacaagaccaccgtgctggagaaggtgatcggcttcctgcagaagcacaacgaggtgagcgcccagaccgagatctgcgacatccagcaggactggaagcccagcttcctgagcaacgaggagttcacccagctgatgctggaggccctggacggcttcatcatcgccgtgaccaccgacggcagcatcatctacgtgagcgacagcatcacccccctgctgggccacctgcccagcgacgtgatggaccagaacctgctgaacttcctgcccgagcaggagcacagcgaggtgtacaagatcctgagcagccacatgctggtgaccgacagccccagccccgagtacctgaagagcgacagcgacctggagttctactgccacctgctgagaggcagcctgaaccccaaggagttccccacctacgagtacatcaagttcgtgggcaacttcagaagctacaacaacgtgcccagccccagctgcaacggcttcgacaacaccctgagcagaccctgcagagtgcccctgggcaaggaggtgtgcttcatcgccaccgtgagactggccaccccccagttcctgaaggagatgtgcatcgtggacgagcccctggaggagttcaccagcagacacagcctggagtggaagttcctgttcctggaccacagagccccccccatcatcggctacctgcccttcgaggtgctgggcaccagcggctacgactactaccacatcgacgacctggagctgctggccagatgccaccagcacctgatgcagttcggcaagggcaagagctgctgctacagattcctgaccaagggccagcagtggatctggctgcagacccactactacatcacctaccaccagtggaacagcaagcccgagttcatcgtgtgcacccacagcgtggtgagctacgccgacgtgagagtggagagaagacaggagctggccctggaggacccccccagcgaggccctgcacagcagcgccctgaaggacaagggcagcagcctggagcccagacagcacttcaacaccctggacgtgggcgccagcggcctgaacaccagccacagccccagcgccagcagcagaagcagccacaagagcagccacaccgccatgagcgagcccaccagcacccccaccaagctgatggccgaggccagcacccccgccctgcccagaagcgccaccctgccccaggagctgcccgtgcccggcctgagccaggccgccaccatgcccgcccccctgcccagccccagcagctgcgacctgacccagcagctgctgccccagaccgtgctgcagagcacccccgcccccatggcccagttcagcgcccagttcagcatgttccagaccatcaaggaccagctggagcagagaaccagaatcctgcaggccaacatcagatggcagcaggaggagctgcacaagatccaggagcagctgtgcctggtgcaggacagcaacgtgcagatgttcctgcagcagcccgccgtgagcctgagcttcagcagcacccagagacccgaggcccagcagcagctgcagcagagaagcgccgccgtgacccagccccagctgggcgccggcccccagctgcccggccagatcagcagcgcccaggtgaccagccagcacctgctgagagagagcagcgtgatcagcacccagggccccaagcccatgagaagcagccagctgatgcagagcagcggcagaagcggcagcagcctggtgagccccttcagcagcgccaccgccgccctgccccccagcctgaacctgaccacccccgccagcaccagccaggacgccagccagtgccagcccagccccgacttcagccacgacagacagctgagactgctgctgagccagcccatccagcccatgatgcccggcagctgcgacgccagacagcccagcgaggtgagcagaaccggcagacaggtgaagtacgcccagagccagaccgtgttccagaaccccgacgcccaccccgccaacagcagcagcgcccccatgcccgtgctgctgatgggccaggccgtgctgcaccccagcttccccgccagccagcccagccccctgcagcccgcccaggccagacagcagcccccccagcactacctgcaggtgcaggcccccaccagcctgcacagcgagcagcaggacagcctgctgctgagcacctacagccagcagcccggcaccctgggctacccccagcccccccccgcccagccccagcccctgagaccccccagaagagtgagcagcctgagcgagagcagcggcctgcagcagccccccagatag

SEQ ID NO: 90922 - DNA, 2670 bp, synthetic construct
  misc_feature 1..2670: note = Description of Artificial Sequence: Synthetic coding sequence
  source 1..2670: mol_type = other DNA
atgtacgcctacggcttcgtgggcagatgcgcccccttccccgccgaggagggcagaaccttcgacctgagcgaggagctgggcagaagcgtgaccagagagggcaccggcaccaccagactgaacagcgagcccgtgcccctgctgtgcctgcccctgctgaactgcagcagaaagaactgcatcgagaacctgatggacgaggacgagaaggacagagccaagagagccagcagaaacaagagcgagaagaagagaagagaccagttcaacgtgctgatcaaggagctgagcagcatgctgcccggcaacaccagaaagatggacaagaccaccgtgctggagaaggtgatcggcttcctgcagaagcacaacgaggtgagcgcccagaccgagatctgcgacatccagcaggactggaagcccagcttcctgagcaacgaggagttcacccagctgatgctggaggccctggacggcttcatcatcgccgtgaccaccgacggcagcatcatctacgtgagcgacagcatcacccccctgctgggccacctgcccagcgacgtgatggaccagaacctgctgaacttcctgcccgagcaggagcacagcgaggtgtacaagatcctgagcagccacatgctggtgaccgacagccccagccccgagtacctgaagagcgacagcgacctggagttctactgccacctgctgagaggcagcctgaaccccaaggagttccccacctacgagtacatcaagttcgtgggcaacttcagaagctacaacaacgtgcccagccccagctgcaacggcttcgacaacaccctgagcagaccctgcagagtgcccctgggcaaggaggtgtgcttcatcgccaccgtgagactggccaccccccagttcctgaaggagatgtgcatcgtggacgagcccctggaggagttcaccagcagacacagcctggagtggaagttcctgttcctggaccacagagccccccccatcatcggctacctgcccttcgaggtgctgggcaccagcggctacgactactaccacatcgacgacctggagctgctggccagatgccaccagcacctgatgcagttcggcaagggcaagagctgctgctacagattcctgaccaagggccagcagtggatctggctgcagacccactactacatcacctaccaccagtggaacagcaagcccgagttcatcgtgtgcacccacagcgtggtgagctacgccgacgtgagagtggagagaagacaggagctggccctggaggacccccccagcgaggccctgcacagcagcgccctgaaggacaagggcagcagcctggagcccagacagcacttcaacaccctggacgtgggcgccagcggcctgaacaccagccacagccccagcgccagcagcagaagcagccacaagagcagccacaccgccatgagcgagcccaccagcacccccaccaagctgatggccgaggccagcacccccgccctgcccagaagcgccaccctgccccaggagctgcccgtgcccggcctgagccaggccgccaccatgcccgcccccctgcccagccccagcagctgcgacctgacccagcagctgctgccccagaccgtgctgcagagcacccccgcccccatggcccagttcagcgcccagttcagcatgttccagaccatcaaggaccagctggagcagagaaccagaatcctgcaggccaacatcagatggcagcaggaggagctgcacaagatccaggagcagctgtgcctggtgcaggacagcaacgtgcagatgttcctgcagcagcccgccgtgagcctgagcttcagcagcacccagagacccgaggcccagcagcagctgcagcagagaagcgccgccgtgacccagccccagctgggcgccggcccccagctgcccggccagatcagcagcgcccaggtgaccagccagcacctgctgagagagagcagcgtgatcagcacccagggccccaagcccatgagaagcagccagctgatgcagagcagcggcagaagcggcagcagcctggtgagccccttcagcagcgccaccgccgccctgccccccagcctgaacctgaccacccccgccagcaccagccaggacgccagccagtgccagcccagccccgacttcagccacgacagacagctgagactgctgctgagccagcccatccagcccatgatgcccggcagctgcgacgccagacagcccagcgaggtgagcagaaccggcagacaggtgaagtacgcccagagccagaccgtgttccagaaccccgacgcccaccccgccaacagcagcagcgcccccatgcccgtgctgctgatgggccaggccgtgctgcaccccagcttccccgccagccagcccagccccctgcagcccgcccaggccagacagcagcccccccagcactacctgcaggtgcaggcccccaccagcctgcacagcgagcagcaggacagcctgctgctgagcacctacagccagcagcccggcaccctgggctacccccagcccccccccgcccagccccagcccctgagaccccccagaagagtgagcagcctgagcgagagcagcggcctgcagcagccccccagatag

SEQ ID NO: 90923 - DNA, 774 bp, synthetic construct
  misc_feature 1..774: note = Description of Artificial Sequence: Synthetic coding sequence
  source 1..774: mol_type = other DNA
atggcccccaccaagcccagcttccagcaggaccccagcagaagagagagaatcaccgcccagcaccccctgcccaaccagagcgagtgcagaaagatctacagatacgacggcatctactgcgagagcacctaccagaacctgcaggccctgagaaaggagaagagcagagacgccgccagaagcagaagaggcaaggagaacttcgagttctacgagctggccaagctgctgcccctgcccgccgccatcaccagccagctggacaaggccagcatcatcagactgaccatcagctacctgaagatgagagacttcgccaaccagggcgaccccccctggaacctgagaatggagggccccccccccaacaccagcgtgaaggtgatcggcgcccagagaagaagaagccccagcgccctggccatcgaggtgttcgaggcccacctgggcagccacatcctgcagagcctggacggcttcgtgttcgccctgaaccaggagggcaagttcctgtacatcagcgagaccgtgagcatctacctgggcctgagccaggtggagctgaccggcagcagcgtgttcgactacgtgcaccccggcgaccacgtggagatggccgagcagctgggcatgaagctgccccccggcagaggcctgctgagccagggcaccgccgaggacggcgccagcagcgccagcagcagcagccagagcgagacccccgagcccgtggtgtgcttcccccccgccagcgaccagttcctgctgtag

SEQ ID NO: 90924 - DNA, 2706 bp, synthetic construct
  misc_feature 1..2706: note = Description of Artificial Sequence: Synthetic coding sequence
  source 1..2706: mol_type = other DNA
atggcccccaccaagcccagcttccagcaggaccccagcagaagagagagactgcaggccctgagaaaggagaagagcagagacgccgccagaagcagaagaggcaaggagaacttcgagttctacgagctggccaagctgctgcccctgcccgccgccatcaccagccagctggacaaggccagcatcatcagactgaccatcagctacctgaagatgagagacttcgccaaccagggcgaccccccctggaacctgagaatggagggccccccccccaacaccagcgtgaagggcgcccagagaagaagaagccccagcgccctggccatcgaggtgttcgaggcccacctgggcagccacatcctgcagagcctggacggcttcgtgttcgccctgaaccaggagggcaagttcctgtacatcagcgagaccgtgagcatctacctgggcctgagccaggtggagctgaccggcagcagcgtgttcgactacgtgcaccccggcgaccacgtggagatggccgagcagctgggcatgaagctgccccccggcagaggcctgctgagccagggcaccgccgaggacggcgccagcagcgccagcagcagcagccagagcgagacccccgagcccgtggagagcaccagccccagcctgctgaccaccgacaacaccctggagagaagcttcttcatcagaatgaagagcaccctgaccaagagaggcgtgcacatcaagagcagcggctacaaggtgatccacatcaccggcagactgagactgagagtgagcctgagccacggcagaaccgtgcccagccagatcatgggcctggtggtggtggcccacgccctgcccccccccaccatcaacgaggtgagaatcgactgccacatgttcgtgaccagagtgaacatggacctgaacatcatctactgcgagaacagaatcagcgactacatggacctgacccccgtggacatcgtgggcaagagatgctaccacttcatccacgccgaggacgtggagggcatcagacacagccacctggacctgctgaacaagggccagtgcgtgaccaagtactacagatggatgcagaagaacggcggctacatctggatccagagcagcgccaccatcgccatcaacgccaagaacgccaacgagaagaacatcatctgggtgaactacctgctgagcaaccccgagtacaaggacacccccatggacatcgcccagctgccccacctgcccgagaagaccagcgagagcagcgagaccagcgacagcgagagcgacagcaaggacaccagcggcatcaccgaggacaacgagaacagcaagagcgacgagaagggcaaccagagcgagaacagcgaggaccccgagcccgacagaaagaagagcggcaacgcctgcgacaacgacatgaactgcaacgacgacggccacagcagcagcaaccccgacagcagagacagcgacgacagcttcgagcacagcgacttcgagaaccccaaggccggcgaggacggcttcggcgccctgggcgccatgcagatcaaggtggagagatacgtggagagcgagagcgacctgagactgcagaactgcgagagcctgaccagcgacagcgccaaggacagcgacagcgccggcgaggccggcgcccaggccagcagcaagcaccagaagagaaagaagagaagaaagagacagaagggcggcagcgccagcagaagaagactgagcagcgccagcagccccggcggcctggacgccggcctggtggagccccccagactgctgagcagccccaacagcgccagcgtgctgaagatcaagaccgagatcagcgagcccatcaacttcgacaacgacagcagcatctggaactacccccccaacagagagatcagcagaaacgagagcccctacagcatgaccaagccccccagcagcgagcacttccccagcccccagggcggcggcggcggcggcggcggcggcggcggcctgcacgtggccatccccgacagcgtgctgaccccccccggcgccgacggcgccgccgccagaaagacccagttcggcgccagcgccaccgccgccctggcccccgtggccagcgaccccctgagcccccccctgagcgccagccccagagacaagcaccccggcaacggcggcggcggcggcggcggcggcggcggcgccggcggcggcggccccagcgccagcaacagcctgctgtacaccggcgacctggaggccctgcagagactgcaggccggcaacgtggtgctgcccctggtgcacagagtgaccggcaccctggccgccaccagcaccgccgcccagagagtgtacaccaccggcaccatcagatacgcccccgccgaggtgaccctggccatgcagagcaacctgctgcccaacgcccacgccgtgaacttcgtggacgtgaacagccccggcttcggcctggaccccaagacccccatggagatgctgtaccaccacgtgcacagactgaacatgagcggccccttcggcggcgccgtgagcgccgccagcctgacccagatgcccgccggcaacgtgttcaccaccgccgagggcctgttcagcaccctgcccttccccgtgtacagcaacggcatccacgccgcccagaccctggagagaaaggaggactag

SEQ ID NO: 90925 - DNA, 2802 bp, synthetic construct
  misc_feature 1..2802: note = Description of Artificial Sequence: Synthetic coding sequence
  source 1..2802: mol_type = other DNA
atggcccccaccaagcccagcttccagcaggaccccagcagaagagagagaatcaccgcccagcaccccctgcccaaccagagcgagtgcagaaagatctacagatacgacggcatctactgcgagagcacctaccagaacctgcaggccctgagaaaggagaagagcagagacgccgccagaagcagaagaggcaaggagaacttcgagttctacgagctggccaagctgctgcccctgcccgccgccatcaccagccagctggacaaggccagcatcatcagactgaccatcagctacctgaagatgagagacttcgccaaccagggcgaccccccctggaacctgagaatggagggccccccccccaacaccagcgtgaaggtgatcggcgcccagagaagaagaagccccagcgccctggccatcgaggtgttcgaggcccacctgggcagccacatcctgcagagcctggacggcttcgtgttcgccctgaaccaggagggcaagttcctgtacatcagcgagaccgtgagcatctacctgggcctgagccaggtggagctgaccggcagcagcgtgttcgactacgtgcaccccggcgaccacgtggagatggccgagcagctgggcatgaagctgccccccggcagaggcctgctgagccagggcaccgccgaggacggcgccagcagcgccagcagcagcagccagagcgagacccccgagcccgtggagagcaccagccccagcctgctgaccaccgacaacaccctggagagaagcttcttcatcagaatgaagagcaccctgaccaagagaggcgtgcacatcaagagcagcggctacaaggtgatccacatcaccggcagactgagactgagagtgagcctgagccacggcagaaccgtgcccagccagatcatgggcctggtggtggtggcccacgccctgcccccccccaccatcaacgaggtgagaatcgactgccacatgttcgtgaccagagtgaacatggacctgaacatcatctactgcgagaacagaatcagcgactacatggacctgacccccgtggacatcgtgggcaagagatgctaccacttcatccacgccgaggacgtggagggcatcagacacagccacctggacctgctgaacaagggccagtgcgtgaccaagtactacagatggatgcagaagaacggcggctacatctggatccagagcagcgccaccatcgccatcaacgccaagaacgccaacgagaagaacatcatctgggtgaactacctgctgagcaaccccgagtacaaggacacccccatggacatcgcccagctgccccacctgcccgagaagaccagcgagagcagcgagaccagcgacagcgagagcgacagcaaggacaccagcggcatcaccgaggacaacgagaacagcaagagcgacgagaagggcaaccagagcgagaacagcgaggaccccgagcccgacagaaagaagagcggcaacgcctgcgacaacgacatgaactgcaacgacgacggccacagcagcagcaaccccgacagcagagacagcgacgacagcttcgagcacagcgacttcgagaaccccaaggccggcgaggacggcttcggcgccctgggcgccatgcagatcaaggtggagagatacgtggagagcgagagcgacctgagactgcagaactgcgagagcctgaccagcgacagcgccaaggacagcgacagcgccggcgaggccggcgcccaggccagcagcaagcaccagaagagaaagaagagaagaaagagacagaagggcggcagcgccagcagaagaagactgagcagcgccagcagccccggcggcctggacgccggcctggtggagccccccagactgctgagcagccccaacagcgccagcgtgctgaagatcaagaccgagatcagcgagcccatcaacttcgacaacgacagcagcatctggaactacccccccaacagagagatcagcagaaacgagagcccctacagcatgaccaagccccccagcagcgagcacttccccagcccccagggcggcggcggcggcggcggcggcggcggcggcctgcacgtggccatccccgacagcgtgctgaccccccccggcgccgacggcgccgccgccagaaagacccagttcggcgccagcgccaccgccgccctggcccccgtggccagcgaccccctgagcccccccctgagcgccagccccagagacaagcaccccggcaacggcggcggcggcggcggcggcggcggcggcgccggcggcggcggccccagcgccagcaacagcctgctgtacaccggcgacctggaggccctgcagagactgcaggccggcaacgtggtgctgcccctggtgcacagagtgaccggcaccctggccgccaccagcaccgccgcccagagagtgtacaccaccggcaccatcagatacgcccccgccgaggtgaccctggccatgcagagcaacctgctgcccaacgcccacgccgtgaacttcgtggacgtgaacagccccggcttcggcctggaccccaagacccccatggagatgctgtaccaccacgtgcacagactgaacatgagcggccccttcggcggcgccgtgagcgccgccagcctgacccagatgcccgccggcaacgtgttcaccaccgccgagggcctgttcagcaccctgcccttccccgtgtacagcaacggcatccacgccgcccagaccctggagagaaaggaggactag

SEQ ID NO: 90926 - DNA, 2763 bp, synthetic construct
  misc_feature 1..2763: note = Description of Artificial Sequence: Synthetic coding sequence
  source 1..2763: mol_type = other DNA
atggcccccaccaagcccagcttccagcaggaccccagcagaagagagagactgcaggccctgagaaaggagaagagcagagacgccgccagaagcagaagaggcaaggagaacttcgagttctacgagctggccaagctgctgcccctgcccgccgccatcaccagccagctggacaaggccagcatcatcagactgaccatcagctacctgaagatgagagacttcgccaaccagggcgaccccccctggaacctgagaatggagggccccccccccaacaccagcgtgaagggcatccagatgtggaagagcgagctgtgcatgagaaagaccccctgcgaggtgatcggcgcccagagaagaagaagccccagcgccctggccatcgaggtgttcgaggcccacctgggcagccacatcctgcagagcctggacggcttcgtgttcgccctgaaccaggagggcaagttcctgtacatcagcgagaccgtgagcatctacctgggcctgagccaggtggagctgaccggcagcagcgtgttcgactacgtgcaccccggcgaccacgtggagatggccgagcagctgggcatgaagctgccccccggcagaggcctgctgagccagggcaccgccgaggacggcgccagcagcgccagcagcagcagccagagcgagacccccgagcccgtggagagcaccagccccagcctgctgaccaccgacaacaccctggagagaagcttcttcatcagaatgaagagcaccctgaccaagagaggcgtgcacatcaagagcagcggctacaaggtgatccacatcaccggcagactgagactgagagtgagcctgagccacggcagaaccgtgcccagccagatcatgggcctggtggtggtggcccacgccctgcccccccccaccatcaacgaggtgagaatcgactgccacatgttcgtgaccagagtgaacatggacctgaacatcatctactgcgagaacagaatcagcgactacatggacctgacccccgtggacatcgtgggcaagagatgctaccacttcatccacgccgaggacgtggagggcatcagacacagccacctggacctgctgaacaagggccagtgcgtgaccaagtactacagatggatgcagaagaacggcggctacatctggatccagagcagcgccaccatcgccatcaacgccaagaacgccaacgagaagaacatcatctgggtgaactacctgctgagcaaccccgagtacaaggacacccccatggacatcgcccagctgccccacctgcccgagaagaccagcgagagcagcgagaccagcgacagcgagagcgacagcaaggacaccagcggcatcaccgaggacaacgagaacagcaagagcgacgagaagggcaaccagagcgagaacagcgaggaccccgagcccgacagaaagaagagcggcaacgcctgcgacaacgacatgaactgcaacgacgacggccacagcagcagcaaccccgacagcagagacagcgacgacagcttcgagcacagcgacttcgagaaccccaaggccggcgaggacggcttcggcgccctgggcgccatgcagatcaaggtggagagatacgtggagagcgagagcgacctgagactgcagaactgcgagagcctgaccagcgacagcgccaaggacagcgacagcgccggcgaggccggcgcccaggccagcagcaagcaccagaagagaaagaagagaagaaagagacagaagggcggcagcgccagcagaagaagactgagcagcgccagcagccccggcggcctggacgccggcctggtggagccccccagactgctgagcagccccaacagcgccagcgtgctgaagatcaagaccgagatcagcgagcccatcaacttcgacaacgacagcagcatctggaactacccccccaacagagagatcagcagaaacgagagcccctacagcatgaccaagccccccagcagcgagcacttccccagcccccagggcggcggcggcggcggcggcggcggcggcggcctgcacgtggccatccccgacagcgtgctgaccccccccggcgccgacggcgccgccgccagaaagacccagttcggcgccagcgccaccgccgccctggcccccgtggccagcgaccccctgagcccccccctgagcgccagccccagagacaagcaccccggcaacggcggcggcggcggcggcggcggcggcggcgccggcggcggcggccccagcgccagcaacagcctgctgtacaccggcgacctggaggccctgcagagactgcaggccggcaacgtggtgctgcccctggtgcacagagtgaccggcaccctggccgccaccagcaccgccgcccagagagtgtacaccaccggcaccatcagatacgcccccgccgaggtgaccctggccatgcagagcaacctgctgcccaacgcccacgccgtgaacttcgtggacgtgaacagccccggcttcggcctggaccccaagacccccatggagatgctgtaccaccacgtgcacagactgaacatgagcggccccttcggcggcgccgtgagcgccgccagcctgacccagatgcccgccggcaacgtgttcaccaccgccgagggcctgttcagcaccctgcccttccccgtgtacagcaacggcatccacgccgcccagaccctggagagaaaggaggactag

SEQ ID NO: 90927 - DNA, 462 bp, synthetic construct
  misc_feature 1..462: note = Description of Artificial Sequence: Synthetic coding sequence
  source 1..462: mol_type = other DNA
atgagagacttcgccaaccagggcgaccccccctggaacctgagaatggagggccccccccccaacaccagcgtgaagggcgcccagagaagaagaagccccagcgccctggccatcgaggtgttcgaggcccacctgggcagccacatcctgcagagcctggacggcttcgtgttcgccctgaaccaggagggcaagttcctgtacatcagcgagaccgtgagcatctacctgggcctgagccaggtggagctgaccggcagcagcgtgttcgactacgtgcaccccggcgaccacgtggagatggccgagcagctgggcatgaagctgccccccggcagaggcctgctgagccagggcaccgccgaggacggcgccagcagcgccagcagcagcagccagagcgagacccccgagcccgtggtgtgcttcccccccgccagcgaccagttcctgctgtag

SEQ ID NO: 90928 - DNA, 2712 bp, synthetic construct
  misc_feature 1..2712: note = Description of Artificial Sequence: Synthetic coding sequence
  source 1..2712: mol_type = other DNA
atggcccccaccaagcccagcttccagcaggaccccagcagaagagagagactgcaggccctgagaaaggagaagagcagagacgccgccagaagcagaagaggcaaggagaacttcgagttctacgagctggccaagctgctgcccctgcccgccgccatcaccagccagctggacaaggccagcatcatcagactgaccatcagctacctgaagatgagagacttcgccaaccagggcgaccccccctggaacctgagaatggagggccccccccccaacaccagcgtgaaggtgatcggcgcccagagaagaagaagccccagcgccctggccatcgaggtgttcgaggcccacctgggcagccacatcctgcagagcctggacggcttcgtgttcgccctgaaccaggagggcaagttcctgtacatcagcgagaccgtgagcatctacctgggcctgagccaggtggagctgaccggcagcagcgtgttcgactacgtgcaccccggcgaccacgtggagatggccgagcagctgggcatgaagctgccccccggcagaggcctgctgagccagggcaccgccgaggacggcgccagcagcgccagcagcagcagccagagcgagacccccgagcccgtggagagcaccagccccagcctgctgaccaccgacaacaccctggagagaagcttcttcatcagaatgaagagcaccctgaccaagagaggcgtgcacatcaagagcagcggctacaaggtgatccacatcaccggcagactgagactgagagtgagcctgagccacggcagaaccgtgcccagccagatcatgggcctggtggtggtggcccacgccctgcccccccccaccatcaacgaggtgagaatcgactgccacatgttcgtgaccagagtgaacatggacctgaacatcatctactgcgagaacagaatcagcgactacatggacctgacccccgtggacatcgtgggcaagagatgctaccacttcatccacgccgaggacgtggagggcatcagacacagccacctggacctgctgaacaagggccagtgcgtgaccaagtactacagatggatgcagaagaacggcggctacatctggatccagagcagcgccaccatcgccatcaacgccaagaacgccaacgagaagaacatcatctgggtgaactacctgctgagcaaccccgagtacaaggacacccccatggacatcgcccagctgccccacctgcccgagaagaccagcgagagcagcgagaccagcgacagcgagagcgacagcaaggacaccagcggcatcaccgaggacaacgagaacagcaagagcgacgagaagggcaaccagagcgagaacagcgaggaccccgagcccgacagaaagaagagcggcaacgcctgcgacaacgacatgaactgcaacgacgacggccacagcagcagcaaccccgacagcagagacagcgacgacagcttcgagcacagcgacttcgagaaccccaaggccggcgaggacggcttcggcgccctgggcgccatgcagatcaaggtggagagatacgtggagagcgagagcgacctgagactgcagaactgcgagagcctgaccagcgacagcgccaaggacagcgacagcgccggcgaggccggcgcccaggccagcagcaagcaccagaagagaaagaagagaagaaagagacagaagggcggcagcgccagcagaagaagactgagcagcgccagcagccccggcggcctggacgccggcctggtggagccccccagactgctgagcagccccaacagcgccagcgtgctgaagatcaagaccgagatcagcgagcccatcaacttcgacaacgacagcagcatctggaactacccccccaacagagagatcagcagaaacgagagcccctacagcatgaccaagccccccagcagcgagcacttccccagcccccagggcggcggcggcggcggcggcggcggcggcggcctgcacgtggccatccccgacagcgtgctgaccccccccggcgccgacggcgccgccgccagaaagacccagttcggcgccagcgccaccgccgccctggcccccgtggccagcgaccccctgagcccccccctgagcgccagccccagagacaagcaccccggcaacggcggcggcggcggcggcggcggcggcggcgccggcggcggcggccccagcgccagcaacagcctgctgtacaccggcgacctggaggccctgcagagactgcaggccggcaacgtggtgctgcccctggtgcacagagtgaccggcaccctggccgccaccagcaccgccgcccagagagtgtacaccaccggcaccatcagatacgcccccgccgaggtgaccctggccatgcagagcaacctgctgcccaacgcccacgccgtgaacttcgtggacgtgaacagccccggcttcggcctggaccccaagacccccatggagatgctgtaccaccacgtgcacagactgaacatgagcggccccttcggcggcgccgtgagcgccgccagcctgacccagatgcccgccggcaacgtgttcaccaccgccgagggcctgttcagcaccctgcccttccccgtgtacagcaacggcatccacgccgcccagaccctggagagaaaggaggactag

SEQ ID NO: 90929 - DNA, 2409 bp, synthetic construct
  misc_feature 1..2409: note = Description of Artificial Sequence: Synthetic coding sequence
  source 1..2409: mol_type = other DNA
atgtacagaagcaccaagggcgccagcaaggccagaagagaccagatcaacgccgagatcagaaacctgaaggagctgctgcccctggccgaggccgacaaggtgagactgagctacctgcacatcatgagcctggcctgcatctacaccagaaagggcgtgttcttcgccggcggcacccccctggccggccccaccggcctgctgagcgcccaggagctggaggacatcgtggccgccctgcccggcttcctgctggtgttcaccgccgagggcaagctgctgtacctgagcgagagcgtgagcgagcacctgggccacagcatggtggacctggtggcccagggcgacagcatctacgacatcatcgaccccgccgaccacctgaccgtgagacagcagctgaccctgcccagcgccctggacaccgacagactgttcagatgcagattcaacaccagcaagagcctgagaagacagagcgccggcaacaagctggtgctgatcagaggcagattccacgcccacccccccggcgcctactgggccggcaaccccgtgttcaccgccttctgcgcccccctggagcccagacccagacccggccccggccccggccccggccccgccagcctgttcctggccatgttccagagcagacacgccaaggacctggccctgctggacatcagcgagagcgtgctgatctacctgggcttcgagagaagcgagctgctgtgcaagagctggtacggcctgctgcaccccgaggacctggcccacgccagcgcccagcactacagactgctggccgagagcggcgacatccaggccgagatggtggtgagactgcaggccaagaccggcggctgggcctggatctactgcctgctgtacagcgagggccccgagggccccatcaccgccaacaactaccccatcagcgacatggaggcctggagcctgagacagcagctgaacagcgaggacacccaggccgcctacgtgctgggcacccccaccatgctgcccagcttccccgagaacatcctgagccaggaggagtgcagcagcaccaaccccctgttcaccgccgccctgggcgcccccagaagcaccagcttccccagcgcccccgagctgagcgtggtgagcgccagcgaggagctgcccagacccagcaaggagctggacttcagctacctgaccttccccagcggccccgagcccagcctgcaggccgagctgagcaaggacctggtgtgcacccccccctacaccccccaccagcccggcggctgcgccttcctgttcagcctgcacgagcccttccagacccacctgcccacccccagcagcaccctgcaggagcagctgacccccagcaccgccaccttcagcgaccagctgacccccagcagcgccaccttccccgaccccctgaccagccccctgcagggccagctgaccgagaccagcgtgagaagctacgaggaccagctgaccccctgcaccagcaccttccccgaccagctgctgcccagcaccgccaccttccccgagcccctgggcagccccgcccacgagcagctgaccccccccagcaccgccttccaggcccacctggacagccccagccagaccttccccgagcagctgagccccaaccccaccaagacctacttcgcccaggagggctgcagcttcctgtacgagaagctgccccccagccccagcagccccggcaacggcgactgcaccctgctggccctggcccagctgagaggccccctgagcgtggacgtgcccctggtgcccgagggcctgctgacccccgaggccagccccgtgaagcagagcttcttccactacagcgagaaggagcagaacgagatcgacagactgatccagcagatcagccagctggcccagggcatggacagacccttcagcgccgaggccggcaccggcggcctggagcccctgggcggcctggagcccctggacagcaacctgagcctgagcggcgccggcccccccgtgctgagcctggacctgaagccctggaagtgccaggagctggacttcctggccgaccccgacaacatgttcctggaggagacccccgtggaggacatcttcatggacctgagcacccccgaccccagcgaggagtggggcagcggcgaccccgaggccgagggccccggcggcgcccccagcccctgcaacaacctgagccccgaggaccacagcttcctggaggacctggccacctacgagaccgccttcgagaccggcgtgagcgccttcccctacgacggcttcaccgacgagctgcaccagctgcagagccaggtgcaggacagcttccacgaggacggcagcggcggcgagcccaccttctag

SEQ ID NO: 90930 - DNA, 705 bp, synthetic construct
  misc_feature 1..705: note = Description of Artificial Sequence: Synthetic coding sequence
  source 1..705: mol_type = other DNA
atgtacagaagcaccaagggcgccagcaaggccagaagagaccagatcaacgccgagatcagaaacctgaaggagctgctgcccctggccgaggccgacaaggtgagactgagctacctgcacatcatgagcctggcctgcatctacaccagaaagggcgtgttcttcgccggcggcacccccctggccggccccaccggcctgctgagcgcccaggagctggaggacatcgtggccgccctgcccggcttcctgctggtgttcaccgccgagggcaagctgctgtacctgagcgagagcgtgagcgagcacctgggccacagcatggtggacctggtggcccagggcgacagcatctacgacatcatcgaccccgccgaccacctgaccgtgagacagcagctgaccctgcccagcgccctggacaccgacagactgttcagatgcagattcaacaccagcaagagcctgagaagacagagcgccggcaacaagctggtgctgatcagaggcagattccacgcccacccccccggcgcctactgggccggcaaccccgtgttcaccgccttctgcgcccccctggagcccagacccagacccggccccggccccggccccggccccgccagcctgttcctggccatgttccagagcagacacgccaaggacctggccctgctggacatcagcgagagcggctag

SEQ ID NO: 90931 - DNA, 1299 bp, synthetic construct
  misc_feature 1..1299: note = Description of Artificial Sequence: Synthetic coding sequence
  source 1..1299: mol_type = other DNA
atgcccgccggcagagccgccagaacctgcgccctgctggccctgtgcctgctgggcgccggcgcccaggacttcggccccaccagattcatctgcaccagcgtgcccgtggacgccgacatgtgcgccgccagcgtggccgccggcggcgccgaggagctgagaagcagcgtgctgcagctgagagagaccgtgctgcagcagaaggagaccatcctgagccagaaggagaccatcagagagctgaccgccaagctgggcagatgcgagagccagagcaccctggaccccggcgccggcgaggccagagccggcggcggcagaaagcagcccggcagcggcaagaacaccatgggcgacctgagcagaacccccgccgccgagaccctgagccagctgggccagaccctgcagagcctgaagaccagactggagaacctggagcagtacagcagactgaacagcagcagccagaccaacagcctgaaggacctgctgcagagcaagatcgacgagctggagagacaggtgctgagcagagtgaacaccctggaggagggcaagggcggccccagaaacgacaccgaggagagagtgaagatcgagaccgccctgaccagcctgcaccagagaatcagcgagctggagaagggccagaaggacaacagacccggcgacaagttccagctgaccttccccctgagaaccaactacatgtacgccaaggtgaagaagagcctgcccgagatgtacgccttcaccgtgtgcatgtggctgaagagcagcgccacccccggcgtgggcacccccttcagctacgccgtgcccggccaggccaacgagctggtgctgatcgagtggggcaacaaccccatggagatcctgatcaacgacaaggtggccaagctgcccttcgtgatcaacgacggcaagtggcaccacatctgcgtgacctggaccaccagagacggcgtgtgggaggcctaccaggacggcacccagggcggcagcggcgagaacctggccccctaccaccccatcaagccccagggcgtgctggtgctgggccaggagcaggacaccctgggcggcggcttcgacgccacccaggccttcgtgggcgagctggcccacttcaacatctgggacagaaagctgacccccggcgaggtgtacaacctggccacctgcagcaccaaggccctgagcggcaacgtgatcgcctgggccgagagccacatcgagatctacggcggcgccaccaagtggaccttcgaggcctgcagacagatcaactag

SEQ ID NO: 90932 - DNA, 585 bp, synthetic construct
  misc_feature 1..585: note = Description of Artificial Sequence: Synthetic coding sequence
  source 1..585: mol_type = other DNA
atgtacgccaaggtgaagaagagcctgcccgagatgtacgccttcaccgtgtgcatgtggctgaagagcagcgccacccccggcgtgggcacccccttcagctacgccgtgcccggccaggccaacgagctggtgctgatcgagtggggcaacaaccccatggagatcctgatcaacgacaaggtggccaagctgcccttcgtgatcaacgacggcaagtggcaccacatctgcgtgacctggaccaccagagacggcgtgtgggaggcctaccaggacggcacccagggcggcagcggcgagaacctggccccctaccaccccatcaagccccagggcgtgctggtgctgggccaggagcaggacaccctgggcggcggcttcgacgccacccaggccttcgtgggcgagctggcccacttcaacatctgggacagaaagctgacccccggcgaggtgtacaacctggccacctgcagcaccaaggccctgagcggcaacgtgatcgcctgggccgagagccacatcgagatctacggcggcgccaccaagtggaccttcgaggcctgcagacagatcaactag

SEQ ID NO: 90933 - DNA, 1296 bp, synthetic construct
  misc_feature 1..1296: note = Description of Artificial Sequence: Synthetic coding sequence
  source 1..1296: mol_type = other DNA
atgctggccctgctggccgccagcgtggccctggccgtggccgccggcgcccaggacagccccgcccccggcagcagattcgtgtgcaccgccctgccccccgaggccgtgcacgccggctgccccctgcccgccatgcccatgcagggcggcgcccagagccccgaggaggagctgagagccgccgtgctgcagctgagagagaccgtggtgcagcagaaggagaccctgggcgcccagagagaggccatcagagagctgaccggcaagctggccagatgcgagggcctggccggcggcaaggccagaggcgccggcgccaccggcaaggacaccatgggcgacctgcccagagaccccggccacgtggtggagcagctgagcagaagcctgcagaccctgaaggacagactggagagcctggagcaccagctgagagccaacgtgagcaacgccggcctgcccggcgacttcagagaggtgctgcagcagagactgggcgagctggagagacagctgctgagaaaggtggccgagctggaggacgagaagagcctgctgcacaacgagaccagcgcccacagacagaagaccgagagcaccctgaacgccctgctgcagagagtgaccgagctggagagaggcaacagcgccttcaagagccccgacgccttcaaggtgagcctgcccctgagaaccaactacctgtacggcaagatcaagaagaccctgcccgagctgtacgccttcaccatctgcctgtggctgagaagcagcgccagccccggcatcggcacccccttcagctacgccgtgcccggccaggccaacgagatcgtgctgatcgagtggggcaacaaccccatcgagctgctgatcaacgacaaggtggcccagctgcccctgttcgtgagcgacggcaagtggcaccacatctgcgtgacctggaccaccagagacggcatgtgggaggccttccaggacggcgagaagctgggcaccggcgagaacctggccccctggcaccccatcaagcccggcggcgtgctgatcctgggccaggagcaggacaccgtgggcggcagattcgacgccacccaggccttcgtgggcgagctgagccagttcaacatctgggacagagtgctgagagcccaggagatcgtgaacatcgccaactgcagcaccaacatgcccggcaacatcatcccctgggtggacaacaacgtggacgtgttcggcggcgccagcaagtggcccgtggagacctgcgaggagagactgctggacctgtag

SEQ ID NO: 90934 - DNA, 246 bp, synthetic construct
  misc_feature 1..246: note = Description of Artificial Sequence: Synthetic coding sequence
  source 1..246: mol_type = other DNA
atggccgccgtggccgccgccagcgccgagctgctgatcatcggctggtacatcttcagagtgctgctgcaggtgttcctggagtgctgcatctactgggtgggcttcgccttcagaaacccccccggcacccagcccatcgccagaagcgaggtgttcagatacagcctgcagaagctggcctacaccgtgagcagaaccggcagacaggtgctgggcgagagaagacagagagcccccaactag

SEQ ID NO: 90935 - DNA, 165 bp, synthetic construct
  misc_feature 1..165: note = Description of Artificial Sequence: Synthetic coding sequence
  source 1..165: mol_type = other DNA
atggccgccgtggccgccgccagcgccgagctgctgatcatcggctggtacatcttcagagtgctgctgcaggtgttcagatacagcctgcagaagctggcctacaccgtgagcagaaccggcagacaggtgctgggcgagagaagacagagagcccccaactag

SEQ ID NO: 90936 - DNA, 270 bp, synthetic construct
  misc_feature 1..270: note = Description of Artificial Sequence: Synthetic coding sequence
  source 1..270: mol_type = other DNA
atgatcagcagcgtgaagctgaacctgatcctggtgctgagcctgagcaccatgcacgtgttctggtgctaccccgtgcccagcagcaaggtgagcggcaagagcgactacttcctgatcctgctgaacagctgccccaccagactggacagaagcaaggagctggccttcctgaagcccatcctggagaagatgttcgtgaagagaagcttcagaaacggcgtgggcaccggcatgaagaagaccagcttccagagagccaagagctag

SEQ ID NO: 90937 - DNA, 525 bp, synthetic construct
  misc_feature 1..525: note = Description of Artificial Sequence: Synthetic coding sequence
  source 1..525: mol_type = other DNA
gtggtgctgctgtacgccagcacctacgtgctggtgagcctgagcatcgacagataccacgccatcgtgtaccccatgaaggtgctgatcgtgatcgcctggagcctgagcttcctgttcagcatccccaccctgatcatcttcggcaagagaaccctgagcaacggcgaggtgcagtgctgggccctgtggcccgacgacagctactggaccccctacatgaccatcgtggccttcctgggcagcctgatcaccttcatctgctgctggagcccctacttcctgttcgacatcctggacaacttcaacctgctgcccgacacccaggagagattctacgccagcgtgatcatccagaacctgcccgccctgaacagcgccatcaaccccctgatctactgcgtgttcagcagcagcatcagcttcccctgcagagagcagagaagccaggacagcagaatgaccttcagagagagaaccgagagacacgagatgcagatcctgagcaagcccgagttcatctag

SEQ ID NO: 90938 - DNA, 1134 bp, synthetic construct
  misc_feature 1..1134: note = Description of Artificial Sequence: Synthetic coding sequence
  source 1..1134: mol_type = other DNA
atgcccgccaacttcaccgagggcagcttcgacagcagcggcaccggccagaccctggacagcagccccgtggcctgcaccgagaccgtgaccttcaccgaggtggtggagggcaaggagtggggcagcttctactacagcttcaagaccgagcagctgatcaccctgtgggtgctgttcgtgttcaccatcgtgggcaacagcgtggtgctgttcagcacctggagaagaaagaagaagagcagaatgaccttcttcgtgacccagctggccatcaccgacagcttcaccggcctggtgaacatcctgaccgacatcaactggagattcaccggcgacttcaccgcccccgacctggtgtgcagagtggtgagatacctgcaggtggtgctgctgtacgccagcacctacgtgctggtgagcctgagcatcgacagataccacgccatcgtgtaccccatgaagttcctgcagggcgagaagcaggccagagtgctgatcgtgatcgcctggagcctgagcttcctgttcagcatccccaccctgatcatcttcggcaagagaaccctgagcaacggcgaggtgcagtgctgggccctgtggcccgacgacagctactggaccccctacatgaccatcgtggccttcctggtgtacttcatccccctgaccatcatcagcatcatgtacggcatcgtgatcagaaccatctggatcaagagcaagacctacgagaccgtgatcagcaactgcagcgacggcaagctgtgcagcagctacaacagaggcctgatcagcaaggccaagatcaaggccatcaagtacagcatcatcatcatcctggccttcatctgctgctggagcccctacttcctgttcgacatcctggacaacttcaacctgctgcccgacacccaggagagattctacgccagcgtgatcatccagaacctgcccgccctgaacagcgccatcaaccccctgatctactgcgtgttcagcagcagcatcagcttcccctgcagagtgatcagactgagacagctgcaggaggccgccctgatgctgtgcccccagagagagaactggaagggcacctggcccggcgtgcccagctgggccctgcccagatag

SEQ ID NO: 90939 - DNA, 1116 bp, synthetic construct
  misc_feature 1..1116: note = Description of Artificial Sequence: Synthetic coding sequence
  source 1..1116: mol_type = other DNA
atgcccgccaacttcaccgagggcagcttcgacagcagcggcaccggccagaccctggacagcagccccgtggcctgcaccgagaccgtgaccttcaccgaggtggtggagggcaaggagtggggcagcttctactacagcttcaagaccgagcagctgatcaccctgtgggtgctgttcgtgttcaccatcgtgggcaacagcgtggtgctgttcagcacctggagaagaaagaagaagagcagaatgaccttcttcgtgacccagctggccatcaccgacagcttcaccggcctggtgaacatcctgaccgacatcaactggagattcaccggcgacttcaccgcccccgacctggtgtgcagagtggtgagatacctgcaggtggtgctgctgtacgccagcacctacgtgctggtgagcctgagcatcgacagataccacgccatcgtgtaccccatgaagttcctgcagggcgagaagcaggccagagtgctgatcgtgatcgcctggagcctgagcttcctgttcagcatccccaccctgatcatcttcggcaagagaaccctgagcaacggcgaggtgcagtgctgggccctgtggcccgacgacagctactggaccccctacatgaccatcgtggccttcctggtgtacttcatccccctgaccatcatcagcatcatgtacggcatcgtgatcagaaccatctggatcaagagcaagacctacgagaccgtgatcagcaactgcagcgacggcaagctgtgcagcagctacaacagaggcctgatcagcaaggccaagatcaaggccatcaagtacagcatcatcatcatcctggccttcatctgctgctggagcccctacttcctgttcgacatcctggacaacttcaacctgctgcccgacacccaggagagattctacgccagcgtgatcatccagaacctgcccgccctgaacagcgccatcaaccccctgatctactgcgtgttcagcagcagcatcagcttcccctgcagagagcagagaagccaggacagcagaatgaccttcagagagagaaccgagagacacgagatgcagatcctgagcaagcccgagttcatctag

SEQ ID NO: 90940 - DNA, 1173 bp, synthetic construct
  misc_feature 1..1173: note = Description of Artificial Sequence: Synthetic coding sequence
  source 1..1173: mol_type = other DNA
atgcccgccaacttcaccgagggcagcttcgacagcagcggcaccggccagaccctggacagcagccccgtggcctgcaccgagaccgtgaccttcaccgaggtggtggagggcaaggagtggggcagcttctactacagcttcaagaccgagcagctgatcaccctgtgggtgctgttcgtgttcaccatcgtgggcaacagcgtggtgctgttcagcacctggagaagaaagaagaagagcagaatgaccttcttcgtgacccagctggccatcaccgacagcttcaccggcctggtgaacatcctgaccgacatcaactggagattcaccggcgacttcaccgcccccgacctggtgtgcagagtggtgagatacctgcaggtggtgctgctgtacgccagcacctacgtgctggtgagcctgagcatcgacagataccacgccatcgtgtaccccatgaagttcctgcagggcgagaagcaggccagagtgctgatcgtgatcgcctggagcctgagcttcctgttcagcatccccaccctgatcatcttcggcaagagaaccctgagcaacggcgaggtgcagtgctgggccctgtggcccgacgacagctactggaccccctacatgaccatcgtggccttcctggtgtacttcatccccctgaccatcatcagcatcatgtacggcatcgtgatcagaaccatctggatcaagagcaagacctacgagaccgtgatcagcaactgcagcgacggcaagctgtgcagcagctacaacagaggcctgatcagcaaggccaagatcaaggccatcaagtacagcatcatcatcatcctggccttcatctgctgctggagcccctacttcctgttcgacatcctggacaacttcaacctgctgcccgacacccaggagagattctacgccagcgtgatcatccagaacctgcccgccctgaacagcgccatcaaccccctgatctactgcgtgttcagcagcagcatcagcttcccctgcagagccaacagcagcgtgtacctgctggcctgcgacgtgagcgtgctgtgggccctggtgctgaccagcgagaaggagagctgcgagagctggagaagaaagggcgccaagatcaccggcttccagaacgacgtgcccggcgagaactag

SEQ ID NO: 90941 - DNA, 918 bp, synthetic construct
  misc_feature 1..918: note = Description of Artificial Sequence: Synthetic coding sequence
  source 1..918: mol_type = other DNA
atgcccgccaacttcaccgagggcagcttcgacagcagcggcaccggccagaccctggacagcagccccgtggcctgcaccgagaccgtgaccttcaccgaggtggtggagggcaaggagtggggcagcttctactacagcttcaagaccgagcagctgatcaccctgtgggtgctgttcgtgttcaccatcgtgggcaacagcgtggtgctgttcagcacctggagaagaaagaagaagagcagaatgaccttcttcgtgacccagctggccatcaccgagaagcaggccagagtgctgatcgtgatcgcctggagcctgagcttcctgttcagcatccccaccctgatcatcttcggcaagagaaccctgagcaacggcgaggtgcagtgctgggccctgtggcccgacgacagctactggaccccctacatgaccatcgtggccttcctggtgtacttcatccccctgaccatcatcagcatcatgtacggcatcgtgatcagaaccatctggatcaagagcaagacctacgagaccgtgatcagcaactgcagcgacggcaagctgtgcagcagctacaacagaggcctgatcagcaaggccaagatcaaggccatcaagtacagcatcatcatcatcctggccttcatctgctgctggagcccctacttcctgttcgacatcctggacaacttcaacctgctgcccgacacccaggagagattctacgccagcgtgatcatccagaacctgcccgccctgaacagcgccatcaaccccctgatctactgcgtgttcagcagcagcatcagcttcccctgcagagagcagagaagccaggacagcagaatgaccttcagagagagaaccgagagacacgagatgcagatcctgagcaagcccgagttcatctag

SEQ ID NO: 90942 - DNA, 432 bp, synthetic construct
  misc_feature 1..432: note = Description of Artificial Sequence: Synthetic coding sequence
  source 1..432: mol_type = other DNA
atgcccgccaacttcaccgagggcagcttcgacagcagcggcaccggccagaccctggacagcagccccgtggcctgcaccgagaccgtgaccttcaccgaggtggtggagggcaaggagtggggcagcttctactacagcttcaagaccgagcagctgatcaccctgtgggtgctgttcgtgttcaccatcgtgggcaacagcgtggtgctgttcagcacctggagaagaaagaagaagagcagaatgaccttcttcgtgacccagctggccatcaccgacagcttcaccggcctggtgaacatcctgaccgacatcaactggagattcaccggcgacttcaccgcccccgacctggtgtgcagagtggtgagatacctgcaggtgatggtgatgaagctgttccacatccagaagatgaacatggagtag

SEQ ID NO: 90943 - DNA, 285 bp, synthetic construct
  misc_feature 1..285: note = Description of Artificial Sequence: Synthetic coding sequence
  source 1..285: mol_type = other DNA
atgcccgccaacttcaccgagggcagcttcgacagcagcggcaccggccagaccctggacagcagccccgtggcctgcaccgagaccgtgaccttcaccgaggtggtggagggcaaggagtggggcagcttctactacagcttcaagaccgagcagctgatcaccctgtgggtgctgttcgtgttcaccatcgtgggcaacagcgtggtgctgttcagcacctggagaagaaagaagaagagcagaatgaccttcttcgtgacccagctggccatcaccgtgtag

SEQ ID NO: 90944 - DNA, 294 bp, synthetic construct
  misc_feature 1..294: note = Description of Artificial Sequence: Synthetic coding sequence
  source 1..294: mol_type = other DNA
atgctgggcaacaagagactgggcctgagcggcctgaccctggccctgagcctgctggtgtgcctgggcgccctggccgaggcctaccccagcaagcccgacaaccccggcgaggacgcccccgccgaggacatggccagatactacagcgccctgagacactacatcaacctgatcaccagacagagatacggcaagagaagcagccccgagaccctgatcagcgacctgctgatgagagagagcaccgagaacgtgcccagaaccagactggaggaccccgccatgtggtag

SEQ ID NO: 90945 - DNA, 294 bp, synthetic construct; identical to SEQ ID NO: 90944
  misc_feature 1..294: note = Description of Artificial Sequence: Synthetic coding sequence
  source 1..294: mol_type = other DNA

SEQ ID NO: 90946 - DNA, 294 bp, synthetic construct; identical to SEQ ID NO: 90944
  misc_feature 1..294: note = Description of Artificial Sequence: Synthetic coding sequence
  source 1..294: mol_type = other DNA

SEQ ID NO: 90947 - DNA, 1155 bp, synthetic construct
  misc_feature 1..1155: note = Description of Artificial Sequence: Synthetic coding sequence
  source 1..1155: mol_type = other DNA
atgaacagcaccctgttcagccaggtggagaaccacagcgtgcacagcaacttcagcgagaagaacgcccagctgctggccttcgagaacgacgactgccacctgcccctggccatgatcttcaccctggccctggcctacggcgccgtgatcatcctgggcgtgagcggcaacctggccctgatcatcatcatcctgaagcagaaggagatgagaaacgtgaccaacatcctgatcgtgaacctgagcttcagcgacctgctggtggccatcatgtgcctgcccttcaccttcgtgtacaccctgatggaccactgggtgttcggcgaggccatgtgcaagctgaaccccttcgtgcagtgcgtgagcatcaccgtgagcatcttcagcctggtgctgatcgccgtggagagacaccagctgatcatcaaccccagaggctggagacccaacaacagacacgcctacgtgggcatcgccgtgatctgggtgctggccgtggccagcagcctgcccttcctgatctaccaggtgatgaccgacgagcccttccagaacgtgaccctggacgcctacaaggacaagtacgtgtgcttcgaccagttccccagcgacagccacagactgagctacaccaccctgctgctggtgctgcagtacttcggccccctgtgcttcatcttcatctgctacttcaagatctacatcagactgaagagaagaaacaacatgatggacaagatgagagacaacaagtacagaagcagcgagaccaagagaatcaacatcatgctgctgagcatcgtggtggccttcgccgtgtgctggctgcccctgaccatcttcaacaccgtgttcgactggaaccaccagatcatcgccacctgcaaccacaacctgctgttcctgctgtgccacctgaccgccatgatcagcacctgcgtgaaccccatcttctacggcttcctgaacaagaacttccagagagacctgcagttcttcttcaacttctgcgacttcagaagcagagacgacgactacgagaccatcgccatgagcaccatgcacaccgacgtgagcaagaccagcctgaagcaggccagccccgtggccttcaagaagatcaacaacaacgacgacaacgagaagatctag

SEQ ID NO: 90948 - DNA, 186 bp, synthetic construct
  misc_feature 1..186: note = Description of Artificial Sequence: Synthetic coding sequence
  source 1..186: mol_type = other DNA
atgaacagcaccctgttcagccaggtggagaaccacagcgtgcacagcaacttcagcgagaagaacgcccagctgctggccttcgagaacgacgactgccacctgcccctggccatgatcttcaccctggccctggcctacggcgccgtgatcatcctgggcgtgagcggcaacctggccctgtag

SEQ ID NO: 90949 - DNA, 426 bp, synthetic construct
  misc_feature 1..426: note = Description of Artificial Sequence: Synthetic coding sequence
  source 1..426: mol_type = other DNA
atgatggacaagatgagagacaacaagtacagaagcagcgagaccaagagaatcaacatcatgctgctgagcatcgtggtggccttcgccgtgtgctggctgcccctgaccatcttcaacaccgtgttcgactggaaccaccagatcatcgccacctgcaaccacaacctgctgttcctgctgtgccacctgaccgccatgatcagcacctgcgtgaaccccatcttctacggcttcctgaacaagaacttccagagagacctgcagttcttcttcaacttctgcgacttcagaagcagagacgacgactacgagaccatcgccatgagcaccatgcacaccgacgtgagcaagaccagcctgaagcaggccagccccgtggccttcaagaagatcaacaacaacgacgacaacgagaagatctag

SEQ ID NO: 90950 - DNA, 78 bp, synthetic construct
  misc_feature 1..78: note = Description of Artificial Sequence: Synthetic coding sequence
  source 1..78: mol_type = other DNA
atgaacagcaccctgttcagccaggtggagaaccacagcgtgcacagcaacttcagcgagaagaacgcccagctgtag

SEQ ID NO: 90951 - DNA, 183 bp, synthetic construct
  misc_feature 1..183: note = Description of Artificial Sequence: Synthetic coding sequence
  source 1..183: mol_type = other DNA
atgaacagcaccctgttcagccaggtggagaaccacagcgtgcacagcaacttcagcgagaagaacgcccagctgctggccttcgagaacgacgactgccacctgcccctggccatgatcttcaccctggccctggcctacggcgccgtgatcatcctgggcgtgagcggcaacctggcctag

SEQ ID NO: 90952 - DNA, 1146 bp, synthetic construct
  misc_feature 1..1146: note = Description of Artificial Sequence: Synthetic coding sequence
  source 1..1146: mol_type = other DNA
atgggccccatcggcgccgaggccgacgagaaccagaccgtggaggagatgaaggtggagcagtacggcccccagaccacccccagaggcgagctggtgcccgaccccgagcccgagctgatcgacagcaccaagctgatcgaggtgcaggtggtgctgatcctggcctactgcagcatcatcctgctgggcgtgatcggcaacagcctggtgatccacgtggtgatcaagttcaagagcatgagaaccgtgaccaacttcttcatcgccaacctggccgtggccgacctgctggtgaacaccctgtgcctgcccttcaccctgacctacaccctgatgggcgagtggaagatgggccccgtgctgtgccacctggtgccctacgcccagggcctggccgtgcaggtgagcaccatcaccctgaccgtgatcgccctggacagacacagatgcatcgtgtaccacctggagagcaagatcagcaagagaatcagcttcctgatcatcggcctggcctggggcatcagcgccctgctggccagccccctggccatcttcagagagtacagcctgatcgagatcatccccgacttcgagatcgtggcctgcaccgagaagtggcccggcgaggagaagagcatctacggcaccgtgtacagcctgagcagcctgctgatcctgtacgtgctgcccctgggcatcatcagcttcagctacaccagaatctggagcaagctgaagaaccacgtgagccccggcgccgccaacgaccactaccaccagagaagacagaagaccaccaagatgctggtgtgcgtggtggtggtgttcgccgtgagctggctgcccctgcacgccttccagctggccgtggacatcgacagccaggtgctggacctgaaggagtacaagctgatcttcaccgtgttccacatcatcgccatgtgcagcaccttcgccaaccccctgctgtacggctggatgaacagcaactacagaaaggccttcctgagcgccttcagatgcgagcagagactggacgccatccacagcgaggtgagcgtgaccttcaaggccaagaagaacctggaggtgagaaagaacagcggccccaacgacagcttcaccgaggccaccaacgtgtag

SEQ ID NO: 90953 - DNA, 1146 bp, synthetic construct; identical to SEQ ID NO: 90952
  misc_feature 1..1146: note = Description of Artificial Sequence: Synthetic coding sequence
  source 1..1146: mol_type = other DNA

SEQ ID NO: 90954 - DNA, 1338 bp, synthetic construct
  misc_feature 1..1338: note = Description of Artificial Sequence: Synthetic coding sequence
  source 1..1338: mol_type = other DNA
atggacctggagctggacgagtactacaacaagaccctggccaccgagaacaacaccgccgccaccagaaacagcgacttccccgtgtgggacgactacaagagcagcgtggacgacctgcagtacttcctgatcggcctgtacaccttcgtgagcctgctgggcttcatgggcaacctgctgatcctgatggccctgatgaagaagagaaaccagaagaccaccgtgaacttcctgatcggcaacctggccttcagcgacatcctggtggtgctgttctgcagccccttcaccctgaccagcgtgctgctggaccagtggatgttcggcaaggtgatgtgccacatcatgcccttcctgcagtgcgtgagcgtgctggtgagcaccctgatcctgatcagcatcgccatcgtgagataccacatgatcaagcaccccatcagcaacaacctgaccgccaaccacggctacttcctgatcgccaccgtgtggaccctgggcttcgccatctgcagccccctgcccgtgttccacagcctggtggagctgcaggagaccttcggcagcgccctgctgagcagcagatacctgtgcgtggagagctggcccagcgacagctacagaatcgccttcaccatcagcctgctgctggtgcagtacatcctgcccctggtgtgcctgaccgtgagccacaccagcgtgtgcagaagcatcagctgcggcctgagcaacaaggagaacagactggaggagaacgagatgatcaacctgaccctgcaccccagcaagaagagcggcccccaggtgaagctgagcggcagccacaagtggagctacagcttcatcaagaagcacagaagaagatacagcaagaagaccgcctgcgtgctgcccgcccccgagagacccagccaggagaaccacagcagaatcctgcccgagaacttcggcagcgtgagaagccagctgagcagcagcagcaagttcatccccggcgtgcccacctgcttcgagatcaagcccgaggagaacagcgacgtgcacgagctgagagtgaagagaagcgtgaccagaatcaagaagagaagcagaagcgtgttctacagactgaccatcctgatcctggtgttcgccgtgagctggatgcccctgcacctgttccacgtggtgaccgacttcaacgacaacctgatcagcaacagacacttcaagctggtgtactgcatctgccacctgctgggcatgatgagctgctgcctgaaccccatcctgtacggcttcctgaacaacggcatcaaggccgacctggtgagcctgatccactgcctgcacatgtag

SEQ ID NO: 90955 - DNA, 1338 bp, synthetic construct; identical to SEQ ID NO: 90954
  misc_feature 1..1338: note = Description of Artificial Sequence: Synthetic coding sequence
  source 1..1338: mol_type = other DNA

SEQ ID NO: 90956 - DNA, 1338 bp, synthetic construct; identical to SEQ ID NO: 90954
  misc_feature 1..1338: note = Description of Artificial Sequence: Synthetic coding sequence
  source 1..1338: mol_type = other DNA

SEQ ID NO: 90957 - DNA, 987 bp, synthetic construct
  misc_feature 1..987: note = Description of Artificial Sequence: Synthetic coding sequence
  source 1..987: mol_type = other DNA
atggacaacgccagcttcagcgagccctggcccgccaacgccagcggccccgaccccgccctgagctgcagcaacgccagcaccctggcccccctgcccgcccccctggccgtggccgtgcccgtggtgtacgccgtgatctgcgccgtgggcctggccggcaacagcgccgtgctgtacgtgctgctgagagcccccagaatgaagaccgtgaccaacctgttcatcctgaacctggccatcgccgacgagctgttcaccctggtgctgcccatcaacatcgccgacttcctgctgagacagtggcccttcggcgagctgatgtgcaagctgatcgtggccatcgaccagtacaacaccttcagcagcctgtacttcctgaccgtgatgagcgccgacagatacctggtggtgctggccaccgccgagagcagaagagtggccggcagaacctacagcgccgccagagccgtgagcctggccgtgtggggcatcgtgaccctggtggtgctgcccttcgccgtgttcgccagactggacgacgagcagggcagaagacagtgcgtgctggtgttcccccagcccgaggccttctggtggagagccagcagactgtacaccctggtgctgggcttcgccatccccgtgagcaccatctgcgtgctgtacaccaccctgctgtgcagactgcacgccatgagactggacagccacgccaaggccctggagagagccaagaagagagtgaccttcctggtggtggccatcctggccgtgtgcctgctgtgctggaccccctaccacctgagcaccgtggtggccctgaccaccgacctgccccagacccccctggtgatcgccatcagctacttcatcaccagcctgagctacgccaacagctgcctgaaccccttcctgtacgccttcctggacgccagcttcagaagaaacctgagacagctgatcacctgcagagccgccgcctag

SEQ ID NO: 90958 - DNA, 1599 bp, synthetic construct
  misc_feature 1..1599: note = Description of Artificial Sequence: Synthetic coding sequence
  source 1..1599: mol_type = other DNA
atgctggccgagcccttccccaaggtggtggccagcctgatcatcctgcacctgagcggcgccaccaagaagggcaccgagaagcagaccaccagcgagacccagaagagcgtgcagtgcggcacctggaccaagcacgccgagggcggcatcttcaccagccccaactaccccagcaagtacccccccgacagagagtgcatctacatcatcgaggccgcccccagacagtgcatcgagctgtacttcgacgagaagtacagcatcgagcccagctgggagtgcaagttcgaccacatcgaggtgagagacggccccttcggcttcagccccatcatcggcagattctgcggccagcagaacccccccgtgatcaagagcagcggcagattcctgtggatcaagttcttcgccgacggcgagctggagagcatgggcttcagcgccagatacaacttcacccccgaccccgacttcaaggacctgggcgccctgaagcccctgcccgcctgcgagttcgagatgggcggcagcgagggcatcgtggagagcatccagatcatgaaggagggcaaggccaccgccagcgaggccgtggactgcaagtggtacatcagagccccccccagaagcaagatctacctgagattcctggactacgagatgcagaacagcaacgagtgcaagagaaacttcgtggccgtgtacgacggcagcagcagcgtggaggacctgaaggccaagttctgcagcaccgtggccaacgacgtgatgctgagaaccggcctgggcgtgatcagaatgtgggccgacgagggcagcagaaacagcagattccagatgctgttcaccagcttccaggagcccccctgcgagggcaacaccttcttctgccacagcaacatgtgcatcaacaacaccctggtgtgcaacggcctgcagaactgcgtgtacccctgggacgagaaccactgcaaggagaagagaaagaccagcctgctggaccagctgaccaacaccagcggcaccgtgatcggcgtgaccagctgcatcgtgatcatcctgatcatcatcagcgtgatcgtgcagatcaagcagcccagaaagaagtacgtgcagagaaagagcgacttcgaccagaccgtgttccaggaggtgttcgagcccccccactacgagctgtgcaccctgagaggcaccggcgccaccgccgacttcgccgacgtggccgacgacttcgagaactaccacaagctgagaagaagcagcagcaagtgcatccacgaccaccactgcggcagccagctgagcagcaccaagggcagcagaagcaacctgagcaccagagacgccagcatcctgaccgagatgcccacccagcccggcaagcccctgatcccccccatgaacagaagaaacatcctggtgatgaagcacagctacagccaggacgccgccgacgcctgcgacatcgacgagatcgaggaggtgcccaccaccagccacagactgagcagacacgacaaggccgtgcagagattctgcctgatcggcagcctgagcaagcacgagagcgagtacaacaccaccagagtgtag

SEQ ID NO: 90959 - DNA, 1602 bp, synthetic construct
  misc_feature 1..1602: note = Description of Artificial Sequence: Synthetic coding sequence
  source 1..1602: mol_type = other DNA
atgatccacggcagaagcgtgctgcacatcgtggccagcctgatcatcctgcacctgagcggcgccaccaagaagggcaccgagaagcagaccaccagcgagacccagaagagcgtgcagtgcggcacctggaccaagcacgccgagggcggcatcttcaccagccccaactaccccagcaagtacccccccgacagagagtgcatctacatcatcgaggccgcccccagacagtgcatcgagctgtacttcgacgagaagtacagcatcgagcccagctgggagtgcaagttcgaccacatcgaggtgagagacggccccttcggcttcagccccatcatcggcagattctgcggccagcagaacccccccgtgatcaagagcagcggcagattcctgtggatcaagttcttcgccgacggcgagctggagagcatgggcttcagcgccagatacaacttcacccccgaccccgacttcaaggacctgggcgccctgaagcccctgcccgcctgcgagttcgagatgggcggcagcgagggcatcgtggagagcatccagatcatgaaggagggcaaggccaccgccagcgaggccgtggactgcaagtggtacatcagagccccccccagaagcaagatctacctgagattcctggactacgagatgcagaacagcaacgagtgcaagagaaacttcgtggccgtgtacgacggcagcagcagcgtggaggacctgaaggccaagttctgcagcaccgtggccaacgacgtgatgctgagaaccggcctgggcgtgatcagaatgtgggccgacgagggcagcagaaacagcagattccagatgctgttcaccagcttccaggagcccccctgcgagggcaacaccttcttctgccacagcaacatgtgcatcaacaacaccctggtgtgcaacggcctgcagaactgcgtgtacccctgggacgagaaccactgcaaggagaagagaaagaccagcctgctggaccagctgaccaacaccagcggcaccgtgatcggcgtgaccagctgcatcgtgatcatcctgatcatcatcagcgtgatcgtgcagatcaagcagcccagaaagaagtacgtgcagagaaagagcgacttcgaccagaccgtgttccaggaggtgttcgagcccccccactacgagctgtgcaccctgagaggcaccggcgccaccgccgacttcgccgacgtggccgacgacttcgagaactaccacaagctgagaagaagcagcagcaagtgcatccacgaccaccactgcggcagccagctgagcagcaccaagggcagcagaagcaacctgagcaccagagacgccagcatcctgaccgagatgcccacccagcccggcaagcccctgatcccccccatgaacagaagaaacatcctggtgatgaagcacagctacagccaggacgccgccgacgcctgcgacatcgacgagatcgaggaggtgcccaccaccagccacagactgagcagacacgacaaggccgtgcagagattctgcctgatcggcagcctgagcaagcacgagagcgagtacaacaccaccagagtgtag

SEQ ID NO: 90960 - DNA, 471 bp, synthetic construct
  misc_feature 1..471: note = Description of Artificial Sequence: Synthetic coding sequence
  source 1..471: mol_type = other DNA
atgctggccgagcccttccccaaggtggtggccagcctgatcatcctgcacctgagcggcgccaccaagaagggcaccgagaagcagaccaccagcgagacccagaagagcgtgcagtgcggcacctggaccaagcacgccgagggcggcatcttcaccagccccaactaccccagcaagtacccccccgacagagagtgcatctacatcatcgaggccgcccccagacagtgcatcgagctgtacttcgacgagaagtacagcatcgagcccagctgggagtgcaagttcgaccacatcgaggtgagagacggccccttcggcttcagccccatcatcggcagattctgcggccagcagaacccccccgtgatcaagagcagcggcagattcctgtggatcaagttcttcgccgacggcgagctggagagcatgggcttcagcgccagatacaacttcacccccgagtag

SEQ ID NO: 90961 - DNA, 1602 bp, synthetic construct; identical to SEQ ID NO: 90959
  misc_feature 1..1602: note = Description of Artificial Sequence: Synthetic coding sequence
  source 1..1602: mol_type = other DNA

SEQ ID NO: 90962 - DNA, 1017 bp, synthetic construct
  misc_feature 1..1017: note = Description of Artificial Sequence: Synthetic coding sequence
  source 1..1017: mol_type = other DNA
atgagcggcagcagcctgcccagcgccctggccctgagcctgctgctggtgagcggcagcctgctgcccggccccggcgccgcccagaacgccggcttcgtgaagagccccatgagcgagaccaagctgaccggcgacgccttcgagctgtactgcgacgtggtgggcagccccacccccgagatccagtggtggtacgccgaggtgaacagagccgagagcttcagacagctgtgggacggcgccagaaagagaagagtgaccgtgaacaccgcctacggcagcaacggcgtgagcgtgctgagaatcaccagactgaccctggaggacagcggcacctacgagtgcagagccagcaacgaccccaagagaaacgacctgagacagaaccccagcatcacctggatcagagcccaggccaccatcagcgtgctgcagaagcccagaatcgtgaccagcgaggaggtgatcatcagagacagccccgtgctgcccgtgaccctgcagtgcaacctgaccagcagcagccacaccctgacctacagctactggaccaagaacggcgtggagctgagcgccaccagaaagaacgccagcaacatggagtacagaatcaacaagcccagagccgaggacagcggcgagtaccactgcgtgtaccacttcgtgagcgcccccaaggccaacgccaccatcgaggtgaaggccgcccccgacatcaccggccacaagagaagcgagaacaagaacgagggccaggacgccaccatgtactgcaagagcgtgggctacccccaccccgactggatctggagaaagaaggagaacggcatgcccatggacatcgtgaacaccagcggcagattcttcatcatcaacaaggagaactacaccgagctgaacatcgtgaacctgcagatcaccgaggaccccggcgagtacgagtggtgcggcgccacctggccccacagcggcctgagctgggagttctggctgaagctgagcagcctgtggtag

SEQ ID NO: 90963 - DNA, 1197 bp, synthetic construct
  misc_feature 1..1197: note = Description of Artificial Sequence: Synthetic coding sequence
  source 1..1197: mol_type = other DNA
atgagcggcagcagcctgcccagcgccctggccctgagcctgctgctggtgagcggcagcctgctgcccggccccggcgccgcccagaacgccggcttcgtgaagagccccatgagcgagaccaagctgaccggcgacgccttcgagctgtactgcgacgtggtgggcagccccacccccgagatccagtggtggtacgccgaggtgaacagagccgagagcttcagacagctgtgggacggcgccagaaagagaagagtgaccgtgaacaccgcctacggcagcaacggcgtgagcgtgctgagaatcaccagactgaccctggaggacagcggcacctacgagtgcagagccagcaacgaccccaagagaaacgacctgagacagaaccccagcatcacctggatcagagcccaggccaccatcagcgtgctgcagaagcccagaatcgtgaccagcgaggaggtgatcatcagagacagccccgtgctgcccgtgaccctgcagtgcaacctgaccagcagcagccacaccctgacctacagctactggaccaagaacggcgtggagctgagcgccaccagaaagaacgccagcaacatggagtacagaatcaacaagcccagagccgaggacagcggcgagtaccactgcgtgtaccacttcgtgagcgcccccaaggccaacgccaccatcgaggtgaaggccgcccccgacatcaccggccacaagagaagcgagaacaagaacgagggccaggacgccaccatgtactgcaagagcgtgggctacccccaccccgactggatctggagaaagaaggagaacggcatgcccatggacatcgtgaacaccagcggcagattcttcatcatcaacaaggagaactacaccgagctgaacatcgtgaacctgcagatcaccgaggaccccggcgagtacgagtgcaacgccaccaacgccatcggcagcgccagcgtggtgaccgtgctgagagtgagaagccacctggcccccctgtggcccttcctgggcatcctggccgagatcatcatcctggtggtgatcatcgtggtgtacgagaagagaaagagacccgacgaggtgcccgacgacgacgagcccgccggccccatgaagaccaacagcaccaacaaccacaaggacaagaacctgagacagagaaacaccaactag

SEQ ID NO: 90964 - DNA, 849 bp, synthetic construct
  misc_feature 1..849: note = Description of Artificial Sequence: Synthetic coding sequence
  source 1..849: mol_type = other DNA
atgagcggcagcagcctgcccagcgccctggccctgagcctgctgctggtgagcggcagcctgctgcccggccccggcgccgcccagaacgagcccagaatcgtgaccagcgaggaggtgatcatcagagacagccccgtgctgcccgtgaccctgcagtgcaacctgaccagcagcagccacaccctgacctacagctactggaccaagaacggcgtggagctgagcgccaccagaaagaacgccagcaacatggagtacagaatcaacaagcccagagccgaggacagcggcgagtaccactgcgtgtaccacttcgtgagcgcccccaaggccaacgccaccatcgaggtgaaggccgcccccgacatcaccggccacaagagaagcgagaacaagaacgagggccaggacgccaccatgtactgcaagagcgtgggctacccccaccccgactggatctggagaaagaaggagaacggcatgcccatggacatcgtgaacaccagcggcagattcttcatcatcaacaaggagaactacaccgagctgaacatcgtgaacctgcagatcaccgaggaccccggcgagtacgagtgcaacgccaccaacgccatcggcagcgccagcgtggtgaccgtgctgagagtgagaagccacctggcccccctgtggcccttcctgggcatcctggccgagatcatcatcctggtggtgatcatcgtggtgtacgagaagagaaagagacccgacgaggtgcccgacgacgacgagcccgccggccccatgaagaccaacagcaccaacaaccacaaggacaagaacctgagacagagaaacaccaactag

SEQ ID NO: 90965 - DNA, 582 bp, synthetic construct
  misc_feature 1..582: note = Description of Artificial Sequence: Synthetic coding sequence
  source 1..582: mol_type = other DNA
atgagcggcagcagcctgcccagcgccctggccctgagcctgctgctggtgagcggcagcctgctgcccggccccggcgccgcccagaacgccgcccccgacatcaccggccacaagagaagcgagaacaagaacgagggccaggacgccaccatgtactgcaagagcgtgggctacccccaccccgactggatctggagaaagaaggagaacggcatgcccatggacatcgtgaacaccagcggcagattcttcatcatcaacaaggagaactacaccgagctgaacatcgtgaacctgcagatcaccgaggaccccggcgagtacgagtgcaacgccaccaacgccatcggcagcgccagcgtggtgaccgtgctgagagtgagaagccacctggcccccctgtggcccttcctgggcatcctggccgagatcatcatcctggtggtgatcatcgtggtgtacgagaagagaaagagacccgacgaggtgcccgacgacgacgagcccgccggccccatgaagaccaacagcaccaacaaccacaaggacaagaacctgagacagagaaacaccaactag

SEQ ID NO: 90966 - DNA, 1185 bp, synthetic construct
  misc_feature 1..1185: note = Description of Artificial Sequence: Synthetic coding sequence
  source 1..1185: mol_type = other DNA
atgagcggcagcagcctgcccagcgccctggccctgagcctgctgctggtgagcggcagcctgctgcccggccccggcgccgcccagaacgccggcttcgtgaagagccccatgagcgagaccaagctgaccggcgacgccttcgagctgtactgcgacgtggtgggcagccccacccccgagatccagtggtggtacgccgaggtgaacagagccgagagcttcagacagctgtgggacggcgccagaaagagaagagtgaccgtgaacaccgcctacggcagcaacggcgtgagcgtgctgagaatcaccagactgaccctggaggacagcggcacctacgagtgcagagccagcaacgaccccaagagaaacgacctgagacagaaccccagcatcacctggatcagagcccaggccaccatcagcgtgctgcagaagcccagaatcgtgaccagcgaggaggtgatcatcagagacagccccgtgctgcccgtgaccctgcagtgcaacctgaccagcagcagccacaccctgacctacagctactggaccaagaacggcgtggagctgagcgccaccagaaagaacgccagcaacatggagtacagaatcaacaagcccagagccgaggacagcggcgagtaccactgcgtgtaccacttcgtgagcgcccccaaggccaacgccaccatcgaggtgaaggccgcccccgacatcaccggccacaagagaagcgagaacaagaacgagggccaggacgccaccatgtactgcaagagcgtgggctacccccaccccgactggatctggagaaagaaggagaacggcatgcccatggacatcgtgaacaccagcggcagattcttcatcatcaacaaggagaactacaccgagctgaacatcgtgaacctgcagatcaccgaggaccccggcgagtacgagtgcaacgccaccaacgccatcggcagcgccagcgtggtgaccgtgctgagagtgagaagccacctggcccccctgtggcccttcctgggcatcctggccgagatcatcatcctggtggtgatcatcgtggtgtacgagaagagaaagagacccgacgaggtgcccgacgtgccccccagaaagaccaacagcaccaacaaccacaaggacaagaacctgagacagagaaacaccaactag

SEQ ID NO: 90967 - DNA, 513 bp, synthetic construct
  misc_feature 1..513: note = Description of Artificial Sequence: Synthetic coding sequence
  source 1..513: mol_type = other DNA
atgatggccggcatgaagatccagctggtgtgcatgctgctgctggccttcagcagctggagcctgtgcagcgacagcgaggaggagatgaaggccctggaggccgacttcctgaccaacatgcacaccagcaagatcagcaaggcccacgtgcccagctggaagatgaccctgctgaacgtgtgcagcctggtgaacaacctgaacagccccgccgaggagaccggcgaggtgcacgaggaggagctggtggccagaagaaagctgcccaccgccctggacggcttcagcctggaggccatgctgaccatctaccagctgcacaagatctgccacagcagagccttccagcactgggagctgatccaggaggacatcctggacaccggcaacgacaagaacggcaaggaggaggtgatcaagagaaagatcccctacatcctgaagagacagctgtacgagaacaagcccagaagaccctacatcctgaagagagacagctactactactag

SEQ ID NO: 90968 - DNA, 348 bp, synthetic construct
  misc_feature 1..348: note = Description of Artificial Sequence: Synthetic coding sequence
  source 1..348: mol_type = other DNA
atgaccctgctgaacgtgtgcagcctggtgaacaacctgaacagccccgccgaggagaccggcgaggtgcacgaggaggagctggtggccagaagaaagctgcccaccgccctggacggcttcagcctggaggccatgctgaccatctaccagctgcacaagatctgccacagcagagccttccagcactgggagctgatccaggaggacatcctggacaccggcaacgacaagaacggcaaggaggaggtgatcaagagaaagatcccctacatcctgaagagacagctgtacgagaacaagcccagaagaccctacatcctgaagagagacagctactactactag

SEQ ID NO: 90969 - DNA, 288 bp, synthetic construct
  misc_feature 1..288: note = Description of Artificial Sequence: Synthetic coding sequence
  source 1..288: mol_type = other DNA
atgatggccggcatgaagatccagctggtgtgcatgctgctgctggccttcagcagctggagcctgtgcagcgacagcgaggaggagatgaaggccctggaggccgacttcctgaccaacatgcacaccagcaagctgatccaggaggacatcctggacaccggcaacgacaagaacggcaaggaggaggtgatcaagagaaagatcccctacatcctgaagagacagctgtacgagaacaagcccagaagaccctacatcctgaagagagacagctactactactag

SEQ ID NO: 90970 - DNA, 1257 bp, synthetic construct
  misc_feature 1..1257: note = Description of Artificial Sequence: Synthetic coding sequence
  source 1..1257: mol_type = other DNA
atgagactgaacagcagcgcccccggcacccccggcacccccgccgccgaccccttccagagagcccaggccggcctggaggaggccctgctggcccccggcttcggcaacgccagcggcaacgccagcgagagagtgctggccgcccccagcagcgagctggacgtgaacaccgacatctacagcaaggtgctggtgaccgccgtgtacctggccctgttcgtggtgggcaccgtgggcaacaccgtgaccgccttcaccctggccagaaagaagagcctgcagagcctgcagagcaccgtgcactaccacctgggcagcctggccctgagcgacctgctgaccctgctgctggccatgcccgtggagctgtacaacttcatctgggtgcaccacccctgggccttcggcgacgccggctgcagaggctactacttcctgagagacgcctgcacctacgccaccgccctgaacgtggccagcctgagcgtggagagatacctggccatctgccaccccttcaaggccaagaccctgatgagcagaagcagaaccaagaagttcatcagcgccatctggctggccagcgccctgctggccgtgcccatgctgttcaccatgggcgagcagaacagaagcgccgacggccagcacgccggcggcctggtgtgcacccccaccatccacaccgccaccgtgaaggtggtgatccaggtgaacaccttcatgagcttcatcttccccatggtggtgatcagcgtgctgaacaccatcatcgccaacaagctgaccgtgatggtgagacaggccgccgagcagggccaggtgtgcaccgtgggcggcgagcacagcaccttcagcatggccatcgagcccggcagagtgcaggccctgagacacggcgtgagagtgctgagagccgtggtgatcgccttcgtggtgtgctggctgccctaccacgtgagaagactgatgttctgctacatcagcgacgagcagtggacccccttcctgtacgacttctaccactacttctacatggtgaccaacgccctgttctacgtgagcagcaccatcaaccccatcctgtacaacctggtgagcgccaacttcagacacatcttcctggccaccctggcctgcctgtgccccgtgtggagaagaagaagaaagagacccgccttcagcagaaaggccgacagcgtgagcagcaaccacaccctgagcagcaacgccaccagagagaccctgtactag

SEQ ID NO: 90971 - DNA, 951 bp, synthetic construct
  misc_feature 1..951: note = Description of Artificial Sequence: Synthetic coding sequence
  source 1..951: mol_type = other DNA
atgggcgtgtgcggctacctgttcctgccctggaagtgcctggtggtggtgagcctgagactgctgttcctggtgcccaccggcgtgcccgtgagaagcggcgacgccaccttccccaaggccatggacaacgtgaccgtgagacagggcgagagcgccaccctgagatgcaccatcgacaacagagtgaccagagtggcctggctgaacagaagcaccatcctgtacgccggcaacgacaagtggtgcctggaccccagagtggtgctgctgagcaacacccagacccagtacagcatcgagatccagaacgtggacgtgtacgacgagggcccctacacctgcagcgtgcagaccgacaaccaccccaagaccagcagagtgcacctgatcgtgcaggtgagccccaagatcgtggagatcagcagcgacatcagcatcaacgagggcaacaacatcagcctgacctgcatcgccaccggcagacccgagcccaccgtgacctggagacacatcagccccaaggccgtgggcttcgtgagcgaggacgagtacctggagatccagggcatcaccagagagcagagcggcgactacgagtgcagcgccagcaacgacgtggccgcccccgtggtgagaagagtgaaggtgaccgtgaactaccccccctacatcagcgaggccaagggcaccggcgtgcccgtgggccagaagggcaccctgcagtgcgaggccagcgccgtgcccagcgccgagttccagtggtacaaggacgacaagagactgatcgagggcaagaagggcgtgaaggtggagaacagacccttcctgagcaagctgatcttcttcaacgtgagcgagcacgactacggcaactacacctgcgtggccagcaacaagctgggccacaccaacgccagcatcatgctgttcggcgagaccgtgctgtag

SEQ ID NO: 90972 - DNA, 1035 bp, synthetic construct
  misc_feature 1..1035: note = Description of Artificial Sequence: Synthetic coding sequence
  source 1..1035: mol_type = other DNA
atgggcgtgtgcggctacctgttcctgccctggaagtgcctggtggtggtgagcctgagactgctgttcctggtgcccaccggcgtgcccgtgagaagcggcgacgccaccttccccaaggccatggacaacgtgaccgtgagacagggcgagagcgccaccctgagatgcaccatcgacaacagagtgaccagagtggcctggctgaacagaagcaccatcctgtacgccggcaacgacaagtggtgcctggaccccagagtggtgctgctgagcaacacccagacccagtacagcatcgagatccagaacgtggacgtgtacgacgagggcccctacacctgcagcgtgcagaccgacaaccaccccaagaccagcagagtgcacctgatcgtgcaggtgagccccaagatcgtggagatcagcagcgacatcagcatcaacgagggcaacaacatcagcctgacctgcatcgccaccggcagacccgagcccaccgtgacctggagacacatcagccccaaggccgtgggcttcgtgagcgaggacgagtacctggagatccagggcatcaccagagagcagagcggcgactacgagtgcagcgccagcaacgacgtggccgcccccgtggtgagaagagtgaaggtgaccgtgaactaccccccctacatcagcgaggccaagggcaccggcgtgcccgtgggccagaagggcaccctgcagtgcgaggccagcgccgtgcccagcgccgagttccagtggtacaaggacgacaagagactgatcgagggcaagaagggcgtgaaggtggagaacagacccttcctgagcaagctgatcttcttcaacgtgagcgagcacgactacggcaactacacctgcgtggccagcaacaagctgggccacaccaacgccagcatcatgctgttcggccccggcgccgtgagcgaggtgagcaacggcaccagcagaagagccggctgcgtgtggctgctgcccctgctggtgctgcacctgctgctgaagttctag

SEQ ID NO: 90973 - DNA, 1035 bp, synthetic construct
  misc_feature 1..1035: note = Description of Artificial Sequence: Synthetic coding sequence
  source 1..1035: mol_type = other DNA
atgaagaccatccagcccaagatgcacaacagcatcagctgggccatcttcaccggcctggccgccctgtgcctgttccagggcgtgcccgtgagaagcggcgacgccaccttccccaaggccatggacaacgtgaccgtgagacagggcgagagcgccaccctgagatgcaccatcgacaacagagtgaccagagtggcctggctgaacagaagcaccatcctgtacgccggcaacgacaagtggtgcctggaccccagagtggtgctgctgagcaacacccagacccagtacagcatcgagatccagaacgtggacgtgtacgacgagggcccctacacctgcagcgtgcagaccgacaaccaccccaagaccagcagagtgcacctgatcgtgcaggtgagccccaagatcgtggagatcagcagcgacatcagcatcaacgagggcaacaacatcagcctgacctgcatcgccaccggcagacccgagcccaccgtgacctggagacacatcagccccaaggccgtgggcttcgtgagcgaggacgagtacctggagatccagggcatcaccagagagcagagcggcgactacgagtgcagcgccagcaacgacgtggccgcccccgtggtgagaagagtgaaggtgaccgtgaactaccccccctacatcagcgaggccaagggcaccggcgtgcccgtgggccagaagggcaccctgcagtgcgaggccagcgccgtgcccagcgccgagttccagtggtacaaggacgacaagagactgatcgagggcaagaagggcgtgaaggtggagaacagacccttcctgagcaagctgatcttcttcaacgtgagcgagcacgactacggcaactacacctgcgtggccagcaacaagctgggccacaccaacgccagcatcatgctgttcggccccggcgccgtgagcgaggtgagcaacggcaccagcagaagagccggctgcgtgtggctgctgcccctgctggtgctgcacctgctgctgaagttctag

SEQ ID NO: 90974 - DNA, 1041 bp, synthetic construct
  misc_feature 1..1041: note = Description of Artificial Sequence: Synthetic coding sequence
  source 1..1041: mol_type = other DNA
atgaacggcaagagaaacggcgagggcggcaagagatggaagtggaagggcaccggcgtgcccgtgagaagcggcgacgccaccttccccaaggccatggacaacgtgaccgtgagacagggcgagagcgccaccctgagatgcaccatcgacaacagagtgaccagagtggcctggctgaacagaagcaccatcctgtacgccggcaacgacaagtggtgcctggaccccagagtggtgctgctgagcaacacccagacccagtacagcatcgagatccagaacgtggacgtgtacgacgagggcccctacacctgcagcgtgcagaccgacaaccaccccaagaccagcagagtgcacctgatcgtgcaggtgagccccaagatcgtggagatcagcagcgacatcagcatcaacgagggcaacaacatcagcctgacctgcatcgccaccggcagacccgagcccaccgtgacctggagacacatcagccccaaggccgtgggcttcgtgagcgaggacgagtacctggagatccagggcatcaccagagagcagagcggcgactacgagtgcagcgccagcaacgacgtggccgcccccgtggtgagaagagtgaaggtgaccgtgaactaccccccctacatcagcgaggccaagggcaccggcgtgcccgtgggccagaagggcaccctgcagtgcgaggccagcgccgtgcccagcgccgagttccagtggtacaaggacgacaagagactgatcgagggcaagaagggcgtgaaggtggagaacagacccttcctgagcaagctgatcttcttcaacgtgagcgagcacgactacggcaactacacctgcgtggccagcaacaagctgggccacaccaacgccagcatcatgctgttcgaggtgaagaccaccgccctgaccccctggaagggccccggcgccgtgagcgaggtgagcaacggcaccagcagaagagccggctgcgtgtggctgctgcccctgctggtgctgcacctgctgctgaagttctag

SEQ ID NO: 90975 - DNA, 1068 bp, synthetic construct
  misc_feature 1..1068: note = Description of Artificial Sequence: Synthetic coding sequence
  source 1..1068: mol_type = other DNA
atgaagaccatccagcccaagatgcacaacagcatcagctgggccatcttcaccggcctggccgccctgtgcctgttccagggcgtgcccgtgagaagcggcgacgccaccttccccaaggccatggacaacgtgaccgtgagacagggcgagagcgccaccctgagatgcaccatcgacaacagagtgaccagagtggcctggctgaacagaagcaccatcctgtacgccggcaacgacaagtggtgcctggaccccagagtggtgctgctgagcaacacccagacccagtacagcatcgagatccagaacgtggacgtgtacgacgagggcccctacacctgcagcgtgcagaccgacaaccaccccaagaccagcagagtgcacctgatcgtgcaggtgagccccaagatcgtggagatcagcagcgacatcagcatcaacgagggcaacaacatcagcctgacctgcatcgccaccggcagacccgagcccaccgtgacctggagacacatcagccccaaggccgtgggcttcgtgagcgaggacgagtacctggagatccagggcatcaccagagagcagagcggcgactacgagtgcagcgccagcaacgacgtggccgcccccgtggtgagaagagtgaaggtgaccgtgaactaccccccctacatcagcgaggccaagggcaccggcgtgcccgtgggccagaagggcaccctgcagtgcgaggccagcgccgtgcccagcgccgagttccagtggtacaaggacgacaagagactgatcgagggcaagaagggcgtgaaggtggagaacagacccttcctgagcaagctgatcttcttcaacgtgagcgagcacgactacggcaactacacctgcgtggccagcaacaagctgggccacaccaacgccagcatcatgctgttcgaggtgaagaccaccgccctgaccccctggaagggccccggcgccgtgagcgaggtgagcaacggcaccagcagaagagccggctgcgtgtggctgctgcccctgctggtgctgcacctgctgctgaagttctag

SEQ ID NO: 90976 - DNA, 1068 bp, synthetic construct
  misc_feature 1..1068: note = Description of Artificial Sequence: Synthetic coding sequence
  source 1..1068: mol_type = other DNA
atgggcgtgtgcggctacctgttcctgccctggaagtgcctggtggtggtgagcctgagactgctgttcctggtgcccaccggcgtgcccgtgagaagcggcgacgccaccttccccaaggccatggacaacgtgaccgtgagacagggcgagagcgccaccctgagatgcaccatcgacaacagagtgaccagagtggcctggctgaacagaagcaccatcctgtacgccggcaacgacaagtggtgcctggaccccagagtggtgctgctgagcaacacccagacccagtacagcatcgagatccagaacgtggacgtgtacgacgagggcccctacacctgcagcgtgcagaccgacaaccaccccaagaccagcagagtgcacctgatcgtgcaggtgagccccaagatcgtggagatcagcagcgacatcagcatcaacgagggcaacaacatcagcctgacctgcatcgccaccggcagacccgagcccaccgtgacctggagacacatcagccccaaggccgtgggcttcgtgagcgaggacgagtacctggagatccagggcatcaccagagagcagagcggcgactacgagtgcagcgccagcaacgacgtggccgcccccgtggtgagaagagtgaaggtgaccgtgaactaccccccctacatcagcgaggccaagggcaccggcgtgcccgtgggccagaagggcaccctgcagtgcgaggccagcgccgtgcccagcgccgagttccagtggtacaaggacgacaagagactgatcgagggcaagaagggcgtgaaggtggagaacagacccttcctgagcaagctgatcttcttcaacgtgagcgagcacgactacggcaactacacctgcgtggccagcaacaagctgggccacaccaacgccagcatcatgctgttcgaggtgaagaccaccgccctgaccccctggaagggccccggcgccgtgagcgaggtgagcaacggcaccagcagaagagccggctgcgtgtggctgctgcccctgctggtgctgcacctgctgctgaagttctag

SEQ ID NO: 90977 - DNA, 2373 bp, synthetic construct
  misc_feature 1..2373: note = Description of Artificial Sequence: Synthetic coding sequence
  source 1..2373: mol_type = other DNA
atgctgagaggcggcagaagaggccagctgggctggcacagctgggccgccggccccggcagcctgctggcctggctgatcctggccagcgccggcgccgccccctgccccgacgcctgctgcccccacggcagcagcggcctgagatgcaccagagacggcgccctggacagcctgcaccacctgcccggcgccgagaacctgaccgagctgtacatcgagaaccagcagcacctgcagcacctggagctgagagacctgagaggcctgggcgagctgagaaacctgaccatcgtgaagagcggcctgagattcgtggcccccgacgccttccacttcacccccagactgagcagactgaacctgagcttcaacgccctggagagcctgagctggaagaccgtgcagggcctgagcctgcaggagctggtgctgagcggcaaccccctgcactgcagctgcgccctgagatggctgcagagatgggaggaggagggcctgggcggcgtgcccgagcagaagctgcagtgccacggccagggccccctggcccacatgcccaacgccagctgcggcgtgcccaccctgaaggtgcaggtgcccaacgccagcgtggacgtgggcgacgacgtgctgctgagatgccaggtggagggcagaggcctggagcaggccggctggatcctgaccgagctggagcagagcgccaccgtgatgaagagcggcggcctgcccagcctgggcctgaccctggccaacgtgaccagcgacctgaacagaaagaacgtgacctgctgggccgagaacgacgtgggcagagccgaggtgagcgtgcaggtgaacgtgagcttccccgccagcgtgcagctgcacaccgccgtggagatgcaccactggtgcatccccttcagcgtggacggccagcccgcccccagcctgagatggctgttcaacggcagcgtgctgaacgagaccagcttcatcttcaccgagttcctggagcccgccgccaacgagaccgtgagacacggctgcctgagactgaaccagcccacccacgtgaacaacggcaactacaccctgctggccgccaaccccttcggccaggccagcgccagcatcatggccgccttcatggacaaccccttcgagttcaaccccgaggaccccatccccgacaccaacagcaccagcggcgaccccgtggagaagaaggacgagacccccttcggcgtgagcgtggccgtgggcctggccgtgttcgcctgcctgttcctgagcaccctgctgctggtgctgaacaagtgcggcagaagaaacaagttcggcatcaacagacccgccgtgctggcccccgaggacggcctggccatgagcctgcacttcatgaccctgggcggcagcagcctgagccccaccgagggcaagggcagcggcctgcagggccacatcatcgagaacccccagtacttcagcgacgcctgcgtgcaccacatcaagagaagagacatcgtgctgaagtgggagctgggcgagggcgccttcggcaaggtgttcctggccgagtgccacaacctgctgcccgagcaggacaagatgctggtggccgtgaaggccctgaaggaggccagcgagagcgccagacaggacttccagagagaggccgagctgctgaccatgctgcagcaccagcacatcgtgagattcttcggcgtgtgcaccgagggcagacccctgctgatggtgttcgagtacatgagacacggcgacctgaacagattcctgagaagccacggccccgacgccaagctgctggccggcggcgaggacgtggcccccggccccctgggcctgggccagctgctggccgtggccagccaggtggccgccggcatggtgtacctggccggcctgcacttcgtgcacagagacctggccaccagaaactgcctggtgggccagggcctggtggtgaagatcggcgacttcggcatgagcagagacatctacagcaccgactactacagagtgggcggcagaaccatgctgcccatcagatggatgccccccgagagcatcctgtacagaaagttcaccaccgagagcgacgtgtggagcttcggcgtggtgctgtgggagatcttcacctacggcaagcagccctggtaccagctgagcaacaccgaggccatcgactgcatcacccagggcagagagctggagagacccagagcctgcccccccgaggtgtacgccatcatgagaggctgctggcagagagagccccagcagagacacagcatcaaggacgtgcacgccagactgcaggccctggcccaggccccccccgtgtacctggacgtgctgggctag

SEQ ID NO: 90978 - DNA, 2283 bp, synthetic construct
  misc_feature 1..2283: note = Description of Artificial Sequence: Synthetic coding sequence
  source 1..2283: mol_type = other DNA
atgaaggaggccgccctgatctgcctggcccccagcgtgccccccatcctgaccgtgaagagctgggacaccatgcagctgagagccgccagaagcagatgcaccaacctgctggccgccagctacatcgagaaccagcagcacctgcagcacctggagctgagagacctgagaggcctgggcgagctgagaaacctgaccatcgtgaagagcggcctgagattcgtggcccccgacgccttccacttcacccccagactgagcagactgaacctgagcttcaacgccctggagagcctgagctggaagaccgtgcagggcctgagcctgcaggagctggtgctgagcggcaaccccctgcactgcagctgcgccctgagatggctgcagagatgggaggaggagggcctgggcggcgtgcccgagcagaagctgcagtgccacggccagggccccctggcccacatgcccaacgccagctgcggcgtgcccaccctgaaggtgcaggtgcccaacgccagcgtggacgtgggcgacgacgtgctgctgagatgccaggtggagggcagaggcctggagcaggccggctggatcctgaccgagctggagcagagcgccaccgtgatgaagagcggcggcctgcccagcctgggcctgaccctggccaacgtgaccagcgacctgaacagaaagaacgtgacctgctgggccgagaacgacgtgggcagagccgaggtgagcgtgcaggtgaacgtgagcttccccgccagcgtgcagctgcacaccgccgtggagatgcaccactggtgcatccccttcagcgtggacggccagcccgcccccagcctgagatggctgttcaacggcagcgtgctgaacgagaccagcttcatcttcaccgagttcctggagcccgccgccaacgagaccgtgagacacggctgcctgagactgaaccagcccacccacgtgaacaacggcaactacaccctgctggccgccaaccccttcggccaggccagcgccagcatcatggccgccttcatggacaaccccttcgagttcaaccccgaggaccccatccccgacaccaacagcaccagcggcgaccccgtggagaagaaggacgagacccccttcggcgtgagcgtggccgtgggcctggccgtgttcgcctgcctgttcctgagcaccctgctgctggtgctgaacaagtgcggcagaagaaacaagttcggcatcaacagacccgccgtgctggcccccgaggacggcctggccatgagcctgcacttcatgaccctgggcggcagcagcctgagccccaccgagggcaagggcagcggcctgcagggccacatcatcgagaacccccagtacttcagcgacgcctgcgtgcaccacatcaagagaagagacatcgtgctgaagtgggagctgggcgagggcgccttcggcaaggtgttcctggccgagtgccacaacctgctgcccgagcaggacaagatgctggtggccgtgaaggccctgaaggaggccagcgagagcgccagacaggacttccagagagaggccgagctgctgaccatgctgcagcaccagcacatcgtgagattcttcggcgtgtgcaccgagggcagacccctgctgatggtgttcgagtacatgagacacggcgacctgaacagattcctgagaagccacggccccgacgccaagctgctggccggcggcgaggacgtggcccccggccccctgggcctgggccagctgctggccgtggccagccaggtggccgccggcatggtgtacctggccggcctgcacttcgtgcacagagacctggccaccagaaactgcctggtgggccagggcctggtggtgaagatcggcgacttcggcatgagcagagacatctacagcaccgactactacagagtgggcggcagaaccatgctgcccatcagatggatgccccccgagagcatcctgtacagaaagttcaccaccgagagcgacgtgtggagcttcggcgtggtgctgtgggagatcttcacctacggcaagcagccctggtaccagctgagcaacaccgaggccatcgactgcatcacccagggcagagagctggagagacccagagcctgcccccccgaggtgtacgccatcatgagaggctgctggcagagagagccccagcagagacacagcatcaaggacgtgcacgccagactgcaggccctggcccaggccccccccgtgtacctggacgtgctgggctag

SEQ ID NO: 90979 - DNA, 2391 bp, synthetic construct
  misc_feature 1..2391: note = Description of Artificial Sequence: Synthetic coding sequence
  source 1..2391: mol_type = other DNA
atgctgagaggcggcagaagaggccagctgggctggcacagctgggccgccggccccggcagcctgctggcctggctgatcctggccagcgccggcgccgccccctgccccgacgcctgctgcccccacggcagcagcggcctgagatgcaccagagacggcgccctggacagcctgcaccacctgcccggcgccgagaacctgaccgagctgtacatcgagaaccagcagcacctgcagcacctggagctgagagacctgagaggcctgggcgagctgagaaacctgaccatcgtgaagagcggcctgagattcgtggcccccgacgccttccacttcacccccagactgagcagactgaacctgagcttcaacgccctggagagcctgagctggaagaccgtgcagggcctgagcctgcaggagctggtgctgagcggcaaccccctgcactgcagctgcgccctgagatggctgcagagatgggaggaggagggcctgggcggcgtgcccgagcagaagctgcagtgccacggccagggccccctggcccacatgcccaacgccagctgcggcgtgcccaccctgaaggtgcaggtgcccaacgccagcgtggacgtgggcgacgacgtgctgctgagatgccaggtggagggcagaggcctggagcaggccggctggatcctgaccgagctggagcagagcgccaccgtgatgaagagcggcggcctgcccagcctgggcctgaccctggccaacgtgaccagcgacctgaacagaaagaacgtgacctgctgggccgagaacgacgtgggcagagccgaggtgagcgtgcaggtgaacgtgagcttccccgccagcgtgcagctgcacaccgccgtggagatgcaccactggtgcatccccttcagcgtggacggccagcccgcccccagcctgagatggctgttcaacggcagcgtgctgaacgagaccagcttcatcttcaccgagttcctggagcccgccgccaacgagaccgtgagacacggctgcctgagactgaaccagcccacccacgtgaacaacggcaactacaccctgctggccgccaaccccttcggccaggccagcgccagcatcatggccgccttcatggacaaccccttcgagttcaaccccgaggaccccatccccgtgagcttcagccccgtggacaccaacagcaccagcggcgaccccgtggagaagaaggacgagacccccttcggcgtgagcgtggccgtgggcctggccgtgttcgcctgcctgttcctgagcaccctgctgctggtgctgaacaagtgcggcagaagaaacaagttcggcatcaacagacccgccgtgctggcccccgaggacggcctggccatgagcctgcacttcatgaccctgggcggcagcagcctgagccccaccgagggcaagggcagcggcctgcagggccacatcatcgagaacccccagtacttcagcgacgcctgcgtgcaccacatcaagagaagagacatcgtgctgaagtgggagctgggcgagggcgccttcggcaaggtgttcctggccgagtgccacaacctgctgcccgagcaggacaagatgctggtggccgtgaaggccctgaaggaggccagcgagagcgccagacaggacttccagagagaggccgagctgctgaccatgctgcagcaccagcacatcgtgagattcttcggcgtgtgcaccgagggcagacccctgctgatggtgttcgagtacatgagacacggcgacctgaacagattcctgagaagccacggccccgacgccaagctgctggccggcggcgaggacgtggcccccggccccctgggcctgggccagctgctggccgtggccagccaggtggccgccggcatggtgtacctggccggcctgcacttcgtgcacagagacctggccaccagaaactgcctggtgggccagggcctggtggtgaagatcggcgacttcggcatgagcagagacatctacagcaccgactactacagagtgggcggcagaaccatgctgcccatcagatggatgccccccgagagcatcctgtacagaaagttcaccaccgagagcgacgtgtggagcttcggcgtggtgctgtgggagatcttcacctacggcaagcagccctggtaccagctgagcaacaccgaggccatcgactgcatcacccagggcagagagctggagagacccagagcctgcccccccgaggtgtacgccatcatgagaggctgctggcagagagagccccagcagagacacagcatcaaggacgtgcacgccagactgcaggccctggcccaggccccccccgtgtacctggacgtgctgggctag

SEQ ID NO: 90980 - DNA, 2517 bp, synthetic construct
  misc_feature 1..2517: note = Description of Artificial Sequence: Synthetic coding sequence
  source 1..2517: mol_type = other DNA
atgagcagctggatcagatggcacggccccgccatggccagactgtggggcttctgctggctggtggtgggcttctggagagccgccttcgcctgccccaccagctgcaagtgcagcgccagcagaatctggtgcagcgaccccagccccggcatcgtggccttccccagactggagcccaacagcgtggaccccgagaacatcaccgagatcttcatcgccaaccagaagagactggagatcatcaacgaggacgacgtggaggcctacgtgggcctgagaaacctgaccatcgtggacagcggcctgaagttcgtggcccacaaggccttcctgaagaacagcaacctgcagcacatcaacttcaccagaaacaagctgaccagcctgagcagaaagcacttcagacacctggacctgagcgagctgatcctggtgggcaaccccttcacctgcagctgcgacatcatgtggatcaagaccctgcaggaggccaagagcagccccgacacccaggacctgtactgcctgaacgagagcagcaagaacatccccctggccaacctgcagatccccaactgcggcctgcccagcgccaacctggccgcccccaacctgaccgtggaggagggcaagagcatcaccctgagctgcagcgtggccggcgaccccgtgcccaacatgtactgggacgtgggcaacctggtgagcaagcacatgaacgagaccagccacacccagggcagcctgagaatcaccaacatcagcagcgacgacagcggcaagcagatcagctgcgtggccgagaacctggtgggcgaggaccaggacagcgtgaacctgaccgtgcacttcgcccccaccatcaccttcctggagagccccaccagcgaccaccactggtgcatccccttcaccgtgaagggcaaccccaagcccgccctgcagtggttctacaacggcgccatcctgaacgagagcaagtacatctgcaccaagatccacgtgaccaaccacaccgagtaccacggctgcctgcagctggacaaccccacccacatgaacaacggcgactacaccctgatcgccaagaacgagtacggcaaggacgagaagcagatcagcgcccacttcatgggctggcccggcatcgacgacggcgccaaccccaactaccccgacgtgatctacgaggactacggcaccgccgccaacgacatcggcgacaccaccaacagaagcaacgagatccccagcaccgacgtgaccgacaagaccggcagagagcacctgagcgtgtacgccgtggtggtgatcgccagcgtggtgggcttctgcctgctggtgatgctgttcctgctgaagctggccagacacagcaagttcggcatgaaggacttcagctggttcggcttcggcaaggtgaagagcagacagggcgtgggccccgccagcgtgatcagcaacgacgacgacagcgccagccccctgcaccacatcagcaacggcagcaacacccccagcagcagcgagggcggccccgacgccgtgatcatcggcatgaccaagatccccgtgatcgagaacccccagtacttcggcatcaccaacagccagctgaagcccgacaccttcgtgcagcacatcaagagacacaacatcgtgctgaagagagagctgggcgagggcgccttcggcaaggtgttcctggccgagtgctacaacctgtgccccgagcaggacaagatcctggtggccgtgaagaccctgaaggacgccagcgacaacgccagaaaggacttccacagagaggccgagctgctgaccaacctgcagcacgagcacatcgtgaagttctacggcgtgtgcgtggagggcgaccccctgatcatggtgttcgagtacatgaagcacggcgacctgaacaagttcctgagagcccacggccccgacgccgtgctgatggccgagggcaacccccccaccgagctgacccagagccagatgctgcacatcgcccagcagatcgccgccggcatggtgtacctggccagccagcacttcgtgcacagagacctggccaccagaaactgcctggtgggcgagaacctgctggtgaagatcggcgacttcggcatgagcagagacgtgtacagcaccgactactacagagtgggcggccacaccatgctgcccatcagatggatgccccccgagagcatcatgtacagaaagttcaccaccgagagcgacgtgtggagcctgggcgtggtgctgtgggagatcttcacctacggcaagcagccctggtaccagctgagcaacaacgaggtgatcgagtgcatcacccagggcagagtgctgcagagacccagaacctgcccccaggaggtgtacgagctgatgctgggctgctggcagagagagccccacatgagaaagaacatcaagggcatccacaccctgctgcagaacctggccaaggccagccccgtgtacctggacatcctgggctag

SEQ ID NO: 90981 - DNA, 1662 bp, synthetic construct
  misc_feature 1..1662: note = Description of Artificial Sequence: Synthetic coding sequence
  source 1..1662: mol_type = other DNA
atgagcagctggatcagatggcacggccccgccatggccagactgtggggcttctgctggctggtggtgggcttctggagagccgccttcgcctgccccaccagctgcaagtgcagcgccagcagaatctggtgcagcgaccccagccccggcatcgtggccttccccagactggagcccaacagcgtggaccccgagaacatcaccgagatcttcatcgccaaccagaagagactggagatcatcaacgaggacgacgtggaggcctacgtgggcctgagaaacctgaccatcgtggacagcggcctgaagttcgtggcccacaaggccttcctgaagaacagcaacctgcagcacatcaacttcaccagaaacaagctgaccagcctgagcagaaagcacttcagacacctggacctgagcgagctgatcctggtgggcaaccccttcacctgcagctgcgacatcatgtggatcaagaccctgcaggaggccaagagcagccccgacacccaggacctgtactgcctgaacgagagcagcaagaacatccccctggccaacctgcagatccccaactgcggcctgcccagcgccaacctggccgcccccaacctgaccgtggaggagggcaagagcatcaccctgagctgcagcgtggccggcgaccccgtgcccaacatgtactgggacgtgggcaacctggtgagcaagcacatgaacgagaccagccacacccagggcagcctgagaatcaccaacatcagcagcgacgacagcggcaagcagatcagctgcgtggccgagaacctggtgggcgaggaccaggacagcgtgaacctgaccgtgcacttcgcccccaccatcaccttcctggagagccccaccagcgaccaccactggtgcatccccttcaccgtgaagggcaaccccaagcccgccctgcagtggttctacaacggcgccatcctgaacgagagcaagtacatctgcaccaagatccacgtgaccaaccacaccgagtaccacggctgcctgcagctggacaaccccacccacatgaacaacggcgactacaccctgatcgccaagaacgagtacggcaaggacgagaagcagatcagcgcccacttcatgggctggcccggcatcgacgacggcgccaaccccaactaccccgacgtgatctacgaggactacggcaccgccgccaacgacatcggcgacaccaccaacagaagcaacgagatccccagcaccgacgtgaccgacaagaccggcagagagcacctgagcgtgtacgccgtggtggtgatcgccagcgtggtgggcttctgcctgctggtgatgctgttcctgctgaagctggccagacacagcaagttcggcatgaaggacttcagctggttcggcttcggcaaggtgaagagcagacagggcgtgggccccgccagcgtgatcagcaacgacgacgacagcgccagccccctgcaccacatcagcaacggcagcaacacccccagcagcagcgagggcggccccgacgccgtgatcatcggcatgaccaagatccccgtgatcgagaacccccagtacttcggcatcaccaacagccagctgaagcccgacacctggcccagaggcagccccaagaccgcctag

SEQ ID NO: 90982 - DNA, 2469 bp, synthetic construct
  misc_feature 1..2469: note = Description of Artificial Sequence: Synthetic coding sequence
  source 1..2469: mol_type = other DNA
atgagcagctggatcagatggcacggccccgccatggccagactgtggggcttctgctggctggtggtgggcttctggagagccgccttcgcctgccccaccagctgcaagtgcagcgccagcagaatctggtgcagcgaccccagccccggcatcgtggccttccccagactggagcccaacagcgtggaccccgagaacatcaccgagatcttcatcgccaaccagaagagactggagatcatcaacgaggacgacgtggaggcctacgtgggcctgagaaacctgaccatcgtggacagcggcctgaagttcgtggcccacaaggccttcctgaagaacagcaacctgcagcacatcaacttcaccagaaacaagctgaccagcctgagcagaaagcacttcagacacctggacctgagcgagctgatcctggtgggcaaccccttcacctgcagctgcgacatcatgtggatcaagaccctgcaggaggccaagagcagccccgacacccaggacctgtactgcctgaacgagagcagcaagaacatccccctggccaacctgcagatccccaactgcggcctgcccagcgccaacctggccgcccccaacctgaccgtggaggagggcaagagcatcaccctgagctgcagcgtggccggcgaccccgtgcccaacatgtactgggacgtgggcaacctggtgagcaagcacatgaacgagaccagccacacccagggcagcctgagaatcaccaacatcagcagcgacgacagcggcaagcagatcagctgcgtggccgagaacctggtgggcgaggaccaggacagcgtgaacctgaccgtgcacttcgcccccaccatcaccttcctggagagccccaccagcgaccaccactggtgcatccccttcaccgtgaagggcaaccccaagcccgccctgcagtggttctacaacggcgccatcctgaacgagagcaagtacatctgcaccaagatccacgtgaccaaccacaccgagtaccacggctgcctgcagctggacaaccccacccacatgaacaacggcgactacaccctgatcgccaagaacgagtacggcaaggacgagaagcagatcagcgcccacttcatgggctggcccggcatcgacgacggcgccaaccccaactaccccgacgtgatctacgaggactacggcaccgccgccaacgacatcggcgacaccaccaacagaagcaacgagatccccagcaccgacgtgaccgacaagaccggcagagagcacctgagcgtgtacgccgtggtggtgatcgccagcgtggtgggcttctgcctgctggtgatgctgttcctgctgaagctggccagacacagcaagttcggcatgaagggccccgccagcgtgatcagcaacgacgacgacagcgccagccccctgcaccacatcagcaacggcagcaacacccccagcagcagcgagggcggccccgacgccgtgatcatcggcatgaccaagatccccgtgatcgagaacccccagtacttcggcatcaccaacagccagctgaagcccgacaccttcgtgcagcacatcaagagacacaacatcgtgctgaagagagagctgggcgagggcgccttcggcaaggtgttcctggccgagtgctacaacctgtgccccgagcaggacaagatcctggtggccgtgaagaccctgaaggacgccagcgacaacgccagaaaggacttccacagagaggccgagctgctgaccaacctgcagcacgagcacatcgtgaagttctacggcgtgtgcgtggagggcgaccccctgatcatggtgttcgagtacatgaagcacggcgacctgaacaagttcctgagagcccacggccccgacgccgtgctgatggccgagggcaacccccccaccgagctgacccagagccagatgctgcacatcgcccagcagatcgccgccggcatggtgtacctggccagccagcacttcgtgcacagagacctggccaccagaaactgcctggtgggcgagaacctgctggtgaagatcggcgacttcggcatgagcagagacgtgtacagcaccgactactacagagtgggcggccacaccatgctgcccatcagatggatgccccccgagagcatcatgtacagaaagttcaccaccgagagcgacgtgtggagcctgggcgtggtgctgtgggagatcttcacctacggcaagcagccctggtaccagctgagcaacaacgaggtgatcgagtgcatcacccagggcagagtgctgcagagacccagaacctgcccccaggaggtgtacgagctgatgctgggctgctggcagagagagccccacatgagaaagaacatcaagggcatccacaccctgctgcagaacctggccaaggccagccccgtgtacctggacatcctgggctag

SEQ ID NO: 90983 - DNA, 1434 bp, synthetic construct
  misc_feature 1..1434: note = Description of Artificial Sequence: Synthetic coding sequence
  source 1..1434: mol_type = other DNA
atgagcagctggatcagatggcacggccccgccatggccagactgtggggcttctgctggctggtggtgggcttctggagagccgccttcgcctgccccaccagctgcaagtgcagcgccagcagaatctggtgcagcgaccccagccccggcatcgtggccttccccagactggagcccaacagcgtggaccccgagaacatcaccgagatcttcatcgccaaccagaagagactggagatcatcaacgaggacgacgtggaggcctacgtgggcctgagaaacctgaccatcgtggacagcggcctgaagttcgtggcccacaaggccttcctgaagaacagcaacctgcagcacatcaacttcaccagaaacaagctgaccagcctgagcagaaagcacttcagacacctggacctgagcgagctgatcctggtgggcaaccccttcacctgcagctgcgacatcatgtggatcaagaccctgcaggaggccaagagcagccccgacacccaggacctgtactgcctgaacgagagcagcaagaacatccccctggccaacctgcagatccccaactgcggcctgcccagcgccaacctggccgcccccaacctgaccgtggaggagggcaagagcatcaccctgagctgcagcgtggccggcgaccccgtgcccaacatgtactgggacgtgggcaacctggtgagcaagcacatgaacgagaccagccacacccagggcagcctgagaatcaccaacatcagcagcgacgacagcggcaagcagatcagctgcgtggccgagaacctggtgggcgaggaccaggacagcgtgaacctgaccgtgcacttcgcccccaccatcaccttcctggagagccccaccagcgaccaccactggtgcatccccttcaccgtgaagggcaaccccaagcccgccctgcagtggttctacaacggcgccatcctgaacgagagcaagtacatctgcaccaagatccacgtgaccaaccacaccgagtaccacggctgcctgcagctggacaaccccacccacatgaacaacggcgactacaccctgatcgccaagaacgagtacggcaaggacgagaagcagatcagcgcccacttcatgggctggcccggcatcgacgacggcgccaaccccaactaccccgacgtgatctacgaggactacggcaccgccgccaacgacatcggcgacaccaccaacagaagcaacgagatccccagcaccgacgtgaccgacaagaccggcagagagcacctgagcgtgtacgccgtggtggtgatcgccagcgtggtgggcttctgcctgctggtgatgctgttcctgctgaagctggccagacacagcaagttcggcatgaagggcttcgtgctgttccacaagatccccctggacggctag

SEQ ID NO: 90984 - DNA, 1614 bp, synthetic construct
  misc_feature 1..1614: note = Description of Artificial Sequence: Synthetic coding sequence
  source 1..1614: mol_type = other DNA
atgagcagctggatcagatggcacggccccgccatggccagactgtggggcttctgctggctggtggtgggcttctggagagccgccttcgcctgccccaccagctgcaagtgcagcgccagcagaatctggtgcagcgaccccagccccggcatcgtggccttccccagactggagcccaacagcgtggaccccgagaacatcaccgagatcttcatcgccaaccagaagagactggagatcatcaacgaggacgacgtggaggcctacgtgggcctgagaaacctgaccatcgtggacagcggcctgaagttcgtggcccacaaggccttcctgaagaacagcaacctgcagcacatcaacttcaccagaaacaagctgaccagcctgagcagaaagcacttcagacacctggacctgagcgagctgatcctggtgggcaaccccttcacctgcagctgcgacatcatgtggatcaagaccctgcaggaggccaagagcagccccgacacccaggacctgtactgcctgaacgagagcagcaagaacatccccctggccaacctgcagatccccaactgcggcctgcccagcgccaacctggccgcccccaacctgaccgtggaggagggcaagagcatcaccctgagctgcagcgtggccggcgaccccgtgcccaacatgtactgggacgtgggcaacctggtgagcaagcacatgaacgagaccagccacacccagggcagcctgagaatcaccaacatcagcagcgacgacagcggcaagcagatcagctgcgtggccgagaacctggtgggcgaggaccaggacagcgtgaacctgaccgtgcacttcgcccccaccatcaccttcctggagagccccaccagcgaccaccactggtgcatccccttcaccgtgaagggcaaccccaagcccgccctgcagtggttctacaacggcgccatcctgaacgagagcaagtacatctgcaccaagatccacgtgaccaaccacaccgagtaccacggctgcctgcagctggacaaccccacccacatgaacaacggcgactacaccctgatcgccaagaacgagtacggcaaggacgagaagcagatcagcgcccacttcatgggctggcccggcatcgacgacggcgccaaccccaactaccccgacgtgatctacgaggactacggcaccgccgccaacgacatcggcgacaccaccaacagaagcaacgagatccccagcaccgacgtgaccgacaagaccggcagagagcacctgagcgtgtacgccgtggtggtgatcgccagcgtggtgggcttctgcctgctggtgatgctgttcctgctgaagctggccagacacagcaagttcggcatgaagggccccgccagcgtgatcagcaacgacgacgacagcgccagccccctgcaccacatcagcaacggcagcaacacccccagcagcagcgagggcggccccgacgccgtgatcatcggcatgaccaagatccccgtgatcgagaacccccagtacttcggcatcaccaacagccagctgaagcccgacacctggcccagaggcagccccaagaccgcctag

SEQ ID NO: 90985 - DNA, 2469 bp, synthetic construct; identical to SEQ ID NO: 90982
  misc_feature 1..2469: note = Description of Artificial Sequence: Synthetic coding sequence
  source 1..2469: mol_type = other DNA

SEQ ID NO: 90986 - DNA, 2517 bp, synthetic construct; identical to SEQ ID NO: 90980
  misc_feature 1..2517: note = Description of Artificial Sequence: Synthetic coding sequence
  source 1..2517: mol_type = other DNA

SEQ ID NO: 90987 - DNA, 966 bp, synthetic construct
  misc_feature 1..966: note = Description of Artificial Sequence: Synthetic coding sequence
  source 1..966: mol_type = other DNA
atgtggatcaagaccctgcaggaggccaagagcagccccgacacccaggacctgtactgcctgaacgagagcagcaagaacatccccctggccaacctgcagatccccaactgcggcctgcccagcgccaacctggccgcccccaacctgaccgtggaggagggcaagagcatcaccctgagctgcagcgtggccggcgaccccgtgcccaacatgtactgggacgtgggcaacctggtgagcaagcacatgaacgagaccagccacacccagggcagcctgagaatcaccaacatcagcagcgacgacagcggcaagcagatcagctgcgtggccgagaacctggtgggcgaggaccaggacagcgtgaacctgaccgtgcacttcgcccccaccatcaccttcctggagagccccaccagcgaccaccactggtgcatccccttcaccgtgaagggcaaccccaagcccgccctgcagtggttctacaacggcgccatcctgaacgagagcaagtacatctgcaccaagatccacgtgaccaaccacaccgagtaccacggctgcctgcagctggacaaccccacccacatgaacaacggcgactacaccctgatcgccaagaacgagtacggcaaggacgagaagcagatcagcgcccacttcatgggctggcccggcatcgacgacggcgccaaccccaactaccccgacgtgatctacgaggactacggcaccgccgccaacgacatcggcgacaccaccaacagaagcaacgagatccccagcaccgacgtgaccgacaagaccggcagagagcacctgagcgtgtacgccgtggtggtgatcgccagcgtggtgggcttctgcctgctggtgatgctgttcctgctgaagctggccagacacagcaagttcggcatgaagggcttcgtgctgttccacaagatccccctggacggctag

SEQ ID NO: 90988 - DNA, 1434 bp, synthetic construct; identical to SEQ ID NO: 90983
  misc_feature 1..1434: note = Description of Artificial Sequence: Synthetic coding sequence
  source 1..1434: mol_type = other DNA

SEQ ID NO: 90989 - DNA, 1839 bp, synthetic construct
  misc_feature 1..1839: note = Description of Artificial Sequence: Synthetic coding sequence
  source 1..1839: mol_type = other DNA
atggacgtgagcctgtgccccgccaagtgcagcttctggagaatcttcctgctgggcagcgtgtggctggactacgtgggcagcgtgctggcctgccccgccaactgcgtgtgcagcaagaccgagatcaactgcagaagacccgacgacggcaacctgttccccctgctggagggccaggacagcggcaacagcaacggcaacgccagcatcaacatcaccgacatcagcagaaacatcaccagcatccacatcgagaactggagaagcctgcacaccctgaacgccgtggacatggagctgtacaccggcctgcagaagctgaccatcaagaacagcggcctgagaagcatccagcccagagccttcgccaagaacccccacctgagatacatcaacctgagcagcaacagactgaccaccctgagctggcagctgttccagaccctgagcctgagagagctgcagctggagcagaacttcttcaactgcagctgcgacatcagatggatgcagctgtggcaggagcagggcgaggccaagctgaacagccagaacctgtactgcatcaacgccgacggcagccagctgcccctgttcagaatgaacatcagccagtgcgacctgcccgagatcagcgtgagccacgtgaacctgaccgtgagagagggcgacaacgccgtgatcacctgcaacggcagcggcagccccctgcccgacgtggactggatcgtgaccggcctgcagagcatcaacacccaccagaccaacctgaactggaccaacgtgcacgccatcaacctgaccctggtgaacgtgaccagcgaggacaacggcttcaccctgacctgcatcgccgagaacgtggtgggcatgagcaacgccagcgtggccctgaccgtgtactacccccccagagtggtgagcctggaggagcccgagctgagactggagcactgcatcgagttcgtggtgagaggcaaccccccccccaccctgcactggctgcacaacggccagcccctgagagagagcaagatcatccacgtggagtactaccaggagggcgagatcagcgagggctgcctgctgttcaacaagcccacccactacaacaacggcaactacaccctgatcgccaagaaccccctgggcaccgccaaccagaccatcaacggccacttcctgaaggagcccttccccgagagcaccgacaacttcatcctgttcgacgaggtgagccccaccccccccatcaccgtgacccacaagcccgaggaggacaccttcggcgtgagcatcgccgtgggcctggccgccttcgcctgcgtgctgctggtggtgctgttcgtgatgatcaacaagtacggcagaagaagcaagttcggcatgaagggccccgtggccgtgatcagcggcgaggaggacagcgccagccccctgcaccacatcaaccacggcatcaccacccccagcagcctggacgccggccccgacaccgtggtgatcggcatgaccagaatccccgtgatcgagaacccccagtacttcagacagggccacaactgccacaagcccgacacctgggtgttcagcaacatcgacaaccacggcatcctgaacctgaaggacaacagagaccacctggtgcccagcacccactacatctacgaggagcccgaggtgcagagcggcgaggtgagctaccccagaagccacggcttcagagagatcatgctgaaccccatcagcctgcccggccacagcaagcccctgaaccacggcatctacgtggaggacgtgaacgtgtacttcagcaagggcagacacggcttctag

SEQ ID NO: 90990 - DNA, 414 bp, synthetic construct
  misc_feature 1..414: note = Description of Artificial Sequence: Synthetic coding sequence
  source 1..414: mol_type = other DNA
atgaccagaatccccgtgatcgagaacccccagtacttcagacagggccacaactgccacaagcccgacacctacgtgcagcacatcaagagaagagacatcgtgctgaagagagagctgggcgagggcgccttcggcaaggtgttcctggccgagtgctacaacctgagccccaccaaggacaagatgctggtggccgtgaaggccctgaaggaccccaccctggccgccagaaaggacttccagagagaggccgagctgctgaccaacctgcagcacgagcacatcgtgaagttctacggcgtgtgcggcgacggcgaccccctgatcatggtgttcgagtacatgaagcacggcgacctgaacaagttcctgagcagcatcagcagccccaagagccaccagcagggctag

SEQ ID NO: 90991 - DNA, 2478 bp, synthetic construct
  misc_feature 1..2478: note = Description of Artificial Sequence: Synthetic coding sequence
  source 1..2478: mol_type = other DNA
atggacgtgagcctgtgccccgccaagtgcagcttctggagaatcttcctgctgggcagcgtgtggctggactacgtgggcagcgtgctggcctgccccgccaactgcgtgtgcagcaagaccgagatcaactgcagaagacccgacgacggcaacctgttccccctgctggagggccaggacagcggcaacagcaacggcaacgccagcatcaacatcaccgacatcagcagaaacatcaccagcatccacatcgagaactggagaagcctgcacaccctgaacgccgtggacatggagctgtacaccggcctgcagaagctgaccatcaagaacagcggcctgagaagcatccagcccagagccttcgccaagaacccccacctgagatacatcaacctgagcagcaacagactgaccaccctgagctggcagctgttccagaccctgagcctgagagagctgcagctggagcagaacttcttcaactgcagctgcgacatcagatggatgcagctgtggcaggagcagggcgaggccaagctgaacagccagaacctgtactgcatcaacgccgacggcagccagctgcccctgttcagaatgaacatcagccagtgcgacctgcccgagatcagcgtgagccacgtgaacctgaccgtgagagagggcgacaacgccgtgatcacctgcaacggcagcggcagccccctgcccgacgtggactggatcgtgaccggcctgcagagcatcaacacccaccagaccaacctgaactggaccaacgtgcacgccatcaacctgaccctggtgaacgtgaccagcgaggacaacggcttcaccctgacctgcatcgccgagaacgtggtgggcatgagcaacgccagcgtggccctgaccgtgtactacccccccagagtggtgagcctggaggagcccgagctgagactggagcactgcatcgagttcgtggtgagaggcaaccccccccccaccctgcactggctgcacaacggccagcccctgagagagagcaagatcatccacgtggagtactaccaggagggcgagatcagcgagggctgcctgctgttcaacaagcccacccactacaacaacggcaactacaccctgatcgccaagaaccccctgggcaccgccaaccagaccatcaacggccacttcctgaaggagcccttccccgagagcaccgacaacttcatcctgttcgacgaggtgagccccaccccccccatcaccgtgacccacaagcccgaggaggacaccttcggcgtgagcatcgccgtgggcctggccgccttcgcctgcgtgctgctggtggtgctgttcgtgatgatcaacaagtacggcagaagaagcaagttcggcatgaagggccccgtggccgtgatcagcggcgaggaggacagcgccagccccctgcaccacatcaaccacggcatcaccacccccagcagcctggacgccggccccgacaccgtggtgatcggcatgaccagaatccccgtgatcgagaacccccagtacttcagacagggccacaactgccacaagcccgacacctacgtgcagcacatcaagagaagagacatcgtgctgaagagagagctgggcgagggcgccttcggcaaggtgttcctggccgagtgctacaacctgagccccaccaaggacaagatgctggtggccgtgaaggccctgaaggaccccaccctggccgccagaaaggacttccagagagaggccgagctgctgaccaacctgcagcacgagcacatcgtgaagttctacggcgtgtgcggcgacggcgaccccctgatcatggtgttcgagtacatgaagcacggcgacctgaacaagttcctgagagcccacggccccgacgccatgatcctggtggacggccagcccagacaggccaagggcgagctgggcctgagccagatgctgcacatcgccagccagatcgccagcggcatggtgtacctggccagccagcacttcgtgcacagagacctggccaccagaaactgcctggtgggcgccaacctgctggtgaagatcggcgacttcggcatgagcagagacgtgtacagcaccgactactacagagtgggcggccacaccatgctgcccatcagatggatgccccccgagagcatcatgtacagaaagttcaccaccgagagcgacgtgtggagcttcggcgtgatcctgtgggagatcttcacctacggcaagcagccctggttccagctgagcaacaccgaggtgatcgagtgcatcacccagggcagagtgctggagagacccagagtgtgccccaaggaggtgtacgacgtgatgctgggctgctggcagagagagccccagcagagactgaacatcaaggagatctacaagatcctgcacgccctgggcaaggccacccccatctacctggacatcctgggctag

SEQ ID NO: 90992 - DNA, 2496 bp, synthetic construct
  misc_feature 1..2496: note = Description of Artificial Sequence: Synthetic coding sequence
  source 1..2496: mol_type = other DNA
atggacgtgagcctgtgccccgccaagtgcagcttctggagaatcttcctgctgggcagcgtgtggctggactacgtgggcagcgtgctggcctgccccgccaactgcgtgtgcagcaagaccgagatcaactgcagaagacccgacgacggcaacctgttccccctgctggagggccaggacagcggcaacagcaacggcaacgccagcatcaacatcaccgacatcagcagaaacatcaccagcatccacatcgagaactggagaagcctgcacaccctgaacgccgtggacatggagctgtacaccggcctgcagaagctgaccatcaagaacagcggcctgagaagcatccagcccagagccttcgccaagaacccccacctgagatacatcaacctgagcagcaacagactgaccaccctgagctggcagctgttccagaccctgagcctgagagagctgcagctggagcagaacttcttcaactgcagctgcgacatcagatggatgcagctgtggcaggagcagggcgaggccaagctgaacagccagaacctgtactgcatcaacgccgacggcagccagctgcccctgttcagaatgaacatcagccagtgcgacctgcccgagatcagcgtgagccacgtgaacctgaccgtgagagagggcgacaacgccgtgatcacctgcaacggcagcggcagccccctgcccgacgtggactggatcgtgaccggcctgcagagcatcaacacccaccagaccaacctgaactggaccaacgtgcacgccatcaacctgaccctggtgaacgtgaccagcgaggacaacggcttcaccctgacctgcatcgccgagaacgtggtgggcatgagcaacgccagcgtggccctgaccgtgtactacccccccagagtggtgagcctggaggagcccgagctgagactggagcactgcatcgagttcgtggtgagaggcaaccccccccccaccctgcactggctgcacaacggccagcccctgagagagagcaagatcatccacgtggagtactaccaggagggcgagatcagcgagggctgcctgctgttcaacaagcccacccactacaacaacggcaactacaccctgatcgccaagaaccccctgggcaccgccaaccagaccatcaacggccacttcctgaaggagcccttccccgtggacgaggtgagccccaccccccccatcaccgtgacccacaagcccgaggaggacaccttcggcgtgagcatcgccgtgggcctggccgccttcgcctgcgtgctgctggtggtgctgttcgtgatgatcaacaagtacggcagaagaagcaagttcggcatgaagggccccgtggccgtgatcagcggcgaggaggacagcgccagccccctgcaccacatcaaccacggcatcaccacccccagcagcctggacgccggccccgacaccgtggtgatcggcatgaccagaatccccgtgatcgagaacccccagtacttcagacagggccacaactgccacaagcccgacacctacgtgcagcacatcaagagaagagacatcgtgctgaagagagagctgggcgagggcgccttcggcaaggtgttcctggccgagtgctacaacctgagccccaccaaggacaagatgctggtggccgtgaaggccctgaaggaccccaccctggccgccagaaaggacttccagagagaggccgagctgctgaccaacctgcagcacgagcacatcgtgaagttctacggcgtgtgcggcgacggcgaccccctgatcatggtgttcgagtacatgaagcacggcgacctgaacaagttcctgagagcccacggccccgacgccatgatcctggtggacggccagcccagacaggccaagggcgagctgggcctgagccagatgctgcacatcgccagccagatcgccagcggcatggtgtacctggccagccagcacttcgtgcacagagacctggccaccagaaactgcctggtgggcgccaacctgctggtgaagatcggcgacttcggcatgagcagagacgtgtacagcaccgactactacagactgttcaaccccagcggcaacgacttctgcatctggtgcgaggtgggcggccacaccatgctgcccatcagatggatgccccccgagagcatcatgtacagaaagttcaccaccgagagcgacgtgtggagcttcggcgtgatcctgtgggagatcttcacctacggcaagcagccctggttccagctgagcaacaccgaggtgatcgagtgcatcacccagggcagagtgctggagagacccagagtgtgccccaaggaggtgtacgacgtgatgctgggctgctggcagagagagccccagcagagactgaacatcaaggagatctacaagatcctgcacgccctgggcaaggccacccccatctacctggacatcctgggctag

SEQ ID NO: 90993 - DNA, 2520 bp, synthetic construct
  misc_feature 1..2520: note = Description of Artificial Sequence: Synthetic coding sequence
  source 1..2520: mol_type = other DNA
atggacgtgagcctgtgccccgccaagtgcagcttctggagaatcttcctgctgggcagcgtgtggctggactacgtgggcagcgtgctggcctgccccgccaactgcgtgtgcagcaagaccgagatcaactgcagaagacccgacgacggcaacctgttccccctgctggagggccaggacagcggcaacagcaacggcaacgccagcatcaacatcaccgacatcagcagaaacatcaccagcatccacatcgagaactggagaagcctgcacaccctgaacgccgtggacatggagctgtacaccggcctgcagaagctgaccatcaagaacagcggcctgagaagcatccagcccagagccttcgccaagaacccccacctgagatacatcaacctgagcagcaacagactgaccaccctgagctggcagctgttccagaccctgagcctgagagagctgcagctggagcagaacttcttcaactgcagctgcgacatcagatggatgcagctgtggcaggagcagggcgaggccaagctgaacagccagaacctgtactgcatcaacgccgacggcagccagctgcccctgttcagaatgaacatcagccagtgcgacctgcccgagatcagcgtgagccacgtgaacctgaccgtgagagagggcgacaacgccgtgatcacctgcaacggcagcggcagccccctgcccgacgtggactggatcgtgaccggcctgcagagcatcaacacccaccagaccaacctgaactggaccaacgtgcacgccatcaacctgaccctggtgaacgtgaccagcgaggacaacggcttcaccctgacctgcatcgccgagaacgtggtgggcatgagcaacgccagcgtggccctgaccgtgtactacccccccagagtggtgagcctggaggagcccgagctgagactggagcactgcatcgagttcgtggtgagaggcaaccccccccccaccctgcactggctgcacaacggccagcccctgagagagagcaagatcatccacgtggagtactaccaggagggcgagatcagcgagggctgcctgctgttcaacaagcccacccactacaacaacggcaactacaccctgatcgccaagaaccccctgggcaccgccaaccagaccatcaacggccacttcctgaaggagcccttccccgagagcaccgacaacttcatcctgttcgacgaggtgagccccaccccccccatcaccgtgacccacaagcccgaggaggacaccttcggcgtgagcatcgccgtgggcctggccgccttcgcctgcgtgctgctggtggtgctgttcgtgatgatcaacaagtacggcagaagaagcaagttcggcatgaagggccccgtggccgtgatcagcggcgaggaggacagcgccagccccctgcaccacatcaaccacggcatcaccacccccagcagcctggacgccggccccgacaccgtggtgatcggcatgaccagaatccccgtgatcgagaacccccagtacttcagacagggccacaactgccacaagcccgacacctacgtgcagcacatcaagagaagagacatcgtgctgaagagagagctgggcgagggcgccttcggcaaggtgttcctggccgagtgctacaacctgagccccaccaaggacaagatgctggtggccgtgaaggccctgaaggaccccaccctggccgccagaaaggacttccagagagaggccgagctgctgaccaacctgcagcacgagcacatcgtgaagttctacggcgtgtgcggcgacggcgaccccctgatcatggtgttcgagtacatgaagcacggcgacctgaacaagttcctgagagcccacggccccgacgccatgatcctggtggacggccagcccagacaggccaagggcgagctgggcctgagccagatgctgcacatcgccagccagatcgccagcggcatggtgtacctggccagccagcacttcgtgcacagagacctggccaccagaaactgcctggtgggcgccaacctgctggtgaagatcggcgacttcggcatgagcagagacgtgtacagcaccgactactacagactgttcaaccccagcggcaacgacttctgcatctggtgcgaggtgggcggccacaccatgctgcccatcagatggatgccccccgagagcatcatgtacagaaagttcaccaccgagagcgacgtgtggagcttcggcgtgatcctgtgggagatcttcacctacggcaagcagccctggttccagctgagcaacaccgaggtgatcgagtgcatcacccagggcagagtgctggagagacccagagtgtgccccaaggaggtgtacgacgtgatgctgggctgctggcagagagagccccagcagagactgaacatcaaggagatctacaagatcctgcacgccctgggcaaggccacccccatctacctggacatcctgggctag

SEQ ID NO: 90994 - DNA, 2478 bp, synthetic construct; identical to SEQ ID NO: 90991
  misc_feature 1..2478: note = Description of Artificial Sequence: Synthetic coding sequence
  source 1..2478: mol_type = other DNA

SEQ ID NO: 90995 - DNA, 1839 bp, synthetic construct; identical to SEQ ID NO: 90989
  misc_feature 1..1839: note = Description of Artificial Sequence: Synthetic coding sequence
  source 1..1839: mol_type = other DNA

SEQ ID NO: 90996 - DNA, 1854 bp, synthetic construct
  misc_feature 1..1854: note = Description of Artificial Sequence: Synthetic coding sequence
  source 1..1854: mol_type = other DNA
atggagctgtacaccggcctgcagaagctgaccatcaagaacagcggcctgagaagcatccagcccagagccttcgccaagaacccccacctgagatacatcaacctgagcagcaacagactgaccaccctgagctggcagctgttccagaccctgagcctgagagagctgcagctggagcagaacttcttcaactgcagctgcgacatcagatggatgcagctgtggcaggagcagggcgaggccaagctgaacagccagaacctgtactgcatcaacgccgacggcagccagctgcccctgttcagaatgaacatcagccagtgcgacctgcccgagatcagcgtgagccacgtgaacctgaccgtgagagagggcgacaacgccgtgatcacctgcaacggcagcggcagccccctgcccgacgtggactggatcgtgaccggcctgcagagcatcaacacccaccagaccaacctgaactggaccaacgtgcacgccatcaacctgaccctggtgaacgtgaccagcgaggacaacggcttcaccctgacctgcatcgccgagaacgtggtgggcatgagcaacgccagcgtggccctgaccgtgtactacccccccagagtggtgagcctggaggagcccgagctgagactggagcactgcatcgagttcgtggtgagaggcaaccccccccccaccctgcactggctgcacaacggccagcccctgagagagagcaagatcatccacgtggagtactaccaggagggcgagatcagcgagggctgcctgctgttcaacaagcccacccactacaacaacggcaactacaccctgatcgccaagaaccccctgggcaccgccaaccagaccatcaacggccacttcctgaaggagcccttccccgagagcaccgacaacttcatcctgttcgacgaggtgagccccaccccccccatcaccgtgacccacaagcccgaggaggacaccttcggcgtgagcatcgccgtgggcctggccgccttcgcctgcgtgctgctggtggtgctgttcgtgatgatcaacaagtacggcagaagaagcaagttcggcatgaagggccccgtggccgtgatcagcggcgaggaggacagcgccagccccctgcaccacatcaaccacggcatcaccacccccagcagcctggacgccggccccgacaccgtggtgatcggcatgaccagaatccccgtgatcgagaacccccagtacttcagacagggccacaactgccacaagcccgacacctacgtgcagcacatcaagagaagagacatcgtgctgaagagagagctgggcgagggcgccttcggcaaggtgttcctggccgagtgctacaacctgagccccaccaaggacaagatgctggtggccgtgaaggccctgaaggaccccaccctggccgccagaaaggacttccagagagaggccgagctgctgaccaacctgcagcacgagcacatcgtgaagttctacggcgtgtgcggcgacggcgaccccctgatcatggtgttcgagtacatgaagcacggcgacctgaacaagttcctgagagcccacggccccgacgccatgatcctggtggacggccagcccagacaggccaagggcgagctgggcctgagccagatgctgcacatcgccagccagatcgccagcggcatggtgtacctggccagccagcacttcgtgcacagagacctggccaccagaaactgcctggtgggcgccaacctgctggtgaagatcggcgacttcggcatgagcagagacgtgtacagcaccgactactacagagtggtgcaggcctag

SEQ ID NO: 90997 - DNA, 774 bp, synthetic construct
  misc_feature 1..774: note = Description of Artificial Sequence: Synthetic coding sequence
  source 1..774: mol_type = other DNA
atgagcatcctgttctacgtgatcttcctggcctacctgagaggcatccagggcaacaacatggaccagagaagcctgcccgaggacagcctgaacagcctgatcatcaagctgatccaggccgacatcctgaagaacaagctgagcaagcagatggtggacgtgaaggagaactaccagagcaccctgcccaaggccgaggcccccagagagcccgagagaggcggccccgccaagagcgccttccagcccgtgatcgccatggacaccgagctgctgagacagcagagaagatacaacagccccagagtgctgctgagcgacagcacccccctggagcccccccccctgtacctgatggaggactacgtgggcagccccgtggtggccaacagaaccagcagaagaaagagatacgccgagcacaagagccacagaggcgagtacagcgtgtgcgacagcgagagcctgtgggtgaccgacaagagcagcgccatcgacatcagaggccaccaggtgaccgtgctgggcgagatcaagaccggcaacagccccgtgaagcagtacttctacgagaccagatgcaaggaggccagacccgtgaagaacggctgcagaggcatcgacgacaagcactggaacagccagtgcaagaccagccagacctacgtgagagccctgaccagcgagaacaacaagctggtgggctggagatggatcagaatcgacaccagctgcgtgtgcgccctgagcagaaagatcggcagaacctag

SEQ ID NO: 90998 - DNA, 813 bp, synthetic construct
  misc_feature 1..813: note = Description of Artificial Sequence: Synthetic coding sequence
  source 1..813: mol_type = other DNA
atggtgaccttcgccaccatcctgcaggtgaacaaggtgatgagcatcctgttctacgtgatcttcctggcctacctgagaggcatccagggcaacaacatggaccagagaagcctgcccgaggacagcctgaacagcctgatcatcaagctgatccaggccgacatcctgaagaacaagctgagcaagcagatggtggacgtgaaggagaactaccagagcaccctgcccaaggccgaggcccccagagagcccgagagaggcggccccgccaagagcgccttccagcccgtgatcgccatggacaccgagctgctgagacagcagagaagatacaacagccccagagtgctgctgagcgacagcacccccctggagcccccccccctgtacctgatggaggactacgtgggcagccccgtggtggccaacagaaccagcagaagaaagagatacgccgagcacaagagccacagaggcgagtacagcgtgtgcgacagcgagagcctgtgggtgaccgacaagagcagcgccatcgacatcagaggccaccaggtgaccgtgctgggcgagatcaagaccggcaacagccccgtgaagcagtacttctacgagaccagatgcaaggaggccagacccgtgaagaacggctgcagaggcatcgacgacaagcactggaacagccagtgcaagaccagccagacctacgtgagagccctgaccagcgagaacaacaagctggtgggctggagatggatcagaatcgacaccagctgcgtgtgcgccctgagcagaaagatcggcagaacctag

SEQ ID NO: 90999 - DNA, 633 bp, synthetic construct
  misc_feature 1..633: note = Description of Artificial Sequence: Synthetic coding sequence
  source 1..633: mol_type = other DNA
atgctgcccctgcccagctgcagcctgcccatcctgctgctgttcctgctgcccagcgtgcccatcgagagccagcccccccccagcaccctgccccccttcctggcccccgagtgggacctgctgagccccagagtggtgctgagcagaggcgcccccgccggcccccccctgctgttcctgctggaggccggcgccttcagagagagcgccggcgcccccgccaacagaagcagaagaggcgtgagcgagaccgcccccgccagcagaagaggcgagctggccgtgtgcgacgccgtgagcggctgggtgaccgacagaagaaccgccgtggacctgagaggcagagaggtggaggtgctgggcgaggtgcccgccgccggcggcagccccctgagacagtacttcttcgagaccagatgcaaggccgacaacgccgaggagggcggccccggcgccggcggcggcggctgcagaggcgtggacagaagacactgggtgagcgagtgcaaggccaagcagagctacgtgagagccctgaccgccgacgcccagggcagagtgggctggagatggatcagaatcgacaccgcctgcgtgtgcaccctgctgagcagaaccggcagagcctag

SEQ ID NO: 91000 - DNA, 594 bp, synthetic construct
  misc_feature 1..594: note = Description of Artificial Sequence: Synthetic coding sequence
  source 1..594: mol_type = other DNA
atgcagagatggaaggccgccgccctggccagcgtgctgtgcagcagcgtgctgagcatctggatgtgcagagagggcctgctgctgagccacagactgggccccgccctggtgcccctgcacagactgcccagaaccctggacgccagaatcgccagactggcccagtacagagccctgctgcagggcgcccccgacgccatggagctgagagagctgaccccctgggccggcagaccccccggccccagaagaagagccggccccagaagaagaagagccagagccagactgggcgccagaccctgcggcctgagagagctggaggtgagagtgagcgagctgggcctgggctacgccagcgacgagaccgtgctgttcagatactgcgccggcgcctgcgaggccgccgccagagtgtacgacctgggcctgagaagactgagacagagaagaagactgagaagagagagagtgagagcccagccctgctgcagacccaccgcctacgaggacgaggtgagcttcctggacgcccacagcagataccacaccgtgcacgagctgagcgccagagagtgcgcctgcgtgtag

SEQ ID NO: 91001 - DNA, 1323 bp, synthetic construct
  misc_feature 1..1323: note = Description of Artificial Sequence: Synthetic coding sequence
  source 1..1323: mol_type = other DNA
atgagcagctgcagaggccagaaggtggccggcggcctgagagtggtgagccccttccccctgtgccagcccgccggcgagcccagccagggcaagatgagaagcagctgcgtgctgctgaccgccctggtggccctggccgcctactacgtgtacatccccctgcccggcagcgtgagcgacccctggaagctgatgctgctggacgccaccttcagaggcgcccagcaggtgagcaacctgatccactacctgggcctgagccaccacctgctggccctgaacttcatcatcgtgagcttcggcaagaagagcgcctggagcagcgcccaggtgaaggtgaccgacaccgacttcgacggcgtggaggtgagagtgttcgagggcccccccaagcccgaggagcccctgaagagaagcgtggtgtacatccacggcggcggctgggccctggccagcgccaagatcagatactacgacgagctgtgcaccgccatggccgaggagctgaacgccgtgatcgtgagcatcgagtacagactggtgcccaaggtgtacttccccgagcagatccacgacgtggtgagagccaccaagtacttcctgaagcccgaggtgctgcagaagtacatggtggaccccggcagaatctgcatcagcggcgacagcgccggcggcaacctggccgccgccctgggccagcagttcacccaggacgccagcctgaagaacaagctgaagctgcaggccctgatctaccccgtgctgcaggccctggacttcaacacccccagctaccagcagaacgtgaacacccccatcctgcccagatacgtgatggtgaagtactgggtggactacttcaagggcaactacgacttcgtgcaggccatgatcgtgaacaaccacaccagcctggacgtggaggaggccgccgccgtgagagccagactgaactggaccagcctgctgcccgccagcttcaccaagaactacaagcccgtggtgcagaccaccggcaacgccagaatcgtgcaggagctgccccagctgctggacgccagaagcgcccccctgatcgccgaccaggccgtgctgcagctgctgcccaagacctacatcctgacctgcgagcacgacgtgctgagagacgacggcatcatgtacgccaagagactggagagcgccggcgtggaggtgaccctggaccacttcgaggacggcttccacggctgcatgatcttcaccagctggcccaccaacttcagcgtgggcatcagaaccagaaacagctacatcaagtggctggaccagaacctgtag

SEQ ID NO: 91002 - DNA, 1227 bp, synthetic construct
  misc_feature 1..1227: note = Description of Artificial Sequence: Synthetic coding sequence
  source 1..1227: mol_type = other DNA
atgagaagcagctgcgtgctgctgaccgccctggtggccctggccgcctactacgtgtacatccccctgcccggcagcgtgagcgacccctggaagctgatgctgctggacgccaccttcagaggcgcccagcaggtgagcaacctgatccactacctgggcctgagccaccacctgctggccctgaacttcatcatcgtgagcttcggcaagaagagcgcctggagcagcgcccaggtgaaggtgaccgacaccgacttcgacggcgtggaggtgagagtgttcgagggcccccccaagcccgaggagcccctgaagagaagcgtggtgtacatccacggcggcggctgggccctggccagcgccaagatcagatactacgacgagctgtgcaccgccatggccgaggagctgaacgccgtgatcgtgagcatcgagtacagactggtgcccaaggtgtacttccccgagcagatccacgacgtggtgagagccaccaagtacttcctgaagcccgaggtgctgcagaagtacatggtggaccccggcagaatctgcatcagcggcgacagcgccggcggcaacctggccgccgccctgggccagcagttcacccaggacgccagcctgaagaacaagctgaagctgcaggccctgatctaccccgtgctgcaggccctggacttcaacacccccagctaccagcagaacgtgaacacccccatcctgcccagatacgtgatggtgaagtactgggtggactacttcaagggcaactacgacttcgtgcaggccatgatcgtgaacaaccacaccagcctggacgtggaggaggccgccgccgtgagagccagactgaactggaccagcctgctgcccgccagcttcaccaagaactacaagcccgtggtgcagaccaccggcaacgccagaatcgtgcaggagctgccccagctgctggacgccagaagcgcccccctgatcgccgaccaggccgtgctgcagctgctgcccaagacctacatcctgacctgcgagcacgacgtgctgagagacgacggcatcatgtacgccaagagactggagagcgccggcgtggaggtgaccctggaccacttcgaggacggcttccacggctgcatgatcttcaccagctggcccaccaacttcagcgtgggcatcagaaccagaaacagctacatcaagtggctggaccagaacctgtag

SEQ ID NO: 91003 - DNA, 1347 bp, synthetic construct
  misc_feature 1..1347: note = Description of Artificial Sequence: Synthetic coding sequence
  source 1..1347: mol_type = other DNA
atgagcagctgcagaggccagaaggtggccggcggcctgagagtggtgagccccttccccctgtgccagcccgccggcgagcccagccagggcaagatgagaagcagctgcgtgctgctgaccgccctggtggccctggccgcctactacgtgtacatccccctgcccggcagcgtgagcgacccctggaagctgatgctgctggacgccaccttcagaggcgcccagcaggtgagcaacctgatccactacctgggcctgagccaccacctgctggccctgaacttcatcatcgtgagcttcggcaagaagagcgcctggagcagcgcccaggtgaaggtgaccgacaccgacttcgacggcgtggaggtgagagtgttcgagggcccccccaagcccgaggagcccctgaagagaagcgtggtgtacatccacggcggcggctgggccctggccagcgccagcgccagctggagccccagcgacgagatcagatactacgacgagctgtgcaccgccatggccgaggagctgaacgccgtgatcgtgagcatcgagtacagactggtgcccaaggtgtacttccccgagcagatccacgacgtggtgagagccaccaagtacttcctgaagcccgaggtgctgcagaagtacatggtggaccccggcagaatctgcatcagcggcgacagcgccggcggcaacctggccgccgccctgggccagcagttcacccaggacgccagcctgaagaacaagctgaagctgcaggccctgatctaccccgtgctgcaggccctggacttcaacacccccagctaccagcagaacgtgaacacccccatcctgcccagatacgtgatggtgaagtactgggtggactacttcaagggcaactacgacttcgtgcaggccatgatcgtgaacaaccacaccagcctggacgtggaggaggccgccgccgtgagagccagactgaactggaccagcctgctgcccgccagcttcaccaagaactacaagcccgtggtgcagaccaccggcaacgccagaatcgtgcaggagctgccccagctgctggacgccagaagcgcccccctgatcgccgaccaggccgtgctgcagctgctgcccaagacctacatcctgacctgcgagcacgacgtgctgagagacgacggcatcatgtacgccaagagactggagagcgccggcgtggaggtgaccctggaccacttcgaggacggcttccacggctgcatgatcttcaccagctggcccaccaacttcagcgtgggcatcagaaccagaaacagctacatcaagtggctggaccagaacctgtag

SEQ ID NO: 91004 - DNA, 828 bp, synthetic construct
  misc_feature 1..828: note = Description of Artificial Sequence: Synthetic coding sequence
  source 1..828: mol_type = other DNA
atggccgaggagctgaacgccgtgatcgtgagcatcgagtacagactggtgcccaaggtgtacttccccgagcagatccacgacgtggtgagagccaccaagtacttcctgaagcccgaggtgctgcagaagtacatggtggaccccggcagaatctgcatcagcggcgacagcgccggcggcaacctggccgccgccctgggccagcagttcacccaggacgccagcctgaagaacaagctgaagctgcaggccctgatctaccccgtgctgcaggccctggacttcaacacccccagctaccagcagaacgtgaacacccccatcctgcccagatacgtgatggtgaagtactgggtggactacttcaagggcaactacgacttcgtgcaggccatgatcgtgaacaaccacaccagcctggacgtggaggaggccgccgccgtgagagccagactgaactggaccagcctgctgcccgccagcttcaccaagaactacaagcccgtggtgcagaccaccggcaacgccagaatcgtgcaggagctgccccagctgctggacgccagaagcgcccccctgatcgccgaccaggccgtgctgcagctgctgcccaagacctacatcctgacctgcgagcacgacgtgctgagagacgacggcatcatgtacgccaagagactggagagcgccggcgtggaggtgaccctggaccacttcgaggacggcttccacggctgcatgatcttcaccagctggcccaccaacttcagcgtgggcatcagaaccagaaacagctacatcaagtggctggaccagaacctgtag

SEQ ID NO: 91005 - DNA, 2754 bp, synthetic construct
  misc_feature 1..2754: note = Description of Artificial Sequence: Synthetic coding sequence
  source 1..2754: mol_type = other DNA
atggccttcatcagaaagaagcagcaggagcagcagctgcagctgtacagcaaggagagattcagcctgctgctgctgaacctggaggagtactacttcgagcagcacagagccaaccacatcctgcacaagggcagccaccacgagagaaagatcagaggcagcctgaagatctgcagcaagagcgtgatcttcgagcccgacagcatcagccagcccatcatcaagatccccctgagagactgcatcaagatcggcaagcacggcgagaacggcgccaacagacacttcaccaaggccaagagcggcggcatcagcctgatcttcagccaggtgtacttcatcaaggagcacaacgtggtggccccctacaagatcgagagaggcaagatggagtacgtgttcgagctggacgtgcccggcaaggtggaggacgtggtggagaccctgctgcagctgcacagagccagctgcctggacaagctgggcgaccagaccgccatgatcaccgccatcctgcagagcagactggccagaaccagcttcgacaagaacagattccagaacatcagcgagaagctgcacatggagtgcaaggccgagatggtgacccccctggtgaccaaccccggccacgtgtgcatcaccgacaccaacctgtacttccagcccctgaacggctaccccaagcccgtggtgcagatcaccctgcaggacgtgagaagaatctacaagagaagacacggcctgatgcccctgggcctggaggtgttctgcaccgaggacgacctgtgcagcgacatctacctgaagttctacgagccccaggacagagacgacctgtacttctacatcgccacctacctggagcaccacgtggccgagcacaccgccgagagctacatgctgcagtggcagagaggccacctgagcaactaccagtacctgctgcacctgaacaacctggccgacagaagctgcaacgacctgagccagtaccccgtgttcccctggatcatccacgactacagcagcagcgagctggacctgagcaaccccggcaccttcagagacctgagcaagcccgtgggcgccctgaacaaggagagactggagagactgctgaccagataccaggagatgcccgagcccaagttcatgtacggcagccactacagcagccccggctacgtgctgttctacctggtgagaatcgcccccgagtacatgctgtgcctgcagaacggcagattcgacaacgccgacagaatgttcaacagcatcgccgagacctggaagaactgcctggacggcgccaccgacttcaaggagctgatccccgagttctacggcgacgacgtgagcttcctggtgaacagcctgaagctggacctgggcaagagacagggcggccagatggtggacgacgtggagctgcccccctgggccagcagccccgaggacttcctgcagaagagcaaggacgccctggagagcaactacgtgagcgagcacctgcacgagtggatcgacctgatcttcggctacaagcagaagggcagcgacgccgtgggcgcccacaacgtgttccaccccctgacctacgagggcggcgtggacctgaacagcatccaggaccccgacgagaaggtggccatgctgacccagatcctggagttcggccagacccccaagcagctgttcgtgaccccccaccccagaagaatcacccccaagttcaagagcctgagccagaccagcagctacaacgccagcatggccgacagccccggcgaggagagcttcgaggacctgaccgaggagagcaagaccctggcctggaacaacatcaccaagctgcagctgcacgagcactacaagatccacaaggaggccgtgaccggcatcaccgtgagcagaaacggcagcagcgtgttcaccaccagccaggacagcaccctgaagatgttcagcaaggagagcaagatgctgcagagaagcatcagcttcagcaacatggccctgagcagctgcctgctgctgcccggcgacgccaccgtgatcaccagcagctgggacaacaacgtgtacttctacagcatcgccttcggcagaagacaggacaccctgatgggccacgacgacgccgtgagcaagatctgctggcacgacaacagactgtacagcgccagctgggacagcaccgtgaaggtgtggagcggcgtgcccgccgagatgcccggcaccaagagacaccacttcgacctgctggccgagctggagcacgacgtgagcgtggacaccatcagcctgaacgccgccagcaccctgctggtgagcggcaccaaggagggcaccgtgaacatctgggacctgaccaccgccaccctgatgcaccagatcccctgccacagcggcatcgtgtgcgacaccgccttcagccccgacagcagacacgtgctgagcaccggcaccgacggctgcctgaacgtgatcgacgtgcagaccggcatgctgatcagcagcatgaccagcgacgagccccagagatgcttcgtgtgggacggcaacagcgtgctgagcggcagccagagcggcgagctgctggtgtgggacctgctgggcgccaagatcagcgagagaatccagggccacaccggcgccgtgacctgcatctggatgaacgagcagtgcagcagcatcatcaccggcggcgaggacagacagatcatcttctggaagctgcagtactag

SEQ ID NO: 91006 - DNA, 2847 bp, synthetic construct
  misc_feature 1..2847: note = Description of Artificial Sequence: Synthetic coding sequence
  source 1..2847: mol_type = other DNA
atgaccggccaggccagattccacagaggcgccgaggcctgcagagccatcagacagtgcagaagcagaagacccagagccgcccaccccgagggcagagccggcagcggcagaggcagcagacacgccagccccggcgtgagaagaggcggcttcagcctgctgctgctgaacctggaggagtactacttcgagcagcacagagccaaccacatcctgcacaagggcagccaccacgagagaaagatcagaggcagcctgaagatctgcagcaagagcgtgatcttcgagcccgacagcatcagccagcccatcatcaagatccccctgagagactgcatcaagatcggcaagcacggcgagaacggcgccaacagacacttcaccaaggccaagagcggcggcatcagcctgatcttcagccaggtgtacttcatcaaggagcacaacgtggtggccccctacaagatcgagagaggcaagatggagtacgtgttcgagctggacgtgcccggcaaggtggaggacgtggtggagaccctgctgcagctgcacagagccagctgcctggacaagctgggcgaccagaccgccatgatcaccgccatcctgcagagcagactggccagaaccagcttcgacaagaacagattccagaacatcagcgagaagctgcacatggagtgcaaggccgagatggtgacccccctggtgaccaaccccggccacgtgtgcatcaccgacaccaacctgtacttccagcccctgaacggctaccccaagcccgtggtgcagatcaccctgcaggacgtgagaagaatctacaagagaagacacggcctgatgcccctgggcctggaggtgttctgcaccgaggacgacctgtgcagcgacatctacctgaagttctacgagccccaggacagagacgacctgtacttctacatcgccacctacctggagcaccacgtggccgagcacaccgccgagagctacatgctgcagtggcagagaggccacctgagcaactaccagtacctgctgcacctgaacaacctggccgacagaagctgcaacgacctgagccagtaccccgtgttcccctggatcatccacgactacagcagcagcgagctggacctgagcaaccccggcaccttcagagacctgagcaagcccgtgggcgccctgaacaaggagagactggagagactgctgaccagataccaggagatgcccgagcccaagttcatgtacggcagccactacagcagccccggctacgtgctgttctacctggtgagaatcgcccccgagtacatgctgtgcctgcagaacggcagattcgacaacgccgacagaatgttcaacagcatcgccgagacctggaagaactgcctggacggcgccaccgacttcaaggagctgatccccgagttctacggcgacgacgtgagcttcctggtgaacagcctgaagctggacctgggcaagagacagggcggccagatggtggacgacgtggagctgcccccctgggccagcagccccgaggacttcctgcagaagagcaaggacgccctggagagcaactacgtgagcgagcacctgcacgagtggatcgacctgatcttcggctacaagcagaagggcagcgacgccgtgggcgcccacaacgtgttccaccccctgacctacgagggcggcgtggacctgaacagcatccaggaccccgacgagaaggtggccatgctgacccagatcctggagttcggccagacccccaagcagctgttcgtgaccccccaccccagaagaatcacccccaagttcaagagcctgagccagaccagcagctacaacgccagcatggccgacagccccggcgaggagagcttcgaggacctgaccgaggagagcaagaccctggcctggaacaacatcaccaagctgcagctgcacgagcactacaagatccacaaggaggccgtgaccggcatcaccgtgagcagaaacggcagcagcgtgttcaccaccagccaggacagcaccctgaagatgttcagcaaggagagcaagatgctgcagagaagcatcagcttcagcaacatggccctgagcagctgcctgctgctgcccggcgacgccaccgtgatcaccagcagctgggacaacaacgtgtacttctacagcatcgccttcggcagaagacaggacaccctgatgggccacgacgacgccgtgagcaagatctgctggcacgacaacagactgtacagcgccagctgggacagcaccgtgaaggtgtggagcggcgtgcccgccgagatgcccggcaccaagagacaccacttcgacctgctggccgagctggagcacgacgtgagcgtggacaccatcagcctgaacgccgccagcaccctgctggtgagcggcaccaaggagggcaccgtgaacatctgggacctgaccaccgccaccctgatgcaccagatcccctgccacagcggcatcgtgtgcgacaccgccttcagccccgacagcagacacgtgctgagcaccggcaccgacggctgcctgaacgtgatcgacgtgcagaccggcatgctgatcagcagcatgaccagcgacgagccccagagatgcttcgtgtgggacggcaacagcgtgctgagcggcagccagagcggcgagctgctggtgtgggacctgctgggcgccaagatcagcgagagaatccagggccacaccggcgccgtgacctgcatctggatgaacgagcagtgcagcagcatcatcaccggcggcgaggacagacagatcatcttctggaagctgcagtactag

SEQ ID NO: 91007 - DNA, 1173 bp, synthetic construct
  misc_feature 1..1173: note = Description of Artificial Sequence: Synthetic coding sequence
  source 1..1173: mol_type = other DNA
atgggcgacaccttcatcagacacatcgccctgctgggcttcgagaagagattcgtgcccagccagcactacgtgtacatgttcctggtgaagtggcaggacctgagcgagaaggtggtgtacagaagattcaccgagatctacgagttccacaagaccctgaaggagatgttccccatcgaggccggcgccatcaaccccgagaacagaatcatcccccacctgcccgcccccaagtggttcgacggccagagagccgccgagaacagacagggcaccctgaccgagtactgcggcaccctgatgagcctgcccaccaagatcagcagatgcccccacctgctggacttcttcaaggtgagacccgacgacctgaagctgcccaccgacaaccagaccaagaagcccgagacctacctgatgcccaaggacggcaagagcaccgccaccgacatcaccggccccatcatcctgcagacctacagagccatcgccaactacgagaagaccagcggcagcgagatggccctgagcaccggcgacgtggtggaggtggtggagaagagcgagagcggctggtggttctgccagatgaaggccaagagaggctggatccccgccagcttcctggagcccctggacagccccgacgagaccgaggaccccgagcccaactacgccggcgagccctacgtggccatcaaggcctacaccgccgtggagggcgacgaggtgagcctgctggagggcgaggccgtggaggtgatccacaagctgctggacggctggtgggtgatcagaaaggacgacgtgaccggctacttccccagcatgtacctgcagaagagcggccaggacgtgagccaggcccagagacagatcaagagaggcgccccccccagaagaagcagcatcagaaacgcccacagcatccaccagagaagcagaaagagactgagccaggacgcctacagaagaaacagcgtgagattcctgcagcagagaagaagacaggccagacccggcccccagagccccggcagccccctggaggaggagagacagacccagagaagcaagccccagcccgccgtgccccccagacccagcgccgacctgatcctgaacagatgcagcgagagcaccaagagaaagctggccagcgccgtgtag

SEQ ID NO: 91008 - DNA, 444 bp, synthetic construct
  misc_feature 1..444: note = Description of Artificial Sequence: Synthetic coding sequence
  source 1..444: mol_type = other DNA
atgaccaagaagcccgagacctacctgatgcccaaggacggcaagagcaccgccaccgacatcaccggccccatcatcctgcagacctacagagccatcgccaactacgagaagaccagcggcagcgagatggccctgagcaccggcgacgtggtggaggtggtggagaagagcgagagcggccagaccagccacctgaccggcctgctgcccctggtgctgagaaacccccagccccaggccccctgccagggcagcggcagcctggcccccggcagaacccccgccctgctgggcgccctgaacgtgctgcccaccctgtgggtggccttctgcctgagcgtgcaccccgtggtggccgtgggcatctgcgcctggcaggccggcgccggccacgtgtgcgtgttctgcctggacggctacggcaccgtgtgcagcctgtag

SEQ ID NO: 91009 - DNA, 759 bp, synthetic construct
  misc_feature 1..759: note = Description of Artificial Sequence: Synthetic coding sequence
  source 1..759: mol_type = other DNA
atgggcgacaccttcatcagacacatcgccctgctgggcttcgagaagagattcgtgcccagccagcactacgtgcacgtgcccggcgagatggccggccccgtgggcgagggcggcctgcccgccctgcacagagacctgagagtgcccagccccaagtggttcgacggccagagagccgccgagaacagacagggcaccctgaccgagtactgcggcaccctgatgagcctgcccaccaagatcagcagatgcccccacctgctggacttcttcaaggtgagacccgacgacctgaagctgcccaccgacaaccagaccaagaagcccgagacctacctgatgcccaaggacggcaagagcaccgccaccgacatcaccggccccatcatcctgcagacctacagagccatcgccaactacgagaagaccagcggcagcgagatggccctgagcaccggcgacgtggtggaggtggtggagaagagcgagagcggccagaccagccacctgaccggcctgctgcccctggtgctgagaaacccccagccccaggccccctgccagggcagcggcagcctggcccccggcagaacccccgccctgctgggcgccctgaacgtgctgcccaccctgtgggtggccttctgcctgagcgtgcaccccgtggtggccgtgggcatctgcgcctggcaggccggcgccggccacgtgtgcgtgttctgcctggacggctacggcaccgtgtgcagcctgtag

SEQ ID NO: 91010 - DNA, 1581 bp, synthetic construct
  misc_feature 1..1581: note = Description of Artificial Sequence: Synthetic coding sequence
  source 1..1581: mol_type = other DNA
atgagcctggtggaggccatcagcctgtggaacgagggcgtgctggccgccgacaagaaggactggaagggcgccctggacgccttcagcgccgtgcaggacccccacagcagaatctgcttcaacatcggctgcatgtacaccatcctgaagaacatgaccgaggccgagaaggccttcaccagaagcatcaacagagacaagcacctggccgtggcctacttccagagaggcatgctgtactaccagaccgagaagtacgacctggccatcaaggacctgaaggaggccctgatccagctgagaggcaaccagctgatcgactacaagatcctgggcctgcagttcaagctgttcgcctgcgaggtgctgtacaacatcgccttcatgtacgccaagaaggaggagtggaagaaggccgaggagcagctggccctggccaccagcatgaagagcgagcccagacacagcaagatcgacaaggccatggagtgcgtgtggaagcagaagctgtacgagcccgtggtgatccccgtgggcaagctgttcagacccaacgagagacaggtggcccagctggccaagaaggactacctgggcaaggccaccgtggtggccagcgtggtggaccaggacagcttcagcggcttcgcccccctgcagccccaggccgccgagcccccccccagacccaagacccccgagatcttcagagccctggagggcgaggcccacagagtgctgttcggcttcgtgcccgagaccaaggaggagctgcaggtgatgcccggcaacatcgtgttcgtgctgaagaagggcaacgacaactgggccaccgtgatgttcaacggccagaagggcctggtgccctgcaactacctggagcccgtggagctgagaatccacccccagcagcagccccaggaggagagcagcccccagagcgacatccccgccccccccagcagcaaggcccccggcagaccccagctgagccccggccagaagcagaaggaggagcccaaggaggtgaagctgagcgtgcccatgccctacaccctgaaggtgcactacaagtacaccgtggtgatgaagacccagcccggcctgccctacagccaggtgagagacatggtgagcaagaagctggagctgagactggagcacaccaagctgagctacagacccagagacagcaacgagctggtgcccctgagcgaggacagcatgaaggacgcctggggccaggtgaagaactactgcctgaccctgtggtgcgagaacaccgtgggcgaccagggcttccccgacgagcccaaggagagcgagaaggccgacgccaacaaccagaccaccgagccccagctgaagaagggcagccaggtggaggccctgttcagctacgaggccacccagcccgaggacctggagttccaggagggcgacatcatcctggtgctgagcaaggtgaacgaggagtggctggagggcgagtgcaagggcaaggtgggcatcttccccaaggtgttcgtggaggactgcgccaccaccgacctggagagcaccagaagagaggtgtag

SEQ ID NO: 91011 - DNA, 1581 bp, synthetic construct; identical to SEQ ID NO: 91010
  misc_feature 1..1581: note = Description of Artificial Sequence: Synthetic coding sequence
  source 1..1581: mol_type = other DNA

SEQ ID NO: 91012 - DNA, 1797 bp, synthetic construct
  misc_feature 1..1797: note = Description of Artificial Sequence: Synthetic coding sequence
  source 1..1797: mol_type = other DNA
ggcagccccgccagaggcgacgcccccacctgcctgctgagcgtgagctggcagctgagctggccccccagcttctacctgatcatgagcctggtggaggccatcagcctgtggaacgagggcgtgctggccgccgacaagaaggactggaagggcgccctggacgccttcagcgccgtgcaggacccccacagcagaatctgcttcaacatcggctgcatgtacaccatcctgaagaacatgaccgaggccgagaaggccttcaccagaagcatcaacagagacaagcacctggccgtggcctacttccagagaggcatgctgtactaccagaccgagaagtacgacctggccatcaaggacctgaaggaggccctgatccagctgagaggcaaccagctgatcgactacaagatcctgggcctgcagttcaagctgttcgcctgcgaggtgctgtacaacatcgccttcatgtacgccaagaaggaggagtggaagaaggccgaggagcagctggccctggccaccagcatgaagagcgagcccagacacagcaagatcgacaaggccatggagtgcgtgtggaagcagaagctgtacgagcccgtggtgatccccgtgggcaagctgttcagacccaacgagagacaggtggcccagctggccaagaaggactacctgggcaaggccaccgtggtggccagcgtggtggaccaggacagcttcagcggcttcgcccccctgcagccccaggtgagacagagcgacctgctgggcgcccaggccggcagcgtgagcagcagacagctgcagctggacgtggagctggagcccggctggagccaggtgcccggcagcaagttcagcgtgttcgccccctggcaccacgtgagaggctggggcctggacctggtgagcatcctgtgcagagccctggagggcgaggcccacagagtgctgttcggcttcgtgcccgagaccaaggaggagctgcaggtgatgcccggcaacatcgtgttcgtgctgaagaagggcaacgacaactgggccaccgtgatgttcaacggccagaagggcctggtgccctgcaactacctggagcccgtggagctgagaatccacccccagcagcagccccaggaggagagcagcccccagagcgacatccccgccccccccagcagcaaggcccccggcagaccccagctgagccccggccagaagcagaaggaggagcccaaggaggtgaagctgagcgtgcccatgccctacaccctgaaggtgcactacaagtacaccgtggtgatgaagacccagcccggcctgccctacagccaggtgagagacatggtgagcaagaagctggagctgagactggagcacaccaagctgagctacagacccagagacagcaacgagctggtgcccctgagcgaggacagcatgaaggacgcctggggccaggtgaagaactactgcctgaccctgtggtgcgagaacaccgtgggcgaccagggcttccccgacgagcccaaggagagcgagaaggccgacgccaacaaccagaccaccgagccccagctgaagaagggcagccaggtggaggccctgttcagctacgaggccacccagcccgaggacctggagttccaggagggcgacatcatcctggtgctgagcaaggtgaacgaggagtggctggagggcgagtgcaagggcaaggtgggcatcttccccaaggtgttcgtggaggactgcgccaccaccgacctggagagcaccagaagagaggtgtag

SEQ ID NO: 91013 - DNA, 1446 bp, synthetic construct
  misc_feature 1..1446: note = Description of Artificial Sequence: Synthetic coding sequence
  source 1..1446: mol_type = other DNA
atgagcctggtggaggccatcagcctgtggaacgagggcgtgctggccgccgacaagaaggactggaagggcgccctggacgccttcagcgccgtgcaggacccccacagcagaatctgcttcaacatcggctgcatgtacaccatcctgaagaacatgaccgaggccgagaaggccttcaccagaagcatcaacagagacaagcacctggccgtggcctacttccagagaggcatgctgtactaccagaccgagaagtacgacctggccatcaaggacctgaaggaggccctgatccagctgagaggcaaccagctgatcgactacaagatcctgggcctgcagttcaagctgttcgcctgcgagaagcagaagctgtacgagcccgtggtgatccccgtgggcaagctgttcagacccaacgagagacaggtggcccagctggccaagaaggactacctgggcaaggccaccgtggtggccagcgtggtggaccaggacagcttcagcggcttcgcccccctgcagccccaggccgccgagcccccccccagacccaagacccccgagatcttcagagccctggagggcgaggcccacagagtgctgttcggcttcgtgcccgagaccaaggaggagctgcaggtgatgcccggcaacatcgtgttcgtgctgaagaagggcaacgacaactgggccaccgtgatgttcaacggccagaagggcctggtgccctgcaactacctggagcccgtggagctgagaatccacccccagcagcagccccaggaggagagcagcccccagagcgacatccccgccccccccagcagcaaggcccccggcagaccccagctgagccccggccagaagcagaaggaggagcccaaggaggtgaagctgagcgtgcccatgccctacaccctgaaggtgcactacaagtacaccgtggtgatgaagacccagcccggcctgccctacagccaggtgagagacatggtgagcaagaagctggagctgagactggagcacaccaagctgagctacagacccagagacagcaacgagctggtgcccctgagcgaggacagcatgaaggacgcctggggccaggtgaagaactactgcctgaccctgtggtgcgagaacaccgtgggcgaccagggcttccccgacgagcccaaggagagcgagaaggccgacgccaacaaccagaccaccgagccccagctgaagaagggcagccaggtggaggccctgttcagctacgaggccacccagcccgaggacctggagttccaggagggcgacatcatcctggtgctgagcaaggtgaacgaggagtggctggagggcgagtgcaagggcaaggtgggcatcttccccaaggtgttcgtggaggactgcgccaccaccgacctggagagcaccagaagagaggtgtag

SEQ ID NO: 91014 - DNA, 1338 bp, synthetic construct
  misc_feature 1..1338: note = Description of Artificial Sequence: Synthetic coding sequence
  source 1..1338: mol_type = other DNA
atgagcctggtggaggccatcagcctgtggaacgagggcgtgctggccgccgacaagaaggactggaagggcgccctggacgccttcagcgccgtgcaggacccccacagcagaatctgcttcaacatcggctgcatgtacaccatcctgaagaacatgaccgaggccgagaaggccttcaccagaagcatcaacagagacaagcacctggccgtggcctacttccagagaggcatgctgtactaccagaccgagaagtacgacctggccatcaaggacctgaaggaggccctgatccagctgagaggcaaccagctgatcgactacaagatcctgggcctgcagttcaagctgttcgcctgcgaggtggtggccagcgtggtggaccaggacagcttcagcggcttcgcccccctgcagccccaggccgccgagcccccccccagacccaagacccccgagatcttcagagccctggagggcgaggcccacagagtgctgttcggcttcgtgcccgagaccaaggaggagctgcaggtgatgcccggcaacatcgtgttcgtgctgaagaagggcaacgacaactgggccaccgtgatgttcaacggccagaagggcctggtgccctgcaactacctggagcccgtggagctgagaatccacccccagcagcagccccaggaggagagcagcccccagagcgacatccccgccccccccagcagcaaggcccccggcagaccccagctgagccccggccagaagcagaaggaggagcccaaggaggtgaagctgagcgtgcccatgccctacaccctgaaggtgcactacaagtacaccgtggtgatgaagacccagcccggcctgccctacagccaggtgagagacatggtgagcaagaagctggagctgagactggagcacaccaagctgagctacagacccagagacagcaacgagctggtgcccctgagcgaggacagcatgaaggacgcctggggccaggtgaagaactactgcctgaccctgtggtgcgagaacaccgtgggcgaccagggcttccccgacgagcccaaggagagcgagaaggccgacgccaacaaccagaccaccgagccccagctgaagaagggcagccaggtggaggccctgttcagctacgaggccacccagcccgaggacctggagttccaggagggcgacatcatcctggtgctgagcaaggtgaacgaggagtggctggagggcgagtgcaagggcaaggtgggcatcttccccaaggtgttcgtggaggactgcgccaccaccgacctggagagcaccagaagagaggtgtag

SEQ ID NO: 91015 - DNA, 432 bp, synthetic construct
  misc_feature 1..432: note = Description of Artificial Sequence: Synthetic coding sequence
  source 1..432: mol_type = other DNA
atgcccggcaacatcgtgttcgtgctgaagaagggcaacgacaactgggccaccgtgatgttcaacggccagaagggcctggtgccctgcaactacctggagcccgtggagctgagaatccacccccagcagcagccccaggaggagagcagcccccagagcgacatccccgccccccccagcagcaaggcccccggcagaccccagctgagccccggccagaagcagaaggaggagcccaaggaggtgaagctgagcgtgcccatgccctacaccctgaaggtgcactacaagtacaccgtggtgatgaagacccagcccggcctgccctacagccaggtgagagacatggtgagcaagaagctggagctgagactggagcacaccaagctgagctacagacccagagacagcaacgagctggtgccctag

SEQ ID NO: 91016 - DNA, 171 bp, synthetic construct
  misc_feature 1..171: note = Description of Artificial Sequence: Synthetic coding sequence
  source 1..171: mol_type = other DNA
atgccctacaccctgaaggtgcactacaagtacaccgtggtgatgaagacccagcccggcctgccctacagccaggtgagagacatggtgagcaagaagctggagctgagactggagcacaccaagctgagctacagacccagagacagcaacgagctggtgcccctgtag

SEQ ID NO: 91017 - DNA, 1020 bp, synthetic construct
  misc_feature 1..1020: note = Description of Artificial Sequence: Synthetic coding sequence
  source 1..1020: mol_type = other DNA
atggccgtggcccagcagctgagagccgagagcgacttcgagcagctgcccgacgacgtggccatcagcgccaacatcgccgacatcgaggagaagagaggcttcaccagccacttcgtgttcgtgatcgaggtgaagaccaagggcggcagcaagtacctgatctacagaagatacagacagttccacgccctgcagagcaagctggaggagagattcggccccgacagcaagagcagcgccctggcctgcaccctgcccaccctgcccgccaaggtgtacgtgggcgtgaagcaggagatcgccgagatgagaatccccgccctgaacgcctacatgaagagcctgctgagcctgcccgtgtgggtgctgatggacgaggacgtgagaatcttcttctaccagagcccctacgacagcgagcaggtgccccaggccctgagaagactgagacccagaaccagaaaggtgaagagcgtgagcccccagggcaacagcgtggacagaatggccgcccccagagccgaggccctgttcgacttcaccggcaacagcaagctggagctgaacttcaaggccggcgacgtgatcttcctgctgagcagaatcaacaaggactggctggagggcaccgtgagaggcgccaccggcatcttccccctgagcttcgtgaagatcctgaaggacttccccgaggaggacgaccccaccaactggctgagatgctactactacgaggacaccatcagcaccatcaaggacatcgccgtggaggaggacctgagcagcacccccctgctgaaggacctgctggagctgaccagaagagagttccagagagaggacatcgccctgaactacagagacgccgagggcgacctggtgagactgctgagcgacgaggacgtggccctgatggtgagacaggccagaggcctgcccagccagaagagactgttcccctggaagctgcacatcacccagaaggacaactacagagtgtacaacaccatgccctag

SEQ ID NO: 91018 - DNA, 1047 bp, synthetic construct
  misc_feature 1..1047: note = Description of Artificial Sequence: Synthetic coding sequence
  source 1..1047: mol_type = other DNA
atggccgtggcccagcagctgagagccgagagcgacttcgagcagctgcccgacgacgtggccatcagcgccaacatcgccgacatcgaggagaagagaggcttcaccagccacttcgtgttcgtgatcgaggtgaagaccaagggcggcagcaagtacctgatctacagaagatacagacagttccacgccctgcagagcaagctggaggagagattcggccccgacagcaagagcagcgccctggcctgcaccctgcccaccctgcccgccaaggtgtacgtgggcgtgaagcaggagatcgccgagatgagaatccccgccctgaacgcctacatgaagagcctgctgagcctgcccgtgtgggtgctgatggacgaggacgtgagaatcttcttctaccagagcccctacgacagcgagcaggtgccccaggccctgagaagactgagacccagaaccagaaaggtgaagagcgtgagcccccagggcaacagcgtggacagaatggccgcccccagagccgaggccctgttcgacttcaccggcaacagcaagctggagctgaacttcaaggccggcgacgtgatcttcctgctgagcagaatcaacaaggactggctggagggcaccgtgagaggcgccaccggcatcttccccctgagcttcgtgaagatcctgaaggacttccccgaggaggacgaccccaccaactggctgagatgctactactacgaggacaccatcagcaccatcaagagcgtggcctgggagggcggcgcctgccccgccttcctgcccagcctgagacccctgcccctgaccagccccagccacggcagcctgagccacagcaaggcccccagcggcagccagatgagccacaacgccgtgaccagccaccagagacccggctggcccggccagccccacagccccttcccccaccccaccccccacttccagcccgacgccagcctgctgcagcccgtgacccccctgggcaccagcagatggagaaagatcagcgccgccctgccctactag

SEQ ID NO: 91019 - DNA, 501 bp, synthetic construct
  misc_feature 1..501: note = Description of Artificial Sequence: Synthetic coding sequence
  source 1..501: mol_type = other DNA
atgagaatccccgccctgaacgcctacatgaagagcctgctgagcctgcccgtgtgggtgctgatggacgaggacgtgagaatcttcttctaccagagcccctacgacagcgagcaggtgccccaggccctgagaagactgagacccagaaccagaaaggtgaagagcgtgagcccccagggcaacagcgtggacagaatggccgcccccagagccgaggccctgttcgacttcaccggcaacagcaagctggagctgaacttcaaggccggcgacgtgatcttcctgctgagcagaatcaacaaggactggctggagggcaccgtgagaggcgccaccggcatcttccccctgagcttcgtgaagatcctgaaggacttccccgaggaggacgaccccaccaactggctgagatgctactactacgaggacaccatcagcaccatcaagagcgtggcctgggagggcggcgcctgccccgccttcctgcccagcctgtag

SEQ ID NO: 91020 - DNA, 480 bp, synthetic construct
  misc_feature 1..480: note = Description of Artificial Sequence: Synthetic coding sequence
  source 1..480: mol_type = other DNA
atgaacgacatcagccagaaggccgagatcctgctgagcagcagcaagcccgtgcccaagacctacgtgcccaagctgggcaagggcgacgtgaaggacaagttcgaggccatgcagagagccagagaggagagaaaccagagaagaagcagagacgagaagcagagaagaaaggagcagtacatcagagagagagagtggaacagaagaaagcaggagatcaaggagatgctggccagcgacgacgaggaggacgtgagcagcaaggtggagaaggcctacgtgcccaagctgaccggcaccgtgaagggcagattcgccgagatggagaagcagagacaggaggagcagagaaagagaaccgaggaggagagaaagagaagaatcgagcaggacatgctggagaagagaaagatccagagagagctggccaagagagccgagcagaagctggccagaagagacggcgcccacctgtag

SEQ ID NO: 91021 - DNA, 1836 bp, synthetic construct
  misc_feature 1..1836: note = Description of Artificial Sequence: Synthetic coding sequence
  source 1..1836: mol_type = other DNA
atgaacgacatcagccagaaggccgagatcaaggagatgctggccagcgacgacgaggaggacgtgagcagcaaggtggagaaggcctacgtgcccaagctgaccggcaccgtgaagggcagattcgccgagatggagaagcagagacaggaggagcagagaaagagaaccgaggaggagagaaagagaagaatcgagcaggacatgctggagaagagaaagatccagagagagctggccaagagagccgagcagatcgaggacatcaacaacaccggcaccgagagcgccagcgaggagggcgacgacagcctgctgatcaccgtggtgcccgtgaagagctacaagaccagcggcaagatgaagaagaacttcgaggacctggagaaggagagagaggagaaggagagaatcaagtacgaggaggacaagagaatcagatacgaggagcagagacccagcctgaaggaggccaagtgcctgagcctggtgatggacgacgagatcgagagcgaggccaagaaggagagcctgagccccggcaagctgaagctgaccttcgaggagctggagagacagagacaggagaacagaaagaagcaggccgaggaggaggccagaaagagactggaggaggagaagagagccttcgaggaggccagaagacagatggtgaacgaggacgaggagaaccaggacaccgccaagatcttcaagggctacagacccggcaagctgaagctgagcttcgaggagatggagagacagagaagagaggacgagaagagaaaggccgaggaggaggccagaagaagaatcgaggaggagaagaaggccttcgccgaggccagaagaaacatggtggtggacgacgacagccccgagatgtacaagaccatcagccaggagttcctgacccccggcaagctggagatcaacttcgaggagctgctgaagcagaagatggaggaggagaagagaagaaccgaggaggagagaaagcacaagctggagatggagaagcaggagttcgagcagctgagacaggagatgggcgaggaggaggaggagaacgagaccttcggcctgagcagagagtacgaggagctgatcaagctgaagagaagcggcagcatccaggccaagaacctgaagagcaagttcgagaagatcggccagctgagcgagaaggagatccagaagaagatcgaggaggagagagccagaagaagagccatcgacctggagatcaaggagagagaggccgagaacttccacgaggaggacgacgtggacgtgagacccgccagaaagagcgaggcccccttcacccacaaggtgaacatgaaggccagattcgagcagatggccaaggccagagaggaggaggagcagagaagaatcgaggagcagaagctgctgagaatgcagttcgagcagagagagatcgacgccgccctgcagaagaagagagaggaggaggaggaggaggagggcagcatcatgaacggcagcaccgccgaggacgaggagcagaccagaagcggcgccccctggttcaagaagcccctgaagaacaccagcgtggtggacagcgagcccgtgagattcaccgtgaaggtgaccggcgagcccaagcccgagatcacctggtggttcgagggcgagatcctgcaggacggcgaggactaccagtacatcgagagaggcgagacctactgcctgtacctgcccgagaccttccccgaggacggcggcgagtacatgtgcaaggccgtgaacaacaagggcagcgccgccagcacctgcatcctgaccatcgagagcaagaactag

SEQ ID NO: 91022 - DNA, 2028 bp, synthetic construct
  misc_feature 1..2028: note = Description of Artificial Sequence: Synthetic coding sequence
  source 1..2028: mol_type = other DNA
atgaacgacatcagccagaaggccgagatcctgctgagcagcagcaagcccgtgcccaagacctacgtgcccaagctgggcaagggcgacgtgaaggacaagttcgaggccatgcagagagccagagaggagagaaaccagagaagaagcagagacgagaagcagagaagaaaggagcagtacatcagagagagagagtggaacagaagaaagcaggagatcaaggagatgctggccagcgacgacgaggaggacgtgagcagcaaggtggagaaggcctacgtgcccaagctgaccggcaccgtgaagggcagattcgccgagatggagaagcagagacaggaggagcagagaaagagaaccgaggaggagagaaagagaagaatcgagcaggacatgctggagaagagaaagatccagagagagctggccaagagagccgagcagatcgaggacatcaacaacaccggcaccgagagcgccagcgaggagggcgacgacagcctgctgatcaccgtggtgcccgtgaagagctacaagaccagcggcaagatgaagaagaacttcgaggacctggagaaggagagagaggagaaggagagaatcaagtacgaggaggacaagagaatcagatacgaggagcagagacccagcctgaaggaggccaagtgcctgagcctggtgatggacgacgagatcgagagcgaggccaagaaggagagcctgagccccggcaagctgaagctgaccttcgaggagctggagagacagagacaggagaacagaaagaagcaggccgaggaggaggccagaaagagactggaggaggagaagagagccttcgaggaggccagaagacagatggtgaacgaggacgaggagaaccaggacaccgccaagatcttcaagggctacagacccggcaagctgaagctgagcttcgaggagatggagagacagagaagagaggacgagaagagaaaggccgaggaggaggccagaagaagaatcgaggaggagaagaaggccttcgccgaggccagaagaaacatggtggtggacgacgacagccccgagatgtacaagaccatcagccaggagttcctgacccccggcaagctggagatcaacttcgaggagctgctgaagcagaagatggaggaggagaagagaagaaccgaggaggagagaaagcacaagctggagatggagaagcaggagttcgagcagctgagacaggagatgggcgaggaggaggaggagaacgagaccttcggcctgagcagagagtacgaggagctgatcaagctgaagagaagcggcagcatccaggccaagaacctgaagagcaagttcgagaagatcggccagctgagcgagaaggagatccagaagaagatcgaggaggagagagccagaagaagagccatcgacctggagatcaaggagagagaggccgagaacttccacgaggaggacgacgtggacgtgagacccgccagaaagagcgaggcccccttcacccacaaggtgaacatgaaggccagattcgagcagatggccaaggccagagaggaggaggagcagagaagaatcgaggagcagaagctgctgagaatgcagttcgagcagagagagatcgacgccgccctgcagaagaagagagaggaggaggaggaggaggagggcagcatcatgaacggcagcaccgccgaggacgaggagcagaccagaagcggcgccccctggttcaagaagcccctgaagaacaccagcgtggtggacagcgagcccgtgagattcaccgtgaaggtgaccggcgagcccaagcccgagatcacctggtggttcgagggcgagatcctgcaggacggcgaggactaccagtacatcgagagaggcgagacctactgcctgtacctgcccgagaccttccccgaggacggcggcgagtacatgtgcaaggccgtgaacaacaagggcagcgccgccagcacctgcatcctgaccatcgagagcaagaactag

SEQ ID NO: 91023 - DNA, 1731 bp, synthetic construct
  misc_feature 1..1731: note = Description of Artificial Sequence: Synthetic coding sequence
  source 1..1731: mol_type = other DNA
tgagtgaagggcagattcgccgagatggagaagcagagacaggaggagcagagaaagagaaccgaggaggagagaaagagaagaatcgagcaggacatgctggagaagagaaagatccagagagagctggccaagagagccgagcagatcgaggacatcaacaacaccggcaccgagagcgccagcgaggagggcgacgacagcctgctgatcaccgtggtgcccgtgaagagctacaagaccagcggcaagatgaagaagaacttcgaggacctggagaaggagagagaggagaaggagagaatcaagtacgaggaggacaagagaatcagatacgaggagcagagacccagcctgaaggaggccaagtgcctgagcctggtgatggacgacgagatcgagagcgaggccaagaaggagagcctgagccccggcaagctgaagctgaccttcgaggagctggagagacagagacaggagaacagaaagaagcaggccgaggaggaggccagaaagagactggaggaggagaagagagccttcgaggaggccagaagacagatggtgaacgaggacgaggagaaccaggacaccgccaagatcttcaagggctacagacccggcaagctgaagctgagcttcgaggagatggagagacagagaagagaggacgagaagagaaaggccgaggaggaggccagaagaagaatcgaggaggagaagaaggccttcgccgaggccagaagaaacatggtggtggacgacgacagccccgagatgtacaagaccatcagccaggagttcctgacccccggcaagctggagatcaacttcgaggagctgctgaagcagaagatggaggaggagaagagaagaaccgaggaggagagaaagcacaagctggagatggagaagcaggagttcgagcagctgagacaggagatgggcgaggaggaggaggagaacgagaccttcggcctgagcagagagtacgaggagctgatcaagctgaagagaagcggcagcatccaggccaagaacctgaagagcaagttcgagaagatcggccagctgagcgagaaggagatccagaagaagatcgaggaggagagagccagaagaagagccatcgacctggagatcaaggagagagaggccgagaacttccacgaggaggacgacgtggacgtgagacccgccagaaagagcgaggcccccttcacccacaaggtgaacatgaaggccagattcgagcagatggccaaggccagagaggaggaggagcagagaagaatcgaggagcagaagctgctgagaatgcagttcgagcagagagagatcgacgccgccctgcagaagaagagagaggaggaggaggaggaggagggcagcatcatgaacggcagcaccgccgaggacgaggagcagaccagaagcggcgccccctggttcaagaagcccctgaagaacaccagcgtggtggacagcgagcccgtgagattcaccgtgaaggtgaccggcgagcccaagcccgagatcacctggtggttcgagggcgagatcctgcaggacggcgaggactaccagtacatcgagagaggcgagacctactgcctgtacctgcccgagaccttccccgaggacggcggcgagtacatgtgcaaggccgtgaacaacaagggcagcgccgccagcacctgcatcctgaccatcgagaccgacgactactag

SEQ ID NO: 91024 - DNA, 966 bp, synthetic construct
  misc_feature 1..966: note = Description of Artificial Sequence: Synthetic coding sequence
  source 1..966: mol_type = other DNA
atgaacgacatcagccagaaggccgagatcaaggagatgctggccagcgacgacgaggaggacgtgagcagcaaggtggagaaggcctacgtgcccaagctgaccggcaccgtgaagggcagattcgccgagatggagaagcagagacaggaggagcagagaaagagaaccgaggaggagagaaagagaagaatcgagcaggacatgctggagaagagaaagatccagagagagctggccaagagagccgagcagatcgaggacatcaacaacaccggcaccgagagcgccagcgaggagggcgacgacagcctgctgatcaccgtggtgcccgtgaagagctacaagaccagcggcaagatgaagaagaacttcgaggacctggagaaggagagagaggagaaggagagaatcaagtacgaggaggacaagagaatcagatacgaggagcagagacccagcctgaaggaggccaagtgcctgagcctggtgatggacgacgagatcgagagcgaggccaagaaggagagcctgagccccggcaagctgaagctgaccttcgaggagctggagagacagagacaggagaacagaaagaagcaggccgaggaggaggccagaaagagactggaggaggagaagagagccttcgaggaggccagaagacagatggtgaacgaggacgaggagaaccaggacaccgccaagatcttcaagggctacagacccggcaagctgaagctgagcttcgaggagatggagagacagagaagagaggacgagaagagaaaggccgaggaggaggccagaagaagaatcgaggaggagaagaaggccttcgccgaggccagaagaaacatggtggtggacgacgacagccccgagatgtacaagaccatcagccaggagttcctgacccccggcaagctggagatcaacttcgaggagctgctgaagcagaagtag

SEQ ID NO: 91025 - DNA, 1308 bp, synthetic construct
  misc_feature 1..1308: note = Description of Artificial Sequence: Synthetic coding sequence
  source 1..1308: mol_type = other DNA
atgaacgacatcagccagaaggccgagatcctgctgagcagcagcaagcccgtgcccaagacctacgtgcccaagctgggcaagggcgacgtgaaggacaagttcgaggccatgcagagagccagagaggagagaaaccagagaagaagcagagacgagaagcagagaagaaaggagcagtacatcagagagagagagtggaacagaagaaagcaggagatcaaggagatgctggccagcgacgacgaggaggacgtgagcagcaaggtggagaaggcctacgtgcccaagctgaccggcaccgtgaagggcagattcgccgagatggagaagcagagacaggaggagcagagaaagagaaccgaggaggagagaaagagaagaatcgagcaggacatgctggagaagagaaagatccagagagagctggccaagagagccgagcaggagggcgacgacagcctgctgatcaccgtggtgcccgtgaagagctacaagaccagcggcaagatgaagaagaacttcgaggacctggagaaggagagagaggagaaggagagaatcaagtacgaggaggacaagagaatcagatacgaggagcagagacccagcctgaaggaggccaagtgcctgagcctggtgatggacgacgagatcgagagcgaggccaagaaggagagcctgagccccggcaagctgaagctgaccttcgaggagctggagagacagagacaggagaacagaaagaagcaggccgaggaggaggccagaaagagactggaggaggagaagagagccttcgaggaggccagaagacagatggtgaacgaggacgaggagaaccaggacaccgccaagatcttcaagggctacagacccggcaagctgaagctgagcttcgaggagatggagagacagagaagagaggacgagaagagaaaggccgaggaggaggccagaagaagaatcgaggaggagaagaaggccttcgccgaggccagaagaaacatggtggtggacgacgacagccccgagatgtacaagaccatcagccaggagttcctgacccccggcaagctggagatcaacttcgaggagctgctgaagcagaagatggaggaggagaagagaagaaccgaggaggagagaaagcacaagctggagatggagaagcaggagttcgagcagctgagacaggagatgggcgaggaggaggaggagaacgagaccttcggcctgagcagagagtacgaggagctgatcaagctgaagagaagcggcagcatccaggccaagaacctgaagtag

SEQ ID NO: 91026 - DNA, 1989 bp, synthetic construct
  misc_feature 1..1989: note = Description of Artificial Sequence: Synthetic coding sequence
  source 1..1989: mol_type = other DNA
atgaacgacatcagccagaaggccgagatcctgctgagcagcagcaagcccgtgcccaagacctacgtgcccaagctgggcaagggcgacgtgaaggacaagttcgaggccatgcagagagccagagaggagagaaaccagagaagaagcagagacgagaagcagagaagaaaggagcagtacatcagagagagagagtggaacagaagaaagcaggagatcaaggagatgctggccagcgacgacgaggaggacgtgagcagcaaggtggagaaggcctacgtgcccaagctgaccggcaccgtgaagggcagattcgccgagatggagaagcagagacaggaggagcagagaaagagaaccgaggaggagagaaagagaagaatcgagcaggacatgctggagaagagaaagatccagagagagctggccaagagagccgagcaggagggcgacgacagcctgctgatcaccgtggtgcccgtgaagagctacaagaccagcggcaagatgaagaagaacttcgaggacctggagaaggagagagaggagaaggagagaatcaagtacgaggaggacaagagaatcagatacgaggagcagagacccagcctgaaggaggccaagtgcctgagcctggtgatggacgacgagatcgagagcgaggccaagaaggagagcctgagccccggcaagctgaagctgaccttcgaggagctggagagacagagacaggagaacagaaagaagcaggccgaggaggaggccagaaagagactggaggaggagaagagagccttcgaggaggccagaagacagatggtgaacgaggacgaggagaaccaggacaccgccaagatcttcaagggctacagacccggcaagctgaagctgagcttcgaggagatggagagacagagaagagaggacgagaagagaaaggccgaggaggaggccagaagaagaatcgaggaggagaagaaggccttcgccgaggccagaagaaacatggtggtggacgacgacagccccgagatgtacaagaccatcagccaggagttcctgacccccggcaagctggagatcaacttcgaggagctgctgaagcagaagatggaggaggagaagagaagaaccgaggaggagagaaagcacaagctggagatggagaagcaggagttcgagcagctgagacaggagatgggcgaggaggaggaggagaacgagaccttcggcctgagcagagagtacgaggagctgatcaagctgaagagaagcggcagcatccaggccaagaacctgaagagcaagttcgagaagatcggccagctgagcgagaaggagatccagaagaagatcgaggaggagagagccagaagaagagccatcgacctggagatcaaggagagagaggccgagaacttccacgaggaggacgacgtggacgtgagacccgccagaaagagcgaggcccccttcacccacaaggtgaacatgaaggccagattcgagcagatggccaaggccagagaggaggaggagcagagaagaatcgaggagcagaagctgctgagaatgcagttcgagcagagagagatcgacgccgccctgcagaagaagagagaggaggaggaggaggaggagggcagcatcatgaacggcagcaccgccgaggacgaggagcagaccagaagcggcgccccctggttcaagaagcccctgaagaacaccagcgtggtggacagcgagcccgtgagattcaccgtgaaggtgaccggcgagcccaagcccgagatcacctggtggttcgagggcgagatcctgcaggacggcgaggactaccagtacatcgagagaggcgagacctactgcctgtacctgcccgagaccttccccgaggacggcggcgagtacatgtgcaaggccgtgaacaacaagggcagcgccgccagcacctgcatcctgaccatcgagaccgacgactactag

SEQ ID NO: 91027 - DNA, 813 bp, synthetic construct
  misc_feature 1..813: note = Description of Artificial Sequence: Synthetic coding sequence
  source 1..813: mol_type = other DNA
atggagaaccagcccgtgagatggagagccctgcccggcctgcccagaccccccggcctgcccgccgccccctggctgctgctgggcgtgctgctgctgcccggcaccctgagactggccggcggccagagcgtgacccacaccggcctgcccatcatggccagcctggccaacaccgccatcagcttcagctgcagaatcacctacccctacaccccccagttcaaggtgttcaccgtgagctacttccacgaggacctgcagggccagagaagccccaagaagcccaccaactgccaccccggcctgggcaccgagaaccagagccacaccctggactgccaggtgaccctggtgctgcccggcgccagcgccaccggcacctactactgcagcgtgcactggccccacagcaccgtgagaggcagcggcaccttcatcctggtgagagacgccggctacagagagcccccccagagcccccagaagctgctgctgttcggcttcaccggcctgctgagcgtgctgagcgtggtgggcaccgccctgctgctgtggaacaagaagagaatgagaggccccggcaaggaccccaccagaaagtgccccgaccccagaagcgccagcagccccaagcagcaccccagcgagagcgtgtacaccgccctgcagagaagagagaccgaggtgtacgcctgcatcgagaacgaggacggcagcagccccaccgccaagcagagccccctgagccaggagagaccccacagattcgaggacgacggcgagctgaacctggtgtacgagaacctgtag

SEQ ID NO: 91028 - DNA, 1248 bp, synthetic construct
  misc_feature 1..1248: note = Description of Artificial Sequence: Synthetic coding sequence
  source 1..1248: mol_type = other DNA
atggcccccgtgagcggcagcagaagccccgacagagaggccagcggcagcggcggcagaagaagaagcagcagcaagagccccaagcccagcaagagcgccagaagccccagaggcagaagaagcagaagccacagctgcagcagaagcggcgacagaaacggcctgacccaccagctgggcggcctgagccagggcagcagaaaccagagctacagaagcagaagcagaagcagaagcagagagagacccagcgcccccagaggcatccccttcgccagcgccagcagcagcgtgtactacggcagctacagcagaccctacggcagcgacaagccctggcccagcctgctggacaaggagagagaggagagcctgagacagaagagactgagcgagagagagagaatcggcgagctgggcgcccccgaggtgtggggcctgagccccaagaaccccgagcccgacagcgacgagcacacccccgtggaggacgaggagcccaagaagagcaccaccagcgccagcaccagcgaggaggagaagaagaagaagagcagcagaagcaaggagagaagcaagaagagaagaaagaagaagagcagcaagagaaagcacaagaagtacagcgaggacagcgacagcgacagcgacagcgagaccgacagcagcgacgaggacaacaagagaagagccaagaaggccaagaagaaggagaagaagaagaagcacagaagcaagaagtacaagaagaagagaagcaagaagagcagaaaggagagcagcgacagcagcagcaaggagagccaggaggagttcctggagaacccctggaaggacagaaccaaggccgaggagcccagcgacctgatcggccccgaggcccccaagaccctgaccagccaggacgacaagcccctgaactacggccacgccctgctgcccggcgagggcgccgccatggccgagtacgtgaaggccggcaagagaatccccagaagaggcgagatcggcctgaccagcgaggagatcgccagcttcgagtgcagcggctacgtgatgagcggcagcagacacagaagaatggaggccgtgagactgagaaaggagaaccagatctacagcgccgacgagaagagagccctggccagcttcaaccaggaggagagaagaaagagagagaacaagatcctggccagcttcagagagatggtgtacagaaagaccaagggcaaggacgacaagtag

SEQ ID NO: 91029 - DNA, 2073 bp, synthetic construct
  misc_feature 1..2073: note = Description of Artificial Sequence: Synthetic coding sequence
  source 1..2073: mol_type = other DNA
atggagaagatcctgcagatggccgagggcatcgacatcggcgagatgcccagctacgacctggtgctgagcaagcccagcaagggccagaagagacacctgagcacctgcgacggccagaacccccccaagaagcaggccggcagcaagttccacgccagacccagattcgagcccgtgcacttcgtggccagcagcagcaaggacgagagacaggaggacccctacggcccccagaccaaggaggtgaacgagcagacccacttcgccagcatgcccagagacatctaccaggactacacccaggacagcttcagcatccaggacggcaacagccagtactgcgacagcagcggcttcatcctgaccaaggaccagcccgtgaccgccaacatgtacttcgacagcggcaaccccgcccccagcaccaccagccagcaggccaacagccagagcacccccgagcccagccccagccagaccttccccgagagcgtggtggccgagaagcagtacttcatcgagaagctgaccgccaccatctggaagaacctgagcaaccccgagatgaccagcggcagcgacaagatcaactacacctacatgctgaccagatgcatccaggcctgcaagaccaaccccgagtacatctacgcccccctgaaggagatcccccccgccgacatccccaagaacaagaagctgctgaccgacggctacgcctgcgaggtgagatgccagaacatctacctgaccaccggctacgccggcagcaagaacggcagcagagacagagccaccgagctggccgtgaagctgctgcagaagagaatcgaggtgagagtggtgagaagaaagttcaagcacaccttcggcgaggacctggtggtgtgccagatcggcatgagcagctacgagttcccccccgccctgaagccccccgaggacctggtggtgctgggcaaggacgccagcggccagcccatcttcaacgccagcgccaagcactggaccaacttcgtgatcaccgagaacgccaacgacgccatcggcatcctgaacaacagcgccagcttcaacaagatgagcatcgagtacaagtacgagatgatgcccaacagaacctggagatgcagagtgttcctgcaggaccactgcctggccgagggctacggcaccaagaagaccagcaagcacgccgccgccgacgaggccctgaagatcctgcagaagacccagcccacctaccccagcgtgaagagcagccagtgccacaccggcagcagccccagaggcagcggcaagaagaaggacatcaaggacctggtggtgtacgagaacagcagcaaccccgtgtgcaccctgaacgacaccgcccagttcaacagaatgaccgtggagtacgtgtacgagagaatgaccggcctgagatggaagtgcaaggtgatcctggagagcgaggtgatcgccgaggccgtgggcgtgaagaagaccgtgaagtacgaggccgccggcgaggccgtgaagaccctgaagaagacccagcccaccgtgatcaacaacctgaagaagggcgccgtggaggacgtgatcagcagaaacgagatccagggcagaagcgccgaggaggcctacaagcagcagatcaaggaggacaacatcggcaaccagctgctgagaaagatgggctggaccggcggcggcctgggcaagagcggcgagggcatcagagagcccatcagcgtgaaggagcagcacaagagagagggcctgggcctggacgtggagagagtgaacaagatcgccaagagagacatcgagcagatcatcagaaactacgccagaagcgagagccacaccgacctgaccttcagcagagagctgaccaacgacgagagaaagcagatccaccagatcgcccagaagtacggcctgaagagcaagagccacggcgtgggccacgacagatacctggtggtgggcagaaagagaagaaaggaggacctgctggaccagctgaagcaggagggccaggtgggccactacgagctggtgatgccccaggccaactag

SEQ ID NO: 91030 - DNA, 2073 bp, synthetic construct; identical to SEQ ID NO: 91029
  misc_feature 1..2073: note = Description of Artificial Sequence: Synthetic coding sequence
  source 1..2073: mol_type = other DNA

SEQ ID NO: 91031 - DNA, 2118 bp, synthetic construct
  misc_feature 1..2118: note = Description of Artificial Sequence: Synthetic coding sequence
  source 1..2118: mol_type = other DNA
atgggcttcatgctgcccctgatcttcagatacagccccagactgatggagaagatcctgcagatggccgagggcatcgacatcggcgagatgcccagctacgacctggtgctgagcaagcccagcaagggccagaagagacacctgagcacctgcgacggccagaacccccccaagaagcaggccggcagcaagttccacgccagacccagattcgagcccgtgcacttcgtggccagcagcagcaaggacgagagacaggaggacccctacggcccccagaccaaggaggtgaacgagcagacccacttcgccagcatgcccagagacatctaccaggactacacccaggacagcttcagcatccaggacggcaacagccagtactgcgacagcagcggcttcatcctgaccaaggaccagcccgtgaccgccaacatgtacttcgacagcggcaaccccgcccccagcaccaccagccagcaggccaacagccagagcacccccgagcccagccccagccagaccttccccgagagcgtggtggccgagaagcagtacttcatcgagaagctgaccgccaccatctggaagaacctgagcaaccccgagatgaccagcggcagcgacaagatcaactacacctacatgctgaccagatgcatccaggcctgcaagaccaaccccgagtacatctacgcccccctgaaggagatcccccccgccgacatccccaagaacaagaagctgctgaccgacggctacgcctgcgaggtgagatgccagaacatctacctgaccaccggctacgccggcagcaagaacggcagcagagacagagccaccgagctggccgtgaagctgctgcagaagagaatcgaggtgagagtggtgagaagaaagttcaagcacaccttcggcgaggacctggtggtgtgccagatcggcatgagcagctacgagttcccccccgccctgaagccccccgaggacctggtggtgctgggcaaggacgccagcggccagcccatcttcaacgccagcgccaagcactggaccaacttcgtgatcaccgagaacgccaacgacgccatcggcatcctgaacaacagcgccagcttcaacaagatgagcatcgagtacaagtacgagatgatgcccaacagaacctggagatgcagagtgttcctgcaggaccactgcctggccgagggctacggcaccaagaagaccagcaagcacgccgccgccgacgaggccctgaagatcctgcagaagacccagcccacctaccccagcgtgaagagcagccagtgccacaccggcagcagccccagaggcagcggcaagaagaaggacatcaaggacctggtggtgtacgagaacagcagcaaccccgtgtgcaccctgaacgacaccgcccagttcaacagaatgaccgtggagtacgtgtacgagagaatgaccggcctgagatggaagtgcaaggtgatcctggagagcgaggtgatcgccgaggccgtgggcgtgaagaagaccgtgaagtacgaggccgccggcgaggccgtgaagaccctgaagaagacccagcccaccgtgatcaacaacctgaagaagggcgccgtggaggacgtgatcagcagaaacgagatccagggcagaagcgccgaggaggcctacaagcagcagatcaaggaggacaacatcggcaaccagctgctgagaaagatgggctggaccggcggcggcctgggcaagagcggcgagggcatcagagagcccatcagcgtgaaggagcagcacaagagagagggcctgggcctggacgtggagagagtgaacaagatcgccaagagagacatcgagcagatcatcagaaactacgccagaagcgagagccacaccgacctgaccttcagcagagagctgaccaacgacgagagaaagcagatccaccagatcgcccagaagtacggcctgaagagcaagagccacggcgtgggccacgacagatacctggtggtgggcagaaagagaagaaaggaggacctgctggaccagctgaagcaggagggccaggtgggccactacgagctggtgatgccccaggccaactag

SEQ ID NO: 91032 - DNA, 570 bp, synthetic construct
  misc_feature 1..570: note = Description of Artificial Sequence: Synthetic coding sequence
  source 1..570: mol_type = other DNA
atgctgctgagagccgcctggagaagagccgccgtggccgtgaccgccgcccccggccccaagcccgccgcccccaccagaggcctgagactgagagtgggcgacagagccccccagagcgccgtgcccgccgacaccgccgccgcccccgaggtgggccccgtgctgagacccctgtacatggacgtgcaggccaccacccccctggaccccagagtgctggacgccatgctgccctacctgatcaactactacggcaacccccacagcagaacccacgcctacggctgggagagcgaggccgccatggagagagccagacagcaggtggccagcctgatcggcgccgaccccagagagatcatcttcaccagcggcgccaccgagagcaacaacatcgccatcaagaccgagagccacagcgtgatccaggccggcgtgcagtggcacgacctggacagcctgcaggcccccccccccggcttcacccccttcagctgcctgagcctgctgagcagctgggactacagaagaccccccccccaccccgccaacttcctgtacttctag

SEQ ID NO: 91033 - DNA, 1374 bp, synthetic construct
  misc_feature 1..1374: note = Description of Artificial Sequence: Synthetic coding sequence
  source 1..1374: mol_type = other DNA
atgctgctgagagccgcctggagaagagccgccgtggccgtgaccgccgcccccggccccaagcccgccgcccccaccagaggcctgagactgagagtgggcgacagagccccccagagcgccgtgcccgccgacaccgccgccgcccccgaggtgggccccgtgctgagacccctgtacatggacgtgcaggccaccacccccctggaccccagagtgctggacgccatgctgccctacctgatcaactactacggcaacccccacagcagaacccacgcctacggctgggagagcgaggccgccatggagagagccagacagcaggtggccagcctgatcggcgccgaccccagagagatcatcttcaccagcggcgccaccgagagcaacaacatcgccatcaagggcgtggccagattctacagaagcagaaagaagcacctgatcaccacccagaccgagcacaagtgcgtgctggacagctgcagaagcctggaggccgagggcttccaggtgacctacctgcccgtgcagaagagcggcatcatcgacctgaaggagctggaggccgccatccagcccgacaccagcctggtgagcgtgatgaccgtgaacaacgagatcggcgtgaagcagcccatcgccgagatcggcagaatctgcagcagcagaaaggtgtacttccacaccgacgccgcccaggccgtgggcaagatccccctggacgtgaacgacatgaagatcgacctgatgagcatcagcggccacaagatctacggccccaagggcgtgggcgccatctacatcagaagaagacccagagtgagagtggaggccctgcagagcggcggcggccaggagagaggcatgagaagcggcaccgtgcccacccccctggtggtgggcctgggcgccgcctgcgaggtggcccagcaggagatggagtacgaccacaagagaatcagcaagctgagcgagagactgatccagaacatcatgaagagcctgcccgacgtggtgatgaacggcgaccccaagcaccactaccccggctgcatcaacctgagcttcgcctacgtggagggcgagagcctgctgatggccctgaaggacgtggccctgagcagcggcagcgcctgcaccagcgccagcctggagcccagctacgtgctgagagccatcggcaccgacgaggacctggcccacagcagcatcagattcggcatcggcagattcaccaccgaggaggaggtggactacaccgtggagaagtgcatccagcacgtgaagagactgagagagatgagccccctgtgggagatggtgcaggacggcatcgacctgaagagcatcaagtggacccagcactag

SEQ ID NO: 91034 - DNA, 486 bp, synthetic construct
  misc_feature 1..486: note = Description of Artificial Sequence: Synthetic coding sequence
  source 1..486: mol_type = other DNA
atgctgctgagagccgcctggagaagagccgccgtggccgtgaccgccgcccccggccccaagcccgccgcccccaccagaggcctgagactgagagtgggcgacagagccccccagagcgccgtgcccgccgacaccgccgccgcccccgaggtgggccccgtgctgagacccctgtacatggacgtgcaggccaccacccccctggaccccagagtgctggacgccatgctgccctacctgatcaactactacggcaacccccacagcagaacccacgcctacggctgggagagcgaggccgccatggagagagccagacagcaggtggccagcctgatcggcgccgaccccagagagatcatcttcaccagcggcgccaccgagagcaacaacatcgccatcaagggcgtggccagattctacagaagcagaaagaagcacctgatcaccaccctgagcggcggcgccggcggctgcgtgtag

SEQ ID NO: 91035 - DNA, 768 bp, synthetic construct
  misc_feature 1..768: note = Description of Artificial Sequence: Synthetic coding sequence
  source 1..768: mol_type = other DNA
atgaccgtgaacaacgagatcggcgtgaagcagcccatcgccgagatcggcagaatctgcagcagcagaaaggtgtacttccacaccgacgccgcccaggccgtgggcaagatccccctggacgtgaacgacatgaagatcgacctgatgagcatcagcggccacaagatctacggccccaagggcgtgggcgccatctacatcagaagaagacccagagtgagagtggaggccctgcagagcggcggcggccaggagagaggcatgagaagcggcaccgtgcccacccccctggtggtgggcctgggcgccgcctgcgaggtggcccagcaggagatggagtacgaccacaagagaatcagcaagctgagcgagagactgatccagaacatcatgaagagcctgcccgacgtggtgatgaacggcgaccccaagcaccactaccccggctgcatcaacctgagcttcgcctacgtggagggcgagagcctgctgatggccctgaaggacgtggccctgagcagcggcagcgcctgcaccagcgccagcctggagcccagctacgtgctgagagccatcggcaccgacgaggacctggcccacagcagcatcagattcggcatcggcagattcaccaccgaggaggaggtggactacaccgtggagaagtgcatccagcacgtgaagagactgagagagatgagccccctgtgggagatggtgcaggacggcatcgacctgaagagcatcaagtggacccagcactag

SEQ ID NO: 91036 - DNA, 1221 bp, synthetic construct
  misc_feature 1..1221: note = Description of Artificial Sequence: Synthetic coding sequence
  source 1..1221: mol_type = other DNA
atgctgctgagagccgcctggagaagagccgccgtggccgtgaccgccgcccccggccccaagcccgccgcccccaccagaggcctgagactgagagtgggcgacagagccccccagagcgccgtgcccgccgacaccgccgccgcccccgaggtgggccccgtgctgagacccctgtacatggacgtgcaggccaccacccccctggaccccagagtgctggacgccatgctgccctacctgatcaactactacggcaacccccacagcagaacccacgcctacggctgggagagcgaggccgccatggagagagccagacagcaggtggccagcctgatcggcgccgaccccagagagatcatcttcaccagcggcgccaccgagagcaacaacatcgccatcaaggagctggaggccgccatccagcccgacaccagcctggtgagcgtgatgaccgtgaacaacgagatcggcgtgaagcagcccatcgccgagatcggcagaatctgcagcagcagaaaggtgtacttccacaccgacgccgcccaggccgtgggcaagatccccctggacgtgaacgacatgaagatcgacctgatgagcatcagcggccacaagatctacggccccaagggcgtgggcgccatctacatcagaagaagacccagagtgagagtggaggccctgcagagcggcggcggccaggagagaggcatgagaagcggcaccgtgcccacccccctggtggtgggcctgggcgccgcctgcgaggtggcccagcaggagatggagtacgaccacaagagaatcagcaagctgagcgagagactgatccagaacatcatgaagagcctgcccgacgtggtgatgaacggcgaccccaagcaccactaccccggctgcatcaacctgagcttcgcctacgtggagggcgagagcctgctgatggccctgaaggacgtggccctgagcagcggcagcgcctgcaccagcgccagcctggagcccagctacgtgctgagagccatcggcaccgacgaggacctggcccacagcagcatcagattcggcatcggcagattcaccaccgaggaggaggtggactacaccgtggagaagtgcatccagcacgtgaagagactgagagagatgagccccctgtgggagatggtgcaggacggcatcgacctgaagagcatcaagtggacccagcactag

SEQ ID NO: 91037 - DNA, 693 bp, synthetic construct
  misc_feature 1..693: note = Description of Artificial Sequence: Synthetic coding sequence
  source 1..693: mol_type = other DNA
atgctgaagaacccctacaccatcaagaagcagcccctgcaccagttcgtgcagagacccctgttccccctgcccgccgccttctaccaccccgtgagatacatgttcatccagacccaggacacccccaaccccaacagcctgaagttcatccccggcaagcccgtgctggagaccagaaccatggacttccccacccccgccgccgccttcagaagccccctggccagacagctgttcagaatcgagggcgtgaagagcgtgttcttcggccccgacttcatcaccgtgaccaaggagaacgaggagctggactggaacctgctgaagcccgacatctacgccaccatcatggacttcttcgccagcggcctgcccctggtgaccgaggagacccccagcggcgaggccggcagcgaggaggacgacgaggtggtggccatgatcaaggagctgctggacaccagaatcagacccaccgtgcaggaggacggcggcgacgtgatctacaagggcttcgaggacggcatcgtgcagctgaagctgcagggcagctgcaccagctgccccagcagcatcatcaccctgaagaacggcatccagaacatgctgcagttctacatccccgaggtggagggcgtggagcaggtgatggacgacgagagcgacgagaaggaggccaacagcccctag

SEQ ID NO: 91038 - DNA, 342 bp, synthetic construct
  misc_feature 1..342: note = Description of Artificial Sequence: Synthetic coding sequence
  source 1..342: mol_type = other DNA
atggacttcttcgccagcggcctgcccctggtgaccgaggagacccccagcggcgaggccggcagcgaggaggacgacgaggtggtggccatgatcaaggagctgctggacaccagaatcagacccaccgtgcaggaggacggcggcgacgtgatctacaagggcttcgaggacggcatcgtgcagctgaagctgcagggcagctgcaccagctgccccagcagcatcatcaccctgaagaacggcatccagaacatgctgcagttctacatccccgaggtggagggcgtggagcaggtgatggacgacgagagcgacgagaaggaggccaacagcccctag

SEQ ID NO: 91039 - DNA, 765 bp, synthetic construct
  misc_feature 1..765: note = Description of Artificial Sequence: Synthetic coding sequence
  source 1..765: mol_type = other DNA
atggccgccaccgccagaagaggctggggcgccgccgccgtggccgccggcctgagaagaagattctgccacatgctgaagaacccctacaccatcaagaagcagcccctgcaccagttcgtgcagagacccctgttccccctgcccgccgccttctaccaccccgtgagatacatgttcatccagacccaggacacccccaaccccaacagcctgaagttcatccccggcaagcccgtgctggagaccagaaccatggacttccccacccccgccgccgccttcagaagccccctggccagacagctgttcagaatcgagggcgtgaagagcgtgttcttcggccccgacttcatcaccgtgaccaaggagaacgaggagctggactggaacctgctgaagcccgacatctacgccaccatcatggacttcttcgccagcggcctgcccctggtgaccgaggagacccccagcggcgaggccggcagcgaggaggacgacgaggtggtggccatgatcaaggagctgctggacaccagaatcagacccaccgtgcaggaggacggcggcgacgtgatctacaagggcttcgaggacggcatcgtgcagctgaagctgcagggcagctgcaccagctgccccagcagcatcatcaccctgaagaacggcatccagaacatgctgcagttctacatccccgaggtggagggcgtggagcaggtgatggacgacgagagcgacgagaaggaggccaacagcccctag

SEQ ID NO: 91040 - DNA, 300 bp, synthetic construct
  misc_feature 1..300: note = Description of Artificial Sequence: Synthetic coding sequence
  source 1..300: mol_type = other DNA
atggacttcttcgccagcggcctgcccctggtgaccgaggagacccccagcggcgaggccggcagcgaggaggacgacgaggtggtggccatgatcaaggagctgctggacaccagaatcagacccaccgtgcaggaggacggcggcgacgtgatctacaagggcttcgaggacggcatcgtgcagctgaagctgcagggcagctgcaccagctgccccagcagcatcatcaccctgaagaacggcatccagaacatgctgcagttctacatccccgaggtggagggcgtggagcagtag

SEQ ID NO: 91041 - DNA, 342 bp, synthetic construct; identical to SEQ ID NO: 91038
  misc_feature 1..342: note = Description of Artificial Sequence: Synthetic coding sequence
  source 1..342: mol_type = other DNA

SEQ ID NO: 91042 - DNA, 291 bp, synthetic construct
  misc_feature 1..291: note = Description of Artificial Sequence: Synthetic coding sequence
  source 1..291: mol_type = other DNA
atggacttcttcgccagcggcctgcccctggtgaccgaggagacccccagcggcgaggccggcagcgaggaggacgacgaggtggtggccatgatcaaggagctgctggacaccagaatcagacccaccgtgcaggaggacggcggcgacgtgatctacaagggcttcgaggacggcatcgtgcagctgaagctgcagggcagctgcaccagctgccccagcagcatcatcaccctgaagaacggcatccagaacatgctgcagttctacatccccgaggtggagggctag

SEQ ID NO: 91043 - DNA, 1464 bp, synthetic construct
  misc_feature 1..1464: note = Description of Artificial Sequence: Synthetic coding sequence
  source 1..1464: mol_type = other DNA
atggccgccgccctgcccagaaccctgggcgagctgcagctgtacagaatcctgcagaaggccaacctgctgagctacttcgacgccttcatccagcagggcggcgacgacgtgcagcagctgtgcgaggccggcgaggaggagttcctggagatcatggccctggtgggcatggccagcaagcccctgcacgtgagaagactgcagaaggccctgagagactgggtgaccaaccccggcctgttcaaccagcccctgaccagcctgcccgtgagcagcatccccatctacaagctgcccgagggcagccccacctggctgggcatcagctgcagcagctacgagagaagcagcaacgccagagagccccacctgaagatccccaagtgcgccgccaccacctgcgtgcagagcctgggccagggcaagagcgacgtggtgggcagcctggccctgcagagcgtgggcgagagcagactgtggcagggccaccacgccaccgagagcgagcacagcctgagccccgccgacctgggcagccccgccagccccaaggagagcagcgaggccctggacgccgccgccgccctgagcgtggccgagtgcgtggagagaatggcccccaccctgcccaagagcgacctgaacgaggtgaaggagctgctgaagaccaacaagaagctggccaagatgatcggccacatcttcgagatgaacgacgacgacccccacaaggaggaggagatcagaaagtacagcgccatctacggcagattcgacagcaagagaaaggacggcaagcacctgaccctgcacgagctgaccgtgaacgaggccgccgcccagctgtgcgtgaaggacaacgccctgctgaccagaagagacgagctgttcgccctggccagacagatcagcagagaggtgacctacaagtacacctacagaaccaccaagagcaagtgcggcgagagagacgagctgagccccaagagaatcaaggtggaggacggcttccccgacttccaggacagcgtgcagaccctgttccagcaggccagagccaagagcgaggagctggccgccctgagcagccagcagcccgagaaggtgatggccaagcagatggagttcctgtgcaaccaggccggctacgagagactgcagcacgccgagagaagactgagcgccggcctgtacagacagagcagcgaggagcacagccccaacggcctgaccagcgacaacagcgacggccagggcgagagacccctgaacctgagaatgcccaacctgcagaacagacagccccaccacttcgtggtggacggcgagctgagcagactgtaccccagcgaggccaagagccacagcagcgagagcctgggcatcctgaaggactacccccacagcgccttcaccctggagaagaaggtgatcaagaccgagcccgaggacagcagatag

SEQ ID NO: 91044 - DNA, 1377 bp, synthetic construct
  misc_feature 1..1377: note = Description of Artificial Sequence: Synthetic coding sequence
  source 1..1377: mol_type = other DNA
atggccgccgccctgcccagaaccctgggcgagctgcagctgtacagaatcctgcagaaggccaacctgctgagctacttcgacgccttcatccagcagggcggcgacgacgtgcagcagctgtgcgaggccggcgaggaggagttcctggagatcatggccctggtgggcatggccagcaagcccctgcacgtgagaagactgcagaaggccctgagagactgggtgaccaaccccggcctgttcaaccagcccctgaccagcctgcccgtgagcagcatccccatctacaagctgcccgagggcagccccacctggctgggcatcagctgcagcagctacgagagaagcagcaacgccagagagccccacctgaagatccccaagtgcgccgccaccacctgcgtgcagagcctgggccagggcaagagcgacgtggtgggcagcctggccctgcagagcgtgggcgagagcagactgtggcagggccaccacgccaccgagagcgagcacagcctgagccccgccgacctgggcagccccgccagccccaaggagagcagcgaggccctggacgccgccgccgccctgagcgtggccgagtgcgtggagagaatggcccccaccctgcccaagagcgacctgaacgaggtgaaggagctgctgaagaccaacaagaagctggccaagatgatcggccacatcttcgagatgaacgacgacgacccccacaaggaggaggagatcagaaagtacagcgccatctacggcagattcgacagcaagagaaaggacggcaagcacctgaccctgcacgagctgaccgtgaacgaggccgccgcccagctgtgcgtgaaggacaacgccctgctgaccagaagagacgagctgttcgccctggccagacagatcagcagagaggtgacctacaagtacacctacagaaccaccaagagcaagtgcggcgagagagacgagctgagccccaagagaatcaaggtggaggaccagcccgagaaggtgatggccaagcagatggagttcctgtgcaaccaggccggctacgagagactgcagcacgccgagagaagactgagcgccggcctgtacagacagagcagcgaggagcacagccccaacggcctgaccagcgacaacagcgacggccagggcgagagacccctgaacctgagaatgcccaacctgcagaacagacagccccaccacttcgtggtggacggcgagctgagcagactgtaccccagcgaggccaagagccacagcagcgagagcctgggcatcctgaaggactacccccacagcgccttcaccctggagaagaaggtgatcaagaccgagcccgaggacagcagatag

SEQ ID NO: 91045 - DNA, 1464 bp, synthetic construct; identical to SEQ ID NO: 91043
  misc_feature 1..1464: note = Description of Artificial Sequence: Synthetic coding sequence
  source 1..1464: mol_type = other DNA

SEQ ID NO: 91046 - DNA, 1461 bp, synthetic construct
  misc_feature 1..1461: note = Description of Artificial Sequence: Synthetic coding sequence
  source 1..1461: mol_type = other DNA
atggccgccgccctgcccagaaccctgggcgagctgcagctgtacagaatcctgcagaaggccaacctgctgagctacttcgacgccttcatccagcagggcggcgacgacgtgcagcagctgtgcgaggccggcgaggaggagttcctggagatcatggccctggtgggcatggccagcaagcccctgcacgtgagaagactgcagaaggccctgagagactgggtgaccaaccccggcctgttcaaccagcccctgaccagcctgcccgtgagcagcatccccatctacaagctgcccgagggcagccccacctggctgggcatcagctgcagcagctacgagagaagcagcaacgccagagagccccacctgaagatccccaagtgcgccgccaccacctgcgtgcagagcctgggccagggcaagagcgacgtggtgggcagcctggccctgcagagcgtgggcgagagcagactgtggcagggccaccacgccaccgagagcgagcacagcctgagccccgccgacctgggcagccccgccagccccaaggagagcagcgaggccctggacgccgccgccgccctgagcgtggccgagtgcgtggagagaatggcccccaccctgcccaagagcgacctgaacgaggtgaaggagctgctgaagaccaacaagaagctggccaagatgatcggccacatcttcgagatgaacgacgacgacccccacaaggaggaggagatcagaaagtacagcgccatctacggcagattcgacagcaagagaaaggacggcaagcacctgaccctgcacgagctgaccgtgaacgaggccgccgcccagctgtgcgtgaaggacaacgccctgctgaccagaagagacgagctgttcgccctggccagacagatcagcagagaggtgacctacaagtacacctacagaaccaccaagagcaagtgcggcgagagagacgagctgagccccaagagaatcaaggtggaggacggcttccccgacttccaggacagcgtgcagaccctgttccagcaggccagagccaagagcgaggagctggccgccctgagcagccagcccgagaaggtgatggccaagcagatggagttcctgtgcaaccaggccggctacgagagactgcagcacgccgagagaagactgagcgccggcctgtacagacagagcagcgaggagcacagccccaacggcctgaccagcgacaacagcgacggccagggcgagagacccctgaacctgagaatgcccaacctgcagaacagacagccccaccacttcgtggtggacggcgagctgagcagactgtaccccagcgaggccaagagccacagcagcgagagcctgggcatcctgaaggactacccccacagcgccttcaccctggagaagaaggtgatcaagaccgagcccgaggacagcagatag

SEQ ID NO: 91047 - DNA, 474 bp, synthetic construct
  misc_feature 1..474: note = Description of Artificial Sequence: Synthetic coding sequence
  source 1..474: mol_type = other DNA
atggccgccgccctgcccagaaccctgggcgagctgcagctgtacagaatcctgcagaaggccaacctgctgagctacttcgacgccttcatccagcagggcggcgacgacgtgcagcagctgtgcgaggccggcgaggaggagttcctggagatcatggccctggtgggcatggccagcaagcccctgcacgtgagaagactgcagaaggccctgagagactgggtgaccaaccccggcctgttcaaccagcccctgaccagcctgcccgtgagcagcatccccatctacaagctgcccgagggcagccccacctggctgggcatcagctgcagcagctacgagagaagcagcaacgccagagagccccacctgaagatccccaagtgcgccgccaccacctgcgtgcagagcctgggccagggcaagagcgacgtggtgggcagcctggccctgcagagcgtgggcgagtag

SEQ ID NO: 91048 - DNA, 189 bp, synthetic construct
  misc_feature 1..189: note = Description of Artificial Sequence: Synthetic coding sequence
  source 1..189: mol_type = other DNA
atggccgccgccctgcccagaaccctgggcgagctgcagctgtacagaatcctgcagaaggccaacctgctgagctacttcgacgccttcatccagcagggcggcgacgacgtgcagcagctgtgcgaggccggcgaggaggagttcctggagatcatggccctggtgggcatggccagcaagccctag

SEQ ID NO: 91049 - DNA, 303 bp, synthetic construct
  misc_feature 1..303: note = Description of Artificial Sequence: Synthetic coding sequence
  source 1..303: mol_type = other DNA
atggccgccgccctgcccagaaccctgggcgagctgcagctgtacagaatcctgcagaaggccaacctgctgagctacttcgacgccttcatccagcagggcggcgacgacgtgcagcagctgtgcgaggccggcgaggaggagttcctggagatcatggccctggtgggcatggccagcaagcccctgcacgtgagaagactgcagaaggccctgagagactgggtgaccaaccccggcctgttcaaccagcccctgaccagcctgcccgtgagcagcatccccatctacaagctgccctag

SEQ ID NO: 91050 - DNA, 723 bp, synthetic construct
  misc_feature 1..723: note = Description of Artificial Sequence: Synthetic coding sequence
  source 1..723: mol_type = other DNA
tgaaaggagctgctgaagaccaacaagaagctggccaagatgatcggccacatcttcgagatgaacgacgacgacccccacaaggaggaggagatcagaaagtacagcgccatctacggcagattcgacagcaagagaaaggacggcaagcacctgaccctgcacgagctgaccgtgaacgaggccgccgcccagctgtgcgtgaaggacaacgccctgctgaccagaagagacgagctgttcgccctggccagacagatcagcagagaggtgacctacaagtacacctacagaaccaccaagagcaagtgcggcgagagagacgagctgagccccaagagaatcaaggtggagcagcccgagaaggtgatggccaagcagatggagttcctgtgcaaccaggccggctacgagagactgcagcacgccgagagaagactgagcgccggcctgtacagacagagcagcgaggagcacagccccaacggcctgaccagcgacaacagcgacggccagggcgagagacccctgaacctgagaatgcccaacctgcagaacagacagccccaccacttcgtggtggacggcgagctgagcagactgtaccccagcgaggccaagagccacagcagcgagagcctgggcatcctgaaggactacccccacagcgccttcaccctggagaagaaggtgatcaagaccgagcccgaggacagcagatag

SEQ ID NO: 91051 - DNA, 459 bp, synthetic construct
  misc_feature 1..459: note = Description of Artificial Sequence: Synthetic coding sequence
  source 1..459: mol_type = other DNA
atggccgccgccctgcccagaaccctgggcgagctgcagctgtacagaatcctgcagaaggccaacctgctgagctacttcgacgccttcatccagcagggcggcgacgacgtgcagcagctgtgcgaggccggcgaggaggagttcctggagatcatggccctggtgggcatggccagcaagcccctgcacgtgagaagactgcagaaggccctgagagactgggtgaccaaccccggcctgttcaaccagcccctgaccagcctgcccgtgagcagcatccccatctacaagctgcccgagggcagccccacctggctgggcatcagctgcagcagctacgagagaagcagcaacgccagagagccccacctgaagatccccaagtgcgccgccaccacctgcgtgcagagcctgggccagggcaagagcgacgtggtgggcagcctggccctgtag

SEQ ID NO: 91052 - DNA, 684 bp, synthetic construct
  misc_feature 1..684: note = Description of Artificial Sequence: Synthetic coding sequence
  source 1..684: mol_type = other DNA
atgatcggccacatcttcgagatgaacgacgacgacccccacaaggaggaggagatcagaaagtacagcgccatctacggcagattcgacagcaagagaaaggacggcaagcacctgaccctgcacgagctgaccgtgaacgaggccgccgcccagctgtgcgtgaaggacaacgccctgctgaccagaagagacgagctgttcgccctggccagacagatcagcagagaggtgacctacaagtacacctacagaaccaccaagagcaagtgcggcgagagagacgagctgagccccaagagaatcaaggtggagcagcccgagaaggtgatggccaagcagatggagttcctgtgcaaccaggccggctacgagagactgcagcacgccgagagaagactgagcgccggcctgtacagacagagcagcgaggagcacagccccaacggcctgaccagcgacaacagcgacggccagggcgagagacccctgaacctgagaatgcccaacctgcagaacagacagccccaccacttcgtggtggacggcgagctgagcagactgtaccccagcgaggccaagagccacagcagcgagagcctgggcatcctgaaggactacccccacagcgccttcaccctggagaagaaggtgatcaagaccgagcccgaggacagcagatag

SEQ ID NO: 91053 - DNA, 1578 bp, synthetic construct
  misc_feature 1..1578: note = Description of Artificial Sequence: Synthetic coding sequence
  source 1..1578: mol_type = other DNA
atgcacagagcccccagccccaccgccgagcagccccccggcggcggcgacagcgccagaagaaccctgcagcccagactgaagcccagcgccagagccatggccctgcccagaaccctgggcgagctgcagctgtacagagtgctgcagagagccaacctgctgagctactacgagaccttcatccagcagggcggcgacgacgtgcagcagctgtgcgaggccggcgaggaggagttcctggagatcatggccctggtgggcatggccaccaagcccctgcacgtgagaagactgcagaaggccctgagagagtgggccaccaaccccggcctgttcagccagcccgtgcccgccgtgcccgtgagcagcatccccctgttcaagatcagcgagaccgccggcaccagaaagggcagcatgagcaacggccacggcagccccggcgagaaggccggcagcgccagaagcttcagccccaagagccccctggagctgggcgagaagctgagccccctgcccggcggccccggcgccggcgaccccagaatctggcccggcagaagcacccccgagagcgacgtgggcgccggcggcgaggaggaggccggcagcccccccttcagcccccccgccggcggcggcgtgcccgagggcaccggcgccggcggcctggccgccggcggcaccggcggcggccccgacagactggagcccgagatggtgagaatggtggtggagagcgtggagagaatcttcagaagcttccccagaggcgacgccggcgaggtgaccagcctgctgaagctgaacaagaagctggccagaagcgtgggccacatcttcgagatggacgacaacgacagccagaaggaggaggagatcagaaagtacagcatcatctacggcagattcgacagcaagagaagagagggcaagcagctgagcctgcacgagctgaccatcaacgaggccgccgcccagttctgcatgagagacaacaccctgctgctgagaagagtggagctgttcagcctgagcagacaggtggccagagagagcacctacctgagcagcctgaagggcagcagactgcaccccgaggagctgggcggcccccccctgaagaagctgaagcaggaggtgggcgagcagagccaccccgagatccagcagcccccccccggccccgagagctacgtgcccccctacagacccagcctggaggaggacagcgccagcctgagcggcgagagcctggacggccacctgcaggccgtgggcagctgccccagactgacccccccccccgccgacctgcccctggccctgcccgcccacggcctgtggagcagacacatcctgcagcagaccctgatggacgagggcctgagactggccagactggtgagccacgacagagtgggcagactgagcccctgcgtgcccgccaagccccccctggccgagttcgaggagggcctgctggacagatgccccgcccccggcccccaccccgccctggtggagggcagaagaagcagcgtgaaggtggaggccgaggccagcagacagtag

SEQ ID NO: 91054 - DNA, 1386 bp, synthetic construct
  misc_feature 1..1386: note = Description of Artificial Sequence: Synthetic coding sequence
  source 1..1386: mol_type = other DNA
atgcacagagcccccagccccaccgccgagcagccccccggcggcggcgacagcgccagaagaaccctgcagcccagactgaagcccagcgccagagccatggccctgcccagaaccctgggcgagctgcagctgtacagagtgctgcagagagccaacctgctgagctactacgagaccttcatccagcagggcggcgacgacgtgcagcagctgtgcgaggccggcgaggaggagttcctggagatcatggccctggtgggcatggccaccaagcccctgcacgtgagaagactgcagaaggccctgagagagtgggccaccaaccccggcctgttcagccagcccgtgcccgccgtgcccgtgagcagcatccccctgttcaagatcagcgagaccgccggcaccagaaagggcagcatgagcaacggccacggcagccccggcgagaaggccggcagcgccagaagcttcagccccaagagccccctggagctgggcgagaagctgagccccctgcccggcggccccggcgccggcgaccccagaatctggcccggcagaagcacccccgagagcgacgtgggcgccggcggcgaggaggaggccggcagcccccccttcagcccccccgccggcggcggcgtgcccgagggcaccggcgccggcggcctggccgccggcggcaccggcggcggccccgacagactggagcccgagatggtgagaatggtggtggagagcgtggagagaatcttcagaagcttccccagaggcgacgccggcgaggtgaccagcctgctgaagctgaacaagaagctggccagaagcgtgggccacatcttcgagatggacgacaacgacagccagaaggaggaggagatcagaaagtacagcatcatctacggcagattcgacagcaagagaagagagggcaagcagctgagcctgcacgagctgaccatcaacgaggccgccgcccagttctgcatgagagacaacaccctgctgctgagaagagtggagctgttcagcctgagcagacaggtggccagagagagcacctacctgagcagcctgaagggcagcagactgcaccccgaggagctgggcggcccccccctgaagaagctgaagcaggaggtgggcgagcagagccaccccgagatccagcagcccccccccggccccgagagctacgtgcccccctacagacccagcctggaggaggacagcgccagcctgagcggcgagagcctggacggccacctgcaggagttcgaggagggcctgctggacagatgccccgcccccggcccccaccccgccctggtggagggcagaagaagcagcgtgaaggtggaggccgaggccagcagacagtag

SEQ ID NO: 91055 - DNA, 969 bp, synthetic construct
  misc_feature 1..969: note = Description of Artificial Sequence: Synthetic coding sequence
  source 1..969: mol_type = other DNA
atgcacagagcccccagccccaccgccgagcagccccccggcggcggcgacagcgccagaagaaccctgcagcccagactgaagcccagcgccagagccatggccctgcccagaaccctgggcgagctgcagctgtacagagtgctgcagagagccaacctgctgagctactacgagaccttcatccagcagggcggcgacgacgtgcagcagctgtgcgaggccggcgaggaggagttcctggagatcatggccctggtgggcatggccaccaagcccctgcacgtgagaagactgcagaaggccctgagagagtgggccaccaaccccggcctgttcagccagcccgtgcccgccgtgcccgtgagcagcatccccctgttcaagatcagcgagaccgccggcaccagaaagggcagcatgagcaacggccacggcagccccggcgagaaggccggcagcgccagaagcttcagccccaagagccccctggagctgggcgagaagctgagccccctgcccggcggccccggcgccggcgaccccagaatctggcccggcagaagcacccccgagagcgacgtgggcgccggcggcgaggaggaggccggcagcccccccttcagcccccccgccggcggcggcgtgcccgagggcaccggcgccggcggcctggccgccggcggcaccggcggcggccccgacagactggagcccgagatggtgagaatggtggtggagagcgtggagagaatcttcagaagcttccccagaggcgacgccggcgaggtgaccagcctgctgaagctgaacaagaagctggccagaagcgtgggccacatcttcgagatggacgacaacgacagccagaaggaggaggagatcagaaagtacagcatcatctacggcagattcgacagcaagagaagagagggcaagcagctgagcctgcacgaggccagcccctag

SEQ ID NO: 91056 - DNA, 723 bp, synthetic construct
  misc_feature 1..723: note = Description of Artificial Sequence: Synthetic coding sequence
  source 1..723: mol_type = other DNA
tgaagcggcagcgccagccccgccgtggccgagctgtgccagaacacccccgagaccttcctggaggccagcaagctgctgctgacctacgccgacaacatcctgagaaaccccaacgacgagaagtacagaagcatcagaatcggcaacaccgccttcagcaccagactgctgcccgtgagaggcgccgtggagtgcctgttcgagatgggcttcgaggagggcgagacccacctgatcttccccaagaaggccagcgtggagcagctgcagaagatcagagacctgatcgccatcgagagaagcagcagactggacggcagcaacaagagccacaaggtgaagagcagccagcagcccgccgccagcacccagctgcccaccacccccagcagcaaccccagcggcctgaaccagcacaccagaaacagacagggccagagcagcgacccccccagcgccagcaccgtggccgccgacagcgccatcctggaggtgctgcagagcaacatccagcacgtgctggtgtacgagaaccccgccctgcaggagaaggccctggcctgcatccccgtgcaggagctgaagagaaagagccaggagaagctgagcagagccagaaagctggacaaggacatcatcaccctgagaaacttctggaagcaggacgtggacggcgtggccagcggccccatcgtgctgcactgcgccgccgagctgtag

SEQ ID NO: 91057 - DNA, 1965 bp, synthetic construct
  misc_feature 1..1965: note = Description of Artificial Sequence: Synthetic coding sequence
  source 1..1965: mol_type = other DNA
atggccgccgccgccctgggcagcagcagcggcagcgccagccccgccgtggccgagctgtgccagaacacccccgagaccttcctggaggccagcaagctgctgctgacctacgccgacaacatcctgagaaaccccaacgacgagaagtacagaagcatcagaatcggcaacaccgccttcagcaccagactgctgcccgtgagaggcgccgtggagtgcctgttcgagatgggcttcgaggagggcgagacccacctgatcttccccaagaaggccagcgtggagcagctgcagaagatcagagacctgatcgccatcgagagaagcagcagactggacggcagcaacaagagccacaaggtgaagagcagccagcagcccgccgccagcacccagctgcccaccacccccagcagcaaccccagcggcctgaaccagcacaccagaaacagacagggccagagcagcgacccccccagcgccagcaccgtggccgccgacagcgccatcctggaggtgctgcagagcaacatccagcacgtgctggtgtacgagaaccccgccctgcaggagaaggccctggcctgcatccccgtgcaggagctgaagagaaagagccaggagaagctgagcagagccagaaagctggacaagggcatcaacatcagcgacgaggacttcctgctgctggagctgctgcactggttcaaggaggagttcttccactgggtgaacaacgtgctgtgcagcaagtgcggcggccagaccagaagcagagacagaagcctgctgcccagcgacgacgagctgaagtggggcgccaaggaggtggaggaccactactgcgacgcctgccagttcagcaacagattccccagatacaacaaccccgagaagctgctggagaccagatgcggcagatgcggcgagtgggccaactgcttcaccctgtgctgcagagccgtgggcttcgaggccagatacgtgtgggactacaccgaccacgtgtggaccgaggtgtacagccccagccagcagagatggctgcactgcgacgcctgcgaggacgtgtgcgacaagcccctgctgtacgagatcggctggggcaagaagctgagctacgtgatcgccttcagcaaggacgaggtggtggacgtgacctggagatacagctgcaagcacgaggaggtgatcgccagaagaaccaaggtgaaggaggccctgctgagagacaccatcaacggcctgaacaagcagagacagctgttcctgagcgagaacagaagaaaggagctgctgcagagaatcatcgtggagctggtggagttcatcagccccaagacccccaagcccggcgagctgggcggcagaatcagcggcagcgtggcctggagagtggccagaggcgagatgggcctgcagagaaaggagaccctgttcatcccctgcgagaacgagaagatcagcaagcagctgcacctgtgctacaacatcgtgaaggacagatacgtgagagtgagcaacaacaaccagaccatcagcggctgggagaacggcgtgtggaagatggagagcatcttcagaaaggtggagaccgactggcacatggtgtacctggccagaaaggagggcagcagcttcgcctacatcagctggaagttcgagtgcggcagcgtgggcctgaaggtggacagcatcagcatcagaaccagcagccagaccttccagaccggcaccgtggagtggaagctgagaagcgacaccgcccaggtggagctgaccggcgacaacagcctgcacagctacgccgacttcagcggcgccaccgaggtgatcctggaggccgagctgagcagaggcgacggcgacgtggcctggcagcacacccagctgttcagacagagcctgaacgaccacgaggagaactgcctggagatcatcatcaagttcagcgacctgtag

SEQ ID NO: 91058 - DNA, 1902 bp, synthetic construct
  misc_feature 1..1902: note = Description of Artificial Sequence: Synthetic coding sequence
  source 1..1902: mol_type = other DNA
gccgccctgggcagcagcagcggcagcgccagccccgccgtggccgagctgtgccagaacacccccgagaccttcctggaggccagcaagctgctgctgacctacgccgacaacatcctgagaaaccccaacgacgagaagtacagaagcatcagaatcggcaacaccgccttcagcaccagactgctgcccgtgagaggcgccgtggagtgcctgttcgagatgggcttcgaggagggcgagacccacctgatcttccccaagaaggccagcgtggagcagctgcagaagatcagagacctgatcgccatcgagagaagcagcagactggacggcagcaacaagagccacaaggtgaagagcagccagcagcccgccgccagcacccagctgcccaccacccccagcagcaaccccagcggcctgaaccagcacaccagaaacagacagggccagagcagcgacccccccagcgccagcaccgtggccgccgacagcgccatcctggaggtgctgcagagcaacatccagcacgtgctggtgtacgagaaccccgccctgcaggagaaggccctggcctgcatccccgtgcaggagctgaagagaaagagccaggagaagctgagcagagccagaaagctggacaagggcatcaacatcagcgacgaggacttcctgctgctggagctgctgcactggttcaaggaggagttcttccactgggtgaacaacgtgctgtgcagcaagtgcggcggccagaccagaagcagagacagaagcctgctgcccagcgacgacgagctgaagtggggcgccaaggaggtggaggaccactactgcgacgcctgccagttcagcaacagattccccagatacaacaaccccgagaagctgctggagaccagatgcggcagatgcggcgagtgggccaactgcttcaccctgtgctgcagagccgtgggcttcgaggccagatacgtgtgggactacaccgagctgcagagaaccctgagcctgaagctgaccaccctgaaggagatcggcaagaccttcctgagaatcagcaagagacagaagctgatccaggtggtggacgtgacctggagatacagctgcaagcacgaggaggtgatcgccagaagaaccaaggtgaaggaggccctgctgagagacaccatcaacggcctgaacaagcagagacagctgttcctgagcgagaacagaagaaaggagctgctgcagagaatcatcgtggagctggtggagttcatcagccccaagacccccaagcccggcgagctgggcggcagaatcagcggcagcgtggcctggagagtggccagaggcgagatgggcctgcagagaaaggagaccctgttcatcccctgcgagaacgagaagatcagcaagcagctgcacctgtgctacaacatcgtgaaggacagatacgtgagagtgagcaacaacaaccagaccatcagcggctgggagaacggcgtgtggaagatggagagcatcttcagaaaggtggagaccgactggcacatggtgtacctggccagaaaggagggcagcagcttcgcctacatcagctggaagttcgagtgcggcagcgtgggcctgaaggtggacagcatcagcatcagaaccagcagccagaccttccagaccggcaccgtggagtggaagctgagaagcgacaccgcccaggtggagctgaccggcgacaacagcctgcacagctacgccgacttcagcggcgccaccgaggtgatcctggaggccgagctgagcagaggcgacggcgacgtggcctggcagcacacccagctgttcagacagagcctgaacgaccacgaggagaactgcctggagatcatcatcaagttcagcgacctgtag

SEQ ID NO: 91059 - DNA, 1677 bp, synthetic construct
  misc_feature 1..1677: note = Description of Artificial Sequence: Synthetic coding sequence
  source 1..1677: mol_type = other DNA
atggccgccgccgccctgggcagcagcagcggcagcgccagccccgccgtggccgagctgtgccagaacacccccgagaccttcctggaggccagcaagctgctgctgacctacgccgacaacatcctgagaaaccccaacgacgagaagtacagaagcatcagaatcggcaacaccgccttcagcaccagactgctgcccgtgagaggcgccgtggagtgcctgttcgagatgggcttcgaggagggcgagacccacctgatcttccccaagaaggccagcgtggagcagctgcagaagatcagagacctgatcgccatcgagagaagcagcagactggacggcagcaacaagagccacaaggtgaagagcagccagcagcccgccgccagcacccagctgcccaccacccccagcagcaaccccagcggcctgaaccagcacaccagaaacagacagggccagagcagcgacccccccagcgccagcaccgtggccgccgacagcgccatcctggaggtgctgcagagcaacatccagcacgtgctggtgtacgagaaccccgccctgcaggagaaggccctggcctgcatccccgtgcaggagctgaagagaaagagccaggagaagctgagcagagccagaaagctggacaagggcatcaacatcagcgacgaggacttcctgctgctggagctgctgcactggttcaaggaggagttcttccactgggtgaacaacgtgctgtgcagcaagtgcggcggccagaccagaagcagagacagaagcctgctgcccagcgacgacgagctgaagtggggcgccaaggaggtggaggaccactactgcgacgcctgccagttcagcaacagattccccagatacaacaaccccgagaagctgctggagaccagatgcggcagatgcggcgagtgggccaactgcttcaccctgtgctgcagagccgtgggcttcgaggccagatacgtgtgggactacaccgaccacgtgtggaccgaggtgtacagccccagccagcagagatggctgcactgcgacgcctgcgaggacgtgtgcgacaagcccctgctgtacgagatcggctggggcaagaagctgagctacgtgatcgccttcagcaaggacgaggtggtggacgtgacctggagatacagctgcaagcacgaggaggtgatcgccagaagaaccaaggtgaaggaggccctgctgagagacaccatcaacggcctgaacaagcagagacagctgttcctgagcgagaacagaagaaaggagctgctgcagagaatcatcgtggagctggtggagttcatcagccccaagacccccaagcccggcgagctgggcggcagaatcagcggcagcgtggcctggagagtggccagaggcgagatgggcctgcagagaaaggagaccctgttcatcccctgcgagaacgagaagatcagcaagcagctgcacctgtgctacaacatcgtgaaggacagatacgtgagagtgagcaacaacaaccagaccatcagcggctgggagaacggcgtgtggaagatggagagcatcttcagaaaggtggagaccgactggcacatgatcaccgtgttcacccccatgctgatcttcctggtgcccctgaagctgttctggaagcagaactag

SEQ ID NO: 91060 - DNA, 1839 bp, synthetic construct
  misc_feature 1..1839: note = Description of Artificial Sequence: Synthetic coding sequence
  source 1..1839: mol_type = other DNA
atgagaaaccccaacgacgagaagtacagaagcatcagaatcggcaacaccgccttcagcaccagactgctgcccgtgagaggcgccgtggagtgcctgttcgagatgggcttcgaggagggcgagacccacctgatcttccccaagaaggccagcgtggagcagctgcagaagatcagagacctgatcgccatcgagagaagcagcagactggacggcagcaacaagagccacaaggtgaagagcagccagcagcccgccgccagcacccagctgcccaccacccccagcagcaaccccagcggcctgaaccagcacaccagaaacagacagggccagagcagcgacccccccagcgccagcaccgtggccgccgacagcgccatcctggaggtgctgcagagcaacatccagcacgtgctggtgtacgagaaccccgccctgcaggagaaggccctggcctgcatccccgtgcaggagctgaagagaaagagccaggagaagctgagcagagccagaaagctggacaagggcatcaacatcagcgacgaggacttcctgctgctggagctgctgcactggttcaaggaggagttcttccactgggtgaacaacgtgctgtgcagcaagtgcggcggccagaccagaagcagagacagaagcctgctgcccagcgacgacgagctgaagtggggcgccaaggaggtggaggaccactactgcgacgcctgccagttcagcaacagattccccagatacaacaaccccgagaagctgctggagaccagatgcggcagatgcggcgagtgggccaactgcttcaccctgtgctgcagagccgtgggcttcgaggccagatacgtgtgggactacaccgaccacgtgtggaccgaggtgtacagccccagccagcagagatggctgcactgcgacgcctgcgaggacgtgtgcgacaagcccctgctgtacgagatcggctggggcaagaagctgagctacgtgatcgccttcagcaaggacgaggtggtggacgtgacctggagatacagctgcaagcacgaggaggtgatcgccagaagaaccaaggtgaaggaggccctgctgagagacaccatcaacggcctgaacaagcagagacagctgttcctgagcgagaacagaagaaaggagctgctgcagagaatcatcgtggagctggtggagttcatcagccccaagacccccaagcccggcgagctgggcggcagaatcagcggcagcgtggcctggagagtggccagaggcgagatgggcctgcagagaaaggagaccctgttcatcccctgcgagaacgagaagatcagcaagcagctgcacctgtgctacaacatcgtgaaggacagatacgtgagagtgagcaacaacaaccagaccatcagcggctgggagaacggcgtgtggaagatggagagcatcttcagaaaggtggagaccgactggcacatggtgtacctggccagaaaggagggcagcagcttcgcctacatcagctggaagttcgagtgcggcagcgtgggcctgaaggtggacagcatcagcatcagaaccagcagccagaccttccagaccggcaccgtggagtggaagctgagaagcgacaccgcccaggtggagctgaccggcgacaacagcctgcacagctacgccgacttcagcggcgccaccgaggtgatcctggaggccgagctgagcagaggcgacggcgacgtggcctggcagcacacccagctgttcagacagagcctgaacgaccacgaggagaactgcctggagatcatcatcaagttcagcgacctgtag

SEQ ID NO: 91061 - DNA, 516 bp, synthetic construct
  misc_feature 1..516: note = Description of Artificial Sequence: Synthetic coding sequence
  source 1..516: mol_type = other DNA
atgggcttcgaggagggcgagacccacctgatcttccccaagaaggccagcgtggagcagctgcagaagatcagagacctgatcgccatcgagagaagcagcagactggacggcagcaacaagagccacaaggtgaagagcagccagcagcccgccgccagcacccagctgcccaccacccccagcagcaaccccagcggcctgaaccagcacaccagaaacagacagggccagagcagcgacccccccagcgccagcaccgtggccgccgacagcgccatcctggaggtgctgcagagcaacatccagcacgtgctggtgtacgagaaccccgccctgcaggagaaggccctggcctgcatccccgtgcaggagctgaagagaaagagccaggagaagctgagcagagccagaaagctggacaaggacatcatcaccctgagaaacttctggaagcaggacgtggacggcgtggccagcggccccatcgtgctgcactgcgccgccgagctgtag

SEQ ID NO: 91062 - DNA, 1911 bp, synthetic construct
  misc_feature 1..1911: note = Description of Artificial Sequence: Synthetic coding sequence
  source 1..1911: mol_type = other DNA
atggccgccgccgccctgggcagcagcagcggcagcgccagccccgccgtggccgagctgtgccagaacacccccgagaccttcctggaggccagcaagctgctgctgacctacgccgacaacatcctgagaaaccccaacgacgagaagtacagaagcatcagaatcggcaacaccgccttcagcaccagactgctgcccgtgagaggcgccgtggagtgcctgttcgagatgggcttcgaggagggcgagacccacctgatcttccccaagaaggccagcgtggagcagctgcagaagatcagagacctgatcgccatcgagagaagcagcagactggacggcagcaacaagagccacaaggtgaagagcagccagcagcccgccgccagcacccagctgcccaccacccccagcagcaaccccagcggcctgaaccagcacaccagaaacagacagggccagagcagcgacccccccagcgccagcaccgtggccgccgacagcgccatcctggaggtgctgcagagcaacatccagcacgtgctggtgtacgagaaccccgccctgcaggagaaggccctggcctgcatccccgtgcaggagctgaagagaaagagccaggagaagctgagcagagccagaaagctggacaagggcatcaacatcagcgacgaggacttcctgctgctggagctgctgcactggttcaaggaggagttcttccactgggtgaacaacgtgctgtgcagcaagtgcggcggccagaccagaagcagagacagaagcctgctgcccagcgacgacgagctgaagtggggcgccaaggaggtggaggaccactactgcgacgcctgccagttcagcaacagattccccagatacaacaaccccgagaagctgctggagaccagatgcggcagatgcggcgagtgggccaactgcttcaccctgtgctgcagagccgtgggcttcgaggccagatacgtgtgggactacaccgagctgcagagaaccctgagcctgaagctgaccaccctgaaggagatcggcaagaccttcctgagaatcagcaagagacagaagctgatccaggtggtggacgtgacctggagatacagctgcaagcacgaggaggtgatcgccagaagaaccaaggtgaaggaggccctgctgagagacaccatcaacggcctgaacaagcagagacagctgttcctgagcgagaacagaagaaaggagctgctgcagagaatcatcgtggagctggtggagttcatcagccccaagacccccaagcccggcgagctgggcggcagaatcagcggcagcgtggcctggagagtggccagaggcgagatgggcctgcagagaaaggagaccctgttcatcccctgcgagaacgagaagatcagcaagcagctgcacctgtgctacaacatcgtgaaggacagatacgtgagagtgagcaacaacaaccagaccatcagcggctgggagaacggcgtgtggaagatggagagcatcttcagaaaggtggagaccgactggcacatggtgtacctggccagaaaggagggcagcagcttcgcctacatcagctggaagttcgagtgcggcagcgtgggcctgaaggtggacagcatcagcatcagaaccagcagccagaccttccagaccggcaccgtggagtggaagctgagaagcgacaccgcccaggtggagctgaccggcgacaacagcctgcacagctacgccgacttcagcggcgccaccgaggtgatcctggaggccgagctgagcagaggcgacggcgacgtggcctggcagcacacccagctgttcagacagagcctgaacgaccacgaggagaactgcctggagatcatcatcaagttcagcgacctgtag

SEQ ID NO: 91063 - DNA, 1188 bp, synthetic construct
  misc_feature 1..1188: note = Description of Artificial Sequence: Synthetic coding sequence
  source 1..1188: mol_type = other DNA
atggccgccgaggccagcgagagcggccccgccctgcacgagctgatgagagaggccgagatcagcctgctggagtgcaaggtgtgcttcgagaagttcggccacagacagcagagaagacccagaaacctgagctgcggccacgtggtgtgcctggcctgcgtggccgccctggcccaccccagaaccctggccctggagtgccccttctgcagaagagcctgcagaggctgcgacaccagcgactgcctgcccgtgctgcacctgatcgagctgctgggcagcgccctgagacagagccccgccgcccacagagccgcccccagcgcccccggcgccctgacctgccaccacaccttcggcggctggggcaccctggtgaaccccaccggcctggccctgtgccccaagaccggcagagtggtggtggtgcacgacggcagaagaagagtgaagatcttcgacagcggcggcggctgcgcccaccagttcggcgagaagggcgacgccgcccaggacatcagataccccgtggacgtgaccatcaccaacgactgccacgtggtggtgaccgacgccggcgacagaagcatcaaggtgttcgacttcttcggccagatcaagctggtgatcggcggccagttcagcctgccctggggcgtggagaccaccccccagaacggcatcgtggtgaccgacgccgaggccggcagcctgcacctgctggacgtggacttcgccgagggcgtgctgagaagaaccgagagactgcaggcccacctgtgcaaccccagaggcgtggccgtgagctggctgaccggcgccatcgccgtgctggagcaccccctggccctgggcaccggcgtgtgcagcaccagagtgaaggtgttcagcagcagcatgcagctggtgggccaggtggacaccttcggcctgagcctgtacttccccagcaagatcaccgccagcgccgtgaccttcgaccaccagggcaacgtgatcgtggccgacaccagcggccccgccatcctgtgcctgggcaagcccgaggagttccccgtgcccaagcccatggtgacccacggcctgagccaccccgtggccctgaccttcaccaaggagaacagcctgctggtgctggacaccgccagccacagcatcaaggtgtacaaggtggactggggctag

SEQ ID NO: 91064 - DNA, 903 bp, synthetic construct
  misc_feature 1..903: note = Description of Artificial Sequence: Synthetic coding sequence
  source 1..903: mol_type = other DNA
atggccgccgccgccggcgacgccgacgacgagcccagaagcggccacagcagcagcgagggcgagtgcgccgtggcccccgagcccctgaccgacgccgagggcctgttcagcttcgccgacttcggcagcgccctgggcggcggcggcgccggcctgagcggcagagccagcggcggcgcccagagccccctgagatacctgcacgtgctgtggcagcaggacgccgagcccagagacgagctgagatgcaagatccccgccggcagactgagaagagccgccagaccccacagaagactgggccccaccggcaaggaggtgcacgccctgaagagactgagagacagcgccaacgccaacgacgtggagaccgtgcagcagctgctggaggacggcgccgacccctgcgccgccgacgacaagggcagaaccgccctgcacttcgccagctgcaacggcaacgaccagatcgtgcagctgctgctggaccacggcgccgaccccaaccagagagacggcctgggcaacacccccctgcacctggccgcctgcaccaaccacgtgcccgtgatcaccaccctgctgagaggcggcgccagagtggacgccctggacagagccggcagaacccccctgcacctggccaagagcaagctgaacatcctgcaggagggccacgcccagtgcctggaggccgtgagactggaggtgaagcagatcatccacatgctgagagagtacctggagagactgggccagcacgagcagagagagagactggacgacctgtgcaccagactgcagatgaccagcaccaaggagcaggtggacgaggtgaccgacctgctggccagcttcaccagcctgagcctgcagatgcagagcatggagaagagatag

SEQ ID NO: 91065 - DNA, 387 bp, synthetic construct
  misc_feature 1..387: note = Description of Artificial Sequence: Synthetic coding sequence
  source 1..387: mol_type = other DNA
atgaccgaggccgacgtgaaccccaaggcctaccccctggccgacgcccacctgaccaagaagctgctggacctggtgcagcagagctgcaactacaagcagctgagaaagggcgccaacgaggccaccaagaccctgaacagaggcatcagcgagttcatcgtgatggccgccgacgccgagcccctggagatcatcctgcacctgcccctgctgtgcgaggacaagaacgtgccctacgtgttcgtgagaagcaagcaggccctgggcagagcctgcggcgtgagcagacccgtgatcgcctgcagcgtgaccatcaaggagggcagccagctgaagcagcagatccagagcatccagcagagcatcgagagactgctggtgtag

SEQ ID NO: 91066 - DNA, 387 bp, synthetic construct; identical to SEQ ID NO: 91065
  misc_feature 1..387: note = Description of Artificial Sequence: Synthetic coding sequence
  source 1..387: mol_type = other DNA

SEQ ID NO: 91067 - DNA, 399 bp, synthetic construct
  misc_feature 1..399: note = Description of Artificial Sequence: Synthetic coding sequence
  source 1..399: mol_type = other DNA
atgctgctggtgcagaccgaggccgacgtgaaccccaaggcctaccccctggccgacgcccacctgaccaagaagctgctggacctggtgcagcagagctgcaactacaagcagctgagaaagggcgccaacgaggccaccaagaccctgaacagaggcatcagcgagttcatcgtgatggccgccgacgccgagcccctggagatcatcctgcacctgcccctgctgtgcgaggacaagaacgtgccctacgtgttcgtgagaagcaagcaggccctgggcagagcctgcggcgtgagcagacccgtgatcgcctgcagcgtgaccatcaaggagggcagccagctgaagcagcagatccagagcatccagcagagcatcgagagactgctggtgtag

SEQ ID NO: 91068 - DNA, 2130 bp, synthetic construct
  misc_feature 1..2130: note = Description of Artificial Sequence: Synthetic coding sequence
  source 1..2130: mol_type = other DNA
atggccaccgccggcggcggcagcggcgccgaccccggcagcagaggcctgctgagactgctgagcttctgcgtgctgctggccggcctgtgcagaggcaacagcgtggagagaaagatctacatccccctgaacaagaccgccccctgcgtgagactgctgaacgccacccaccagatcggctgccagagcagcatcagcggcgacaccggcgtgatccacgtggtggagaaggaggaggacctgcagtgggtgctgaccgacggccccaaccccccctacatggtgctgctggagagcaagcacttcaccagagacctgatggagaagctgaagggcagaaccagcagaatcgccggcctggccgtgagcctgaccaagcccagccccgccagcggcttcagccccagcgtgcagtgccccaacgacggcttcggcgtgtacagcaacagctacggccccgagttcgcccactgcagagagatccagtggaacagcctgggcaacggcctggcctacgaggacttcagcttccccatcttcctgctggaggacgagaacgagaccaaggtgatcaagcagtgctaccaggaccacaacctgagccagaacggcagcgcccccaccttccccctgtgcgccatgcagctgttcagccacatgcacgccgtgatcagcaccgccacctgcatgagaagaagcagcatccagagcaccttcagcatcaaccccgagatcgtgtgcgaccccctgagcgactacaacgtgtggagcatgctgaagcccatcaacaccaccggcaccctgaagcccgacgacagagtggtggtggccgccaccagactggacagcagaagcttcttctggaacgtggcccccggcgccgagagcgccgtggccagcttcgtgacccagctggccgccgccgaggccctgcagaaggcccccgacgtgaccaccctgcccagaaacgtgatgttcgtgttcttccagggcgagaccttcgactacatcggcagcagcagaatggtgtacgacatggagaagggcaagttccccgtgcagctggagaacgtggacagcttcgtggagctgggccaggtggccctgagaaccagcctggagctgtggatgcacaccgaccccgtgagccagaagaacgagagcgtgagaaaccaggtggaggacctgctggccaccctggagaagagcggcgccggcgtgcccgccgtgatcctgagaagacccaaccagagccagcccctgccccccagcagcctgcagagattcctgagagccagaaacatcagcggcgtggtgctggccgaccacagcggcgccttccacaacaagtactaccagagcatctacgacaccgccgagaacatcaacgtgagctaccccgagtggctgagccccgaggaggacctgaacttcgtgaccgacaccgccaaggccctggccgacgtggccaccgtgctgggcagagccctgtacgagctggccggcggcaccaacttcagcgacaccgtgcaggccgacccccagaccgtgaccagactgctgtacggcttcctgatcaaggccaacaacagctggttccagagcatcctgagacaggacctgagaagctacctgggcgacggccccctgcagcactacatcgccgtgagcagccccaccaacaccacctacgtggtgcagtacgccctggccaacctgaccggcaccgtggtgaacctgaccagagagcagtgccaggaccccagcaaggtgcccagcgagaacaaggacctgtacgagtacagctgggtgcagggccccctgcacagcaacgagaccgacagactgcccagatgcgtgagaagcaccgccagactggccagagccctgagccccgccttcgagctgagccagtggagcagcaccgagtacagcacctggaccgagagcagatggaaggacatcagagccagaatcttcctgatcgccagcaaggagctggagctgatcaccctgaccgtgggcttcggcatcctgatcttcagcctgatcgtgacctactgcatcaacgccaaggccgacgtgctgttcatcgcccccagagagcccggcgccgtgagctactag

SEQ ID NO: 91069 - DNA, 2070 bp, synthetic construct
  misc_feature 1..2070: note = Description of Artificial Sequence: Synthetic coding sequence
  source 1..2070: mol_type = other DNA
atggacttcaacctgatcctggagagcctgtgcagaggcaacagcgtggagagaaagatctacatccccctgaacaagaccgccccctgcgtgagactgctgaacgccacccaccagatcggctgccagagcagcatcagcggcgacaccggcgtgatccacgtggtggagaaggaggaggacctgcagtgggtgctgaccgacggccccaaccccccctacatggtgctgctggagagcaagcacttcaccagagacctgatggagaagctgaagggcagaaccagcagaatcgccggcctggccgtgagcctgaccaagcccagccccgccagcggcttcagccccagcgtgcagtgccccaacgacggcttcggcgtgtacagcaacagctacggccccgagttcgcccactgcagagagatccagtggaacagcctgggcaacggcctggcctacgaggacttcagcttccccatcttcctgctggaggacgagaacgagaccaaggtgatcaagcagtgctaccaggaccacaacctgagccagaacggcagcgcccccaccttccccctgtgcgccatgcagctgttcagccacatgcacgccgtgatcagcaccgccacctgcatgagaagaagcagcatccagagcaccttcagcatcaaccccgagatcgtgtgcgaccccctgagcgactacaacgtgtggagcatgctgaagcccatcaacaccaccggcaccctgaagcccgacgacagagtggtggtggccgccaccagactggacagcagaagcttcttctggaacgtggcccccggcgccgagagcgccgtggccagcttcgtgacccagctggccgccgccgaggccctgcagaaggcccccgacgtgaccaccctgcccagaaacgtgatgttcgtgttcttccagggcgagaccttcgactacatcggcagcagcagaatggtgtacgacatggagaagggcaagttccccgtgcagctggagaacgtggacagcttcgtggagctgggccaggtggccctgagaaccagcctggagctgtggatgcacaccgaccccgtgagccagaagaacgagagcgtgagaaaccaggtggaggacctgctggccaccctggagaagagcggcgccggcgtgcccgccgtgatcctgagaagacccaaccagagccagcccctgccccccagcagcctgcagagattcctgagagccagaaacatcagcggcgtggtgctggccgaccacagcggcgccttccacaacaagtactaccagagcatctacgacaccgccgagaacatcaacgtgagctaccccgagtggctgagccccgaggaggacctgaacttcgtgaccgacaccgccaaggccctggccgacgtggccaccgtgctgggcagagccctgtacgagctggccggcggcaccaacttcagcgacaccgtgcaggccgacccccagaccgtgaccagactgctgtacggcttcctgatcaaggccaacaacagctggttccagagcatcctgagacaggacctgagaagctacctgggcgacggccccctgcagcactacatcgccgtgagcagccccaccaacaccacctacgtggtgcagtacgccctggccaacctgaccggcaccgtggtgaacctgaccagagagcagtgccaggaccccagcaaggtgcccagcgagaacaaggacctgtacgagtacagctgggtgcagggccccctgcacagcaacgagaccgacagactgcccagatgcgtgagaagcaccgccagactggccagagccctgagccccgccttcgagctgagccagtggagcagcaccgagtacagcacctggaccgagagcagatggaaggacatcagagccagaatcttcctgatcgccagcaaggagctggagctgatcaccctgaccgtgggcttcggcatcctgatcttcagcctgatcgtgacctactgcatcaacgccaaggccgacgtgctgttcatcgcccccagagagcccggcgccgtgagctactag

SEQ ID NO: 91070 - DNA, 1356 bp, synthetic construct
  misc_feature 1..1356: note = Description of Artificial Sequence: Synthetic coding sequence
  source 1..1356: mol_type = other DNA
atgctgaagcccatcaacaccaccggcaccctgaagcccgacgacagagtggtggtggccgccaccagactggacagcagaagcttcttctggaacgtggcccccggcgccgagagcgccgtggccagcttcgtgacccagctggccgccgccgaggccctgcagaaggcccccgacgtgaccaccctgcccagaaacgtgatgttcgtgttcttccagggcgagaccttcgactacatcggcagcagcagaatggtgtacgacatggagaagggcaagttccccgtgcagctggagaacgtggacagcttcgtggagctgggccaggtggccctgagaaccagcctggagctgtggatgcacaccgaccccgtgagccagaagaacgagagcgtgagaaaccaggtggaggacctgctggccaccctggagaagagcggcgccggcgtgcccgccgtgatcctgagaagacccaaccagagccagcccctgccccccagcagcctgcagagattcctgagagccagaaacatcagcggcgtggtgctggccgaccacagcggcgccttccacaacaagtactaccagagcatctacgacaccgccgagaacatcaacgtgagctaccccgagtggctgagccccgaggaggacctgaacttcgtgaccgacaccgccaaggccctggccgacgtggccaccgtgctgggcagagccctgtacgagctggccggcggcaccaacttcagcgacaccgtgcaggccgacccccagaccgtgaccagactgctgtacggcttcctgatcaaggccaacaacagctggttccagagcatcctgagacaggacctgagaagctacctgggcgacggccccctgcagcactacatcgccgtgagcagccccaccaacaccacctacgtggtgcagtacgccctggccaacctgaccggcaccgtggtgaacctgaccagagagcagtgccaggaccccagcaaggtgcccagcgagaacaaggacctgtacgagtacagctgggtgcagggccccctgcacagcaacgagaccgacagactgcccagatgcgtgagaagcaccgccagactggccagagccctgagccccgccttcgagctgagccagtggagcagcaccgagtacagcacctggaccgagagcagatggaaggacatcagagccagaatcttcctgatcgccagcaaggagctggagctgatcaccctgaccgtgggcttcggcatcctgatcttcagcctgatcgtgacctactgcatcaacgccaaggccgacgtgctgttcatcgcccccagagagcccggcgccgtgagctactag

SEQ ID NO: 91071 - DNA, 918 bp, synthetic construct
  misc_feature 1..918: note = Description of Artificial Sequence: Synthetic coding sequence
  source 1..918: mol_type = other DNA
atgctgaagcccatcaacaccaccggcaccctgaagcccgacgacagagtggtggtggccgccaccagactggacagcagaagcttcttctggaacgtggcccccggcgccgagagcgccgtggccagcttcgtgacccagctggccgccgccgaggccctgcagaaggcccccgacgtgaccaccctgcccagaaacgtgatgttcgtgttcttccagggcgtggccctgagaaccagcctggagctgtggatgcacaccgaccccgtgagccagaagaacgagagcgtgagaaaccaggtggaggacctgctggccaccctggagaagagcggcgccggcgtgcccgccgtgatcctgagaagacccaaccagagccagcccctgccccccagcagcctgcagagattcctgagagccagaaacatcagcggcgtggtgctggccgaccacagcggcgccttccacaacaagtactaccagagcatctacgacaccgccgagaacatcaacgtgagctaccccgagtggctgagccccgaggaggacctgaacttcgtgaccgacaccgccaaggccctggccgacgtggccaccgtgctgggcagagccctgtacgagctggccggcggcaccaacttcagcgacaccgtgcaggccgacccccagaccgtgaccagactgctgtacggcttcctgatcaaggccaacaacagctggttccagagcatcctgagacaggacctgagaagctacctgggcgacggccccctgcagcactacatcgccgtgagcagccccaccaacaccacctacgtggtgcagtacgccctggccaacctgaccggcaccgtggtgaacctgaccagagagcagtgccaggaccccagcaaggtgcccagcgagaacaaggactag

SEQ ID NO: 91072 - DNA, 2070 bp, synthetic construct; identical to SEQ ID NO: 91069
  misc_feature 1..2070: note = Description of Artificial Sequence: Synthetic coding sequence
  source 1..2070: mol_type = other DNA

SEQ ID NO: 91073 - DNA, 768 bp, synthetic construct
  misc_feature 1..768: note = Description of Artificial Sequence: Synthetic coding sequence
  source 1..768: mol_type = other DNA
atggccaccgccggcggcggcagcggcgccgaccccggcagcagaggcctgctgagactgctgagcttctgcgtgctgctggccggcctgtgcagaggcaacagcgtggagagaaagatctacatccccctgaacaagaccgccccctgcgtgagactgctgaacgccacccaccagatcggctgccagagcagcatcagcggcgacaccggcgtgatccacgtggtggagaaggaggaggacctgcagtgggtgctgaccgacggccccaaccccccctacatggtgctgctggagagcaagcacttcaccagagacctgatggagaagctgaagggcagaaccagcagaatcgccggcctggccgtgagcctgaccaagcccagccccgccagcggcttcagccccagcgtgcagtgccccaacgacggcttcggcgtgtacagcaacagctacggccccgagttcgcccactgcagagagatccagtggaacagcctgggcaacggcctggcctacgaggacttcagcttccccatcttcctgctggaggacgagaacgagaccaaggtgatcaagcaggagaccttcgactacatcggcagcagcagaatggtgtacgacatggagaagggcaagttccccgtgcagctggagaacgtggacagcttcgtggagctgggccaggtggccctgagaaccagcctggagctgtggatgcacaccgaccccgtgagccagaagaacgagagcgtgagaaaccagtag

SEQ ID NO: 91074 - DNA, 963 bp, synthetic construct
  misc_feature 1..963: note = Description of Artificial Sequence: Synthetic coding sequence
  source 1..963: mol_type = other DNA
tgaggcttcggcgtgtacagcaacagctacggccccgagttcgcccactgcagagagatccagtggaacagcctgggcaacggcctggcctacgaggacttcagcttccccatcttcctgctggaggacgagaacgagaccaaggtgatcaagcagctgttcagccacatgcacgccgtgatcagcaccgccacctgcatgagaagaagcagcatccagagcaccttcagcatcaaccccgagatcgtgtgcgaccccctgagcgactacaacgtgtggagcatgctgaagcccatcaacaccaccggcaccctgaagcccgacgacagagtggtggtggccgccaccagactggacagcagaagcttcttctggaacgtggcccccggcgccgagagcgccgtggccagcttcgtgacccagctggccgccgccgaggccctgcagaaggcccccgacgtgaccaccctgcccagaaacgtgatgttcgtgttcttccagggcgagaccttcgactacatcggcagcagcagaatggtgtacgacatggagaagggcaagttccccgtgcagctggagaacgtggacagcttcgtggagctgggccaggtggccctgagaaccagcctggagctgtggatgcacaccgaccccgtgagccagaagaacgagagcgtgagaaaccaggtggaggacctgctggccaccctggagaagagcggcgccggcgtgcccgccgtgatcctgagaagacccaaccagagccagcccctgccccccagcagcctgcagagattcctgagagccagaaacatcagcggcgtggtgctggccgaccacagcggcgccttccacaacaagtactaccagagcatctacgacaccgccgagaacatcaacgtgagctaccccgagtggctgagccccgaggaggacctgaacttcgtgaccgacaccgcctag

SEQ ID NO: 91075 - DNA, 660 bp, synthetic construct
  misc_feature 1..660: note = Description of Artificial Sequence: Synthetic coding sequence
  source 1..660: mol_type = other DNA
agaagcagcatccagagcaccttcagcatcaaccccgagatcgtgtgcgaccccctgagcgactacaacgtgtggagcatgctgaagcccatcaacaccaccggcaccctgaagcccgacgacagagtggtggtggccgccaccagactggccgccgccgaggccctgcagaaggcccccgacgtgaccaccctgcccagaaacgtgatgttcgtgttcttccagggcgagaccttcgactacatcggcagcagcagaatggtgtacgacatggagaagggcaagttccccgtgcagctggagaacgtggacagcttcgtggagctgggccaggtggccctgagaaccagcctggagctgtggatgcacaccgaccccgtgagccagaagaacgagagcgtgagaaaccaggtggaggacctgctggccaccctggagaagagcggcgccggcgtgcccgccgtgatcctgagaagacccaaccagagccagcccctgccccccagcagcctgcagagattcctgagagccagaaacatcagcggcgtggtgctggccgaccacagcggcgccttccacaacaagtactaccagagcatctacgacaccgccgagaacatcaacgtgagctaccccgagtggctgagccccgaggagtag

SEQ ID NO: 91076 - DNA, 828 bp, synthetic construct
  misc_feature 1..828: note = Description of Artificial Sequence: Synthetic coding sequence
  source 1..828: mol_type = other DNA
tgaaacgtggcccccggcgccgagagcgccgtggccagcttcgtgacccagctggccgccgccgaggccctgcagaaggcccccgacgtgaccaccctgcccagaaacgtgatgttcgtgttcttccagggcgtggccctgagaaccagcctggagctgtggatgcacaccgaccccgtgagccagaagaacgagagcgtgagaaaccaggtggaggacctgctggccaccctggagaagagcggcgccggcgtgcccgccgtgatcctgagaagacccaaccagagccagcccctgccccccagcagcctgcagagattcctgagagccagaaacatcagcggcgtggtgctggccgaccacagcggcgccttccacaacaagtactaccagagcatctacgacaccgccgagaacatcaacgtgagctaccccgagtggctgagccccgaggaggacctgaacttcgtgaccgacaccgccaaggccctggccgacgtggccaccgtgctgggcagagccctgtacgagctggccggcggcaccaacttcagcgacaccgtgcaggccgacccccagaccgtgaccagactgctgtacggcttcctgatcaaggccaacaacagctggttccagagcatcctgagacaggacctgagaagctacctgggcgacggccccctgcagcactacatcgccgtgagcagccccaccaacaccacctacgtggtgcagtacgccctggccaacctgaccggcaccgtggtgaacctgaccagagagcagtgccaggaccccagcaaggtgcccagcgagaacaaggactag

SEQ ID NO: 91077 - DNA, 405 bp, synthetic construct
  misc_feature 1..405: note = Description of Artificial Sequence: Synthetic coding sequence
  source 1..405: mol_type = other DNA
atggccaccgccggcggcggcagcggcgccgaccccggcagcagaggcctgctgagactgctgagcttctgcgtgctgctggccggcctgtgcagaggcaacagcgtggagagaaagatctacatccccctgaacaagaccgccccctgcgtgagactgctgaacgccacccaccagatcggctgccagagcagcatcagcggcgacaccggcgtgatccacgtggtggagaaggaggaggacctgcagtgggtgctgaccgacggccccaaccccccctacatggtgctgctggagagcaagcacttcaccagacagaacgtgagactgagcgacaccttcctgtgcagcttcatggagttcctgagctacagcagagacctgatggagaagctgaagggctag

SEQ ID NO: 91078 - DNA, 699 bp, synthetic construct
  misc_feature 1..699: note = Description of Artificial Sequence: Synthetic coding sequence
  source 1..699: mol_type = other DNA
atggccaccgccggcggcggcagcggcgccgaccccggcagcagaggcctgctgagactgctgagcttctgcgtgctgctggccggcctgttcctggacttcgagcccgaccccctgcccctgtgccccgacgtgagcttcttcccccagccccagccccccaccccccagagcaagggcaccggcctgtgcagaggcaacagcgtggagagaaagatctacatccccctgaacaagaccgccccctgcgtgagactgctgaacgccacccaccagatcggctgccagagcagcatcagcggcgacaccggcgtgatccacgtggtggagaaggaggaggacctgcagtgggtgctgaccgacggccccaaccccccctacatggtgctgctggagagcaagcacttcaccagagacctgatggagaagctgaagggcagaaccagcagaatcgccggcctggccgtgagcctgaccaagcccagccccgccagcggcttcagccccagcgtgcagtgccccaacgacggcttcggcgtgtacagcaacagctacggccccgagttcgcccactgcagagagatccagtggaacagcctgggcaacggcctggcctacgaggacttcagcttccccatcttcctgctggaggacgagaacgagaccaaggtgatcaagcagtgctaccaggaccactag

SEQ ID NO: 91079 - DNA, 1716 bp, synthetic construct
  misc_feature 1..1716: note = Description of Artificial Sequence: Synthetic coding sequence
  source 1..1716: mol_type = other DNA
atggccaccgccggcggcggcagcggcgccgaccccggcagcagaggcctgctgagactgctgagcttctgcgtgctgctggccggcctgtgcagaggcaacagcgtggagagaaagatctacatccccctgaacaagaccgccccctgcgtgagactgctgaacgccacccaccagatcggctgccagagcagcatcagcggcgacaccggcgtgatccacgtggtggagaaggaggaggacctgcagtgggtgctgaccgacggccccaaccccccctacatggtgctgctggagagcaagcacttcaccagagacctgatggagaagctgaagggcagaaccagcagaatcgccggcctggccgtgagcctgaccaagcccagccccgccagcggcttcagccccagcgtgcagtgccccaacgacggcttcggcgtgtacagcaacagctacggccccgagttcgcccactgcagagagatccagtggaacagcctgggcaacggcctggcctacgaggacttcagcttccccatcttcctgctggaggacgagaacgagaccaaggtgatcaagcaggagaccttcgactacatcggcagcagcagaatggtgtacgacatggagaagggcaagttccccgtgcagctggagaacgtggacagcttcgtggagctgggccaggtggccctgagaaccagcctggagctgtggatgcacaccgaccccgtgagccagaagaacgagagcgtgagaaaccaggtggaggacctgctggccaccctggagaagagcggcgccggcgtgcccgccgtgatcctgagaagacccaaccagagccagcccctgccccccagcagcctgcagagattcctgagagccagaaacatcagcggcgtggtgctggccgaccacagcggcgccttccacaacaagtactaccagagcatctacgacaccgccgagaacatcaacgtgagctaccccgagtggctgagccccgaggaggacctgaacttcgtgaccgacaccgccaaggccctggccgacgtggccaccgtgctgggcagagccctgtacgagctggccggcggcaccaacttcagcgacaccgtgcaggccgacccccagaccgtgaccagactgctgtacggcttcctgatcaaggccaacaacagctggttccagagcatcctgagacaggacctgagaagctacctgggcgacggccccctgcagcactacatcgccgtgagcagccccaccaacaccacctacgtggtgcagtacgccctggccaacctgaccggcaccgtggtgaacctgaccagagagcagtgccaggaccccagcaaggtgcccagcgagaacaaggacctgtacgagtacagctgggtgcagggccccctgcacagcaacgagaccgacagactgcccagatgcgtgagaagcaccgccagactggccagagccctgagccccgccttcgagctgagccagtggagcagcaccgagtacagcacctggaccgagagcagatggaaggacatcagagccagaatcttcctgatcgccagcaaggagctggagctgatcaccctgaccgtgggcttcggcatcctgatcttcagcctgatcgtgacctactgcatcaacgccaaggccgacgtgctgttcatcgcccccagagagcccggcgccgtgagctactag

SEQ ID NO: 91080 - DNA, 642 bp, synthetic construct
  misc_feature 1..642: note = Description of Artificial Sequence: Synthetic coding sequence
  source 1..642: mol_type = other DNA
atgagcagagtgctggtgccctgccacgtgaagggcagcgtggccctgcaggtgggcgacgtgagaaccagccagggcagacccggcgtgctggtgatcgacgtgaccttccccagcgtggcccccttcgagctgcaggagatcaccttcaagaactactacaccgccttcctgagcatcagagtgagacagtacaccagcgcccacacccccgccaagtgggtgacctgcctgagagactactgcctgatgcccgacccccacagcgaggagggcgcccaggagtacgtgagcctgttcaagcaccagatgctgtgcgacatggccagaatcagcgagctgagactgatcctgagacagcccagccccctgtggctgagcttcaccgtggaggagctgcagatctaccagcagggccccaagagccccagcgtgaccttccccaagtggctgagccaccccgtgccctgcgagcagcccgccctgctgagagagggcctgcccgaccccagcagagtgagcagcgaggtgcagcagatgtgggccctgaccgagatgatcagagccagccacaccagcgccagaatcggcagattcgacgtggacggctgctacgacctgaacctgctgagctacacctag

SEQ ID NO: 91081 - DNA, 642 bp, synthetic construct; identical to SEQ ID NO: 91080
  misc_feature 1..642: note = Description of Artificial Sequence: Synthetic coding sequence
  source 1..642: mol_type = other DNA

SEQ ID NO: 91082 - DNA, 528 bp, synthetic construct
  misc_feature 1..528: note = Description of Artificial Sequence: Synthetic coding sequence
  source 1..528: mol_type = other DNA
atgagcagagtgctggtgccctgccacgtgaagggcagcgtggccctgcaggtgggcgacgtgagaaccagccagggcagacccggcgtgctggtgatcgacgtgaccttccccagcgtggcccccttcgagctgcaggagatcaccttcaagaactactacaccgccttcctgagcatcagagtgagacagtacaccagcgcccacacccccgccaagtgggtgacctgcctgagagactactgcctgatgcccgacccccacagcgaggagggcgcccaggagtacgtgagcctgttcaagcaccagagccccagcgtgaccttccccaagtggctgagccaccccgtgccctgcgagcagcccgccctgctgagagagggcctgcccgaccccagcagagtgagcagcgaggtgcagcagatgtgggccctgaccgagatgatcagagccagccacaccagcgccagaatcggcagattcgacgtggacggctgctacgacctgaacctgctgagctacacctag

SEQ ID NO: 91083 - DNA, 795 bp, synthetic construct
  misc_feature 1..795: note = Description of Artificial Sequence: Synthetic coding sequence
  source 1..795: mol_type = other DNA
atggagagcggcttcaccagcaaggacacctacctgagccacttcaaccccagagactacctggagaagtactacaagttcggcagcagacacagcgccgagagccagatcctgaagcacctgctgaagaacctgttcaagatcttctgcctggacggcgtgaagggcgacctgctgatcgacatcggcagcggccccaccatctaccagctgctgagcgcctgcgagagcttcaaggagatcgtggtgaccgactacagcgaccagaacctgcaggagctggagaagtggctgaagaaggagcccgaggccttcgactggagccccgtggtgacctacgtgtgcgacctggagggcaacagagtgaagggccccgagaaggaggagaagctgagacaggccgtgaagcaggtgctgaagtgcgacgtgacccagagccagcccctgggcgccgtgcccctgccccccgccgactgcgtgctgagcaccctgtgcctggacgccgcctgccccgacctgcccacctactgcagagccctgagaaacctgggcagcctgctgaagcccggcggcttcctggtgatcatggacgccctgaagagcagctactacatgatcggcgagcagaagttcagcagcctgcccctgggcagagaggccgtggaggccgccgtgaaggaggccggctacaccatcgagtggttcgaggtgatcagccagagctacagcagcaccatggccaacaacgagggcctgttcagcctggtggccagaaagctgagcagacccctgtag

SEQ ID NO: 91084 - DNA, 795 bp, synthetic construct; identical to SEQ ID NO: 91083
  misc_feature 1..795: note = Description of Artificial Sequence: Synthetic coding sequence
  source 1..795: mol_type = other DNA

SEQ ID NO: 91085 - DNA, 759 bp, synthetic construct
  misc_feature 1..759: note = Description of Artificial Sequence: Synthetic coding sequence
  source 1..759: mol_type = other DNA
atgaagagcagaatccccgtggtgctgctggcctgcggcagcttcaaccccatcaccaacatgcacctgagaatgttcgaggtggccagagaccacctgcaccagaccggcatgtaccaggtgatccagggcatcatcagccccgtgaacgacacctacggcaagaaggacctggccgccagccaccacagagtggccatggccagactggccctgcagaccagcgactggatcagagtggacccctgggagagcgagcaggcccagtggatggagaccgtgaaggtgctgagacaccaccacagcaagctgctgagaagccccccccagatggagggccccgaccacggcaaggccctgttcagcacccccgccgccgtgcccgagctgaagctgctgtgcggcgccgacgtgctgaagaccttccagacccccaacctgtggaaggacgcccacatccaggagatcgtggagaagttcggcctggtgtgcgtgggcagagtgggccacgaccccaagggctacatcgccgagagccccatcctgagaatgcaccagcacaacatccacctggccaaggagcccgtgcagaacgagatcagcgccacctacatcagaagagccctgggccagggccagagcgtgaagtacctgatccccgacgccgtgatcacctacatcaaggaccacggcctgtacaccaagggcagcacctggaagggcaagagcacccagagcaccgagggcaagaccagctag

SEQ ID NO: 91086 - DNA, 648 bp, synthetic construct
  misc_feature 1..648: note = Description of Artificial Sequence: Synthetic coding sequence
  source 1..648: mol_type = other DNA
atgtaccaggtgatccagggcatcatcagccccgtgaacgacacctacggcaagaaggacctggccgccagccaccacagagtggccatggccagactggccctgcagaccagcgactggatcagagtggacccctgggagagcgagcaggcccagtggatggagaccgtgaaggtgctgagacaccaccacagcaagctgctgagaagccccccccagatggagggccccgaccacggcaaggccctgttcagcacccccgccgccgtgcccgagctgaagctgctgtgcggcgccgacgtgctgaagaccttccagacccccaacctgtggaaggacgcccacatccaggagatcgtggagaagttcggcctggtgtgcgtgggcagagtgggccacgaccccaagggctacatcgccgagagccccatcctgagaatgcaccagcacaacatccacctggccaaggagcccgtgcagaacgagatcagcgccacctacatcagaagagccctgggccagggccagagcgtgaagtacctgatccccgacgccgtgatcacctacatcaaggaccacggcctgtacaccaagggcagcacctggaagggcaagagcacccagagcaccgagggcaagaccagctag

SEQ ID NO: 91087 - DNA, 648 bp, synthetic construct; identical to SEQ ID NO: 91086
  misc_feature 1..648: note = Description of Artificial Sequence: Synthetic coding sequence
  source 1..648: mol_type = other DNA

SEQ ID NO: 91088 - DNA, 429 bp, synthetic construct
  misc_feature 1..429: note = Description of Artificial Sequence: Synthetic coding sequence
  source 1..429: mol_type = other DNA
atggagggccccgaccacggcaaggccctgttcagcacccccgccgccgtgcccgagctgaagctgctgtgcggcgccgacgtgctgaagaccttccagacccccaacctgtggaaggacgcccacatccaggagatcgtggagaagttcggcctggtgtgcgtgggcagagtgggccacgaccccaagggctacatcgccgagagccccatcctgagaatgcaccagcacaacatccacctggccaaggagcccgtgcagaacgagatcagcgccacctacatcagaagagccctgggccagggccagagcgtgaagtacctgatccccgacgccgtgatcacctacatcaaggaccacggcctgtacaccaagggcagcacctggaagggcaagagcacccagagcaccgagggcaagaccagctag

SEQ ID NO: 91089 - DNA, 345 bp, synthetic construct
  misc_feature 1..345: note = Description of Artificial Sequence: Synthetic coding sequence
  source 1..345: mol_type = other DNA
atgaagagcagaatccccgtggtgctgctggcctgcggcagcttcaaccccatcaccaacatgcacctgagaatgttcgaggtggccagagaccacctgcaccagaccggcatgtaccaggtgatccagggcatcatcagccccgtgaacgacacctacggcaagaaggacctggccgccagccaccacagagtggccatggccagactggccctgcagaccagcgactggatcagagtggacccctgggagagcgagcaggcccagtggatggagaccgtgaaggtgctgagacaccaccacagcaagctgctgagaagccccccccagatggagggcccctag

SEQ ID NO: 91090 - DNA, 492 bp, synthetic construct
  misc_feature 1..492: note = Description of Artificial Sequence: Synthetic coding sequence
  source 1..492: mol_type = other DNA
atgaagagcagaatccccgtggtgctgctggcctgcggcagcttcaaccccatcaccaacatgcacctgagaatgttcgaggtggccagagaccacctgcaccagaccgccgtgcccgagctgaagctgctgtgcggcgccgacgtgctgaagaccttccagacccccaacctgtggaaggacgcccacatccaggagatcgtggagaagttcggcctggtgtgcgtgggcagagtgggccacgaccccaagggctacatcgccgagagccccatcctgagaatgcaccagcacaacatccacctggccaaggagcccgtgcagaacgagatcagcgccacctacatcagaagagccctgggccagggccagagcgtgaagtacctgatccccgacgccgtgatcacctacatcaaggaccacggcctgtacaccaagggcagcacctggaagggcaagagcacccagagcaccgagggcaagaccagctag

SEQ ID NO: 91091 - DNA, 3261 bp, synthetic construct
  misc_feature 1..3261: note = Description of Artificial Sequence: Synthetic coding sequence
  source 1..3261: mol_type = other DNA
atggccaacctgctgaagaccgtggtgaccggctgcagctgccccctgctgagcaacctgggcagctgcaagggcctgagagtgaagaaggacttcctgagaaccttctacacccaccaggagctgtggtgcaaggcccccgtgaagcccggcatcccctacaagcagctgaccgtgggcgtgcccaaggagatcttccagaacgagaagagagtggccctgagccccgccggcgtgcagaacctggtgaagcagggcttcaacgtggtggtggagagcggcgccggcgaggccagcaagttcagcgacgaccactacagagtggccggcgcccagatccagggcgccaaggaggtgctggccagcgacctggtggtgaaggtgagagcccccatggtgaaccccaccctgggcgtgcacgaggccgacctgctgaagaccagcggcaccctgatcagcttcatctaccccgcccagaaccccgagctgctgaacaagctgagccagagaaagaccaccgtgctggccatggaccaggtgcccagagtgaccatcgcccagggctacgacgccctgagcagcatggccaacatcgccggctacaaggccgtggtgctggccgccaaccacttcggcagattcttcaccggccagatcaccgccgccggcaaggtgccccccgccaagatcctgatcgtgggcggcggcgtggccggcctggccagcgccggcgccgccaagagcatgggcgccatcgtgagaggcttcgacaccagagccgccgccctggagcagttcaagagcctgggcgccgagcccctggaggtggacctgaaggagagcggcgagggccagggcggctacgccaaggagatgagcaaggagttcatcgaggccgagatgaagctgttcgcccagcagtgcaaggaggtggacatcctgatcagcaccgccctgatccccggcaagaaggcccccgtgctgttcaacaaggagatgatcgagagcatgaaggagggcagcgtggtggtggacctggccgccgaggccggcggcaacttcgagaccaccaagcccggcgagctgtacatccacaagggcatcacccacatcggctacaccgacctgcccagcagaatggccacccaggccagcaccctgtacagcaacaacatcaccaagctgctgaaggccatcagccccgacaaggacaacttctacttcgacgtgaaggacgacttcgacttcggcaccatgggccacgtgatcagaggcaccgtggtgatgaaggacggcaaggtgatcttccccgcccccacccccaagaacatcccccagggcgcccccgtgaagcagaagaccgtggccgagctggaggccgagaaggccgccaccatcacccccttcagaaagaccatgagcaccgccagcgcctacaccgccggcctgaccggcatcctgggcctgggcatcgccgcccccaacctggccttcagccagatggtgaccaccttcggcctggccggcatcgtgggctaccacaccgtgtggggcgtgacccccgccctgcacagccccctgatgagcgtgaccaacgccatcagcggcctgaccgccgtgggcggcctggccctgatgggcggccacctgtaccccagcaccaccagccagggcctggccgccctggccgccttcatcagcagcgtgaacatcgccggcggcttcctggtgacccagagaatgctggacatgttcaagagacccaccgacccccccgagtacaactacctgtacctgctgcccgccggcaccttcgtgggcggctacctggccgccctgtacagcggctacaacatcgagcagatcatgtacctgggcagcggcctgtgctgcgtgggcgccctggccggcctgagcacccagggcaccgccagactgggcaacgccctgggcatgatcggcgtggccggcggcctggccgccaccctgggcgtgctgaagcccggccccgagctgctggcccagatgagcggcgccatggccctgggcggcaccatcggcctgaccatcgccaagagaatccagatcagcgacctgccccagctggtggccgccttccacagcctggtgggcctggccgccgtgctgacctgcatcgccgagtacatcatcgagtacccccacttcgccaccgacgccgccgccaacctgaccaagatcgtggcctacctgggcacctacatcggcggcgtgaccttcagcggcagcctgatcgcctacggcaagctgcagggcctgctgaagagcgcccccctgctgctgcccggcagacacctgctgaacgccggcctgctggccgccagcgtgggcggcatcatccccttcatggtggaccccagcttcaccaccggcatcacctgcctgggcagcgtgagcgccctgagcgccgtgatgggcgtgaccctgaccgccgccatcggcggcgccgacatgcccgtggtgatcaccgtgctgaacagctacagcggctgggccctgtgcgccgagggcttcctgctgaacaacaacctgctgaccatcgtgggcgccctgatcggcagcagcggcgccatcctgagctacatcatgtgcgtggccatgaacagaagcctggccaacgtgatcctgggcggctacggcaccaccagcaccgccggcggcaagcccatggagatcagcggcacccacaccgagatcaacctggacaacgccatcgacatgatcagagaggccaacagcatcatcatcacccccggctacggcctgtgcgccgccaaggcccagtaccccatcgccgacctggtgaagatgctgaccgagcagggcaagaaggtgagattcggcatccaccccgtggccggcagaatgcccggccagctgaacgtgctgctggccgaggccggcgtgccctacgacatcgtgctggagatggacgagatcaaccacgacttccccgacaccgacctggtgctggtgatcggcgccaacgacaccgtgaacagcgccgcccaggaggaccccaacagcatcatcgccggcatgcccgtgctggaggtgtggaagagcaagcaggtgatcgtgatgaagagaagcctgggcgtgggctacgccgccgtggacaaccccatcttctacaagcccaacaccgccatgctgctgggcgacgccaagaagacctgcgacgccctgcaggccaaggtgagagagagctaccagaagtag

SEQ ID NO: 91092 - DNA, 3261 bp, synthetic construct; identical to SEQ ID NO: 91091
  misc_feature 1..3261: note = Description of Artificial Sequence: Synthetic coding sequence
  source 1..3261: mol_type = other DNA

SEQ ID NO: 91093 - DNA, 600 bp, synthetic construct
  misc_feature 1..600: note = Description of Artificial Sequence: Synthetic coding sequence
  source 1..600: mol_type = other DNA
atggccaacctgctgaagaccgtggtgaccggctgcagctgccccctgctgagcaacctgggcagctgcaagggcctgagagtgaagaaggacttcctgagaaccttctacacccaccaggagctgtggtgcaaggcccccgtgaagcccggcatcccctacaagcagctgaccgtgggcgtgcccaaggagatcttccagaacgagaagagagtggccctgagccccgccggcgtgcagaacctggtgaagcagggcttcaacgtggtggtggagagcggcgccggcgaggccagcaagttcagcgacgaccactacagagtggccggcgcccagatccagggcgccaaggaggtgctggccagcgacctggtggtgaaggtgagagcccccatggtgaaccccaccctgggcgtgcacgaggccgacctgctgaagaccagcggcaccctgatcagcttcatctaccccgcccagaaccccgagctgctgaacaagctgagccagagaaagaccaccgtgctggccatggaccaggtgcccagagtgaccatcgcccagggctacgacgccctgagcagcatggccaacatcgcctag

SEQ ID NO: 91094 - DNA, 654 bp, synthetic construct
  misc_feature 1..654: note = Description of Artificial Sequence: Synthetic coding sequence
  source 1..654: mol_type = other DNA
atggccaacctgctgaagaccgtggtgaccggctgcagctgccccctgctgagcaacctgggcagctgcaagggcctgagagtgaagaaggacttcctgagaaccttctacacccaccaggagctgtggtgcaaggcccccgtgaagcccggcatcccctacaagcagctgaccgtgggcgtgcccaaggagatcttccagaacgagaagagagtggccctgagccccgccggcgtgcagaacctggtgaagcagggcttcaacgtggtggtggagagcggcgccggcgaggccagcaagttcagcgacgaccactacagagtggccggcgcccagatccagggcgccaaggaggtgctggccagcgacctggtggtgaaggtgagagcccccatggtgaaccccaccctgggcgtgcacgaggccgacctgctgaagaccagcggcaccctgatcagcttcatctaccccgcccagaaccccgagctgctgaacaagctgagccagagaaagaccaccgtgctggccatggaccaggtgcccagagtgaccatcgcccagggctacgacgccctgagcagcatggccaacatcgccggctacaaggccgtggtgctggccgccaaccacttcggcagattcttcaccggctag

SEQ ID NO: 91095 - DNA, 1806 bp, synthetic construct
  misc_feature 1..1806: note = Description of Artificial Sequence: Synthetic coding sequence
  source 1..1806: mol_type = other DNA
atgctgagctggaacagagtgagagccaagctgcccagcagccagatggtgaccaccttcggcctggccggcatcgtgggctaccacaccgtgtggggcgtgacccccgccctgcacagccccctgatgagcgtgaccaacgccatcagcggcctgaccgccgtgggcggcctggccctgatgggcggccacctgtaccccagcaccaccagccagggcctggccgccctggccgccttcatcagcagcgtgaacatcgccggcggcttcctggtgacccagagaatgctggacatgttcaagagacccaccgacccccccgagtacaactacctgtacctgctgcccgccggcaccttcgtgggcggctacctggccgccctgtacagcggctacaacatcgagcagatcatgtacctgggcagcggcctgtgctgcgtgggcgccctggccggcctgagcacccagggcaccgccagactgggcaacgccctgggcatgatcggcgtggccggcggcctggccgccaccctgggcgtgctgaagcccggccccgagctgctggcccagatgagcggcgccatggccctgggcggcaccatcggcctgaccatcgccaagagaatccagatcagcgacctgccccagctggtggccgccttccacagcctggtgggcctggccgccgtgctgacctgcatcgccgagtacatcatcgagtacccccacttcgccaccgacgccgccgccaacctgaccaagatcgtggcctacctgggcacctacatcggcggcgtgaccttcagcggcagcctgatcgcctacggcaagctgcagggcctgctgaagagcgcccccctgctgctgcccggcagacacctgctgaacgccggcctgctggccgccagcgtgggcggcatcatccccttcatggtggaccccagcttcaccaccggcatcacctgcctgggcagcgtgagcgccctgagcgccgtgatgggcgtgaccctgaccgccgccatcggcggcgccgacatgcccgtggtgatcaccgtgctgaacagctacagcggctgggccctgtgcgccgagggcttcctgctgaacaacaacctgctgaccatcgtgggcgccctgatcggcagcagcggcgccatcctgagctacatcatgtgcgtggccatgaacagaagcctggccaacgtgatcctgggcggctacggcaccaccagcaccgccggcggcaagcccatggagatcagcggcacccacaccgagatcaacctggacaacgccatcgacatgatcagagaggccaacagcatcatcatcacccccggctacggcctgtgcgccgccaaggcccagtaccccatcgccgacctggtgaagatgctgaccgagcagggcaagaaggtgagattcggcatccaccccgtggccggcagaatgcccggccagctgaacgtgctgctggccgaggccggcgtgccctacgacatcgtgctggagatggacgagatcaaccacgacttccccgacaccgacctggtgctggtgatcggcgccaacgacaccgtgaacagcgccgcccaggaggaccccaacagcatcatcgccggcatgcccgtgctggaggtgtggaagagcaagcaggtgatcgtgatgaagagaagcctgggcgtgggctacgccgccgtggacaaccccatcttctacaagcccaacaccgccatgctgctgggcgacgccaagaagacctgcgacgccctgcaggccaaggtgagagagagctaccagaagtag

SEQ ID NO: 91096 - DNA, 357 bp, synthetic construct
  misc_feature 1..357: note = Description of Artificial Sequence: Synthetic coding sequence
  source 1..357: mol_type = other DNA
atgagaagagccggcctgggcgagggcgtgccccccggcaactacggcaactacggctacgccaacagcggctacagcgcctgcgaggaggagaacgagagactgaccgagagcctgagaagcaaggtgaccgccatcaagagcctgagcatcgagatcggccacgaggtgaagacccagaacaagctgctggccgagatggacagccagttcgacagcaccaccggcttcctgggcaagaccatgggcaagctgaagatcctgagcagaggcagccagaccaagctgctgtgctacatgatgctgttcagcctgttcgtgttcttcatcatctactggatcatcaagctgagatag

SEQ ID NO: 91097 - DNA, 1107 bp, synthetic construct
  misc_feature 1..1107: note = Description of Artificial Sequence: Synthetic coding sequence
  source 1..1107: mol_type = other DNA
atgaaccccgccgccgaggccgagttcaacatcctgctggccaccgacagctacaaggtgacccactacaagcagtacccccccaacaccagcaaggtgtacagctacttcgagtgcagagagaagaagaccgagaacagcaagctgagaaaggtgaagtacgaggagaccgtgttctacggcctgcagtacatcctgaacaagtacctgaagggcaaggtggtgaccaaggagaagatccaggaggccaaggacgtgtacaaggagcacttccaggacgacgtgttcaacgagaagggctggaactacatcctggagaagtacgacggccacctgcccatcgagatcaaggccgtgcccgagggcttcgtgatccccagaggcaacgtgctgttcaccgtggagaacaccgaccccgagtgctactggctgaccaactggatcgagaccatcctggtgcagagctggtaccccatcaccgtggccaccaacagcagagagcagaagaagatcctggccaagtacctgctggagaccagcggcaacctggacggcctggagtacaagctgcacgacttcggctacagaggcgtgagcagccaggagaccgccggcatcggcgccagcgcccacctggtgaacttcaagggcaccgacaccgtggccggcctggccctgatcaagaagtactacggcaccaaggaccccgtgcccggctacagcgtgcccgccgccgagcacagcaccatcaccgcctggggcaaggaccacgagaaggacgccttcgagcacatcgtgacccagttcagcagcgtgcccgtgagcgtggtgagcgacagctacgacatctacaacgcctgcgagaagatctggggcgaggacctgagacacctgatcgtgagcagaagcacccaggcccccctgatcatcagacccgacagcggcaaccccctggacaccgtgctgaaggtgctggagatcctgggcaagaagttccccgtgaccgagaacagcaagggctacaagctgctgcccccctacctgagagtgatccagggcgacggcgtggacatcaacaccctgcaggaggtgtgcgtgctgtactag

SEQ ID NO: 91098 - DNA, 183 bp, synthetic construct
  misc_feature 1..183: note = Description of Artificial Sequence: Synthetic coding sequence
  source 1..183: mol_type = other DNA
atgaaccccgccgccgaggccgagttcaacatcctgctggccaccgacagctacaaggtgacccactacaagcagtacccccccaacaccagcaaggtgtacagctacttcgagtgcagagagaagaagaccgagaacagcaagctgagaaaggtgaagtacgaggagaccgtgttctactag

SEQ ID NO: 91099 - DNA, 267 bp, synthetic construct
  misc_feature 1..267: note = Description of Artificial Sequence: Synthetic coding sequence
  source 1..267: mol_type = other DNA
atgaaccccgccgccgaggccgagttcaacatcctgctggccaccgacagctacaaggtgacccactacaagcagtacccccccaacaccagcaaggtgtacagctacttcgagtgcagagagaagaagaccgagaacagcaagctgagaaaggtgaagtacgaggagaccgtgttctacggcctgcagtacatcctgaacaagtacctgaagggcaaggtggtgaccaaggagaagatccaggaggccaaggacgtgtacaagtag

SEQ ID NO: 91100 - DNA, 1701 bp, synthetic construct
  misc_feature 1..1701: note = Description of Artificial Sequence: Synthetic coding sequence
  source 1..1701: mol_type = other DNA
atggccgccgagcaggaccccgaggccagagccgccgccagacccctgctgaccgacctgtaccaggccaccatggccctgggctactggagagccggcagagccagagacgccgccgagttcgagctgttcttcagaagatgccccttcggcggcgccttcgccctggccgccggcctgagagactgcgtgagattcctgagagccttcagactgagagacgccgacgtgcagttcctggccagcgtgctgccccccgacaccgaccccgccttcttcgagcacctgagagccctggactgcagcgaggtgaccgtgagagccctgcccgagggcagcctggccttccccggcgtgcccctgctgcaggtgagcggccccctgctggtggtgcagctgctggagacccccctgctgtgcctggtgagctacgccagcctggtggccaccaacgccgccagactgagactgatcgccggccccgagaagagactgctggagatgggcctgagaagagcccagggccccgacggcggcctgaccgccagcacctacagctacctgggcggcttcgacagcagcagcaacgtgctggccggccagctgagaggcgtgcccgtggccggcaccctggcccacagcttcgtgaccagcttcagcggcagcgaggtgccccccgaccccatgctggcccccgccgccggcgagggccccggcgtggacctggccgccaaggcccaggtgtggctggagcaggtgtgcgcccacctgggcctgggcgtgcaggagccccaccccggcgagagagccgccttcgtggcctacgccctggccttccccagagccttccagggcctgctggacacctacagcgtgtggagaagcggcctgcccaacttcctggccgtggccctggccctgggcgagctgggctacagagccgtgggcgtgagactggacagcggcgacctgctgcagcaggcccaggagatcagaaaggtgttcagagccgccgccgcccagttccaggtgccctggctggagagcgtgctgatcgtggtgagcaacaacatcgacgaggaggccctggccagactggcccaggagggcagcgaggtgaacgtgatcggcatcggcaccagcgtggtgacctgcccccagcagcccagcctgggcggcgtgtacaagctggtggccgtgggcggccagcccagaatgaagctgaccgaggaccccgagaagcagaccctgcccggcagcaaggccgccttcagactgctgggcagcgacggcagccccctgatggacatgctgcagctggccgaggagcccgtgccccaggccggccaggagctgagagtgtggccccccggcgcccaggagccctgcaccgtgagacccgcccaggtggagcccctgctgagactgtgcctgcagcagggccagctgtgcgagcccctgcccagcctggccgagagcagagccctggcccagctgagcctgagcagactgagccccgagcacagaagactgagaagccccgcccagtaccaggtgggcggcggccccccctgccacagcgccctgtgcgcccccgccctgaccctgcccaccgcccccgtgctgtgcagcctgcaggtggtgctgagcgagagactgcaggccctggtgaacagcctgtgcgccggccagagcccctag

SEQ ID NO: 91101 - DNA, 1578 bp, synthetic construct
  misc_feature 1..1578: note = Description of Artificial Sequence: Synthetic coding sequence
  source 1..1578: mol_type = other DNA
atggccgccgagcaggaccccgaggccagagccgccgccagacccctgctgaccgacctgtaccaggccaccatggccctgggctactggagagccggcagagccagagacgccgccgagttcgagctgttcttcagaagatgccccttcggcggcgccttcgccctggccgccggcctgagagactgcgtgagattcctgagagccttcagactgagagacgccgacgtgcagttcctggccagcgtgctgccccccgacaccgaccccgccttcttcgagcacctgagagccctggactgcagcgaggtgaccgtgagagccctgcccgagggcagcctggccttccccggcgtgcccctgctgcaggtgagcggccccctgctggtggtgcagctgctggagacccccctgctgtgcctggtgagctacgccagcctggtggccaccaacgccgccagactgagactgatcgccggccccgagaagagactgctggagatgggcctgagaagagcccagggccccgacggcggcctgaccgccagcacctacagctacctgggcggcttcgacagcagcagcaacgtgctggccggccagctgagaggcgtgcccgtggccggcaccctggcccacagcttcgtgaccagcttcagcggcagcgaggtgccccccgaccccatgctggcccccgccgccggcgagggccccggcgtggacctggccgccaaggcccaggtgtggctggagcaggtgtgcgcccacctgggcctgggcgtgcaggagccccaccccggcgagagagccgccttcgtggcctacgccctggccttccccagagccttccagggcctgctggacacctacagcgtgtggagaagcggcctgcccaacttcctggccgtggccctggccctgggcgagctgggctacagagccgtgggcgtgagactggacagcggcgacctgctgcagcaggcccaggagatcagaaaggtgttcagagccgccgccgcccagttccaggtgccctggctggagagcgtgctgatcgtggtgagcaacaacatcgacgaggaggccctggccagactggcccaggagggcagcgaggtgaacgtgatcggcatcggcaccagcgtggtgacctgcccccagcagcccagcctgggcggcgtgtacaagctggtggccgtgggcggccagcccagaatgaagctgaccgaggaccccgagaagcagaccctgcccggcagcaaggccgccttcagactgctgggcagcgacggcagccccctgatggacatgctgcagctggccgaggagcccgtgccccaggccggccaggagctgagagtgtggccccccggcgcccaggagccctgcaccgtgagacccgcccagctgtgcgagcccctgcccagcctggccgagagcagagccctggcccagctgagcctgagcagactgagccccgagcacagaagactgagaagccccgcccagtaccaggtggtgctgagcgagagactgcaggccctggtgaacagcctgtgcgccggccagagcccctag

SEQ ID NO: 91102 - DNA, 1473 bp, synthetic construct
  misc_feature 1..1473: note = Description of Artificial Sequence: Synthetic coding sequence
  source 1..1473: mol_type = other DNA
atggccgccgagcaggaccccgaggccagagccgccgccagacccctgctgaccgacctgtaccaggccaccatggccctgggctactggagagccggcagagccagagacgccgccgagttcgagctgttcttcagaagatgccccttcggcggcgccttcgccctggccgccggcctgagagactgcgtgagattcctgagagccttcagactgagagacgccgacgtgcagttcctggccagcgtgctgccccccgacaccgaccccgccttcttcgagcacctgagagccctggactgcagcgaggtgaccgtgagagccctgcccgagggcagcctggccttccccggcgtgcccctgctgcaggtgagcggccccctgctggtggtgcagctgctggagacccccctgctgtgcctggtgagctacgccagcctggtggccaccaacgccgccagactgagactgatcgccggccccgagaagagactgctggagatgggcctgagaagagcccagggccccgacggcggcctgaccgccagcacctacagctacctgggcggcttcgacagcagcagcaacgtgctggccggccagctgagaggcgtgcccgtggccggcaccctggcccacagcttcgtgaccagcttcagcggcagcgaggtgccccccgaccccatgctggcccccgccgccggcgagggccccggcgtggacctggccgccaaggcccaggtgtggctggagcaggtgtgcgcccacctgggcctgggcgtgcaggagccccaccccggcgagagagccgccttcgtggcctacgccctggccttccccagagccttccagggcctgctggacacctacagcgtgtggagaagcggcctgcccaacttcctggccgtggccctggccctgggcgagctgggctacagagccgtgggcgtgagactggacagcggcgacctgctgcagcaggcccaggagatcagaaaggtgttcagagccgccgccgcccagttccaggtgccctggctggagagcgtgctgatcgtggtgagcaacaacatcgacgaggaggccctggccagactggcccaggagggcagcgaggtgaacgtgatcggcatcggcaccagcgtggtgacctgcccccagcagcccagcctgggcggcgtgtacaagctggtggccgtgggcggccagcccagaatgaagctgaccgaggaccccgagaagcagaccctgcccggcagcaaggccgccttcagactgctgggcagcgacggcagccccctgatggacatgctgcagctggccgaggagcccgtgccccaggccggccaggagctgagagtgtggccccccggcgcccaggagccctgcaccgtgagacccgcccaggtggagcccctgctgagactgtgcctgcagcagggccaggtggccgcccccccccccagcagctag

SEQ ID NO: 91103 - DNA, 1617 bp, synthetic construct
  misc_feature 1..1617: note = Description of Artificial Sequence: Synthetic coding sequence
  source 1..1617: mol_type = other DNA
atggccgccgagcaggaccccgaggccagagccgccgccagacccctgctgaccgacctgtaccaggccaccatggccctgggctactggagagccggcagagccagagacgccgccgagttcgagctgttcttcagaagatgccccttcggcggcgccttcgccctggccgccggcctgagagactgcgtgagattcctgagagccttcagactgagagacgccgacgtgcagttcctggccagcgtgctgccccccgacaccgaccccgccttcttcgagcacctgagagccctggactgcagcgaggtgaccgtgagagccctgcccgagggcagcctggccttccccggcgtgcccctgctgcaggtgagcggccccctgctggtggtgcagctgctggagacccccctgctgtgcctggtgagctacgccagcctggtggccaccaacgccgccagactgagactgatcgccggccccgagaagagactgctggagatgggcctgagaagagcccagggccccgacggcggcctgaccgccagcacctacagctacctgggcggcttcgacagcagcagcaacgtgctggccggccagctgagaggcgtgcccgtggccggcaccctggcccacagcttcgtgaccagcttcagcggcagcgaggtgccccccgaccccatgctggcccccgccgccggcgagggccccggcgtggacctggccgccaaggcccaggtgtggctggagcaggtgtgcgcccacctgggcctgggcgtgcaggagccccaccccggcgagagagccgccttcgtggcctacgccctggccttccccagagccttccagggcctgctggacacctacagcgtgtggagaagcggcctgcccaacttcctggccgtggccctggccctgggcgagctgggctacagagccgtgggcgtgagactggacagcggcgacctgctgcagcaggcccaggagatcagaaaggtgttcagagccgccgccgcccagttccaggtgccctggctggagagcgtgctgatcgtggtgagcaacaacatcgacgaggaggccctggccagactggcccaggagggcagcgaggtgaacgtgatcggcatcggcaccagcgtggtgacctgcccccagcagcccagcctgggcggcgtgtacaagctggtggccgtgggcggccagcccagaatgaagctgaccgaggaccccgagaagcagaccctgcccggcagcaaggccgccttcagactgctgggcagcgacggcagccccctgatggacatgctgcagctggccgaggagcccgtgccccaggccggccaggagctgagagtgtggccccccggcgcccaggagccctgcaccgtgagacccgcccaggtggagcccctgctgagactgtgcctgcagcagggccagctgtgcgagcccctgcccagcctggccgagagcagagccctggcccagctgagcctgagcagactgagccccgagcacagaagactgagaagccccgcccagtaccaggtggtgctgagcgagagactgcaggccctggtgaacagcctgtgcgccggccagagcccctag

SEQ ID NO: 91104 - DNA, 2199 bp, synthetic construct
  misc_feature 1..2199: note = Description of Artificial Sequence: Synthetic coding sequence
  source 1..2199: mol_type = other DNA
atgcccgaggagacccagacccaggaccagcccatggaggaggaggaggtggagaccttcgccttccaggccgagatcgcccagctgatgagcctgatcatcaacaccttctacagcaacaaggagatcttcctgagagagctgatcagcaacagcagcgacgccctggacaagatcagatacgagagcctgaccgaccccagcaagctggacagcggcaaggagctgcacatcaacctgatccccaacaagcaggacagaaccctgaccatcgtggacaccggcatcggcatgaccaaggccgacctgatcaacaacctgggcaccatcgccaagagcggcaccaaggccttcatggaggccctgcaggccggcgccgacatcagcatgatcggccagttcggcgtgggcttctacagcgcctacctggtggccgagaaggtgaccgtgatcaccaagcacaacgacgacgagcagtacgcctgggagagcagcgccggcggcagcttcaccgtgagaaccgacaccggcgagcccatgggcagaggcaccaaggtgatcctgcacctgaaggaggaccagaccgagtacctggaggagagaagaatcaaggagatcgtgaagaagcacagccagttcatcggctaccccatcaccctgttcgtggagaaggagagagacaaggaggtgagcgacgacgaggccgaggagaaggaggacaaggaggaggagaaggagaaggaggagaaggagagcgaggacaagcccgagatcgaggacgtgggcagcgacgaggaggaggagaagaaggacggcgacaagaagaagaagaagaagatcaaggagaagtacatcgaccaggaggagctgaacaagaccaagcccatctggaccagaaaccccgacgacatcaccaacgaggagtacggcgagttctacaagagcctgaccaacgactgggaggaccacctggccgtgaagcacttcagcgtggagggccagctggagttcagagccctgctgttcgtgcccagaagagcccccttcgacctgttcgagaacagaaagaagaagaacaacatcaagctgtacgtgagaagagtgttcatcatggacaactgcgaggagctgatccccgagtacctgaacttcatcagaggcgtggtggacagcgaggacctgcccctgaacatcagcagagagatgctgcagcagagcaagatcctgaaggtgatcagaaagaacctggtgaagaagtgcctggagctgttcaccgagctggccgaggacaaggagaactacaagaagttctacgagcagttcagcaagaacatcaagctgggcatccacgaggacagccagaacagaaagaagctgagcgagctgctgagatactacaccagcgccagcggcgacgagatggtgagcctgaaggactactgcaccagaatgaaggagaaccagaagcacatctactacatcaccggcgagaccaaggaccaggtggccaacagcgccttcgtggagagactgagaaagcacggcctggaggtgatctacatgatcgagcccatcgacgagtactgcgtgcagcagctgaaggagttcgagggcaagaccctggtgagcgtgaccaaggagggcctggagctgcccgaggacgaggaggagaagaagaagcaggaggagaagaagaccaagttcgagaacctgtgcaagatcatgaaggacatcctggagaagaaggtggagaaggtggtggtgagcaacagactggtgaccagcccctgctgcatcgtgaccagcacctacggctggaccgccaacatggagagaatcatgaaggcccaggccctgagagacaacagcaccatgggctacatggccgccaagaagcacctggagatcaaccccgaccacagcatcatcgagaccctgagacagaaggccgaggccgacaagaacgacaagagcgtgaaggacctggtgatcctgctgtacgagaccgccctgctgagcagcggcttcagcctggaggacccccagacccacgccaacagaatctacagaatgatcaagctgggcctgggcatcgacgaggacgaccccaccgccgacgacaccagcgccgccgtgaccgaggagatgccccccctggagggcgacgacgacaccagcagaatggaggaggtggactag

SEQ ID NO: 91105 - DNA, 2910 bp, synthetic construct
  misc_feature 1..2910: note = Description of Artificial Sequence: Synthetic coding sequence
  source 1..2910: mol_type = other DNA
atggagggcgacagagtggccggcagacccgtgctgagcagcctgcccgtgctgctgctgctgcccctgctgatgctgagagccgccgccctgcaccccgacgagctgttcccccacggcgagagctggggcgaccagctgctgcaggagggcgacgacgagagcagcgccgtggtgaagctggccaaccccctgcacttctacgaggccagattcagcaacctgtacgtgggcaccaacggcatcatcagcacccaggacttccccagagagacccagtacgtggactacgacttccccaccgacttccccgccatcgcccccttcctggccgacatcgacaccagccacggcagaggcagagtgctgtacagagtgaacggcaaggtgagcggccacctgcacgtgggccacacccccgtgcacttcaccgacgtggacctgcacgcctacatcgtgggcaacgacggcagagcctacaccgccatcagccacatcccccagcccgccgcccaggccctgctgcccctgacccccatcggcggcctgttcggctggctgttcgccctggagaagcccggcagcgagaacggcttcagcctggccggcgccgccttcacccacgacatggaggtgaccttctaccccggcgaggagaccgtgagaatcacccagaccgccgagggcctggaccccgagaactacctgagcatcaagaccaacatccagggccaggtgccctacgtgagcgccaacttcaccgcccacatcagcccctacaaggagctgtaccactacagcgacagcaccgtgaccagcaccagcagcagagactacagcctgaccttcggcgccatcaaccagacctggagctacagaatccaccagaacatcacctaccaggtgtgcagacacgcccccagacaccccagcttccccaccacccagcagctgaacgtggacagagtgttcgccctgtacaacgacgaggagagagtgctgagattcgccgtgaccaaccagatcggccccgtgaaggaggacagcgaccccacccccggcaacccctgctacgacggcagccacatgtgcgacaccaccgccagatgccaccccggcaccggcgtggactacacctgcgagtgcgccagcggctaccagggcgacggcagaaactgcgtggacgagaacgagtgcgccaccggcttccacagatgcggccccaacagcgtgtgcatcaacctgcccggcagctacagatgcgagtgcagaagcggctacgagttcgccgacgacagacacacctgcatcctgatcaccccccccgccaacccctgcgaggacggcagccacacctgcgcccccgccggccaggccagatgcgtgcaccacggcggcagcaccttcagctgcgcctgcctgcccggctacgccggcgacggccaccagtgcaccgacgtggacgagtgcagcgagaacagatgccaccccgccgccacctgctacaacacccccggcagcttcagctgcagatgccagcccggctactacggcgacggcttccagtgcatccccgacagcaccagcagcctgaccccctgcgagcagcagcagagacacgcccaggcccagtacgcctaccccggcgccagattccacatcccccagtgcgacgagcagggcaacttcctgcccctgcagtgccacggcagcaccggcttctgctggtgcgtggaccccgacggccacgaggtgcccggcacccagaccccccccggcagcacccccccccactgcggccccagccccgagcccacccagagaccccccaccatctgcgagagatggagagagaacctgctggagcactacggcggcacccccagagacgaccagtacgtgccccagtgcgacgacctgggccacttcatccccctgcagtgccacggcaagagcgacttctgctggtgcgtggacaaggacggcagagaggtgcagggcaccagaagccagcccggcaccacccccgcctgcatccccaccgtggccccccccatggtgagacccacccccagacccgacgtgaccccccccagcgtgggcaccttcctgctgtacacccagggccagcagatcggctacctgcccctgaacggcaccagactgcagaaggacgccgccaagaccctgctgagcctgcacggcagcatcatcgtgggcatcgactacgactgcagagagagaatggtgtactggaccgacgtggccggcagaaccatcagcagagccggcctggagctgggcgccgagcccgagaccatcgtgaacagcggcctgatcagccccgagggcctggccatcgaccacatcagaagaaccatgtactggaccgacagcgtgctggacaagatcgagagcgccctgctggacggcagcgagagaaaggtgctgttctacaccgacctggtgaaccccagagccatcgccgtggaccccatcagaggcaacctgtactggaccgactggaacagagaggcccccaagatcgagaccagcagcctggacggcgagaacagaagaatcctgatcaacaccgacatcggcctgcccaacggcctgaccttcgaccccttcagcaagctgctgtgctgggccgacgccggcaccaagaagctggagtgcaccctgcccgacggcaccggcagaagagtgatccagaacaacctgaagtaccccttcagcatcgtgagctacgccgaccacttctaccacaccgactggagaagagacggcgtggtgagcgtgaacaagcacagcggccagttcaccgacgagtacctgcccgagcagagaagccacctgtacggcatcaccgccgtgtacccctactgccccaccggcagaaagtag

SEQ ID NO: 91106 - DNA, 3543 bp, synthetic construct
  misc_feature 1..3543: note = Description of Artificial Sequence: Synthetic coding sequence
  source 1..3543: mol_type = other DNA
accccccagaccgagagaatcacccacagcagcatcagctggagcttcctgctgagattcagcagaggcaagctgctgatgctgagagccgccgccctgcaccccgacgagctgttcccccacggcgagagctggggcgaccagctgctgcaggagggcgacgacgagagcagcgccgtggtgaagctggccaaccccctgcacttctacgaggccagattcagcaacctgtacgtgggcaccaacggcatcatcagcacccaggacttccccagagagacccagtacgtggactacgacttccccaccgacttccccgccatcgcccccttcctggccgacatcgacaccagccacggcagaggcagagtgctgtacagagaggacaccagccccgccgtgctgggcctggccgccagatacgtgagagccggcttccccagaagcgccagattcacccccacccacgccttcctggccacctgggagcaggtgggcgcctacgaggaggtgaagagaggcgccctgcccagcggcgagctgaacaccttccaggccgtgctggccagcgacggcagcgacagctacgccctgttcctgtaccccgccaacggcctgcagttcctgggcaccagacccaaggagagctacaacgtgcagctgcagctgcccgccagagtgggcttctgcagaggcgaggccgacgacctgaagagcgagggcccctacttcagcctgaccagcaccgagcagagcgtgaagaacctgtaccagctgagcaacctgggcatccccggcgtgtgggccttccacatcggcagcaccagccccctggacaacgtgagacccgccgccgtgggcgacctgagcgccgcccacagcagcgtgcccctgggcagaagcttcagccacgccaccgccctggagagcgactacaacgaggacaacctggactactacgacgtgaacgaggaggaggccgagtacctgcccggcgagcccgaggaggccctgaacggccacagcagcatcgacgtgagcttccagagcaaggtggacaccaagcccctggaggagagcagcaccctggacccccacaccaaggagggcaccagcctgggcgaggtgggcggccccgacctgaagggccaggtggagccctgggacgagagagagaccagaagccccgccccccccgaggtggacagagacagcctggcccccagctgggagaccccccccccctaccccgagaacggcagcatccagccctaccccgacggcggccccgtgcccagcgagatggacgtgccccccgcccaccccgaggaggagatcgtgctgagaagctaccccgccagcggccacaccacccccctgagcagaggcacctacgaggtgggcctggaggacaacatcggcagcaacaccgaggtgttcacctacaacgccgccaacaaggagacctgcgagcacaaccacagacagtgcagcagacacgccttctgcaccgactacgccaccggcttctgctgccactgccagagcaagttctacggcaacggcaagcactgcctgcccgagggcgccccccacagagtgaacggcaaggtgagcggccacctgcacgtgggccacacccccgtgcacttcaccgacgtggacctgcacgcctacatcgtgggcaacgacggcagagcctacaccgccatcagccacatcccccagcccgccgcccaggccctgctgcccctgacccccatcggcggcctgttcggctggctgttcgccctggagaagcccggcagcgagaacggcttcagcctggccggcgccgccttcacccacgacatggaggtgaccttctaccccggcgaggagaccgtgagaatcacccagaccgccgagggcctggaccccgagaactacctgagcatcaagaccaacatccagggccaggtgccctacgtgagcgccaacttcaccgcccacatcagcccctacaaggagctgtaccactacagcgacagcaccgtgaccagcaccagcagcagagactacagcctgaccttcggcgccatcaaccagacctggagctacagaatccaccagaacatcacctaccaggtgtgcagacacgcccccagacaccccagcttccccaccacccagcagctgaacgtggacagagtgttcgccctgtacaacgacgaggagagagtgctgagattcgccgtgaccaaccagatcggccccgtgaaggaggacagcgaccccacccccggcaacccctgctacgacggcagccacatgtgcgacaccaccgccagatgccaccccggcaccggcgtggactacacctgcgagtgcgccagcggctaccagggcgacggcagaaactgcgtggacgagaacgagtgcgccaccggcttccacagatgcggccccaacagcgtgtgcatcaacctgcccggcagctacagatgcgagtgcagaagcggctacgagttcgccgacgacagacacacctgcatcctgatcaccccccccgccaacccctgcgaggacggcagccacacctgcgcccccgccggccaggccagatgcgtgcaccacggcggcagcaccttcagctgcgcctgcctgcccggctacgccggcgacggccaccagtgcaccgacgtggacgagtgcagcgagaacagatgccaccccgccgccacctgctacaacacccccggcagcttcagctgcagatgccagcccggctactacggcgacggcttccagtgcatccccgacagcaccagcagcctgaccccctgcgagcagcagcagagacacgcccaggcccagtacgcctaccccggcgccagattccacatcccccagtgcgacgagcagggcaacttcctgcccctgcagtgccacggcagcaccggcttctgctggtgcgtggaccccgacggccacgaggtgcccggcacccagaccccccccggcagcacccccccccactgcggccccagccccgagcccacccagagaccccccaccatctgcgagagatggagagagaacctgctggagcactacggcggcacccccagagacgaccagtacgtgccccagtgcgacgacctgggccacttcatccccctgcagtgccacggcaagagcgacttctgctggtgcgtggacaaggacggcagagaggtgcagggcaccagaagccagcccggcaccacccccgcctgcatccccaccgtggccccccccatggtgagacccacccccagacccgacgtgaccccccccagcgtgggcaccttcctgctgtacacccagggccagcagatcggctacctgcccctgaacggcaccagactgcagaaggacgccgccaagaccctgctgagcctgcacgtgaagtggatcagccccgtgggcggcagagccgcctggctgagccagtgggagcccccccacagaccctgctgcagcgaggtggactggtgcagagaggtgctggagggcttctag

SEQ ID NO: 91107 - DNA, 3825 bp, synthetic construct
  misc_feature 1..3825: note = Description of Artificial Sequence: Synthetic coding sequence
  source 1..3825: mol_type = other DNA
atggagggcgacagagtgaagctggccaaccccctgcacttctacgaggccagattcagcaacctgtacgtgggcaccaacggcatcatcagcacccaggacttccccagagagacccagtacgtggactacgacttccccaccgacttccccgccatcgcccccttcctggccgacatcgacaccagccacggcagaggcagagtgctgtacagagaggacaccagccccgccgtgctgggcctggccgccagatacgtgagagccggcttccccagaagcgccagattcacccccacccacgccttcctggccacctgggagcaggtgggcgcctacgaggaggtgaagagaggcgccctgcccagcggcgagctgaacaccttccaggccgtgctggccagcgacggcagcgacagctacgccctgttcctgtaccccgccaacggcctgcagttcctgggcaccagacccaaggagagctacaacgtgcagctgcagctgcccgccagagtgggcttctgcagaggcgaggccgacgacctgaagagcgagggcccctacttcagcctgaccagcaccgagcagagcgtgaagaacctgtaccagctgagcaacctgggcatccccggcgtgtgggccttccacatcggcagcaccagccccctggacaacgtgagacccgccgccgtgggcgacctgagcgccgcccacagcagcgtgcccctgggcagaagcttcagccacgccaccgccctggagagcgactacaacgaggacaacctggactactacgacgtgaacgaggaggaggccgagtacctgcccggcgagcccgaggaggccctgaacggccacagcagcatcgacgtgagcttccagagcaaggtggacaccaagcccctggaggagagcagcaccctggacccccacaccaaggagggcaccagcctgggcgaggtgggcggccccgacctgaagggccaggtggagccctgggacgagagagagaccagaagccccgccccccccgaggtggacagagacagcctggcccccagctgggagaccccccccccctaccccgagaacggcagcatccagccctaccccgacggcggccccgtgcccagcgagatggacgtgccccccgcccaccccgaggaggagatcgtgctgagaagctaccccgccagcggccacaccacccccctgagcagaggcacctacgaggtgggcctggaggacaacatcggcagcaacaccgaggtgttcacctacaacgccgccaacaaggagacctgcgagcacaaccacagacagtgcagcagacacgccttctgcaccgactacgccaccggcttctgctgccactgccagagcaagttctacggcaacggcaagcactgcctgcccgagggcgccccccacagagtgaacggcaaggtgagcggccacctgcacgtgggccacacccccgtgcacttcaccgacgtggacctgcacgcctacatcgtgggcaacgacggcagagcctacaccgccatcagccacatcccccagcccgccgcccaggccctgctgcccctgacccccatcggcggcctgttcggctggctgttcgccctggagaagcccggcagcgagaacggcttcagcctggccggcgccgccttcacccacgacatggaggtgaccttctaccccggcgaggagaccgtgagaatcacccagaccgccgagggcctggaccccgagaactacctgagcatcaagaccaacatccagggccaggtgccctacgtgagcgccaacttcaccgcccacatcagcccctacaaggagctgtaccactacagcgacagcaccgtgaccagcaccagcagcagagactacagcctgaccttcggcgccatcaaccagacctggagctacagaatccaccagaacatcacctaccaggtgtgcagacacgcccccagacaccccagcttccccaccacccagcagctgaacgtggacagagtgttcgccctgtacaacgacgaggagagagtgctgagattcgccgtgaccaaccagatcggccccgtgaaggaggacagcgaccccacccccggcaacccctgctacgacggcagccacatgtgcgacaccaccgccagatgccaccccggcaccggcgtggactacacctgcgagtgcgccagcggctaccagggcgacggcagaaactgcgtggacgagaacgagtgcgccaccggcttccacagatgcggccccaacagcgtgtgcatcaacctgcccggcagctacagatgcgagtgcagaagcggctacgagttcgccgacgacagacacacctgcatctacgtggacgagtgcagcgagaacagatgccaccccgccgccacctgctacaacacccccggcagcttcagctgcagatgccagcccggctactacggcgacggcttccagtgcatccccgacagcaccagcagcctgaccccctgcgagcagcagcagagacacgcccaggcccagtacgcctaccccggcgccagattccacatcccccagtgcgacgagcagggcaacttcctgcccctgcagtgccacggcagcaccggcttctgctggtgcgtggaccccgacggccacgaggtgcccggcacccagaccccccccggcagcacccccccccactgcggccccagccccgagcccacccagagaccccccaccatctgcgagagatggagagagaacctgctggagcactacggcggcacccccagagacgaccagtacgtgccccagtgcgacgacctgggccacttcatccccctgcagtgccacggcaagagcgacttctgctggtgcgtggacaaggacggcagagaggtgcagggcaccagaagccagcccggcaccacccccgcctgcatccccaccgtggccccccccatggtgagacccacccccagacccgacgtgaccccccccagcgtgggcaccttcctgctgtacacccagggccagcagatcggctacctgcccctgaacggcaccagactgcagaaggacgccgccaagaccctgctgagcctgcacggcagcatcatcgtgggcatcgactacgactgcagagagagaatggtgtactggaccgacgtggccggcagaaccatcagcagagccggcctggagctgggcgccgagcccgagaccatcgtgaacagcggcctgatcagccccgagggcctggccatcgaccacatcagaagaaccatgtactggaccgacagcgtgctggacaagatcgagagcgccctgctggacggcagcgagagaaaggtgctgttctacaccgacctggtgaaccccagagccatcgccgtggaccccatcagaggcaacctgtactggaccgactggaacagagaggcccccaagatcgagaccagcagcctggacggcgagaacagaagaatcctgatcaacaccgacatcggcctgcccaacggcctgaccttcgaccccttcagcaagctgctgtgctgggccgacgccggcaccaagaagctggagtgcaccctgcccgacggcaccggcagaagagtgatccagaacaacctgaagtaccccttcagcatcgtgagctacgccgaccacttctaccacaccgactggagaagagacggcgtggtgagcgtgaacaagcacagcggccagttcaccgacgagtacctgcccgagcagagaagccacctgtacggcatcaccgccgtgtacccctactgccccaccggcagaaagtag

SEQ ID NO: 91108 - DNA, 3837 bp, synthetic construct
  misc_feature 1..3837: note = Description of Artificial Sequence: Synthetic coding sequence
  source 1..3837: mol_type = other DNA
atgaccgccagaggcctggccctgggcctgctgctgctgctgctgtgccccgcccaggtgttcagccagagctgcgtgtggtacggcgagtgcggcatcgcctacggcgacaagagatacaactgcgagtacagcggcccccccaagcccctgcccaaggacggctacgacctggtgcaggagctgtgccccggcttcttcttcggcaacgtgagcctgtgctgcgacgtgagacagctgcagaccctgaaggacaacctgcagctgcccctgcagttcctgagcagatgccccagctgcttctacaacctgctgaacctgttctgcgagctgacctgcagccccagacagagccagttcctgaacgtgaccgccaccgaggactacgtggaccccgtgaccaaccagaccaagaccaacgtgaaggagctgcagtactacgtgggccagagcttcgccaacgccatgtacaacgcctgcagagacgtggaggcccccagcagcaacgacaaggccctgggcctgctgtgcggcaaggacgccgacgcctgcaacgccaccaactggatcgagtacatgttcaacaaggacaacggccaggcccccttcaccatcacccccgtgttcagcgacttccccgtgcacggcatggagcccatgaacaacgccaccaagggctgcgacgagagcgtggacgaggtgaccgccccctgcagctgccaggactgcagcatcgtgtgcggccccaagccccagcccccccccccccccgccccctggaccatcctgggcctggacgccatgtacgtgatcatgtggatcacctacatggccttcctgctggtgttcttcggcgccttcttcgccgtgtggtgctacagaaagagatacttcgtgagcgagtacacccccatcgacagcaacatcgccttcagcgtgaacgccagcgacaagggcgaggccagctgctgcgaccccgtgagcgccgccttcgagggctgcctgagaagactgttcaccagatggggcagcttctgcgtgagaaaccccggctgcgtgatcttcttcagcctggtgttcatcaccgcctgcagcagcggcctggtgttcgtgagagtgaccaccaaccccgtggacctgtggagcgcccccagcagccaggccagactggagaaggagtacttcgaccagcacttcggccccttcttcagaaccgagcagctgatcatcagagcccccctgaccgacaagcacatctaccagccctaccccagcggcgccgacgtgcccttcggcccccccctggacatccagatcctgcaccaggtgctggacctgcagatcgccatcgagaacatcaccgccagctacgacaacgagaccgtgaccctgcaggacatctgcctggcccccctgagcccctacaacaccaactgcaccatcctgagcgtgctgaactacttccagaacagccacagcgtgctggaccacaagaagggcgacgacttcttcgtgtacgccgactaccacacccacttcctgtactgcgtgagagcccccgccagcctgaacgacaccagcctgctgcacgacccctgcctgggcaccttcggcggccccgtgttcccctggctggtgctgggcggctacgacgaccagaactacaacaacgccaccgccctggtgatcaccttccccgtgaacaactactacaacgacaccgagaagctgcagagagcccaggcctgggagaaggagttcatcaacttcgtgaagaactacaagaaccccaacctgaccatcagcttcaccgccgagagaagcatcgaggacgagctgaacagagagagcgacagcgacgtgttcaccgtggtgatcagctacgccatcatgttcctgtacatcagcctggccctgggccacatgaagagctgcagaagactgctggtggacagcaaggtgagcctgggcatcgccggcatcctgatcgtgctgagcagcgtggcctgcagcctgggcgtgttcagctacatcggcctgcccctgaccctgatcgtgatcgaggtgatccccttcctggtgctggccgtgggcgtggacaacatcttcatcctggtgcaggcctaccagagagacgagagactgcagggcgagaccctggaccagcagctgggcagagtgctgggcgaggtggcccccagcatgttcctgagcagcttcagcgagaccgtggccttcttcctgggcgccctgagcgtgatgcccgccgtgcacaccttcagcctgttcgccggcctggccgtgttcatcgacttcctgctgcagatcacctgcttcgtgagcctgctgggcctggacatcaagagacaggagaagaacagactggacatcttctgctgcgtgagaggcgccgaggacggcaccagcgtgcaggccagcgagagctgcctgttcagattcttcaagaacagctacagccccctgctgctgaaggactggatgagacccatcgtgatcgccatcttcgtgggcgtgctgagcttcagcatcgccgtgctgaacaaggtggacatcggcctggaccagagcctgagcatgcccgacgacagctacatggtggactacttcaagagcatcagccagtacctgcacgccggcccccccgtgtacttcgtgctggaggagggccacgactacaccagcagcaagggccagaacatggtgtgcggcggcatgggctgcaacaacgacagcctggtgcagcagatcttcaacgccgcccagctggacaactacaccagaatcggcttcgcccccagcagctggatcgacgactacttcgactgggtgaagccccagagcagctgctgcagagtggacaacatcaccgaccagttctgcaacgccagcgtggtggaccccgcctgcgtgagatgcagacccctgacccccgagggcaagcagagaccccagggcggcgacttcatgagattcctgcccatgttcctgagcgacaaccccaaccccaagtgcggcaagggcggccacgccgcctacagcagcgccgtgaacatcctgctgggccacggcaccagagtgggcgccacctacttcatgacctaccacaccgtgctgcagaccagcgccgacttcatcgacgccctgaagaaggccagactgatcgccagcaacgtgaccgagaccatgggcatcaacggcagcgcctacagagtgttcccctacagcgtgttctacgtgttctacgagcagtacctgaccatcatcgacgacaccatcttcaacctgggcgtgagcctgggcgccatcttcctggtgaccatggtgctgctgggctgcgagctgtggagcgccgtgatcatgtgcgccaccatcgccatggtgctggtgaacatgttcggcgtgatgtggctgtggggcatcagcctgaacgccgtgagcctggtgaacctggtgatgagctgcggcatcagcgtggagttctgcagccacatcaccagagccttcaccgtgagcatgaagggcagcagagtggagagagccgaggaggccctggcccacatgggcagcagcgtgttcagcggcatcaccctgaccaagttcggcggcatcgtggtgctggccttcgccaagagccagatcttccagatcttctacttcagaatgtacctggccatggtgctgctgggcgccacccacggcctgatcttcctgcccgtgctgctgagctacatcggccccagcgtgaacaaggccaagagctgcgccaccgaggagagatacaagggcaccgagagagagagactgctgaacttctag

SEQ ID NO: 91109 - DNA, 2883 bp, synthetic construct
  misc_feature 1..2883: note = Description of Artificial Sequence: Synthetic coding sequence
  source 1..2883: mol_type = other DNA
atgtacgtgatcatgtggatcacctacatggccttcctgctggtgttcttcggcgccttcttcgccgtgtggtgctacagaaagagatacttcgtgagcgagtacacccccatcgacagcaacatcgccttcagcgtgaacgccagcgacaagggcaccgcctggctgctgaccagcaccttccccagcagccccgtgctgcccggcgaggccagctgctgcgaccccgtgagcgccgccttcgagggctgcctgagaagactgttcaccagatggggcagcttctgcgtgagaaaccccggctgcgtgatcttcttcagcctggtgttcatcaccgcctgcagcagcggcctggtgttcgtgagagtgaccaccaaccccgtggacctgtggagcgcccccagcagccaggccagactggagaaggagtacttcgaccagcacttcggccccttcttcagaaccgagcagctgatcatcagagcccccctgaccgacaagcacatctaccagccctaccccagcggcgccgacgtgcccttcggcccccccctggacatccagatcctgcaccaggtgctggacctgcagatcgccatcgagaacatcaccgccagctacgacaacgagaccgtgaccctgcaggacatctgcctggcccccctgagcccctacaacaccaactgcaccatcctgagcgtgctgaactacttccagaacagccacagcgtgctggaccacaagaagggcgacgacttcttcgtgtacgccgactaccacacccacttcctgtactgcgtgagattcatcaacttcgtgaagaactacaagaaccccaacctgaccatcagcttcaccgccgagagaagcatcgaggacgagctgaacagagagagcgacagcgacgtgttcaccgtggtgatcagctacgccatcatgttcctgtacatcagcctggccctgggccacatgaagagctgcagaagactgctggtggacagcaaggtgagcctgggcatcgccggcatcctgatcgtgctgagcagcgtggcctgcagcctgggcgtgttcagctacatcggcctgcccctgaccctgatcgtgatcgaggtgatccccttcctggtgctggccgtgggcgtggacaacatcttcatcctggtgcaggcctaccagagagacgagagactgcagggcgagaccctggaccagcagctgggcagagtgctgggcgaggtggcccccagcatgttcctgagcagcttcagcgagaccgtggccttcttcctgggcgccctgagcgtgatgcccgccgtgcacaccttcagcctgttcgccggcctggccgtgttcatcgacttcctgctgcagatcacctgcttcgtgagcctgctgggcctggacatcaagagacaggagaagaacagactggacatcttctgctgcgtgagaggcgccgaggacggcaccagcgtgcaggccagcgagagctgcctgttcagattcttcaagaacagctacagccccctgctgctgaaggactggatgagacccatcgtgatcgccatcttcgtgggcgtgctgagcttcagcatcgccgtgctgaacaaggtggacatcggcctggaccagagcctgagcatgcccgacgacagctacatggtggactacttcaagagcatcagccagtacctgcacgccggcccccccgtgtacttcgtgctggaggagggccacgactacaccagcagcaagggccagaacatggtgtgcggcggcatgggctgcaacaacgacagcctggtgcagcagatcttcaacgccgcccagctggacaactacaccagaatcggcttcgcccccagcagctggatcgacgactacttcgactgggtgaagccccagagcagctgctgcagagtggacaacatcaccgaccagttctgcaacgccagcgtggtggaccccgcctgcgtgagatgcagacccctgacccccgagggcaagcagagaccccagggcggcgacttcatgagattcctgcccatgttcctgagcgacaaccccaaccccaagtgcggcaagggcggccacgccgcctacagcagcgccgtgaacatcctgctgggccacggcaccagagtgggcgccacctacttcatgacctaccacaccgtgctgcagaccagcgccgacttcatcgacgccctgaagaaggccagactgatcgccagcaacgtgaccgagaccatgggcatcaacggcagcgcctacagagtgttcccctacagcgtgttctacgtgttctacgagcagtacctgaccatcatcgacgacaccatcttcaacctgggcgtgagcctgggcgccatcttcctggtgaccatggtgctgctgggctgcgagctgtggagcgccgtgatcatgtgcgccaccatcgccatggtgctggtgaacatgttcggcgtgatgtggctgtggggcatcagcctgaacgccgtgagcctggtgaacctggtgatgagctgcggcatcagcgtggagttctgcagccacatcaccagagccttcaccgtgagcatgaagggcagcagagtggagagagccgaggaggccctggcccacatgggcagcagcgtgttcagcggcatcaccctgaccaagttcggcggcatcgtggtgctggccttcgccaagagccagatcttccagatcttctacttcagaatgtacctggccatggtgctgctgggcgccacccacggcctgatcttcctgcccgtgctgctgagctacatcggccccagcgtgaacaaggccaagagctgcgccaccgaggagagatacaagggcaccgagagagagagactgctgaacttctag

SEQ ID NO: 91110 - DNA, 2331 bp, synthetic construct
  misc_feature 1..2331: note = Description of Artificial Sequence: Synthetic coding sequence
  source 1..2331: mol_type = other DNA
atgtacaacgcctgcagagacgtggaggcccccagcagcaacgacaaggccctgggcctgctgtgcggcaaggacgccgacgcctgcaacgccaccaactggatcgagtacatgttcaacaaggacaacggccaggcccccttcaccatcacccccgtgttcagcgacttccccgtgcacggcatggagcccatgaacaacgccaccaagggctgcgacgagagcgtggacgaggtgaccgccccctgcagctgccaggactgcagcatcgtgtgcggccccaagccccagcccccccccccccccgccccctggaccatcctgggcctggacgccatgtacgtgatcatgtggatcacctacatggccttcctgctggtgttcttcggcgccttcttcgccgtgtggtgctacagaaagagatacttcgtgagcgagtacacccccatcgacagcaacatcgccttcagcgtgaacgccagcgacaagggcgaggccagctgctgcgaccccgtgagcgccgccttcgagggctgcctgagaagactgttcaccagatggggcagcttctgcgtgagaaaccccggctgcgtgatcttcttcagcctggtgttcatcaccgcctgcagcagcggcctggtgttcgtgagagtgaccaccaaccccgtggacctgtggagcgcccccagcagccaggccagactggagaaggagtacttcgaccagcacttcggccccttcttcagaaccgagcagctgatcatcagagcccccctgaccgacaagcacatctaccagccctaccccagcggcgccgacgtgcccttcggcccccccctggacatccagatcctgcaccaggtgctggacctgcagatcgccatcgagaacatcaccgccagctacgacaacgagaccgtgaccctgcaggacatctgcctggcccccctgagcccctacaacaccaactgcaccatcctgagcgtgctgaactacttccagaacagccacagcgtgctggaccacaagaagggcgacgacttcttcgtgtacgccgactaccacacccacttcctgtactgcgtgagagcccccgccagcctgaacgacaccagcctgctgcacgacccctgcctgggcaccttcggcggccccgtgttcccctggctggtgctgggcggctacgacgaccagaactacaacaacgccaccgccctggtgatcaccttccccgtgaacaactactacaacgacaccgagaagctgcagagagcccaggcctgggagaaggagttcatcaacttcgtgaagaactacaagaaccccaacctgaccatcagcttcaccgccgagagaagcatcgaggacgagctgaacagagagagcgacagcgacgtgttcaccgtggtgatcagctacgccatcatgttcctgtacatcagcctggccctgggccacatgaagagctgcagaagactgctggtggacagcaaggtgagcctgggcatcgccggcatcctgatcgtgctgagcagcgtggcctgcagcctgggcgtgttcagctacatcggcctgcccctgaccctgatcgtgatcgaggtgatccccttcctggtgctggccgtgggcgtggacaacatcttcatcctggtgcaggcctaccagagagacgagagactgcagggcgagaccctggaccagcagctgggcagagtgctgggcgaggtggcccccagcatgttcctgagcagcttcagcgagaccgtggccttcttcctgggcgccctgagcgtgatgcccgccgtgcacaccttcagcctgttcgccggcctggccgtgttcatcgacttcctgctgcagatcacctgcttcgtgagcctgctgggcctggacatcaagagacaggagaagaacagactggacatcttctgctgcgtgagaggcgccgaggacggcaccagcgtgcaggccagcgagagctgcctgttcagattcttcaagaacagctacagccccctgctgctgaaggactggatgagacccatcgtgatcgccatcttcgtgggcgtgctgagcttcagcatcgccgtgctgaacaaggtggacatcggcctggaccagagcctgagcatgcccgacgacagctacatggtggactacttcaagagcatcagccagtacctgcacgccggcccccccgtgtacttcgtgctggaggagggccacgactacaccagcagcaagggccagaacatggtgtgcggcggcatgggctgcaacaacgacagcctggtgcagcagatcttcaacgccgcccagctggacaactag

SEQ ID NO: 91111 - DNA, 369 bp, synthetic construct
  misc_feature 1..369: note = Description of Artificial Sequence: Synthetic coding sequence
  source 1..369: mol_type = other DNA
atgagattcctggccgccaccttcctgctgctggccctgagcaccgccgcccaggccgagcccgtgcagttcaaggactgcggcagcgtggacggcgtgatcaaggaggtgaacgtgagcccctgccccacccagccctgccagctgagcaagggccagagctacagcgtgaacgtgaccttcaccagcaacatccagagcaagagcagcaaggccgtggtgcacggcatcctgatgggcgtgcccgtgcccttccccatccccgagcccgacggctgcaagagcggcatcaactgccccatccagaaggacaagacctacagctacctgaacaagctgcccgtgaagagcgagtaccccagcgtgtag

SEQ ID NO: 91112 - DNA, 456 bp, synthetic construct
  misc_feature 1..456: note = Description of Artificial Sequence: Synthetic coding sequence
  source 1..456: mol_type = other DNA
atgagattcctggccgccaccttcctgctgctggccctgagcaccgccgcccaggccgagcccgtgcagttcaaggactgcggcagcgtggacggcgtgatcaaggaggtgaacgtgagcccctgccccacccagccctgccagctgagcaagggccagagctacagcgtgaacgtgaccttcaccagcaacatccagagcaagagcagcaaggccgtggtgcacggcatcctgatgggcgtgcccgtgcccttccccatccccgagcccgacggctgcaagagcggcatcaactgccccatccagaaggacaagacctacagctacctgaacaagctgcccgtgaagagcgagtaccccagcatcaagctggtggtggagtggcagctgcaggacgacaagaaccagagcctgttctgctgggagatccccgtgcagatcgtgagccacctgtag

SEQ ID NO: 91113 - DNA, 1053 bp, synthetic construct
  misc_feature 1..1053: note = Description of Artificial Sequence: Synthetic coding sequence
  source 1..1053: mol_type = other DNA
atggacctgaaggccctgctgagcagcctgaacgacttcgccagcctgagcttcgccgagagctgggacaacgtgggcctgctggtggagcccagccccccccacaccgtgaacaccctgttcctgaccaacgacctgaccgaggaggtgatggaggaggtgctgcagaagaaggccgacctgatcctgagctaccacccccccatcttcagacccatgaagagaatcacctggaacacctggaaggagagactggtgatcagagccctggagaacagagtgggcatctacagcccccacaccgcctacgacgccgccccccagggcgtgaacaactggctggccaagggcctgggcgcctgcaccagcagacccatccaccccagcaaggcccccaactaccccaccgagggcaaccacagagtggagttcaacgtgaactacacccaggacctggacaaggtgatgagcgccgtgaagggcatcgacggcgtgagcgtgaccagcttcagcgccagaaccggcaacgaggagcagaccagaatcaacctgaactgcacccagaaggccctgatgcaggtggtggacttcctgagcagaaacaagcagctgtaccagaagaccgagatcctgagcctggagaagcccctgctgctgcacaccggcatgggcagactgtgcaccctggacgagagcgtgagcctggccaccatgatcgacagaatcaagagacacctgaagctgagccacatcagactggccctgggcgtgggcagaaccctggagagccaggtgaaggtggtggccctgtgcgccggcagcggcagcagcgtgctgcagggcgtggaggccgacctgtacctgaccggcgagatgagccaccacgacaccctggacgccgccagccagggcatcaacgtgatcctgtgcgagcacagcaacaccgagagaggcttcctgagcgacctgagagacatgctggacagccacctggagaacaagatcaacatcatcctgagcgagaccgacagagaccccctgcaggtggtgtag

SEQ ID NO: 91114 - DNA, 759 bp, synthetic construct
  misc_feature 1..759: note = Description of Artificial Sequence: Synthetic coding sequence
  source 1..759: mol_type = other DNA
atgctgagcagctgcgtgagacccgtgcccaccaccgtgagattcgtggacagcctgatctgcaacagcagcagaagcttcatggacctgaaggccctgctgagcagcctgaacgacttcgccagcctgagcttcgccgagagctgggacaacgtgggcctgctggtggagcccagccccccccacaccgtgaacaccctgttcctgaccaacgacctgaccgaggaggtgatggaggaggtgctgcagaagaaggccgacctgatcctgagctaccacccccccatcttcagacccatgaagagaatcacctggaacacctggaaggagagactggtgatcagagccctggagaacagagtgggcatctacagcccccacaccgcctacgacgccgccccccagggcgtgaacaactggctggccaagggcctgggcgcctgcaccagcagacccatccaccccagcaaggcccccaactaccccaccgagggcaaccacagagtggagttcaacgtgaactacacccaggacctggacaaggtgatgagcgccgtgaagggcatcgacggcgtgagcgtgaccagcttcagcgccagaaccggcaacgaggagcagaccagaatcaacctgaactgcacccagaaggccctgatgcaggtggtggacttcctgagcagaaacaagcagctgtaccagaagcaccaggacaacaccttctacaagagcgccggctgccagctgaagttcgtgacctag

SEQ ID NO: 91115 - DNA, 1134 bp, synthetic construct
  misc_feature 1..1134: note = Description of Artificial Sequence: Synthetic coding sequence
  source 1..1134: mol_type = other DNA
atgctgagcagctgcgtgagacccgtgcccaccaccgtgagattcgtggacagcctgatctgcaacagcagcagaagcttcatggacctgaaggccctgctgagcagcctgaacgacttcgccagcctgagcttcgccgagagctgggacaacgtgggcctgctggtggagcccagccccccccacaccgtgaacaccctgttcctgaccaacgacctgaccgaggaggtgatggaggaggtgctgcagaagaaggccgacctgatcctgagctaccacccccccatcttcagacccatgaagagaatcacctggaacacctggaaggagagactggtgatcagagccctggagaacagagtgggcatctacagcccccacaccgcctacgacgccgccccccagggcgtgaacaactggctggccaagggcctgggcgcctgcaccagcagacccatccaccccagcaaggcccccaactaccccaccgagggcaaccacagagtggagttcaacgtgaactacacccaggacctggacaaggtgatgagcgccgtgaagggcatcgacggcgtgagcgtgaccagcttcagcgccagaaccggcaacgaggagcagaccagaatcaacctgaactgcacccagaaggccctgatgcaggtggtggacttcctgagcagaaacaagcagctgtaccagaagaccgagatcctgagcctggagaagcccctgctgctgcacaccggcatgggcagactgtgcaccctggacgagagcgtgagcctggccaccatgatcgacagaatcaagagacacctgaagctgagccacatcagactggccctgggcgtgggcagaaccctggagagccaggtgaaggtggtggccctgtgcgccggcagcggcagcagcgtgctgcagggcgtggaggccgacctgtacctgaccggcgagatgagccaccacgacaccctggacgccgccagccagggcatcaacgtgatcctgtgcgagcacagcaacaccgagagaggcttcctgagcgacctgagagacatgctggacagccacctggagaacaagatcaacatcatcctgagcgagaccgacagagaccccctgcaggtggtgtag

SEQ ID NO: 91116 - DNA, 489 bp, synthetic construct
  misc_feature 1..489: note = Description of Artificial Sequence: Synthetic coding sequence
  source 1..489: mol_type = other DNA
atggacctgaaggccctgctgagcagcctgaacgacttcgccagcctgagcttcgccgagagctgggacaacgtgggcctgctggtggagcccagccccccccacaccgtgaacaccctgttcctgaccaacgacctgaccgaggaggtgatggaggaggtgctgcagaagaaggccgacctgatcctgagctaccacccccccatcttcagacccatgaagagaatcacctggaacacctggaaggagagactggtgatcagagccctggagaacagagtgggcatctacagcccccacaccgcctacgacgccgccccccagggcgtgaacaactggctggccaagggcctgggcgcctgcaccagcagacccatccaccccagcaaggcccccaactaccccaccgagggcaaccacagagtggagttcaacgtgaactacacccaggacctggacaaggtgatgagcgccgtgaagggcatctag

SEQ ID NO: 91117 - DNA, 1134 bp, synthetic construct; identical to SEQ ID NO: 91115
  misc_feature 1..1134: note = Description of Artificial Sequence: Synthetic coding sequence
  source 1..1134: mol_type = other DNA

SEQ ID NO: 91118 - DNA, 858 bp, synthetic construct
  misc_feature 1..858: note = Description of Artificial Sequence: Synthetic coding sequence
  source 1..858: mol_type = other DNA
atgctgagcagctgcgtgagacccgtgcccaccaccgtgagattcgtggacagcctgatctgcaacagcagcagaagcttcatggacctgaaggccctgctgagcagcctgaacgacttcgccagcctgagcttcgccgagagctgggacaacgtgggcctgctggtggagcccagccccccccacaccgtgaacaccctgttcctgaccaacgacctgaccgaggaggtgatggaggaggtgctgcagaagaaggccgacctgatcctgagctaccacccccccatcttcagacccatgaagagaatcacctggaacacctggaaggagagactggtgatcagagccctggagaacagagtgggcatctacagcccccacaccgcctacgacgccgccccccagggcgtgaacaactggctggccaagggcctgggcgcctgcaccagcagacccatccaccccagcaaggcccccaactaccccaccgagggcaaccacagagtggagttcaacgtgaactacacccaggacctggacaaggtgatgagcgccgtgaagggcatcgacggcgtgagcgtgaccagcttcagcgccagaaccggcaacgaggagcagaccagaatcaacctgaactgcacccagaaggccctgatgcaggtggtggacttcctgagcagaaacaagcagctgtaccagaagaccgagatcctgagcctggagaagagcctgaagagcaagagctggccctgcgtgctggtgctgggcgccgccttctgcagagtgctgagactgaccttcaccagccaggtgagatgccccatcatgatcctgtggatgctgctgcccaaggagtag

SEQ ID NO: 91119 - DNA, 1134 bp, synthetic construct; identical to SEQ ID NO: 91115
  misc_feature 1..1134: note = Description of Artificial Sequence: Synthetic coding sequence
  source 1..1134: mol_type = other DNA

SEQ ID NO: 91120 - DNA, 630 bp, synthetic construct
  misc_feature 1..630: note = Description of Artificial Sequence: Synthetic coding sequence
  source 1..630: mol_type = other DNA
atggacctgaaggccctgctgagcagcctgaacgacttcgccagcctgagcttcgccgagagctgggacaacgtgggcctgctggtggagcccagccccccccacaccgtgaacaccctgttcctgaccaacgacctgaccgaggaggtgatggaggaggtgctgcagaagaaggccgacctgatcctgagctaccacccccccatcttcagacccatgaagagaatcacctggaacacctggaaggagagactggtgatcagagccctggagaacagagtgggcatctacagcccccacaccgcctacgacgccgccccccagggcgtgaacaactggctggccaagggcctgggcgcctgcaccagcagacccatccaccccagcaaggcccccaactaccccaccgagggcaaccacagagtggagttcaacgtgaactacacccaggacctggacaaggtgatgagcgccgtgaagggcatcgacggcgtgagcgtgaccagcttcagcgccagaaccggcaacgaggagcagaccagaatcaacctgaactgcacccagaaggccctgatgcaggtggtggacttcctgagcagaaacaagcagctgtaccagaagaccgagtag

SEQ ID NO: 91121 - DNA, 492 bp, synthetic construct
  misc_feature 1..492: note = Description of Artificial Sequence: Synthetic coding sequence
  source 1..492: mol_type = other DNA
atgctgagcagctgcgtgagacccgtgcccaccaccgtgagattcgtggacagcctgatctgcaacagcagcagaagcttcatggacctgaaggccctgctgagcagcctgaacgacttcgccagcctgagcttcgccgagagctgggacaacgtgggcctgctggtggagcccagccccccccacaccgtgaacaccctgttcctgaccaacgacctgaccgaggaggtgatggaggaggtgctgcagaagaaggccgacctgatcctgagctaccacccccccatcttcagacccatgaagagaatcacctggaacacctggaaggagagactggtgatcagagccctggagaacagagtgggcatctacagcccccacaccgcctacgacgccgccccccagggcgtgaacaactggctggccaagggcctgggcgcctgcaccagcagacccatccaccccagcaaggcccccaactaccccacctag

SEQ ID NO: 91122 - DNA, 4749 bp, synthetic construct
  misc_feature 1..4749: note = Description of Artificial Sequence: Synthetic coding sequence
  source 1..4749: mol_type = other DNA
atggccggccccggcggctggagagacagagaggtgaccgacctgggccacctgcccgaccccaccggcatcttcagcctggacaagaccatcggcctgggcacctacggcagaatctacctgggcctgcacgagaagaccggcgccttcaccgccgtgaaggtgatgaacgccagaaagacccccctgcccgagatcggcagaagagtgagagtgaacaagtaccagaagagcgtgggctggagatacagcgacgaggaggaggacctgagaaccgagctgaacctgctgagaaagtacagcttccacaagaacatcgtgagcttctacggcgccttcttcaagctgagcccccccggccagagacaccagctgtggatggtgatggagctgtgcgccgccggcagcgtgaccgacgtggtgagaatgaccagcaaccagagcctgaaggaggactggatcgcctacatctgcagagagatcctgcagggcctggcccacctgcacgcccacagagtgatccacagagacatcaagggccagaacgtgctgctgacccacaacgccgaggtgaagctggtggacttcggcgtgagcgcccaggtgagcagaaccaacggcagaagaaacagcttcatcggcaccccctactggatggcccccgaggtgatcgactgcgacgaggaccccagaagaagctacgactacagaagcgacgtgtggagcgtgggcatcaccgccatcgagatggccgagggcgccccccccctgtgcaacctgcagcccctggaggccctgttcgtgatcctgagagagagcgcccccaccgtgaagagcagcggctggagcagaaagttccacaacttcatggagaagtgcaccatcaagaacttcctgttcagacccaccagcgccaacatgctgcagcaccccttcgtgagagacatcaagaacgagagacacgtggtggagagcctgaccagacacctgaccggcatcatcaagaagagacagaagaagggcatccccctgatcttcgagagagaggaggccatcaaggagcagtacaccgtgagaagattcagaggccccagctgcacccacgagctgctgagactgcccaccagcagcagatgcagacccctgagagtgctgcacggcgagcccagccagcccagatggctgcccgacagagaggagccccaggtgcaggccctgcagcagctgcagggcgccgccagagtgttcatgcccctgcaggccctggacagcgcccccaagcccctgaagggccaggcccaggccccccagagactgcagggcgccgccagagtgttcatgcccctgcaggcccaggtgaaggccaaggccagcaagcccctgcagatgcagatcaaggccccccccagactgagaagagccgccagagtgctgatgcccctgcaggcccaggtgagagcccccagactgctgcaggtgcagagccaggtgagcaagaagcagcaggcccagacccagaccagcgagccccaggacctggaccaggtgcccgaggagttccagggccaggaccaggtgcccgagcagcagagacagggccaggcccccgagcagcagcagagacacaaccaggtgcccgagcaggagctggagcagaaccaggcccccgagcagcccgaggtgcaggagcaggccgccgagcccgcccaggccgagaccgaggccgaggagcccgagagcctgagagtgaacgcccaggtgttcctgcccctgctgagccaggaccaccacgtgctgctgcccctgcacctggacacccaggtgctgatccccgtggagggccagaccgagggcagcccccaggcccaggcctggaccctggagcccccccaggccatcggcagcgtgcaggccctgatcgagggcctgagcagagacctgctgagagcccccaacagcaacaacagcaagcccctgggccccctgcagaccctgatggagaacctgagcagcaacagattctacagccagcccgagcaggccagagagaagaagagcaaggtgagcaccctgagacaggccctggccaagagactgagccccaagagattcagagccaagagcagctggagacccgagaagctggagctgagcgacctggaggccagaagacagagaagacagagaagatgggaggacatcttcaaccagcacgaggaggagctgagacaggtggacaaggacaaggaggacgagagcagcgacaacgacgaggtgttccacagcatccaggccgaggtgcagatcgagcccctgaagccctacatcagcaaccccaagaagatcgaggtgcaggagagaagccccagcgtgcccaacaaccaggaccacgcccaccacgtgaagttcagcagcagcgtgccccagagaagcctgctggagcaggcccagaagcccatcgacatcagacagagaagcagccagaacagacagaactggctggccgccagcgagagcagcagcgaggaggagagccccgtgaccggcagaagaagccagagcagccccccctacagcaccatcgaccagaagctgctggtggacatccacgtgcccgacggcttcaaggtgggcaagatcagcccccccgtgtacctgaccaacgagtgggtgggctacaacgccctgagcgagatcttcagaaacgactggctgacccccgcccccgtgatccagccccccgaggaggacggcgactacgtggagctgtacgacgccagcgccgacaccgacggcgacgacgacgacgagagcaacgacaccttcgaggacacctacgaccacgccaacggcaacgacgacctggacaaccaggtggaccaggccaacgacgtgtgcaaggaccacgacgacgacaacaacaagttcgtggacgacgtgaacaacaactactacgaggcccccagctgccccagagccagctacggcagagacggcagctgcaagcaggacggctacgacggcagcagaggcaaggaggaggcctacagaggctacggcagccacaccgccaacagaagccacggcggcagcgccgccagcgaggacaacgccgccatcggcgaccaggaggagcacgccgccaacatcggcagcgagagaagaggcagcgagggcgacggcggcaagggcgtggtgagaaccagcgaggagagcggcgccctgggcctgaacggcgaggagaactgcagcgagaccgacggccccggcctgaagagacccgccagccaggacttcgagtacctgcaggaggagcccggcggcggcaacgaggccagcaacgccatcgacagcggcgccgcccccagcgcccccgaccacgagagcgacaacaaggacatcagcgagagcagcacccagagcgacttcagcgccaaccacagcagccccagcaagggcagcggcatgagcgccgacgccaacttcgccagcgccatcctgtacgccggcttcgtggaggtgcccgaggagagccccaagcagcccagcgaggtgaacgtgaaccccctgtacgtgagccccgcctgcaagaagcccctgatccacatgtacgagaaggagttcaccagcgagatctgctgcggcagcctgtggggcgtgaacctgctgctgggcaccagaagcaacctgtacctgatggacagaagcggcaaggccgacatcaccaagctgatcagaagaagacccttcagacagatccaggtgctggagcccctgaacctgctgatcaccatcagcggccacaagaacagactgagagtgtaccacctgacctggctgagaaacaagatcctgaacaacgaccccgagagcaagagaagacaggaggagatgctgaagaccgaggaggcctgcaaggccatcgacaagctgaccggctgcgagcacttcagcgtgctgcagcacgaggagaccacctacatcgccatcgccctgaagagcagcatccacctgtacgcctgggcccccaagagcttcgacgagagcaccgccatcaaggtgtgcatcgaccagagcgccgacagcgagggcgactacatgagctaccaggcctacatcagaatcctggccaagatccaggccgccgaccccgtgaacagattcaagagacccgacgagctgctgcacctgctgaagctgaaggtgttccccaccctggaccacaagcccgtgaccgtggacctggccatcggcagcgagaagagactgaagatcttcttcagcagcgccgacggctaccacctgatcgacgccgagagcgaggtgatgagcgacgtgaccctgcccaagaaccccctggagatcatcatcccccagaacatcatcatcctgcccgactgcctgggcatcggcatgatgctgaccttcaacgccgaggccctgagcgtggaggccaacgagcagctgttcaagaagatcctggagatgtggaaggacatccccagcagcatcgccttcgagtgcacccagagaaccaccggctggggccagaaggccatcgaggtgagaagcctgcagagcagagtgctggagagcgagctgaagagaagaagcatcaagaagctgagattcctgtgcaccagaggcgacaagctgttcttcaccagcaccctgagaaaccaccacagcagagtgtacttcatgaccctgggcaagctggaggagctgcagagcaactacgacgtgtag

SEQ ID NO: 91123 - DNA, 4752 bp, synthetic construct
  misc_feature 1..4752: note = Description of Artificial Sequence: Synthetic coding sequence
  source 1..4752: mol_type = other DNA
atggccggccccggcggctggagagacagagaggtgaccgacctgggccacctgcccgaccccaccggcatcttcagcctggacaagaccatcggcctgggcacctacggcagaatctacctgggcctgcacgagaagaccggcgccttcaccgccgtgaaggtgatgaacgccagaaagacccccctgcccgagatcggcagaagagtgagagtgaacaagtaccagaagagcgtgggctggagatacagcgacgaggaggaggacctgagaaccgagctgaacctgctgagaaagtacagcttccacaagaacatcgtgagcttctacggcgccttcttcaagctgagcccccccggccagagacaccagctgtggatggtgatggagctgtgcgccgccggcagcgtgaccgacgtggtgagaatgaccagcaaccagagcctgaaggaggactggatcgcctacatctgcagagagatcctgcagggcctggcccacctgcacgcccacagagtgatccacagagacatcaagggccagaacgtgctgctgacccacaacgccgaggtgaagctggtggacttcggcgtgagcgcccaggtgagcagaaccaacggcagaagaaacagcttcatcggcaccccctactggatggcccccgaggtgatcgactgcgacgaggaccccagaagaagctacgactacagaagcgacgtgtggagcgtgggcatcaccgccatcgagatggccgagggcgccccccccctgtgcaacctgcagcccctggaggccctgttcgtgatcctgagagagagcgcccccaccgtgaagagcagcggctggagcagaaagttccacaacttcatggagaagtgcaccatcaagaacttcctgttcagacccaccagcgccaacatgctgcagcaccccttcgtgagagacatcaagaacgagagacacgtggtggagagcctgaccagacacctgaccggcatcatcaagaagagacagaagaagaagggcatccccctgatcttcgagagagaggaggccatcaaggagcagtacaccgtgagaagattcagaggccccagctgcacccacgagctgctgagactgcccaccagcagcagatgcagacccctgagagtgctgcacggcgagcccagccagcccagatggctgcccgacagagaggagccccaggtgcaggccctgcagcagctgcagggcgccgccagagtgttcatgcccctgcaggccctggacagcgcccccaagcccctgaagggccaggcccaggccccccagagactgcagggcgccgccagagtgttcatgcccctgcaggcccaggtgaaggccaaggccagcaagcccctgcagatgcagatcaaggccccccccagactgagaagagccgccagagtgctgatgcccctgcaggcccaggtgagagcccccagactgctgcaggtgcagagccaggtgagcaagaagcagcaggcccagacccagaccagcgagccccaggacctggaccaggtgcccgaggagttccagggccaggaccaggtgcccgagcagcagagacagggccaggcccccgagcagcagcagagacacaaccaggtgcccgagcaggagctggagcagaaccaggcccccgagcagcccgaggtgcaggagcaggccgccgagcccgcccaggccgagaccgaggccgaggagcccgagagcctgagagtgaacgcccaggtgttcctgcccctgctgagccaggaccaccacgtgctgctgcccctgcacctggacacccaggtgctgatccccgtggagggccagaccgagggcagcccccaggcccaggcctggaccctggagcccccccaggccatcggcagcgtgcaggccctgatcgagggcctgagcagagacctgctgagagcccccaacagcaacaacagcaagcccctgggccccctgcagaccctgatggagaacctgagcagcaacagattctacagccagcccgagcaggccagagagaagaagagcaaggtgagcaccctgagacaggccctggccaagagactgagccccaagagattcagagccaagagcagctggagacccgagaagctggagctgagcgacctggaggccagaagacagagaagacagagaagatgggaggacatcttcaaccagcacgaggaggagctgagacaggtggacaaggacaaggaggacgagagcagcgacaacgacgaggtgttccacagcatccaggccgaggtgcagatcgagcccctgaagccctacatcagcaaccccaagaagatcgaggtgcaggagagaagccccagcgtgcccaacaaccaggaccacgcccaccacgtgaagttcagcagcagcgtgccccagagaagcctgctggagcaggcccagaagcccatcgacatcagacagagaagcagccagaacagacagaactggctggccgccagcgagagcagcagcgaggaggagagccccgtgaccggcagaagaagccagagcagccccccctacagcaccatcgaccagaagctgctggtggacatccacgtgcccgacggcttcaaggtgggcaagatcagcccccccgtgtacctgaccaacgagtgggtgggctacaacgccctgagcgagatcttcagaaacgactggctgacccccgcccccgtgatccagccccccgaggaggacggcgactacgtggagctgtacgacgccagcgccgacaccgacggcgacgacgacgacgagagcaacgacaccttcgaggacacctacgaccacgccaacggcaacgacgacctggacaaccaggtggaccaggccaacgacgtgtgcaaggaccacgacgacgacaacaacaagttcgtggacgacgtgaacaacaactactacgaggcccccagctgccccagagccagctacggcagagacggcagctgcaagcaggacggctacgacggcagcagaggcaaggaggaggcctacagaggctacggcagccacaccgccaacagaagccacggcggcagcgccgccagcgaggacaacgccgccatcggcgaccaggaggagcacgccgccaacatcggcagcgagagaagaggcagcgagggcgacggcggcaagggcgtggtgagaaccagcgaggagagcggcgccctgggcctgaacggcgaggagaactgcagcgagaccgacggccccggcctgaagagacccgccagccaggacttcgagtacctgcaggaggagcccggcggcggcaacgaggccagcaacgccatcgacagcggcgccgcccccagcgcccccgaccacgagagcgacaacaaggacatcagcgagagcagcacccagagcgacttcagcgccaaccacagcagccccagcaagggcagcggcatgagcgccgacgccaacttcgccagcgccatcctgtacgccggcttcgtggaggtgcccgaggagagccccaagcagcccagcgaggtgaacgtgaaccccctgtacgtgagccccgcctgcaagaagcccctgatccacatgtacgagaaggagttcaccagcgagatctgctgcggcagcctgtggggcgtgaacctgctgctgggcaccagaagcaacctgtacctgatggacagaagcggcaaggccgacatcaccaagctgatcagaagaagacccttcagacagatccaggtgctggagcccctgaacctgctgatcaccatcagcggccacaagaacagactgagagtgtaccacctgacctggctgagaaacaagatcctgaacaacgaccccgagagcaagagaagacaggaggagatgctgaagaccgaggaggcctgcaaggccatcgacaagctgaccggctgcgagcacttcagcgtgctgcagcacgaggagaccacctacatcgccatcgccctgaagagcagcatccacctgtacgcctgggcccccaagagcttcgacgagagcaccgccatcaaggtgtgcatcgaccagagcgccgacagcgagggcgactacatgagctaccaggcctacatcagaatcctggccaagatccaggccgccgaccccgtgaacagattcaagagacccgacgagctgctgcacctgctgaagctgaaggtgttccccaccctggaccacaagcccgtgaccgtggacctggccatcggcagcgagaagagactgaagatcttcttcagcagcgccgacggctaccacctgatcgacgccgagagcgaggtgatgagcgacgtgaccctgcccaagaaccccctggagatcatcatcccccagaacatcatcatcctgcccgactgcctgggcatcggcatgatgctgaccttcaacgccgaggccctgagcgtggaggccaacgagcagctgttcaagaagatcctggagatgtggaaggacatccccagcagcatcgccttcgagtgcacccagagaaccaccggctggggccagaaggccatcgaggtgagaagcctgcagagcagagtgctggagagcgagctgaagagaagaagcatcaagaagctgagattcctgtgcaccagaggcgacaagctgttcttcaccagcaccctgagaaaccaccacagcagagtgtacttcatgaccctgggcaagctggaggagctgcagagcaactacgacgtgtag

SEQ ID NO: 91124 - DNA, 567 bp, synthetic construct
  misc_feature 1..567: note = Description of Artificial Sequence: Synthetic coding sequence
  source 1..567: mol_type = other DNA
atggccggccccggcggctggagagacagagaggtgaccgacctgggccacctgcccgaccccaccggcatcttcagcctggacaagaccatcggcctgggcacctacggcagaatctacctgggcctgcacgagaagaccggcgccttcaccgccgtgaaggtgatgaacgccagaaagacccccctgcccgagatcggcagaagagtgagagtgaacaagtaccagaagagcgtgggctggagatacagcgacgaggaggaggacctgagaaccgagctgaacctgctgagaaagtacagcttccacaagaacatcgtgagcttctacggcgccttcttcaagctgagcccccccggccagagacaccagctgtggatggtgatggagctgtgcgccgccggcagcgtgaccgacgtggtgagaatgaccagcaaccagagcctgaaggaggactggatcgcctacatctgcagagagatcctgcagcccaaggtgatcttcctgggcaccggctgcagcgacagcagcctgaagaaggagctgtgcctgaagcaccagaactag

SEQ ID NO: 91125 - DNA, 492 bp, synthetic construct
  misc_feature 1..492: note = Description of Artificial Sequence: Synthetic coding sequence
  source 1..492: mol_type = other DNA
atgcaggtgcccagagagagaatcaagatcgccttcagactgtggatccccatcctggtgatcagaatcgtggtggccggcacctggccccaggcccccggcctgagcaccctgggcctgaacatcatcatcctgcccgactgcctgggcatcggcatgatgctgaccttcaacgccgaggccctgagcgtggaggccaacgagcagctgttcaagaagatcctggagatgtggaaggacatccccagcagcatcgccttcgagtgcacccagagaaccaccggctggggccagaaggccatcgaggtgagaagcctgcagagcagagtgctggagagcgagctgaagagaagaagcatcaagaagctgagattcctgtgcaccagaggcgacaagctgttcttcaccagcaccctgagaaaccaccacagcagagtgtacttcatgaccctgggcaagctggaggagctgcagagcaactacgacgtgtag

SEQ ID NO: 91126 - DNA, 1449 bp, synthetic construct
  misc_feature 1..1449: note = Description of Artificial Sequence: Synthetic coding sequence
  source 1..1449: mol_type = other DNA
atgctgaagttccaggaggccgccaagtgcgtgagcggcagcaccgccatcagcacctaccccaagaccctgatcgccagaagatacgtgctgcagcagaagctgggcagcggcagcttcggcaccgtgtacctggtgagcgacaagaaggccaagagaggcgaggagctgaaggtgctgaaggagatcagcgtgggcgagctgaaccccaacgagaccgtgcaggccaacctggaggcccagctgctgagcaagctggaccaccccgccatcgtgaagttccacgccagcttcgtggagcaggacaacttctgcatcatcaccgagtactgcgagggcagagacctggacgacaagatccaggagtacaagcaggccggcaagatcttccccgagaaccagatcatcgagtggttcatccagctgctgctgggcgtggactacatgcacgagagaagaatcctgcacagagacctgaagagcaagaacgtgttcctgaagaacaacctgctgaagatcggcgacttcggcgtgagcagactgctgatgggcagctgcgacctggccaccaccctgaccggcaccccccactacatgagccccgaggccctgaagcaccagggctacgacaccaagagcgacatctggagcctggcctgcatcctgtacgagatgtgctgcatgaaccacgccttcgccggcagcaacttcctgagcatcgtgctgaagatcgtggagggcgacacccccagcctgcccgagagataccccaaggagctgaacgccatcatggagagcatgctgaacaagaaccccagcctgagacccagcgccatcgagatcctgaagatcccctacctggacgagcagctgcagaacctgatgtgcagatacagcgagatgaccctggaggacaagaacctggactgccagaaggaggccgcccacatcatcaacgccatgcagaagagaatccacctgcagaccctgagagccctgagcgaggtgcagaagatgacccccagagagagaatgagactgagaaagctgcaggccgccgacgagaaggccagaaagctgaagaagatcgtggaggagaagtacgaggagaacagcaagagaatgcaggagctgagaagcagaaacttccagcagctgagcgtggacgtgctgcacgagaagacccacctgaagggcatggaggagaaggaggagcagcccgagggcagactgagctgcagcccccaggacgaggacgaggagagatggcagggcagagaggaggagagcgacgagcccaccctggagaacctgcccgagagccagcccatccccagcatggacctgcacgagctggagagcatcgtggaggacgccaccagcgacctgggctaccacggcgactgcaacctgatcagcctggacgagtactggaagaacgagaagtag

SEQ ID NO: 91127 - DNA, 1938 bp, synthetic construct
  misc_feature 1..1938: note = Description of Artificial Sequence: Synthetic coding sequence
  source 1..1938: mol_type = other DNA
atgctgaagttccaggaggccgccaagtgcgtgagcggcagcaccgccatcagcacctaccccaagaccctgatcgccagaagatacgtgctgcagcagaagctgggcagcggcagcttcggcaccgtgtacctggtgagcgacaagaaggccaagagaggcgaggagctgaaggtgctgaaggagatcagcgtgggcgagctgaaccccaacgagaccgtgcaggccaacctggaggcccagctgctgagcaagctggaccaccccgccatcgtgaagttccacgccagcttcgtggagcaggacaacttctgcatcatcaccgagtactgcgagggcagagacctggacgacaagatccaggagtacaagcaggccggcaagatcttccccgagaaccagatcatcgagtggttcatccagctgctgctgggcgtggactacatgcacgagagaagaatcctgcacagagacctgaagagcaagaacgtgttcctgaagaacaacctgctgaagatcggcgacttcggcgtgagcagactgctgatgggcagctgcgacctggccaccaccctgaccggcaccccccactacatgagccccgaggccctgaagcaccagggctacgacaccaagagcgacatctggagcctggcctgcatcctgtacgagatgtgctgcatgaaccacgccttcgccggcagcaacttcctgagcatcgtgctgaagatcgtggagggcgacacccccagcctgcccgagagataccccaaggagctgaacgccatcatggagagcatgctgaacaagaaccccagcctgagacccagcgccatcgagatcctgaagatcccctacctggacgagcagctgcagaacctgatgtgcagatacagcgagatgaccctggaggacaagaacctggactgccagaaggaggccgcccacatcatcaacgccatgcagaagagaatccacctgcagaccctgagagccctgagcgaggtgcagaagatgacccccagagagagaatgagactgagaaagctgcaggccgccgacgagaaggccagaaagctgaagaagatcgtggaggagaagtacgaggagaacagcaagagaatgcaggagctgagaagcagaaacttccagcagctgagcgtggacgtgctgcacgagaagacccacctgaagggcatggaggagaaggaggagcagcccgagggcagactgagctgcagcccccaggacgaggacgaggagagatggcagggcagagaggaggagagcgacgagcccaccctggagaacctgcccgagagccagcccatccccagcatggacctgcacgagctggagagcatcgtggaggacgccaccagcgacctgggctaccacgagatccccgaggaccccctggtggccgaggagtactacgccgacgccttcgacagctactgcgaggagagcgacgaggaggaggaggagatcgccctggagagacccgagaaggagatcagaaacgagggcagccagcccgcctacagaaccaaccagcaggacagcgacatcgaggccctggccagatgcctggagaacgtgctgggctgcaccagcctggacaccaagaccatcaccaccatggccgaggacatgagccccggcccccccatcttcaacagcgtgatggccagaaccaagatgaagagaatgagagagagcgccatgcagaagctgggcaccgaggtgttcgaggaggtgtacaactacctgaagagagccagacaccagaacgccagcgaggccgagatcagagagtgcctggagaaggtggtgccccaggccagcgactgcttcgaggtggaccagctgctgtacttcgaggagcagctgctgatcaccatgggcaaggagcccaccctgcagaaccacctgtag

SEQ ID NO: 91128 - DNA, 1386 bp, synthetic construct
  misc_feature 1..1386: note = Description of Artificial Sequence: Synthetic coding sequence
  source 1..1386: mol_type = other DNA
atgcacgagagaagaatcctgcacagagacctgaagagcaagaacgtgttcctgaagaacaacctgctgaagatcggcgacttcggcgtgagcagactgctgatgggcagctgcgacctggccaccaccctgaccggcaccccccactacatgagccccgaggccctgaagcaccagggctacgacaccaagagcgacatctggagcctggcctgcatcctgtacgagatgtgctgcatgaaccacgccttcgccggcagcaacttcctgagcatcgtgctgaagatcgtggagggcgacacccccagcctgcccgagagataccccaaggagctgaacgccatcatggagagcatgctgaacaagaaccccagcctgagacccagcgccatcgagatcctgaagatcccctacctggacgagcagctgcagaacctgatgtgcagatacagcgagatgaccctggaggacaagaacctggactgccagaaggaggccgcccacatcatcaacgccatgcagaagagaatccacctgcagaccctgagagccctgagcgaggtgcagaagatgacccccagagagagaatgagactgagaaagctgcaggccgccgacgagaaggccagaaagctgaagaagatcgtggaggagaagtacgaggagaacagcaagagaatgcaggagctgagaagcagaaacttccagcagctgagcgtggacgtgctgcacgagagcgacgagcccaccctggagaacctgcccgagagccagcccatccccagcatggacctgcacgagctggagagcatcgtggaggacgccaccagcgacctgggctaccacgagatccccgaggaccccctggtggccgaggagtactacgccgacgccttcgacagctactgcgaggagagcgacgaggaggaggaggagatcgccctggagagacccgagaaggagatcagaaacgagggcagccagcccgcctacagaaccaaccagcaggacagcgacatcgaggccctggccagatgcctggagaacgtgctgggctgcaccagcctggacaccaagaccatcaccaccatggccgaggacatgagccccggcccccccatcttcaacagcgtgatggccagaaccaagatgaagagaatgagagagagcgccatgcagaagctgggcaccgaggtgttcgaggaggtgtacaactacctgaagagagccagacaccagaacgccagcgaggccgagatcagagagtgcctggagaaggtggtgccccaggccagcgactgcttcgaggtggaccagctgctgtacttcgaggagcagctgctgatcaccatgggcaaggagcccaccctgcagaaccacctgtag

SEQ ID NO: 91129 - DNA, 1938 bp, synthetic construct; identical to SEQ ID NO: 91127
  misc_feature 1..1938: note = Description of Artificial Sequence: Synthetic coding sequence
  source 1..1938: mol_type = other DNA

SEQ ID NO: 91130 - DNA, 1449 bp, synthetic construct; identical to SEQ ID NO: 91126
  misc_feature 1..1449: note = Description of Artificial Sequence: Synthetic coding sequence
  source 1..1449: mol_type = other DNA

SEQ ID NO: 91131 - DNA, 1938 bp, synthetic construct; identical to SEQ ID NO: 91127
  misc_feature 1..1938: note = Description of Artificial Sequence: Synthetic coding sequence
  source 1..1938: mol_type = other DNA

SEQ ID NO: 91132 - DNA, 1413 bp, synthetic construct
  misc_feature 1..1413: note = Description of Artificial Sequence: Synthetic coding sequence
  source 1..1413: mol_type = other DNA
atgctgaagttccaggaggccgccaagtgcgtgagcggcagcaccgccatcagcacctaccccaagaccctgatcgccagaagatacgtgctgcagcagaagctgggcagcggcagcttcggcaccgtgtacctggtgagcgacaagaaggccaagagaggcgaggagctgaaggtgctgaaggagatcagcgtgggcgagctgaaccccaacgagaccgtgcaggccaacctggaggcccagctgctgagcaagctggaccaccccgccatcgtgaagttccacgccagcttcgtggagcaggacaacttctgcatcatcaccgagtactgcgagggcagagacctggacgacaagatccaggagtacaagcaggccggcaagatcttccccgagaaccagatcatcgagtggttcatccagctgctgctgggcgtggactacatgcacgagagaagaatcctgcacagagacctgaagagcaagaacgtgttcctgaagaacaacctgctgaagatcggcgacttcggcgtgagcagactgctgatgggcagctgcgacctggccaccaccctgaccggcaccccccactacatgagccccgaggccctgaagcaccagggctacgacaccaagagcgacatctggagcctggcctgcatcctgtacgagatgtgctgcatgaaccacgccttcgccggcagcaacttcctgagcatcgtgctgaagatcgtggagggcgacacccccagcctgcccgagagataccccaaggagctgaacgccatcatggagagcatgctgaacaagaaccccagcctgagacccagcgccatcgagatcctgaagatcccctacctggacgagcagctgcagaacctgatgtgcagatacagcgagatgaccctggaggacaagaacctggactgccagaaggaggccgcccacatcatcaacgccatgcagaagagaatccacctgcagaccctgagagccctgagcgaggtgcagaagatgacccccagagagagaatgagactgagaaagctgcaggccgccgacgagaaggccagaaagctgaagaagatcgtggaggagaagtacgaggagaacagcaagagaatgcaggagctgagaagcagaaacttccagcagctgagcgtggacgtgctgcacgagaagacccacctgaagggcatggaggagaaggaggagcagcccgagggcagactgagctgcagcccccaggacgaggacgaggagagatggcagggcagagaggaggagagcgacgagcccaccctggagaacctgcccgagagccagcccatccccagcatggacctgcacgagctggagagcatcgtggaggacgccaccagcgacctgggctaccacgccacccacagctag

SEQ ID NO: 91133 - DNA, 2079 bp, synthetic construct
  misc_feature 1..2079: note = Description of Artificial Sequence: Synthetic coding sequence
  source 1..2079: mol_type = other DNA
atggagaagtacgagagaatcagagtggtgggcagaggcgccttcggcatcgtgcacctgtgcctgagaaaggccgaccagaagctggtgatcatcaagcagatccccgtggagcagatgaccaaggaggagagacaggccgcccagaacgagtgccaggtgctgaagctgctgaaccaccccaacgtgatcgagtactacgagaacttcctggaggacaaggccctgatgatcgccatggagtacgcccccggcggcaccctggccgagttcatccagaagagatgcaacagcctgctggaggaggagaccatcctgcacttcttcgtgcagatcctgctggccctgcaccacgtgcacacccacctgatcctgcacagagacctgaagacccagaacatcctgctggacaagcacagaatggtggtgaagatcggcgacttcggcatcagcaagatcctgagcagcaagagcaaggcctacaccgtggtgggcaccccctgctacatcagccccgagctgtgcgagggcaagccctacaaccagaagagcgacatctgggccctgggctgcgtgctgtacgagctggccagcctgaagagagccttcgaggccgccaacctgcccgccctggtgctgaagatcatgagcggcaccttcgcccccatcagcgacagatacagccccgagctgagacagctggtgctgagcctgctgagcctggagcccgcccagagaccccccctgagccacatcatggcccagcccctgtgcatcagagccctgctgaacctgcacaccgacgtgggcagcgtgagaatgagaagagccgagaagagcgtggcccccagcaacaccggcagcagaaccaccagcgtgagatgcagaggcatccccagaggccccgtgagacccgccatccccccccccctgagcagcgtgtacgcctggggcggcggcctgggcacccccctgagactgcccatgctgaacaccgaggtggtgcaggtggccgccggcagaacccagaaggccggcgtgaccagaagcggcagactgatcctgtgggaggccccccccctgggcgccggcggcggcagcctgctgcccggcgccgtggagcagccccagccccagttcatcagcagattcctggagggccagagcggcgtgaccatcaagcacgtggcctgcggcgacttcttcaccgcctgcctgaccgacagaggcatcatcatgaccttcggcagcggcagcaacggctgcctgggccacggcagcctgaccgacatcagccagcccaccatcgtggaggccctgctgggctacgagatggtgcaggtggcctgcggcgccagccacgtgctggccctgagcaccgagagagagctgttcgcctggggcagaggcgacagcggcagactgggcctgggcaccagagagagccacagctgcccccagcaggtgcccatgccccccggccaggaggcccagagagtggtgtgcggcatcgacagcagcatgatcctgaccgtgcccggccaggccctggcctgcggcagcaacagattcaacaagctgggcctggaccacctgagcctgggcgaggagcccgtgccccaccagcaggtggaggaggccctgagcttcaccctgctgggcagcgcccccctggaccaggagcccctgctgagcatcgacctgggcaccgcccacagcgccgccgtgaccgccagcggcgactgctacaccttcggcagcaaccagcacggccagctgggcaccaacaccagaagaggcagcagagccccctgcaaggtgcagggcctggagggcatcaagatggccatggtggcctgcggcgacgccttcaccgtggccatcggcgccgagagcgaggtgtacagctggggcaagggcgccagaggcagactgggcagaagagacgaggacgccggcctgcccagacccgtgcagctggacgagacccacccctacaccgtgaccagcgtgagctgctgccacggcaacaccctgctggccgtgagaagcgtgaccgacgagcccgtgcccccctag

SEQ ID NO: 91134 - DNA, 1383 bp, synthetic construct
  misc_feature 1..1383: note = Description of Artificial Sequence: Synthetic coding sequence
  source 1..1383: mol_type = other DNA
atggagaagtacgagagaatcagagtggtgggcagaggcgccttcggcatcgtgcacctgtgcctgagaaaggccgaccagaagctggtgatcatcaagcagatccccgtggagcagatgaccaaggaggagagacaggccgcccagaacgagtgccaggtgctgaagctgctgaaccaccccaacgtgatcgagtactacgagaacttcctggaggacaaggccctgatgatcgccatggagtacgcccccggcggcaccctggccgagttcatccagaagagatgcaacagcctgctggaggaggagaccatcctgcacttcttcgtgcagatcctgctggccctgcaccacgtgcacacccacctgatcctgcacagagacctgaagacccagaacatcctgctggacaagcacagaatggtggtgaagatcggcgacttcggcatcagcaagatcctgagcagcaagagcaaggcctacaccgtggtgggcaccccctgctacatcagccccgagctgtgcgagggcaagccctacaaccagaagagcgacatctgggccctgggctgcgtgctgtacgagctggccagcctgaagagagccttcgaggccgccaacctgcccgccctggtgctgaagatcatgagcggcaccttcgcccccatcagcgacagatacagccccgagctgagacagctggtgctgagcctgctgagcctggagcccgcccagagaccccccctgagccacatcatggcccagcccctgtgcatcagagccctgctgaacctgcacaccgacgtgggcagcgtgagaatgagaagacccgtgcagggccagagagccgtgctgggcggcagagtgtgggcccccagcggcagcaccggcggcctgagacagagagagacctggggcaagagcagcctgcccgcctgcagaaacgtgagaagagtgttcgtgctgagaccccccagcgtgctgcagggcagagaggtgagaggcccccagcagcacagagagcaggaccaccagtgccccctgcagagatacccccccggcacctgcgaggccagccaccccaccaccaccgtggtgagcgtgtgcctgggctggtgggccggccacccccccgccgccgccaacgcccagcacagaggcggccccggcggcagctgggcccacgccgagagcagaagacacgccctgtgggccagccaccccgtgggcggccccacccccagatgcagaagaagacagagccccagctggggcagcggcgccgccaccgcccccgtgcacctggccttccccggcggccccgtgggctgcgaccaccaggccagaggcctgtggggcctgctgcactgcctgcccgactag

SEQ ID NO: 91135 - DNA, 2940 bp, synthetic construct
  misc_feature 1..2940: note = Description of Artificial Sequence: Synthetic coding sequence
  source 1..2940: mol_type = other DNA
atgagcgtgctgggcgagtacgagagacactgcgacagcatcaacagcgacttcggcagcgagagcggcggctgcggcgacagcagccccggccccagcgccagccagggccccagagccggcggcggcgccgccgagcaggaggagctgcactacatccccatcagagtgctgggcagaggcgccttcggcgaggccaccctgtacagaagaaccgaggacgacagcctggtggtgtggaaggaggtggacctgaccagactgagcgagaaggagagaagagacgccctgaacgagatcgtgatcctggccctgctgcagcacgacaacatcatcgcctactacaaccacttcatggacaacaccaccctgctgatcgagctggagtactgcaacggcggcaacctgtacgacaagatcctgagacagaaggacaagctgttcgaggaggagatggtggtgtggtacctgttccagatcgtgagcgccgtgagctgcatccacaaggccggcatcctgcacagagacatcaagaccctgaacatcttcctgaccaaggccaacctgatcaagctgggcgactacggcctggccaagaagctgaacagcgagtacagcatggccgagaccctggtgggcaccccctactacatgagccccgagctgtgccagggcgtgaagtacaacttcaagagcgacatctgggccgtgggctgcgtgatcttcgagctgctgaccctgaagagaaccttcgacgccaccaaccccctgaacctgtgcgtgaagatcgtgcagggcatcagagccatggaggtggacagcagccagtacagcctggagctgatccagatggtgcacagctgcctggaccaggaccccgagcagagacccaccgccgacgagctgctggacagacccctgctgagaaagagaagaagagagatggaggagaaggtgaccctgctgaacgcccccaccaagagacccagaagcagcaccgtgaccgaggcccccatcgccgtggtgaccagcagaaccagcgaggtgtacgtgtggggcggcggcaagagcaccccccagaagctggacgtgatcaagagcggctgcagcgccagacaggtgtgcgccggcaacacccacttcgccgtggtgaccgtggagaaggagctgtacacctgggtgaacatgcagggcggcaccaagctgcacggccagctgggccacggcgacaaggccagctacagacagcccaagcacgtggagaagctgcagggcaaggccatcagacaggtgagctgcggcgacgacttcaccgtgtgcgtgaccgacgagggccagctgtacgccttcggcagcgactactacggctgcatgggcgtggacaaggtggccggccccgaggtgctggagcccatgcagctgaacttcttcctgagcaaccccgtggagcaggtgagctgcggcgacaaccacgtggtggtgctgaccagaaacaaggaggtgtacagctggggctgcggcgagtacggcagactgggcctggacagcgaggaggactactacaccccccagaaggtggacgtgcccaaggccctgatcatcgtggccgtgcagtgcggctgcgacggcaccttcctgctgacccagagcggcaaggtgctggcctgcggcctgaacgagttcaacaagctgggcctgaaccagtgcatgagcggcatcatcaaccacgaggcctaccacgaggtgccctacaccaccagcttcaccctggccaagcagctgagcttctacaagatcagaaccatcgcccccggcaagacccacaccgccgccatcgacgagagaggcagactgctgaccttcggctgcaacaagtgcggccagctgggcgtgggcaactacaagaagagactgggcatcaacctgctgggcggccccctgggcggcaagcaggtgatcagagtgagctgcggcgacgagttcaccatcgccgccaccgacgacaaccacatcttcgcctggggcaacggcggcaacggcagactggccatgacccccaccgagagaccccacggcagcgacatctgcaccagctggcccagacccatcttcggcagcctgcaccacgtgcccgacctgagctgcagaggctggcacaccatcctgatcgtggagaaggtgctgaacagcaagaccatcagaagcaacagcagcggcctgagcatcggcaccgtgttccagagcagcagccccggcggcggcggcggcggcggcggcggcgaggaggaggacagccagcaggagagcgagacccccgaccccagcggcggcttcagaggcaccatggaggccgacagaggcatggagggcctgatcagccccaccgaggccatgggcaacagcaacggcgccagcagcagctgccccggctggctgagaaaggagctggagaacgccgagttcatccccatgcccgacagccccagccccctgagcgccgccttcagcgagagcgagaaggacaccctgccctacgaggagctgcagggcctgaaggtggccagcgaggcccccctggagcacaagccccaggtggaggccagcagccccagactgaaccccgccgtgacctgcgccggcaagggcacccccctgaccccccccgcctgcgcctgcagcagcctgcaggtggaggtggagagactgcagggcctggtgctgaagtgcctggccgagcagcagaagctgcagcaggagaacctgcagatcttcacccagctgcagaagctgaacaagaagctggagggcggccagcaggtgggcatgcacagcaagggcacccagaccgccaaggaggagatggagatggaccccaagcccgacctggacagcgacagctggtgcctgctgggcaccgacagctgcagacccagcctgtag

SEQ ID NO: 91136 - DNA, 1545 bp, synthetic construct
  misc_feature 1..1545: note = Description of Artificial Sequence: Synthetic coding sequence
  source 1..1545: mol_type = other DNA
atgagcgtgctgggcgagtacgagagacactgcgacagcatcaacagcgacttcggcagcgagagcggcggctgcggcgacagcagccccggccccagcgccagccagggccccagagccggcggcggcgccttcggcgaggccaccctgtacagaagaaccgaggacgacagcctggtggtgtggaaggaggtggacctgaccagactgagcgagaaggagagaagagacgccctgaacgagatcgtgatcctggccctgctgcagcacgacaacatcatcgcctactacaaccacttcatggacaacaccaccctgctgatcgagctggagtactgcaacggcggcaacctgtacgacaagatcctgagacagaaggacaagctgttcgaggaggagatggtggtgtggtacctgttccagatcgtgagcgccgtgagctgcatccacaaggccggcatcctgcacagagacatcaagaccctgaacatcttcctgaccaaggccaacctgatcaagctgggcgactacggcctggccaagaagctgaacagcgagtacagcatggccgagaccctggtgggcaccccctactacatgagccccgagctgtgccagggcgtgaagtacaacttcaagagcgacatctgggccgtgggctgcgtgatcttcgagctgctgaccctgaagagaaccttcgacgccaccaaccccctgaacctgtgcgtgaagatcgtgcagggcatcagagccatggaggtggacagcagccagtacagcctggagctgatccagatggtgcacagctgcctggaccaggaccccgagcagagacccaccgccgacgagctgctggacagacccctgctgagaaagagaagaagagagatggaggagaaggtgaccctgctgaacgcccccaccaagagacccagaagcagcaccgtgaccgaggcccccatcgccgtggtgaccagcagaaccagcgaggtgtacgtgtggggcggcggcaagagcaccccccagaagctggacgtgatcaagagcggctgcagcgccagacaggtgtgcgccggcaacacccacttcgccgtggtgaccgtggagaaggagctgtacacctgggtgaacatgcagggcggcaccaagctgcacggccagctgggccacggcgacaaggccagctacagacagcccaagcacgtggagaagctgcagggcaaggccatcagacaggtgagctgcggcgacgacttcaccgtgtgcgtgaccgacgagggccagctgtacgccttcggcagcgactactacggctgcatgggcgtggacaaggtggccggccccgaggtgctggagcccatgcagctgaacttcttcctgagcaaccccgtggagcaggtgagctgcggcgacaaccacgtggtggtgctgaccagaaacaaggaggtgtacagctggggctgcggcgagtacggcagaggcagcctggtgagcgtgcacttcttcaccggcatccagcccgacttcaaggtggtgtgcatctag

SEQ ID NO: 91137 - DNA, 3777 bp, synthetic construct
  misc_feature 1..3777: note = Description of Artificial Sequence: Synthetic coding sequence
  source 1..3777: mol_type = other DNA
atggagaagtacgtgagactgcagaagatcggcgagggcagcttcggcaaggccatcctggtgaagagcaccgaggacggcagacagtacgtgatcaaggagatcaacatcagcagaatgagcagcaaggagagagaggagagcagaagagaggtggccgtgctggccaacatgaagcaccccaacatcgtgcagtacagagagagcttcgaggagaacggcagcctgtacatcgtgatggactactgcgagggcggcgacctgttcaagagaatcaacgcccagaagggcgtgctgttccaggaggaccagatcctggactggttcgtgcagatctgcctggccctgaagcacgtgcacgacagaaagatcctgcacagagacatcaagagccagaacatcttcctgaccaaggacggcaccgtgcagctgggcgacttcggcatcgccagagtgctgaacagcaccgtggagctggccagaacctgcatcggcaccccctactacctgagccccgagatctgcgagaacaagccctacaacaacaagagcgacatctgggccctgggctgcgtgctgtacgagctgtgcaccctgaagcacgccttcgaggccggcagcatgaagaacctggtgctgaagatcatcagcggcagcttcccccccgtgagcctgcactacagctacgacctgagaagcctggtgagccagctgttcaagagaaaccccagagacagacccagcgtgaacagcatcctggagaagggcttcatcgccaagagaatcgagaagttcctgagcccccagctgatcgccgaggagttctgcctgaagaccttcagcaagttcggcagccagcccatccccgccaagagacccgccagcggccagaacagcatcagcgtgatgcccgcccagaagatcaccaagcccgccgccaagtacggcatccccctggcctacaagaagtacggcgacaagaagctgcacgagaagaagcccctgcagaagcacaagcaggcccaccagacccccgagaagagagtgaacaccggcgaggagagaagaaagatcagcgaggaggccgccagaaagagaagactggagttcatcgagaaggagaagaagcagaaggaccagatcatcagcctgatgaaggccgagcagatgaagagacaggagaaggagagactggagagaatcaacagagccagagagcagggctggagaaacgtgctgagcgccggcggcagcggcgaggtgaaggcccccttcctgggcagcggcggcaccatcgcccccagcagcttcagcagcagaggccagtacgagcactaccacgccatcttcgaccagatgcagcagcagagagccgaggacaacgaggccaagtggaagagagagatctacggcagaggcctgcccgagagaggcatcctgcccggcgtgagacccggcttcccctacggcgccgccggccaccaccacttccccgacgccgacgacatcagaaagaccctgaagagactgaaggccgtgagcaagcaggccaacgccaacagacagaagggccagctggccgtggagagagccaagcaggtggaggagttcctgcagagaaagagagaggccatgcagaacaaggccagagccgagggccacatggtgtacctggccagactgagacagatcagactgcagaacttcaacgagagacagcagatcaaggccaagctgagaggcgagaagaaggaggccaaccacagcgagggccaggagggcagcgaggaggccgacatgagaagaaagaagatcgagagcctgaaggcccacgccaacgccagagccgccgtgctgaaggagcagctggagagaaagagaaaggaggcctacgagagagagaagaaggtgtgggaggagcacctggtggccaagggcgtgaagagcagcgacgtgagcccccccctgggccagcacgagaccggcggcagccccagcaagcagcagatgagaagcgtgatcagcgtgaccagcgccctgaaggaggtgggcgtggacagcagcctgaccgacaccagagagaccagcgaggagatgcagaagaccaacaacgccatcagcagcaagagagagatcctgagaagactgaacgagaacctgaaggcccaggaggacgagaagggcaagcagaacctgagcgacaccttcgagatcaacgtgcacgaggacgccaaggagcacgagaaggagaagagcgtgagcagcgacagaaagaagtgggaggccggcggccagctggtgatccccctggacgagctgaccctggacaccagcttcagcaccaccgagagacacaccgtgggcgaggtgatcaagctgggccccaacggcagccccagaagagcctggggcaagagccccaccgacagcgtgctgaagatcctgggcgaggccgagctgcagctgcagaccgagctgctggagaacaccaccatcagaagcgagatcagccccgagggcgagaagtacaagcccctgatcaccggcgagaagaaggtgcagtgcatcagccacgagatcaaccccagcgccatcgtggacagccccgtggagaccaagagccccgagttcagcgaggccagcccccagatgagcctgaagctggagggcaacctggaggagcccgacgacctggagaccgagatcctgcaggagcccagcggcaccaacaaggacgagagcctgccctgcaccatcaccgacgtgtggatcagcgaggagaaggagaccaaggagacccagagcgccgacagaatcaccatccaggagaacgaggtgagcgaggacggcgtgagcagcaccgtggaccagctgagcgacatccacatcgagcccggcaccaacgacagccagcacagcaagtgcgacgtggacaagagcgtgcagcccgagcccttcttccacaaggtggtgcacagcgagcacctgaacctggtgccccaggtgcagagcgtgcagtgcagccccgaggagagcttcgccttcagaagccacagccacctgccccccaagaacaagaacaagaacagcctgctgatcggcctgagcaccggcctgttcgacgccaacaaccccaagatgctgagaacctgcagcctgcccgacctgagcaagctgttcagaaccctgatggacgtgcccaccgtgggcgacgtgagacaggacaacctggagatcgacgagatcgaggacgagaacatcaaggagggccccagcgacagcgaggacatcgtgttcgaggagaccgacaccgacctgcaggagctgcaggccagcatggagcagctgctgagagagcagcccggcgaggagtacagcgaggaggaggagagcgtgctgaagaacagcgacgtggagcccaccgccaacggcaccgacgtggccgacgaggacgacaaccccagcagcgagagcgccctgaacgaggagtggcacagcgacaacagcgacggcgagatcgccagcgagtgcgagtgcgacagcgtgttcaaccacctggaggagctgagactgcacctggagcaggagatgggcttcgagaagttcttcgaggtgtacgagaagatcaaggccatccacgaggacgaggacgagaacatcgagatctgcagcaagatcgtgcagaacatcctgggcaacgagcaccagcacctgtacgccaagatcctgcacctggtgatggccgacggcgcctaccaggaggacaacgacgagtag

SEQ ID NO: 91138 - DNA, 3861 bp, synthetic construct
  misc_feature 1..3861: note = Description of Artificial Sequence: Synthetic coding sequence
  source 1..3861: mol_type = other DNA
atggagaagtacgtgagactgcagaagatcggcgagggcagcttcggcaaggccatcctggtgaagagcaccgaggacggcagacagtacgtgatcaaggagatcaacatcagcagaatgagcagcaaggagagagaggagagcagaagagaggtggccgtgctggccaacatgaagcaccccaacatcgtgcagtacagagagagcttcgaggagaacggcagcctgtacatcgtgatggactactgcgagggcggcgacctgttcaagagaatcaacgcccagaagggcgtgctgttccaggaggaccagatcctggactggttcgtgcagatctgcctggccctgaagcacgtgcacgacagaaagatcctgcacagagacatcaagagccagaacatcttcctgaccaaggacggcaccgtgcagctgggcgacttcggcatcgccagagtgctgaacagcaccgtggagctggccagaacctgcatcggcaccccctactacctgagccccgagatctgcgagaacaagccctacaacaacaagagcgacatctgggccctgggctgcgtgctgtacgagctgtgcaccctgaagcacgccttcgaggccggcagcatgaagaacctggtgctgaagatcatcagcggcagcttcccccccgtgagcctgcactacagctacgacctgagaagcctggtgagccagctgttcaagagaaaccccagagacagacccagcgtgaacagcatcctggagaagggcttcatcgccaagagaatcgagaagttcctgagcccccagctgatcgccgaggagttctgcctgaagaccttcagcaagttcggcagccagcccatccccgccaagagacccgccagcggccagaacagcatcagcgtgatgcccgcccagaagatcaccaagcccgccgccaagtacggcatccccctggcctacaagaagtacggcgacaagaagctgcacgagaagaagcccctgcagaagcacaagcaggcccaccagacccccgagaagagagtgaacaccggcgaggagagaagaaagatcagcgaggaggccgccagaaagagaagactggagttcatcgagaaggagaagaagcagaaggaccagatcatcagcctgatgaaggccgagcagatgaagagacaggagaaggagagactggagagaatcaacagagccagagagcagggctggagaaacgtgctgagcgccggcggcagcggcgaggtgaaggcccccttcctgggcagcggcggcaccatcgcccccagcagcttcagcagcagaggccagtacgagcactaccacgccatcttcgaccagatgcagcagcagagagccgaggacaacgaggccaagtggaagagagagatctacggcagaggcctgcccgagagaggcatcctgcccggcgtgagacccggcttcccctacggcgccgccggccaccaccacttccccgacgccgacgacatcagaaagaccctgaagagactgaaggccgtgagcaagcaggccaacgccaacagacagaagggccagctggccgtggagagagccaagcaggtggaggagttcctgcagagaaagagagaggccatgcagaacaaggccagagccgagggccacatgggcatcctgcagaacctggccgccatgtacggcggcagacccagcagcagcagaggcggcaagcccagaaacaaggaggaggaggtgtacctggccagactgagacagatcagactgcagaacttcaacgagagacagcagatcaaggccaagctgagaggcgagaagaaggaggccaaccacagcgagggccaggagggcagcgaggaggccgacatgagaagaaagaagatcgagagcctgaaggcccacgccaacgccagagccgccgtgctgaaggagcagctggagagaaagagaaaggaggcctacgagagagagaagaaggtgtgggaggagcacctggtggccaagggcgtgaagagcagcgacgtgagcccccccctgggccagcacgagaccggcggcagccccagcaagcagcagatgagaagcgtgatcagcgtgaccagcgccctgaaggaggtgggcgtggacagcagcctgaccgacaccagagagaccagcgaggagatgcagaagaccaacaacgccatcagcagcaagagagagatcctgagaagactgaacgagaacctgaaggcccaggaggacgagaagggcaagcagaacctgagcgacaccttcgagatcaacgtgcacgaggacgccaaggagcacgagaaggagaagagcgtgagcagcgacagaaagaagtgggaggccggcggccagctggtgatccccctggacgagctgaccctggacaccagcttcagcaccaccgagagacacaccgtgggcgaggtgatcaagctgggccccaacggcagccccagaagagcctggggcaagagccccaccgacagcgtgctgaagatcctgggcgaggccgagctgcagctgcagaccgagctgctggagaacaccaccatcagaagcgagatcagccccgagggcgagaagtacaagcccctgatcaccggcgagaagaaggtgcagtgcatcagccacgagatcaaccccagcgccatcgtggacagccccgtggagaccaagagccccgagttcagcgaggccagcccccagatgagcctgaagctggagggcaacctggaggagcccgacgacctggagaccgagatcctgcaggagcccagcggcaccaacaaggacgagagcctgccctgcaccatcaccgacgtgtggatcagcgaggagaaggagaccaaggagacccagagcgccgacagaatcaccatccaggagaacgaggtgagcgaggacggcgtgagcagcaccgtggaccagctgagcgacatccacatcgagcccggcaccaacgacagccagcacagcaagtgcgacgtggacaagagcgtgcagcccgagcccttcttccacaaggtggtgcacagcgagcacctgaacctggtgccccaggtgcagagcgtgcagtgcagccccgaggagagcttcgccttcagaagccacagccacctgccccccaagaacaagaacaagaacagcctgctgatcggcctgagcaccggcctgttcgacgccaacaaccccaagatgctgagaacctgcagcctgcccgacctgagcaagctgttcagaaccctgatggacgtgcccaccgtgggcgacgtgagacaggacaacctggagatcgacgagatcgaggacgagaacatcaaggagggccccagcgacagcgaggacatcgtgttcgaggagaccgacaccgacctgcaggagctgcaggccagcatggagcagctgctgagagagcagcccggcgaggagtacagcgaggaggaggagagcgtgctgaagaacagcgacgtggagcccaccgccaacggcaccgacgtggccgacgaggacgacaaccccagcagcgagagcgccctgaacgaggagtggcacagcgacaacagcgacggcgagatcgccagcgagtgcgagtgcgacagcgtgttcaaccacctggaggagctgagactgcacctggagcaggagatgggcttcgagaagttcttcgaggtgtacgagaagatcaaggccatccacgaggacgaggacgagaacatcgagatctgcagcaagatcgtgcagaacatcctgggcaacgagcaccagcacctgtacgccaagatcctgcacctggtgatggccgacggcgcctaccaggaggacaacgacgagtag

SEQ ID NO: 91139 - DNA, 3645 bp, synthetic construct
  misc_feature 1..3645: note = Description of Artificial Sequence: Synthetic coding sequence
  source 1..3645: mol_type = other DNA
atggagaagtacgtgagactgcagaagatcggcgagggcagcttcggcaaggccatcctggtgaagagcaccgaggacggcagacagtacgtgatcaaggagatcaacatcagcagaatgagcagcaaggagagagaggagagcagaagagaggtggccgtgctggccaacatgaagcaccccaacatcgtgcagtacagagagagcttcgaggagaacggcagcctgtacatcgtgatggactactgcgagggcggcgacctgttcaagagaatcaacgcccagaagggcgtgctgttccaggaggaccagatcctggactggttcgtgcagatctgcctggccctgaagcacgtgcacgacagaaagatcctgcacagagacatcaagagccagaacatcttcctgaccaaggacggcaccgtgcagctgggcgacttcggcatcgccagagtgctgaacagcaccgtggagctggccagaacctgcatcggcaccccctactacctgagccccgagatctgcgagaacaagccctacaacaacaagagcgacatctgggccctgggctgcgtgctgtacgagctgtgcaccctgaagcacgccttcgaggccggcagcatgaagaacctggtgctgaagatcatcagcggcagcttcccccccgtgagcctgcactacagctacgacctgagaagcctggtgagccagctgttcaagagaaaccccagagacagacccagcgtgaacagcatcctggagaagggcttcatcgccaagagaatcgagaagttcctgagcccccagctgatcgccgaggagttctgcctgaagaccttcagcaagttcggcagccagcccatccccgccaagagacccgccagcggccagaacagcatcagcgtgatgcccgcccagaagatcaccaagcccgccgccaagtacggcatccccctggcctacaagaagtacggcgacaagaagctgcacgagaagaagcccctgcagaagcacaagcaggcccaccagacccccgagaagagagtgaacaccggcgaggagagaagaaagatcagcgaggaggccgccagaaagagaagactggagttcatcgagaaggagaagaagcagaaggaccagatcatcagcctgatgaaggccgagcagatgaagagacaggagaaggagagactggagagaatcaacagagccagagagcagggctggagaaacgtgctgagcgccggcggcagcggcgaggtgaaggcccccttcctgggcagcggcggcaccatcgcccccagcagcttcagcagcagaggccagtacgagcactaccacgccatcttcgaccagatgcagcagcagagagccgaggacaacgaggccaagtggaagagagagatctacggcagaggcctgcccgagagacagaagggccagctggccgtggagagagccaagcaggtggaggagttcctgcagagaaagagagaggccatgcagaacaaggccagagccgagggccacatggtgtacctggccagactgagacagatcagactgcagaacttcaacgagagacagcagatcaaggccaagctgagaggcgagaagaaggaggccaaccacagcgagggccaggagggcagcgaggaggccgacatgagaagaaagaagatcgagagcctgaaggcccacgccaacgccagagccgccgtgctgaaggagcagctggagagaaagagaaaggaggcctacgagagagagaagaaggtgtgggaggagcacctggtggccaagggcgtgaagagcagcgacgtgagcccccccctgggccagcacgagaccggcggcagccccagcaagcagcagatgagaagcgtgatcagcgtgaccagcgccctgaaggaggtgggcgtggacagcagcctgaccgacaccagagagaccagcgaggagatgcagaagaccaacaacgccatcagcagcaagagagagatcctgagaagactgaacgagaacctgaaggcccaggaggacgagaagggcaagcagaacctgagcgacaccttcgagatcaacgtgcacgaggacgccaaggagcacgagaaggagaagagcgtgagcagcgacagaaagaagtgggaggccggcggccagctggtgatccccctggacgagctgaccctggacaccagcttcagcaccaccgagagacacaccgtgggcgaggtgatcaagctgggccccaacggcagccccagaagagcctggggcaagagccccaccgacagcgtgctgaagatcctgggcgaggccgagctgcagctgcagaccgagctgctggagaacaccaccatcagaagcgagatcagccccgagggcgagaagtacaagcccctgatcaccggcgagaagaaggtgcagtgcatcagccacgagatcaaccccagcgccatcgtggacagccccgtggagaccaagagccccgagttcagcgaggccagcccccagatgagcctgaagctggagggcaacctggaggagcccgacgacctggagaccgagatcctgcaggagcccagcggcaccaacaaggacgagagcctgccctgcaccatcaccgacgtgtggatcagcgaggagaaggagaccaaggagacccagagcgccgacagaatcaccatccaggagaacgaggtgagcgaggacggcgtgagcagcaccgtggaccagctgagcgacatccacatcgagcccggcaccaacgacagccagcacagcaagtgcgacgtggacaagagcgtgcagcccgagcccttcttccacaaggtggtgcacagcgagcacctgaacctggtgccccaggtgcagagcgtgcagtgcagccccgaggagagcttcgccttcagaagccacagccacctgccccccaagaacaagaacaagaacagcctgctgatcggcctgagcaccggcctgttcgacgccaacaaccccaagatgctgagaacctgcagcctgcccgacctgagcaagctgttcagaaccctgatggacgtgcccaccgtgggcgacgtgagacaggacaacctggagatcgacgagatcgaggacgagaacatcaaggagggccccagcgacagcgaggacatcgtgttcgaggagaccgacaccgacctgcaggagctgcaggccagcatggagcagctgctgagagagcagcccggcgaggagtacagcgaggaggaggagagcgtgctgaagaacagcgacgtggagcccaccgccaacggcaccgacgtggccgacgaggacgacaaccccagcagcgagagcgccctgaacgaggagtggcacagcgacaacagcgacggcgagatcgccagcgagtgcgagtgcgacagcgtgttcaaccacctggaggagctgagactgcacctggagcaggagatgggcttcgagaagttcttcgaggtgtacgagaagatcaaggccatccacgaggacgaggacgagaacatcgagatctgcagcaagatcgtgcagaacatcctgggcaacgagcaccagcacctgtacgccaagatcctgcacctggtgatggccgacggcgcctaccaggaggacaacgacgagtag

SEQ ID NO: 91140 - DNA, 3570 bp, synthetic construct
  misc_feature 1..3570: note = Description of Artificial Sequence: Synthetic coding sequence
  source 1..3570: mol_type = other DNA
atggagaagtacgtgagactgcagaagatcggcgagggcagcttcggcaaggccatcctggtgaagagcaccgaggacggcagacagtacgtgatcaaggagatcaacatcagcagaatgagcagcaaggagagagaggagagcagaagagaggtggccgtgctggccaacatgaagcaccccaacatcgtgcagtacagagagagcttcgaggagaacggcagcctgtacatcgtgatggactactgcgagggcggcgacctgttcaagagaatcaacgcccagaagggcgtgctgttccaggaggaccagatcctggactggttcgtgcagatctgcctggccctgaagcacgtgcacgacagaaagatcctgcacagagacatcaagagccagaacatcttcctgaccaaggacggcaccgtgcagctgggcgacttcggcatcgccagagtgctgaacagcaccgtggagctggccagaacctgcatcggcaccccctactacctgagccccgagatctgcgagaacaagccctacaacaacaagagcgacatctgggccctgggctgcgtgctgtacgagctgtgcaccctgaagcacgccttcgaggccggcagcatgaagaacctggtgctgaagatcatcagcggcagcttcccccccgtgagcctgcactacagctacgacctgagaagcctggtgagccagctgttcaagagaaaccccagagacagacccagcgtgaacagcatcctggagaagggcttcatcgccaagagaatcgagaagttcctgagcccccagctgatcgccgaggagttctgcctgaagaccttcagcaagttcggcagccagcccatccccgccaagagacccgccagcggccagaacagcatcagcgtgatgcccgcccagaagatcaccaagcccgccgccaagtacggcatccccctggcctacaagaagtacggcgacaagaagctgcacgagaagaagcccctgcagaagcacaagcaggcccaccagacccccgagaagagagtgaacaccggcgaggagagaagaaagatcagcgaggaggccgccagaaagagaagactggagttcatcgagaaggagaagaagcagaaggaccagatcatcagcctgatgaaggccgagcagatgaagagacaggagaaggagagagcccccttcctgggcagcggcggcaccatcgcccccagcagcttcagcagcagaggccagtacgagcactaccacgccatcttcgaccagatgcagcagcagagagccgaggacaacgaggccaagtggaagagagagatctacggcagaggcctgcccgagagacagaagggccagctggccgtggagagagccaagcaggtggaggagttcctgcagagaaagagagaggccatgcagaacaaggccagagccgagggccacatggtgtacctggccagactgagacagatcagactgcagaacttcaacgagagacagcagatcaaggccaagctgagaggcgagaagaaggaggccaaccacagcgagggccaggagggcagcgaggaggccgacatgagaagaaagaagatcgagagcctgaaggcccacgccaacgccagagccgccgtgctgaaggagcagctggagagaaagagaaaggaggcctacgagagagagaagaaggtgtgggaggagcacctggtggccaagggcgtgaagagcagcgacgtgagcccccccctgggccagcacgagaccggcggcagccccagcaagcagcagatgagaagcgtgatcagcgtgaccagcgccctgaaggaggtgggcgtggacagcagcctgaccgacaccagagagaccagcgaggagatgcagaagaccaacaacgccatcagcagcaagagagagatcctgagaagactgaacgagaacctgaaggcccaggaggacgagaagggcaagcagaacctgagcgacaccttcgagatcaacgtgcacgaggacgccaaggagcacgagaaggagaagagcgtgagcagcgacagaaagaagtgggaggccggcggccagctggtgatccccctggacgagctgaccctggacaccagcttcagcaccaccgagagacacaccgtgggcgaggtgatcaagctgggccccaacggcagccccagaagagcctggggcaagagccccaccgacagcgtgctgaagatcctgggcgaggccgagctgcagctgcagaccgagctgctggagaacaccaccatcagaagcgagatcagccccgagggcgagaagtacaagcccctgatcaccggcgagaagaaggtgcagtgcatcagccacgagatcaaccccagcgccatcgtggacagccccgtggagaccaagagccccgagttcagcgaggccagcccccagatgagcctgaagctggagggcaacctggaggagcccgacgacctggagaccgagatcctgcaggagcccagcggcaccaacaaggacgagagcctgccctgcaccatcaccgacgtgtggatcagcgaggagaaggagaccaaggagacccagagcgccgacagaatcaccatccaggagaacgaggtgagcgaggacggcgtgagcagcaccgtggaccagctgagcgacatccacatcgagcccggcaccaacgacagccagcacagcaagtgcgacgtggacaagagcgtgcagcccgagcccttcttccacaaggtggtgcacagcgagcacctgaacctggtgccccaggtgcagagcgtgcagtgcagccccgaggagagcttcgccttcagaagccacagccacctgccccccaagaacaagaacaagaacagcctgctgatcggcctgagcaccggcctgttcgacgccaacaaccccaagatgctgagaacctgcagcctgcccgacctgagcaagctgttcagaaccctgatggacgtgcccaccgtgggcgacgtgagacaggacaacctggagatcgacgagatcgaggacgagaacatcaaggagggccccagcgacagcgaggacatcgtgttcgaggagaccgacaccgacctgcaggagctgcaggccagcatggagcagctgctgagagagcagcccggcgaggagtacagcgaggaggaggagagcgtgctgaagaacagcgacgtggagcccaccgccaacggcaccgacgtggccgacgaggacgacaaccccagcagcgagagcgccctgaacgaggagtggcacagcgacaacagcgacggcgagatcgccagcgagtgcgagtgcgacagcgtgttcaaccacctggaggagctgagactgcacctggagcaggagatgggcttcgagaagttcttcgaggtgtacgagaagatcaaggccatccacgaggacgaggacgagaacatcgagatctgcagcaagatcgtgcagaacatcctgggcaacgagcaccagcacctgtacgccaagatcctgcacctggtgatggccgacggcgcctaccaggaggacaacgacgagtag

SEQ ID NO: 91141 - DNA, 1155 bp, synthetic construct
  misc_feature 1..1155: note = Description of Artificial Sequence: Synthetic coding sequence
  source 1..1155: mol_type = other DNA
atgcccagcagagccgaggactacgaggtgctgtacaccatcggcaccggcagctacggcagatgccagaagatcagaagaaagagcgacggcaagatcctggtgtggaaggagctggactacggcagcatgaccgaggccgagaagcagatgctggtgagcgaggtgaacctgctgagagagctgaagcaccccaacatcgtgagatactacgacagaatcatcgacagaaccaacaccaccctgtacatcgtgatggagtactgcgagggcggcgacctggccagcgtgatcaccaagggcaccaaggagagacagtacctggacgaggagttcgtgctgagagtgatgacccagctgaccctggccctgaaggagtgccacagaagaagcgacggcggccacaccgtgctgcacagagacctgaagcccgccaacgtgttcctggacggcaagcagaacgtgaagctgggcgacttcggcctggccagaatcctgaaccacgacaccagcttcgccaagaccttcgtgggcaccccctactacatgagccccgagcagatgaacagaatgagctacaacgagaagagcgacatctggagcctgggctgcctgctgtacgagctgtgcgccctgatgccccccttcaccgccttcagccagaaggagctggccggcaagatcagagagggcaagttcagaagaatcccctacagatacagcgacgagctgaacgagatcatcaccagaatgctgaacctgaaggactaccacagacccagcgtggaggagatcctggagaaccccctgatcgccgacctggtggccgacgagcagagaagaaacctggagagaagaggcagacagctgggcgagcccgagaagagccaggacagcagccccgtgctgagcgagctgaagctgaaggagatccagctgcaggagagagagagagccctgaaggccagagaggagagactggagcagaaggagcaggagctgtgcgtgagagagagactggccgaggacaagctggccagagccgagaacctgctgaagaactacagcctgctgaaggagagaaagttcctgagcctggccagcaaccccggcatgagaatcaacctggtgaacagaagctggtgctacaagtag

SEQ ID NO: 91142 - DNA, 1338 bp, synthetic construct
  misc_feature 1..1338: note = Description of Artificial Sequence: Synthetic coding sequence
  source 1..1338: mol_type = other DNA
atgcccagcagagccgaggactacgaggtgctgtacaccatcggcaccggcagctacggcagatgccagaagatcagaagaaagagcgacggcaagatcctggtgtggaaggagctggactacggcagcatgaccgaggccgagaagcagatgctggtgagcgaggtgaacctgctgagagagctgaagcaccccaacatcgtgagatactacgacagaatcatcgacagaaccaacaccaccctgtacatcgtgatggagtactgcgagggcggcgacctggccagcgtgatcaccaagggcaccaaggagagacagtacctggacgaggagttcgtgctgagagtgatgacccagctgaccctggccctgaaggagtgccacagaagaagcgacggcggccacaccgtgctgcacagagacctgaagcccgccaacgtgttcctggacggcaagcagaacgtgaagctgggcgacttcggcctggccagaatcctgaaccacgacaccagcttcgccaagaccttcgtgggcaccccctactacatgagccccgagcagatgaacagaatgagctacaacgagaagagcgacatctggagcctgggctgcctgctgtacgagctgtgcgccctgatgccccccttcaccgccttcagccagaaggagctggccggcaagatcagagagggcaagttcagaagaatcccctacagatacagcgacgagctgaacgagatcatcaccagaatgctgaacctgaaggactaccacagacccagcgtggaggagatcctggagaaccccctgatcgccgacctggtggccgacgagcagagaagaaacctggagagaagaggcagacagctgggcgagcccgagaagagccaggacagcagccccgtgctgagcgagctgaagctgaaggagatccagctgcaggagagagagagagccctgaaggccagagaggagagactggagcagaaggagcaggagctgtgcgtgagagagagactggccgaggacaagctggccagagccgagaacctgctgaagaactacagcctgctgaaggagagaaagttcctgagcctggccagcaaccccgagctgctgaacctgcccagcagcgtgatcaagaagaaggtgcacttcagcggcgagagcaaggagaacatcatgagaagcgagaacagcgagagccagctgaccagcaagagcaagtgcaaggacctgaagaagagactgcacgccgcccagctgagagcccaggccctgagcgacatcgagaagaactaccagctgaagagcagacagatcctgggcatgagatag

SEQ ID NO: 91143 - DNA, 1209 bp, synthetic construct
  misc_feature 1..1209: note = Description of Artificial Sequence: Synthetic coding sequence
  source 1..1209: mol_type = other DNA
atgaccgaggccgagaagcagatgctggtgagcgaggtgaacctgctgagagagctgaagcaccccaacatcgtgagatactacgacagaatcatcgacagaaccaacaccaccctgtacatcgtgatggagtactgcgagggcggcgacctggccagcgtgatcaccaagggcaccaaggagagacagtacctggacgaggagttcgtgctgagagtgatgacccagctgaccctggccctgaaggagtgccacagaagaagcgacggcggccacaccgtgctgcacagagacctgaagcccgccaacgtgttcctggacggcaagcagaacgtgaagctgggcgacttcggcctggccagaatcctgaaccacgacaccagcttcgccaagaccttcgtgggcaccccctactacatgagccccgagcagatgaacagaatgagctacaacgagaagagcgacatctggagcctgggctgcctgctgtacgagctgtgcgccctgatgccccccttcaccgccttcagccagaaggagctggccggcaagatcagagagggcaagttcagaagaatcccctacagatacagcgacgagctgaacgagatcatcaccagaatgctgaacctgaaggactaccacagacccagcgtggaggagatcctggagaaccccctgatcgccgacctggtggccgacgagcagagaagaaacctggagagaagaggcagacagctgggcgagcccgagaagagccaggacagcagccccgtgctgagcgagctgaagctgaaggagatccagctgcaggagagagagagagccctgaaggccagagaggagagactggagcagaaggagcaggagctgtgcgtgagagagagactggccgaggacaagctggccagagccgagaacctgctgaagaactacagcctgctgaaggagagaaagttcctgagcctggccagcaaccccgagctgctgaacctgcccagcagcgtgatcaagaagaaggtgcacttcagcggcgagagcaaggagaacatcatgagaagcgagaacagcgagagccagctgaccagcaagagcaagtgcaaggacctgaagaagagactgcacgccgcccagctgagagcccaggccctgagcgacatcgagaagaactaccagctgaagagcagacagatcctgggcatgagatag

SEQ ID NO: 91144 - DNA, 1521 bp, synthetic construct
  misc_feature 1..1521: note = Description of Artificial Sequence: Synthetic coding sequence
  source 1..1521: mol_type = other DNA
atggacgactacatggtgctgagaatgatcggcgagggcagcttcggcagagccctgctggtgcagcacgagagcagcaaccagatgttcgccatgaaggagatcagactgcccaagagcttcagcaacacccagaacagcagaaaggaggccgtgctgctggccaagatgaagcaccccaacatcgtggccttcaaggagagcttcgaggccgagggccacctgtacatcgtgatggagtactgcgacggcggcgacctgatgcagaagatcaagcagcagaagggcaagctgttccccgaggacatgatcctgaactggttcacccagatgtgcctgggcgtgaaccacatccacaagaagagagtgctgcacagagacatcaagagcaagaacatcttcctgacccagaacggcaaggtgaagctgggcgacttcggcagcgccagactgctgagcaaccccatggccttcgcctgcacctacgtgggcaccccctactacgtgccccccgagatctgggagaacctgccctacaacaacaagagcgacatctggagcctgggctgcatcctgtacgagctgtgcaccctgaagcaccccttccaggccaacagctggaagaacctgatcctgaaggtgtgccagggctgcatcagccccctgcccagccactacagctacgagctgcagttcctggtgaagcagatgttcaagagaaaccccagccacagacccagcgccaccaccctgctgagcagaggcatcgtggccagactggtgcagaagtgcctgccccccgagatcatcatggagtacggcgaggaggtgctggaggagatcaagaacagcaagcacaacacccccagaaagaaggccaaccccagcagaatcagaatcgccctgggcaacgaggccagcaccgtgcaggaggaggagcaggacagaaagggcagccacaccgacctggagagcatcaacgagaacctggtggagagcgccctgagaagagtgaacagagaggagaagggcaacaagagcgtgcacctgagaaaggccagcagccccaacctgcacagaagacagtgggagaagaacgtgcccaacaccgccctgaccgccctggagaacgccagcatcctgaccagcagcctgaccgccgaggacgacagaggcggcagcgtgatcaagtacagcaagaacaccaccagaaagcagtggctgaaggagacccccgacaccctgctgaacatcctgaagaacgccgacctgagcctggccttccagacctacaccatctacagacccggcagcgagggcttcctgaagggccccctgagcgaggagaccgaggccagcgacagcgtggacggcggccacgacagcgtgatcctggaccccgagagactggagcccggcctggacgaggaggacaccgacttcgaggaggaggacgacaaccccgactgggtgagcgagctgaagaagagagccggctggcagggcctgtgcgacagatag

SEQ ID NO: 91145 - DNA, 1521 bp, synthetic construct; identical to SEQ ID NO: 91144
  misc_feature 1..1521: note = Description of Artificial Sequence: Synthetic coding sequence
  source 1..1521: mol_type = other DNA

SEQ ID NO: 91146 - DNA, 1470 bp, synthetic construct
  misc_feature 1..1470: note = Description of Artificial Sequence: Synthetic coding sequence
  source 1..1470: mol_type = other DNA
atggacgactacatggtgctgagaatgatcggcgagggcagcttcggcagagccctgctggtgcagcacgagagcagcaaccagatgttcgccatgaaggagatcagactgcccaagagcttcagcaacacccagaacagcagaaaggaggccgtgctgctggccaagatgaagcaccccaacatcgtggccttcaaggagagcttcgaggccgagggccacctgtacatcgtgatggagtactgcgacggcggcgacctgatgcagaagatcaagcagcagaagggcaagctgttccccgaggacatgatcctgaactggttcacccagatgtgcctgggcgtgaaccacatccacaagaagagagtgctgcacagagacatcaagagcaagaacatcttcctgacccagaacggcaaggtgaagctgggcgacttcggcagcgccagactgctgagcaaccccatggccttcgcctgcacctacgtgggcaccccctactacgtgccccccgagatctgggagaacctgccctacaacaacaagagcgacatctggagcctgggctgcatcctgtacgagctgtgcaccctgaagcaccccttccaggccaacagctggaagaacctgatcctgaaggtgtgccagggctgcatcagccccctgcccagccactacagctacgagctgcagttcctggtgaagcagatgttcaagagaaaccccagccacagacccagcgccaccaccctgctgagcagaggcatcgtggccagactggtgcagaagtgcctgccccccgagatcatcatggagtacggcgaggaggtgctggaggagatcaagaacagcaagcacaacacccccagaaagaagcaggaggaggagcaggacagaaagggcagccacaccgacctggagagcatcaacgagaacctggtggagagcgccctgagaagagtgaacagagaggagaagggcaacaagagcgtgcacctgagaaaggccagcagccccaacctgcacagaagacagtgggagaagaacgtgcccaacaccgccctgaccgccctggagaacgccagcatcctgaccagcagcctgaccgccgaggacgacagaggcggcagcgtgatcaagtacagcaagaacaccaccagaaagcagtggctgaaggagacccccgacaccctgctgaacatcctgaagaacgccgacctgagcctggccttccagacctacaccatctacagacccggcagcgagggcttcctgaagggccccctgagcgaggagaccgaggccagcgacagcgtggacggcggccacgacagcgtgatcctggaccccgagagactggagcccggcctggacgaggaggacaccgacttcgaggaggaggacgacaaccccgactgggtgagcgagctgaagaagagagccggctggcagggcctgtgcgacagatag

SEQ ID NO: 91147 - DNA, 1533 bp, synthetic construct
  misc_feature 1..1533: note = Description of Artificial Sequence: Synthetic coding sequence
  source 1..1533: mol_type = other DNA
atgcagttcggcagagcccacggcgactgcgtgagcggcgcccagctgtgcggctgccccagcatggacgactacatggtgctgagaatgatcggcgagggcagcttcggcagagccctgctggtgcagcacgagagcagcaaccagatgttcgccatgaaggagatcagactgcccaagagcttcagcaacacccagaacagcagaaaggaggccgtgctgctggccaagatgaagcaccccaacatcgtggccttcaaggagagcttcgaggccgagggccacctgtacatcgtgatggagtactgcgacggcggcgacctgatgcagaagatcaagcagcagaagggcaagctgttccccgaggacatgatcctgaactggttcacccagatgtgcctgggcgtgaaccacatccacaagaagagagtgctgcacagagacatcaagagcaagaacatcttcctgacccagaacggcaaggtgaagctgggcgacttcggcagcgccagactgctgagcaaccccatggccttcgcctgcacctacgtgggcaccccctactacgtgccccccgagatctgggagaacctgccctacaacaacaagagcgacatctggagcctgggctgcatcctgtacgagctgtgcaccctgaagcaccccttccaggccaacagctggaagaacctgatcctgaaggtgtgccagggctgcatcagccccctgcccagccactacagctacgagctgcagttcctggtgaagcagatgttcaagagaaaccccagccacagacccagcgccaccaccctgctgagcagaggcatcgtggccagactggtgcagaagtgcctgccccccgagatcatcatggagtacggcgaggaggtgctggaggagatcaagaacagcaagcacaacacccccagaaagaagcaggaggaggagcaggacagaaagggcagccacaccgacctggagagcatcaacgagaacctggtggagagcgccctgagaagagtgaacagagaggagaagggcaacaagagcgtgcacctgagaaaggccagcagccccaacctgcacagaagacagtgggagaagaacgtgcccaacaccgccctgaccgccctggagaacgccagcatcctgaccagcagcctgaccgccgaggacgacagaggcggcagcgtgatcaagtacagcaagaacaccaccagaaagcagtggctgaaggagacccccgacaccctgctgaacatcctgaagaacgccgacctgagcctggccttccagacctacaccatctacagacccggcagcgagggcttcctgaagggccccctgagcgaggagaccgaggccagcgacagcgtggacggcggccacgacagcgtgatcctggaccccgagagactggagcccggcctggacgaggaggacaccgacttcgaggaggaggacgacaaccccgactgggtgagcgagctgaagaagagagccggctggcagggcctgtgcgacagatag

SEQ ID NO: 91148 - DNA, 177 bp, synthetic construct
  misc_feature 1..177: note = Description of Artificial Sequence: Synthetic coding sequence
  source 1..177: mol_type = other DNA
atggacgactacatggtgctgagaatgatcggcgagggcagcttcggcagagccctgctggtgcagcacgagagcagcaaccagatgttcgccatgaaggagatcagactgcccaagagcttcagcaacacccagaacagcagaaaggaggccgtgctgctggccaagatgaagtag

SEQ ID NO: 91149 - DNA, 510 bp, synthetic construct
  misc_feature 1..510: note = Description of Artificial Sequence: Synthetic coding sequence
  source 1..510: mol_type = other DNA
atggccagaggcggcgacaccggctgcaccggccccagcgagaccagcgccagcggcgccgccgccatcgccctgcccggcctggagggccccgccaccgacgcccagtgccagaccctgcccctgaccgtgctgaagagcagaagccccagccccagaagcctgccccccgccctgagctgcccccccccccagcccgccatgctggagcacctgagcagcctgcccacccagatggactacaagggccagaagctggccgagcagatgttccagggcatcatcctgttcagcgccatcgtgggcttcatctacggctacgtggccgagcagttcggctggaccgtgtacatcgtgatggccggcttcgccttcagctgcctgctgaccctgcccccctggcccatctacagaagacaccccctgaagtggctgcccgtgcaggagagcagcaccgacgacaagaagcccggcgagagaaagatcaagagacacgccaagaacaactag

SEQ ID NO: 91150 - DNA, 2259 bp, synthetic construct
  misc_feature 1..2259: note = Description of Artificial Sequence: Synthetic coding sequence
  source 1..2259: mol_type = other DNA
atgcccctggccgcctactgctacctgagagtggtgggcaagggcagctacggcgaggtgaccctggtgaagcacagaagagacggcaagcagtacctgcacgagaagcacatcctgcacagagacctgaagacccagaacgtgttcctgaccagaaccaacatcatcaaggtgggcgacctgggcatcgccagagtgctggagaaccactgcgacatggccagcaccctgatcggcaccccctactacatgagccccgagctgttcagcaacaagccctacaactacaagagcgacgtgtgggccctgggctgctgcgtgtacgagatggccaccctgaagcacgccttcaacgccaaggacatgaacagcctggtgtacagaatcatcgagggcaagctgccccccatgcccagagactacagccccgagctggccgagctgatcagaaccatgctgagcaagagacccgaggagagacccagcgtgagaagcatcctgagacagccctacatcaagagacagatcagcttcttcctggaggccaccaagatcaagaccagcaagaacaacatcaagaacggcgacagccagagcaagcccttcgccaccgtggtgagcggcgaggccgagagcaaccacgaggtgatccacccccagcccctgagcagcgagggcagccagacctacatcatgggcgagggcaagtgcctgagccaggagaagcccagagccagcggcctgctgaagagccccgccagcctgaaggcccacacctgcaagcaggacctgagcaacaccaccgagctggccaccatcagcagcgtgaacatcgacatcctgcccgccaagggcagagacagcgtgagcgacggcttcgtgcaggagaaccagcccagatacctggacgccagcaacgagctgggcggcatctgcagcatcagccaggtggaggaggagatgctgcaggacaacaccaagagcagcgcccagcccgagaacctgatccccatgtggagcagcgacatcgtgaccggcgagaagaacgagcccgtgaagcccctgcagcccctgatcaaggagcagaagcccaaggaccagagcctggccctgagccccaagctggagtgcagcggcaccatcctggcccacagcaacctgagactgctgggcagcagcgacagccccgccagcgccagcagagtggccggcatcaccggcgtgtgccaccacgcccaggaccaggtggccggcgagtgcatcatcgagaagcagggcagaatccaccccgacctgcagccccacaacagcggcagcgagcccagcctgagcagacagagaagacagaagagaagagagcagaccgagcacagaggcgagaagagacaggtgagaagagacctgttcgccttccaggagagcccccccagattcctgcccagccaccccatcgtgggcaaggtggacgtgaccagcacccagaaggaggccgagaaccagagaagagtggtgaccggcagcgtgagcagcagcagaagcagcgagatgagcagcagcaaggacagacccctgagcgccagagagagaagaagactgaagcagagccaggaggagatgagcagcagcggccccagcgtgagaaaggccagcctgagcgtggccggccccggcaagccccaggaggaggaccagcccctgcccgccagaagactgagcagcgactgcagcgtgacccaggagagaaagcagatccactgcctgagcgaggacgagctgagcagcagcaccagcagcaccgacaagagcgacggcgactacggcgagggcaagggccagaccaacgagatcaacgccctggtgcagctgatgacccagaccctgaagctggacagcaaggagagctgcgaggacgtgcccgtggccaaccccgtgagcgagttcaagctgcacagaaagtacagagacaccctgatcctgcacggcaaggtggccgaggaggccgaggagatccacttcaaggagctgcccagcgccatcatgcccggcagcgagaagatcagaagactggtggaggtgctgagaaccgacgtgatcagaggcctgggcgtgcagctgctggagcaggtgtacgacctgctggaggaggaggacgagttcgacagagaggtgagactgagagagcacatgggcgagaagtacaccacctacagcgtgaaggccagacagctgaagttcttcgaggagaacatgaacttctag

SEQ ID NO: 91151 - DNA, 942 bp, synthetic construct
  misc_feature 1..942: note = Description of Artificial Sequence: Synthetic coding sequence
  source 1..942: mol_type = other DNA
atggccggccagcccggccacatgccccacggcggcagcagcaacaacctgtgccacaccctgggccccgtgcacccccccgacccccagagacaccccaacaccctgagcttcagatgcagcctggccgacttccagatcgagaagaagatcggcagaggccagttcagcgaggtgtacaaggccacctgcctgctggacagaaagaccgtggccctgaagaaggtgcagatcttcgagatgatggacgccaaggccagacaggactgcgtgaaggagatcggcctgctgaagcagctgaaccaccccaacatcatcaagtacctggacagcttcatcgaggacaacgagctgaacatcgtgctggagctggccgacgccggcgacctgagccagatgatcaagtacttcaagaagcagaagagactgatccccgagagaaccgtgtggaagtacttcgtgcagctgtgcagcgccgtggagcacatgcacagcagaagagtgatgcacagagacatcaagcccgccaacgtgttcatcaccgccaccggcgtggtgaagctgggcgacctgggcctgggcagattcttcagcagcgagaccaccgccgcccacagcctggtgggcaccccctactacatgagccccgagagaatccacgagaacggctacaacttcaagagcgacatctggagcctgggctgcctgctgtacgagatggccgccctgcagagccccttctacggcgacaagatgaacctgttcagcctgtgccagaagatcgagcagtgcgactacccccccctgcccggcgagcactacagcgagaagctgagagagctggtgagcatgtgcatctgccccgacccccaccagagacccgacatcggctacgtgcaccaggtggccaagcagatgcacatctggatgagcagcacctag

SEQ ID NO: 91152 - DNA, 624 bp, synthetic construct
  misc_feature 1..624: note = Description of Artificial Sequence: Synthetic coding sequence
  source 1..624: mol_type = other DNA
atggccggccagcccggccacatgccccacggcggcagcagcaacaacctgtgccacaccctgggccccgtgcacccccccgacccccagagacaccccaacaccctgagcttcagatgcagcctggccgacttccagatcgagaagaagatcggcagaggccagttcagcgaggtgtacaaggccacctgcctgctggacagaaagaccgtggccctgaagaaggtgcagatcttcgagatgatggacgccaaggccagacaggactgcgtgaaggagatcggcctgctgaagcagctgaaccaccccaacatcatcaagtacctggacagcttcatcgaggacaacgagctgaacatcgtgctggagctggccgacgccggcgacctgagccagatgatcaagtacttcaagaagcagaagagactgatccccgagagaaccgtgtggaagtacttcgtgcagctgtgcagcgccgtggagcacatgcacagcagaagagtgatgcacagagacatcaagcccgccaacgtgttcatcaccgccaccggcgtggtgaagctgggcgacctgggcctgggcagattcttcagcagcgagaccaccgccgcccacagcctgtag

SEQ ID NO: 91153 - DNA, 1044 bp, synthetic construct
  misc_feature 1..1044: note = Description of Artificial Sequence: Synthetic coding sequence
  source 1..1044: mol_type = other DNA
atgcccagaagagaggtgtgctgggaggccgcccacttcagacaggaggagcagagcctgcccagacccagagtgagagccctggtgagactggcctgcagaatggccggccagcccggccacatgccccacggcggcagcagcaacaacctgtgccacaccctgggccccgtgcacccccccgacccccagagacaccccaacaccctgagcttcagatgcagcctggccgacttccagatcgagaagaagatcggcagaggccagttcagcgaggtgtacaaggccacctgcctgctggacagaaagaccgtggccctgaagaaggtgcagatcttcgagatgatggacgccaaggccagacaggactgcgtgaaggagatcggcctgctgaagcagctgaaccaccccaacatcatcaagtacctggacagcttcatcgaggacaacgagctgaacatcgtgctggagctggccgacgccggcgacctgagccagatgatcaagtacttcaagaagcagaagagactgatccccgagagaaccgtgtggaagtacttcgtgcagctgtgcagcgccgtggagcacatgcacagcagaagagtgatgcacagagacatcaagcccgccaacgtgttcatcaccgccaccggcgtggtgaagctgggcgacctgggcctgggcagattcttcagcagcgagaccaccgccgcccacagcctggtgggcaccccctactacatgagccccgagagaatccacgagaacggctacaacttcaagagcgacatctggagcctgggctgcctgctgtacgagatggccgccctgcagagccccttctacggcgacaagatgaacctgttcagcctgtgccagaagatcgagcagtgcgactacccccccctgcccggcgagcactacagcgagaagctgagagagctggtgagcatgtgcatctgccccgacccccaccagagacccgacatcggctacgtgcaccaggtggccaagcagatgcacatctggatgagcagcacctag

SEQ ID NO: 91154 - DNA, 738 bp, synthetic construct
  misc_feature 1..738: note = Description of Artificial Sequence: Synthetic coding sequence
  source 1..738: mol_type = other DNA
atggccggccagcccggccacatgccccacggcggcagcagcaacaacctgtgccacaccctgggccccgtgcacccccccgacccccagcagctgaaccaccccaacatcatcaagtacctggacagcttcatcgaggacaacgagctgaacatcgtgctggagctggccgacgccggcgacctgagccagatgatcaagtacttcaagaagcagaagagactgatccccgagagaaccgtgtggaagtacttcgtgcagctgtgcagcgccgtggagcacatgcacagcagaagagtgatgcacagagacatcaagcccgccaacgtgttcatcaccgccaccggcgtggtgaagctgggcgacctgggcctgggcagattcttcagcagcgagaccaccgccgcccacagcctggtgggcaccccctactacatgagccccgagagaatccacgagaacggctacaacttcaagagcgacatctggagcctgggctgcctgctgtacgagatggccgccctgcagagccccttctacggcgacaagatgaacctgttcagcctgtgccagaagatcgagcagtgcgactacccccccctgcccggcgagcactacagcgagaagctgagagagctggtgagcatgtgcatctgccccgacccccaccagagacccgacatcggctacgtgcaccaggtggccaagcagatgcacatctggatgagcagcacctag

SEQ ID NO: 91155 - DNA, 942 bp, synthetic construct; identical to SEQ ID NO: 91151
  misc_feature 1..942: note = Description of Artificial Sequence: Synthetic coding sequence
  source 1..942: mol_type = other DNA

SEQ ID NO: 91156 - DNA, 1044 bp, synthetic construct; identical to SEQ ID NO: 91153
  misc_feature 1..1044: note = Description of Artificial Sequence: Synthetic coding sequence
  source 1..1044: mol_type = other DNA

SEQ ID NO: 91157 - DNA, 663 bp, synthetic construct
  misc_feature 1..663: note = Description of Artificial Sequence: Synthetic coding sequence
  source 1..663: mol_type = other DNA
atggccggccagcccggccacatgccccacggcggcagcagcaacaacctgtgccacaccctgggccccgtgcacccccccgacccccagagacaccccaacaccctgagcttcagatgcagcctggccgacttccagatcgagaagaagatcggcagaggccagttcagcgaggtgtacaaggccacctgcctgctggacagaaagaccgtggccctgaagaaggtgcagatcttcgagatgatggacgccaaggccagacaggactgcgtgaaggagatcggcctgctgaagcagctgaaccaccccaacatcatcaagtacctggacagcttcatcgaggacaacgagctgaacatcgtgctggagctggccgacgccggcgacctgagccagatgatcaagtacttcaagaagcagaagagactgatccccgagagaaccgtgtggaagtacttcgtgcagctgtgcagcgccgtggagcacatgcacagcagaagagtgatgcacagagacatcaagcccgccaacgtgttcatcaccgccaccggcgtggtgaagctgggcgacctgggcctgggcagattcttcagcagcgagaccaccgccgcccacagcctggtgggcaccccctactacatgagccccgagagaatccactag

SEQ ID NO: 91158 - DNA, 585 bp, synthetic construct
  misc_feature 1..585: note = Description of Artificial Sequence: Synthetic coding sequence
  source 1..585: mol_type = other DNA
atgcccagaagagaggtgtgctgggaggccgcccacttcagacaggaggagcagagcctgcccagacccagagtgagagccctggtgagactggcctgcagaatggccggccagcccggccacatgccccacggcggcagcagcaacaacctgtgccacaccctgggccccgtgcacccccccgacccccagagacaccccaacaccctgagcttcagatgcagcctggccgacttccagatcgagaagaagatcggcagaggccagttcagcgaggtgtacaaggccacctgcctgctggacagaaagaccgtggccctgaagaaggtgcagatcttcgagatgatggacgccaaggccagacaggactgcgtgaaggagatcggcctgctgaagcagctgaaccaccccaacatcatcaagtacctggacagcttcatcgaggacaacgagctgaacatcgtgctggagctggccgacgccggcgacctgagccagatgatcaagtacttcaagaagcagaagagactgatccccgagagaaccgtgtggaagtacttcgtgcagctgtgcagcgccgtgtag

SEQ ID NO: 91159 - DNA, 669 bp, synthetic construct
  misc_feature 1..669: note = Description of Artificial Sequence: Synthetic coding sequence
  source 1..669: mol_type = other DNA
atggccggccagcccggccacatgccccacggcggcagcagcaacaacctgtgccacaccctgggccccgtgcacccccccgacccccagagacaccccaacaccctgagcttcagatgcagcctggccgacttccagatcgagaagaagatcggcagaggccagttcagcgaggtgtacaaggccacctgcctgctggacagaaagaccgtggccctgaagaaggtgcagatcttcgagatgatggacgccaaggccagacaggactgcgtgaaggagatcggcctgctgaagcagctgaaccaccccaacatcatcaagtacctggacagcttcatcgaggacaacgagctgaacatcgtgctggagctggccgacgccggcgacctgagccagatgatcaagtacttcaagaagcagaagagactgatccccgagagaaccgtgtggaagtacttcgtgcagctgtgcagcgccgtggagcacatgcacagcagaagagtgatgcacagagacatcaagcccgccaacgtgttcatcaccgccaccggcgtggtgaagctgggcgacctgggcctgggcagattcttcagcagcgagaccaccgccgcccacagcctggtgggcaccccctactacatgagccccgagagaatccacgagaactag

SEQ ID NO: 91160 - DNA, 660 bp, synthetic construct
  misc_feature 1..660: note = Description of Artificial Sequence: Synthetic coding sequence
  source 1..660: mol_type = other DNA
atggccggccagcccggccacatgccccacggcggcagcagcaacaacctgtgccacaccctgggccccgtgcacccccccgacccccagagacaccccaacaccctgagcttcagatgcagcctggccgacttccagatcgagaagaagatcggcagaggccagttcagcgaggtgtacaaggccacctgcctgctggacagaaagaccgtggccctgaagaaggtgcagatcttcgagatgatggacgccaaggccagacaggactgcgtgaaggagatcggcctgctgaagcagctgaaccaccccaacatcatcaagtacctggacagcttcatcgaggacaacgagctgaacatcgtgctggagctggccgacgccggcgacctgagccagatgatcaagtacttcaagaagcagaagagactgatccccgagagaaccgtgtggaagtacttcgtgcagctgtgcagcgccgtggagcacatgcacagcagaagagtgatgcacagagacatcaagcccgccaacgtgttcatcaccgccaccggcgtggtgaagctgggcgacctgggcctgggcagattcttcagcagcgagaccaccgccgcccacagcctggtgggcaccccctactacatgagccccgagagaatctag

SEQ ID NO: 91161 - DNA, 516 bp, synthetic construct
  misc_feature 1..516: note = Description of Artificial Sequence: Synthetic coding sequence
  source 1..516: mol_type = other DNA
atggccggccagcccggccacatgccccacggcggcagcagcaacaacctgtgccacaccctgggccccgtgcacccccccgacccccagagacaccccaacaccctgagcttcagatgcagcctggccgacttccagatcgagaagaagatcggcagaggccagttcagcgaggtgtacaaggccacctgcctgctggacagaaagaccgtggccctgaagaaggtgcagatcttcgagatgatggacgccaaggccagacaggactgcgtgaaggagatcggcctgctgaagcagctgaaccaccccaacatcatcaagtacctggacagcttcatcgaggacaacgagctgaacatcgtgctggagctggccgacgccggcgacctgagccagatgatcaagtacttcaagaagcagaagagactgatccccgagagaaccgtgtggaagtacttcgtgcagctgtgcagcgccgtggagcacatgcacagcagaagagtgatgcacagatag

SEQ ID NO: 91162 - DNA, 606 bp, synthetic construct
  misc_feature 1..606: note = Description of Artificial Sequence: Synthetic coding sequence
  source 1..606: mol_type = other DNA
atggccggccagcccggccacatgccccacggcggcagcagcaacaacctgtgccacaccctgggccccgtgcacccccccgacccccagcagctgaaccaccccaacatcatcaagtacctggacagcttcatcgaggacaacgagctgaacatcgtgctggagctggccgacgccggcgacctgagccagatgatcaagtacttcaagaagcagaagagactgatccccgagagaaccgtgtggaagtacttcgtgcagctgtgcagcgccgtggagcacatgcacagcagaagagtgatgcacagagacatcaagcccgccaacgtgttcatcaccgccaccggcgtggtgaagctgggcgacctgggcctgggcagattcttcagcagcgagaccaccgccgcccacagcctggtgggcaccccctactacatgagccccgagagaatccacgagaacggctacaacttcaagagcgacatctggagcctgggctgcctgctgtacgagatggccgccctgcagagccccttctacggcgacaagatgaacctgttcagcctgtgccagaagatcgagcagtgcgactacccccccctgtag

SEQ ID NO: 91163 - DNA, 1017 bp, synthetic construct
  misc_feature 1..1017: note = Description of Artificial Sequence: Synthetic coding sequence
  source 1..1017: mol_type = other DNA
atggaggccaccggctgggacagcagatgcagccccggcacccaggtgagagccctggtgagactggcctgcagaatggccggccagcccggccacatgccccacggcggcagcagcaacaacctgtgccacaccctgggccccgtgcacccccccgacccccagagacaccccaacaccctgagcttcagatgcagcctggccgacttccagatcgagaagaagatcggcagaggccagttcagcgaggtgtacaaggccacctgcctgctggacagaaagaccgtggccctgaagaaggtgcagatcttcgagatgatggacgccaaggccagacaggactgcgtgaaggagatcggcctgctgaagcagctgaaccaccccaacatcatcaagtacctggacagcttcatcgaggacaacgagctgaacatcgtgctggagctggccgacgccggcgacctgagccagatgatcaagtacttcaagaagcagaagagactgatccccgagagaaccgtgtggaagtacttcgtgcagctgtgcagcgccgtggagcacatgcacagcagaagagtgatgcacagagacatcaagcccgccaacgtgttcatcaccgccaccggcgtggtgaagctgggcgacctgggcctgggcagattcttcagcagcgagaccaccgccgcccacagcctggtgggcaccccctactacatgagccccgagagaatccacgagaacggctacaacttcaagagcgacatctggagcctgggctgcctgctgtacgagatggccgccctgcagagccccttctacggcgacaagatgaacctgttcagcctgtgccagaagatcgagcagtgcgactacccccccctgcccggcgagcactacagcgagaagctgagagagctggtgagcatgtgcatctgccccgacccccaccagagacccgacatcggctacgtgcaccaggtggccaagcagatgcacatctggatgagcagcacctag

SEQ ID NO: 91164 - DNA, 996 bp, synthetic construct
  misc_feature 1..996: note = Description of Artificial Sequence: Synthetic coding sequence
  source 1..996: mol_type = other DNA
atgggcagaagaagacccgcccccttcagagccctggtgagactggcctgcagaatggccggccagcccggccacatgccccacggcggcagcagcaacaacctgtgccacaccctgggccccgtgcacccccccgacccccagagacaccccaacaccctgagcttcagatgcagcctggccgacttccagatcgagaagaagatcggcagaggccagttcagcgaggtgtacaaggccacctgcctgctggacagaaagaccgtggccctgaagaaggtgcagatcttcgagatgatggacgccaaggccagacaggactgcgtgaaggagatcggcctgctgaagcagctgaaccaccccaacatcatcaagtacctggacagcttcatcgaggacaacgagctgaacatcgtgctggagctggccgacgccggcgacctgagccagatgatcaagtacttcaagaagcagaagagactgatccccgagagaaccgtgtggaagtacttcgtgcagctgtgcagcgccgtggagcacatgcacagcagaagagtgatgcacagagacatcaagcccgccaacgtgttcatcaccgccaccggcgtggtgaagctgggcgacctgggcctgggcagattcttcagcagcgagaccaccgccgcccacagcctggtgggcaccccctactacatgagccccgagagaatccacgagaacggctacaacttcaagagcgacatctggagcctgggctgcctgctgtacgagatggccgccctgcagagccccttctacggcgacaagatgaacctgttcagcctgtgccagaagatcgagcagtgcgactacccccccctgcccggcgagcactacagcgagaagctgagagagctggtgagcatgtgcatctgccccgacccccaccagagacccgacatcggctacgtgcaccaggtggccaagcagatgcacatctggatgagcagcacctag

SEQ ID NO: 91165 - DNA, 942 bp, synthetic construct; identical to SEQ ID NO: 91151
  misc_feature 1..942: note = Description of Artificial Sequence: Synthetic coding sequence
  source 1..942: mol_type = other DNA

SEQ ID NO: 91166 - DNA, 942 bp, synthetic construct; identical to SEQ ID NO: 91151
  misc_feature 1..942: note = Description of Artificial Sequence: Synthetic coding sequence
  source 1..942: mol_type = other DNA

SEQ ID NO: 91167 - DNA, 909 bp, synthetic construct
  misc_feature 1..909: note = Description of Artificial Sequence: Synthetic coding sequence
  source 1..909: mol_type = other DNA
atggacgagcagagccagggcatgcagggcccccccgtgccccagttccagccccagaaggccctgagacccgacatgggctacaacaccctggccaacttcagaatcgagaagaagatcggcagaggccagttcagcgaggtgtacagagccgcctgcctgctggacggcgtgcccgtggccctgaagaaggtgcagatcttcgacctgatggacgccaaggccagagccgactgcatcaaggagatcgacctgctgaagcagctgaaccaccccaacgtgatcaagtactacgccagcttcatcgaggacaacgagctgaacatcgtgctggagctggccgacgccggcgacctgagcagaatgatcaagcacttcaagaagcagaagagactgatccccgagagaaccgtgtggaagtacttcgtgcagctgtgcagcgccctggagcacatgcacagcagaagagtgatgcacagagacatcaagcccgccaacgtgttcatcaccgccaccggcgtggtgaagctgggcgacctgggcctgggcagattcttcagcagcaagaccaccgccgcccacagcctggtgggcaccccctactacatgagccccgagagaatccacgagaacggctacaacttcaagagcgacatctggagcctgggctgcctgctgtacgagatggccgccctgcagagccccttctacggcgacaagatgaacctgtacagcctgtgcaagaagatcgagcagtgcgactacccccccctgcccagcgaccactacagcgaggagctgagacagctggtgaacatgtgcatcaaccccgaccccgagaagagacccgacgtgacctacgtgtacgacgtggccaagagaatgcacgcctgcaccgccagcagctag

SEQ ID NO: 91168 - DNA, 249 bp, synthetic construct
  misc_feature 1..249: note = Description of Artificial Sequence: Synthetic coding sequence
  source 1..249: mol_type = other DNA
atggacgagcagagccagggcatgcagggcccccccgtgccccagttccagccccagaaggccctgagacccgacatgggctacaacaccctggccaacttcagaatcgagaagaagatcggcagaggccagttcagcgaggtgtacagagccgcctgcctgctggacggcgtgcccgtggccctgaagaaggtgcagatcttcgacctgatggacgccaaggccagagccgactgcatcaaggagtag

SEQ ID NO: 91169 - DNA, 99 bp, synthetic construct
  misc_feature 1..99: note = Description of Artificial Sequence: Synthetic coding sequence
  source 1..99: mol_type = other DNA
atggacgagcagagccagggcatgcagggcccccccgtgccccagttccagccccagaaggccctgagacccgacatgggctacaacaccctggcctag

SEQ ID NO: 91170 - DNA, 909 bp, synthetic construct; identical to SEQ ID NO: 91167
  misc_feature 1..909: note = Description of Artificial Sequence: Synthetic coding sequence
  source 1..909: mol_type = other DNA

SEQ ID NO: 91171 - DNA, 189 bp, synthetic construct
  misc_feature 1..189: note = Description of Artificial Sequence: Synthetic coding sequence
  source 1..189: mol_type = other DNA
atggacgagcagagccagggcatgcagggcccccccgtgccccagttccagccccagaaggccctgagacccgacatgggctacaacaccctggccaacttcagaatcgagaagaagatcggcagaggccagttcagcgaggtgtacagagccgcctgcctgctggacggcgtgcccgtggccctgtag

SEQ ID NO: 91172 - DNA, 3729 bp, synthetic construct
  misc_feature 1..3729: note = Description of Artificial Sequence: Synthetic coding sequence
  source 1..3729: mol_type = other DNA
atggagaagtacgtgagactgcagaagatcggcgagggcagcttcggcaaggccatcctggtgaagagcaccgaggacggcagacagtacgtgatcaaggagatcaacatcagcagaatgagcagcaaggagagagaggagagcagaagagaggtggccgtgctggccaacatgaagcaccccaacatcgtgcagtacagagagagcttcgaggagaacggcagcctgtacatcgtgatggactactgcgagggcggcgacctgttcaagagaatcaacgcccagaagggcgtgctgttccaggaggaccagatcctggactggttcgtgcagatctgcctggccctgaagcacgtgcacgacagaaagatcctgcacagagacatcaagagccagaacatcttcctgaccaaggacggcaccgtgcagctgggcgacttcggcatcgccagagtgctgaacagcaccgtggagctggccagaacctgcatcggcaccccctactacctgagccccgagatctgcgagaacaagccctacaacaacaagagcgacatctgggccctgggctgcgtgctgtacgagctgtgcaccctgaagcacgccttcgaggccggcagcatgaagaacctggtgctgaagatcatcagcggcagcttcccccccgtgagcctgcactacagctacgacctgagaagcctggtgagccagctgttcaagagaaaccccagagacagacccagcgtgaacagcatcctggagaagggcttcatcgccaagagaatcgagaagttcctgagcccccagctgatcgccgaggagttctgcctgaagaccttcagcaagttcggcagccagcccatccccgccaagagacccgccagcggccagaacagcatcagcgtgatgcccgcccagaagatcaccaagcccgccgccaagtacggcatccccctggcctacaagaagtacggcgacaagaagctgcacgagaagaagcccctgcagaagcacaagcaggcccaccagacccccgagaagagagtgaacaccggcgaggagagaagaaagatcagcgaggaggccgccagaaagagaagactggagttcatcgagaaggagaagaagcagaaggaccagatcatcagcctgatgaaggccgagcagatgaagagacaggagaaggagagactggagagaatcaacagagccagagagcagggctggagaaacgtgctgagcgccggcggcagcggcgaggtgaaggcccccttcctgggcagcggcggcaccatcgcccccagcagcttcagcagcagaggccagtacgagcactaccacgccatcttcgaccagatgcagcagcagagagccgaggacaacgaggccaagtggaagagagagatctacggcagaggcctgcccgagagacagaagggccagctggccgtggagagagccaagcaggtggaggagttcctgcagagaaagagagaggccatgcagaacaaggccagagccgagggccacatgggcatcctgcagaacctggccgccatgtacggcggcagacccagcagcagcagaggcggcaagcccagaaacaaggaggaggaggtgtacctggccagactgagacagatcagactgcagaacttcaacgagagacagcagatcaaggccaagctgagaggcgagaagaaggaggccaaccacagcgagggccaggagggcagcgaggaggccgacatgagaagaaagaagatcgagagcctgaaggcccacgccaacgccagagccgccgtgctgaaggagcagctggagagaaagagaaaggaggcctacgagagagagaagaaggtgtgggaggagcacctggtggccaagggcgtgaagagcagcgacgtgagcccccccctgggccagcacgagaccggcggcagccccagcaagcagcagatgagaagcgtgatcagcgtgaccagcgccctgaaggaggtgggcgtggacagcagcctgaccgacaccagagagaccagcgaggagatgcagaagaccaacaacgccatcagcagcaagagagagatcctgagaagactgaacgagaacctgaaggcccaggaggacgagaagggcaagcagaacctgagcgacaccttcgagatcaacgtgcacgaggacgccaaggagcacgagaaggagaagagcgtgagcagcgacagaaagaagtgggaggccggcggccagctggtgatccccctggacgagctgaccctggacaccagcttcagcaccaccgagagacacaccgtgggcgaggtgatcaagctgggccccaacggcagccccagaagagcctggggcaagagccccaccgacagcgtgctgaagatcctgggcgaggccgagctgcagctgcagaccgagctgctggagaacaccaccatcagaagcgagatcagccccgagggcgagaagtacaagcccctgatcaccggcgagaagaaggtgcagtgcatcagccacgagatcaaccccagcgccatcgtggacagccccgtggagaccaagagccccgagttcagcgaggccagcccccagatgagcctgaagctggagggcaacctggaggagcccgacgacctggagaccgagatcctgcaggagcccagcggcaccaacaaggacgagagcctgccctgcaccatcaccgacgtgtggatcagcgaggagaaggagaccaaggagacccagagcgccgacagaatcaccatccaggagaacgaggtgagcgaggacggcgtgagcagcaccgtggaccagctgagcgacatccacatcgagcccggcaccaacgacagccagcacagcaagtgcgacgtggacaagagcgtgcagcccgagcccttcttccacaaggtggtgcacagcgagcacctgaacctggtgccccaggtgcagagcgtgcagtgcagccccgaggagagcttcgccttcagaagccacagccacctgccccccaagaacaagaacaagaacagcctgctgatcggcctgagcaccggcctgttcgacgccaacaaccccaagatgctgagaacctgcagcctgcccgacctgagcaagctgttcagaaccctgatggacgtgcccaccgtgggcgacgtgagacaggacaacctggagatcgacgagatcgaggacgagaacatcaaggagggccccagcgacagcgaggacatcgtgttcgaggagaccgacaccgacctgcaggagctgcaggccagcatggagcagctgctgagagagcagcccggcgaggagtacagcgaggaggaggagagcgtgctgaagaacagcgacgtggagcccaccgccaacggcaccgacgtggccgacgaggacgacaaccccagcagcgagagcgccctgaacgaggagtggcacagcgacaacagcgacggcgagatcgccagcgagtgcgagtgcgacagcgtgttcaaccacctggaggagctgagactgcacctggagcaggagatgggcttcgagaagttcttcgaggtgtacgagaagatcaaggccatccacgaggacgaggacgagaacatcgagatctgcagcaagatcgtgcagaacatcctgggcaacgagcaccagcacctgtacgccaagatcctgcacctggtgatggccgacggcgcctaccaggaggacaacgacgagtag

SEQ ID NO: 91173 - DNA, 1800 bp, synthetic construct
  misc_feature 1..1800: note = Description of Artificial Sequence: Synthetic coding sequence
  source 1..1800: mol_type = other DNA
atgctgaagttccaggaggccgccaagtgcgtgagcggcagcaccgccatcagcacctaccccaagaccctgatcgccagaagatacgtgctgcagcagaagctgggcagcggcagcttcggcaccgtgtacctggtgagcgacaagaaggccaagagaggcgaggagctgaaggtgctgaaggagatcagcgtgggcgagctgaaccccaacgagaccgtgcaggccaacctggaggcccagctgctgagcaagctggaccaccccgccatcgtgaagttccacgccagcttcgtggagcaggacaacttctgcatcatcaccgagtactgcgagggcagagacctggacgacaagatccaggagtacaagcaggccggcaagatcttccccgagaaccagatcatcgagtggttcatccagctgctgctgggcgtggactacatgcacgagagaagaatcctgcacagagacctgaagagcaagaacgtgttcctgaagaacaacctgctgaagatcggcgacttcggcgtgagcagactgctgatgggcagctgcgacctggccaccaccctgaccggcaccccccactacatgagccccgaggccctgaagcaccagggctacgacaccaagagcgacatctggagcctggcctgcatcctgtacgagatgtgctgcatgaaccacgccttcgccggcagcaacttcctgagcatcgtgctgaagatcgtggagggcgacacccccagcctgcccgagagataccccaaggagctgaacgccatcatggagagcatgctgaacaagaaccccagcctgagacccagcgccatcgagatcctgaagatcccctacctggacgagcagctgcagaacctgatgtgcagatacagcgagatgaccctggaggacaagaacctggactgccagaaggaggccgcccacatcatcaacgccatgcagaagagaatccacctgcagaccctgagagccctgagcgaggtgcagaagatgacccccagagagagaatgagactgagaaagctgcaggccgccgacgagaaggccagaaagctgaagaagatcgtggaggagaagtacgaggagaacagcaagagaatgcaggagctgagaagcagaaacttccagcagctgagcgtggacgtgctgcacgagaagacccacctgaagggcatggaggagaaggaggagcagcccgagggcagactgagctgcagcccccaggacgaggacgaggagagatggcagggcagagaggaggagagcgacgagcccaccctggagaacctgcccgagagccagcccatccccagcatggacctgcacgagctggagagcatcgtggaggacgccaccagcgacctgggctaccacgagatccccgaggaccccctggtggccgaggagtactacgccgacgccttcgacagctactgcgaggagagcgacgaggaggaggaggagatcgccctggagagacccgagaaggagatcagaaacgagggcagccagcccgcctacagaaccaaccagcaggacagcgacatcgaggccctggccagatgcctggagaacgtgctgggctgcaccagcctggaccagccctgcagaagctggggccagaagtacctgaagagaagcatcatcaccagcagagagcagggcatcagaatgctggccaagcagagaagcgccagcgtgtggaagaagtggtgcctgaagcccgccaccgtgctgaagtggaccagcagctgcaccctgaagagcagctgctag

SEQ ID NO: 91174 - DNA, 459 bp, synthetic construct
  misc_feature 1..459: note = Description of Artificial Sequence: Synthetic coding sequence
  source 1..459: mol_type = other DNA
atggacagcggcaccgaggagtacgagctgaacggcggcctgccccccggcacccccggcagccccgacgccagccccgccagatggggctggagacacggccccatcaacgtgaaccactacgccagcaagaagagcgccgccgagagcatgctggacatcgccctgctgatggccaacgccagccagctgaaggccgtggtggagcagggccccagcttcgccttctacgtgcccctggtggtgctgatcagcatcagcctggtgctgcagatcggcgtgggcgtgctgctgatcttcctggtgaagtacgacctgaacaaccccgccaagcacgccaagctggacttcctgaacaacctggccaccggcctggtgttcatcatcgtggtggtgaacatcttcatcaccgccttcggcgtgcagaagcccctgatggacatggccccccagcagtag

SEQ ID NO: 91175 - DNA, 567 bp, synthetic construct
  misc_feature 1..567: note = Description of Artificial Sequence: Synthetic coding sequence
  source 1..567: mol_type = other DNA
atggccggcctgagcagacagctgtgcgccctgagccaccccaagaaggccgccgagacccagaccgccgagcccggcggcgcccacgccgtgtgcagcagacaccccgtgagagtgaagggcctggagggcagcgagatggagagcgccagagagaacatcgacctgcagcccggcagcagcgaccccagaagccagcccatcaacctgaaccactacgccaccaagaagagcgtggccgagagcatgctggacgtggccctgttcatgagcaacgccatgagactgaaggccgtgctggagcagggccccagcagccactactacaccaccctggtgaccctgatcagcctgagcctgctgctgcaggtggtgatcggcgtgctgctggtggtgatcgccagactgaacctgaacgaggtggagaagcagtggagactgaaccagctgaacaacgccgccaccatcctggtgttcttcaccgtggtgatcaacgtgttcatcaccgccttcggcgcccacaagaccggcttcctggccgccagagccagcagaaaccccctgtag

SEQ ID NO: 91176 - DNA, 273 bp, synthetic construct
  misc_feature 1..273: note = Description of Artificial Sequence: Synthetic coding sequence
  source 1..273: mol_type = other DNA
atgctggacgtggccctgttcatgagcaacgccatgagactgaaggccgtgctggagcagggccccagcagccactactacaccaccctggtgaccctgatcagcctgagcctgctgctgcaggtggtgatcggcgtgctgctggtggtgatcggcgaggagcccagcctgcagagcgacctgctgcccagacacccctggctggccgagagaccccacgtgagccccggccccccctgcatcggcaccggcagcttcgccaccaccagatag

SEQ ID NO: 91177 - DNA, 1401 bp, synthetic construct
  misc_feature 1..1401: note = Description of Artificial Sequence: Synthetic coding sequence
  source 1..1401: mol_type = other DNA
atgcccggcgacagcagccccggcaccctgcccctgtgggacgccagcctgagcccccccctgggccccgaccccggcggcttcagcagagccagccacgccggcgacaagagcagaccccccgcccccgagctgggcagccccggcgccgtgagacccagagtgggcagctgcgcccccggccccatggagctgagagtgagcaacaccagctgcgagaacggcagcctgctgcacctgtactgcagcagccaggaggtgctgtgccagatcgtgaacgacctgagccccgaggtgcccagcaacgccaccttccacagctggcaggagagaatcagacagaactacggcttctacatcggcctgggcctggccttcctgagcagcttcctgatcggcagcagcgtgatcctgaagaagaagggcctgctgagactggtggccaccggcgccaccagagccgtggacggcggcttcggctacctgaaggacgccatgtggtgggccggcttcctgaccatggccgccggcgaggtggccaacttcggcgcctacgccttcgcccccgccaccgtggtgacccccctgggcgccctgagcgtgctgatcagcgccatcctgagcagctacttcctgagagagagcctgaacctgctgggcaagctgggctgcgtgatctgcgtggccggcagcaccgtgatggtgatccacgcccccgaggaggagaaggtgaccaccatcatggagatggccagcaagatgaaggacaccggcttcatcgtgttcgccgtgctgctgctggtgagctgcctgatcctgatcttcgtgatcgcccccagatacggccagagaaacatcctgatctacatcatcatctgcagcgtgatcggcgccttcagcgtggccgccgtgaagggcctgggcatcaccatcaagaacttcttccagggcctgcccgtggtgagacaccccctgccctacatcctgagcctgatcctggccctgagcctgagcacccaggtgaacttcctgaacagagccctggacatcttcaacaccagcctggtgttccccatctactacgtgttcttcaccaccgtggtggtgaccagcagcatcatcctgttcaaggagtggtacagcatgagcgccgtggacatcgccggcaccctgagcggcttcgtgaccatcatcctgggcgtgttcatgctgcacgccttcaaggacctggacatcagctgcgccagcctgccccacatgcacaagaaccccccccccagccccgcccccgagcccaccgtgatcagactggaggacaagaacgtgctggtggacaacatcgagctggccagcaccagcagccccgaggagaagcccaaggtgttcatcatccacagctag

SEQ ID NO: 91178 - DNA, 1344 bp, synthetic construct
  misc_feature 1..1344: note = Description of Artificial Sequence: Synthetic coding sequence
  source 1..1344: mol_type = other DNA
atgcccggcgacagcagccccggcaccctgcccctgtgggacgccagcctgagcccccccctgggccccgaccccggcggcttcagcagagccagccacgccggcgacaagagcagaccccccgcccccgagctgggcagccccggcgccgtgagacccagagtgggcagctgcgcccccggccccatggagctgagagtgagcaacaccagctgcgagaacggcagcctgctgcacctgtactgcagcagccaggaggtgctgtgccagatcgtgaacgacctgagccccgaggtgcccagcaacgccaccttccacagctggcaggagagaatcagacagaactacggcttctacatcggcctgggcctggccttcctgagcagcttcctgatcggcagcagcgtgatcctgaagaagaagggcctgctgagactggtggccaccggcgccaccagagccgtggccgccggcgaggtggccaacttcggcgcctacgccttcgcccccgccaccgtggtgacccccctgggcgccctgagcgtgctgatcagcgccatcctgagcagctacttcctgagagagagcctgaacctgctgggcaagctgggctgcgtgatctgcgtggccggcagcaccgtgatggtgatccacgcccccgaggaggagaaggtgaccaccatcatggagatggccagcaagatgaaggacaccggcttcatcgtgttcgccgtgctgctgctggtgagctgcctgatcctgatcttcgtgatcgcccccagatacggccagagaaacatcctgatctacatcatcatctgcagcgtgatcggcgccttcagcgtggccgccgtgaagggcctgggcatcaccatcaagaacttcttccagggcctgcccgtggtgagacaccccctgccctacatcctgagcctgatcctggccctgagcctgagcacccaggtgaacttcctgaacagagccctggacatcttcaacaccagcctggtgttccccatctactacgtgttcttcaccaccgtggtggtgaccagcagcatcatcctgttcaaggagtggtacagcatgagcgccgtggacatcgccggcaccctgagcggcttcgtgaccatcatcctgggcgtgttcatgctgcacgccttcaaggacctggacatcagctgcgccagcctgccccacatgcacaagaaccccccccccagccccgcccccgagcccaccgtgatcagactggaggacaagaacgtgctggtggacaacatcgagctggccagcaccagcagccccgaggagaagcccaaggtgttcatcatccacagctag

SEQ ID NO: 91179 - DNA, 8415 bp, synthetic construct
  misc_feature 1..8415: note = Description of Artificial Sequence: Synthetic coding sequence
  source 1..8415: mol_type = other DNA
atgaacggcgacatgccccacgtgcccatcaccaccctggccggcatcgccagcctgaccgacctgctgaaccagctgcccctgcccagccccctgcccgccaccaccaccaagagcctgctgttcaacgccagaatcgccgaggaggtgaactgcctgctggcctgcagagacgacaacctggtgagccagctggtgcacagcctgaaccaggtgagcaccgaccacatcgagctgaaggacaacctgggcagcgacgaccccgagggcgacatccccgtgctgctgcaggccgtgctggccagaagccccaacgtgttcagagagaagagcatgcagaacagatacgtgcagagcggcatgatgatgagccagtacaagctgagccagaacagcatgcacagcagccccgccagcagcaactaccagcagaccaccatcagccacagccccagcagcagattcgtgcccccccagaccagcagcggcaacagattcatgccccagcagaacagccccgtgcccagcccctacgccccccagagccccgccggctacatgccctacagccaccccagcagctacaccacccacccccagatgcagcaggccagcgtgagcagccccatcgtggccggcggcctgagaaacatccacgacaacaaggtgagcggccccctgagcggcaacagcgccaaccaccacgccgacaaccccagacacggcagcagcgaggactacctgcacatggtgcacagactgagcagcgacgacggcgacagcagcaccatgagaaacgccgccagcttccccctgagaagcccccagcccgtgtgcagccccgccggcagcgagggcacccccaagggcagcagaccccccctgatcctgcagagccagagcctgccctgcagcagccccagagacgtgccccccgacatcctgctggacagccccgagagaaagcagaagaagcagaagaagatgaagctgggcaaggacgagaaggagcagagcgagaaggccgccatgtacgacatcatcagcagccccagcaaggacagcaccaagctgaccctgagactgagcagagtgagaagcagcgacatggaccagcaggaggacatgatcagcggcgtggagaacagcaacgtgagcgagaacgacatccccttcaacgtgcagtaccccggccagaccagcaagacccccatcaccccccaggacatcaacagacccctgaacgccgcccagtgcctgagccagcaggagcagaccgccttcctgcccgccaaccaggtgcccgtgctgcagcagaacaccagcgtggccgccaagcagccccagaccagcgtggtgcagaaccagcagcagatcagccagcagggccccatctacgacgaggtggagctggacgccctggccgagatcgagagaatcgagagagagagcgccatcgagagagagagattcagcaaggaggtgcaggacaaggacaagcccctgaagaagagaaagcaggacagctacccccaggaggccggcggcgccaccggcggcaacagacccgccagccaggagaccggcagcaccggcaacggcagcagacccgccctgatggtgagcatcgacctgcaccaggccggcagagtggacagccaggccagcatcacccaggacagcgacagcatcaagaagcccgaggagatcaagcagtgcaacgacgcccccgtgagcgtgctgcaggaggacatcgtgggcagcctgaagagcacccccgagaaccaccccgagacccccaagaagaagagcgaccccgagctgagcaagagcgagatgaagcagagcgagagcagactggccgagagcaagcccaacgagaacagactggtggagaccaagagcagcgagaacaagctggagaccaaggtggagacccagaccgaggagctgaagcagaacgagagcagaaccaccgagtgcaagcagaacgagagcaccatcgtggagcccaagcagaacgagaacagactgagcgacaccaagcccaacgacaacaagcagaacaacggcagaagcgagaccaccaagagcagacccgagacccccaagcagaagggcgagagcagacccgagacccccaagcagaagagcgacggccaccccgagacccccaagcagaagggcgacggcagacccgagacccccaagcagaagggcgagagcagacccgagacccccaagcagaagaacgagggcagacccgagacccccaagcacagacacgacaacagaagagacagcggcaagcccagcaccgagaagaagcccgaggtgagcaagcacaagcaggacaccaagagcgacagccccagactgaagagcgagagagccgaggccctgaagcagagacccgacggcagaagcgtgagcgagagcctgagaagagaccacgacaacaagcagaagagcgacgacagaggcgagagcgagagacacagaggcgaccagagcagagtgagaagacccgagaccctgagaagcagcagcagaaacgagcacggcatcaagagcgacagcagcaagaccgacaagctggagagaaagcacagacacgagagcggcgacagcagagagagacccagcagcggcgagcagaagagcagacccgacagccccagagtgaagcagggcgacagcaacaagagcagaagcgacaagctgggcttcaagagccccaccagcaaggacgacaagagaaccgagggcaacaagagcaaggtggacaccaacaaggcccaccccgacaacaaggccgagttccccagctacctgctgggcggcagaagcggcgccctgaagaacttcgtgatccccaagatcaagagagacaaggacggcaacgtgacccaggagaccaagaagatggagatgaagggcgagcccaaggacaaggtggagaagatcggcctggtggaggacctgaacaagggcgccaagcccgtggtggtgctgcagaagctgagcctggacgacgtgcagaagctgatcaaggacagagaggacaagagcagaagcagcctgaagcccatcaagaacaagcccagcaagagcaacaagggcagcatcgaccagagcgtgctgaaggagctgccccccgagctgctggccgagatcgagagcaccatgcccctgtgcgagagagtgaagatgaacaagagaaagagaagcaccgtgaacgagaagcccaagtacgccgagatcagcagcgacgaggacaacgacagcgacgaggccttcgagagcagcagaaagagacacaagaaggacgacgacaaggcctgggagtacgaggagagagacagaagaagcagcggcgaccacagaagaagcggccacagccacgagggcagaagaagcagcggcggcggcagatacagaaacagaagccccagcgacagcgacatggaggactacagccccccccccagcctgagcgaggtggccagaaagatgaagaagaaggagaagcagaagaagagaaaggcctacgagcccaagctgacccccgaggagatgatggacagcagcaccttcaagagattcaccgccagcatcgagaacatcctggacaacctggaggacatggacttcaccgccttcggcgacgacgacgagatcccccaggagctgctgctgggcaagcaccagctgaacgagctgggcagcgagagcgccaagatcaaggccatgggcatcatggacaagctgagcaccgacaagaccgtgaaggtgctgaacatcctggagaagaacatccaggacggcagcaagctgagcaccctgctgaaccacaacaacgacaccgaggaggaggagagactgtggagagacctgatcatggagagagtgaccaagagcgccgacgcctgcctgaccaccatcaacatcatgaccagccccaacatgcccaaggccgtgtacatcgaggacgtgatcgagagagtgatccagtacaccaagttccacctgcagaacaccctgtacccccagtacgaccccgtgtacagactggacccccacggcggcggcctgctgagcagcaaggccaagagagccaagtgcagcacccacaagcagagagtgatcgtgatgctgtacaacaaggtgtgcgacatcgtgagcagcctgagcgagctgctggagatccagctgctgaccgacaccaccatcctgcaggtgagcagcatgggcatcacccccttcttcgtggagaacgtgagcgagctgcagctgtgcgccatcaagctggtgaccgccgtgttcagcagatacgagaagcacagacagctgatcctggaggagatcttcaccagcctggccagactgcccaccagcaagagaagcctgagaaacttcagactgaacagcagcgacatggacggcgagcccatgtacatccagatggtgaccgccctggtgctgcagctgatccagtgcgtggtgcacctgcccagcagcgagaaggacagcaacgccgaggaggacagcaacaagaagatcgaccaggacgtggtgatcaccaacagctacgagaccgccatgagaaccgcccagaacttcctgagcatcttcctgaagaagtgcggcagcaagcagggcgaggaggactacagacccctgttcgagaacttcgtgcaggacctgctgagcaccgtgaacaagcccgagtggcccgccgccgagctgctgctgagcctgctgggcagactgctggtgcaccagttcagcaacaagagcaccgagatggccctgagagtggccagcctggactacctgggcaccgtggccgccagactgagaaaggacgccgtgaccagcaagatggaccagggcagcatcgagagaatcctgaagcaggtgagcggcggcgaggacgagatccagcagctgcagaaggccctgctggactacctggacgagaacaccgagaccgaccccagcctggtgttcagcagaaagttctacatcgcccagtggttcagagacaccaccctggagaccgagaaggccatgaagagccagaaggacgaggagagcagcgagggcacccaccacgccaaggagatcgagaccaccggccagatcatgcacagagccgagaacagaaagaagttcctgagaagcatcatcaagaccacccccagccagttcagcaccctgaagatgaacagcgacaccgtggactacgacgacgcctgcctgatcgtgagatacctggccagcatgagacccttcgcccagagcttcgacatctacctgacccagatcctgagagtgctgggcgagaacgccatcgccgtgagaaccaaggccatgaagtgcctgagcgaggtggtggccgtggaccccagcatcctggccagactggacatgcagagaggcgtgcacggcagactgatggacaacagcaccagcgtgagagaggccgccgtggagctgctgggcagattcgtgctgtgcagaccccagctggccgagcagtactacgacatgctgatcgagagaatcctggacaccggcatcagcgtgagaaagagagtgatcaagatcctgagagacatctgcatcgagcagcccaccttccccaagatcaccgagatgtgcgtgaagatgatcagaagagtgaacgacgaggagggcatcaagaagctggtgaacgagaccttccagaagctgtggttcacccccaccccccacaacgacaaggaggccatgaccagaaagatcctgaacatcaccgacgtggtggccgcctgcagagacaccggctacgactggttcgagcagctgctgcagaacctgctgaagagcgaggaggacagcagctacaagcccgtgaagaaggcctgcacccagctggtggacaacctggtggagcacatcctgaagtacgaggagagcctggccgacagcgacaacaagggcgtgaacagcggcagactggtggcctgcatcaccaccctgttcctgttcagcaagatcagaccccagctgatggtgaagcacgccatgaccatgcagccctacctgaccaccaagtgcagcacccagaacgacttcatggtgatctgcaacgtggccaagatcctggagctggtggtgcccctgatggagcaccccagcgagaccttcctggccaccatcgaggaggacctgatgaagctgatcatcaagtacggcatgaccgtggtgcagcactgcgtgagctgcctgggcgccgtggtgaacaaggtgacccagaacttcaagttcgtgtgggcctgcttcaacagatactacggcgccatcagcaagctgaagagccagcaccaggaggaccccaacaacaccagcctgctgaccaacaagcccgccctgctgagaagcctgttcaccgtgggcgccctgtgcagacacttcgacttcgacctggaggacttcaagggcaacagcaaggtgaacatcaaggacaaggtgctggagctgctgatgtacttcaccaagcacagcgacgaggaggtgcagaccaaggccatcatcggcctgggcttcgccttcatccagcaccccagcctgatgttcgagcaggaggtgaagaacctgtacaacaacatcctgagcgacaagaacagcagcgtgaacctgaagatccaggtgctgaagaacctgcagacctacctgcaggaggaggacaccagaatgcagcaggccgacagagactggaagaaggtggccaagcaggaggacctgaaggagatgggcgacgtgagcagcggcatgagcagcagcatcatgcagctgtacctgaagcaggtgctggaggccttcttccacacccagagcagcgtgagacacttcgccctgaacgtgatcgccctgaccctgaaccagggcctgatccaccccgtgcagtgcgtgccctacctgatcgccatgggcaccgaccccgagcccgccatgagaaacaaggccgaccagcagctggtggagatcgacaagaagtacgccggcttcatccacatgaaggccgtggccggcatgaagatgagctaccaggtgcagcaggccatcaacacctgcctgaaggaccccgtgagaggcttcagacaggacgagagcagcagcgccctgtgcagccacctgtacagcatgatcagaggcaacagacagcacagaagagccttcctgatcagcctgctgaacctgttcgacgacaccgccaagaccgacgtgaccatgctgctgtacatcgccgacaacctggcctgcttcccctaccagacccaggaggagcccctgttcatcatgcaccacatcgacatcaccctgagcgtgagcggcagcaacctgctgcagagcttcaaggagagcatggtgaaggacaagagaaaggagagaaagagcagccccagcaaggagaacgagagcagcgacagcgaggaggaggtgagcagacccagaaagagcagaaagagagtggacagcgacagcgacagcgacagcgaggacgacatcaacagcgtgatgaagtgcctgcccgagaacagcgcccccctgatcgagttcgccaacgtgagccagggcatcctgctgctgctgatgctgaagcagcacctgaagaacctgtgcggcttcagcgacagcaagatccagaagtacagccccagcgagagcgccaaggtgtacgacaaggccatcaacagaaagaccggcgtgcacttccaccccaagcagaccctggacttcctgagaagcgacatggccaacagcaagatcaccgaggaggtgaagagaagcatcgtgaagcagtacctggacttcaagctgctgatggagcacctggaccccgacgaggaggaggaggagggcgaggtgagcgccagcaccaacgccagaaacaaggccatcaccagcctgctgggcggcggcagccccaagaacaacaccgccgccgagaccgaggacgacgagagcgacggcgaggacagaggcggcggcaccagcggcagcctgagaagaagcaagagaaacagcgacagcaccgagctggccgcccagatgaacgagagcgtggacgtgatggacgtgatcgccatctgctgccccaagtacaaggacagaccccagatcgccagagtggtgcagaagaccagcagcggcttcagcgtgcagtggatggccggcagctacagcggcagctggaccgaggccaagagaagagacggcagaaagctggtgccctgggtggacaccatcaaggagagcgacatcatctacaagaagatcgccctgaccagcgccaacaagctgaccaacaaggtggtgcagaccctgagaagcctgtacgccgccaaggacggcaccagcagctag

SEQ ID NO: 91180 - DNA, 8094 bp, synthetic construct
  misc_feature 1..8094: note = Description of Artificial Sequence: Synthetic coding sequence
  source 1..8094: mol_type = other DNA
atgaacggcgacatgccccacgtgcccatcaccaccctggccggcatcgccagcctgaccgacctgctgaaccagctgcccctgcccagccccctgcccgccaccaccaccaagagcctgctgttcaacgccagaatcgccgaggaggtgaactgcctgctggcctgcagagacgacaacctggtgagccagctggtgcacagcctgaaccaggtgagcaccgaccacatcgagctgaaggacaacctgggcagcgacgaccccgagggcgacatccccgtgctgctgcaggccgtgctggccagaagccccaacgtgttcagagagaagagcatgcagaacagatacgtgcagagcggcatgatgatgagccagtacaagctgagccagaacagcatgcacagcagccccgccagcagcaactaccagcagaccaccatcagccacagccccagcagcagattcgtgcccccccagaccagcagcggcaacagattcatgccccagcagaacagccccgtgcccagcccctacgccccccagagccccgccggctacatgccctacagccaccccagcagctacaccacccacccccagatgcagcaggccagcgtgagcagccccatcgtggccggcggcctgagaaacatccacgacaacaaggtgagcggccccctgagcggcaacagcgccaaccaccacgccgacaaccccagacacggcagcagcgaggactacctgcacatggtgcacagactgagcagcgacgacggcgacagcagcaccatgagaaacgccgccagcttccccctgagaagcccccagcccgtgtgcagccccgccggcagcgagggcacccccaagggcagcagaccccccctgatcctgcagagccagagcctgccctgcagcagccccagagacgtgccccccgacatcctgctggacagccccgagagaaagcagaagaagcagaagaagatgaagctgggcaaggacgagaaggagcagagcgagaaggccgccatgtacgacatcatcagcagccccagcaaggacagcaccaagctgaccctgagactgagcagagtgagaagcagcgacatggaccagcaggaggacatgatcagcggcgtggagaacagcaacgtgagcgagaacgacatccccttcaacgtgcagtaccccggccagaccagcaagacccccatcaccccccaggacatcaacagacccctgaacgccgcccagtgcctgagccagcaggagcagaccgccttcctgcccgccaaccaggtgcccgtgctgcagcagaacaccagcgtggccgccaagcagccccagaccagcgtggtgcagaaccagcagcagatcagccagcagggccccatctacgacgaggtggagctggacgccctggccgagatcgagagaatcgagagagagagcgccatcgagagagagagattcagcaaggaggtgcaggacaaggacaagcccctgaagaagagaaagcaggacagctacccccaggaggccggcggcgccaccggcggcaacagacccgccagccaggagaccggcagcaccggcaacggcagcagacccgccctgatggtgagcatcgacctgcaccaggccggcagagtggacagccaggccagcatcacccaggacagcgacagcatcaagaagcccgaggagatcaagcagtgcaacgacgcccccgtgagcgtgctgcaggaggacatcgtgggcagcctgaagagcacccccgagaaccaccccgagacccccaagaagaagagcgaccccgagctgagcaagagcgagatgaagcagagcgagagcagactggccgagagcaagcccaacgagaacagactggtggagaccaagagcagcgagaacaagctggagaccaaggtggagacccagaccgaggagctgaagcagaacgagagcagaaccaccgagtgcaagcagaacgagagcaccatcgtggagcccaagcagaacgagaacagactgagcgacaccaagcccaacgacaacaagcagaacaacggcagaagcgagaccaccaagagcagacccgagacccccaagcagaagggcgagagcagacccgagacccccaagcagaagagcgacggccaccccgagacccccaagcagaagggcgacggcagacccgagacccccaagcagaagggcgagagcagacccgagacccccaagcagaagaacgagggcagacccgagacccccaagcacagacacgacaacagaagagacagcggcaagcccagcaccgagaagaagcccgaggtgagcaagcacaagcaggacaccaagagcgacagccccagactgaagagcgagagagccgaggccctgaagcagagacccgacggcagaagcgtgagcgagagcctgagaagagaccacgacaacaagcagaagagcgacgacagaggcgagagcgagagacacagaggcgaccagagcagagtgagaagacccgagaccctgagaagcagcagcagaaacgagcacggcatcaagagcgacagcagcaagaccgacaagctggagagaaagcacagacacgagagcggcgacagcagagagagacccagcagcggcgagcagaagagcagacccgacagccccagagtgaagcagggcgacagcaacaagagcagaagcgacaagctgggcttcaagagccccaccagcaaggacgacaagagaaccgagggcaacaagagcaaggtggacaccaacaaggcccaccccgacaacaaggccgagttccccagctacctgctgggcggcagaagcggcgccctgaagaacttcgtgatccccaagatcaagagagacaaggacggcaacgtgacccaggagaccaagaagatggagatgaagggcgagcccaaggacaaggtggagaagatcggcctggtggaggacctgaacaagggcgccaagcccgtggtggtgctgcagaagctgagcctggacgacgtgcagaagctgatcaaggacagagaggacaagagcagaagcagcctgaagcccatcaagaacaagcccagcaagagcaacaagggcagcatcgaccagagcgtgctgaaggagctgccccccgagctgctggccgagatcgagagcaccatgcccctgtgcgagagagtgaagatgaacaagagaaagagaagcaccgtgaacgagaagcccaagtacgccgagatcagcagcgacgaggacaacgacagcgacgaggccttcgagagcagcagaaagagacacaagaaggacgacgacaaggcctgggagtacgaggagagagacagaagaagcagcggcgaccacagaagaagcggccacagccacgagggcagaagaagcagcggcggcggcagatacagaaacagaagccccagcgacagcgacatggaggactacagccccccccccagcctgagcgaggtggccagaaagatgaagaagaaggagaagcagaagaagagaaaggcctacgagcccaagctgacccccgaggagatgatggacagcagcaccttcaagagattcaccgccagcatcgagaacatcctggacaacctggaggacatggacttcaccgccttcggcgacgacgacgagatcccccaggagctgctgctgggcaagcaccagctgaacgagctgggcagcgagagcgccaagatcaaggccatgggcatcatggacaagctgagcaccgacaagaccgtgaaggtgctgaacatcctggagaagaacatccaggacggcagcaagctgagcaccctgctgaaccacaacaacgacaccgaggaggaggagagactgtggagagacctgatcatggagagagtgaccaagagcgccgacgcctgcctgaccaccatcaacatcatgaccagccccaacatgcccaaggccgtgtacatcgaggacgtgatcgagagagtgatccagtacaccaagttccacctgcagaacaccctgtacccccagtacgaccccgtgtacagactggacccccacggcggcggcctgctgagcagcaaggccaagagagccaagtgcagcacccacaagcagagagtgatcgtgatgctgtacaacaaggtgtgcgacatcgtgagcagcctgagcgagctgctggagatccagctgctgaccgacaccaccatcctgcaggtgagcagcatgggcatcacccccttcttcgtggagaacgtgagcgagctgcagctgtgcgccatcaagctggtgaccgccgtgttcagcagatacgagaagcacagacagctgatcctggaggagatcttcaccagcctggccagactgcccaccagcaagagaagcctgagaaacttcagactgaacagcagcgacatggacggcgagcccatgtacatccagatggtgaccgccctggtgctgcagctgatccagtgcgtggtgcacctgcccagcagcgagaaggacagcaacgccgaggaggacagcaacaagaagatcgaccaggacgtggtgatcaccaacagctacgagaccgccatgagaaccgcccagaacttcctgagcatcttcctgaagaagtgcggcagcaagcagggcgaggaggactacagacccctgttcgagaacttcgtgcaggacctgctgagcaccgtgaacaagcccgagtggcccgccgccgagctgctgctgagcctgctgggcagactgctggtgcaccagttcagcaacaagagcaccgagatggccctgagagtggccagcctggactacctgggcaccgtggccgccagactgagaaaggacgccgtgaccagcaagatggaccagggcagcatcgagagaatcctgaagcaggtgagcggcggcgaggacgagatccagcagctgcagaaggccctgctggactacctggacgagaacaccgagaccgaccccagcctggtgttcagcagaaagttctacatcgcccagtggttcagagacaccaccctggagaccgagaaggccatgaagagccagaaggacgaggagagcagcgagggcacccaccacgccaaggagatcgagaccaccggccagatcatgcacagagccgagaacagaaagaagttcctgagaagcatcatcaagaccacccccagccagttcagcaccctgaagatgaacagcgacaccgtggactacgacgacgcctgcctgatcgtgagatacctggccagcatgagacccttcgcccagagcttcgacatctacctgacccagatcctgagagtgctgggcgagaacgccatcgccgtgagaaccaaggccatgaagtgcctgagcgaggtggtggccgtggaccccagcatcctggccagactggacatgcagagaggcgtgcacggcagactgatggacaacagcaccagcgtgagagaggccgccgtggagctgctgggcagattcgtgctgtgcagaccccagctggccgagcagtactacgacatgctgatcgagagaatcctggacaccggcatcagcgtgagaaagagagtgatcaagatcctgagagacatctgcatcgagcagcccaccttccccaagatcaccgagatgtgcgtgaagatgatcagaagagtgaacgacgaggagggcatcaagaagctggtgaacgagaccttccagaagctgtggttcacccccaccccccacaacgacaaggaggccatgaccagaaagatcctgaacatcaccgacgtggtggccgcctgcagagacaccggctacgactggttcgagcagctgctgcagaacctgctgaagagcgaggaggacagcagctacaagcccgtgaagaaggcctgcacccagctggtggacaacctggtggagcacatcctgaagtacgaggagagcctggccgacagcgacaacaagggcgtgaacagcggcagactggtggcctgcatcaccaccctgttcctgttcagcaagatcagaccccagctgatggtgaagcacgccatgaccatgcagccctacctgaccaccaagtgcagcacccagaacgacttcatggtgatctgcaacgtggccaagatcctggagctggtggtgcccctgatggagcaccccagcgagaccttcctggccaccatcgaggaggacctgatgaagctgatcatcaagtacggcatgaccgtggtgcagcactgcgtgagctgcctgggcgccgtggtgaacaaggtgacccagaacttcaagttcgtgtgggcctgcttcaacagatactacggcgccatcagcaagctgaagagccagcaccaggaggaccccaacaacaccagcctgctgaccaacaagcccgccctgctgagaagcctgttcaccgtgggcgccctgtgcagacacttcgacttcgacctggaggacttcaagggcaacagcaaggtgaacatcaaggacaaggtgctggagctgctgatgtacttcaccaagcacagcgacgaggaggtgcagaccaaggccatcatcggcctgggcttcgccttcatccagcaccccagcctgatgttcgagcaggaggtgaagaacctgtacaacaacatcctgagcgacaagaacagcagcgtgaacctgaagatccaggtgctgaagaacctgcagacctacctgcaggaggaggacaccagaatgcagcaggccgacagagactggaagaaggtggccaagcaggaggacctgaaggagatgggcgacgtgagcagcggcatgagcagcagcatcatgcagctgtacctgaagcaggtgctggaggccttcttccacacccagagcagcgtgagacacttcgccctgaacgtgatcgccctgaccctgaaccagggcctgatccaccccgtgcagtgcgtgccctacctgatcgccatgggcaccgaccccgagcccgccatgagaaacaaggccgaccagcagctggtggagatcgacaagaagtacgccggcttcatccacatgaaggccgtggccggcatgaagatgagctaccaggtgcagcaggccatcaacacctgcctgaaggaccccgtgagaggcttcagacaggacgagagcagcagcgccctgtgcagccacctgtacagcatgatcagaggcaacagacagcacagaagagccttcctgatcagcctgctgaacctgttcgacgacaccgccaagaccgacgtgaccatgctgctgtacatcgccgacaacctggcctgcttcccctaccagacccaggaggagcccctgttcatcatgcaccacatcgacatcaccctgagcgtgagcggcagcaacctgctgcagagcttcaaggagagcatggtgaaggacaagagaaaggagagaaagagcagccccagcaaggagaacgagagcagcgacagcgaggaggaggtgagcagacccagaaagagcagaaagagagtggacagcgacagcgacagcgacagcgaggacgacatcaacagcgtgatgaagtgcctgcccgagaacagcgcccccctgatcgagttcgccaacgtgagccagggcatcctgctgctgctgatgctgaagcagcacctgaagaacctgtgcggcttcagcgacagcaagatccagaagtacagccccagcgagagcgccaaggtgtacgacaaggccatcaacagaaagaccggcgtgcacttccaccccaagcagaccctggacttcctgagaagcgacatggccaacagcaagatcaccgaggaggtgaagagaagcatcgtgaagcagtacctggacttcaagctgctgatggagcacctggaccccgacgaggaggaggaggagggcgaggtgagcgccagcaccaacgccagaaacaaggccatcaccagcctgctgggcggcggcagccccaagaacaacaccgccgccgagaccgaggacgacgagagcgacggcgaggacagaggcggcggcaccagcggcgtgagaagaagaagaagccagagaatcagccagagaatcacctag

SEQ ID NO: 91181 - DNA, 867 bp, synthetic construct
  misc_feature 1..867: note = Description of Artificial Sequence: Synthetic coding sequence
  source 1..867: mol_type = other DNA
atggagagaccccagcccgacagcatgccccaggacctgagcgaggccctgaaggaggccaccaaggaggtgcacacccaggccgagaacgccgagttcatgagaaacttccagaagggccaggtgaccagagacggcttcaagctggtgatggccagcctgtaccacatctacgtggccctggaggaggagatcgagagaaacaaggagagccccgtgttcgcccccgtgtacttccccgaggagctgcacagaaaggccgccctggagcaggacctggccttctggtacggccccagatggcaggaggtgatcccctacacccccgccatgcagagatacgtgaagagactgcacgaggtgggcagaaccgagcccgagctgctggtggcccacgcctacaccagatacctgggcgacctgagcggcggccaggtgctgaagaagatcgcccagaaggccctggacctgcccagcagcggcgagggcctggccttcttcaccttccccaacatcgccagcgccaccaagttcaagcagctgtacagaagcagaatgaacagcctggagatgacccccgccgtgagacagagagtgatcgaggaggccaagaccgccttcctgctgaacatccagctgttcgaggagctgcaggagctgctgacccacgacaccaaggaccagagccccagcagagcccccggcctgagacagagagccagcaacaaggtgcaggacagcgcccccgtggagacccccagaggcaagccccccctgaacaccagaagccaggcccccctgctgagatgggtgctgaccctgagcttcctggtggccaccgtggccgtgggcctgtacgccatgtag

SEQ ID NO: 91182 - DNA, 4305 bp, synthetic construct
  misc_feature 1..4305: note = Description of Artificial Sequence: Synthetic coding sequence
  source 1..4305: mol_type = other DNA
atggaggaccacatgttcggcgtgcagcagatccagcccaacgtgatcagcgtgagactgttcaagagaaaggtgggcggcctgggcttcctggtgaaggagagagtgagcaagccccccgtgatcatcagcgacctgatcagaggcggcgccgccgagcagagcggcctgatccaggccggcgacatcatcctggccgtgaacggcagacccctggtggacctgagctacgacagcgccctggaggtgctgagaggcatcgccagcgagacccacgtggtgctgatcctgagaggccccgagggcttcaccacccacctggagaccaccttcaccggcgacggcacccccaagaccatcagagtgacccagcccctgggcccccccaccaaggccgtggacctgagccaccagccccccgccggcaaggagcagcccctggccgtggacggcgccagcggccccggcaacggcccccagcacgcctacgacgacggccaggaggccggcagcctgccccacgccaacggcctggcccccagaccccccggccaggaccccgccaagaaggccaccagagtgagcctgcagggcagaggcgagaacaacgagctgctgaaggagatcgagcccgtgctgagcctgctgaccagcggcagcagaggcgtgaagggcggcgcccccgccaaggccgagatgaaggacatgggcatccaggtggacagagacctggacggcaagagccacaagcccctgcccctgggcgtggagaacgacagagtgttcaacgacctgtggggcaagggcaacgtgcccgtggtgctgaacaacccctacagcgagaaggagcagccccccaccagcggcaagcagagccccaccaagaacggcagccccagcaagtgccccagattcctgaaggtgaagaactgggagaccgaggtggtgctgaccgacaccctgcacctgaagagcaccctggagaccggctgcaccgagtacatctgcatgggcagcatcatgcaccccagccagcacgccagaagacccgaggacgtgagaaccaagggccagctgttccccctggccaaggagttcatcgaccagtactacagcagcatcaagagattcggcagcaaggcccacatggagagactggaggaggtgaacaaggagatcgacaccaccagcacctaccagctgaaggacaccgagctgatctacggcgccaagcacgcctggagaaacgccagcagatgcgtgggcagaatccagtggagcaagctgcaggtgttcgacgccagagactgcaccaccgcccacggcatgttcaactacatctgcaaccacgtgaagtacgccaccaacaagggcaacctgagaagcgccatcaccatcttcccccagagaaccgacggcaagcacgacttcagagtgtggaacagccagctgatcagatacgccggctacaagcagcccgacggcagcaccctgggcgaccccgccaacgtgcagttcaccgagatctgcatccagcagggctggaagccccccagaggcagattcgacgtgctgcccctgctgctgcaggccaacggcaacgaccccgagctgttccagatcccccccgagctggtgctggaggtgcccatcagacaccccaagttcgagtggttcaaggacctgggcctgaagtggtacggcctgcccgccgtgagcaacatgctgctggagatcggcggcctggagttcagcgcctgccccttcagcggctggtacatgggcaccgagatcggcgtgagagactactgcgacaacagcagatacaacatcctggaggaggtggccaagaagatgaacctggacatgagaaagaccagcagcctgtggaaggaccaggccctggtggagatcaacatcgccgtgctgtacagcttccagagcgacaaggtgaccatcgtggaccaccacagcgccaccgagagcttcatcaagcacatggagaacgagtacagatgcagaggcggctgccccgccgactgggtgtggatcgtgccccccatgagcggcagcatcacccccgtgttccaccaggagatgctgaactacagactgacccccagcttcgagtaccagcccgacccctggaacacccacgtgtggaagggcaccaacggcacccccaccaagagaagagccatcggcttcaagaagctggccgaggccgtgaagttcagcgccaagctgatgggccaggccatggccaagagagtgaaggccaccatcctgtacgccaccgagaccggcaagagccaggcctacgccaagaccctgtgcgagatcttcaagcacgccttcgacgccaaggtgatgagcatggaggagtacgacatcgtgcacctggagcacgagaccctggtgctggtggtgaccagcaccttcggcaacggcgacccccccgagaacggcgagaagttcggctgcgccctgatggagatgagacaccccaacagcgtgcaggaggagagaaagagctacaaggtgagattcaacagcgtgagcagctacagcgacagccagaagagcagcggcgacggccccgacctgagagacaacttcgagagcgccggccccctggccaacgtgagattcagcgtgttcggcctgggcagcagagcctacccccacttctgcgccttcggccacgccgtggacaccctgctggaggagctgggcggcgagagaatcctgaagatgagagagggcgacgagctgtgcggccaggaggaggccttcagaacctgggccaagaaggtgttcaaggccgcctgcgacgtgttctgcgtgggcgacgacgtgaacatcgagaaggccaacaacagcctgatcagcaacgacagaagctggaagagaaacaagttcagactgaccttcgtggccgaggcccccgagctgacccagggcctgagcaacgtgcacaagaagagagtgagcgccgccagactgctgagcagacagaacctgcagagccccaagagcagcagaagcaccatcttcgtgagactgcacaccaacggcagccaggagctgcagtaccagcccggcgaccacctgggcgtgttccccggcaaccacgaggacctggtgaacgccctgatcgagagactggaggacgccccccccgtgaaccagatggtgaaggtggagctgctggaggagagaaacaccgccctgggcgtgatcagcaactggaccgacgagctgagactgcccccctgcaccatcttccaggccttcaagtactacctggacatcaccaccccccccacccccctgcagctgcagcagttcgccagcctggccaccagcgagaaggagaagcagagactgctggtgctgagcaagggcctgcaggagtacgaggagtggaagtggggcaagaaccccaccatcgtggaggtgctggaggagttccccagcatccagatgcccgccaccctgctgctgacccagctgagcctgctgcagcccagatactacagcatcagcagcagccccgacatgtaccccgacgaggtgcacctgaccgtggccatcgtgagctacagaaccagagacggcgagggccccatccaccacggcgtgtgcagcagctggctgaacagaatccaggccgacgagctggtgccctgcttcgtgagaggcgcccccagcttccacctgcccagaaacccccaggtgccctgcatcctggtgggccccggcaccggcatcgcccccttcagaagcttctggcagcagagacagttcgacatccagcacaagggcatgaacccctgccccatggtgctggtgttcggctgcagacagagcaagatcgaccacatctacagagaggagaccctgcaggccaagaacaagggcgtgttcagagagctgtacaccgcctacagcagagagcccgacaagcccaagaagtacgtgcaggacatcctgcaggagcagctggccgagagcgtgtacagagccctgaaggagcagggcggccacatctacgtgtgcggcgacgtgaccatggccgccgacgtgctgaaggccatccagagaatcatgacccagcagggcaagctgagcgccgaggacgccggcgtgttcatcagcagaatgagagacgacaacagataccacgaggacatcttcggcgtgaccctgagaacctacgaggtgaccaacagactgagaagcgagagcatcgccttcatcgaggagagcaagaaggacaccgacgaggtgttcagcagctag

SEQ ID NO: 91183 - DNA, 4407 bp, synthetic construct
  misc_feature 1..4407: note = Description of Artificial Sequence: Synthetic coding sequence
  source 1..4407: mol_type = other DNA
atggaggaccacatgttcggcgtgcagcagatccagcccaacgtgatcagcgtgagactgttcaagagaaaggtgggcggcctgggcttcctggtgaaggagagagtgagcaagccccccgtgatcatcagcgacctgatcagaggcggcgccgccgagcagagcggcctgatccaggccggcgacatcatcctggccgtgaacggcagacccctggtggacctgagctacgacagcgccctggaggtgctgagaggcatcgccagcgagacccacgtggtgctgatcctgagaggccccgagggcttcaccacccacctggagaccaccttcaccggcgacggcacccccaagaccatcagagtgacccagcccctgggcccccccaccaaggccgtggacctgagccaccagccccccgccggcaaggagcagcccctggccgtggacggcgccagcggccccggcaacggcccccagcacgcctacgacgacggccaggaggccggcagcctgccccacgccaacggcctggcccccagaccccccggccaggaccccgccaagaaggccaccagagtgagcctgcagggcagaggcgagaacaacgagctgctgaaggagatcgagcccgtgctgagcctgctgaccagcggcagcagaggcgtgaagggcggcgcccccgccaaggccgagatgaaggacatgggcatccaggtggacagagacctggacggcaagagccacaagcccctgcccctgggcgtggagaacgacagagtgttcaacgacctgtggggcaagggcaacgtgcccgtggtgctgaacaacccctacagcgagaaggagcagccccccaccagcggcaagcagagccccaccaagaacggcagccccagcaagtgccccagattcctgaaggtgaagaactgggagaccgaggtggtgctgaccgacaccctgcacctgaagagcaccctggagaccggctgcaccgagtacatctgcatgggcagcatcatgcaccccagccagcacgccagaagacccgaggacgtgagaaccaagggccagctgttccccctggccaaggagttcatcgaccagtactacagcagcatcaagagattcggcagcaaggcccacatggagagactggaggaggtgaacaaggagatcgacaccaccagcacctaccagctgaaggacaccgagctgatctacggcgccaagcacgcctggagaaacgccagcagatgcgtgggcagaatccagtggagcaagctgcaggtgttcgacgccagagactgcaccaccgcccacggcatgttcaactacatctgcaaccacgtgaagtacgccaccaacaagggcaacctgagaagcgccatcaccatcttcccccagagaaccgacggcaagcacgacttcagagtgtggaacagccagctgatcagatacgccggctacaagcagcccgacggcagcaccctgggcgaccccgccaacgtgcagttcaccgagatctgcatccagcagggctggaagccccccagaggcagattcgacgtgctgcccctgctgctgcaggccaacggcaacgaccccgagctgttccagatcccccccgagctggtgctggaggtgcccatcagacaccccaagttcgagtggttcaaggacctgggcctgaagtggtacggcctgcccgccgtgagcaacatgctgctggagatcggcggcctggagttcagcgcctgccccttcagcggctggtacatgggcaccgagatcggcgtgagagactactgcgacaacagcagatacaacatcctggaggaggtggccaagaagatgaacctggacatgagaaagaccagcagcctgtggaaggaccaggccctggtggagatcaacatcgccgtgctgtacagcttccagagcgacaaggtgaccatcgtggaccaccacagcgccaccgagagcttcatcaagcacatggagaacgagtacagatgcagaggcggctgccccgccgactgggtgtggatcgtgccccccatgagcggcagcatcacccccgtgttccaccaggagatgctgaactacagactgacccccagcttcgagtaccagcccgacccctggaacacccacgtgtggaagggcaccaacggcacccccaccaagagaagagccatcggcttcaagaagctggccgaggccgtgaagttcagcgccaagctgatgggccaggccatggccaagagagtgaaggccaccatcctgtacgccaccgagaccggcaagagccaggcctacgccaagaccctgtgcgagatcttcaagcacgccttcgacgccaaggtgatgagcatggaggagtacgacatcgtgcacctggagcacgagaccctggtgctggtggtgaccagcaccttcggcaacggcgacccccccgagaacggcgagaagttcggctgcgccctgatggagatgagacaccccaacagcgtgcaggaggagagaaagtaccccgagcccctgagattcttccccagaaagggcccccccctgcccaacggcgacaccgaggtgcacggcctggccgccgccagagacagccagcacagaagctacaaggtgagattcaacagcgtgagcagctacagcgacagccagaagagcagcggcgacggccccgacctgagagacaacttcgagagcgccggccccctggccaacgtgagattcagcgtgttcggcctgggcagcagagcctacccccacttctgcgccttcggccacgccgtggacaccctgctggaggagctgggcggcgagagaatcctgaagatgagagagggcgacgagctgtgcggccaggaggaggccttcagaacctgggccaagaaggtgttcaaggccgcctgcgacgtgttctgcgtgggcgacgacgtgaacatcgagaaggccaacaacagcctgatcagcaacgacagaagctggaagagaaacaagttcagactgaccttcgtggccgaggcccccgagctgacccagggcctgagcaacgtgcacaagaagagagtgagcgccgccagactgctgagcagacagaacctgcagagccccaagagcagcagaagcaccatcttcgtgagactgcacaccaacggcagccaggagctgcagtaccagcccggcgaccacctgggcgtgttccccggcaaccacgaggacctggtgaacgccctgatcgagagactggaggacgccccccccgtgaaccagatggtgaaggtggagctgctggaggagagaaacaccgccctgggcgtgatcagcaactggaccgacgagctgagactgcccccctgcaccatcttccaggccttcaagtactacctggacatcaccaccccccccacccccctgcagctgcagcagttcgccagcctggccaccagcgagaaggagaagcagagactgctggtgctgagcaagggcctgcaggagtacgaggagtggaagtggggcaagaaccccaccatcgtggaggtgctggaggagttccccagcatccagatgcccgccaccctgctgctgacccagctgagcctgctgcagcccagatactacagcatcagcagcagccccgacatgtaccccgacgaggtgcacctgaccgtggccatcgtgagctacagaaccagagacggcgagggccccatccaccacggcgtgtgcagcagctggctgaacagaatccaggccgacgagctggtgccctgcttcgtgagaggcgcccccagcttccacctgcccagaaacccccaggtgccctgcatcctggtgggccccggcaccggcatcgcccccttcagaagcttctggcagcagagacagttcgacatccagcacaagggcatgaacccctgccccatggtgctggtgttcggctgcagacagagcaagatcgaccacatctacagagaggagaccctgcaggccaagaacaagggcgtgttcagagagctgtacaccgcctacagcagagagcccgacaagcccaagaagtacgtgcaggacatcctgcaggagcagctggccgagagcgtgtacagagccctgaaggagcagggcggccacatctacgtgtgcggcgacgtgaccatggccgccgacgtgctgaaggccatccagagaatcatgacccagcagggcaagctgagcgccgaggacgccggcgtgttcatcagcagaatgagagacgacaacagataccacgaggacatcttcggcgtgaccctgagaacctacgaggtgaccaacagactgagaagcgagagcatcgccttcatcgaggagagcaagaaggacaccgacgaggtgttcagcagctag

SEQ ID NO: 91184 - DNA, 1224 bp, synthetic construct
  misc_feature 1..1224: note = Description of Artificial Sequence: Synthetic coding sequence
  source 1..1224: mol_type = other DNA
atggaggaccacatgttcggcgtgcagcagatccagcccaacgtgatcagcgtgagactgttcaagagaaaggtgggcggcctgggcttcctggtgaaggagagagtgagcaagccccccgtgatcatcagcgacctgatcagaggcggcgccgccgagcagagcggcctgatccaggccggcgacatcatcctggccgtgaacggcagacccctggtggacctgagctacgacagcgccctggaggtgctgagaggcatcgccagcgagacccacgtggtgctgatcctgagaggccccgagggcttcaccacccacctggagaccaccttcaccggcgacggcacccccaagaccatcagagtgacccagcccctgggcccccccaccaaggccgtggacctgagccaccagccccccgccggcaaggagcagcccctggccgtggacggcgccagcggccccggcaacggcccccagcacgcctacgacgacggccaggaggccggcagcctgccccacgccaacggcctggcccccagaccccccggccaggaccccgccaagaaggccaccagagtgagcctgcagggcagaggcgagaacaacgagctgctgaaggagatcgagcccgtgctgagcctgctgaccagcggcagcagaggcgtgaagggcggcgcccccgccaaggccgagatgaaggacatgggcatccaggtggacagagacctggacggcaagagccacaagcccctgcccctgggcgtggagaacgacagagtgttcaacgacctgtggggcaagggcaacgtgcccgtggtgctgaacaacccctacagcgagaaggagcagatgagaaagctgagaatcaccgagggcttcggcgcccagagaggcagccacaaccacccccccccccaggagaacagccccccccagagaatggccgccccccccagcgtgcacgccagcagcagaagcagaaccggcagactgagatggttcagcctgacccccagcaccctgagagcccactggaagagagacgccctgagcaccagcgcctgggcccccagctgcatcctgctgagcatgcagggcggcctgaagaccagcgcccagaaggacagcagcagcctgagccccaagagcctgctgatcaacaccatccaccagctgaaggacctggcccccaagcccacctggaagggctggaagagatag

SEQ ID NO: 91185 - DNA, 3993 bp, synthetic construct
  misc_feature 1..3993: note = Description of Artificial Sequence: Synthetic coding sequence
  source 1..3993: mol_type = other DNA
atggaggaccacatgttcggcgtgcagcagatccagcccaacgtgatcagcgtgagactgttcaagagaaaggtgggcggcctgggcttcctggtgaaggagagagtgagcaagccccccgtgatcatcagcgacctgatcagaggcggcgccgccgagcagagcggcctgatccaggccggcgacatcatcctggccgtgaacggcagacccctggtggacctgagctacgacagcgccctggaggtgctgagaggcatcgccagcgagacccacgtggtgctgatcctgagaggccccgagggcttcaccacccacctggagaccaccttcaccggcgacggcacccccaagaccatcagagtgacccagcccctgggcccccccaccaaggccgtggacctgagccaccagccccccgccggcaaggagcagcccctggccgtggacggcgccagcggccccggcaacggcccccagcacgcctacgacgacggccaggaggccggcagcctgccccacgccaacggcctggcccccagaccccccggccaggaccccgccaagaaggccaccagagtgagcctgcagggcagaggcgagaacaacgagctgctgaaggagatcgagcccgtgctgagcctgctgaccagcggcagcagaggcgtgaagggcggcgcccccgccaaggccgagatgaaggacatgggcatccaggtggacagagacctggacggcaagagccacaagcccctgcccctgggcgtggagaacgacagagtgttcaacgacctgtggggcaagggcaacgtgcccgtggtgctgaacaacccctacagcgagaaggagcagccccccaccagcggcaagcagagccccaccaagaacggcagccccagcaagtgccccagattcctgaaggtgaagaactgggagaccgaggtggtgctgaccgacaccctgcacctgaagagcaccctggagaccggctgcaccgagtacatctgcatgggcagcatcatgcaccccagccagcacgccagaagacccgaggacgtgagaaccaagggccagctgttccccctggccaaggagttcatcgaccagtactacagcagcatcaagagattcggcagcaaggcccacatggagagactggaggaggtgaacaaggagatcgacaccaccagcacctaccagctgaaggacaccgagctgatctacggcgccaagcacgcctggagaaacgccagcagatgcgtgggcagaatccagtggagcaagctgcaggtgttcgacgccagagactgcaccaccgcccacggcatgttcaactacatctgcaaccacgtgaagtacgccaccaacaagggcaacctgagaagcgccatcaccatcttcccccagagaaccgacggcaagcacgacttcagagtgtggaacagccagctgatcagatacgccggctacaagcagcccgacggcagcaccctgggcgaccccgccaacgtgcagttcaccgaggaggtggccaagaagatgaacctggacatgagaaagaccagcagcctgtggaaggaccaggccctggtggagatcaacatcgccgtgctgtacagcttccagagcgacaaggtgaccatcgtggaccaccacagcgccaccgagagcttcatcaagcacatggagaacgagtacagatgcagaggcggctgccccgccgactgggtgtggatcgtgccccccatgagcggcagcatcacccccgtgttccaccaggagatgctgaactacagactgacccccagcttcgagtaccagcccgacccctggaacacccacgtgtggaagggcaccaacggcacccccaccaagagaagagccatcggcttcaagaagctggccgaggccgtgaagttcagcgccaagctgatgggccaggccatggccaagagagtgaaggccaccatcctgtacgccaccgagaccggcaagagccaggcctacgccaagaccctgtgcgagatcttcaagcacgccttcgacgccaaggtgatgagcatggaggagtacgacatcgtgcacctggagcacgagaccctggtgctggtggtgaccagcaccttcggcaacggcgacccccccgagaacggcgagaagttcggctgcgccctgatggagatgagacaccccaacagcgtgcaggaggagagaaagagctacaaggtgagattcaacagcgtgagcagctacagcgacagccagaagagcagcggcgacggccccgacctgagagacaacttcgagagcgccggccccctggccaacgtgagattcagcgtgttcggcctgggcagcagagcctacccccacttctgcgccttcggccacgccgtggacaccctgctggaggagctgggcggcgagagaatcctgaagatgagagagggcgacgagctgtgcggccaggaggaggccttcagaacctgggccaagaaggtgttcaaggccgcctgcgacgtgttctgcgtgggcgacgacgtgaacatcgagaaggccaacaacagcctgatcagcaacgacagaagctggaagagaaacaagttcagactgaccttcgtggccgaggcccccgagctgacccagggcctgagcaacgtgcacaagaagagagtgagcgccgccagactgctgagcagacagaacctgcagagccccaagagcagcagaagcaccatcttcgtgagactgcacaccaacggcagccaggagctgcagtaccagcccggcgaccacctgggcgtgttccccggcaaccacgaggacctggtgaacgccctgatcgagagactggaggacgccccccccgtgaaccagatggtgaaggtggagctgctggaggagagaaacaccgccctgggcgtgatcagcaactggaccgacgagctgagactgcccccctgcaccatcttccaggccttcaagtactacctggacatcaccaccccccccacccccctgcagctgcagcagttcgccagcctggccaccagcgagaaggagaagcagagactgctggtgctgagcaagggcctgcaggagtacgaggagtggaagtggggcaagaaccccaccatcgtggaggtgctggaggagttccccagcatccagatgcccgccaccctgctgctgacccagctgagcctgctgcagcccagatactacagcatcagcagcagccccgacatgtaccccgacgaggtgcacctgaccgtggccatcgtgagctacagaaccagagacggcgagggccccatccaccacggcgtgtgcagcagctggctgaacagaatccaggccgacgagctggtgccctgcttcgtgagaggcgcccccagcttccacctgcccagaaacccccaggtgccctgcatcctggtgggccccggcaccggcatcgcccccttcagaagcttctggcagcagagacagttcgacatccagcacaagggcatgaacccctgccccatggtgctggtgttcggctgcagacagagcaagatcgaccacatctacagagaggagaccctgcaggccaagaacaagggcgtgttcagagagctgtacaccgcctacagcagagagcccgacaagcccaagaagtacgtgcaggacatcctgcaggagcagctggccgagagcgtgtacagagccctgaaggagcagggcggccacatctacgtgtgcggcgacgtgaccatggccgccgacgtgctgaaggccatccagagaatcatgacccagcagggcaagctgagcgccgaggacgccggcgtgttcatcagcagaatgagagacgacaacagataccacgaggacatcttcggcgtgaccctgagaacctacgaggtgaccaacagactgagaagcgagagcatcgccttcatcgaggagagcaagaaggacaccgacgaccaggtgttcaagacctag

SEQ ID NO: 91186 - DNA, 3621 bp, synthetic construct
  misc_feature 1..3621: note = Description of Artificial Sequence: Synthetic coding sequence
  source 1..3621: mol_type = other DNA
atggaggaccacatgttcggcgtgcagcagatccagcccaacgtgatcagcgtgagactgttcaagagaaaggtgggcggcctgggcttcctggtgaaggagagagtgagcaagccccccgtgatcatcagcgacctgatcagaggcggcgccgccgagcagagcggcctgatccaggccggcgacatcatcctggccgtgaacggcagacccctggtggacctgagctacgacagcgccctggaggtgctgagaggcatcgccagcgagacccacgtggtgctgatcctgagaggccccgagggcttcaccacccacctggagaccaccttcaccggcgacggcacccccaagaccatcagagtgacccagcccctgggcccccccaccaaggccgtggacctgagccaccagccccccgccggcaaggagcagcccctggccgtggacggcgccagcggccccggcaacggcccccagcacgcctacgacgacggccaggaggccggcagcctgccccacgccaacggcctggcccccagaccccccggccaggaccccgccaagaaggccaccagagtgagcctgcagggcagaggcgagaacaacgagctgctgaaggagatcgagcccgtgctgagcctgctgaccagcggcagcagaggcgtgaagggcggcgcccccgccaaggccgagatgaaggacatgggcatccaggtggacagagacctggacggcaagagccacaagcccctgcccctgggcgtggagaacgacagagtgttcaacgacctgtggggcaagggcaacgtgcccgtggtgctgaacaacccctacagcgagaaggagcagccccccaccagcggcaagcagagccccaccaagaacggcagccccagcaagtgccccagattcctgaaggtgaagaactgggagaccgaggtggtgctgaccgacaccctgcacctgaagagcaccctggagaccggctgcaccgagtacatctgcatgggcagcatcatgcaccccagccagcacgccagaagacccgaggacgtgagaaccaagggccagctgttccccctggccaaggagttcatcgaccagtactacagcagcatcaagagattcggcagcaaggcccacatggagagactggaggaggtgaacaaggagatcgacaccaccagcacctaccagctgaaggacaccgagctgatctacggcgccaagcacgcctggagaaacgccagcagatgcgtgggcagaatccagtggagcaagctgcaggtgttcgacgccagagactgcaccaccgcccacggcatgttcaactacatctgcaaccacgtgaagtacgccaccaacaagggcaacctgagaagcgccatcaccatcttcccccagagaaccgacggcaagcacgacttcagagtgtggaacagccagctgatcagatacgccggctacaagcagcccgacggcagcaccctgggcgaccccgccaacgtgcagttcaccgagatctgcatccagcagggctggaagccccccagaggcagattcgacgtgctgcccctgctgctgcaggccaacggcaacgaccccgagctgttccagatcccccccgagctggtgctggaggtgcccatcagacaccccaagttcgagtggttcaaggacctgggcctgaagtggtacggcctgcccgccgtgagcaacatgctgctggagatcggcggcctggagttcagcgcctgccccttcagcggctggtacatgggcaccgagatcggcgtgagagactactgcgacaacagcagatacaacatcctggaggaggtggccaagaagatgaacctggacatgagaaagaccagcagcctgtggaaggaccaggccctggtggagatcaacatcgccgtgctgtacagcttccagagcgacaaggtgaccatcgtggaccaccacagcgccaccgagagcttcatcaagcacatggagaacgagtacagatgcagaggcggctgccccgccgactgggtgtggatcgtgccccccatgagcggcagcatcacccccgtgttccaccaggagatgctgaactacagactgacccccagcttcgagtaccagcccgacccctggaacacccacgtgtggaagggcaccaacggcacccccaccaagagaagagccatcggcttcaagaagctggccgaggccgtgaagttcagcgccaagctgatgggccaggccatggccaagagagtgaaggccaccatcctgtacgccaccgagaccggcaagagccaggcctacgccaagaccctgtgcgagatcttcaagcacgccttcgacgccaaggtgatgagcatggaggagtacgacatcgtgcacctggagcacgagaccctggtgctggtggtgaccagcaccttcggcaacggcgacccccccgagaacggcgagaagttcggctgcgccctgatggagatgagacaccccaacagcgtgcaggaggagagaaagagctacaaggtgagattcaacagcgtgagcagctacagcgacagccagaagagcagcggcgacggccccgacctgagagacaacttcgagagcgccggccccctggccaacgtgagattcagcgtgttcggcctgggcagcagagcctacccccacttctgcgccttcggccacgccgtggacaccctgctggaggagctgggcggcgagagaatcctgaagatgagagagggcgacgagctgtgcggccaggaggaggccttcagaacctgggccaagaaggtgttcaaggccgcctgcgacgtgttctgcgtgggcgacgacgtgaacatcgagaaggccaacaacagcctgatcagcaacgacagaagctggaagagaaacaagttcagactgaccttcgtggccgaggcccccgagctgacccagggcctgagcaacgtgcacaagaagagagtgagcgccgccagactgctgagcagacagaacctgcagagccccaagagcagcagaagcaccatcttcgtgagactgcacaccaacggcagccaggagctgcagtaccagcccggcgaccacctgggcgtgttccccggcaaccacgaggacctggtgaacgccctgatcgagagactggaggacgccccccccgtgaaccagatggtgaaggtggagctgctggaggagagaaacaccgccctgggcgtgatcagcaactggaccgacgagctgagactgcccccctgcaccatcttccaggccttcaagtactacctggacatcaccaccccccccacccccctgcagctgcagcagttcgccagcctggccaccagcgagaaggagaagcagagactgctggtgctgagcaagggcctgcaggagtacgaggagtggaagtggggcaagaaccccaccatcgtggaggtgctggaggagttccccagcatccagatgcccgccaccctgctgctgacccagctgagcctgctgcagcccagatactacagcatcagcagcagcccccacacccacaccctgagcgagaccagacccagccccctgcccctgagcagccagtgctgctag

SEQ ID NO: 91187 - DNA, 204 bp, synthetic construct
  misc_feature 1..204: note = Description of Artificial Sequence: Synthetic coding sequence
  source 1..204: mol_type = other DNA
caccccaacagcgtgcaggaggagagaaagtaccccgagcccctgagattcttccccagaaagggcccccccctgcccaacggcgacaccgaggtgcacggcctggccgccgccagagacagccagcacagaagctacaaggtgagattcaacagcgtgagcagctacagcgacagccagaagagcagcggcgacggcccctag

SEQ ID NO: 91188 - DNA, 1521 bp, synthetic construct
  misc_feature 1..1521: note = Description of Artificial Sequence: Synthetic coding sequence
  source 1..1521: mol_type = other DNA
atgcccagcaagaccaagtacaacctggtggacgacggccacgacctgagaatccccctgcacaacgaggacgccttccagcacggcatctgcttcgaggccaagtacgtgggcagcctggacgtgcccagacccaacagcagagtggagatcgtggccgccatgagaagaatcagatacgagttcaaggccaagaacatcaagaagaagaaggtgagcatcatggtgagcgtggacggcgtgaaggtgatcctgaagaagaagaagaagctgctgctgctgcagaagaaggagtggacctgggacgagagcaagatgctggtgatgcaggaccccatctacagaatcttctacgtgagccacgacagccaggacctgaagatcttcagctacatcgccagagacggcgccagcaacatcttcagatgcaacgtgttcaagagcaagaagaagagccaggccatgagaatcgtgagaaccgtgggccaggccttcgaggtgtgccacaagctgagcctgcagcacacccagcagaacgccgacggccaggaggacggcgagagcgagagaaacagcaacagcagcggcgaccccggcagacagctgaccggcgccgagagagccagcaccgccaccgccgaggagaccgacatcgacgccgtggaggtgcccctgcccggcaacgacgtgctggagttcagcagaggcgtgaccgacctggacgccgtgggcaaggagggcggcagccacaccggcagcaaggtgagccacccccaggagcccatgctgaccgccagccccagaatgctgctgcccagcagcagcagcaagccccccggcctgggcaccgagacccccctgagcacccaccaccagatgcagctgctgcagcagctgctgcagcagcagcagcagcagacccaggtggccgtggcccaggtgcacctgctgaaggaccagctggccgccgaggccgccgccagactggaggcccaggccagagtgcaccagctgctgctgcagaacaaggacatgctgcagcacatcagcctgctggtgaagcaggtgcaggagctggagctgaagctgagcggccagaacgccatgggcagccaggacagcctgctggagatcaccttcagaagcggcgccctgcccgtgctgtgcgaccccaccacccccaagcccgaggacctgcacagcccccccctgggcgccggcctggccgacttcgcccaccccgccggcagccccctgggcagaagagactgcctggtgaagctggagtgcttcagattcctgccccccgaggacacccccccccccgcccagggcgaggccctgctgggcggcctggagctgatcaagttcagagagagcggcatcgccagcgagtacgagagcaacaccgacgagagcgaggagagagacagctggagccaggaggagctgcccagactgctgaacgtgctgcagagacaggagctgggcgacggcctggacgacgagatcgccgtgtag

SEQ ID NO: 91189 - DNA, 636 bp, synthetic construct
  misc_feature 1..636: note = Description of Artificial Sequence: Synthetic coding sequence
  source 1..636: mol_type = other DNA
atgagcctgagcagcctgtgccccgtgttcagcgccgccgccagcagcctgcaggtgcacctgctgaaggaccagctggccgccgaggccgccgccagactggaggcccaggccagagtgcaccagctgctgctgcagaacaaggacatgctgcagcacatcagcctgctggtgaagcaggtgcaggagctggagctgaagctgagcggccagaacgccatgggcagccaggacagcctgctggagatcaccttcagaagcggcgccctgcccgtgctgtgcgaccccaccacccccaagcccgaggacctgcacagcccccccctgggcgccggcctggccgacttcgcccaccccgccggcagccccctgggcagaagagactgcctggtgaagctggagtgcttcagattcctgccccccgaggacacccccccccccgcccagggcgaggccctgctgggcggcctggagctgatcaagttcagagagagcggcatcgccagcgagtacgagagcaacaccgacgagagcgaggagagagacagctggagccaggaggagctgcccagactgctgaacgtgctgcagagacaggagctgggcgacggcctggacgacgagatcgccgtgtag

SEQ ID NO: 91190 - DNA, 1506 bp, synthetic construct
  misc_feature 1..1506: note = Description of Artificial Sequence: Synthetic coding sequence
  source 1..1506: mol_type = other DNA
atgcccagcaagaccaagtacaacctggtggacgacggccacgacctgagaatccccctgcacaacgaggacgccttccagcacggcatctgcttcgaggccaagtacgtgggcagcctggacgtgcccagacccaacagcagagtggagatcgtggccgccatgagaagaatcagatacgagttcaaggccaagaacatcaagaagaagaaggtgagcatcatggtgagcgtggacggcgtgaaggtgatcctgaagaagaagaagaagaagaaggagtggacctgggacgagagcaagatgctggtgatgcaggaccccatctacagaatcttctacgtgagccacgacagccaggacctgaagatcttcagctacatcgccagagacggcgccagcaacatcttcagatgcaacgtgttcaagagcaagaagaagagccaggccatgagaatcgtgagaaccgtgggccaggccttcgaggtgtgccacaagctgagcctgcagcacacccagcagaacgccgacggccaggaggacggcgagagcgagagaaacagcaacagcagcggcgaccccggcagacagctgaccggcgccgagagagccagcaccgccaccgccgaggagaccgacatcgacgccgtggaggtgcccctgcccggcaacgacgtgctggagttcagcagaggcgtgaccgacctggacgccgtgggcaaggagggcggcagccacaccggcagcaaggtgagccacccccaggagcccatgctgaccgccagccccagaatgctgctgcccagcagcagcagcaagccccccggcctgggcaccgagacccccctgagcacccaccaccagatgcagctgctgcagcagctgctgcagcagcagcagcagcagacccaggtggccgtggcccaggtgcacctgctgaaggaccagctggccgccgaggccgccgccagactggaggcccaggccagagtgcaccagctgctgctgcagaacaaggacatgctgcagcacatcagcctgctggtgaagcaggtgcaggagctggagctgaagctgagcggccagaacgccatgggcagccaggacagcctgctggagatcaccttcagaagcggcgccctgcccgtgctgtgcgaccccaccacccccaagcccgaggacctgcacagcccccccctgggcgccggcctggccgacttcgcccaccccgccggcagccccctgggcagaagagactgcctggtgaagctggagtgcttcagattcctgccccccgaggacacccccccccccgcccagggcgaggccctgctgggcggcctggagctgatcaagttcagagagagcggcatcgccagcgagtacgagagcaacaccgacgagagcgaggagagagacagctggagccaggaggagctgcccagactgctgaacgtgctgcagagacaggagctgggcgacggcctggacgacgagatcgccgtgtag

SEQ ID NO: 91191 - DNA, 2190 bp, synthetic construct
  misc_feature 1..2190: note = Description of Artificial Sequence: Synthetic coding sequence
  source 1..2190: mol_type = other DNA
atggcctgcccctggaagttcctgttcaagaccaagttccaccagtacgccatgaacggcgagaaggacatcaacaacaacgtggagaaggccccctgcgccaccagcagccccgtgacccaggacgacctgcagtaccacaacctgagcaagcagcagaacgagagcccccagcccctggtggagaccggcaagaagagccccgagagcctggtgaagctggacgccacccccctgagcagccccagacacgtgagaatcaagaactggggcagcggcatgaccttccaggacaccctgcaccacaaggccaagggcatcctgacctgcagaagcaagagctgcctgggcagcatcatgacccccaagagcctgaccagaggccccagagacaagcccaccccccccgacgagctgctgccccaggccatcgagttcgtgaaccagtactacggcagcttcaaggaggccaagatcgaggagcacctggccagagtggaggccgtgaccaaggagatcgagaccaccggcacctaccagctgaccggcgacgagctgatcttcgccaccaagcaggcctggagaaacgcccccagatgcatcggcagaatccagtggagcaacctgcaggtgttcgacgccagaagctgcagcaccgccagagagatgttcgagcacatctgcagacacgtgagatacagcaccaacaacggcaacatcagaagcgccatcaccgtgttcccccagagaagcgacggcaagcacgacttcagagtgtggaacgcccagctgatcagatacgccggctaccagatgcccgacggcagcatcagaggcgaccccgccaacgtggagttcacccagctgtgcatcgacctgggctggaagcccaagtacggcagattcgacgtggtgcccctggtgctgcaggccaacggcagagaccccgagctgttcgagatcccccccgacctggtgctggaggtggccatggagcaccccaagtacgagtggttcagagagctggagctgaagtggtacgccctgcccgccgtggccaacatgctgctggaggtgggcggcctggagttccccggctgccccttcaacggctggtacatgggcaccgagatcggcgtgagagacttctgcgacgtgcagagatacaacatcctggaggaggtgggcagaagaatgggcctggagacccacaagctggccagcctgtggaaggaccaggccgtggtggagatcaacatcgccgtgctgcacagcttccagaagcagaacgtgaccatcatggaccaccacagcgccgccgagagcttcatgaagtacatgcagaacgagtacagaagcagaggcggctgccccgccgactggatctggctggtgccccccatgagcggcagcatcacccccgtgttccaccaggagatgctgaactacgtgctgagccccttctactactaccaggtggaggcctggaagacccacgtgtggcaggacgagaagagaagacccaagagaagagagatccccctgaaggtgctggtgaaggccgtgctgttcgcctgcatgctgatgagaaagaccatggccagcagagtgagagtgaccatcctgttcgccaccgagaccggcaagagcgaggccctggcctgggacctgggcgccctgttcagctgcgccttcaaccccaagaagctgaagaagagcctgttcatgctgaaggagctgaacaacaagttcagatacgccgtgttcggcctgggcagcagcatgtaccccagattctgcgccttcgcccacgacatcgaccagaagctgagccacctgggcgccagccagctgacccccatgggcgagggcgacgagctgagcggccaggaggacgccttcagaagctgggccgtgcagaccttcaaggccgcctgcgagaccttcgacgtgagaggcaagcagcacatccagatccccaagctgtacaccagcaacgtgacctgggacccccaccactacagactggtgcaggacagccagcccctgcccgccgccagcaccagccccagaatcccccccatcctggccagcagcagcggcctggcccaggccagcagacccagcgccgtgagcggcagcaacggcagcatgacccccagcaccagagagtgcggcgaggccgcctag

SEQ ID NO: 91192 - DNA, 3462 bp, synthetic construct
  misc_feature 1..3462: note = Description of Artificial Sequence: Synthetic coding sequence
  source 1..3462: mol_type = other DNA
atggcctgcccctggaagttcctgttcaagaccaagttccaccagtacgccatgaacggcgagaaggacatcaacaacaacgtggagaaggccccctgcgccaccagcagccccgtgacccaggacgacctgcagtaccacaacctgagcaagcagcagaacgagagcccccagcccctggtggagaccggcaagaagagccccgagagcctggtgaagctggacgccacccccctgagcagccccagacacgtgagaatcaagaactggggcagcggcatgaccttccaggacaccctgcaccacaaggccaagggcatcctgacctgcagaagcaagagctgcctgggcagcatcatgacccccaagagcctgaccagaggccccagagacaagcccaccccccccgacgagctgctgccccaggccatcgagttcgtgaaccagtactacggcagcttcaaggaggccaagatcgaggagcacctggccagagtggaggccgtgaccaaggagatcgagaccaccggcacctaccagctgaccggcgacgagctgatcttcgccaccaagcaggcctggagaaacgcccccagatgcatcggcagaatccagtggagcaacctgcaggtgttcgacgccagaagctgcagcaccgccagagagatgttcgagcacatctgcagacacgtgagatacagcaccaacaacggcaacatcagaagcgccatcaccgtgttcccccagagaagcgacggcaagcacgacttcagagtgtggaacgcccagctgatcagatacgccggctaccagatgcccgacggcagcatcagaggcgaccccgccaacgtggagttcacccagctgtgcatcgacctgggctggaagcccaagtacggcagattcgacgtggtgcccctggtgctgcaggccaacggcagagaccccgagctgttcgagatcccccccgacctggtgctggaggtggccatggagcaccccaagtacgagtggttcagagagctggagctgaagtggtacgccctgcccgccgtggccaacatgctgctggaggtgggcggcctggagttccccggctgccccttcaacggctggtacatgggcaccgagatcggcgtgagagacttctgcgacgtgcagagatacaacatcctggaggaggtgggcagaagaatgggcctggagacccacaagctggccagcctgtggaaggaccaggccgtggtggagatcaacatcgccgtgctgcacagcttccagaagcagaacgtgaccatcatggaccaccacagcgccgccgagagcttcatgaagtacatgcagaacgagtacagaagcagaggcggctgccccgccgactggatctggctggtgccccccatgagcggcagcatcacccccgtgttccaccaggagatgctgaactacgtgctgagccccttctactactaccaggtggaggcctggaagacccacgtgtggcaggacgagaagagaagacccaagagaagagagatccccctgaaggtgctggtgaaggccgtgctgttcgcctgcatgctgatgagaaagaccatggccagcagagtgagagtgaccatcctgttcgccaccgagaccggcaagagcgaggccctggcctgggacctgggcgccctgttcagctgcgccttcaaccccaaggtggtgtgcatggacaagtacagactgagctgcctggaggaggagagactgctgctggtggtgaccagcaccttcggcaacggcgactgccccggcaacggcgagaagctgaagaagagcctgttcatgctgaaggagctgaacaacaagttcagatacgccgtgttcggcctgggcagcagcatgtaccccagattctgcgccttcgcccacgacatcgaccagaagctgagccacctgggcgccagccagctgacccccatgggcgagggcgacgagctgagcggccaggaggacgccttcagaagctgggccgtgcagaccttcaaggccgcctgcgagaccttcgacgtgagaggcaagcagcacatccagatccccaagctgtacaccagcaacgtgacctgggacccccaccactacagactggtgcaggacagccagcccctggacctgagcaaggccctgagcagcatgcacgccaagaacgtgttcaccatgagactgaagagcagacagaacctgcagagccccaccagcagcagagccaccatcctggtggagctgagctgcgaggacggccagggcctgaactacctgcccggcgagcacctgggcgtgtgccccggcaaccagcccgccctggtgcagggcatcctggagagagtggtggacggccccaccccccaccagaccgtgagactggaggccctggacgagagcggcagctactgggtgagcgacaagagactgcccccctgcagcctgagccaggccctgacctacttcctggacatcaccaccccccccacccagctgctgctgcagaagctggcccaggtggccaccgaggagcccgagagacagagactggaggccctgtgccagcccagcgagtacagcaagtggaagttcaccaacagccccaccttcctggaggtgctggaggagttccccagcctgagagtgagcgccggcttcctgctgagccagctgcccatcctgaagcccagattctacagcatcagcagcagcagagaccacacccccaccgagatccacctgaccgtggccgtggtgacctaccacaccagagacggccagggccccctgcaccacggcgtgtgcagcacctggctgaacagcctgaagccccaggaccccgtgccctgcttcgtgagaaacgccagcggcttccacctgcccgaggaccccagccacccctgcatcctgatcggccccggcaccggcatcgcccccttcagaagcttctggcagcagagactgcacgacagccagcacaagggcgtgagaggcggcagaatgaccctggtgttcggctgcagaagacccgacgaggaccacatctaccaggaggagatgctggagatggcccagaagggcgtgctgcacgccgtgcacaccgcctacagcagactgcccggcaagcccaaggtgtacgtgcaggacatcctgagacagcagctggccagcgaggtgctgagagtgctgcacaaggagcccggccacctgtacgtgtgcggcgacgtgagaatggccagagacgtggcccacaccctgaagcagctggtggccgccaagctgaagctgaacgaggagcaggtggaggactacttcttccagctgaagagccagaagagataccacgaggacatcttcggcgccgtgttcccctacgaggccaagaaggacagagtggccgtgcagcccagcagcctggagatgagcgccctgtag

SEQ ID NO: 91193 - DNA, 3345 bp, synthetic construct
  misc_feature 1..3345: note = Description of Artificial Sequence: Synthetic coding sequence
  source 1..3345: mol_type = other DNA
atggcctgcccctggaagttcctgttcaagaccaagttccaccagtacgccatgaacggcgagaaggacatcaacaacaacgtggagaaggccccctgcgccaccagcagccccgtgacccaggacgacctgcagtaccacaacctgagcaagcagcagaacgagagcccccagcccctggtggagaccggcaagaagagccccgagagcctggtgaagctggacgccacccccctgagcagccccagacacgtgagaatcaagaactggggcagcggcatgaccttccaggacaccctgcaccacaaggccaagggcatcctgacctgcagaagcaagagctgcctgggcagcatcatgacccccaagagcctgaccagaggccccagagacaagcccaccccccccgacgagctgctgccccaggccatcgagttcgtgaaccagtactacggcagcttcaaggaggccaagatcgaggagcacctggccagagtggaggccgtgaccaaggagatcgagaccaccggcacctaccagctgaccggcgacgagctgatcttcgccaccaagcaggcctggagaaacgcccccagatgcatcggcagaatccagtggagcaacctgcaggtgttcgacgccagaagctgcagcaccgccagagagatgttcgagcacatctgcagacacgtgagatacagcaccaacaacggcaacatcagaagcgccatcaccgtgttcccccagagaagcgacggcaagcacgacttcagagtgtggaacgcccagctgtgcatcgacctgggctggaagcccaacggcagagaccccgagctgttcgagatcccccccgacctggtgctggaggtggccatggagcaccccaagtacgagtggttcagagagctggagctgaagtggtacgccctgcccgccgtggccaacatgctgctggaggtgggcggcctggagttccccggctgccccttcaacggctggtacatgggcaccgagatcggcgtgagagacttctgcgacgtgcagagatacaacatcctggaggaggtgggcagaagaatgggcctggagacccacaagctggccagcctgtggaaggaccaggccgtggtggagatcaacatcgccgtgctgcacagcttccagaagcagaacgtgaccatcatggaccaccacagcgccgccgagagcttcatgaagtacatgcagaacgagtacagaagcagaggcggctgccccgccgactggatctggctggtgccccccatgagcggcagcatcacccccgtgttccaccaggagatgctgaactacgtgctgagccccttctactactaccaggtggaggcctggaagacccacgtgtggcaggacgagaagagaagacccaagagaagagagatccccctgaaggtgctggtgaaggccgtgctgttcgcctgcatgctgatgagaaagaccatggccagcagagtgagagtgaccatcctgttcgccaccgagaccggcaagagcgaggccctggcctgggacctgggcgccctgttcagctgcgccttcaaccccaaggtggtgtgcatggacaagtacagactgagctgcctggaggaggagagactgctgctggtggtgaccagcaccttcggcaacggcgactgccccggcaacggcgagaagctgaagaagagcctgttcatgctgaaggagctgaacaacaagttcagatacgccgtgttcggcctgggcagcagcatgtaccccagattctgcgccttcgcccacgacatcgaccagaagctgagccacctgggcgccagccagctgacccccatgggcgagggcgacgagctgagcggccaggaggacgccttcagaagctgggccgtgcagaccttcaaggccgcctgcgagaccttcgacgtgagaggcaagcagcacatccagatccccaagctgtacaccagcaacgtgacctgggacccccaccactacagactggtgcaggacagccagcccctggacctgagcaaggccctgagcagcatgcacgccaagaacgtgttcaccatgagactgaagagcagacagaacctgcagagccccaccagcagcagagccaccatcctggtggagctgagctgcgaggacggccagggcctgaactacctgcccggcgagcacctgggcgtgtgccccggcaaccagcccgccctggtgcagggcatcctggagagagtggtggacggccccaccccccaccagaccgtgagactggaggccctggacgagagcggcagctactgggtgagcgacaagagactgcccccctgcagcctgagccaggccctgacctacttcctggacatcaccaccccccccacccagctgctgctgcagaagctggcccaggtggccaccgaggagcccgagagacagagactggaggccctgtgccagcccagcgagtacagcaagtggaagttcaccaacagccccaccttcctggaggtgctggaggagttccccagcctgagagtgagcgccggcttcctgctgagccagctgcccatcctgaagcccagattctacagcatcagcagcagcagagaccacacccccaccgagatccacctgaccgtggccgtggtgacctaccacaccagagacggccagggccccctgcaccacggcgtgtgcagcacctggctgaacagcctgaagccccaggaccccgtgccctgcttcgtgagaaacgccagcggcttccacctgcccgaggaccccagccacccctgcatcctgatcggccccggcaccggcatcgcccccttcagaagcttctggcagcagagactgcacgacagccagcacaagggcgtgagaggcggcagaatgaccctggtgttcggctgcagaagacccgacgaggaccacatctaccaggaggagatgctggagatggcccagaagggcgtgctgcacgccgtgcacaccgcctacagcagactgcccggcaagcccaaggtgtacgtgcaggacatcctgagacagcagctggccagcgaggtgctgagagtgctgcacaaggagcccggccacctgtacgtgtgcggcgacgtgagaatggccagagacgtggcccacaccctgaagcagctggtggccgccaagctgaagctgaacgaggagcaggtggaggactacttcttccagctgaagagccagaagagataccacgaggacatcttcggcgccgtgttcccctacgaggccaagaaggacagagtggccgtgcagcccagcagcctggagatgagcgccctgtag

SEQ ID NO: 91194 - DNA, 3612 bp, synthetic construct
  misc_feature 1..3612: note = Description of Artificial Sequence: Synthetic coding sequence
  source 1..3612: mol_type = other DNA
atgggcaacctgaagagcgtggcccaggagcccggccccccctgcggcctgggcctgggcctgggcctgggcctgtgcggcaagcagggccccgccacccccgcccccgagcccagcagagcccccgccagcctgctgccccccgcccccgagcacagcccccccagcagccccctgacccagccccccgagggccccaagttccccagagtgaagaactgggaggtgggcagcatcacctacgacaccctgagcgcccaggcccagcaggacggcccctgcacccccagaagatgcctgggcagcctggtgttccccagaaagctgcagggcagacccagccccggcccccccgcccccgagcagctgctgagccaggccagagacttcatcaaccagtactacagcagcatcaagagaagcggcagccaggcccacgagcagagactgcaggaggtggaggccgaggtggccgccaccggcacctaccagctgagagagagcgagctggtgttcggcgccaagcaggcctggagaaacgcccccagatgcgtgggcagaatccagtggggcaagctgcaggtgttcgacgccagagactgcagaagcgcccaggagatgttcacctacatctgcaaccacatcaagtacgccaccaacagaggcaacctgagaagcgccatcaccgtgttcccccagagatgccccggcagaggcgacttcagaatctggaacagccagctggtgagatacgccggctacagacagcaggacggcagcgtgagaggcgaccccgccaacgtggagatcaccgagctgtgcatccagcacggctggacccccggcaacggcagattcgacgtgctgcccctgctgctgcaggcccccgacgacccccccgagctgttcctgctgccccccgagctggtgctggaggtgcccctggagcaccccaccctggagtggttcgccgccctgggcctgagatggtacgccctgcccgccgtgagcaacatgctgctggagatcggcggcctggagttccccgccgcccccttcagcggctggtacatgagcaccgagatcggcaccagaaacctgtgcgacccccacagatacaacatcctggaggacgtggccgtgtgcatggacctggacaccagaaccaccagcagcctgtggaaggacaaggccgccgtggagatcaacgtggccgtgctgcacagctaccagctggccaaggtgaccatcgtggaccaccacgccgccaccgccagcttcatgaagcacctggagaacgagcagaaggccagaggcggctgccccgccgactgggcctggatcgtgccccccatcagcggcagcctgacccccgtgttccaccaggagatggtgaactacttcctgagccccgccttcagataccagcccgacccctggaagggcagcgccgccaagggcaccggcatcaccagaaagaagaccttcaaggaggtggccaacgccgtgaagatcagcgccagcctgatgggcaccgtgatggccaagagagtgaaggccaccatcctgtacggcagcgagaccggcagagcccagagctacgcccagcagctgggcagactgttcagaaaggccttcgaccccagagtgctgtgcatggacgagtacgacgtggtgagcctggagcacgagaccctggtgctggtggtgaccagcaccttcggcaacggcgacccccccgagaacggcgagagcttcgccgccgccctgatggagatgagcggcccctacaacagcagccccagacccgagcagcacaagagctacaagatcagattcaacagcatcagctgcagcgaccccctggtgagcagctggagaagaaagagaaaggagagcagcaacaccgacagcgccggcgccctgggcaccctgagattctgcgtgttcggcctgggcagcagagcctacccccacttctgcgccttcgccagagccgtggacaccagactggaggagctgggcggcgagagactgctgcagctgggccagggcgacgagctgtgcggccaggaggaggccttcagaggctgggcccaggccgccttccaggccgcctgcgagaccttctgcgtgggcgaggacgccaaggccgccgccagagacatcttcagccccaagagaagctggaagagacagagatacagactgagcgcccaggccgagggcctgcagctgctgcccggcctgatccacgtgcacagaagaaagatgttccaggccaccatcagaagcgtggagaacctgcagagcagcaagagcaccagagccaccatcctggtgagactggacaccggcggccaggagggcctgcagtaccagcccggcgaccacatcggcgtgtgcccccccaacagacccggcctggtggaggccctgctgagcagagtggaggacccccccgcccccaccgagcccgtggccgtggagcagctggagaagggcagccccggcggccccccccccggctgggtgagagaccccagactgcccccctgcaccctgagacaggccctgaccttcttcctggacatcaccagcccccccagcccccagctgctgagactgctgagcaccctggccgaggagcccagagagcagcaggagctggaggccctgagccaggaccccagaagatacgaggagtggaagtggttcagatgccccaccctgctggaggtgctggagcagttccccagcgtggccctgcccgcccccctgctgctgacccagctgcccctgctgcagcccagatactacagcgtgagcagcgcccccagcacccaccccggcgagatccacctgaccgtggccgtgctggcctacagaacccaggacggcctgggccccctgcactacggcgtgtgcagcacctggctgagccagctgaagcccggcgaccccgtgccctgcttcatcagaggcgcccccagcttcagactgccccccgaccccagcctgccctgcatcctggtgggccccggcaccggcatcgcccccttcagaggcttctggcaggagagactgcacgacatcgagagcaagggcctgcagcccacccccatgaccctggtgttcggctgcagatgcagccagctggaccacctgtacagagacgaggtgcagaacgcccagcagagaggcgtgttcggcagagtgctgaccgccttcagcagagagcccgacaaccccaagacctacgtgcaggacatcctgagaaccgagctggccgccgaggtgcacagagtgctgtgcctggagagaggccacatgttcgtgtgcggcgacgtgaccatggccaccaacgtgctgcagaccgtgcagagaatcctggccaccgagggcgacatggagctggacgaggccggcgacgtgatcggcgtgctgagagaccagcagagataccacgaggacatcttcggcctgaccctgagaacccaggaggtgaccagcagaatcagaacccagagcttcagcctgcaggagagacagctgagaggcgccgtgccctgggccttcgacccccccggcagcgacaccaacagcccctag

SEQ ID NO: 91195 - DNA, 2994 bp, synthetic construct
  misc_feature 1..2994: note = Description of Artificial Sequence: Synthetic coding sequence
  source 1..2994: mol_type = other DNA
atgttcacctacatctgcaaccacatcaagtacgccaccaacagaggcaacctgagaagcgccatcaccgtgttcccccagagatgccccggcagaggcgacttcagaatctggaacagccagctggtgagatacgccggctacagacagcaggacggcagcgtgagaggcgaccccgccaacgtggagatcaccgagctgtgcatccagcacggctggacccccggcaacggcagattcgacgtgctgcccctgctgctgcaggcccccgacgacccccccgagctgttcctgctgccccccgagctggtgctggaggtgcccctggagcaccccaccctggagtggttcgccgccctgggcctgagatggtacgccctgcccgccgtgagcaacatgctgctggagatcggcggcctggagttccccgccgcccccttcagcggctggtacatgagcaccgagatcggcaccagaaacctgtgcgacccccacagatacaacatcctggaggacgtggccgtgtgcatggacctggacaccagaaccaccagcagcctgtggaaggacaaggccgccgtggagatcaacgtggccgtgctgcacagctaccagctggccaaggtgaccatcgtggaccaccacgccgccaccgccagcttcatgaagcacctggagaacgagcagaaggccagaggcggctgccccgccgactgggcctggatcgtgccccccatcagcggcagcctgacccccgtgttccaccaggagatggtgaactacttcctgagccccgccttcagataccagcccgacccctggaagggcagcgccgccaagggcaccggcatcaccagaaagaagaccttcaaggaggtggccaacgccgtgaagatcagcgccagcctgatgggcaccgtgatggccaagagagtgaaggccaccatcctgtacggcagcgagaccggcagagcccagagctacgcccagcagctgggcagactgttcagaaaggccttcgaccccagagtgctgtgcatggacgagtacgacgtggtgagcctggagcacgagaccctggtgctggtggtgaccagcaccttcggcaacggcgacccccccgagaacggcgagagcttcgccgccgccctgatggagatgagcggcccctacaacagcagccccagacccgagcagcacaagagctacaagatcagattcaacagcatcagctgcagcgaccccctggtgagcagctggagaagaaagagaaaggagagcagcaacaccgacagcgccggcgccctgggcaccctgagattctgcgtgttcggcctgggcagcagagcctacccccacttctgcgccttcgccagagccgtggacaccagactggaggagctgggcggcgagagactgctgcagctgggccagggcgacgagctgtgcggccaggaggaggccttcagaggctgggcccaggccgccttccaggccgcctgcgagaccttctgcgtgggcgaggacgccaaggccgccgccagagacatcttcagccccaagagaagctggaagagacagagatacagactgagcgcccaggccgagggcctgcagctgctgcccggcctgatccacgtgcacagaagaaagatgttccaggccaccatcagaagcgtggagaacctgcagagcagcaagagcaccagagccaccatcctggtgagactggacaccggcggccaggagggcctgcagtaccagcccggcgaccacatcggcgtgtgcccccccaacagacccggcctggtggaggccctgctgagcagagtggaggacccccccgcccccaccgagcccgtggccgtggagcagctggagaagggcagccccggcggccccccccccggctgggtgagagaccccagactgcccccctgcaccctgagacaggccctgaccttcttcctggacatcaccagcccccccagcccccagctgctgagactgctgagcaccctggccgaggagcccagagagcagcaggagctggaggccctgagccaggaccccagaagatacgaggagtggaagtggttcagatgccccaccctgctggaggtgctggagcagttccccagcgtggccctgcccgcccccctgctgctgacccagctgcccctgctgcagcccagatactacagcgtgagcagcgcccccagcacccaccccggcgagatccacctgaccgtggccgtgctggcctacagaacccaggacggcctgggccccctgcactacggcgtgtgcagcacctggctgagccagctgaagcccggcgaccccgtgccctgcttcatcagaggcgcccccagcttcagactgccccccgaccccagcctgccctgcatcctggtgggccccggcaccggcatcgcccccttcagaggcttctggcaggagagactgcacgacatcgagagcaagggcctgcagcccacccccatgaccctggtgttcggctgcagatgcagccagctggaccacctgtacagagacgaggtgcagaacgcccagcagagaggcgtgttcggcagagtgctgaccgccttcagcagagagcccgacaaccccaagacctacgtgcaggacatcctgagaaccgagctggccgccgaggtgcacagagtgctgtgcctggagagaggccacatgttcgtgtgcggcgacgtgaccatggccaccaacgtgctgcagaccgtgcagagaatcctggccaccgagggcgacatggagctggacgaggccggcgacgtgatcggcgtgctgagagaccagcagagataccacgaggacatcttcggcctgaccctgagaacccaggaggtgaccagcagaatcagaacccagagcttcagcctgcaggagagacagctgagaggcgccgtgccctgggccttcgacccccccggcagcgacaccaacagcccctag

SEQ ID NO: 91196 - DNA, 1521 bp, synthetic construct
  misc_feature 1..1521: note = Description of Artificial Sequence: Synthetic coding sequence
  source 1..1521: mol_type = other DNA
atgagagaccccctgaccgactgcccctacaacaaggtgtacaagaacctgaaggagttcagccagaacggcgagaacttctgcaagcaggtgaccagcgtgctgcagcagagagccaacctggagatcagctacgccaagggcctgcagaagctggccagcaagctgagcaaggccctgcagaacaccagaaagagctgcgtgagcagcgcctgggcctgggccagcgagggcatgaagagcaccgccgacctgcaccagaagctgggcaaggccatcgagctggaggccatcaagcccacctaccaggtgctgaacgtgcaggagaagaagagaaagagcctggacaacgaggtggagaagaccgccaacctggtgatcagcaactggaaccagcagatcaaggccaagaagaagctgatggtgagcaccaagaagcacgaggccctgttccagctggtggagagcagcaagcagagcatgaccgagaaggagaagagaaagctgctgaacaagctgaccaagagcaccgagaagctggagaaggaggacgagaactactaccagaagaacatggccggctacagcaccagactgaagtgggagaacaccctggagaactgctaccagagcatcctggagctggagaaggagagaatccagctgctgtgcaacaacctgaaccagtacagccagcacatcagcctgttcggccagaccctgaccacctgccacacccagatccactgcgccatcagcaagatcgacatcgagaaggacatccaggccgtgatggaggagaccgccatcctgagcaccgagaacaagagcgagttcctgctgaccgactacttcgaggaggaccccaacagcgccatggacaaggagagaagaaagagcctgctgaagcccaagctgctgagactgcagagagacatcgagaaggccagcaaggacaaggagggcctggagagaatgctgaagacctacagcagcaccagcagcttcagcgacgccaagagccagaaggacaccgccgccctgatggacgagaacaacctgaagctggacctgctggaggccaacagctacaagctgagcagcatgctggccgagctggagcagagaccccagcccagccacccctgcagcaacagcatcttcagatggagagagaaggagcacacccacagctacgtgaagatcagcagacccttcctgatgaagagactggagaacatcgtgagcaaggccagcagcggcggccagagcaaccccggcagcagcacccccgcccccggcgccgcccagctgagcagcagactgtgcaaggccctgtacagcttccaggccagacaggacgacgagctgaacctggagaagggcgacatcgtgatcatccacgagaagaaggagggcggctggtggttcggcagcctgaacggcaagaagggccacttccccgccgcctacgtggaggagctgcccagcaacgccggcaacaccgccaccaaggcctag

SEQ ID NO: 91197 - DNA, 1287 bp, synthetic construct
  misc_feature 1..1287: note = Description of Artificial Sequence: Synthetic coding sequence
  source 1..1287: mol_type = other DNA
atgaagagcaccgccgacctgcaccagaagctgggcaaggccatcgagctggaggccatcaagcccacctaccaggtgctgaacgtgcaggagaagaagagaaagagcctggacaacgaggtggagaagaccgccaacctggtgatcagcaactggaaccagcagatcaaggccaagaagaagctgatggtgagcaccaagaagcacgaggccctgttccagctggtggagagcagcaagcagagcatgaccgagaaggagaagagaaagctgctgaacaagctgaccaagagcaccgagaagctggagaaggaggacgagaactactaccagaagaacatggccggctacagcaccagactgaagtgggagaacaccctggagaactgctaccagagcatcctggagctggagaaggagagaatccagctgctgtgcaacaacctgaaccagtacagccagcacatcagcctgttcggccagaccctgaccacctgccacacccagatccactgcgccatcagcaagatcgacatcgagaaggacatccaggccgtgatggaggagaccgccatcctgagcaccgagaacaagagcgagttcctgctgaccgactacttcgaggaggaccccaacagcgccatggacaaggagagaagaaagagcctgctgaagcccaagctgctgagactgcagagagacatcgagaaggccagcaaggacaaggagggcctggagagaatgctgaagacctacagcagcaccagcagcttcagcgacgccaagagccagaaggacaccgccgccctgatggacgagaacaacctgaagctggacctgctggaggccaacagctacaagctgagcagcatgctggccgagctggagcagagaccccagcccagccacccctgcagcaacagcatcttcagatggagagagaaggagcacacccacagctacgtgaagatcagcagacccttcctgatgaagagactggagaacatcgtgagcaaggccagcagcggcggccagagcaaccccggcagcagcacccccgcccccggcgccgcccagctgagcagcagactgtgcaaggccctgtacagcttccaggccagacaggacgacgagctgaacctggagaagggcgacatcgtgatcatccacgagaagaaggagggcggctggtggttcggcagcctgaacggcaagaagggccacttccccgccgcctacgtggaggagctgcccagcaacgccggcaacaccgccaccaaggcctag

SEQ ID NO: 91198 - DNA, 1692 bp, synthetic construct
  misc_feature 1..1692: note = Description of Artificial Sequence: Synthetic coding sequence
  source 1..1692: mol_type = other DNA
atgagagaccccctgaccgactgcccctacaacaaggtgtacaagaacctgaaggagttcagccagaacggcgagaacttctgcaagcaggtgaccagcgtgctgcagcagagagccaacctggagatcagctacgccaagggcctgcagaagctggccagcaagctgagcaaggccctgcagaacaccagaaagagctgcgtgagcagcgcctgggcctgggccagcgagggcatgaagagcaccgccgacctgcaccagaagctgggcaaggccatcgagctggaggccatcaagcccacctaccaggtgctgaacgtgcaggagaagaagagaaagagcctggacaacgaggtggagaagaccgccaacctggtgatcagcaactggaaccagcagatcaaggccaagaagaagctgatggtgagcaccaagaagcacgaggccctgttccagctggtggagagcagcaagcagagcatgaccgagaaggagaagagaaagctgctgaacaagctgaccaagagcaccgagaagctggagaaggaggacgagaactactaccagaagaacatggccggctacagcaccagactgaagtgggagaacaccctggagaactgctaccaggtgacccacagcatctgcctgtacgccttctgggtgaagagagcctggggcaagtgcgtgagcgacctgagataccaggacaccttcctgcccggcaacctgccccccctgtggttcggctacgacatcgtgaagagactgatcatgagactgtgcagcgtgtgcctgcagagcatcctggagctggagaaggagagaatccagctgctgtgcaacaacctgaaccagtacagccagcacatcagcctgttcggccagaccctgaccacctgccacacccagatccactgcgccatcagcaagatcgacatcgagaaggacatccaggccgtgatggaggagaccgccatcctgagcaccgagaacaagagcgagttcctgctgaccgactacttcgaggaggaccccaacagcgccatggacaaggagagaagaaagagcctgctgaagcccaagctgctgagactgcagagagacatcgagaaggccagcaaggacaaggagggcctggagagaatgctgaagacctacagcagcaccagcagcttcagcgacgccaagagccagaaggacaccgccgccctgatggacgagaacaacctgaagctggacctgctggaggccaacagctacaagctgagcagcatgctggccgagctggagcagagaccccagcccagccacccctgcagcaacagcatcttcagatggagagagaaggagcacacccacagctacgtgaagatcagcagacccttcctgatgaagagactggagaacatcgtgagcaaggccagcagcggcggccagagcaaccccggcagcagcacccccgcccccggcgccgcccagctgagcagcagactgtgcaaggccctgtacagcttccaggccagacaggacgacgagctgaacctggagaagggcgacatcgtgatcatccacgagaagaaggagggcggctggtggttcggcagcctgaacggcaagaagggccacttccccgccgcctacgtggaggagctgcccagcaacgccggcaacaccgccaccaaggcctag

SEQ ID NO: 91199 - DNA, 1692 bp, synthetic construct; identical to SEQ ID NO: 91198
  misc_feature 1..1692: note = Description of Artificial Sequence: Synthetic coding sequence
  source 1..1692: mol_type = other DNA

SEQ ID NO: 91200 - DNA, 939 bp, synthetic construct
  misc_feature 1..939: note = Description of Artificial Sequence: Synthetic coding sequence
  source 1..939: mol_type = other DNA
atgaccttcggcctgagaaagagactgagcgaggagagaggcttcagcctgatgcccagagccatggccatcagcagcagcagctgcgagctgcccctggtggccgtgtgccaggtgaccagcacccccgacaagcagcagaacttcaagacctgcgccgagctggtgagagaggccgccagactgggcgcctgcctggccttcctgcccgaggccttcgacttcatcgccagagaccccgccgagaccctgcacctgagcgagcccctgggcggcaagctgctggaggagtacacccagctggccagagagtgcggcctgtggctgagcctgggcggcttccacgagagaggccaggactgggagcagacccagaagatctacaactgccacgtgctgctgaacagcaagggcgccgtggtggccacctacagaaagacccacctgtgcgacgtggagatccccggccagggccccatgtgcgagagcaacagcaccatgcccggccccagcctggagagccccgtgagcacccccgccggcaagatcggcctggccgtgtgctacgacatgagattccccgagctgagcctggccctggcccaggccggcgccgagatcctgacctaccccagcgccttcggcagcatcaccggccccgcccactgggaggtgctgctgagagccagagccatcgagacccagtgctacgtggtggccgccgcccagtgcggcagacaccacgagaagagagccagctacggccacagcatggtggtggacccctggggcaccgtggtggccagatgcagcgagggccccggcctgtgcctggccagaatcgacctgaactacctgagacagctgagaagacacctgcccgtgttccagcacagaagacccgacctgtacggcaacctgggccaccccctgagctag

SEQ ID NO: 91201 - DNA, 732 bp, synthetic construct
  misc_feature 1..732: note = Description of Artificial Sequence: Synthetic coding sequence
  source 1..732: mol_type = other DNA
atgctgggcttcatcaccagacccccccacagattcctgagcctgctgtgccccggcctgagaatcccccagctgagcgtgctgtgcgcccagcccagacccagagccatggccatcagcagcagcagctgcgagctgcccctggtggccgtgtgccaggtgaccagcacccccgacaagcagcagaacttcaagacctgcgccgagctggtgagagaggccgccagactgggcgcctgcctggccttcctgcccgaggccttcgacttcatcgccagagaccccgccgagaccctgcacctgagcgagcccctgggcggcaagctgctggaggagtacacccagctggccagagagtgcggcctgtggctgagcctgggcggcttccacgagagaggccaggactgggagcagacccagaagatctacaactgccacgtgctgctgaacagcaagggcgccgtggtggccacctacagaaagacccacctgtgcgacgtggagatccccggccagggccccatgtgcgagagcaacagcaccatgcccggccccagcctggagagccccgtgagcacccccgccggcaagatcggcctggccgtgtgctacgacatgagattccccgagctgagcctggccctggcccaggccggcgccgagatcctgacctaccccagcgccttcggcagcatcaccggccccgcccactgggagcccgtgagcagctag

SEQ ID NO: 91202 - DNA, 984 bp, synthetic construct
  misc_feature 1..984: note = Description of Artificial Sequence: Synthetic coding sequence
  source 1..984: mol_type = other DNA
atgctgggcttcatcaccagacccccccacagattcctgagcctgctgtgccccggcctgagaatcccccagctgagcgtgctgtgcgcccagcccagacccagagccatggccatcagcagcagcagctgcgagctgcccctggtggccgtgtgccaggtgaccagcacccccgacaagcagcagaacttcaagacctgcgccgagctggtgagagaggccgccagactgggcgcctgcctggccttcctgcccgaggccttcgacttcatcgccagagaccccgccgagaccctgcacctgagcgagcccctgggcggcaagctgctggaggagtacacccagctggccagagagtgcggcctgtggctgagcctgggcggcttccacgagagaggccaggactgggagcagacccagaagatctacaactgccacgtgctgctgaacagcaagggcgccgtggtggccacctacagaaagacccacctgtgcgacgtggagatccccggccagggccccatgtgcgagagcaacagcaccatgcccggccccagcctggagagccccgtgagcacccccgccggcaagatcggcctggccgtgtgctacgacatgagattccccgagctgagcctggccctggcccaggccggcgccgagatcctgacctaccccagcgccttcggcagcatcaccggccccgcccactgggaggtgctgctgagagccagagccatcgagacccagtgctacgtggtggccgccgcccagtgcggcagacaccacgagaagagagccagctacggccacagcatggtggtggacccctggggcaccgtggtggccagatgcagcgagggccccggcctgtgcctggccagaatcgacctgaactacctgagacagctgagaagacacctgcccgtgttccagcacagaagacccgacctgtacggcaacctgggccaccccctgagctag

SEQ ID NO: 91203 - DNA, 876 bp, synthetic construct
  misc_feature 1..876: note = Description of Artificial Sequence: Synthetic coding sequence
  source 1..876: mol_type = other DNA
atggccatcagcagcagcagctgcgagctgcccctggtggccgtgtgccaggtgaccagcacccccgacaagcagcagaacttcaagacctgcgccgagctggtgagagaggccgccagactgggcgcctgcctggccttcctgcccgaggccttcgacttcatcgccagagaccccgccgagaccctgcacctgagcgagcccctgggcggcaagctgctggaggagtacacccagctggccagagagtgcggcctgtggctgagcctgggcggcttccacgagagaggccaggactgggagcagacccagaagatctacaactgccacgtgctgctgaacagcaagggcgccgtggtggccacctacagaaagacccacctgtgcgacgtggagatccccggccagggccccatgtgcgagagcaacagcaccatgcccggccccagcctggagagccccgtgagcacccccgccggcaagatcggcctggccgtgtgctacgacatgagattccccgagctgagcctggccctggcccaggccggcgccgagatcctgacctaccccagcgccttcggcagcatcaccggccccgcccactgggaggtgctgctgagagccagagccatcgagacccagtgctacgtggtggccgccgcccagtgcggcagacaccacgagaagagagccagctacggccacagcatggtggtggacccctggggcaccgtggtggccagatgcagcgagggccccggcctgtgcctggccagaatcgacctgaactacctgagacagctgagaagacacctgcccgtgttccagcacagaagacccgacctgtacggcaacctgggccaccccctgagctag

SEQ ID NO: 91204 - DNA, 822 bp, synthetic construct
  misc_feature 1..822: note = Description of Artificial Sequence: Synthetic coding sequence
  source 1..822: mol_type = other DNA
atgagcctgaccaacaccaagaccggcttcagcgtgaaggacatcctggacctgcccgacaccaacgacgaggagggcagcgtggccgagggccccgaggaggagaacgagggccccgagcccgccaagagagccggccccctgggccagggcgccctggacgccgtgcagagcctgcccctgaagaaccccttctacgacagcagcgacaacccctacaccagatggctggccagcaccgagggcctgcagtacagcctgcacggcctggccgccggcgcccccccccaggacagcagcagcaagagccccgagcccagcgccgacgagagccccgacaacgacaaggagacccccggcggcggcggcgacgccggcaagaagagaaagagaagagtgctgttcagcaaggcccagacctacgagctggagagaagattcagacagcagagatacctgagcgcccccgagagagagcacctggccagcctgatcagactgacccccacccaggtgaagatctggttccagaaccacagatacaagatgaagagagccagagccgagaagggcatggaggtgacccccctgcccagccccagaagagtggccgtgcccgtgctggtgagagacggcaagccctgccacgccctgaaggcccaggacctggccgccgccaccttccaggccggcatccccttcagcgcctacagcgcccagagcctgcagcacatgcagtacaacgcccagtacagcagcgccagcaccccccagtaccccaccgcccaccccctggtgcaggcccagcagtggacctggtag

SEQ ID NO: 91205 - DNA, 1065 bp, synthetic construct
  misc_feature 1..1065: note = Description of Artificial Sequence: Synthetic coding sequence
  source 1..1065: mol_type = other DNA
atgagcctgagccccaagcacaccacccccttcagcgtgagcgacatcctgagccccatcgaggagacctacaagaagttcagcggcgccatggacggcgccccccccggcctgggcgcccccctgggcgccgccgccgcctacagagcccccccccccggccccagcagccaggccgccaccgtggccggcatgcagcccagccacgccatggccggccacaacgccgccgccgccgccgccgccgccgccgccgccgccgccgccgccgccacctaccacatgccccccggcgtgagccagttcccccacggcgccatgggcagctactgcaacggcggcctgggcaacatgggcgagctgcccgcctacaccgacggcatgagaggcggcgccgccaccggctggtacggcgccaaccccgaccccagatacagcagcatcagcagattcatgggccccagcgccggcgtgaacgtggccggcatgggcagcctgaccggcatcgccgacgccgccaagagcctgggccccctgcacgccgccgccgccgccgccgcccccagaagaaagagaagagtgctgttcagccaggcccaggtgtacgagctggagagaagattcaagcagcagaagtacctgagcgcccccgagagagagcacctggccagcatgatccacctgacccccacccaggtgaagatctggttccagaaccacagatacaagatgaagagacaggccaaggacaaggccgcccagcagctgcagcaggagggcggcctgggccccccccccccccccccccccagccccagaagagtggccgtgcccgtgctggtgaaggacggcaagccctgccagaacggcgccagcacccccacccccggccaggccggcccccagccccccgcccccacccccgcccccgagctggaggagctgagccccagcccccccgccctgcacggccccggcggcggcctggccgccctggacgccgccgccggcgagtacagcggcggcgtgctgggcgccaacctgctgtacggcagaacctggtag

SEQ ID NO: 91206 - DNA, 975 bp, synthetic construct
  misc_feature 1..975: note = Description of Artificial Sequence: Synthetic coding sequence
  source 1..975: mol_type = other DNA
atgttccccagccccgccctgacccccacccccttcagcgtgaaggacatcctgaacctggagcagcagcagagaagcctggccgccgccggcgagctgagcgccagactggaggccaccctggcccccagcagctgcatgctggccgccttcaagcccgaggcctacgccggccccgaggccgccgcccccggcctgcccgagctgagagccgagctgggcagagcccccagccccgccaagtgcgccagcgccttccccgccgcccccgccttctaccccagagcctacagcgaccccgaccccgccaaggaccccagagccgagaagaaggagctgtgcgccctgcagaaggccgtggagctggagaagaccgaggccgacaacgccgagagacccagagccagaagaagaagaaagcccagagtgctgttcagccaggcccaggtgtacgagctggagagaagattcaagcagcagagatacctgagcgcccccgagagagaccagctggccagcgtgctgaagctgaccagcacccaggtgaagatctggttccagaacagaagatacaagtgcaagagacagagacaggaccagaccctggagctggtgggcctgcccccccccccccccccccccgccagaagaatcgccgtgcccgtgctggtgagagacggcaagccctgcctgggcgacagcgccccctacgcccccgcctacggcgtgggcctgaacccctacggctacaacgcctaccccgcctaccccggctacggcggcgccgcctgcagccccggctacagctgcaccgccgcctaccccgccggccccagccccgcccagcccgccaccgccgccgccaacaacaacttcgtgaacttcggcgtgggcgacctgaacgccgtgcagagccccggcatcccccagagcaacagcggcgtgagcaccctgcacggcatcagagcctggtag

SEQ ID NO: 91207 - DNA, 339 bp, synthetic construct
  misc_feature 1..339: note = Description of Artificial Sequence: Synthetic coding sequence
  source 1..339: mol_type = other DNA
atgttccccagccccgccctgacccccacccccttcagcgtgaaggacatcctgaacctggagcagcagcagagaagcctggccgccgccggcgagctgagcgccagactggaggccaccctggcccccagcagctgcatgctggccgccttcaagcccgaggcctacgccggccccgaggccgccgcccccggcctgcccgagctgagagccgagctgggcagagcccccagccccgccaagtgcgccagcgccttccccgccgcccccgccttctaccccagagcctacagcgaccccgaccccgccaaggaccccagagccgagaagaaggcctag

SEQ ID NO: 91208 - DNA, 456 bp, synthetic construct
  misc_feature 1..456: note = Description of Artificial Sequence: Synthetic coding sequence
  source 1..456: mol_type = other DNA
atgttccccagccccgccctgacccccacccccttcagcgtgaaggacatcctgaacctggagcagcagcagagaagcctggccgccgccggcgagctgagcgccagactggaggccaccctggcccccagcagctgcatgctggccgccttcaagcccgaggcctacgccggccccgaggccgccgcccccggcctgcccgagctgagagccgagctgggcagagcccccagccccgccaagtgcgccagcgccttccccgccgcccccgccttctaccccagagcctacagcgaccccgaccccgccaaggaccccagagccgagaagaagggctgcgagctgcccagaggccagagaccccccgtgctgttcagcagcgccctgagccagcccgacttcctgcagatgctgagcgagacctgcagatggctgcccgtgcacctggccgagtag

SEQ ID NO: 91209 - DNA, 906 bp, synthetic construct
  misc_feature 1..906: note = Description of Artificial Sequence: Synthetic coding sequence
  source 1..906: mol_type = other DNA
atgctgctgagccccgtgaccagcacccccttcagcgtgaaggacatcctgagactggagagagagagaagctgccccgccgccagcccccaccccagagtgagaaagagccccgagaacttccagtacctgagaatggacgccgagcccagaggcagcgaggtgcacaacgccggcggcggcggcggcgacagaaagctggacggcagcgagccccccggcggcccctgcgaggccgtgctggagatggacgccgagagaatgggcgagccccagcccggcctgaacgccgccagccccctgggcggcggcaccagagtgcccgagagaggcgtgggcaacagcggcgacagcgtgagaggcggcagaagcgagcagcccaaggccagacagagaagaaagcccagagtgctgttcagccaggcccaggtgctggccctggagagaagattcaagcagcagagatacctgagcgcccccgagagagagcacctggccagcgccctgcagctgaccagcacccaggtgaagatctggttccagaacagaagatacaagtgcaagagacagagacaggacaagagcctggagctggccggccaccccctgacccccagaagagtggccgtgcccgtgctggtgagagacggcaagccctgcctgggccccggccccggcgcccccgccttccccagcccctacagcgccgccgtgagcccctacagctgctacggcggctacagcggcgccccctacggcgccggctacggcacctgctacgccggcgcccccagcggccccgccccccacacccccctggccagcgccggcttcggccacggcggccagaacgccaccccccagggccacctggccgccaccctgcagggcgtgagagcctggtag

SEQ ID NO: 91210 - DNA, 660 bp, synthetic construct
  misc_feature 1..660: note = Description of Artificial Sequence: Synthetic coding sequence
  source 1..660: mol_type = other DNA
atggacgccgagagaatgggcgagccccagcccggcctgaacgccgccagccccctgggcggcggcaccagagtgcccgagagaggcgtgggcaacagcggcgacagcgtgagaggcggcagaagcgagcagcccaaggccagacagagaagaaagcccagagtgctgttcagccaggcccaggtgctggccctggagagaagattcaagcagcagagatacctgagcgcccccgagagagagcacctggccagcgccctgcagctgaccagcacccaggtgaagatctggttccagaacagaagatacaagtgcaagagacagagacaggacaagagcctggagctggccggccaccccctgacccccagaagagtggccgtgcccgtgctggtgagagacggcaagccctgcctgggccccggccccggcgcccccgccttccccagcccctacagcgccgccgtgagcccctacagctgctacggcggctacagcggcgccccctacggcgccggctacggcacctgctacgccggcgcccccagcggccccgccccccacacccccctggccagcgccggcttcggccacggcggccagaacgccaccccccagggccacctggccgccaccctgcagggcgtgagagcctggtag

SEQ ID NO: 91211 - DNA, 720 bp, synthetic construct
  misc_feature 1..720: note = Description of Artificial Sequence: Synthetic coding sequence
  source 1..720: mol_type = other DNA
atggccaccagcggcagactgagcttcaccgtgagaagcctgctggacctgcccgagcaggacgcccagcacctgcccagaagagagcccgagcccagagccccccagcccgacccctgcgccgcctggctggacagcgagagaggccactaccccagcagcgacgagagcagcctggagaccagcccccccgacagcagccagagacccagcgccagacccgccagccccggcagcgacgccgagaagagaaagaagagaagagtgctgttcagcaaggcccagaccctggagctggagagaagattcagacagcagagatacctgagcgcccccgagagagagcagctggccagcctgctgagactgacccccacccaggtgaagatctggttccagaaccacagatacaagctgaagagagccagagcccccggcgccgccgagagccccgacctggccgccagcgccgagctgcacgccgcccccggcctgctgagaagagtggtggtgcccgtgctggtgagagacggccagccctgcggcggcggcggcggcggcgaggtgggcaccgccgccgcccaggagaagtgcggcgccccccccgccgccgcctgccccctgcccggctaccccgccttcggccccggcagcgccctgggcctgttccccgcctaccagcacctggccagccccgccctggtgagctggaactggtag

SEQ ID NO: 91212 - DNA, 1002 bp, synthetic construct
  misc_feature 1..1002: note = Description of Artificial Sequence: Synthetic coding sequence
  source 1..1002: mol_type = other DNA
atggccgtgagaggcgccaacaccctgaccagcttcagcatccaggccatcctgaacaagaaggaggagagaggcggcctggccgcccccgagggcagacccgcccccggcggcaccgccgccagcgtggccgccgcccccgccgtgtgctgctggagactgttcggcgagagagacgccggcgccctgggcggcgccgaggacagcctgctggccagccccgccggcaccagaaccgccgccggcagaaccgccgagagccccgagggctgggacagcgacagcgccctgagcgaggagaacgagagcagaagaagatgcgccgacgccagaggcgccagcggcgccggcctggccggcggcagcctgagcctgggccagcccgtgtgcgagctggccgccagcaaggacctggaggaggaggccgccggcagaagcgacagcgagatgagcgccagcgtgagcggcgacagaagccccagaaccgaggacgacggcgtgggccccagaggcgcccacgtgagcgccctgtgcagcggcgccggcggcggcggcggcagcggccccgccggcgtggccgaggaggaggaggagcccgccgcccccaagcccagaaagaagagaagcagagccgccttcagccacgcccaggtgttcgagctggagagaagattcaaccaccagagatacctgagcggccccgagagagccgacctggccgccagcctgaagctgaccgagacccaggtgaagatctggttccagaacagaagatacaagaccaagagaagacagatggccgccgacctgctggccagcgcccccgccgccaagaaggtggccgtgaaggtgctggtgagagacgaccagagacagtacctgcccggcgaggtgctgagaccccccagcctgctgcccctgcagcccagctactactacccctactactgcctgcccggctgggccctgagcacctgcgccgccgccgccggcacccagtag

SEQ ID NO: 91213 - DNA, 798 bp, synthetic construct
  misc_feature 1..798: note = Description of Artificial Sequence: Synthetic coding sequence
  source 1..798: mol_type = other DNA
atggagagcaacctgcagggcaccttcctgctgaacaacacccccctggcccagttccccgagatgaaggcccccgtgtgccagtacagcgtgcagaacagcttctacaagctgagcccccccggcctgggcccccagctggccgccggcaccccccacggcatcaccgacatcctgagcagacccgtggccgcccccaacaacagcctgctgagcggctacccccacgtggccggcttcggcggcctgagcagccagggcgtgtactacagcccccaggtgggcaacttcagcaaggccggcaacgagtaccccaccagaaccagaaactgctgggccgacaccggccaggactggagaggcggcagacagtgcagcaacacccccgaccccctgagcgacagcatccacaagaagaagcacaccagacccaccttcaccggccaccagatcttcgccctggagaagaccttcgagcagaccaagtacctggccggccccgagagagccagactggcctacagcctgggcatgaccgagagccaggtgaaggtgtggttccagaacagaagaaccaagtggagaaagaagagcgccctggagcccagcagcagcacccccagagcccccggcggcgccggcgccggcgccggcggcgacagagcccccagcgagaacgaggacgacgagtacaacaagcccctggaccccgacagcgacgacgagaagatcagactgctgctgagaaagcacagagccgccttcagcgtgctgagcctgggcgcccacagcgtgtag

SEQ ID NO: 91214 - DNA, 408 bp, synthetic construct
  misc_feature 1..408: note = Description of Artificial Sequence: Synthetic coding sequence
  source 1..408: mol_type = other DNA
atgcagcagggccagctggcccccggcagcagactgtgcagcggcccctggggcctgcccgagctgcagcccgccgcccccagcagcagcgccgcccagctgccctggggcgagagctggggcgaggaggccgacacccccgcctgcctgagcgccagcggcgtgtggttccagaacagaagaaccaagtggagaaagaagagcgccctggagcccagcagcagcacccccagagcccccggcggcgccggcgccggcgccggcggcgacagagcccccagcgagaacgaggacgacgagtacaacaagcccctggaccccgacagcgacgacgagaagatcagactgctgctgagaaagcacagagccgccttcagcgtgctgagcctgggcgcccacagcgtgtag

SEQ ID NO: 91215 - DNA, 2928 bp, synthetic construct
  misc_feature 1..2928: note = Description of Artificial Sequence: Synthetic coding sequence
  source 1..2928: mol_type = other DNA
atgagatggggccaccacctgcccagagccagctggggcagcggcttcagaagagccctgcagagacccgacgacagaatccccttcctgatccactggagctggcccctgcagggcgagagacccttcggcccccccagagccttcatcagacaccacggcagcagcgtggacagcgcccccccccccggcagacacggcagactgttccccagcgccagcgccaccgaggccatccagagacacagaagaaacctggccgagtggttcagcagactgcccagagaggagagacagttcggccccaccttcgccctggacaccgtgcacgtggaccccgtgatcagagagagcacccccgacgagctgctgagaccccccgccgagctggccctggagcaccagcccccccaggccggcctgccccccctggccctgagccagctgttcaaccccgacgcctgcggcagaagagtgcagaccgtggtgctgtacggcaccgtgggcaccggcaagagcaccctggtgagaaagatggtgctggactggtgctacggcagactgcccgccttcgagctgctgatccccttcagctgcgaggacctgagcagcctgggccccgcccccgccagcctgtgccagctggtggcccagagatacacccccctgaaggaggtgctgcccctgatggccgccgccggcagccacctgctgttcgtgctgcacggcctggagcacctgaacctggacttcagactggccggcaccggcctgtgcagcgaccccgaggagccccaggagcccgccgccatcatcgtgaacctgctgagaaagtacatgctgccccaggccagcatcctggtgaccaccagacccagcgccatcggcagaatccccagcaagtacgtgggcagatacggcgagatctgcggcttcagcgacaccaacctgcagaagctgtacttccagctgagactgaaccagccctactgcggctacgccgtgggcggcagcggcgtgagcgccacccccgcccagagagaccacctggtgcagatgctgagcagaaacctggagggccaccaccagatcgccgccgcctgcttcctgcccagctactgctggctggtgtgcgccaccctgcacttcctgcacgcccccacccccgccggccagaccctgaccagcatctacaccagcttcctgagactgaacttcagcggcgagaccctggacagcaccgaccccagcaacctgagcctgatggcctacgccgccagaaccatgggcaagctggcctacgagggcgtgagcagcagaaagacctacttcagcgaggaggacgtgtgcggctgcctggaggccggcatcagaaccgaggaggagttccagctgctgcacatcttcagaagagacgccctgagattcttcctggccccctgcgtggagcccggcagagccggcaccttcgtgttcaccgtgcccgccatgcaggagtacctggccgccctgtacatcgtgctgggcctgagaaagaccaccctgcagaaggtgggcaaggaggtggccgagctggtgggcagagtgggcgaggacgtgagcctggtgctgggcatcatggccaagctgctgcccctgagagccctgcccctgctgttcaacctgatcaaggtggtgcccagagtgttcggcagaatggtgggcaagagcagagaggccgtggcccaggccatggtgctggagatgttcagagaggaggactactacaacgacgacgtgctggaccagatgggcgccagcatcctgggcgtggagggccccagaagacaccccgacgagccccccgaggacgaggtgttcgagctgttccccatgttcatgggcggcctgctgagcgcccacaacagagccgtgctggcccagctgggctgccccatcaagaacctggacgccctggagaacgcccaggccatcaagaagaagctgggcaagctgggcagacaggtgctgccccccagcgagctgctggaccacctgttcttccactacgagttccagaaccagagattcagcgccgaggtgctgagcagcctgagacagctgaacctggccggcgtgagaatgacccccgtgaagtgcaccgtggtggccgccgtgctgggcagcggcagacacgccctggacgaggtgaacctggccagctgccagctggaccccgccggcctgagaaccctgctgcccgtgttcctgagagccagaaagctgggcctgcagctgaacagcctgggccccgaggcctgcaaggacctgagagacctgctgctgcacgaccagtgccagatcaccaccctgagactgagcaacaaccccctgaccgccgccggcgtggccgtgctgatggagggcctggccggcaacaccagcgtgacccacctgagcctgctgcacaccggcctgggcgacgagggcctggagctgctggccgcccagctggacagaaacagacagctgcaggagctgaacgtggcctacaacggcgccggcgacaccgccgccctggccctggccagagccgccagagagcaccccagcctggagctgctgcacctgtacttcaacgagctgagcagcgagggcagacaggtgctgagagacctgggcggcgccgccgagggcggcgccagagtggtggtgagcctgaccgagggcaccgccgtgagcgagtactggagcgtgatcctgagcgaggtgcagagaaacctgaacagctgggacagagccagagtgcagagacacctggagctgctgctgagagacctggaggacagcagaggcgccaccctgaacccctggagaaaggcccagctgctgagagtggagggcgaggtgagagccctgctggagcagctgggcagcagcggcagctag

SEQ ID NO: 91216 - DNA, 345 bp, synthetic construct
  misc_feature 1..345: note = Description of Artificial Sequence: Synthetic coding sequence
  source 1..345: mol_type = other DNA
ggcatcagcaagctgaagatggtgaaccagtgcttcggcctgggcgacggcacctgcctgctgagcatccagctggagggccccaagcacgtggccttcggctggcccgagtgccccgaggcccccctgcccaccctgccccccccccccctgaaggagcccctgaccgtgagccccagaggcagccacctgatgagcgccatgcccggcgtgagccccagcagatgcgtgggcagcttccccagctgcctgatgctgacctgcggccacagaggctgcccccacatcggcgccttcagcagcagcagctgccccctgtgccacaacggcatgatggcctggtag

SEQ ID NO: 91217 - DNA, 2928 bp, synthetic construct; identical to SEQ ID NO: 91215
  misc_feature 1..2928: note = Description of Artificial Sequence: Synthetic coding sequence
  source 1..2928: mol_type = other DNA

SEQ ID NO: 91218 - DNA, 2766 bp, synthetic construct
  misc_feature 1..2766: note = Description of Artificial Sequence: Synthetic coding sequence
  source 1..2766: mol_type = other DNA
atgagatggggccaccacctgcccagagccagctggggcagcggcttcagaagagccctgcagagacccgacgacagaatccccttcctgatccactggagctggcccctgcagggcgagagacccttcggcccccccagagccttcatcagacaccacggcagcagcgtggacagcgcccccccccccggcagacacggcagactgttccccagcgccagcgccaccgaggccatccagagacacagaagaaacctggccgagtggttcagcagactgcccagagaggagagacagttcggccccaccttcgccctggacaccgtgcacgtggaccccgtgatcagagagagcacccccgacgagctgctgagaccccccgccgagctggccctggagcaccagcccccccaggccggcctgccccccctggccctgagccagctgttcaaccccgacgcctgcggcagaagagtgcagaccgtggtgctgtacggcaccgtgggcaccggcaagagcaccctggtgagaaagatggtgctggactggtgctacggcagactgcccgccttcgagctgctgatccccttcagctgcgaggacctgagcagcctgggccccgcccccgccagcctgtgccagctggtggcccagagatacacccccctgaaggaggtgctgcccctgatggccgccgccggcagccacctgctgttcgtgctgcacggcctggagcacctgaacctggacttcagactggccggcaccggcctgtgcagcgaccccgaggagccccaggagcccgccgccatcatcgtgaacctgctgagaaagtacatgctgccccaggccagcatcctggtgaccaccagacccagcgccatcggcagaatccccagcaagtacgtgggcagatacggcgagatctgcggcttcagcgacaccaacctgcagaagctgtacttccagctgagactgaaccagccctactgcggctacgccgtgggcggcagcggcgtgagcgccacccccgcccagagagaccacctggtgcagatgctgagcagaaacctggagggccaccaccagatcgccgccgcctgcttcctgcccagctactgctggctggtgtgcgccaccctgcacttcctgcacgcccccacccccgccggccagaccctgaccagcatctacaccagcttcctgagactgaacttcagcggcgagaccctggacagcaccgaccccagcaacctgagcctgatggcctacgccgccagaaccatgggcaagctggcctacgagggcgtgagcagcagaaagacctacttcagcgaggaggacgtgtgcggctgcctggaggccggcatcagaaccgaggaggagttccagctgctgcacatcttcagaagagacgccctgagattcttcctggccccctgcgtggagcccggcagagccggcaccttcgtgttcaccgtgcccgccatgcaggagtacctggccgccctgtacatcgtgctgggcctgagaaagaccaccctgcagaaggtgggcaaggaggtggccgagctggtgggcagagtgggcgaggacgtgagcctggtgctgggcatcatggccaagctgctgcccctgagagccctgcccctgctgttcaacctgatcaaggtggtgcccagagtgttcggcagaatggtgggcaagagcagagaggccgtggcccaggccatggtgctggagatgttcagagaggaggactactacaacgacgacgtgctggaccagatgggcgccagcatcctgggcgtggagggccccagaagacaccccgacgagccccccgaggacgaggtgttcgagctgttccccatgttcatgggcggcctgctgagcgcccacaacagagccgtgctggcccagctgggctgccccatcaagaacctggacgccctggagaacgcccaggccatcaagaagaagctgggcaagctgggcagacaggtgctgccccccagcgagctgctggaccacctgttcttccactacgagttccagaaccagagattcagcgccgaggtgctgagcagcctgagacagctgaacctggccggcgtgagaatgacccccgtgaagtgcaccgtggtggccgccgtgctgggcagcggcagacacgccctggacgaggtgaacctggccagctgccagctggaccccgccggcctgagaaccctgctgcccgtgttcctgagagccagaaagctgggcctgcagctgaacagcctgggccccgaggcctgcaaggacctgagagacctgctgctgcacgaccagtgccagatcaccaccctgagactgagcaacaaccccctgaccgccgccggcgtggccgtgctgatggagggcctggccggcaacaccagcgtgacccacctgagcctgctgcacaccggcctgggcgacgagggcctggagctgctggccgcccagctggacagaaacagacagctgcaggagctgaacgtggcctacaacggcgccggcgacaccgccgccctggccctggccagagccgccagagagcaccccagcctggagctgctgcagggcgtggccatccagatgtgctggaagctgcccctgctgccctacgcccacctgtggacccccagaatgcccagccactggtgcttcctgctgatcctgatgccccccctgccccagtggtacgacggcctggtggcccccagaggcagatgcacctag

SEQ ID NO: 91219 - DNA, 2928 bp, synthetic construct; identical to SEQ ID NO: 91215
  misc_feature 1..2928: note = Description of Artificial Sequence: Synthetic coding sequence
  source 1..2928: mol_type = other DNA

SEQ ID NO: 91220 - DNA, 2766 bp, synthetic construct; identical to SEQ ID NO: 91218
  misc_feature 1..2766: note = Description of Artificial Sequence: Synthetic coding sequence
  source 1..2766: mol_type = other DNA

SEQ ID NO: 91221 - DNA, 3111 bp, synthetic construct
  misc_feature 1..3111: note = Description of Artificial Sequence: Synthetic coding sequence
  source 1..3111: mol_type = other DNA
atgaagatggccagcaccagatgcaagctggccagatacctggaggacctggaggacgtggacctgaagaagttcaagatgcacctggaggactaccccccccagaagggctgcatccccctgcccagaggccagaccgagaaggccgaccacgtggacctggccaccctgatgatcgacttcaacggcgaggagaaggcctgggccatggccgtgtggatcttcgccgccatcaacagaagagacctgtacgagaaggccaagagagacgagcccaagtggggcagcgacaacgccagagtgagcaaccccaccgtgatctgccaggaggacagcatcgaggaggagtggatgggcctgctggagtacctgagcagaatcagcatctgcaagatgaagaaggactacagaaagaagtacagaaagtacgtgagaagcagattccagtgcatcgaggacagaaacgccagactgggcgagagcgtgagcctgaacaagagatacaccagactgagactgatcaaggagcacagaagccagcaggagagagagcaggagctgctggccatcggcaagaccaagacctgcgagagccccgtgagccccatcaagatggagctgctgttcgaccccgacgacgagcacagcgagcccgtgcacaccgtggtgttccagggcgccgccggcatcggcaagaccatcctggccagaaagatgatgctggactgggccagcggcaccctgtaccaggacagattcgactacctgttctacatccactgcagagaggtgagcctggtgacccagagaagcctgggcgacctgatcatgagctgctgccccgaccccaacccccccatccacaagatcgtgagaaagcccagcagaatcctgttcctgatggacggcttcgacgagctgcagggcgccttcgacgagcacatcggccccctgtgcaccgactggcagaaggccgagagaggcgacatcctgctgagcagcctgatcagaaagaagctgctgcccgaggccagcctgctgatcaccaccagacccgtggccctggagaagctgcagcacctgctggaccaccccagacacgtggagatcctgggcttcagcgaggccaagagaaaggagtacttcttcaagtacttcagcgacgaggcccaggccagagccgccttcagcctgatccaggagaacgaggtgctgttcaccatgtgcttcatccccctggtgtgctggatcgtgtgcaccggcctgaagcagcagatggagagcggcaagagcctggcccagaccagcaagaccaccaccgccgtgtacgtgttcttcctgagcagcctgctgcagcccagaggcggcagccaggagcacggcctgtgcgcccacctgtggggcctgtgcagcctggccgccgacggcatctggaaccagaagatcctgttcgaggagagcgacctgagaaaccacggcctgcagaaggccgacgtgagcgccttcctgagaatgaacctgttccagaaggaggtggactgcgagaagttctacagcttcatccacatgaccttccaggagttcttcgccgccatgtactacctgctggaggaggagaaggagggcagaaccaacgtgcccggcagcagactgaagctgcccagcagagacgtgaccgtgctgctggagaactacggcaagttcgagaagggctacctgatcttcgtggtgagattcctgttcggcctggtgaaccaggagagaaccagctacctggagaagaagctgagctgcaagatcagccagcagatcagactggagctgctgaagtggatcgaggtgaaggccaaggccaagaagctgcagatccagcccagccagctggagctgttctactgcctgtacgagatgcaggaggaggacttcgtgcagagagccatggactacttccccaagatcgagatcaacctgagcaccagaatggaccacatggtgagcagcttctgcatcgagaactgccacagagtggagagcctgagcctgggcttcctgcacaacatgcccaaggaggaggaggaggaggagaaggagggcagacacctggacatggtgcagtgcgtgctgcccagcagcagccacgccgcctgcagccacggcctggtgaacagccacctgaccagcagcttctgcagaggcctgttcagcgtgctgagcaccagccagagcctgaccgagctggacctgagcgacaacagcctgggcgaccccggcatgagagtgctgtgcgagaccctgcagcaccccggctgcaacatcagaagactgtggctgggcagatgcggcctgagccacgagtgctgcttcgacatcagcctggtgctgagcagcaaccagaagctggtggagctggacctgagcgacaacgccctgggcgacttcggcatcagactgctgtgcgtgggcctgaagcacctgctgtgcaacctgaagaagctgtggctggtgagctgctgcctgaccagcgcctgctgccaggacctggccagcgtgctgagcaccagccacagcctgaccagactgtacgtgggcgagaacgccctgggcgacagcggcgtggccatcctgtgcgagaaggccaagaacccccagtgcaacctgcagaagctgggcctggtgaacagcggcctgaccagcgtgtgctgcagcgccctgagcagcgtgctgagcaccaaccagaacctgacccacctgtacctgagaggcaacaccctgggcgacaagggcatcaagctgctgtgcgagggcctgctgcaccccgactgcaagctgcaggtgctggagctggacaactgcaacctgaccagccactgctgctgggacctgagcaccctgctgaccagcagccagagcctgagaaagctgagcctgggcaacaacgacctgggcgacctgggcgtgatgatgttctgcgaggtgctgaagcagcagagctgcctgctgcagaacctgggcctgagcgagatgtacttcaactacgagaccaagagcgccctggagaccctgcaggaggagaagcccgagctgaccgtggtgttcgagcccagctggtag

SEQ ID NO: 91222 - DNA, 2769 bp, synthetic construct
  misc_feature 1..2769: note = Description of Artificial Sequence: Synthetic coding sequence
  source 1..2769: mol_type = other DNA
atgaagatggccagcaccagatgcaagctggccagatacctggaggacctggaggacgtggacctgaagaagttcaagatgcacctggaggactaccccccccagaagggctgcatccccctgcccagaggccagaccgagaaggccgaccacgtggacctggccaccctgatgatcgacttcaacggcgaggagaaggcctgggccatggccgtgtggatcttcgccgccatcaacagaagagacctgtacgagaaggccaagagagacgagcccaagtggggcagcgacaacgccagagtgagcaaccccaccgtgatctgccaggaggacagcatcgaggaggagtggatgggcctgctggagtacctgagcagaatcagcatctgcaagatgaagaaggactacagaaagaagtacagaaagtacgtgagaagcagattccagtgcatcgaggacagaaacgccagactgggcgagagcgtgagcctgaacaagagatacaccagactgagactgatcaaggagcacagaagccagcaggagagagagcaggagctgctggccatcggcaagaccaagacctgcgagagccccgtgagccccatcaagatggagctgctgttcgaccccgacgacgagcacagcgagcccgtgcacaccgtggtgttccagggcgccgccggcatcggcaagaccatcctggccagaaagatgatgctggactgggccagcggcaccctgtaccaggacagattcgactacctgttctacatccactgcagagaggtgagcctggtgacccagagaagcctgggcgacctgatcatgagctgctgccccgaccccaacccccccatccacaagatcgtgagaaagcccagcagaatcctgttcctgatggacggcttcgacgagctgcagggcgccttcgacgagcacatcggccccctgtgcaccgactggcagaaggccgagagaggcgacatcctgctgagcagcctgatcagaaagaagctgctgcccgaggccagcctgctgatcaccaccagacccgtggccctggagaagctgcagcacctgctggaccaccccagacacgtggagatcctgggcttcagcgaggccaagagaaaggagtacttcttcaagtacttcagcgacgaggcccaggccagagccgccttcagcctgatccaggagaacgaggtgctgttcaccatgtgcttcatccccctggtgtgctggatcgtgtgcaccggcctgaagcagcagatggagagcggcaagagcctggcccagaccagcaagaccaccaccgccgtgtacgtgttcttcctgagcagcctgctgcagcccagaggcggcagccaggagcacggcctgtgcgcccacctgtggggcctgtgcagcctggccgccgacggcatctggaaccagaagatcctgttcgaggagagcgacctgagaaaccacggcctgcagaaggccgacgtgagcgccttcctgagaatgaacctgttccagaaggaggtggactgcgagaagttctacagcttcatccacatgaccttccaggagttcttcgccgccatgtactacctgctggaggaggagaaggagggcagaaccaacgtgcccggcagcagactgaagctgcccagcagagacgtgaccgtgctgctggagaactacggcaagttcgagaagggctacctgatcttcgtggtgagattcctgttcggcctggtgaaccaggagagaaccagctacctggagaagaagctgagctgcaagatcagccagcagatcagactggagctgctgaagtggatcgaggtgaaggccaaggccaagaagctgcagatccagcccagccagctggagctgttctactgcctgtacgagatgcaggaggaggacttcgtgcagagagccatggactacttccccaagatcgagatcaacctgagcaccagaatggaccacatggtgagcagcttctgcatcgagaactgccacagagtggagagcctgagcctgggcttcctgcacaacatgcccaaggaggaggaggaggaggagaaggagggcagacacctggacatggtgcagtgcgtgctgcccagcagcagccacgccgcctgcagccacggcctgggcagatgcggcctgagccacgagtgctgcttcgacatcagcctggtgctgagcagcaaccagaagctggtggagctggacctgagcgacaacgccctgggcgacttcggcatcagactgctgtgcgtgggcctgaagcacctgctgtgcaacctgaagaagctgtggctggtgaacagcggcctgaccagcgtgtgctgcagcgccctgagcagcgtgctgagcaccaaccagaacctgacccacctgtacctgagaggcaacaccctgggcgacaagggcatcaagctgctgtgcgagggcctgctgcaccccgactgcaagctgcaggtgctggagctggacaactgcaacctgaccagccactgctgctgggacctgagcaccctgctgaccagcagccagagcctgagaaagctgagcctgggcaacaacgacctgggcgacctgggcgtgatgatgttctgcgaggtgctgaagcagcagagctgcctgctgcagaacctgggcctgagcgagatgtacttcaactacgagaccaagagcgccctggagaccctgcaggaggagaagcccgagctgaccgtggtgttcgagcccagctggtag

SEQ ID NO: 91223 - DNA, 2940 bp, synthetic construct
  misc_feature 1..2940: note = Description of Artificial Sequence: Synthetic coding sequence
  source 1..2940: mol_type = other DNA
atgaagatggccagcaccagatgcaagctggccagatacctggaggacctggaggacgtggacctgaagaagttcaagatgcacctggaggactaccccccccagaagggctgcatccccctgcccagaggccagaccgagaaggccgaccacgtggacctggccaccctgatgatcgacttcaacggcgaggagaaggcctgggccatggccgtgtggatcttcgccgccatcaacagaagagacctgtacgagaaggccaagagagacgagcccaagtggggcagcgacaacgccagagtgagcaaccccaccgtgatctgccaggaggacagcatcgaggaggagtggatgggcctgctggagtacctgagcagaatcagcatctgcaagatgaagaaggactacagaaagaagtacagaaagtacgtgagaagcagattccagtgcatcgaggacagaaacgccagactgggcgagagcgtgagcctgaacaagagatacaccagactgagactgatcaaggagcacagaagccagcaggagagagagcaggagctgctggccatcggcaagaccaagacctgcgagagccccgtgagccccatcaagatggagctgctgttcgaccccgacgacgagcacagcgagcccgtgcacaccgtggtgttccagggcgccgccggcatcggcaagaccatcctggccagaaagatgatgctggactgggccagcggcaccctgtaccaggacagattcgactacctgttctacatccactgcagagaggtgagcctggtgacccagagaagcctgggcgacctgatcatgagctgctgccccgaccccaacccccccatccacaagatcgtgagaaagcccagcagaatcctgttcctgatggacggcttcgacgagctgcagggcgccttcgacgagcacatcggccccctgtgcaccgactggcagaaggccgagagaggcgacatcctgctgagcagcctgatcagaaagaagctgctgcccgaggccagcctgctgatcaccaccagacccgtggccctggagaagctgcagcacctgctggaccaccccagacacgtggagatcctgggcttcagcgaggccaagagaaaggagtacttcttcaagtacttcagcgacgaggcccaggccagagccgccttcagcctgatccaggagaacgaggtgctgttcaccatgtgcttcatccccctggtgtgctggatcgtgtgcaccggcctgaagcagcagatggagagcggcaagagcctggcccagaccagcaagaccaccaccgccgtgtacgtgttcttcctgagcagcctgctgcagcccagaggcggcagccaggagcacggcctgtgcgcccacctgtggggcctgtgcagcctggccgccgacggcatctggaaccagaagatcctgttcgaggagagcgacctgagaaaccacggcctgcagaaggccgacgtgagcgccttcctgagaatgaacctgttccagaaggaggtggactgcgagaagttctacagcttcatccacatgaccttccaggagttcttcgccgccatgtactacctgctggaggaggagaaggagggcagaaccaacgtgcccggcagcagactgaagctgcccagcagagacgtgaccgtgctgctggagaactacggcaagttcgagaagggctacctgatcttcgtggtgagattcctgttcggcctggtgaaccaggagagaaccagctacctggagaagaagctgagctgcaagatcagccagcagatcagactggagctgctgaagtggatcgaggtgaaggccaaggccaagaagctgcagatccagcccagccagctggagctgttctactgcctgtacgagatgcaggaggaggacttcgtgcagagagccatggactacttccccaagatcgagatcaacctgagcaccagaatggaccacatggtgagcagcttctgcatcgagaactgccacagagtggagagcctgagcctgggcttcctgcacaacatgcccaaggaggaggaggaggaggagaaggagggcagacacctggacatggtgcagtgcgtgctgcccagcagcagccacgccgcctgcagccacggcctggtgaacagccacctgaccagcagcttctgcagaggcctgttcagcgtgctgagcaccagccagagcctgaccgagctggacctgagcgacaacagcctgggcgaccccggcatgagagtgctgtgcgagaccctgcagcaccccggctgcaacatcagaagactgtggctgggcagatgcggcctgagccacgagtgctgcttcgacatcagcctggtgctgagcagcaaccagaagctggtggagctggacctgagcgacaacgccctgggcgacttcggcatcagactgctgtgcgtgggcctgaagcacctgctgtgcaacctgaagaagctgtggctggtgaacagcggcctgaccagcgtgtgctgcagcgccctgagcagcgtgctgagcaccaaccagaacctgacccacctgtacctgagaggcaacaccctgggcgacaagggcatcaagctgctgtgcgagggcctgctgcaccccgactgcaagctgcaggtgctggagctggacaactgcaacctgaccagccactgctgctgggacctgagcaccctgctgaccagcagccagagcctgagaaagctgagcctgggcaacaacgacctgggcgacctgggcgtgatgatgttctgcgaggtgctgaagcagcagagctgcctgctgcagaacctgggcctgagcgagatgtacttcaactacgagaccaagagcgccctggagaccctgcaggaggagaagcccgagctgaccgtggtgttcgagcccagctggtag

SEQ ID NO: 91224 - DNA, 2940 bp, synthetic construct; identical to SEQ ID NO: 91223
  misc_feature 1..2940: note = Description of Artificial Sequence: Synthetic coding sequence
  source 1..2940: mol_type = other DNA

SEQ ID NO: 91225 - DNA, 2940 bp, synthetic construct
  misc_feature 1..2940: note = Description of Artificial Sequence: Synthetic coding sequence
  source 1..2940: mol_type = other DNA
atgaagatggccagcaccagatgcaagctggccagatacctggaggacctggaggacgtggacctgaagaagttcaagatgcacctggaggactaccccccccagaagggctgcatccccctgcccagaggccagaccgagaaggccgaccacgtggacctggccaccctgatgatcgacttcaacggcgaggagaaggcctgggccatggccgtgtggatcttcgccgccatcaacagaagagacctgtacgagaaggccaagagagacgagcccaagtggggcagcgacaacgccagagtgagcaaccccaccgtgatctgccaggaggacagcatcgaggaggagtggatgggcctgctggagtacctgagcagaatcagcatctgcaagatgaagaaggactacagaaagaagtacagaaagtacgtgagaagcagattccagtgcatcgaggacagaaacgccagactgggcgagagcgtgagcctgaacaagagatacaccagactgagactgatcaaggagcacagaagccagcaggagagagagcaggagctgctggccatcggcaagaccaagacctgcgagagccccgtgagccccatcaagatggagctgctgttcgaccccgacgacgagcacagcgagcccgtgcacaccgtggtgttccagggcgccgccggcatcggcaagaccatcctggccagaaagatgatgctggactgggccagcggcaccctgtaccaggacagattcgactacctgttctacatccactgcagagaggtgagcctggtgacccagagaagcctgggcgacctgatcatgagctgctgccccgaccccaacccccccatccacaagatcgtgagaaagcccagcagaatcctgttcctgatggacggcttcgacgagctgcagggcgccttcgacgagcacatcggccccctgtgcaccgactggcagaaggccgagagaggcgacatcctgctgagcagcctgatcagaaagaagctgctgcccgaggccagcctgctgatcaccaccagacccgtggccctggagaagctgcagcacctgctggaccaccccagacacgtggagatcctgggcttcagcgaggccaagagaaaggagtacttcttcaagtacttcagcgacgaggcccaggccagagccgccttcagcctgatccaggagaacgaggtgctgttcaccatgtgcttcatccccctggtgtgctggatcgtgtgcaccggcctgaagcagcagatggagagcggcaagagcctggcccagaccagcaagaccaccaccgccgtgtacgtgttcttcctgagcagcctgctgcagcccagaggcggcagccaggagcacggcctgtgcgcccacctgtggggcctgtgcagcctggccgccgacggcatctggaaccagaagatcctgttcgaggagagcgacctgagaaaccacggcctgcagaaggccgacgtgagcgccttcctgagaatgaacctgttccagaaggaggtggactgcgagaagttctacagcttcatccacatgaccttccaggagttcttcgccgccatgtactacctgctggaggaggagaaggagggcagaaccaacgtgcccggcagcagactgaagctgcccagcagagacgtgaccgtgctgctggagaactacggcaagttcgagaagggctacctgatcttcgtggtgagattcctgttcggcctggtgaaccaggagagaaccagctacctggagaagaagctgagctgcaagatcagccagcagatcagactggagctgctgaagtggatcgaggtgaaggccaaggccaagaagctgcagatccagcccagccagctggagctgttctactgcctgtacgagatgcaggaggaggacttcgtgcagagagccatggactacttccccaagatcgagatcaacctgagcaccagaatggaccacatggtgagcagcttctgcatcgagaactgccacagagtggagagcctgagcctgggcttcctgcacaacatgcccaaggaggaggaggaggaggagaaggagggcagacacctggacatggtgcagtgcgtgctgcccagcagcagccacgccgcctgcagccacggcctgggcagatgcggcctgagccacgagtgctgcttcgacatcagcctggtgctgagcagcaaccagaagctggtggagctggacctgagcgacaacgccctgggcgacttcggcatcagactgctgtgcgtgggcctgaagcacctgctgtgcaacctgaagaagctgtggctggtgagctgctgcctgaccagcgcctgctgccaggacctggccagcgtgctgagcaccagccacagcctgaccagactgtacgtgggcgagaacgccctgggcgacagcggcgtggccatcctgtgcgagaaggccaagaacccccagtgcaacctgcagaagctgggcctggtgaacagcggcctgaccagcgtgtgctgcagcgccctgagcagcgtgctgagcaccaaccagaacctgacccacctgtacctgagaggcaacaccctgggcgacaagggcatcaagctgctgtgcgagggcctgctgcaccccgactgcaagctgcaggtgctggagctggacaactgcaacctgaccagccactgctgctgggacctgagcaccctgctgaccagcagccagagcctgagaaagctgagcctgggcaacaacgacctgggcgacctgggcgtgatgatgttctgcgaggtgctgaagcagcagagctgcctgctgcagaacctgggcctgagcgagatgtacttcaactacgagaccaagagcgccctggagaccctgcaggaggagaagcccgagctgaccgtggtgttcgagcccagctggtag

SEQ ID NO: 91226 - DNA, 3111 bp, synthetic construct; identical to SEQ ID NO: 91221
  misc_feature 1..3111: note = Description of Artificial Sequence: Synthetic coding sequence
  source 1..3111: mol_type = other DNA

SEQ ID NO: 91227 - DNA, 1512 bp, synthetic construct
  misc_feature 1..1512: note = Description of Artificial Sequence: Synthetic coding sequence
  source 1..1512: mol_type = other DNA
atggagtacatggccgagagcaccgacagaagccccggccacatcctgtgctgcgagtgcggcgtgcccatcagccccaaccccgccaacatctgcgtggcctgcctgagaagcaaggtggacatcagccagggcatccccaagcaggtgagcatcagcttctgcaagcagtgccagagatacttccagccccccggcacctggatccagtgcgccctggagagcagagagctgctggccctgtgcctgaagaagatcaaggcccccctgagcaaggtgagactggtggacgccggcttcgtgtggaccgagccccacagcaagagactgaaggtgaagctgaccatccagaaggaggtgatgaacggcgccatcctgcagcaggtgttcgtggtggactacgtggtgcagagccagatgtgcggcgactgccacagagtggaggccaaggacttctggaaggccgtgatccaggtgagacagaagaccctgcacaagaagaccttctactacctggagcagctgatcctgaagtacggcatgcaccagaacaccctgagaatcaaggagatccacgacggcctggacttctactacagcagcaagcagcacgcccagaagatggtggagttcctgcagtgcaccgtgccctgcagatacaaggccagccagagactgatcagccaggacatccacagcaacacctacaactacaagagcaccttcagcgtggagatcgtgcccatctgcaaggacaacgtggtgtgcctgagccccaagctggcccagagcctgggcaacatgaaccagatctgcgtgtgcatcagagtgaccagcgccatccacctgatcgaccccaacaccctgcaggtggccgacatcgacggcagcaccttctggagccaccccttcaacagcctgtgccaccccaagcagctggaggagttcatcgtgatggagtgcagcatcgtgcaggacatcaagagagccgccggcgccggcatgatcagcaagaagcacaccctgggcgaggtgtgggtgcagaagaccagcgagatgaacaccgacaagcagtacttctgcagaacccacctgggccacctgctgaaccccggcgacctggtgctgggcttcgacctggccaactgcaacctgaacgacgagcacgtgaacaagatgaacagcgacagagtgcccgacgtggtgctgatcaagaagagctacgacagaaccaagagacagagaagaagaaactggaagctgaaggagctggccagagagagagagaacatggacaccgacgacgagagacagtaccaggacttcctggaggacctggaggaggacgaggccatcagaaagaacgtgaacatctacagagacagcgccatccccgtggagagcgacaccgacgacgagggcgcccccagaatcagcctggccgagatgctggaggacctgcacatcagccaggacgccaccggcgaggagggcgccagcatgctgacctag

SEQ ID NO: 91228 - DNA, 1512 bp, synthetic construct; identical to SEQ ID NO: 91227
  misc_feature 1..1512: note = Description of Artificial Sequence: Synthetic coding sequence
  source 1..1512: mol_type = other DNA

SEQ ID NO: 91229 - DNA, 471 bp, synthetic construct
  misc_feature 1..471: note = Description of Artificial Sequence: Synthetic coding sequence
  source 1..471: mol_type = other DNA
atggagtacatggccgagagcaccgacagaagccccggccacatcctgtgctgcgagtgcggcgtgcccatcagccccaaccccgccaacatctgcgtggcctgcctgagaagcaaggtggacatcagccagggcatccccaagcaggtgagcatcagcttctgcaagcagtgccagagatacttccagccccccggcacctggatccagtgcgccctggagagcagagagctgctggccctgtgcctgaagaagatcaaggcccccctgagcaaggtgagactggtggacgccggcttcgtgtggaccgagccccacagcaagagactgaaggtgaagctgaccatccagaaggaggtgatgaacggcgccatcctgcagcaggtgttcgtggtggactacgtggtgcagagccagatgtgcggcgactgccacagagtggaggccaaggacttctggaaggccgtgtag

SEQ ID NO: 91230 - DNA, 657 bp, synthetic construct
  misc_feature 1..657: note = Description of Artificial Sequence: Synthetic coding sequence
  source 1..657: mol_type = other DNA
atggagtacatggccgagagcaccgacagaagccccggccacatcctgtgctgcgagtgcggcgtgcccatcagccccaaccccgccaacatctgcgtggcctgcctgagaagcaaggtggacatcagccagggcatccccaagcaggtgagcatcagcttctgcaagcagtgccagagatacttccagccccccggcacctggatccagtgcgccctggagagcagagagctgctggccctgtgcctgaagaagatcaaggcccccctgagcaaggtgagactggtggacgccggcttcgtgtggaccgagccccacagcaagagactgaaggtgaagctgaccatccagaaggaggtgatgaacggcgccatcctgcagcaggtgttcgtggtggactacgtggtgcagagccagatgtgcggcgactgccacagagtggaggccaaggacttctggaaggccgtgatccaggtgagacagaagaccctgcacaagaagaccttctactacctggagcagctgatcctgaagtacggcatgcaccagaacaccctgagaatcaaggagatccacgacggcctggacttctactacagcagcaagcagcacgcccagaagatggtggagttcctgcagtgcaccgtgccctgctag

SEQ ID NO: 91231 - DNA, 297 bp, synthetic construct
  misc_feature 1..297: note = Description of Artificial Sequence: Synthetic coding sequence
  source 1..297: mol_type = other DNA
atggagtacatggccgagagcaccgacagaagccccggccacatcctgtgctgcgagtgcggcgtgcccatcagccccaaccccgccaacatctgcgtggcctgcctgagaagcaaggtggacatcagccagggcatccccaagcaggtgagcatcagcttctgcaagcagtgccagagatacttccagccccccggcacctggatccagtgcgccctggagagcagagagctgctggccctgtgcctgaagaagatcaaggcccccctgagcaaggtgagactggtggacgcctag

SEQ ID NO: 91232 - DNA, 489 bp, synthetic construct
  misc_feature 1..489: note = Description of Artificial Sequence: Synthetic coding sequence
  source 1..489: mol_type = other DNA
atggagtacatggccgagagcaccgacagaagccccggccacatcctgtgctgcgagtgcggcgtgcccatcagccccaaccccgccaacatctgcgtggcctgcctgagaagcaaggtggacatcagccagggcatccccaagcaggtgagcatcagcttctgcaagcagtgccagagatacttccagccccccggcacctggatccagtgcgccctggagagcagagagctgctggccctgtgcctgaagaagatcaaggcccccctgagcaaggtgagactggtggacgccggcttcgtgtggaccgagccccacagcaagagactgaaggtgaagctgaccatccagaaggaggtgatgaacggcgccatcctgcagcaggtgttcgtggtggactacgtggtgcagagccagatgtgcggcgactgccacagagtggaggccaaggacttctggaaggccgtgatccaggtgagacagaagtag

SEQ ID NO: 91233 - DNA, 657 bp, synthetic construct; identical to SEQ ID NO: 91230
  misc_feature 1..657: note = Description of Artificial Sequence: Synthetic coding sequence
  source 1..657: mol_type = other DNA

SEQ ID NO: 91234 - DNA, 1152 bp, synthetic construct
  misc_feature 1..1152: note = Description of Artificial Sequence: Synthetic coding sequence
  source 1..1152: mol_type = other DNA
atgaacggcgccatcctgcagcaggtgttcgtggtggactacgtggtgcagagccagatgtgcggcgactgccacagagtggaggccaaggacttctggaaggccgtgatccaggtgagacagaagaccctgcacaagaagaccttctactacctggagcagctgatcctgaagtacggcatgcaccagaacaccctgagaatcaaggagatccacgacggcctggacttctactacagcagcaagcagcacgcccagaagatggtggagttcctgcagtgcaccgtgccctgcagatacaaggccagccagagactgatcagccaggacatccacagcaacacctacaactacaagagcaccttcagcgtggagatcgtgcccatctgcaaggacaacgtggtgtgcctgagccccaagctggcccagagcctgggcaacatgaaccagatctgcgtgtgcatcagagtgaccagcgccatccacctgatcgaccccaacaccctgcaggtggccgacatcgacggcagcaccttctggagccaccccttcaacagcctgtgccaccccaagcagctggaggagttcatcgtgatggagtgcagcatcgtgcaggacatcaagagagccgccggcgccggcatgatcagcaagaagcacaccctgggcgaggtgtgggtgcagaagaccagcgagatgaacaccgacaagcagtacttctgcagaacccacctgggccacctgctgaaccccggcgacctggtgctgggcttcgacctggccaactgcaacctgaacgacgagcacgtgaacaagatgaacagcgacagagtgcccgacgtggtgctgatcaagaagagctacgacagaaccaagagacagagaagaagaaactggaagctgaaggagctggccagagagagagagaacatggacaccgacgacgagagacagtaccaggacttcctggaggacctggaggaggacgaggccatcagaaagaacgtgaacatctacagagacagcgccatccccgtggagagcgacaccgacgacgagggcgcccccagaatcagcctggccgagatgctggaggacctgcacatcagccaggacgccaccggcgaggagggcgccagcatgctgacctag

SEQ ID NO: 91235 - DNA, 2949 bp, synthetic construct
  misc_feature 1..2949: note = Description of Artificial Sequence: Synthetic coding sequence
  source 1..2949: mol_type = other DNA
atgagcagcaagatggtgatcagcgagcccggcctgaactgggacatcagccccaagaacggcctgaagaccttcttcagcagagagaactacaaggaccacagcatggcccccagcctgaaggagctgagagtgctgagcaacagaagaatcggcgagaacctgaacgccagcgccagcagcgtggagaacgagcccgccgtgagcagcgccacccaggccaaggagaaggtgaagaccaccatcggcatggtgctgctgcccaagcccagagtgccctaccccagattcagcagattcagccagagagagcagagaagctacgtggacctgctggtgaagtacgccaagatccccgccaacagcaaggccgtgggcatcaacaagaacgactacctgcagtacctggacatgaagaagcacgtgaacgaggaggtgaccgagttcctgaagttcctgcagaacagcgccaagaagtgcgcccaggactacaacatgctgagcgacgacgccagactgttcaccgagaagatcctgagagcctgcatcgagcaggtgaagaagtacagcgagttctacaccctgcacgaggtgaccagcctgatgggcttcttccccttcagagtggagatgggcctgaagctggagaagaccctgctggccctgggcagcgtgaagtacgtgaagaccgtgttccccagcatgcccatcaagctgcagctgagcaaggacgacatcgccaccatcgagaccagcgagcagaccgccgaggccatgcactacgacatcagcaaggaccccaacgccgagaagctggtgagcagataccacccccagatcgccctgaccagccagagcctgttcaccctgctgaacaaccacggccccacctacaaggagcagtgggagatccccgtgtgcatccaggtgatccccgtggccggcagcaagcccgtgaaggtgatctacatcaacagccccctgccccagaagaagatgaccatgagagagagaaaccagatcttccacgaggtgcccctgaagttcatgatgagcaagaacaccagcgtgcccgtgagcgccgtgttcatggacaagcccgaggagttcatcagcgagatggacatgagctgcgaggtgaacgagtgcagaaagatcgagagcctggagaacctgtacctggacttcgacgacgacgtgaccgagctggagaccttcggcgtgaccaccaccaaggtgagcaagagccccagccccgccagcaccagcaccgtgcccaacatgaccgacgcccccaccgcccccaaggccggcaccaccaccgtggcccccagcgcccccgacatcagcgccaacagcagaagcctgagccagatcctgatggagcagctgcagaaggagaagcagctggtgaccggcatggacggcggccccgaggagtgcaagaacaaggacgaccagggcttcgagagctgcgagaaggtgagcaacagcgacaagcccctgatccaggacagcgacctgaagaccagcgacgccctgcagctggagaacagccaggagatcgagaccagcaacaagaacgacatgaccatcgacatcctgcacgccgacggcgagagacccaacgtgctggagaacctggacaacagcaaggagaagaccgtgggcagcgaggccgccaagaccgaggacaccgtgctgtgcagcagcgacaccgacgaggagtgcctgatcatcgacaccgagtgcaagaacaacagcgacggcaagaccgccgtggtgggcagcaacctgagcagcagacccgccagccccaacagcagcagcggccaggccagcgtgggcaaccagaccaacaccgcctgcagccccgaggagagctgcgtgctgaagaagcccatcaagagagtgtacaagaagttcgaccccgtgggcgagatcctgaagatgcaggacgagctgctgaagcccatcagcagaaaggtgcccgagctgcccctgatgaacctggagaacagcaagcagcccagcgtgagcgagcagctgagcggccccagcgacagcagcagctggcccaagagcggctggcccagcgccttccagaagcccaagggcagactgccctacgagctgcaggactacgtggaggacaccagcgagtacctggccccccaggagggcaacttcgtgtacaagctgttcagcctgcaggacctgctgctgctggtgagatgcagcgtgcagagaatcgagaccagacccagaagcaagaagagaaagaagatcagaagacagttccccgtgtacgtgctgcccaaggtggagtaccaggcctgctacggcgtggaggccctgaccgagagcgagctgtgcagactgtggaccgagagcctgctgcacagcaacagcagcttctacgtgggccacatcgacgccttcaccagcaagctgttcctgctggaggagatcaccagcgaggagctgaaggagaagctgagcgccctgaagatcagcaacctgttcaacatcctgcagcacatcctgaagaagctgagcagcctgcaggagggcagctacctgctgagccacgccgccgaggacagcagcctgctgatctacaaggccagcgacggcaaggtgaccagaaccgcctacaacctgtacaagacccactgcggcctgcccggcgtgcccagcagcctgagcgtgccctgggtgcccctggaccccagcctgctgctgccctaccacatccaccacggcagaatcccctgcaccttcccccccaagagcctggacaccaccacccagcagaagatcggcggcaccagaatgcccaccagaagccacagaaaccccgtgagcatggagaccaagagcagctgcctgcccgcccagcaggtggagaccgagggcgtggccccccacaagagaaagatcacctag

SEQ ID NO: 91236 - DNA, 2538 bp, synthetic construct
  misc_feature 1..2538: note = Description of Artificial Sequence: Synthetic coding sequence
  source 1..2538: mol_type = other DNA
atgaagaagcacgtgaacgaggaggtgaccgagttcctgaagttcctgcagaacagcgccaagaagtgcgcccaggactacaacatgctgagcgacgacgccagactgttcaccgagaagatcctgagagcctgcatcgagcaggtgaagaagtacagcgagttctacaccctgcacgaggtgaccagcctgatgggcttcttccccttcagagtggagatgggcctgaagctggagaagaccctgctggccctgggcagcgtgaagtacgtgaagaccgtgttccccagcatgcccatcaagctgcagctgagcaaggacgacatcgccaccatcgagaccagcgagcagaccgccgaggccatgcactacgacatcagcaaggaccccaacgccgagaagctggtgagcagataccacccccagatcgccctgaccagccagagcctgttcaccctgctgaacaaccacggccccacctacaaggagcagtgggagatccccgtgtgcatccaggtgatccccgtggccggcagcaagcccgtgaaggtgatctacatcaacagccccctgccccagaagaagatgaccatgagagagagaaaccagatcttccacgaggtgcccctgaagttcatgatgagcaagaacaccagcgtgcccgtgagcgccgtgttcatggacaagcccgaggagttcatcagcgagatggacatgagctgcgaggtgaacgagtgcagaaagatcgagagcctggagaacctgtacctggacttcgacgacgacgtgaccgagctggagaccttcggcgtgaccaccaccaaggtgagcaagagccccagccccgccagcaccagcaccgtgcccaacatgaccgacgcccccaccgcccccaaggccggcaccaccaccgtggcccccagcgcccccgacatcagcgccaacagcagaagcctgagccagatcctgatggagcagctgcagaaggagaagcagctggtgaccggcatggacggcggccccgaggagtgcaagaacaaggacgaccagggcttcgagagctgcgagaaggtgagcaacagcgacaagcccctgatccaggacagcgacctgaagaccagcgacgccctgcagctggagaacagccaggagatcgagaccagcaacaagaacgacatgaccatcgacatcctgcacgccgacggcgagagacccaacgtgctggagaacctggacaacagcaaggagaagaccgtgggcagcgaggccgccaagaccgaggacaccgtgctgtgcagcagcgacaccgacgaggagtgcctgatcatcgacaccgagtgcaagaacaacagcgacggcaagaccgccgtggtgggcagcaacctgagcagcagacccgccagccccaacagcagcagcggccaggccagcgtgggcaaccagaccaacaccgcctgcagccccgaggagagctgcgtgctgaagaagcccatcaagagagtgtacaagaagttcgaccccgtgggcgagatcctgaagatgcaggacgagctgctgaagcccatcagcagaaaggtgcccgagctgcccctgatgaacctggagaacagcaagcagcccagcgtgagcgagcagctgagcggccccagcgacagcagcagctggcccaagagcggctggcccagcgccttccagaagcccaagggcagactgccctacgagctgcaggactacgtggaggacaccagcgagtacctggccccccaggagggcaacttcgtgtacaagctgttcagcctgcaggacctgctgctgctggtgagatgcagcgtgcagagaatcgagaccagacccagaagcaagaagagaaagaagatcagaagacagttccccgtgtacgtgctgcccaaggtggagtaccaggcctgctacggcgtggaggccctgaccgagagcgagctgtgcagactgtggaccgagagcctgctgcacagcaacagcagcttctacgtgggccacatcgacgccttcaccagcaagctgttcctgctggaggagatcaccagcgaggagctgaaggagaagctgagcgccctgaagatcagcaacctgttcaacatcctgcagcacatcctgaagaagctgagcagcctgcaggagggcagctacctgctgagccacgccgccgaggacagcagcctgctgatctacaaggccagcgacggcaaggtgaccagaaccgcctacaacctgtacaagacccactgcggcctgcccggcgtgcccagcagcctgagcgtgccctgggtgcccctggaccccagcctgctgctgccctaccacatccaccacggcagaatcccctgcaccttcccccccaagagcctggacaccaccacccagcagaagatcggcggcaccagaatgcccaccagaagccacagaaaccccgtgagcatggagaccaagagcagctgcctgcccgcccagcaggtggagaccgagggcgtggccccccacaagagaaagatcacctag

SEQ ID NO: 91237 - DNA, 1017 bp, synthetic construct
  misc_feature 1..1017: note = Description of Artificial Sequence: Synthetic coding sequence
  source 1..1017: mol_type = other DNA
atgagcagcaagatggtgatcagcgagcccggcctgaactgggacatcagccccaagaacggcctgaagaccttcttcagcagagagaactacaaggaccacagcatggcccccagcctgaaggagctgagagtgctgagcaacagaagaatcggcgagaacctgaacgccagcgccagcagcgtggagaacgagcccgccgtgagcagcgccacccaggccaaggagaaggtgaagaccaccatcggcatggtgctgctgcccaagcccagagtgccctaccccagattcagcagattcagccagagagagcagagaagctacgtggacctgctggtgaagtacgccaagatccccgccaacagcaaggccgtgggcatcaacaagaacgactacctgcagtacctggacatgaagaagcacgtgaacgaggaggtgaccgagttcctgaagttcctgcagaacagcgccaagaagtgcgcccaggactacaacatgctgagcgacgacgccagactgttcaccgagaagatcctgagagcctgcatcgagcaggtgaagaagtacagcgagttctacaccctgcacgaggtgaccagcctgatgggcttcttccccttcagagtggagatgggcctgaagctggagaagaccctgctggccctgggcagcgtgaagtacgtgaagaccgtgttccccagcatgcccatcaagctgcagctgagcaaggacgacatcgccaccatcgagaccagcgagcagaccgccgaggccatgcactacgacatcagcaaggaccccaacgccgagaagctggtgagcagataccacccccagatcgccctgaccagccagagcctgttcaccctgctgaacaaccacggccccacctacaaggagcagtgggagatccccgtgtgcatccaggtgatccccgtggccggcagcaagcccgtgaaggtgatctacatcaacagccccctgccccagaagaagatgaccatgagagagagatag

SEQ ID NO: 91238 - DNA, 438 bp, synthetic construct
  misc_feature 1..438: note = Description of Artificial Sequence: Synthetic coding sequence
  source 1..438: mol_type = other DNA
atgagcagcaagatggtgatcagcgagcccggcctgaactgggacatcagccccaagaacggcctgaagaccttcttcagcagagagaactacaaggaccacagcatggcccccagcctgaaggagctgagagtgctgagcaacagaagaatcggcgagaacctgaacgccagcgccagcagcgtggagaacgagcccgccgtgagcagcgccacccaggccaaggagaaggtgaagaccaccatcggcatggtgctgctgcccaagcccagagtgccctaccccagattcagcagattcagccagagagagcagagaagctacgtggacctgctggtgaagtacgccaagatccccgccaacagcaaggccgtgggcatcaacaagaacgactacctgcagtacctggacatgaagaagcacgtgaacgaggagtag

SEQ ID NO: 91239 - DNA, 300 bp, synthetic construct
  misc_feature 1..300: note = Description of Artificial Sequence: Synthetic coding sequence
  source 1..300: mol_type = other DNA
atgagcagcaagatggtgatcagcgagcccggcctgaactgggacatcagccccaagaacggcctgaagaccttcttcagcagagagaactacaaggaccacagcatggcccccagcctgaaggagctgagagtgctgagcaacagaagaatcggcgagaacctgaacgccagcgccagcagcgtggagaacgagcccgccgtgagcagcgccacccaggccaaggagaaggtgaagaccaccatcggcatggtgctgctgcccaagcccagagtgccctaccccagattcagcagatag

SEQ ID NO: 91240 - DNA, 285 bp, synthetic construct
  misc_feature 1..285: note = Description of Artificial Sequence: Synthetic coding sequence
  source 1..285: mol_type = other DNA
atgagcagcaagatggtgatcagcgagcccggcctgaactgggacatcagccccaagaacggcctgaagaccttcttcagcagagagaactacaaggaccacagcatggcccccagcctgaaggagctgagagtgctgagcaacagaagaatcggcgagaacctgaacgccagcgccagcagcgtggagaacgagcccgccgtgagcagcgccacccaggccaaggagaaggtgaagaccaccatcggcatggtgctgctgcccaagcccagagtgccctactag

SEQ ID NO: 91241 - DNA, 846 bp, synthetic construct
  misc_feature 1..846: note = Description of Artificial Sequence: Synthetic coding sequence
  source 1..846: mol_type = other DNA
atgggccagaagaagcagagacccgccagagccggccagccccacagcagcagcgacgccgcccaggcccccgccgagcagccccacagcagcagcgacgccgcccaggccccctgccccagagagagatgcctgggcccccccaccacccccggcccctacagaagcatctacttcagcagccccaagggccacctgaccagactgggcctggagttcttcgaccagcccgccgtgcccctggccagagccttcctgggccaggtgctggtgagaagactgcccaacggcaccgagctgagaggcagaatcgtggagaccgaggcctacctgggccccgaggacgaggccgcccacagcagaggcggcagacagacccccagaaacagaggcatgttcatgaagcccggcaccctgtacgtgtacatcatctacggcatgtacttctgcatgaacatcagcagccagggcgacggcgcctgcgtgctgctgagagccctggagcccctggagggcctggagaccatgagacagctgagaagcaccctgagaaagggcaccgccagcagagtgctgaaggacagagagctgtgcagcggccccagcaagctgtgccaggccctggccatcaacaagagcttcgaccagagagacctggcccaggacgaggccgtgtggctggagagaggccccctggagcccagcgagcccgccgtggtggccgccgccagagtgggcgtgggccacgccggcgagtgggccagaaagcccctgagattctacgtgagaggcagcccctgggtgagcgtggtggacagagtggccgagcaggacacccaggcctag

SEQ ID NO: 91242 - DNA, 924 bp, synthetic construct
  misc_feature 1..924: note = Description of Artificial Sequence: Synthetic coding sequence
  source 1..924: mol_type = other DNA
atggaggccgacaaggacgacacccagcagatcctgaaggagcacagccccgacgagttcatcaaggacgagcagaacaagggcctgatcgacgagatcaccaagaagaacatccagctgaagaaggagatccagaagctggagaccgagctgcaggaggccaccaaggagttccagatcaaggaggacatccccgagaccaagatgaagttcctgagcgtggagacccccgagaacgacagccagctgagcaacatcagctgcagcttccaggtgagcagcaaggtgccctacgagatccagaagggccaggccctgatcaccttcgagaaggaggaggtggcccagaacgtggtgagcatgagcaagcaccacgtgcagatcaaggacgtgaacctggaggtgaccgccaagcccgtgcccctgaacagcggcgtgagattccaggtgtacgtggaggtgagcaagatgaagatcaacgtgaccgagatccccgacaccctgagagaggaccagatgagagacaagctggagctgagcttcagcaagagcagaaacggcggcggcgaggtggacagagtggactacgacagacagagcggcagcgccgtgatcaccttcgtggagatcggcgtggccgacaagatcctgaagaagaaggagtaccccctgtacatcaaccagacctgccacagagtgaccgtgagcccctacaccgagatccacctgaagaagtaccagatcttcagcggcaccagcaagagaaccgtgctgctgaccggcatggagggcatccagatggacgaggagatcgtggaggacctgatcaacatccacttccagagagccaagaacggcggcggcgaggtggacgtggtgaagtgcagcctgggccagccccacatcgcctacttcgaggagtag

SEQ ID NO: 91243 - DNA, 90 bp, synthetic construct
  misc_feature 1..90: note = Description of Artificial Sequence: Synthetic coding sequence
  source 1..90: mol_type = other DNA
atggaggccgacaaggacgacacccagcagatcctgaaggagcacagccccgacgagttcatcaaggacgagcagaacaagggcctgtag

SEQ ID NO: 91244 - DNA, 1185 bp, synthetic construct
  misc_feature 1..1185: note = Description of Artificial Sequence: Synthetic coding sequence
  source 1..1185: mol_type = other DNA
atgagcagagagatgcaggacgtggacctggccgaggtgaagcccctggtggagaagggcgagaccatcaccggcctgctgcaggagttcgacgtgcaggagcaggacatcgagaccctgcacggcagcgtgcacgtgaccctgtgcggcacccccaagggcaacagacccgtgatcctgacctaccacgacatcggcatgaaccacaagacctgctacaaccccctgttcaactacgaggacatgcaggagatcacccagcacttcgccgtgtgccacgtggacgcccccggccagcaggacggcgccgccagcttccccgccggctacatgtaccccagcatggaccagctggccgagatgctgcccggcgtgctgcagcagttcggcctgaagagcatcatcggcatgggcaccggcgccggcgcctacatcctgaccagattcgccctgaacaaccccgagatggtggagggcctggtgctgatcaacgtgaacccctgcgccgagggctggatggactgggccgccagcaagatcagcggctggacccaggccctgcccgacatggtggtgagccacctgttcggcaaggaggagatgcagagcaacgtggaggtggtgcacacctacagacagcacatcgtgaacgacatgaaccccggcaacctgcacctgttcatcaacgcctacaacagcagaagagacctggagatcgagagacccatgcccggcacccacaccgtgaccctgcagtgccccgccctgctggtggtgggcgacagcagccccgccgtggacgccgtggtggagtgcaacagcaagctggaccccaccaagaccaccctgctgaagatggccgactgcggcggcctgccccagatcagccagcccgccaagctggccgaggccttcaagtacttcgtgcagggcatgggctacatgcccagcgccagcatgaccagactgatgagaagcagaaccgccagcggcagcagcgtgaccagcctggacggcaccagaagcagaagccacaccagcgagggcaccagaagcagaagccacaccagcgagggcaccagaagcagaagccacaccagcgagggcgcccacctggacatcacccccaacagcggcgccgccggcaacagcgccggccccaagagcatggaggtgagctgctag

SEQ ID NO: 91245 - DNA, 975 bp, synthetic construct
  misc_feature 1..975: note = Description of Artificial Sequence: Synthetic coding sequence
  source 1..975: mol_type = other DNA
atgagcagagagatgcaggacgtggacctggccgaggtgaagcccctggtggagaagggcgagaccatcaccggcctgctgcaggagttcgacgtgcaggagcaggacatcgagaccctgcacggcagcgtgcacgtgaccctgtgcggcacccccaagggcaacagacccgtgatcctgacctaccacgacatcggcatgaaccacaagacctgcgcctacatcctgaccagattcgccctgaacaaccccgagatggtggagggcctggtgctgatcaacgtgaacccctgcgccgagggctggatggactgggccgccagcaagatcagcggctggacccaggccctgcccgacatggtggtgagccacctgttcggcaaggaggagatgcagagcaacgtggaggtggtgcacacctacagacagcacatcgtgaacgacatgaaccccggcaacctgcacctgttcatcaacgcctacaacagcagaagagacctggagatcgagagacccatgcccggcacccacaccgtgaccctgcagtgccccgccctgctggtggtgggcgacagcagccccgccgtggacgccgtggtggagtgcaacagcaagctggaccccaccaagaccaccctgctgaagatggccgactgcggcggcctgccccagatcagccagcccgccaagctggccgaggccttcaagtacttcgtgcagggcatgggctacatgcccagcgccagcatgaccagactgatgagaagcagaaccgccagcggcagcagcgtgaccagcctggacggcaccagaagcagaagccacaccagcgagggcaccagaagcagaagccacaccagcgagggcaccagaagcagaagccacaccagcgagggcgcccacctggacatcacccccaacagcggcgccgccggcaacagcgccggccccaagagcatggaggtgagctgctag

SEQ ID NO: 91246 - DNA, 1185 bp, synthetic construct; identical to SEQ ID NO: 91244
  misc_feature 1..1185: note = Description of Artificial Sequence: Synthetic coding sequence
  source 1..1185: mol_type = other DNA

SEQ ID NO: 91247 - DNA, 498 bp, synthetic construct
  misc_feature 1..498: note = Description of Artificial Sequence: Synthetic coding sequence
  source 1..498: mol_type = other DNA
atgagcagagagatgcaggacgtggacctggccgaggtgaagcccctggtggagaagggcgagaccatcaccggcctgctgcaggagttcgacgtgcaggagcaggacatcgagaccctgcacggcagcgtgcacgtgaccctgtgcggcacccccaagggcaacagacccgtgatcctgacctaccacgacatcggcatgaaccacaagacctgctacaaccccctgttcaactacgaggacatgcaggagatcacccagcacttcgccgtgtgccacgtggacgcccccggccagcaggacggcgccgccagcttccccgccggctacatgtaccccagcatggaccagctggccgagatgctgcccggcgtgctgcagcagttcggcctgaagagcatcatcggcatgggcaccggcgccggcgcctacatcctgaccagattcgccctgaacaaccccgagatggtggagggcctggtgctgatcaacgtgtag

SEQ ID NO: 91248 - DNA, 477 bp, synthetic construct
  misc_feature 1..477: note = Description of Artificial Sequence: Synthetic coding sequence
  source 1..477: mol_type = other DNA
atgagcagagagatgcaggacgtggacctggccgaggtgaagcccctggtggagaagggcgagaccatcaccggcctgctgcaggagttcgacgtgcaggagcaggacatcgagaccctgcacggcagcgtgcacgtgaccctgtgcggcacccccaagggcaacagacccgtgatcctgacctaccacgacatcggcatgaaccacaagacctgctacaaccccctgttcaactacgaggacatgcaggagatcacccagcacttcgccgtgtgccacgtggacgcccccggccagcaggacggcgccgccagcttccccgccggctacatgtaccccagcatggaccagctggccgagatgctgcccggcgtgctgcagcagttcggcctgaagagcatcatcggcatgggcaccggcgccggcgcctacatcctgaccagattcgccctgaacaaccccgagatggtggagtag

SEQ ID NO: 91249 - DNA, 402 bp, synthetic construct
  misc_feature 1..402: note = Description of Artificial Sequence: Synthetic coding sequence
  source 1..402: mol_type = other DNA
atgagcagagagatgcaggacgtggacctggccgaggtgaagcccctggtggagaagggcgagaccatcaccggcctgctgcaggagttcgacgtgcaggagcaggacatcgagaccctgcacggcagcgtgcacgtgaccctgtgcggcacccccaagggcaacagacccgtgatcctgacctaccacgacatcggcatgaaccacaagacctgctacaaccccctgttcaactacgaggacatgcaggagatcacccagcacttcgccgtgtgccacgtggacgcccccggccagcaggacggcgccgccagcttccccgccggctacatgtaccccagcatggaccagctggccgagatgctgcccggcgtgctgcagcagttcggcctgaagagctag

SEQ ID NO: 91250 - DNA, 477 bp, synthetic construct; identical to SEQ ID NO: 91248
  misc_feature 1..477: note = Description of Artificial Sequence: Synthetic coding sequence
  source 1..477: mol_type = other DNA

SEQ ID NO: 91251 - DNA, 669 bp, synthetic construct
  misc_feature 1..669: note = Description of Artificial Sequence: Synthetic coding sequence
  source 1..669: mol_type = other DNA
atggactgggccgccagcaagatcagcggctggacccaggccctgcccgacatggtggtgagccacctgttcggcaaggaggagatgcagagcaacgtggaggtggtgcacacctacagacagcacatcgtgaacgacatgaaccccggcaacctgcacctgttcatcaacgcctacaacagcagaagagacctggagatcgagagacccatgcccggcacccacaccgtgaccctgcagtgccccgccctgctggtggtgggcgacagcagccccgccgtggacgccgtggtggagtgcaacagcaagctggaccccaccaagaccaccctgctgaagatggccgactgcggcggcctgccccagatcagccagcccgccaagctggccgaggccttcaagtacttcgtgcagggcatgggctacatgcccagcgccagcatgaccagactgatgagaagcagaaccgccagcggcagcagcgtgaccagcctggacggcaccagaagcagaagccacaccagcgagggcaccagaagcagaagccacaccagcgagggcaccagaagcagaagccacaccagcgagggcgcccacctggacatcacccccaacagcggcgccgccggcaacagcgccggccccaagagcatggaggtgagctgctag

SEQ ID NO: 91252 - DNA, 450 bp, synthetic construct
  misc_feature 1..450: note = Description of Artificial Sequence: Synthetic coding sequence
  source 1..450: mol_type = other DNA
atgagcagagagatgcaggacgtggacctggccgaggtgaagcccctggtggagaagggcgagaccatcaccggcctgctgcaggagttcgacgtgcaggagcaggacatcgagaccctgcacggcagcgtgcacgtgaccctgtgcggcaccccccccgccaagctggccgaggccttcaagtacttcgtgcagggcatgggctacatgcccagcgccagcatgaccagactgatgagaagcagaaccgccagcggcagcagcgtgaccagcctggacggcaccagaagcagaagccacaccagcgagggcaccagaagcagaagccacaccagcgagggcaccagaagcagaagccacaccagcgagggcgcccacctggacatcacccccaacagcggcgccgccggcaacagcgccggccccaagagcatggaggtgagctgctag

SEQ ID NO: 91253 - DNA, 942 bp, synthetic construct
  misc_feature 1..942: note = Description of Artificial Sequence: Synthetic coding sequence
  source 1..942: mol_type = other DNA
atgcaggagatcacccagcacttcgccgtgtgccacgtggacgcccccggccagcaggacggcgccgccagcttccccgccggctacatgtaccccagcatggaccagctggccgagatgctgcccggcgtgctgcagcagttcggcctgaagagcatcatcggcatgggcaccggcgccggcgcctacatcctgaccagattcgccctgaacaaccccgagatggtggagggcctggtgctgatcaacgtgaacccctgcgccgagggctggatggactgggccgccagcaagatcagcggctggacccaggccctgcccgacatggtggtgagccacctgttcggcaaggaggagatgcagagcaacgtggaggtggtgcacacctacagacagcacatcgtgaacgacatgaaccccggcaacctgcacctgttcatcaacgcctacaacagcagaagagacctggagatcgagagacccatgcccggcacccacaccgtgaccctgcagtgccccgccctgctggtggtgggcgacagcagccccgccgtggacgccgtggtggagtgcaacagcaagctggaccccaccaagaccaccctgctgaagatggccgactgcggcggcctgccccagatcagccagcccgccaagctggccgaggccttcaagtacttcgtgcagggcatgggctacatgcccagcgccagcatgaccagactgatgagaagcagaaccgccagcggcagcagcgtgaccagcctggacggcaccagaagcagaagccacaccagcgagggcaccagaagcagaagccacaccagcgagggcaccagaagcagaagccacaccagcgagggcgcccacctggacatcacccccaacagcggcgccgccggcaacagcgccggccccaagagcatggaggtgagctgctag

SEQ ID NO: 91254 - DNA, 288 bp, synthetic construct
  misc_feature 1..288: note = Description of Artificial Sequence: Synthetic coding sequence
  source 1..288: mol_type = other DNA
atgagcagagagatgcaggacgtggacctggccgaggtgaagcccctggtggagaagggcgagaccatcaccggcctgctgcaggagttcgacgtgcagaccaagcccgccaccacccccagcagcaccaccagaacctgcagaagaagccccagcaccctgcccagcgccacctggacccccctggccagcagaaccgcccagccccccagcccccagggcacctgcacccccccctggatcagctggctgaagtgcttcctggagagcttcaacagcctgggctag

SEQ ID NO: 91255 - DNA, 1491 bp, synthetic construct
  misc_feature 1..1491: note = Description of Artificial Sequence: Synthetic coding sequence
  source 1..1491: mol_type = other DNA
atggccgacgagagcgagaccgccgtgaagccccccgccccccccctgccccagatgatggagggcaacggcaacggccacgagcactgcagcgactgcgagaacgaggaggacaacagctacaacagaggcggcctgagccccgccaacgacaccggcgccaagaagaagaagaagaagcagaagaagaagaaggagaagggcagcgagaccgacagcgcccaggaccagcccgtgaagatgaacagcctgcccgccgagagaatccaggagatccagaaggccatcgagctgttcagcgtgggccagggccccgccaagaccatggaggaggccagcaagagaagctaccagttctgggacacccagcccgtgcccaagctgggcgaggtggtgaacacccacggccccgtggagcccgacaaggacaacatcagacaggagccctacaccctgccccagggcttcacctgggacgccctggacctgggcgacagaggcgtgctgaaggagctgtacaccctgctgaacgagaactacgtggaggacgacgacaacatgttcagattcgactacagccccgagttcctgctgtgggccctgagaccccccggctggctgccccagtggcactgcggcgtgagagtggtgagcagcagaaagctggtgggcttcatcagcgccatccccgccaacatccacatctacgacaccgagaagaagatggtggagatcaacttcctgtgcgtgcacaagaagctgagaagcaagagagtggcccccgtgctgatcagagagatcaccagaagagtgcacctggagggcatcttccaggccgtgtacaccgccggcgtggtgctgcccaagcccgtgggcacctgcagatactggcacagaagcctgaaccccagaaagctgatcgaggtgaagttcagccacctgagcagaaacatgaccatgcagagaaccatgaagctgtacagactgcccgagacccccaagaccgccggcctgagacccatggagaccaaggacatccccgtggtgcaccagctgctgaccagatacctgaagcagttccacctgacccccgtgatgagccaggaggaggtggagcactggttctacccccaggagaacatcatcgacaccttcgtggtggagaacgccaacggcgaggtgaccgacttcctgagcttctacaccctgcccagcaccatcatgaaccaccccacccacaagagcctgaaggccgcctacagcttctacaacgtgcacacccagacccccctgctggacctgatgagcgacgccctggtgctggccaagatgaagggcttcgacgtgttcaacgccctggacctgatggagaacaagaccttcctggagaagctgaagttcggcatcggcgacggcaacctgcagtactacctgtacaactggaagtgccccagcatgggcgccgagaaggtgggcctggtgctgcagtag

SEQ ID NO: 91256 - DNA, 414 bp, synthetic construct
  misc_feature 1..414: note = Description of Artificial Sequence: Synthetic coding sequence
  source 1..414: mol_type = other DNA
atggccgacgagagcgagaccgccgtgaagccccccgccccccccctgccccagatgatggagggcaacggcaacggccacgagcactgcagcgactgcgagaacgaggaggacaacagctacaacagaggcggcctgagccccgccaacgacaccggcgccaagaagaagaagaagaagcagaagaagaagaaggagaagggcagcgagaccgacagcgcccaggaccagcccgtgaagatgaacagcctgcccgccgagagaatccaggagatccagaaggccatcgagctgttcagcgtgggccagggccccgccaagaccatggaggaggccagcaagagaagctaccagttctgggacacccagcccgtgcccaagctggccaagagaaccgtgcacccccccgagtag

SEQ ID NO: 91257 - DNA, 1491 bp, synthetic construct; identical to SEQ ID NO: 91255
  misc_feature 1..1491: note = Description of Artificial Sequence: Synthetic coding sequence
  source 1..1491: mol_type = other DNA

SEQ ID NO: 91258 - DNA, 1590 bp, synthetic construct
  misc_feature 1..1590: note = Description of Artificial Sequence: Synthetic coding sequence
  source 1..1590: mol_type = other DNA
atggccgaggacagcgagagcgccgccagccagcagagcctggagctggacgaccaggacacctgcggcatcgacggcgacaacgaggaggagaccgagcacgccaagggcagccccggcggctacctgggcgccaagaagaagaagaagaagcagaagagaaagaaggagaagcccaacagcggcggcaccaagagcgacagcgccagcgacagccaggagatcaagatccagcagcccagcaagcacaacaccatctggcagcagatcagcgccggcgccgccatgggcagcgccaccatggagggcgagtggaccggcatgagaaacgaccacaagaaccccagcgtgcccatgcagaagctgcaggacatccagagagccatggagctgctgagcgcctgccagggccccgccagaaacatcgacgaggccgccaagcacagataccagttctgggacacccagcccgtgcccaagctggacgaggtgatcaccagccacggcgccatcgagcccgacaaggacaacgtgagacaggagccctacagcctgccccagggcttcatgtgggacaccctggacctgagcgacgccgaggtgctgaaggagctgtacaccctgctgaacgagaactacgtggaggacgacgacaacatgttcagattcgactacagccccgagttcctgctgtgggccctgagaccccccggctggctgctgcagtggcactgcggcgtgagagtgagcagcaacaagaagctggtgggcttcatcagcgccatccccgccaacatcagaatctacgacagcgtgaagaagatggtggagatcaacttcctgtgcgtgcacaagaagctgagaagcaagagagtggcccccgtgctgatcagagagatcaccagaagagtgaacctggagggcatcttccaggccgtgtacaccgccggcgtggtgctgcccaagcccatcgccacctgcagatactggcacagaagcctgaaccccagaaagctggtggaggtgaagttcagccacctgagcagaaacatgaccctgcagagaaccatgaagctgtacagactgcccgacgtgaccaagaccagcggcctgagacccatggagcccaaggacatcaagagcgtgagagagctgatcaacacctacctgaagcagttccacctggcccccgtgatggacgaggaggaggtggcccactggttcctgcccagagagcacatcatcgacaccttcgtggtggagagccccaacggcaagctgaccgacttcctgagcttctacaccctgcccagcaccgtgatgcaccaccccgcccacaagagcctgaaggccgcctacagcttctacaacatccacaccgagacccccctgctggacctgatgagcgacgccctgatcctggccaagagcaagggcttcgacgtgttcaacgccctggacctgatggagaacaagaccttcctggagaagctgaagttcggcatcggcgacggcaacctgcagtactacctgtacaactggagatgccccggcaccgacagcgagaaggtgggcctggtgctgcagtag

SEQ ID NO: 91259 - DNA, 1458 bp, synthetic construct
  misc_feature 1..1458: note = Description of Artificial Sequence: Synthetic coding sequence
  source 1..1458: mol_type = other DNA
atgagaagaagaagaagcacccccaaggaggtgctggagggcatctgggagcccaagagaaagagaagaaacagaagagagaagagaagaaaccagatccccgaggcccccagccagaccagacacctgatccccagaagactgaagttcagcagcctgagaaacaccacccccagcggcagcagattccagagagagcagccctggaaccccagcgtgcccatgcagaagctgcaggacatccagagagccatggagctgctgagcgcctgccagggccccgccagaaacatcgacgaggccgccaagcacagataccagttctgggacacccagcccgtgcccaagctggacgaggtgatcaccagccacggcgccatcgagcccgacaaggacaacgtgagacaggagccctacagcctgccccagggcttcatgtgggacaccctggacctgagcgacgccgaggtgctgaaggagctgtacaccctgctgaacgagaactacgtggaggacgacgacaacatgttcagattcgactacagccccgagttcctgctgtgggccctgagaccccccggctggctgctgcagtggcactgcggcgtgagagtgagcagcaacaagaagctggtgggcttcatcagcgccatccccgccaacatcagaatctacgacagcgtgaagaagatggtggagatcaacttcctgtgcgtgcacaagaagctgagaagcaagagagtggcccccgtgctgatcagagagatcaccagaagagtgaacctggagggcatcttccaggccgtgtacaccgccggcgtggtgctgcccaagcccatcgccacctgcagatactggcacagaagcctgaaccccagaaagctggtggaggtgaagttcagccacctgagcagaaacatgaccctgcagagaaccatgaagctgtacagactgcccgacgtgaccaagaccagcggcctgagacccatggagcccaaggacatcaagagcgtgagagagctgatcaacacctacctgaagcagttccacctggcccccgtgatggacgaggaggaggtggcccactggttcctgcccagagagcacatcatcgacaccttcgtggtggagagccccaacggcaagctgaccgacttcctgagcttctacaccctgcccagcaccgtgatgcaccaccccgcccacaagagcctgaaggccgcctacagcttctacaacatccacaccgagacccccctgctggacctgatgagcgacgccctgatcctggccaagagcaagggcttcgacgtgttcaacgccctggacctgatggagaacaagaccttcctggagaagctgaagttcggcatcggcgacggcaacctgcagtactacctgtacaactggagatgccccggcaccgacagcgagaaggtgggcctggtgctgcagtag

SEQ ID NO: 91260 - DNA, 1497 bp, synthetic construct
  misc_feature 1..1497: note = Description of Artificial Sequence: Synthetic coding sequence
  source 1..1497: mol_type = other DNA
atggccgaggacagcgagagcgccgccagccagcagagcctggagctggacgaccaggacacctgcggcatcgacggcgacaacgaggaggagaccgagcacgccaagggcagccccggcggctacctgggcgccaagaagaagaagaagaagcagaagagaaagaaggagaagcccaacagcggcggcaccaagagcgacagcgccagcgacagccaggagatcaagatccagcagcccagcaagaaccccagcgtgcccatgcagaagctgcaggacatccagagagccatggagctgctgagcgcctgccagggccccgccagaaacatcgacgaggccgccaagcacagataccagttctgggacacccagcccgtgcccaagctggacgaggtgatcaccagccacggcgccatcgagcccgacaaggacaacgtgagacaggagccctacagcctgccccagggcttcatgtgggacaccctggacctgagcgacgccgaggtgctgaaggagctgtacaccctgctgaacgagaactacgtggaggacgacgacaacatgttcagattcgactacagccccgagttcctgctgtgggccctgagaccccccggctggctgctgcagtggcactgcggcgtgagagtgagcagcaacaagaagctggtgggcttcatcagcgccatccccgccaacatcagaatctacgacagcgtgaagaagatggtggagatcaacttcctgtgcgtgcacaagaagctgagaagcaagagagtggcccccgtgctgatcagagagatcaccagaagagtgaacctggagggcatcttccaggccgtgtacaccgccggcgtggtgctgcccaagcccatcgccacctgcagatactggcacagaagcctgaaccccagaaagctggtggaggtgaagttcagccacctgagcagaaacatgaccctgcagagaaccatgaagctgtacagactgcccgacgtgaccaagaccagcggcctgagacccatggagcccaaggacatcaagagcgtgagagagctgatcaacacctacctgaagcagttccacctggcccccgtgatggacgaggaggaggtggcccactggttcctgcccagagagcacatcatcgacaccttcgtggtggagagccccaacggcaagctgaccgacttcctgagcttctacaccctgcccagcaccgtgatgcaccaccccgcccacaagagcctgaaggccgcctacagcttctacaacatccacaccgagacccccctgctggacctgatgagcgacgccctgatcctggccaagagcaagggcttcgacgtgttcaacgccctggacctgatggagaacaagaccttcctggagaagctgaagttcggcatcggcgacggcaacctgcagtactacctgtacaactggagatgccccggcaccgacagcgagaaggtgggcctggtgctgcagtag

SEQ ID NO: 91261 - DNA, 234 bp, synthetic construct
  misc_feature 1..234: note = Description of Artificial Sequence: Synthetic coding sequence
  source 1..234: mol_type = other DNA
atgagcgacgccctgatcctggccaagagcaagggcttcgacgtgttcaacgccctggacctgatggagaacaagaccttcctggagaagctgaagttcggcatcggcgacggcaacctgcagtactacctgtacaactggagatgccccggcaccgacagcgagaagggcagcggcaacttcgtgaacgccaacggcaagctgctgcccgacgtgtgcagaagacccccctag

SEQ ID NO: 91262 - DNA, 1458 bp, synthetic construct
  misc_feature 1..1458: note = Description of Artificial Sequence: Synthetic coding sequence
  source 1..1458: mol_type = other DNA
atggccagcccctggagaggcgcccacgaggtgctggagggcatctgggagcccaagagaaagagaagaaacagaagagagaagagaagaaaccagatccccgaggcccccagccagaccagacacctgatccccagaagactgaagttcagcagcctgagaaacaccacccccagcggcagcagattccagagagagcagccctggaaccccagcgtgcccatgcagaagctgcaggacatccagagagccatggagctgctgagcgcctgccagggccccgccagaaacatcgacgaggccgccaagcacagataccagttctgggacacccagcccgtgcccaagctggacgaggtgatcaccagccacggcgccatcgagcccgacaaggacaacgtgagacaggagccctacagcctgccccagggcttcatgtgggacaccctggacctgagcgacgccgaggtgctgaaggagctgtacaccctgctgaacgagaactacgtggaggacgacgacaacatgttcagattcgactacagccccgagttcctgctgtgggccctgagaccccccggctggctgctgcagtggcactgcggcgtgagagtgagcagcaacaagaagctggtgggcttcatcagcgccatccccgccaacatcagaatctacgacagcgtgaagaagatggtggagatcaacttcctgtgcgtgcacaagaagctgagaagcaagagagtggcccccgtgctgatcagagagatcaccagaagagtgaacctggagggcatcttccaggccgtgtacaccgccggcgtggtgctgcccaagcccatcgccacctgcagatactggcacagaagcctgaaccccagaaagctggtggaggtgaagttcagccacctgagcagaaacatgaccctgcagagaaccatgaagctgtacagactgcccgacgtgaccaagaccagcggcctgagacccatggagcccaaggacatcaagagcgtgagagagctgatcaacacctacctgaagcagttccacctggcccccgtgatggacgaggaggaggtggcccactggttcctgcccagagagcacatcatcgacaccttcgtggtggagagccccaacggcaagctgaccgacttcctgagcttctacaccctgcccagcaccgtgatgcaccaccccgcccacaagagcctgaaggccgcctacagcttctacaacatccacaccgagacccccctgctggacctgatgagcgacgccctgatcctggccaagagcaagggcttcgacgtgttcaacgccctggacctgatggagaacaagaccttcctggagaagctgaagttcggcatcggcgacggcaacctgcagtactacctgtacaactggagatgccccggcaccgacagcgagaaggtgggcctggtgctgcagtag

SEQ ID NO: 91263 - DNA, 933 bp, synthetic construct
  misc_feature 1..933: note = Description of Artificial Sequence: Synthetic coding sequence
  source 1..933: mol_type = other DNA
atgttcagattcgactacagccccgagttcctgctgtgggccctgagaccccccggctggctgctgcagtggcactgcggcgtgagagtgagcagcaacaagaagctggtgggcttcatcagcgccatccccgccaacatcagaatctacgacagcgtgaagaagatggtggagatcaacttcctgtgcgtgcacaagaagctgagaagcaagagagtggcccccgtgctgatcagagagatcaccagaagagtgaacctggagggcatcttccaggccgtgtacaccgccggcgtggtgctgcccaagcccatcgccacctgcagatactggcacagaagcctgaaccccagaaagctggtggaggtgaagttcagccacctgagcagaaacatgaccctgcagagaaccatgaagctgtacagactgcccgacgtgaccaagaccagcggcctgagacccatggagcccaaggacatcaagagcgtgagagagctgatcaacacctacctgaagcagttccacctggcccccgtgatggacgaggaggaggtggcccactggttcctgcccagagagcacatcatcgacaccttcgtggtggagagccccaacggcaagctgaccgacttcctgagcttctacaccctgcccagcaccgtgatgcaccaccccgcccacaagagcctgaaggccgcctacagcttctacaacatccacaccgagacccccctgctggacctgatgagcgacgccctgatcctggccaagagcaagggcttcgacgtgttcaacgccctggacctgatggagaacaagaccttcctggagaagctgaagttcggcatcggcgacggcaacctgcagtactacctgtacaactggagatgccccggcaccgacagcgagaaggtgggcctggtgctgcagtag

SEQ ID NO: 91264 - DNA, 459 bp, synthetic construct
  misc_feature 1..459: note = Description of Artificial Sequence: Synthetic coding sequence
  source 1..459: mol_type = other DNA
atggaggccgtgctgaacgagctggtgagcgtggaggacctgctgaagttcgagaagaagttccagagcgagaaggccgccggcagcgtgagcaagagcacccagttcgagtacgcctggtgcctggtgagaagcaagtacaacgacgacatcagaaagggcatcgtgctgctggaggagctgctgcccaagggcagcaaggaggagcagagagactacgtgttctacctggccgtgggcaactacagactgaaggagtacgagaaggccctgaagtacgtgagaggcctgctgcagaccgagccccagaacaaccaggccaaggagctggagagactgatcgacaaggccatgaagaaggacggcctggtgggcatggccatcgtgggcggcatggccctgggcgtggccggcctggccggcctgatcggcctggccgtgagcaagagcaagagctag

SEQ ID NO: 91265 - DNA, 2076 bp, synthetic construct
  misc_feature 1..2076: note = Description of Artificial Sequence: Synthetic coding sequence
  source 1..2076: mol_type = other DNA
atggccctgctgctgaccctgaccagccccgacctggagggcacctgggacaccagagacaaggacggcttcaaggcccaggagggcccccccctggccgtgcccgagttccccgtgtgcggcctgtacagaatctacggcgtgtgcggcagcttcagcagcttcttcatcatcagatgcagcctgtgcgccctggagaccctgaagagcccccagcacgaccccctggagatccccgagcagagcctgaagctgatccccctggtgagcggcaagagagagctgaccagaggccagaaggccggcgagaagcccctggccgccggccccggcgaggaggagctgctgagaggcagcgccccccacgcccaggacacccagagcgaggagctgccccccagctgcaccatcagcggcgagaagaagccccccgccgtgagcggcgaggccaccggcgccgacgccggcagactgtgccccccccccagaagcagagccccccacaaggacagaaccctggccagaagcagaccccagacccagggcgaggactgcagcctgcccgtgggcgaggtgaagatcggcaagagaagctacagccccgcccccggcaagcagaagaagcccaacgccatgggcctggcccccaccagcagccccggcgcccccaacagcgccagagccacccacaaccccgtgccctgcggcagcggcagaggcccctgccacctggccaacctgctgagcaccctggcccagagcaaccagaacagagaccacaagcagggcccccccgaggtgacctgccagatcagaaagaagaccagaaccctgtacagaagcgaccagctggaggagctggagaagatcttccaggaggaccactaccccgacagcgacaagagaagagagatcgcccagaccgtgggcgtgaccccccagagaatcatggtgaagggcgccggcagcctggtggccggctggagcggcggcggccccaccatcgagaccctggagctgcagagcgagagaagcgccgtggcctgggtgtggttccagaacagaagagccaagtggagaaagatggagaagctgaacggcaaggagagcaaggacaaccccgccgcccccggccccgccagcagccagtgcagcagcgccgccgagatcctgcccgccgtgcccatggagcccaagcccgaccccttcccccaggagagccccctggacaccttccccgagccccccatgctgctgaccagcgaccagaccctggcccccacccagcccagcgagggcgcccagagagtggtgaccccccccctgttcagccccccccccgtgagaagagccgacctgcccttccccctgggccccgtgcacaccccccagctgatgcccctgctgatggacgtggccggcagcgacagcagccacaaggacggcccctgcggcagctggggcaccagcatcaccctgccccccccctgcagctacctggaggagctggagccccaggactaccagcagagcaaccagcccggccccttccagttcagccaggccccccagccccccctgttccagagcccccagcccaagctgccctacctgcccaccttccccttcagcatgcccagcagcctgaccctgcccccccccgaggacagcctgttcatgttcccctgcggccccagcggcggcaccagccagggctactgccccggcgccagcagcggccagatcctgatgcagccccccgccggcaacatcggcaccgccagctggagcgacccctgcctgcccgagctgcccttccccggccccttctgcccccaggccctgggccacccccccggcggcgacggctacttccccgacctgttccccaccccctgcccccaggccctgggcagacagcccagcagcgccctgagctggatgcccgagggcgccagacccggcaccggccccctgctgagcaaggccaaggaggagccccccgccgccagcctggaccagcccagcgccctggaggaggccagaggcgacgacaagaacagccacgtgccctag

SEQ ID NO: 91266 - DNA, 699 bp, synthetic construct
  misc_feature 1..699: note = Description of Artificial Sequence: Synthetic coding sequence
  source 1..699: mol_type = other DNA
atggagagatgccccagcctgggcgtgaccctgtacgccctggtggtggtgctgggcctgagagccacccccgccggcggccagcactacctgcacatcagacccgcccccagcgacaacctgcccctggtggacctgatcgagcaccccgaccccatcttcgaccccaaggagaaggacctgaacgagaccctgctgagaagcctgctgggcggccactacgaccccggcttcatggccaccagcccccccgaggacagacccggcggcggcggcggcgccgccggcggcgccgaggacctggccgagctggaccagctgctgagacagagacccagcggcgccatgcccagcgagatcaagggcctggagttcagcgagggcctggcccagggcaagaagcagagactgagcaagaagctgagaagaaagctgcagatgtggctgtggagccagaccttctgccccgtgctgtacgcctggaacgacctgggcagcagattctggcccagatacgtgaaggtgggcagctgcttcagcaagagaagctgcagcgtgcccgagggcatggtgtgcaagcccagcaagagcgtgcacctgaccgtgctgagatggagatgccagagaagaggcggccagagatgcggctggatccccatccagtaccccatcatcagcgagtgcaagtgcagctgctag

SEQ ID NO: 91267 - DNA, 990 bp, synthetic construct
  misc_feature 1..990: note = Description of Artificial Sequence: Synthetic coding sequence
  source 1..990: mol_type = other DNA
atgggcaccgccgccgccgccgccgccgccgccgccgccgccgccgccggcgagggcgccagaagccccagccccgccgccgtgagcctgggcctgggcgtggccgtggtgagcagcctggtgaacggcagcaccttcgtgctgcagaagaagggcatcgtgagagccaagagaagaggcaccagctacctgaccgacatcgtgtggtgggccggcaccatcgccatggccgtgggccagatcggcaacttcctggcctacaccgccgtgcccaccgtgctggtgacccccctgggcgccctgggcgtgcccttcggcagcatcctggccagctacctgctgaaggagaagctgaacatcctgggcaagctgggctgcctgctgagctgcgccggcagcgtggtgctgatcatccacagccccaagagcgagagcgtgaccacccaggccgagctggaggagaagctgaccaaccccgtgttcgtgggctacctgtgcatcgtgctgctgatgctgctgctgctgatcttctggatcgcccccgcccacggccccaccaacatcatggtgtacatcagcatctgcagcctgctgggcagcttcaccgtgcccagcaccaagggcatcggcctggccgcccaggacatcctgcacaacaaccccagcagccagagagccctgtgcctgtgcctggtgctgctggccgtgctgggctgcagcatcatcgtgcagttcagatacatcaacaaggccctggagtgcttcgacagcagcgtgttcggcgccatctactacgtggtgttcaccaccctggtgctgctggccagcgccatcctgttcagagagtggagcaacgtgggcctggtggacttcctgggcatggcctgcggcttcaccaccgtgagcgtgggcatcgtgctgatccaggtgttcaaggagttcaacttcaacctgggcgagatgaacaagagcaacatgaagaccgactag

SEQ ID NO: 91268 - DNA, 765 bp, synthetic construct
  misc_feature 1..765: note = Description of Artificial Sequence: Synthetic coding sequence
  source 1..765: mol_type = other DNA
atggccgtgggccagatcggcaacttcctggcctacaccgccgtgcccaccgtgctggtgacccccctgggcgccctgggcgtgcccttcggcagcatcctggccagctacctgctgaaggagaagctgaacatcctgggcaagctgggctgcctgctgagctgcgccggcagcgtggtgctgatcatccacagccccaagagcgagagcgtgaccacccaggccgagctggaggagaagctgaccaaccccgtgttcgtgggctacctgtgcatcgtgctgctgatgctgctgctgctgatcttctggatcgcccccgcccacggccccaccaacatcatggtgtacatcagcatctgcagcctgctgggcagcttcaccgtgcccagcaccaagggcatcggcctggccgcccaggacatcctgcacaacaaccccagcagccagagagccctgtgcctgtgcctggtgctgctggccgtgctgggctgcagcatcatcgtgcagttcagatacatcaacaaggccctggagtgcttcgacagcagcgtgttcggcgccatctactacgtggtgttcaccaccctggtgctgctggccagcgccatcctgttcagagagtggagcaacgtgggcctggtggacttcctgggcatggcctgcggcttcaccaccgtgagcgtgggcatcgtgctgatccaggtgttcaaggagttcaacttcaacctgggcgagatgaacaagagcaacatgaagaccgactag

SEQ ID NO: 91269 - DNA, 480 bp, synthetic construct
  misc_feature 1..480: note = Description of Artificial Sequence: Synthetic coding sequence
  source 1..480: mol_type = other DNA
atgctgctgctgctgatcttctggatcgcccccgcccacggccccaccaacatcatggtgtacatcagcatctgcagcctgctgggcagcttcaccgtgcccagcaccaagggcatcggcctggccgcccaggacatcctgcacaacaaccccagcagccagagagccctgtgcctgtgcctggtgctgctggccgtgctgggctgcagcatcatcgtgcagttcagatacatcaacaaggccctggagtgcttcgacagcagcgtgttcggcgccatctactacgtggtgttcaccaccctggtgctgctggccagcgccatcctgttcagagagtggagcaacgtgggcctggtggacttcctgggcatggcctgcggcttcaccaccgtgagcgtgggcatcgtgctgatccaggtgttcaaggagttcaacttcaacctgggcgagatgaacaagagcaacatgaagaccgactag

SEQ ID NO: 91270 - DNA, 765 bp, synthetic construct; identical to SEQ ID NO: 91268
  misc_feature 1..765: note = Description of Artificial Sequence: Synthetic coding sequence
  source 1..765: mol_type = other DNA

SEQ ID NO: 91271 - DNA, 1083 bp, synthetic construct
  misc_feature 1..1083: note = Description of Artificial Sequence: Synthetic coding sequence
  source 1..1083: mol_type = other DNA
atgagccagggcagaggcaagtacgacttctacatcggcctgggcctggccatgagcagcagcatcttcatcggcggcagcttcatcctgaagaagaagggcctgctgagactggccagaaagggcagcatgagagccggccagggcggccacgcctacctgaaggagtggctgtggtgggccggcctgctgagcatgggcgccggcgaggtggccaacttcgccgcctacgccttcgcccccgccaccctggtgacccccctgggcgccctgagcgtgctggtgagcgccatcctgagcagctacttcctgaacgagagactgaacctgcacggcaagatcggctgcctgctgagcatcctgggcagcaccgtgatggtgatccacgcccccaaggaggaggagatcgagaccctgaacgagatgagccacaagctgggcgaccccggcttcgtggtgttcgccaccctggtggtgatcgtggccctgatcctgatcttcgtggtgggccccagacacggccagaccaacatcctggtgtacatcaccatctgcagcgtgatcggcgccttcagcgtgagctgcgtgaagggcctgggcatcgccatcaaggagctgttcgccggcaagcccgtgctgagacaccccctggcctggatcctgctgctgagcctgatcgtgtgcgtgagcacccagatcaactacctgaacagagccctggacatcttcaacaccagcatcgtgacccccatctactacgtgttcttcaccaccagcgtgctgacctgcagcgccatcctgttcaaggagtggcaggacatgcccgtggacgacgtgatcggcaccctgagcggcttcttcaccatcatcgtgggcatcttcctgctgcacgccttcaaggacgtgagcttcagcctggccagcctgcccgtgagcttcagaaaggacgagaaggccatgaacggcaacctgagcaacatgtacgaggtgctgaacaacaacgaggagagcctgacctgcggcatcgagcagcacaccggcgagaacgtgagcagaagaaacggcaacctgaccgccttctag

SEQ ID NO: 91272 - DNA, 1026 bp, synthetic construct
  misc_feature 1..1026: note = Description of Artificial Sequence: Synthetic coding sequence
  source 1..1026: mol_type = other DNA
atgagccagggcagaggcaagtacgacttctacatcggcctgggcctggccatgagcagcagcatcttcatcggcggcagcttcatcctgaagaagaagggcctgctgagactggccagaaagggcagcatgagagccgtgggcgccggcgaggtggccaacttcgccgcctacgccttcgcccccgccaccctggtgacccccctgggcgccctgagcgtgctggtgagcgccatcctgagcagctacttcctgaacgagagactgaacctgcacggcaagatcggctgcctgctgagcatcctgggcagcaccgtgatggtgatccacgcccccaaggaggaggagatcgagaccctgaacgagatgagccacaagctgggcgaccccggcttcgtggtgttcgccaccctggtggtgatcgtggccctgatcctgatcttcgtggtgggccccagacacggccagaccaacatcctggtgtacatcaccatctgcagcgtgatcggcgccttcagcgtgagctgcgtgaagggcctgggcatcgccatcaaggagctgttcgccggcaagcccgtgctgagacaccccctggcctggatcctgctgctgagcctgatcgtgtgcgtgagcacccagatcaactacctgaacagagccctggacatcttcaacaccagcatcgtgacccccatctactacgtgttcttcaccaccagcgtgctgacctgcagcgccatcctgttcaaggagtggcaggacatgcccgtggacgacgtgatcggcaccctgagcggcttcttcaccatcatcgtgggcatcttcctgctgcacgccttcaaggacgtgagcttcagcctggccagcctgcccgtgagcttcagaaaggacgagaaggccatgaacggcaacctgagcaacatgtacgaggtgctgaacaacaacgaggagagcctgacctgcggcatcgagcagcacaccggcgagaacgtgagcagaagaaacggcaacctgaccgccttctag

SEQ ID NO: 91273 - DNA, 1083 bp, synthetic construct; identical to SEQ ID NO: 91271
  misc_feature 1..1083: note = Description of Artificial Sequence: Synthetic coding sequence
  source 1..1083: mol_type = other DNA

SEQ ID NO: 91274 - DNA, 1083 bp, synthetic construct; identical to SEQ ID NO: 91271
  misc_feature 1..1083: note = Description of Artificial Sequence: Synthetic coding sequence
  source 1..1083: mol_type = other DNA

SEQ ID NO: 91275 - DNA, 1026 bp, synthetic construct; identical to SEQ ID NO: 91272
  misc_feature 1..1026: note = Description of Artificial Sequence: Synthetic coding sequence
  source 1..1026: mol_type = other DNA

SEQ ID NO: 91276 - DNA, 180 bp, synthetic construct
  misc_feature 1..180: note = Description of Artificial Sequence: Synthetic coding sequence
  source 1..180: mol_type = other DNA
atgagccagggcagaggcaagtacgacttctacatcggcctgggcctggccatgagcagcagcatcttcatcggcggcagcttcatcctgaagaagaagggcctgctgagactggccagaaagggcagcatgagagccggccagggcggccacgcctacctgaaggagtggctgtggtag

SEQ ID NO: 91277 - DNA, 900 bp, synthetic construct
  misc_feature 1..900: note = Description of Artificial Sequence: Synthetic coding sequence
  source 1..900: mol_type = other DNA
atggaggagctggagcagggcctgctgatgcagccctgggcctggctgcagctggccgagaacagcctgctggccaaggtgttcatcaccaagcagggctacgccctgctggtgagcgacctgcagcaggtgtggcacgagcaggtggacaccagcgtggtgagccagagagccaaggagctgaacaagagactgaccgccccccccgccgccttcctgtgccacctggacaacctgctgagacccctgctgaaggacgccgcccaccccagcgaggccaccttcagctgcgactgcgtggccgacgccctgatcctgagagtgagaagcgagctgagcggcctgcccttctactggaacttccactgcatgctggccagccccagcctggtgagccagcacctgatcagacccctgatgggcatgagcctggccctgcagtgccaggtgagagagctggccaccctgctgcacatgaaggacctggagatccaggactaccaggagagcggcgccaccctgatcagagacagactgaagaccgagcccttcgaggagaacagcttcctggagcagttcatgatcgagaagctgcccgaggcctgcagcatcggcgacggcaagcccttcgtgatgaacctgcaggacctgtacatggccgtgaccacccaggaggtgcaggtgggccagaagcaccagggcgccggcgacccccacaccagcaacagcgccagcctgcagggcatcgacagccagtgcgtgaaccagcccgagcagctggtgagcagcgcccccaccctgagcgcccccgagaaggagagcaccggcaccagcggccccctgcagagaccccagctgagcaaggtgaagagaaagaagcccagaggcctgttcagctag

SEQ ID NO: 91278 - DNA, 951 bp, synthetic construct
  misc_feature 1..951: note = Description of Artificial Sequence: Synthetic coding sequence
  source 1..951: mol_type = other DNA
atggaggagctggagcagggcctgctgatgcagccctgggcctggctgcagctggccgagaacagcctgctggccaaggtgttcatcaccaagcagggctacgccctgctggtgagcgacctgcagcaggtgtggcacgagcaggtggacaccagcgtggtgagccagagagccaaggagctgaacaagagactgaccgccccccccgccgccttcctgtgccacctggacaacctgctgagacccctgctgaaggacgccgcccaccccagcgaggccaccttcagctgcgactgcgtggccgacgccctgatcctgagagtgagaagcgagctgagcggcctgcccttctactggaacttccactgcatgctggccagccccagcctggtgagccagcacctgatcagacccctgatgggcatgagcctggccctgcagtgccaggtgagagagctggccaccctgctgcacatgaaggacctggagatccaggactaccaggagagcggcgccaccctgatcagagacagactgaagaccgagcccttcgaggagaacagcttcctggagcagttcatgatcgagaagctgcccgaggcctgcagcatcggcgacggcaagcccttcgtgatgaacctgcaggacctgtacatggccgtgaccacccaggaggtgcaggtgggccagaagcaccagggcgccggcgacccccacaccagcaacagcgccagcctgcagggcatcgacagccagtgcgtgaaccagcccgagcagctggtgagcagcgcccccaccctgagcgcccccgagaaggagagcaccgccctgtgcagagacctgagctgccagagaagcagaggcagaagccagggcgtgagcagcgtgaacctgctgtggccccagctgctgagaatggacctggagaacagcttccaggccagcccctag

SEQ ID NO: 91279 - DNA, 690 bp, synthetic construct
  misc_feature 1..690: note = Description of Artificial Sequence: Synthetic coding sequence
  source 1..690: mol_type = other DNA
atggaggagctggagcagggcctgctgatgcagccctgggcctggctgcagctggccgagaacagcctgctggccaaggtgttcatcaccaagcagggctacgccctgctggtgagcgacctgcagcaggtgtggcacgagcaggtggacaccagcgtggtgagccagagagccaaggagctgaacaagagactgaccgccccccccgccgccttcctgtgccacctggacaacctgctgagacccctgctgaaggacgccgcccaccccagcgaggccaccttcagctgcgactgcgtggccgacgccctgatcctgagagtgagaagcgagctgagcggcctgcccttctactggaacttccactgcatgctggccagccccagcctggtgagccagcacctgatcagacccctgatgggcatgagcctggccctgcagtgccaggtgagagagctggccaccctgctgcacatgaaggacctggagatccaggactaccaggagagcggcgccaccctgatcagagacagactgaagaccgagcccttcgaggagaacagcttcctggagcagttcatgatcgagaagctgcccgaggcctgcagcatcggcgacggcaagcccttcgtgatgaacctgcaggacctgtacatggccgtgaccacccaggaggtgcaggtgggctag

SEQ ID NO: 91280 - DNA, 804 bp, synthetic construct
  misc_feature 1..804: note = Description of Artificial Sequence: Synthetic coding sequence
  source 1..804: mol_type = other DNA
atggccaactgcgagagaaccttcatcgccatcaagcccgacggcgtgcagagaggcctggtgggcgagatcatcaagagattcgagcagaagggcttcagactggtgggcctgaagttcatgcaggccagcgaggacctgctgaaggagcactacgtggacctgaaggacagacccttcttcgccggcctggtgaagtacatgcacagcggccccgtggtggccatggtgtgggagggcctgaacgtggtgaagaccggcagagtgatgctgggcgagaccaaccccgccgacagcaagcccggcaccatcagaggcgacttctgcatccaggtgggcagaaccatggccaacctggagagaaccttcatcgccatcaagcccgacggcgtgcagagaggcctggtgggcgagatcatcaagagattcgagcagaagggcttcagactggtggccatgaagttcctgagagccagcgaggagcacctgaagcagcactacatcgacctgaaggacagacccttcttccccggcctggtgaagtacatgaacagcggccccgtggtggccatggtgtgggagggcctgaacgtggtgaagaccggcagagtgatgctgggcgagaccaaccccgccgacagcaagcccggcaccatcagaggcgacttctgcatccaggtgggcagaaacatcatccacggcagcgacagcgtgaagagcgccgagaaggagatcagcctgtggttcaagcccgaggagctggtggactacaagagctgcgcccacgactgggtgtacgagtag

SEQ ID NO: 91281 - DNA, 234 bp, synthetic construct
  misc_feature 1..234: note = Description of Artificial Sequence: Synthetic coding sequence
  source 1..234: mol_type = other DNA
atggtgtgggagggcctgaacgtggtgaagaccggcagagtgatgctgggcgagaccaaccccgccgacagcaagcccggcaccatcagaggcgacttctgcatccaggtgggcagaaacatcatccacggcagcgacagcgtgaagagcgccgagaaggagatcagcctgtggttcaagcccgaggagctggtggactacaagagctgcgcccacgactgggtgtacgagtag

SEQ ID NO: 91282 - DNA, 234 bp, synthetic construct; identical to SEQ ID NO: 91281
  misc_feature 1..234: note = Description of Artificial Sequence: Synthetic coding sequence
  source 1..234: mol_type = other DNA

SEQ ID NO: 91283 - DNA, 459 bp, synthetic construct
  misc_feature 1..459: note = Description of Artificial Sequence: Synthetic coding sequence
  source 1..459: mol_type = other DNA
atggccaacctggagagaaccttcatcgccatcaagcccgacggcgtgcagagaggcctggtgggcgagatcatcaagagattcgagcagaagggcttcagactggtggccatgaagttcctgagagccagcgaggagcacctgaagcagcactacatcgacctgaaggacagacccttcttccccggcctggtgaagtacatgaacagcggccccgtggtggccatggtgtgggagggcctgaacgtggtgaagaccggcagagtgatgctgggcgagaccaaccccgccgacagcaagcccggcaccatcagaggcgacttctgcatccaggtgggcagaaacatcatccacggcagcgacagcgtgaagagcgccgagaaggagatcagcctgtggttcaagcccgaggagctggtggactacaagagctgcgcccacgactgggtgtacgagtag

SEQ ID NO: 91284 - DNA, 459 bp, synthetic construct; identical to SEQ ID NO: 91283
  misc_feature 1..459: note = Description of Artificial Sequence: Synthetic coding sequence
  source 1..459: mol_type = other DNA

SEQ ID NO: 91285 - DNA, 459 bp, synthetic construct; identical to SEQ ID NO: 91283
  misc_feature 1..459: note = Description of Artificial Sequence: Synthetic coding sequence
  source 1..459: mol_type = other DNA

SEQ ID NO: 91286 - DNA, 459 bp, synthetic construct; identical to SEQ ID NO: 91283
  misc_feature 1..459: note = Description of Artificial Sequence: Synthetic coding sequence
  source 1..459: mol_type = other DNA

SEQ ID NO: 91287 - DNA, 459 bp, synthetic construct; identical to SEQ ID NO: 91283
  misc_feature 1..459: note = Description of Artificial Sequence: Synthetic coding sequence
  source 1..459: mol_type = other DNA

SEQ ID NO: 91288 - DNA, 879 bp, synthetic construct
  misc_feature 1..879: note = Description of Artificial Sequence: Synthetic coding sequence
  source 1..879: mol_type = other DNA
atggtgctgctgagcaccctgggcatcgtgttccagggcgagggcccccccatcagcagctgcgacaccggcaccatggccaactgcgagagaaccttcatcgccatcaagcccgacggcgtgcagagaggcctggtgggcgagatcatcaagagattcgagcagaagggcttcagactggtgggcctgaagttcatgcaggccagcgaggacctgctgaaggagcactacgtggacctgaaggacagacccttcttcgccggcctggtgaagtacatgcacagcggccccgtggtggccatggtgtgggagggcctgaacgtggtgaagaccggcagagtgatgctgggcgagaccaaccccgccgacagcaagcccggcaccatcagaggcgacttctgcatccaggtgggcagaaccatggccaacctggagagaaccttcatcgccatcaagcccgacggcgtgcagagaggcctggtgggcgagatcatcaagagattcgagcagaagggcttcagactggtggccatgaagttcctgagagccagcgaggagcacctgaagcagcactacatcgacctgaaggacagacccttcttccccggcctggtgaagtacatgaacagcggccccgtggtggccatggtgtgggagggcctgaacgtggtgaagaccggcagagtgatgctgggcgagaccaaccccgccgacagcaagcccggcaccatcagaggcgacttctgcatccaggtgggcagaaacatcatccacggcagcgacagcgtgaagagcgccgagaaggagatcagcctgtggttcaagcccgaggagctggtggactacaagagctgcgcccacgactgggtgtacgagtag

SEQ ID NO: 91289 - DNA, 1188 bp, synthetic construct
  misc_feature 1..1188: note = Description of Artificial Sequence: Synthetic coding sequence
  source 1..1188: mol_type = other DNA
atggtgagcgccgccggcctgagcggcgacggcaagatgagaggcgtgctgctggtgctgctgggcctgctgtacagcagcaccagctgcggcgtgcagaaggccagcgtgttctacggccccgaccccaaggagggcctggtgagcagcatggagttcccctgggtggtgagcctgcaggacagccagtacacccacctggccttcggctgcatcctgagcgagttctgggtgctgagcatcgccagcgccatccagaacagaaaggacatcgtggtgatcgtgggcatcagcaacatggaccccagcaagatcgcccacaccgagtaccccgtgaacaccatcatcatccacgaggacttcgacaacaacagcatgagcaacaacatcgccctgctgaagaccgacaccgccatgcacttcggcaacctggtgcagagcatctgcttcctgggcagaatgctgcacaccccccccgtgctgcagaactgctgggtgagcggctggaaccccaccagcgccaccggcaaccacatgaccatgagcgtgctgagaaagatcttcgtgaaggacctggacatgtgccccctgtacaagctgcagaagaccgagtgcggcagccacaccaaggaggagaccaagaccgcctgcctgggcgaccccggcagccccatgatgtgccagctgcagcagttcgacctgtgggtgctgagaggcgtgctgaacttcggcggcgagacctgccccggcctgttcctgtacaccaaggtggaggactacagcaagtggatcaccagcaaggccgagagagccggcccccccctgagcagcctgcaccactgggagaagctgatcagcttcagccaccacggccccaacgccaccatgacccagaagacctacagcgacagcgagctgggccacgtgggcagctacctgcagggccagagaagaaccatcacccacagcagactgggcaacagcagcagagacagcctggacgtgagagagaaggacgtgaaggagagcggcagaagccccgaggccagcgtgcagcccctgtactacgactactacggcggcgaggtgggcgagggcagaatcttcgccggccagaacagactgtaccagcccgaggagatcatcctggtgagcttcgtgctggtgttcttctgcagcagcatctag

SEQ ID NO: 91290 - DNA, 639 bp, synthetic construct
  misc_feature 1..639: note = Description of Artificial Sequence: Synthetic coding sequence
  source 1..639: mol_type = other DNA
atggagatcagcatgccccccccccagatctacgtggagaagaccctggccatcatcaagcccgacatcgtggacaaggaggaggagatccaggacatcatcctgagaagcggcttcaccatcgtgcagagaagaaagctgagactgagccccgagcagtgcagcaacttctacgtggagaagtacggcaagatgttcttccccaacctgaccgcctacatgagcagcggccccctggtggccatgatcctggccagacacaaggccatcagctactggctggagctgctgggccccaacaacagcctggtggccaaggagacccaccccgacagcctgagagccatctacggcaccgacgacctgagaaacgccctgcacggcagcaacgacttcgccgccgccgagagagagatcagattcatgttccccgaggtgatcgtggagcccatccccatcggccaggccgccaaggactacctgaacctgcacatcatgcccaccctgctggagggcctgaccgagctgtgcaagcagaagcccgccgaccccctgatctggctggccgactggctgctgaagaacaaccccaacaagcccaagctgtgccaccaccccatcgtggaggagccctactag

SEQ ID NO: 91291 - DNA, 561 bp, synthetic construct
  misc_feature 1..561: note = Description of Artificial Sequence: Synthetic coding sequence
  source 1..561: mol_type = other DNA
atggccagcatcctgagaagcccccaggccctgcagctgaccctggccctgatcaagcccgacgccgtggcccaccccctgatcctggaggccgtgcaccagcagatcctgagcaacaagttcctgatcgtgagaatgagagagctgctgtggagaaaggaggactgccagagattctacagagagcacgagggcagattcttctaccagagactggtggagttcatggccagcggccccatcagagcctacatcctggcccacaaggacgccatccagctgtggagaaccctgatgggccccaccagagtgttcagagccagacacgtggcccccgacagcatcagaggcagcttcggcctgaccgacaccagaaacaccacccacggcagcgacagcgtggtgagcgccagcagagagatcgccgccttcttccccgacttcagcgagcagagatggtacgaggaggaggagccccagctgagatgcggccccgtgtgctacagccccgagggcggcgtgcactacgtggccggcaccggcggcctgggccccgcctag

SEQ ID NO: 91292 - DNA, 585 bp, synthetic construct
  misc_feature 1..585: note = Description of Artificial Sequence: Synthetic coding sequence
  source 1..585: mol_type = other DNA
atgacccagaacctgggcagcgagatggccagcatcctgagaagcccccaggccctgcagctgaccctggccctgatcaagcccgacgccgtggcccaccccctgatcctggaggccgtgcaccagcagatcctgagcaacaagttcctgatcgtgagaatgagagagctgctgtggagaaaggaggactgccagagattctacagagagcacgagggcagattcttctaccagagactggtggagttcatggccagcggccccatcagagcctacatcctggcccacaaggacgccatccagctgtggagaaccctgatgggccccaccagagtgttcagagccagacacgtggcccccgacagcatcagaggcagcttcggcctgaccgacaccagaaacaccacccacggcagcgacagcgtggtgagcgccagcagagagatcgccgccttcttccccgacttcagcgagcagagatggtacgaggaggaggagccccagctgagatgcggccccgtgtgctacagccccgagggcggcgtgcactacgtggccggcaccggcggcctgggccccgcctag

SEQ ID NO: 91293 - DNA, 561 bp, synthetic construct; identical to SEQ ID NO: 91291
  misc_feature 1..561: note = Description of Artificial Sequence: Synthetic coding sequence
  source 1..561: mol_type = other DNA

SEQ ID NO: 91294 - DNA, 360 bp, synthetic construct
  misc_feature 1..360: note = Description of Artificial Sequence: Synthetic coding sequence
  source 1..360: mol_type = other DNA
atggccagcatcctgagaagcccccaggccctgcagctgaccctggccctgatcaagcccgacgccgtggcccaccccctgatcctggaggccgtgcaccagcagatcctgagcaacaagttcctgatcgtgagaatgagagagctgctgtggagaaaggaggactgccagagattctacagagagcacgaggacagcgtggtgagcgccagcagagagatcgccgccttcttccccgacttcagcgagcagagatggtacgaggaggaggagccccagctgagatgcggccccgtgtgctacagccccgagggcggcgtgcactacgtggccggcaccggcggcctgggccccgcctag

SEQ ID NO: 91295 - DNA, 561 bp, synthetic construct; identical to SEQ ID NO: 91291
  misc_feature 1..561: note = Description of Artificial Sequence: Synthetic coding sequence
  source 1..561: mol_type = other DNA

SEQ ID NO: 91296 - DNA, 492 bp, synthetic construct
  misc_feature 1..492: note = Description of Artificial Sequence: Synthetic coding sequence
  source 1..492: mol_type = other DNA
atggccagcatcctgagaagcccccaggccctgcagctgaccctggccctgatcaagcccgacgccgtggcccaccccctgatcctggaggccgtgcaccagcagatcctgagcaacaagttcctgatcgtgagaatgagagagctgctgtggagaaaggaggactgccagagattctacagagagcacgaggccggccagagcgagcccaccagcctgcccaccagaatgcccagcagcagcggcggcagaagctgggacccccccgagtgcagcgagcacgccatgtggccccagatcctgagcgtgggcgtgagcgccagcctgacccccgccaccccccccatggtgagaaccctgtggttccagcccgccgagagactgcagcccagcagcctgaccagcgtgaacagcgccggcatgagaagaaagagccccagctgcgccgtggccctgtgcgccatcgcccagagagaggtgagcaccatgtag

SEQ ID NO: 91297 - DNA, 561 bp, synthetic construct; identical to SEQ ID NO: 91291
  misc_feature 1..561: note = Description of Artificial Sequence: Synthetic coding sequence
  source 1..561: mol_type = other DNA

SEQ ID NO: 91298 - DNA, 1131 bp, synthetic construct
  misc_feature 1..1131: note = Description of Artificial Sequence: Synthetic coding sequence
  source 1..1131: mol_type = other DNA
atgaaccacagcgagagattcgtgttcatcgccgagtggtacgaccccaacgccagcctgctgagaagatacgagctgctgttctaccccggcgacggcagcgtggagatgcacgacgtgaagaaccacagaaccttcctgaagagaaccaagtacgacaacctgcacctggaggacctgttcatcggcaacaaggtgaacgtgttcagcagacagctggtgctgatcgactacggcgaccagtacaccgccagacagctgggcagcagaaaggagaagaccctggccctgatcaagcccgacgccatcagcaaggccggcgagatcatcgagatcatcaacaaggccggcttcaccatcaccaagctgaagatgatgatgctgagcagaaaggaggccctggacttccacgtggaccaccagagcagacccttcttcaacgagctgatccagttcatcaccaccggccccatcatcgccatggagatcctgagagacgacgccatctgcgagtggaagagactgctgggccccgccaacagcggcgtggccagaaccgacgccagcgagagcatcagagccctgttcggcaccgacggcatcagaaacgccgcccacggccccgacagcttcgccagcgccgccagagagatggagctgttcttccccagcagcggcggctgcggccccgccaacaccgccaagttcaccaactgcacctgctgcatcgtgaagccccacgccgtgagcgagggcctgctgggcaagatcctgatggccatcagagacgccggcttcgagatcagcgccatgcagatgttcaacatggacagagtgaacgtggaggagttctacgaggtgtacaagggcgtggtgaccgagtaccacgacatggtgaccgagatgtacagcggcccctgcgtggccatggagatccagcagaacaacgccaccaagaccttcagagagttctgcggccccgccgaccccgagatcgccagacacctgagacccggcaccctgagagccatcttcggcaagaccaagatccagaacgccgtgcactgcaccgacctgcccgaggacggcctgctggaggtgcagtacttcttcaagatcctggacaactag

SEQ ID NO: 91299 - DNA, 1023 bp, synthetic construct
  misc_feature 1..1023: note = Description of Artificial Sequence: Synthetic coding sequence
  source 1..1023: mol_type = other DNA
atgcacgacgtgaagaaccacagaaccttcctgaagagaaccaagtacgacaacctgcacctggaggacctgttcatcggcaacaaggtgaacgtgttcagcagacagctggtgctgatcgactacggcgaccagtacaccgccagacagctgggcagcagaaaggagaagaccctggccctgatcaagcccgacgccatcagcaaggccggcgagatcatcgagatcatcaacaaggccggcttcaccatcaccaagctgaagatgatgatgctgagcagaaaggaggccctggacttccacgtggaccaccagagcagacccttcttcaacgagctgatccagttcatcaccaccggccccatcatcgccatggagatcctgagagacgacgccatctgcgagtggaagagactgctgggccccgccaacagcggcgtggccagaaccgacgccagcgagagcatcagagccctgttcggcaccgacggcatcagaaacgccgcccacggccccgacagcttcgccagcgccgccagagagatggagctgttcttccccagcagcggcggctgcggccccgccaacaccgccaagttcaccaactgcacctgctgcatcgtgaagccccacgccgtgagcgagggcctgctgggcaagatcctgatggccatcagagacgccggcttcgagatcagcgccatgcagatgttcaacatggacagagtgaacgtggaggagttctacgaggtgtacaagggcgtggtgaccgagtaccacgacatggtgaccgagatgtacagcggcccctgcgtggccatggagatccagcagaacaacgccaccaagaccttcagagagttctgcggccccgccgaccccgagatcgccagacacctgagacccggcaccctgagagccatcttcggcaagaccaagatccagaacgccgtgcactgcaccgacctgcccgaggacggcctgctggaggtgcagtacttcttcaagatcctggacaactag

SEQ ID NO: 91300 - DNA, 1416 bp, synthetic construct
  misc_feature 1..1416: note = Description of Artificial Sequence: Synthetic coding sequence
  source 1..1416: mol_type = other DNA
atgcagagcaacaagaccttcaacctggagaagcagaaccacacccccagaaagcaccaccagcaccaccaccagcagcagcaccaccagcagcagcagcagcagcccccccccccccccatccccgccaacggccagcaggccagcagccagaacgagggcctgaccatcgacctgaagaacttcagaaagcccggcgagaagaccttcacccagagaagcagactgttcgtgggcaacctgccccccgacatcaccgaggaggagatgagaaagctgttcgagaagtacggcaaggccggcgaggtgttcatccacaaggacaagggcttcggcttcatcagactggagaccagaaccctggccgagatcgccaaggtggagctggacaacatgcccctgagaggcaagcagctgagagtgagattcgcctgccacagcgccagcctgaccgtgagaaacctgccccagtacgtgagcaacgagctgctggaggaggccttcagcgtgttcggccaggtggagagagccgtggtgatcgtggacgacagaggcagacccagcggcaagggcatcgtggagttcagcggcaagcccgccgccagaaaggccctggacagatgcagcgagggcagcttcctgctgaccaccttccccagacccgtgaccgtggagcccatggaccagctggacgacgaggagggcctgcccgagaagctggtgatcaagaaccagcagttccacaaggagagagagcagccccccagattcgcccagcccggcagcttcgagtacgagtacgccatgagatggaaggccctgatcgagatggagaagcagcagcaggaccaggtggacagaaacatcaaggaggccagagagaagctggagatggagatggaggccgccagacacgagcaccaggtgatgctgatgagacaggacctgatgagaagacaggaggagctgagaagaatggaggagctgcacaaccaggaggtgcagaagagaaagcagctggagctgagacaggaggaggagagaagaagaagagaggaggagatgagaagacagcaggaggagatgatgagaagacagcaggagggcttcaagggcaccttccccgacgccagagagcaggagatcagaatgggccagatggccatgggcggcgccatgggcatcaacaacagaggcgccatgccccccgcccccgtgcccgccggcacccccgccccccccggccccgccaccatgatgcccgacggcaccctgggcctgaccccccccaccaccgagagattcggccaggccgccaccatggagggcatcggcgccatcggcggcaccccccccgccttcaacagagccgcccccggcgccgagttcgcccccaacaagagaagaagatactag

SEQ ID NO: 91301 - DNA, 1416 bp, synthetic construct; identical to SEQ ID NO: 91300
  misc_feature 1..1416: note = Description of Artificial Sequence: Synthetic coding sequence
  source 1..1416: mol_type = other DNA

SEQ ID NO: 91302 - DNA, 1416 bp, synthetic construct; identical to SEQ ID NO: 91300
  misc_feature 1..1416: note = Description of Artificial Sequence: Synthetic coding sequence
  source 1..1416: mol_type = other DNA

SEQ ID NO: 91303 - DNA, 747 bp, synthetic construct
  misc_feature 1..747: note = Description of Artificial Sequence: Synthetic coding sequence
  source 1..747: mol_type = other DNA
atgcagagcaacaagaccttcaacctggagaagcagaaccacacccccagaaagcaccaccagcaccaccaccagcagcagcaccaccagcagcagcagcagcagcccccccccccccccatccccgccaacggccagcaggccagcagccagaacgagggcctgaccatcgacctgaagaacttcagaaagcccggcgagaagaccttcacccagagaagcagactgttcgtgggcaacctgccccccgacatcaccgaggaggagatgagaaagctgttcgagaagtacggcaaggccggcgaggtgttcatccacaaggacaagggcttcggcttcatcagactggagaccagaaccctggccgagatcgccaaggtggagctggacaacatgcccctgagaggcaagcagctgagagtgagattcgcctgccacagcgccagcctgaccgtgagaaacctgccccaggagagagagcagccccccagattcgcccagcccggcagcttcgagtacgagtacgccatgagatggaaggccctgatcgagatggagaagcagcagcaggaccaggtggacagaaacatcaaggaggccagagagaagctggagatggagatggaggccgccagacacgagcaccaggtgatgctgatgagacaggacctgatgagaagacaggaggagctgagaagaatggaggagctgcacaaccaggaggtgcagaagagaaagcagctgtag

SEQ ID NO: 91304 - DNA, 708 bp, synthetic construct
  misc_feature 1..708: note = Description of Artificial Sequence: Synthetic coding sequence
  source 1..708: mol_type = other DNA
tgacccgacatcaccgaggaggagatgagaaagctgttcgagaagtacggcaaggccggcgaggtgttcatccacaaggacaagggcttcggcttcatcagactggtggagagagccgtggtgatcgtggacgacagaggcagacccagcggcaagggcatcgtggagttcagcggcaagcccgccgccagaaaggccctggacagatgcagcgagggcagcttcctgctgaccaccttccccagacccgtgaccgtggagcccatggaccagctggacgacgaggagggcctgcccgagaagctggtgatcaagaaccagcagttccacaaggagagagagcagccccccagattcgcccagcccggcagcttcgagtacgagtacgccatgagatggaaggccctgatcgagatggagaagcagcagcaggaccaggtggacagaaacatcaaggaggccagagagaagctggagatggagatggaggccgccagacacgagcaccaggtgatgctgatgagacaggacctgatgagaagacaggaggagctgagaagaatggaggagctgcacaaccaggaggtgcagaagagaaagcagctggagctgagacaggaggaggagagaagaagaagagaggaggagatgagaagacagcaggaggagatgatgagaagacagcaggagggcttcaagggcacctag

SEQ ID NO: 91305 - DNA, 375 bp, synthetic construct
  misc_feature 1..375: note = Description of Artificial Sequence: Synthetic coding sequence
  source 1..375: mol_type = other DNA
atgcagagcaacaagaccttcaacctggagaagcagaaccacacccccagaaagcaccaccagcaccaccaccagcagcagcaccaccagcagcagcagcagcagcccccccccccccccatccccgccaacggccagcaggccagcagccagaacgagggcctgaccatcgacctgaagaacttcagaaagcccggcgagaagaccttcacccagagaagcagactgttcgtgggcaacctgccccccgacatcaccgaggaggagatgagaaagctgttcgagaagtacggcaaggagaccagaaccctggccgagatcgccaaggtggagctggacaacatgcccctgagaggcaagcagctgagagtgtag

SEQ ID NO: 91306 - DNA, 201 bp, synthetic construct
  misc_feature 1..201: note = Description of Artificial Sequence: Synthetic coding sequence
  source 1..201: mol_type = other DNA
atgcagagcaacaagaccttcaacctggagaagcagaaccacacccccagaaagcaccaccagcaccaccaccagcagcagcaccaccagcagcagcagcagcagcccccccccccccccatccccgccaacggccagcaggccagcagccagaacgagggcctgaccatcgacctgaagaacttcagaaagcccggctag

SEQ ID NO: 91307 - DNA, 624 bp, synthetic construct
  misc_feature 1..624: note = Description of Artificial Sequence: Synthetic coding sequence
  source 1..624: mol_type = other DNA
atgcagagcaacaagaccttcaacctggagaagcagaaccacacccccagaaagcaccaccagcaccaccaccagcagcagcaccaccagcagcagcagcagcagcccccccccccccccatccccgccaacggccagcaggccagcagccagaacgagggcctgaccatcgacctgaagaacttcagaaagcccggcgagaagaccttcacccagagaagcagactgttcgtgggcaacctgccccccgacatcaccgaggaggagatgagaaagctgttcgagaagtacggcaaggccggcgaggtgttcatccacaaggacaagggcttcggcttcatcagactggagaccagaaccctggccgagatcgccaaggtggagctggacaacatgcccctgagaggcaagcagctgagagtgagattcgcctgccacagcgccagcctgaccgtgagaaacctgccccagtacgtgagcaacgagctgctggaggaggccttcagcgtgttcggccaggtggagagagccgtggtgatcgtggacgacagaggcagacccagcggcaagggcatcgtggagttcagcggcaagcccgccgccagaaaggccctggacagatag

SEQ ID NO: 91308 - DNA, 1149 bp, synthetic construct
  misc_feature 1..1149: note = Description of Artificial Sequence: Synthetic coding sequence
  source 1..1149: mol_type = other DNA
atgagaaagctgttcgagaagtacggcaaggccggcgaggtgttcatccacaaggacaagggcttcggcttcatcagactggagaccagaaccctggccgagatcgccaaggtggagctggacaacatgcccctgagaggcaagcagctgagagtgagattcgcctgccacagcgccagcctgaccgtgagaaacctgccccagtacgtgagcaacgagctgctggaggaggccttcagcgtgttcggccaggtggagagagccgtggtgatcgtggacgacagaggcagacccagcggcaagggcatcgtggagttcagcggcaagcccgccgccagaaaggccctggacagatgcagcgagggcagcttcctgctgaccaccttccccagacccgtgaccgtggagcccatggaccagctggacgacgaggagggcctgcccgagaagctggtgatcaagaaccagcagttccacaaggagagagagcagccccccagattcgcccagcccggcagcttcgagtacgagtacgccatgagatggaaggccctgatcgagatggagaagcagcagcaggaccaggtggacagaaacatcaaggaggccagagagaagctggagatggagatggaggccgccagacacgagcaccaggtgatgctgatgagacaggacctgatgagaagacaggaggagctgagaagaatggaggagctgcacaaccaggaggtgcagaagagaaagcagctggagctgagacaggaggaggagagaagaagaagagaggaggagatgagaagacagcaggaggagatgatgagaagacagcaggagggcttcaagggcaccttccccgacgccagagagcaggagatcagaatgggccagatggccatgggcggcgccatgggcatcaacaacagaggcgccatgccccccgcccccgtgcccgccggcacccccgccccccccggccccgccaccatgatgcccgacggcaccctgggcctgaccccccccaccaccgagagattcggccaggccgccaccatggagggcatcggcgccatcggcggcaccccccccgccttcaacagagccgcccccggcgccgagttcgcccccaacaagagaagaagatactag

SEQ ID NO: 91309 - DNA, 3048 bp, synthetic construct
  misc_feature 1..3048: note = Description of Artificial Sequence: Synthetic coding sequence
  source 1..3048: mol_type = other DNA
atgggcgccgagagaagactgctgagcatcaaggaggccttcagactggcccagcagccccaccagaaccaggccaagctggtggtggccctgagcagaacctacagaaccatggacgacaagaccgtgttccacgaggagttcatccactacctgaagtacgtgatggtggtgtacaagagagagcccgccgtggagagagtgatcgagttcgccgccaagttcgtgaccagcttccaccagagcgacatggaggacgacgaggaggaggaggacggcggcctgctgaactacctgttcaccttcctgctgaagagccacgaggccaacagcaacgccgtgagattcagagtgtgcctgctgatcaacaagctgctgggcagcatgcccgagaacgcccagatcgacgacgacgtgttcgacaagatcaacaaggccatgctgatcagactgaaggacaagatccccaacgtgagaatccaggccgtgctggccctgagcagactgcaggaccccaaggacgacgagtgccccgtggtgaacgcctacgccaccctgatcgagaacgacagcaaccccgaggtgagaagagccgtgctgagctgcatcgcccccagcgccaagaccctgcccaagatcgtgggcagaaccaaggacgtgaaggaggccgtgagaaagctggcctaccaggtgctggccgagaaggtgcacatgagagccatgagcatcgcccagagagtgatgctgctgcagcagggcctgaacgacagaagcgacgccgtgaagcaggccatgcagaagcacctgctgcagggctggctgagattcagcgagggcaacatcctggagctgctgcacagactggacgtggagaacagcagcgaggtggccgtgagcgtgctgaacgccctgttcagcatcacccccctgagcgagctggtgggcctgtgcaagaacaacgacggcagaaagctgatccccgtggagaccctgacccccgagatcgccctgtactggtgcgccctgtgcgagtacctgaagagcaagggcgacgagggcgaggagttcctggagcagatcctgcccgagcccgtggtgtacgccgactacctgctgagctacatccagagcatccccgtggtgaacgaggagcacagaggcgacttcagctacatcggcaacctgatgaccaaggagttcatcggccagcagctgatcctgatcatcaagagcctggacaccagcgaggagggcggcagaaagaagctgctggccgtgctgcaggagatcctgatcctgcccaccatccccatcagcctggtgagcttcctggtggagagactgctgcacatcatcatcgacgacaacaagagaacccagatcgtgaccgagatcatcagcgagatcagagcccccatcgtgaccgtgggcgtgaacaacgaccccgccgacgtgagaaagaaggagctgaagatggccgagatcaaggtgaagctgatcgaggccaaggaggccctggagaactgcatcaccctgcaggacttcaacagagccagcgagctgaaggaggagatcaaggccctggaggacgccagaatcaacctgctgaaggagaccgagcagctggagatcaaggaggtgcacatcgagaagaacgacgccgagaccctgcagaagtgcctgatcctgtgctacgagctgctgaagcagatgagcatcagcaccggcctgagcgccaccatgaacggcatcatcgagagcctgatcctgcccggcatcatcagcatccaccccgtggtgagaaacctggccgtgctgtgcctgggctgctgcggcctgcagaaccaggacttcgccagaaagcacttcgtgctgctgctgcaggtgctgcagatcgacgacgtgaccatcaagatcagcgccctgaaggccatcttcgaccagctgatgaccttcggcatcgagcccttcaagaccaagaagatcaagaccctgcactgcgagggcaccgagatcaacagcgacgacgagcaggagagcaaggaggtggaggagaccgccaccgccaagaacgtgctgaagctgctgagcgacttcctggacagcgaggtgagcgagctgagaaccggcgccgccgagggcctggccaagctgatgttcagcggcctgctggtgagcagcagaatcctgagcagactgatcctgctgtggtacaaccccgtgaccgaggaggacgtgcagctgagacactgcctgggcgtgttcttccccgtgttcgcctacgccagcagaaccaaccaggagtgcttcgaggaggccttcctgcccaccctgcagaccctggccaacgcccccgccagcagccccctggccgagatcgacatcaccaacgtggccgagctgctggtggacctgaccagacccagcggcctgaacccccaggccaagaccagccaggactaccaggccctgaccgtgcacgacaacctggccatgaagatctgcaacgagatcctgaccagcccctgcagccccgagatcagagtgtacaccaaggccctgagcagcctggagctgagcagccacctggccaaggacctgctggtgctgctgaacgagatcctggagcaggtgaaggacagaacctgcctgagagccctggagaagatcaagatccagctggagaagggcaacaaggagttcggcgaccaggccgaggccgcccaggacgccaccctgaccaccaccaccttccagaacgaggacgagaagaacaaggaggtgtacatgacccccctgagaggcgtgaaggccacccaggccagcaagagcacccagctgaagaccaacagaggccagagaaaggtgaccgtgagcgccagaaccaacagaagatgccagaccgccgaggccgacagcgagagcgaccacgaggtgcccgagcccgagagcgagatgaagatgagactgcccagaagagccaagaccgccgccctggagaagagcaagctgaacctggcccagttcctgaacgaggacctgagctag

SEQ ID NO: 91310 - DNA, 951 bp, synthetic construct
  misc_feature 1..951: note = Description of Artificial Sequence: Synthetic coding sequence
  source 1..951: mol_type = other DNA
atgagcggcgacagcagcggcagaggccccgagggcagaggcagaggcagagacccccacagagacagaaccagaagcagaagcagaagcagaagccccctgagccccagaagcagaagaggcagcgccagagagagaagagaggcccccgagagacccagcctggaggacaccgagcccagcgacagcggcgacgagatgatggaccccgccagcctggaggccgaggccgaccagggcctgtgcagacagatcagacaccagtacagagccctgatcaacagcgtgcagcagaacagagaggacatcctgaacgccggcgacaagctgaccgaggtgctggaggaggccaacaccctgttcaacgaggtgagcagagccagagaggccgtgctggacgcccacttcctggtgctggccagcgacctgggcaaggagaaggccaagcagctgagaagcgacctgagcagcttcgacatgctgagatacgtggagaccctgctgacccacatgggcgtgaaccccctggaggccgaggagctgatcagagacgaggacagccccgacttcgagttcatcgtgtacgacagctggaagatcaccggcagaaccgccgagaacaccttcaacaagacccacaccttccacttcctgctgggcagcatctacggcgagtgccccgtgcccaagcccagagtggacagacccagaaaggtgcccgtgatccaggaggagagagccatgcccgcccagctgagaagaatggaggagagccaccaggaggccaccgagaaggaggtggagagaatcctgggcctgctgcagacctacttcagagaggacagagacagcctgaccctgagccccagactggagtgcagcggcaccatcagcacccactgcaacctgcacctgctggacagcagcaacagccccgccagcgccagctag

SEQ ID NO: 91311 - DNA, 1158 bp, synthetic construct
  misc_feature 1..1158: note = Description of Artificial Sequence: Synthetic coding sequence
  source 1..1158: mol_type = other DNA
atgagcggcgacagcagcggcagaggccccgagggcagaggcagaggcagagacccccacagagacagaaccagaagcagaagcagaagcagaagccccctgagccccagaagcagaagaggcagcgccagagagagaagagaggcccccgagagacccagcctggaggacaccgagcccagcgacagcggcgacgagatgatggaccccgccagcctggaggccgaggccgaccagggcctgtgcagacagatcagacaccagtacagagccctgatcaacagcgtgcagcagaacagagaggacatcctgaacgccggcgacaagctgaccgaggtgctggaggaggccaacaccctgttcaacgaggtgagcagagccagagaggccgtgctggacgcccacttcctggtgctggccagcgacctgggcaaggagaaggccaagcagctgagaagcgacctgagcagcttcgacatgctgagatacgtggagaccctgctgacccacatgggcgtgaaccccctggaggccgaggagctgatcagagacgaggacagccccgacttcgagttcatcgtgtacgacagctggaagatcaccggcagaaccgccgagaacaccttcaacaagacccacaccttccacttcctgctgggcagcatctacggcgagtgccccgtgcccaagcccagagtggacagacccagaaaggtgcccgtgatccaggaggagagagccatgcccgcccagctgagaagaatggaggagagccaccaggaggccaccgagaaggaggtggagagaatcctgggcctgctgcagacctacttcagagaggaccccgacacccccatgagcttcttcgacttcgtggtggacccccacagcttccccagaaccgtggagaacatcttccacgtgagcttcatcatcagagacggcttcgccagaatcagactggaccaggacagactgcccgtgatcgagcccgtgagcatcaacgaggagaacgagggcttcgagcacaacacccaggtgagaaaccagggcatcatcgccctgagctacagagactgggaggagatcgtgaagaccttcgagatcagcgagcccgtgatcacccccagccagagacagcagaagcccagcgcctag

SEQ ID NO: 91312 - DNA, 519 bp, synthetic construct
  misc_feature 1..519: note = Description of Artificial Sequence: Synthetic coding sequence
  source 1..519: mol_type = other DNA
atgctgagatacgtggagaccctgctgacccacatgggcgtgaaccccctggaggccgaggagctgatcagagacgaggacagccccgacttcgagttcatcgtgtacgacagctggaagatcaccggcagaaccgccgagaacaccttcaacaagacccacaccttccacttcctgctgggcagcatctacggcgagtgccccgtgcccaagcccagagtggacagacccagaaaggtgcccgtgatccaggaggagagagccatgcccgcccagctgagaagaatggaggagagccaccaggaggccaccgagaaggaggtggagagaatcctgggcctgctgcagacctacttcagagaggaccccgacacccccatgagcttcttcgacttcgtggtggacccccacagcttccccagaaccgtggagaacatcttccacgtgagcttcatcatcagagacggcttcgccagaatcagactggaccaggacagactgcccgtgatcggcaagtag

SEQ ID NO: 91313 - DNA, 2574 bp, synthetic construct
  misc_feature 1..2574: note = Description of Artificial Sequence: Synthetic coding sequence
  source 1..2574: mol_type = other DNA
atggccaaggccaagaaggtgggcgccagaagaaaggccagcggcgcccccgccggcgccagaggcggccccgccaaggccaacagcaaccccttcgaggtgaaggtgaacagacagaagttccagatcctgggcagaaagaccagacacgacgtgggcctgcccggcgtgagcagagccagagccctgagaaagagaacccagaccctgctgaaggagtacaaggagagagacaagagcaacgtgttcagagacaagagattcggcgagtacaacagcaacatgagccccgaggagaagatgatgaagagattcgccctggagcagcagagacaccacgagaagaagagcatctacaacctgaacgaggacgaggagctgacccactacggccagagcctggccgacatcgagaagcacaacgacatcgtggacagcgacagcgacgccgaggacagaggcaccctgagcgccgagctgaccgccgcccacttcggcggcggcggcggcctgctgcacaagaagacccagcaggagggcgaggagagagagaagcccaagagcagaaaggagctgatcgaggagctgatcgccaagagcaagcaggagaagagagagagacaggcccagagagaggacgccctggagctgaccgagaagctggaccaggactggaaggagatccagaccctgctgagccacaagacccccaagagcgagaacagagacaagaaggagaagcccaagcccgacgcctacgacatgatggtgagagagctgggcttcgagatgaaggcccagcccagcaacagaatgaagaccgaggccgagctggccaaggaggagcaggagcacctgagaaagctggaggccgagagactgagaagaatgctgggcaaggacgaggacgagaacgtgaagaagcccaagcacatgagcgccgacgacctgaacgacggcttcgtgctggacaaggacgacagaagactgctgagctacaaggacggcaagatgaacgtggaggaggacgtgcaggaggagcagagcaaggaggccagcgaccccgagagcaacgaggaggagggcgacagcagcggcggcgaggacaccgaggagagcgacagccccgacagccacctggacctggagagcaacgtggagagcgaggaggagaacgagaagcccgccaaggagcagagacagacccccggcaagggcctgatcagcggcaaggagagagccggcaaggccaccagagacgagctgccctacaccttcgccgcccccgagagctacgaggagctgagaagcctgctgctgggcagaagcatggaggagcagctgctggtggtggagagaatccagaagtgcaaccaccccagcctggccgagggcaacaaggccaagctggagaagctgttcggcttcctgctggagtacgtgggcgacctggccaccgacgacccccccgacctgaccgtgatcgacaagctggtggtgcacctgtaccacctgtgccagatgttccccgagagcgccagcgacgccatcaagttcgtgctgagagacgccatgcacgagatggaggagatgatcgagaccaagggcagagccgccctgcccggcctggacgtgctgatctacctgaagatcaccggcctgctgttccccaccagcgacttctggcaccccgtggtgacccccgccctggtgtgcctgagccagctgctgaccaagtgccccatcctgagcctgcaggacgtggtgaagggcctgttcgtgtgctgcctgttcctggagtacgtggccctgagccagagattcatccccgagctgatcaacttcctgctgggcatcctgtacatcgccacccccaacaaggccagccagggcagcaccctggtgcaccccttcagagccctgggcaagaacagcgagctgctggtggtgagcgccagagaggacgtggccacctggcagcagagcagcctgagcctgagatgggccagcagactgagagcccccaccagcaccgaggccaaccacatcagactgagctgcctggccgtgggcctggccctgctgaagagatgcgtgctgatgtacggcagcctgcccagcttccacgccatcatgggccccctgcaggccctgctgaccgaccacctggccgactgcagccacccccaggagctgcaggagctgtgccagagcaccctgaccgagatggagagccagaagcagctgtgcagacccctgacctgcgagaagagcaagcccgtgcccctgaagctgttcacccccagactggtgaaggtgctggagttcggcagaaagcagggcagcagcaaggaggagcaggagagaaagagactgatccacaagcacaagagagagttcaagggcgccgtgagagagatcagaaaggacaaccagttcctggccagaatgcagctgagcgagatcatggagagagacgccgagagaaagagaaaggtgaagcagctgttcaacagcctggccacccaggagggcgagtggaaggccctgaagagaaagaagttcaagaagtag

SEQ ID NO: 91314 - DNA, 2421 bp, synthetic construct
  misc_feature 1..2421: note = Description of Artificial Sequence: Synthetic coding sequence
  source 1..2421: mol_type = other DNA
atggccaaggccaagaaggtgggcgccagaagaaaggccagcggcgcccccgccggcgccagaggcggccccgccaaggccaacagcaaccccttcgaggtgaaggtgaacagacagaagttccagatcctgggcagaaagaccagacacgacgtgggcctgcccggcgtgagcagagccagagccctgagaaagagaacccagaccctgctgaaggagtacaaggagagagacaagagcaacgtgttcagagacaagagattcggcgagtacaacagcaacatgagccccgaggagaagatgatgaagagattcgccctggagcagcagagacaccacgagaagaagagcatctacaacctgaacgaggacgaggagctgacccactacggccagagcctggccgacatcgagaagcacaacgacatcgtggacagcgacagcgacgccgaggacagaggcaccctgagcgccgagctgaccgccgcccacttcggcggcggcggcggcctgctgcacaagaagacccagcaggagggcgaggagagagagaagcccaagagcagaaaggagctgatcgaggagctgatcgccaagagcaagcaggagaagagagagagacaggcccagagagaggacgccctggagctgaccgagaagctggaccaggactggaaggagatccagaccctgctgagccacaagacccccaagagcgagaacagagacaagaaggagaagcccaagcccgacgcctacgacatgatggtgagagagctgggcttcgagatgaaggcccagcccagcaacagaatgaagaccgaggccgagctggccaaggaggagcaggagcacctgagaaagctggaggccgagagactgagaagaatgctgggcaaggacgaggacgagaacgtgaagaagcccaagcacatgagcgccgacgacctgaacgacggcttcgtgctggacaaggacgacagaagactgctgagctacaaggacggcaagatgaacgtggaggaggacgtgcaggaggagcagagcaaggaggccagcgaccccgagagcaacgaggaggagggcgacagcagcggcggcgaggacaccgaggagagcgacagccccgacagccacctggacctggagagcaacgtggagagcgaggaggagaacgagaagcccgccaaggagcagagacagacccccggcaagggcctgatcagcggcaaggagagagccggcaaggccaccagagacgagctgccctacaccttcgccgcccccgagagctacgaggagctgagaagcctgctgctgggcagaagcatggaggagcagctgctggtggtggagagaatccagaagtgcaaccaccccagcctggccgagggcaacaaggccaagctggagaagctgttcggcttcctgctggagtacgtgggcgacctggccaccgacgacccccccgacctgaccgtgatcgacaagctggtggtgcacctgtaccacctgtgccagatgttccccgagagcgccagcgacgccatcaagttcgtgctgagagacgccatgcacgagatggaggagatgatcgagaccaagggcagagccgccctgcccggcctggacgtgctgatctacctgaagatcaccggcctgctgttccccaccagcgacttctggcaccccgtggtgacccccgccctggtgtgcctgagccagctgctgaccaagtgccccatcctgagcctgcaggacgtggtgaagggcctgttcgtgtgctgcctgttcctggagtacgtggccctgagccagagattcatccccgagctgatcaacttcctgctgggcatcctgtacatcgccacccccaacaaggccagccagggcagcaccctggtgcaccccttcagagccctgggcaagaacagcgagctgctggtggtgagcgccagagaggacgtggccacctggcagcagagcagcctgagcctgagatgggccagcagactgagagcccccaccagcaccgaggccaaccacatcagactgagctgcctggccgtgggcctggccctgctgaagagatgcgtgctgatgtacggcagcctgcccagcttccacgccatcatgggccccctgcaggccctgctgaccgaccacctggccgactgcagccacccccaggagctgcaggagctgtgccagagcaccctgaccgagatggagagccagaagcagctgtgcagacccctgacctgcgagaagagcaagcccgtgcccctgaagctgttcacccccagactggtgagcaacagcagaccccaggtgatccacctgccctggccccccaactacagatgcgagccccagcaccccgccaagaaggtgatcttcttcagagtgatcatgctgtag

SEQ ID NO: 91315 - DNA, 2574 bp, synthetic construct; identical to SEQ ID NO: 91313
  misc_feature 1..2574: note = Description of Artificial Sequence: Synthetic coding sequence
  source 1..2574: mol_type = other DNA

SEQ ID NO: 91316 - DNA, 1728 bp, synthetic construct
  misc_feature 1..1728: note = Description of Artificial Sequence: Synthetic coding sequence
  source 1..1728: mol_type = other DNA
atgaagagattcgccctggagcagcagagacaccacgagaagaagagcatctacaacctgaacgaggacgaggagctgacccactacggccagagcctggccgacatcgagaagcacaacgacatcgtggacagcgacagcgacgccgaggacagaggcaccctgagcgccgagctgaccgccgcccacttcggcggcggcggcggcctgctgcacaagaagacccagcaggagggcgaggagagagagaagcccaagagcagaaaggagctgatcgaggagctgatcgccaagagcaagcaggagaagagagagagacaggcccagagagaggacgccctggagctgaccgagaagctggaccaggactggaaggagatccagaccctgctgagccacaagacccccaagagcgagaacagagacaagaaggagaagcccaagcccgacgcctacgacatgatggtgagagagctgggcttcgagatgaaggcccagcccagcaacagaatgaagaccgaggccgagctggccaaggaggagcaggagcacctgagaaagctggaggccgagagactgagaagaatgctgggcaaggacgaggacgagaacgtgaagaagcccaagcacatgagcgccgacgacctgaacgacggcttcgtgctggacaaggacgacagaagactgctgagctacaaggacggcaagatgaacgtggaggaggacgtgcaggaggagcagagcaaggaggccagcgaccccgagagcaacgaggaggagggcgacagcagcggcggcgaggacaccgaggagagcgacagccccgacagccacctggacctggagagcaacgtggagagcgaggaggagaacgagaagcccgccaaggagcagagacagacccccggcaagggcctgatcagcggcaaggagagagccggcaaggccaccagagacgagctgccctacaccttcgccgcccccgagagctacgaggagctgagaagcctgctgctgggcagaagcatggaggagcagctgctggtggtggagagaatccagaagtgcaaccaccccagcctggccgagggcaacaaggccaagctggagaagctgttcggcttcctgctggagtacgtgggcgacctggccaccgacgacccccccgacctgaccgtgatcgacaagctggtggtgcacctgtaccacctgtgccagatgttccccgagagcgccagcgacgccatcaagttcgtgctgagagacgccatgcacgagatggaggagatgatcgagaccaagggcagagccgccctgcccggcctggacgtgctgatctacctgaagatcaccggcctgctgttccccaccagcgacttctggcaccccgtggtgacccccgccctggtgtgcctgagccagctgctgaccaagtgccccatcctgagcctgcaggacgtggtgaagggcctgttcgtgtgctgcctgttcctggagtacgtggccctgagccagagattcatccccgagctgatcaacttcctgctgggcatcctgtacatcgccacccccaacaaggccagccagggcagcaccctggtgcaccccttcagagccctgggcaagaacagcgagctgctggtggtgagcgccagagaggacgtggccacctggcagcagagcagcctgagcctgagatggtggagcagaatccccgacctgagatag

SEQ ID NO: 91317 - DNA, 2304 bp, synthetic construct
  misc_feature 1..2304: note = Description of Artificial Sequence: Synthetic coding sequence
  source 1..2304: mol_type = other DNA
atgggcagaagaagcagaggcagaagactgcagcagcagcagagacccgaggacgccgaggacggcgccgagggcggcggcaagagaggcgaggccggctgggagggcggctaccccgagatcgtgaaggagaacaagctgttcgagcactactaccaggagctgaagatcgtgcccgagggcgagtggggccagttcatggacgccctgagagagcccctgcccgccaccctgagaatcaccggctacaagagccacgccaaggagatcctgcactgcctgaagaacaagtacttcaaggagctggaggacctggaggtggacggccagaaggtggaggtgccccagcccctgagctggtaccccgaggagctggcctggcacaccaacctgagcagaaagatcctgagaaagagcccccacctggagaagttccaccagttcctggtgagcgagaccgagagcggcaacatcagcagacaggaggccgtgagcatgatcccccccctgctgctgaacgtgagaccccaccacaagatcctggacatgtgcgccgcccccggcagcaagaccacccagctgatcgagatgctgcacgccgacatgaacgtgcccttccccgagggcttcgtgatcgccaacgacgtggacaacaagagatgctacctgctggtgcaccaggccaagagactgagcagcccctgcatcatggtggtgaaccacgacgccagcagcatccccagactgcagatcgacgtggacggcagaaaggagatcctgttctacgacagaatcctgtgcgacgtgccctgcagcggcgacggcaccatgagaaagaacatcgacgtgtggaagaagtggaccaccctgaacagcctgcagctgcacggcctgcagctgagaatcgccaccagaggcgccgagcagctggccgagggcggcagaatggtgtacagcacctgcagcctgaaccccatcgaggacgaggccgtgatcgccagcctgctggagaagagcgagggcgccctggagctggccgacgtgagcaacgagctgcccggcctgaagtggatgcccggcatcacccagtggaaggtgatgaccaaggacggccagtggttcaccgactgggacgccgtgccccacagcagacacacccagatcagacccaccatgttcccccccaaggaccccgagaagctgcaggccatgcacctggagagatgcctgagaatcctgccccaccaccagaacaccggcggcttcttcgtggccgtgctggtgaagaagagcagcatgccctggaacaagagacagcccaagctgcagggcaagagcgccgagaccagagagagcacccagctgagccccgccgacctgaccgagggcaagcccaccgaccccagcaagctggagagccccagcttcaccggcaccggcgacaccgagatcgcccacgccaccgaggacctggagaacaacggcagcaagaaggacggcgtgtgcggccccccccccagcaagaagatgaagctgttcggcttcaaggaggaccccttcgtgttcatccccgaggacgaccccctgttcccccccatcgagaagttctacgccctggaccccagcttccccagaatgaacctgctgaccagaaccaccgagggcaagaagagacagctgtacatggtgagcaaggagctgagaaacgtgctgctgaacaacagcgagaagatgaaggtgatcaacaccggcatcaaggtgtggtgcagaaacaacagcggcgaggagttcgactgcgccttcagactggcccaggagggcatctacaccctgtaccccttcatcaacagcagaatcatcaccgtgagcatggaggacgtgaagatcctgctgacccaggagaaccccttcttcagaaagctgagcagcgagacctacagccaggccaaggacctggccaagggcagcatcgtgctgaagtacgagcccgacagcgccaaccccgacgccctgcagtgccccatcgtgctgtgcggctggagaggcaaggccagcatcagaaccttcgtgcccaagaacgagagactgcactacctgagaatgatgggcctggaggtgctgggcgagaagaagaaggagggcgtgatcctgaccaacgagagcgccgccagcaccggccagcccgacaacgacgtgaccgagggccagagagccggcgagcccaacagccccgacgccgaggaggccaacagccccgacgtgaccgccggctgcgaccccgccggcgtgcacccccccagatag

SEQ ID NO: 91318 - DNA, 1596 bp, synthetic construct
  misc_feature 1..1596: note = Description of Artificial Sequence: Synthetic coding sequence
  source 1..1596: mol_type = other DNA
atggtggtgaaccacgacgccagcagcatccccagactgcagatcgacgtggacggcagaaaggagatcctgttctacgacagaatcctgtgcgacgtgccctgcagcggcgacggcaccatgagaaagaacatcgacgtgtggaagaagtggaccaccctgaacagcctgcagctgcacggcctgcagctgagaatcgccaccagaggcgccgagcagctggccgagggcggcagaatggtgtacagcacctgcagcctgaaccccatcgaggacgaggccgtgatcgccagcctgctggagaagagcgagggcgccctggagctggccgacgtgagcaacgagctgcccggcctgaagtggatgcccggcatcacccagtggaaggtgatgaccaaggacggccagtggttcaccgactgggacgccgtgccccacagcagacacacccagatcagacccaccatgttcccccccaaggaccccgagaagctgcaggccatgcacctggagagatgcctgagaatcctgccccaccaccagaacaccggcggcttcttcgtggccgtgctggtgaagaagagcagcatgccctggaacaagagacagcccaagctgcagggcaagagcgccgagaccagagagagcacccagctgagccccgccgacctgaccgagggcaagcccaccgaccccagcaagctggagagccccagcttcaccggcaccggcgacaccgagatcgcccacgccaccgaggacctggagaacaacggcagcaagaaggacggcgtgtgcggccccccccccagcaagaagatgaagctgttcggcttcaaggaggaccccttcgtgttcatccccgaggacgaccccctgttcccccccatcgagaagttctacgccctggaccccagcttccccagaatgaacctgctgaccagaaccaccgagggcaagaagagacagctgtacatggtgagcaaggagctgagaaacgtgctgctgaacaacagcgagaagatgaaggtgatcaacaccggcatcaaggtgtggtgcagaaacaacagcggcgaggagttcgactgcgccttcagactggcccaggagggcatctacaccctgtaccccttcatcaacagcagaatcatcaccgtgagcatggaggacgtgaagatcctgctgacccaggagaaccccttcttcagaaagctgagcagcgagacctacagccaggccaaggacctggccaagggcagcatcgtgctgaagtacgagcccgacagcgccaaccccgacgccctgcagtgccccatcgtgctgtgcggctggagaggcaaggccagcatcagaaccttcgtgcccaagaacgagagactgcactacctgagaatgatgggcctggaggtgctgggcgagaagaagaaggagggcgtgatcctgaccaacgagagcgccgccagcaccggccagcccgacaacgacgtgaccgagggccagagagccggcgagcccaacagccccgacgccgaggaggccaacagccccgacgtgaccgccggctgcgaccccgccggcgtgcacccccccagatag

SEQ ID NO: 91319 - DNA, 2199 bp, synthetic construct
  misc_feature 1..2199: note = Description of Artificial Sequence: Synthetic coding sequence
  source 1..2199: mol_type = other DNA
atgggcagaagaagcagaggcagaagactgcagcagcagcagagacccgaggacgccgaggacggcgccgagggcggcggcaagagaggcgaggccggctgggagggcggctaccccgagatcgtgaaggagaacaagctgttcgagcactactaccaggagctgaagatcgtgcccgagggcgagtggggccagttcatggacgccctgagagagcccctgcccgccaccctgagaatcaccggctacaagagataccccgaggagctggcctggcacaccaacctgagcagaaagatcctgagaaagagcccccacctggagaagttccaccagttcctggtgagcgagaccgagagcggcaacatcagcagacaggaggccgtgagcatgatcccccccctgctgctgaacgtgagaccccaccacaagatcctggacatgtgcgccgcccccggcagcaagaccacccagctgatcgagatgctgcacgccgacatgaacgtgcccttccccgagggcttcgtgatcgccaacgacgtggacaacaagagatgctacctgctggtgcaccaggccaagagactgagcagcccctgcatcatggtggtgaaccacgacgccagcagcatccccagactgcagatcgacgtggacggcagaaaggagatcctgttctacgacagaatcctgtgcgacgtgccctgcagcggcgacggcaccatgagaaagaacatcgacgtgtggaagaagtggaccaccctgaacagcctgcagctgcacggcctgcagctgagaatcgccaccagaggcgccgagcagctggccgagggcggcagaatggtgtacagcacctgcagcctgaaccccatcgaggacgaggccgtgatcgccagcctgctggagaagagcgagggcgccctggagctggccgacgtgagcaacgagctgcccggcctgaagtggatgcccggcatcacccagtggaaggtgatgaccaaggacggccagtggttcaccgactgggacgccgtgccccacagcagacacacccagatcagacccaccatgttcccccccaaggaccccgagaagctgcaggccatgcacctggagagatgcctgagaatcctgccccaccaccagaacaccggcggcttcttcgtggccgtgctggtgaagaagagcagcatgccctggaacaagagacagcccaagctgcagggcaagagcgccgagaccagagagagcacccagctgagccccgccgacctgaccgagggcaagcccaccgaccccagcaagctggagagccccagcttcaccggcaccggcgacaccgagatcgcccacgccaccgaggacctggagaacaacggcagcaagaaggacggcgtgtgcggccccccccccagcaagaagatgaagctgttcggcttcaaggaggaccccttcgtgttcatccccgaggacgaccccctgttcccccccatcgagaagttctacgccctggaccccagcttccccagaatgaacctgctgaccagaaccaccgagggcaagaagagacagctgtacatggtgagcaaggagctgagaaacgtgctgctgaacaacagcgagaagatgaaggtgatcaacaccggcatcaaggtgtggtgcagaaacaacagcggcgaggagttcgactgcgccttcagactggcccaggagggcatctacaccctgtaccccttcatcaacagcagaatcatcaccgtgagcatggaggacgtgaagatcctgctgacccaggagaaccccttcttcagaaagctgagcagcgagacctacagccaggccaaggacctggccaagggcagcatcgtgctgaagtacgagcccgacagcgccaaccccgacgccctgcagtgccccatcgtgctgtgcggctggagaggcaaggccagcatcagaaccttcgtgcccaagaacgagagactgcactacctgagaatgatgggcctggaggtgctgggcgagaagaagaaggagggcgtgatcctgaccaacgagagcgccgccagcaccggccagcccgacaacgacgtgaccgagggccagagagccggcgagcccaacagccccgacgccgaggaggccaacagccccgacgtgaccgccggctgcgaccccgccggcgtgcacccccccagatag

SEQ ID NO: 91320 - DNA, 1785 bp, synthetic construct
  misc_feature 1..1785: note = Description of Artificial Sequence: Synthetic coding sequence
  source 1..1785: mol_type = other DNA
atggtgctgctgcacgtgctgttcgagcacgccgtgggctacgccctgctggccctgaaggaggtggaggagatcagcctgctgcagccccaggtggaggagagcgtgctgaacctgggcaagttccacagcatcgtgagactggtggccttctgccccttcgccagcagccaggtggccctggagaacgccaacgccgtgagcgagggcgtggtgcacgaggacctgagactgctgctggagacccacctgcccagcaagaagaagaaggtgctgctgggcgtgggcgaccccaagatcggcgccgccatccaggaggagctgggctacaactgccagaccggcggcgtgatcgccgagatcctgagaggcgtgagactgcacttccacaacctggtgaagggcctgaccgacctgagcgcctgcaaggcccagctgggcctgggccacagctacagcagagccaaggtgaagttcaacgtgaacagagtggacaacatgatcatccagagcatcagcctgctggaccagctggacaaggacatcaacaccttcagcatgagagtgagagagtggtacggctaccacttccccgagctggtgaagatcatcaacgacaacgccacctactgcagactggcccagttcatcggcaacagaagagagctgaacgaggacaagctggagaagctggaggagctgaccatggacggcgccaaggccaaggccatcctggacgccagcagaagcagcatgggcatggacatcagcgccatcgacctgatcaacatcgagagcttcagcagcagagtggtgagcctgagcgagtacagacagagcctgcacacctacctgagaagcaagatgagccaggtggcccccagcctgagcgccctgatcggcgaggccgtgggcgccagactgatcgcccacgccggcagcctgaccaacctggccaagtaccccgccagcaccgtgcagatcctgggcgccgagaaggccctgttcagagccctgaagaccagaggcaacacccccaagtacggcctgatcttccacagcaccttcatcggcagagccgccgccaagaacaagggcagaatcagcagatacctggccaacaagtgcagcatcgccagcagaatcgactgcttcagcgaggtgcccaccagcgtgttcggcgagaagctgagagagcaggtggaggagagactgagcttctacgagaccggcgagatccccagaaagaacctggacgtgatgaaggaggccatggtgcaggccgaggaggccgccgccgagatcaccagaaagctggagaagcaggagaagaagagactgaagaaggagaagaagagactggccgccctggccctggccagcagcgagaacagcagcagcacccccgaggagtgcgaggagatgagcgagaagcccaagaagaagaagaagcagaagccccaggaggtgccccaggagaacggcatggaggaccccagcatcagcttcagcaagcccaagaagaagaagagcttcagcaaggaggagctgatgagcagcgacctggaggagaccgccggcagcaccagcatccccaagagaaagaagagcacccccaaggaggagaccgtgaacgaccccgaggaggccggccacagaagcggcagcaagaagaagagaaagttcagcaaggaggagcccgtgagcagcggccccgaggaggccgtgggcaagagcagcagcaagaagaagaagaagttccacaaggccagccaggaggactag

SEQ ID NO: 91321 - DNA, 678 bp, synthetic construct
  misc_feature 1..678: note = Description of Artificial Sequence: Synthetic coding sequence
  source 1..678: mol_type = other DNA
atggacatcagcgccatcgacctgatcaacatcgagagcttcagcagcagagtggtgagcctgagcgagtacagacagagcctgcacacctacctgagaagcaagatgagccaggtggcccccagcctgagcgccctgatcggcgaggccgtgggcgccagactgatcgcccacgccggcagcctgaccaacctggccaagtaccccgccagcaccgtgcagatcctgggcgccgagaaggccctgttcagagccctgaagaccagaggcaacacccccaagtacggcctgatcttccacagcaccttcatcggcagagccgccgccaagaacaagggcagaatcagcagatacctggccaacaagtgcagcatcgccagcagaatcgactgcttcagcgaggtgcccaccagcgtgttcggcgagaagctgagagagcaggtggaggagagactgagcttctacgagaccggcgagatccccagaaagaacctggacgtgatgaaggaggccatggtgcaggccgaggaggccgccgccgagatcaccagaaagctggagaagcaggagaagaagagactgaagaaggagaagaagagactggccgccctggccctggccagcagcgagaacagcagcagcacccccgaggagtgcgaggagggcgacagatgctag

SEQ ID NO: 91322 - DNA, 660 bp, synthetic construct
  misc_feature 1..660: note = Description of Artificial Sequence: Synthetic coding sequence
  source 1..660: mol_type = other DNA
tgactgatcaacatcgagagcttcagcagcagagtggtgagcctgagcgagtacagacagagcctgcacacctacctgagaagcaagatgagccaggtggcccccagcctgagcgccctgatcggcgaggccgtgggcgccagactgatcgcccacgccggcagcctgaccaacctggccaagtaccccgccagcaccgtgcagatcctgggcgccgagaaggccctgttcagagccctgaagaccagaggcaacacccccaagtacggcctgatcttccacagcaccttcatcggcagagccgccgccaagaacaagggcagaatcagcagatacctggccaacaagtgcagcatcgccagcagaatcgactgcttcagcgaggtgcccaccagcgtgttcggcgagaagctgagagagcaggtggaggagagactgagcttctacgagaccggcgagatccccagaaagaacctggacgtgatgaaggaggccatggtgcaggccgaggaggccgccgccgagatcaccagaaagctggagaagcaggagaagaagagactgaagaaggagaagaagagactggccgccctggccctggccagcagcgagaacagcagcagcacccccgaggagtgcgaggagggcgacagatgctag

SEQ ID NO: 91323 - DNA, 846 bp, synthetic construct
  misc_feature 1..846: note = Description of Artificial Sequence: Synthetic coding sequence
  source 1..846: mol_type = other DNA
atggtgctgctgcacgtgctgttcgagcacgccgtgggctacgccctgctggccctgaaggaggtggaggagatcagcctgctgcagccccaggtggaggagagcgtgctgaacctgggcaagttccacagcatcgtgagactggtggccttctgccccttcgccagcagccaggtggccctggagaacgccaacgccgtgagcgagggcgtggtgcacgaggacctgagactgctgctggagacccacctgcccagcaagaagaagaaggtgctgctgggcgtgggcgaccccaagatcggcgccgccatccaggaggagctgggctacaactgccagaccggcggcgtgatcgccgagatcctgagaggcgtgagactgcacttccacaacctggtgaagggcctgaccgacctgagcgcctgcaaggcccagctgggcctgggccacagctacagcagagccaaggtgaagttcaacgtgaacagagtggacaacatgatcatccagagcatcagcctgctggaccagctggacaaggacatcaacaccttcagcatgagagtgagacagagcagatgcggcgagggcaaggccgtggccctgtggttcctgatgaagcagctgggccagggcgtgaccgtggccctgtgcagagagtggtacggctaccacttccccgagctggtgaagatcatcaacgacaacgccacctactgcagactggcccagttcatcggcaacagaagagagctgaacgaggacaagctggagaagctggaggagctgaccatggacggcgccaaggccaaggccatcctggacgccagcagaagcagcatgtag

SEQ ID NO: 91324 - DNA, 402 bp, synthetic construct
  misc_feature 1..402: note = Description of Artificial Sequence: Synthetic coding sequence
  source 1..402: mol_type = other DNA
atgagaaagcacgtgctggccgccagcttcagcatgctgagcctgctggtgatcatgggcgacaccgacagcaagaccgacagcagcttcatcatggacagcgaccccagaagatgcatgagacaccactacgtggacagcatcagccaccccctgtacaagtgcagcagcaagatggtgctgctggccagatgcgagggccactgcagccaggccagcagaagcgagcccctggtgagcttcagcaccgtgctgaagcagcccttcagaagcagctgccactgctgcagaccccagaccagcaagctgaaggccctgagactgagatgcagcggcggcatgagactgaccgccacctacagatacatcctgagctgccactgcgaggagtgcaacagctag

SEQ ID NO: 91325 - DNA, 7416 bp, synthetic construct
  misc_feature 1..7416: note = Description of Artificial Sequence: Synthetic coding sequence
  source 1..7416: mol_type = other DNA
atgcccgccctgagacccgccctgctgtgggccctgctggccctgtggctgtgctgcgccgcccccgcccacgccctgcagtgcagagacggctacgagccctgcgtgaacgagggcatgtgcgtgacctaccacaacggcaccggctactgcaagtgccccgagggcttcctgggcgagtactgccagcacagagacccctgcgagaagaacagatgccagaacggcggcacctgcgtggcccaggccatgctgggcaaggccacctgcagatgcgccagcggcttcaccggcgaggactgccagtacagcaccagccacccctgcttcgtgagcagaccctgcctgaacggcggcacctgccacatgctgagcagagacacctacgagtgcacctgccaggtgggcttcaccggcaaggagtgccagtggaccgacgcctgcctgagccacccctgcgccaacggcagcacctgcaccaccgtggccaaccagttcagctgcaagtgcctgaccggcttcaccggccagaagtgcgagaccgacgtgaacgagtgcgacatccccggccactgccagcacggcggcacctgcctgaacctgcccggcagctaccagtgccagtgcccccagggcttcaccggccagtactgcgacagcctgtacgtgccctgcgcccccagcccctgcgtgaacggcggcacctgcagacagaccggcgacttcaccttcgagtgcaactgcctgcccggcttcgagggcagcacctgcgagagaaacatcgacgactgccccaaccacagatgccagaacggcggcgtgtgcgtggacggcgtgaacacctacaactgcagatgccccccccagtggaccggccagttctgcaccgaggacgtggacgagtgcctgctgcagcccaacgcctgccagaacggcggcacctgcgccaacagaaacggcggctacggctgcgtgtgcgtgaacggctggagcggcgacgactgcagcgagaacatcgacgactgcgccttcgccagctgcacccccggcagcacctgcatcgacagagtggccagcttcagctgcatgtgccccgagggcaaggccggcctgctgtgccacctggacgacgcctgcatcagcaacccctgccacaagggcgccctgtgcgacaccaaccccctgaacggccagtacatctgcacctgcccccagggctacaagggcgccgactgcaccgaggacgtggacgagtgcgccatggccaacagcaacccctgcgagcacgccggcaagtgcgtgaacaccgacggcgccttccactgcgagtgcctgaagggctacgccggccccagatgcgagatggacatcaacgagtgccacagcgacccctgccagaacgacgccacctgcctggacaagatcggcggcttcacctgcctgtgcatgcccggcttcaagggcgtgcactgcgagctggagatcaacgagtgccagagcaacccctgcgtgaacaacggccagtgcgtggacaaggtgaacagattccagtgcctgtgcccccccggcttcaccggccccgtgtgccagatcgacatcgacgactgcagcagcaccccctgcctgaacggcgccaagtgcatcgaccaccccaacggctacgagtgccagtgcgccaccggcttcaccggcgtgctgtgcgaggagaacatcgacaactgcgaccccgacccctgccaccacggccagtgccaggacggcatcgacagctacacctgcatctgcaaccccggctacatgggcgccatctgcagcgaccagatcgacgagtgctacagcagcccctgcctgaacgacggcagatgcatcgacctggtgaacggctaccagtgcaactgccagcccggcaccagcggcgtgaactgcgagatcaacttcgacgactgcgccagcaacccctgcatccacggcatctgcatggacggcatcaacagatacagctgcgtgtgcagccccggcttcaccggccagagatgcaacatcgacatcgacgagtgcgccagcaacccctgcagaaagggcgccacctgcatcaacggcgtgaacggcttcagatgcatctgccccgagggcccccaccaccccagctgctacagccaggtgaacgagtgcctgagcaacccctgcatccacggcaactgcaccggcggcctgagcggctacaagtgcctgtgcgacgccggctgggtgggcatcaactgcgaggtggacaagaacgagtgcctgagcaacccctgccagaacggcggcacctgcgacaacctggtgaacggctacagatgcacctgcaagaagggcttcaagggctacaactgccaggtgaacatcgacgagtgcgccagcaacccctgcctgaaccagggcacctgcttcgacgacatcagcggctacacctgccactgcgtgctgccctacaccggcaagaactgccagaccgtgctggccccctgcagccccaacccctgcgagaacgccgccgtgtgcaaggagagccccaacttcgagagctacacctgcctgtgcgcccccggctggcagggccagagatgcaccatcgacatcgacgagtgcatcagcaagccctgcatgaaccacggcctgtgccacaacacccagggcagctacatgtgcgagtgcccccccggcttcagcggcatggactgcgaggaggacatcgacgactgcctggccaacccctgccagaacggcggcagctgcatggacggcgtgaacaccttcagctgcctgtgcctgcccggcttcaccggcgacaagtgccagaccgacatgaacgagtgcctgagcgagccctgcaagaacggcggcacctgcagcgactacgtgaacagctacacctgcaagtgccaggccggcttcgacggcgtgcactgcgagaacaacatcaacgagtgcaccgagagcagctgcttcaacggcggcacctgcgtggacggcatcaacagcttcagctgcctgtgccccgtgggcttcaccggcagcttctgcctgcacgagatcaacgagtgcagcagccacccctgcctgaacgagggcacctgcgtggacggcctgggcacctacagatgcagctgccccctgggctacaccggcaagaactgccagaccctggtgaacctgtgcagcagaagcccctgcaagaacaagggcacctgcgtgcagaagaaggccgagagccagtgcctgtgccccagcggctgggccggcgcctactgcgacgtgcccaacgtgagctgcgacatcgccgccagcagaagaggcgtgctggtggagcacctgtgccagcacagcggcgtgtgcatcaacgccggcaacacccactactgccagtgccccctgggctacaccggcagctactgcgaggagcagctggacgagtgcgccagcaacccctgccagcacggcgccacctgcagcgacttcatcggcggctacagatgcgagtgcgtgcccggctaccagggcgtgaactgcgagtacgaggtggacgagtgccagaaccagccctgccagaacggcggcacctgcatcgacctggtgaaccacttcaagtgcagctgcccccccggcaccagaggcctgctgtgcgaggagaacatcgacgactgcgccagaggcccccactgcctgaacggcggccagtgcatggacagaatcggcggctacagctgcagatgcctgcccggcttcgccggcgagagatgcgagggcgacatcaacgagtgcctgagcaacccctgcagcagcgagggcagcctggactgcatccagctgaccaacgactacctgtgcgtgtgcagaagcgccttcaccggcagacactgcgagaccttcgtggacgtgtgcccccagatgccctgcctgaacggcggcacctgcgccgtggccagcaacatgcccgacggcttcatctgcagatgcccccccggcttcagcggcgccagatgccagagcagctgcggccaggtgaagtgcagaaagggcgagcagtgcgtgcacaccgccagcggccccagatgcttctgccccagccccagagactgcgagagcggctgcgccagcagcccctgccagcacggcggcagctgccacccccagagacagcccccctactacagctgccagtgcgccccccccttcagcggcagcagatgcgagctgtacaccgccccccccagcaccccccccgccacctgcctgagccagtactgcgccgacaaggccagagacggcgtgtgcgacgaggcctgcaacagccacgcctgccagtgggacggcggcgactgcagcctgaccatggagaacccctgggccaactgcagcagccccctgccctgctgggactacatcaacaaccagtgcgacgagctgtgcaacaccgtggagtgcctgttcgacaacttcgagtgccagggcaacagcaagacctgcaagtacgacaagtactgcgccgaccacttcaaggacaaccactgcgaccagggctgcaacagcgaggagtgcggctgggacggcctggactgcgccgccgaccagcccgagaacctggccgagggcaccctggtgatcgtggtgctgatgccccccgagcagctgctgcaggacgccagaagcttcctgagagccctgggcaccctgctgcacaccaacctgagaatcaagagagacagccagggcgagctgatggtgtacccctactacggcgagaagagcgccgccatgaagaagcagagaatgaccagaagaagcctgcccggcgagcaggagcaggaggtggccggcagcaaggtgttcctggagatcgacaacagacagtgcgtgcaggacagcgaccactgcttcaagaacaccgacgccgccgccgccctgctggccagccacgccatccagggcaccctgagctaccccctggtgagcgtggtgagcgagagcctgacccccgagagaacccagctgctgtacctgctggccgtggccgtggtgatcatcctgttcatcatcctgctgggcgtgatcatggccaagagaaagagaaagcacggcagcctgtggctgcccgagggcttcaccctgagaagagacgccagcaaccacaagagaagagagcccgtgggccaggacgccgtgggcctgaagaacctgagcgtgcaggtgagcgaggccaacctgatcggcaccggcaccagcgagcactgggtggacgacgagggcccccagcccaagaaggtgaaggccgaggacgaggccctgctgagcgaggaggacgaccccatcgacagaagaccctggacccagcagcacctggaggccgccgacatcagaagaacccccagcctggccctgacccccccccaggccgagcaggaggtggacgtgctggacgtgaacgtgagaggccccgacggctgcacccccctgatgctggccagcctgagaggcggcagcagcgacctgagcgacgaggacgaggacgccgaggacagcagcgccaacatcatcaccgacctggtgtaccagggcgccagcctgcaggcccagaccgacagaaccggcgagatggccctgcacctggccgccagatacagcagagccgacgccgccaagagactgctggacgccggcgccgacgccaacgcccaggacaacatgggcagatgccccctgcacgccgccgtggccgccgacgcccagggcgtgttccagatcctgatcagaaacagagtgaccgacctggacgccagaatgaacgacggcaccacccccctgatcctggccgccagactggccgtggagggcatggtggccgagctgatcaactgccaggccgacgtgaacgccgtggacgaccacggcaagagcgccctgcactgggccgccgccgtgaacaacgtggaggccaccctgctgctgctgaagaacggcgccaacagagacatgcaggacaacaaggaggagacccccctgttcctggccgccagagagggcagctacgaggccgccaagatcctgctggaccacttcgccaacagagacatcaccgaccacatggacagactgcccagagacgtggccagagacagaatgcaccacgacatcgtgagactgctggacgagtacaacgtgacccccagcccccccggcaccgtgctgaccagcgccctgagccccgtgatctgcggccccaacagaagcttcctgagcctgaagcacacccccatgggcaagaagagcagaagacccagcgccaagagcaccatgcccaccagcctgcccaacctggccaaggaggccaaggacgccaagggcagcagaagaaagaagagcctgagcgagaaggtgcagctgagcgagagcagcgtgaccctgagccccgtggacagcctggagagcccccacacctacgtgagcgacaccaccagcagccccatgatcaccagccccggcatcctgcaggccagccccaaccccatgctggccaccgccgccccccccgcccccgtgcacgcccagcacgccctgagcttcagcaacctgcacgagatgcagcccctggcccacggcgccagcaccgtgctgcccagcgtgagccagctgctgagccaccaccacatcgtgagccccggcagcggcagcgccggcagcctgagcagactgcaccccgtgcccgtgcccgccgactggatgaacagaatggaggtgaacgagacccagtacaacgagatgttcggcatggtgctggcccccgccgagggcacccaccccggcatcgccccccagagcagaccccccgagggcaagcacatcaccacccccagagagcccctgccccccatcgtgaccttccagctgatccccaagggcagcatcgcccagcccgccggcgccccccagccccagagcacctgcccccccgccgtggccggccccctgcccaccatgtaccagatccccgagatggccagactgcccagcgtggccttccccaccgccatgatgccccagcaggacggccaggtggcccagaccatcctgcccgcctaccaccccttccccgccagcgtgggcaagtaccccaccccccccagccagcacagctacgccagcagcaacgccgccgagagaacccccagccacagcggccacctgcagggcgagcacccctacctgacccccagccccgagagccccgaccagtggagcagcagcagcccccacagcgccagcgactggagcgacgtgaccaccagccccacccccggcggcgccggcggcggccagagaggccccggcacccacatgagcgagcccccccacaacaacatgcaggtgtacgcctag

SEQ ID NO: 91326 - DNA, 711 bp, synthetic construct
  misc_feature 1..711: note = Description of Artificial Sequence: Synthetic coding sequence
  source 1..711: mol_type = other DNA
atgtgcgtgacctaccacaacggcaccggctactgcaagtgccccgagggcttcctgggcgagtactgccagcacagagacccctgcgagaagaacagatgccagaacggcggcacctgcgtggcccaggccatgctgggcaaggccacctgcagatgcgccagcggcttcaccggcgaggactgccagtacagcaccagccacccctgcttcgtgagcagaccctgcctgaacggcggcacctgccacatgctgagcagagacacctacgagtgcacctgccaggtgggcttcaccggcaaggagtgccagtggaccgacgcctgcctgagccacccctgcgccaacggcagcacctgcaccaccgtggccaaccagttcagctgcaagtgcctgaccggcttcaccggccagaagtgcgagaccgacgtgaacgagtgcgacatccccggccactgccagcacggcggcacctgcctgaacctgcccggcagctaccagtgccagtgcccccagggcttcaccggccagtactgcgacagcctgtacgtgccctgcgcccccagcccctgcgtgaacggcggcacctgcagacagaccggcgacttcaccttcgagtgcaactgcctgcccgagaccgtgagaagaggcaccgagctgtgggagagagacagacaggtgtggaacggcaaggagcacgacgagaactag

SEQ ID NO: 91327 - DNA, 720 bp, synthetic construct
  misc_feature 1..720: note = Description of Artificial Sequence: Synthetic coding sequence
  source 1..720: mol_type = other DNA
tgcagagacggctacgagccctgcgtgaacgagggcatgtgcgtgacctaccacaacggcaccggctactgcaagtgccccgagggcttcctgggcgagtactgccagcacagagacccctgcgagaagaacagatgccagaacggcggcacctgcgtggcccaggccatgctgggcaaggccacctgcagatgcgccagcggcttcaccggcgaggactgccagtacagcaccagccacccctgcttcgtgagcagaccctgcctgaacggcggcacctgccacatgctgagcagagacacctacgagtgcacctgccaggtgggcttcaccggcaaggagtgccagtggaccgacgcctgcctgagccacccctgcgccaacggcagcacctgcaccaccgtggccaaccagttcagctgcaagtgcctgaccggcttcaccggccagaagtgcgagaccgacgtgaacgagtgcgacatccccggccactgccagcacggcggcacctgcctgaacctgcccggcagctaccagtgccagtgcccccagggcttcaccggccagtactgcgacagcctgtacgtgccctgcgcccccagcccctgcgtgaacggcggcacctgcagacagaccggcgacttcaccttcgagtgcaactgcctgcccgcctgctggcccagaacccccgacctgagactgctgctgggcgagaagtag

SEQ ID NO: 91328 - DNA, 672 bp, synthetic construct
  misc_feature 1..672: note = Description of Artificial Sequence: Synthetic coding sequence
  source 1..672: mol_type = other DNA
atgtggatctgccccggcggcggcggcggcggcggcggcggcggcgacagagaggacgccagaccccccctgtgctgcggcagatgctggagaagcggctgcgccgccagaccccccagaatggtgagcatcggcctgagaggcgccgtgagaggcgccagaggctgccacctgggcagacccttcagccccagcgtgctgctgtgcgtgggcagacccggcagcgccgccggcgccgagagaggccacagcctgggcagccaggagttcggccacagaagaggccccctgccctggtgccccgccaacagaagaggcagcccccccagcgcccccagaggccccggccccctgaccagactgctgggcagaagagaggccggcagcaagagccagaagctgctgttcagaagcgccagagtgcagggcggcggccagttctgccccagcggcagcgccttcctgggcgtggagagagagcccaccgccggcctgggcggcgccgagagaagaaacgccagattctggagaggcgagagaggccagggcagacaggccaagagacccgcccccagccagcccgccagccccctgcccggcggcggcacctgggccggctgcgtgggcctggtgtggatgggcaccggcttctgcggcgcccccgagttctag

SEQ ID NO: 91329 - DNA, 2592 bp, synthetic construct
  misc_feature 1..2592: note = Description of Artificial Sequence: Synthetic coding sequence
  source 1..2592: mol_type = other DNA
atgtgcgtgacctaccacaacggcaccggctactgcaagtgccccgagggcttcctgggcgagtactgccagcacagagacccctgcgagaagaacagatgccagaacggcggcacctgcgtggcccaggccatgctgggcaaggccacctgcagatgcgccagcggcttcaccggcgaggactgccagtacagcaccagccacccctgcttcgtgagcagaccctgcctgaacggcggcacctgccacatgctgagcagagacacctacgagtgcacctgccaggtgggcttcaccggcaaggagtgccagtggaccgacgcctgcctgagccacccctgcgccaacggcagcacctgcaccaccgtggccaaccagttcagctgcaagtgcctgaccggcttcaccggccagaagtgcgagaccgacgtgaacgagtgcgacatccccggccactgccagcacggcggcacctgcctgaacctgcccggcagctaccagtgccagtgcccccagggcttcaccggccagtactgcgacagcctgtacgtgccctgcgcccccagcccctgcgtgaacggcggcacctgcagacagaccggcgacttcaccttcgagtgcaactgcctgcccggcttcgagggcagcacctgcgagagaaacatcgacgactgccccaaccacagatgccagaacggcggcgtgtgcgtggacggcgtgaacacctacaactgcagatgccccccccagtggaccggccagttctgcaccgaggacgtggacgagtgcctgctgcagcccaacgcctgccagaacggcggcacctgcgccaacagaaacggcggctacggctgcgtgtgcgtgaacggctggagcggcgacgactgcagcgagaacatcgacgactgcgccttcgccagctgcacccccggcagcacctgcatcgacagagtggccagcttcagctgcatgtgccccgagggcaaggccggcctgctgtgccacctggacgacgcctgcatcagcaacccctgccacaagggcgccctgtgcgacaccaaccccctgaacggccagtacatctgcacctgcccccagggctacaagggcgccgactgcaccgaggacgtggacgagtgcgccatggccaacagcaacccctgcgagcacgccggcaagtgcgtgaacaccgacggcgccttccactgcgagtgcctgaagggctacgccggccccagatgcgagatggacatcaacgagtgccacagcgacccctgccagaacgacgccacctgcctggacaagatcggcggcttcacctgcctgtgcatgcccggcttcaagggcgtgcactgcgagctggagatcaacgagtgccagagcaacccctgcgtgaacaacggccagtgcgtggacaaggtgaacagattccagtgcctgtgcccccccggcttcaccggccccgtgtgccagatcgacatcgacgactgcagcagcaccccctgcctgaacggcgccaagtgcatcgaccaccccaacggctacgagtgccagtgcgccaccggcttcaccggcgtgctgtgcgaggagaacatcgacaactgcgaccccgacccctgccaccacggccagtgccaggacggcatcgacagctacacctgcatctgcaaccccggctacatgggcgccatctgcagcgaccagatcgacgagtgctacagcagcccctgcctgaacgacggcagatgcatcgacctggtgaacggctaccagtgcaactgccagcccggcaccagcggcgtgaactgcgagatcaacttcgacgactgcgccagcaacccctgcatccacggcatctgcatggacggcatcaacagatacagctgcgtgtgcagccccggcttcaccggccagagatgcaacatcgacatcgacgagtgcgccagcaacccctgcagaaagggcgccacctgcatcaacggcgtgaacggcttcagatgcatctgccccgagggcccccaccaccccagctgctacagccaggtgaacgagtgcctgagcaacccctgcatccacggcaactgcaccggcggcctgagcggctacaagtgcctgtgcgacgccggctgggtgggcatcaactgcgaggtggacaagaacgagtgcctgagcaacccctgccagaacggcggcacctgcgacaacctggtgaacggctacagatgcacctgcaagaagggcttcaagggctacaactgccaggtgaacatcgacgagtgcgccagcaacccctgcctgaaccagggcacctgcttcgacgacatcagcggctacacctgccactgcgtgctgccctacaccggcggcagctggagataccagcagggccccgagggcatcctggacctggccctgagcgtgcccgagagccagtgccccggcctgtggggctgcaacgccccccccagagcccacagcagcgtggtgctgcccgccttcaccgactggatcctgagcttcgaggagaccctgtggccccccaagatgcaggtggtggacagccacctgcccaccctgtacttcagcatctag

SEQ ID NO: 91330 - DNA, 6966 bp, synthetic construct
  misc_feature 1..6966: note = Description of Artificial Sequence: Synthetic coding sequence
  source 1..6966: mol_type = other DNA
atgggccccggcgccagaggcagaagaagaagaagaagacccatgagccccccccccccccccccccccgtgagagccctgcccctgctgctgctgctggccggccccggcgccgccgcccccccctgcctggacggcagcccctgcgccaacggcggcagatgcacccagctgcccagcagagaggccgcctgcctgtgcccccccggctgggtgggcgagagatgccagctggaggacccctgccacagcggcccctgcgccggcagaggcgtgtgccagagcagcgtggtggccggcaccgccagattcagctgcagatgccccagaggcttcagaggccccgactgcagcctgcccgacccctgcctgagcagcccctgcgcccacggcgccagatgcagcgtgggccccgacggcagattcctgtgcagctgcccccccggctaccagggcagaagctgcagaagcgacgtggacgagtgcagagtgggcgagccctgcagacacggcggcacctgcctgaacacccccggcagcttcagatgccagtgccccgccggctacaccggccccctgtgcgagaaccccgccgtgccctgcgcccccagcccctgcagaaacggcggcacctgcagacagagcggcgacctgacctacgactgcgcctgcctgcccggcttcgagggccagaactgcgaggtgaacgtggacgactgccccggccacagatgcctgaacggcggcacctgcgtggacggcgtgaacacctacaactgccagtgcccccccgagtggaccggccagttctgcaccgaggacgtggacgagtgccagctgcagcccaacgcctgccacaacggcggcacctgcttcaacaccctgggcggccacagctgcgtgtgcgtgaacggctggaccggcgagagctgcagccagaacatcgacgactgcgccaccgccgtgtgcttccacggcgccacctgccacgacagagtggccagcttctactgcgcctgccccatgggcaagaccggcctgctgtgccacctggacgacgcctgcgtgagcaacccctgccacgaggacgccatctgcgacaccaaccccgtgaacggcagagccatctgcacctgcccccccggcttcaccggcggcgcctgcgaccaggacgtggacgagtgcagcatcggcgccaacccctgcgagcacctgggcagatgcgtgaacacccagggcagcttcctgtgccagtgcggcagaggctacaccggccccagatgcgagaccgacgtgaacgagtgcctgagcggcccctgcagaaaccaggccacctgcctggacagaatcggccagttcacctgcatctgcatggccggcttcaccggcacctactgcgaggtggacatcgacgagtgccagagcagcccctgcgtgaacggcggcgtgtgcaaggacagagtgaacggcttcagctgcacctgccccagcggcttcagcggcagcacctgccagctggacgtggacgagtgcgccagcaccccctgcagaaacggcgccaagtgcgtggaccagcccgacggctacgagtgcagatgcgccgagggcttcgagggcaccctgtgcgacagaaacgtggacgactgcagccccgacccctgccaccacggcagatgcgtggacggcatcgccagcttcagctgcgcctgcgcccccggctacaccggcaccagatgcgagagccaggtggacgagtgcagaagccagccctgcagacacggcggcaagtgcctggacctggtggacaagtacctgtgcagatgccccagcggcaccaccggcgtgaactgcgaggtgaacatcgacgactgcgccagcaacccctgcaccttcggcgtgtgcagagacggcatcaacagatacgactgcgtgtgccagcccggcttcaccggccccctgtgcaacgtggagatcaacgagtgcgccagcagcccctgcggcgagggcggcagctgcgtggacggcgagaacggcttcagatgcctgtgcccccccggcagcctgccccccctgtgcctgccccccagccacccctgcgcccacgagccctgcagccacggcatctgctacgacgcccccggcggcttcagatgcgtgtgcgagcccggctggagcggccccagatgcagccagagcctggccagagacgcctgcgagagccagccctgcagagccggcggcacctgcagcagcgacggcatgggcttccactgcacctgcccccccggcgtgcagggcagacagtgcgagctgctgagcccctgcacccccaacccctgcgagcacggcggcagatgcgagagcgcccccggccagctgcccgtgtgcagctgcccccagggctggcagggccccagatgccagcaggacgtggacgagtgcgccggccccgccccctgcggcccccacggcatctgcaccaacctggccggcagcttcagctgcacctgccacggcggctacaccggccccagctgcgaccaggacatcaacgactgcgaccccaacccctgcctgaacggcggcagctgccaggacggcgtgggcagcttcagctgcagctgcctgcccggcttcgccggccccagatgcgccagagacgtggacgagtgcctgagcaacccctgcggccccggcacctgcaccgaccacgtggccagcttcacctgcacctgcccccccggctacggcggcttccactgcgagcaggacctgcccgactgcagccccagcagctgcttcaacggcggcacctgcgtggacggcgtgaacagcttcagctgcctgtgcagacccggctacaccggcgcccactgccagcacgaggccgacccctgcctgagcagaccctgcctgcacggcggcgtgtgcagcgccgcccaccccggcttcagatgcacctgcctggagagcttcaccggcccccagtgccagaccctggtggactggtgcagcagacagccctgccagaacggcggcagatgcgtgcagaccggcgcctactgcctgtgcccccccggctggagcggcagactgtgcgacatcagaagcctgccctgcagagaggccgccgcccagatcggcgtgagactggagcagctgtgccaggccggcggccagtgcgtggacgaggacagcagccactactgcgtgtgccccgagggcagaaccggcagccactgcgagcaggaggtggacccctgcctggcccagccctgccagcacggcggcacctgcagaggctacatgggcggctacatgtgcgagtgcctgcccggctacaacggcgacaactgcgaggacgacgtggacgagtgcgccagccagccctgccagcacggcggcagctgcatcgacctggtggccagatacctgtgcagctgcccccccggcaccctgggcgtgctgtgcgagatcaacgaggacgactgcggccccggcccccccctggacagcggccccagatgcctgcacaacggcacctgcgtggacctggtgggcggcttcagatgcacctgcccccccggctacaccggcctgagatgcgaggccgacatcaacgagtgcagaagcggcgcctgccacgccgcccacaccagagactgcctgcaggaccccggcggcggcttcagatgcctgtgccacgccggcttcagcggccccagatgccagaccgtgctgagcccctgcgagagccagccctgccagcacggcggccagtgcagacccagccccggccccggcggcggcctgaccttcacctgccactgcgcccagcccttctggggccccagatgcgagagagtggccagaagctgcagagagctgcagtgccccgtgggcgtgccctgccagcagacccccagaggccccagatgcgcctgcccccccggcctgagcggccccagctgcagaagcttccccggcagcccccccggcgccagcaacgccagctgcgccgccgccccctgcctgcacggcggcagctgcagacccgcccccctggcccccttcttcagatgcgcctgcgcccagggctggaccggccccagatgcgaggcccccgccgccgcccccgaggtgagcgaggagcccagatgccccagagccgcctgccaggccaagagaggcgaccagagatgcgacagagagtgcaacagccccggctgcggctgggacggcggcgactgcagcctgagcgtgggcgacccctggagacagtgcgaggccctgcagtgctggagactgttcaacaacagcagatgcgaccccgcctgcagcagccccgcctgcctgtacgacaacttcgactgccacgccggcggcagagagagaacctgcaaccccgtgtacgagaagtactgcgccgaccacttcgccgacggcagatgcgaccagggctgcaacaccgaggagtgcggctgggacggcctggactgcgccagcgaggtgcccgccctgctggccagaggcgtgctggtgctgaccgtgctgctgccccccgaggagctgctgagaagcagcgccgacttcctgcagagactgagcgccatcctgagaaccagcctgagattcagactggacgcccacggccaggccatggtgttcccctaccacagacccagccccggcagcgagcccagagccagaagagagctggcccccgaggtgatcggcagcgtggtgatgctggagatcgacaacagactgtgcctgcagagccccgagaacgaccactgcttccccgacgcccagagcgccgccgactacctgggcgccctgagcgccgtggagagactggacttcccctaccccctgagagacgtgagaggcgagcccctggagccccccgagcccagcgtgcccctgctgcccctgctggtggccggcgccgtgctgctgctggtgatcctggtgctgggcgtgatggtggccagaagaaagagagagcacagcaccctgtggttccccgagggcttcagcctgcacaaggacgtggccagcggccacaagggcagaagagagcccgtgggccaggacgccctgggcatgaagaacatggccaagggcgagagcctgatgggcgaggtggccaccgactggatggacaccgagtgccccgaggccaagagactgaaggtggaggagcccggcatgggcgccgaggaggccgtggactgcagacagtggacccagcaccacctggtggccgccgacatcagagtggcccccgccatggccctgacccccccccagggcgacgccgacgccgacggcatggacgtgaacgtgagaggccccgacggcttcacccccctgatgctggccagcttctgcggcggcgccctggagcccatgcccaccgaggaggacgaggccgacgacaccagcgccagcatcatcagcgacctgatctgccagggcgcccagctgggcgccagaaccgacagaaccggcgagaccgccctgcacctggccgccagatacgccagagccgacgccgccaagagactgctggacgccggcgccgacaccaacgcccaggaccacagcggcagaacccccctgcacaccgccgtgaccgccgacgcccagggcgtgttccagatcctgatcagaaacagaagcaccgacctggacgccagaatggccgacggcagcaccgccctgatcctggccgccagactggccgtggagggcatggtggaggagctgatcgccagccacgccgacgtgaacgccgtggacgagctgggcaagagcgccctgcactgggccgccgccgtgaacaacgtggaggccaccctggccctgctgaagaacggcgccaacaaggacatgcaggacagcaaggaggagacccccctgttcctggccgccagagagggcagctacgaggccgccaagctgctgctggaccacttcgccaacagagagatcaccgaccacctggacagactgcccagagacgtggcccaggagagactgcaccaggacatcgtgagactgctggaccagcccagcggccccagaagcccccccggcccccacggcctgggccccctgctgtgcccccccggcgccttcctgcccggcctgaaggccgcccagagcggcagcaagaagagcagaagaccccccggcaaggccggcctgggcccccagggccccagaggcagaggcaagaagctgaccctggcctgccccggccccctggccgacagcagcgtgaccctgagccccgtggacagcctggacagccccagacccttcggcggcccccccgccagccccggcggcttccccctggagggcccctacgccgccgccaccgccaccgccgtgagcctggcccagctgggcggccccggcagagccggcctgggcagacagccccccggcggctgcgtgctgagcctgggcctgctgaaccccgtggccgtgcccctggactgggccagactgcccccccccgccccccccggccccagcttcctgctgcccctggcccccggcccccagctgctgaaccccggcacccccgtgagcccccaggagagaccccccccctacctggccgtgcccggccacggcgaggagtaccccgccgccggcgcccacagcagcccccccaaggccagattcctgagagtgcccagcgagcacccctacctgacccccagccccgagagccccgagcactgggccagccccagcccccccagcctgagcgactggagcgagagcacccccagccccgccaccgccaccggcgccatggccaccaccaccggcgccctgcccgcccagcccctgcccctgagcgtgcccagcagcctggcccaggcccagacccagctgggcccccagcccgaggtgacccccaagagacaggtgctggcctag

SEQ ID NO: 91331 - DNA, 3867 bp, synthetic construct
  misc_feature 1..3867: note = Description of Artificial Sequence: Synthetic coding sequence
  source 1..3867: mol_type = other DNA
gccgccatgggccccggcgccagaggcagaagaagaagaagaagacccatgagccccccccccccccccccccccgtgagagccctgcccctgctgctgctgctggccggccccggcgccgccgcccccccctgcctggacggcagcccctgcgccaacggcggcagatgcacccagctgcccagcagagaggccgcctgcctgtgcccccccggctgggtgggcgagagatgccagctggaggacccctgccacagcggcccctgcgccggcagaggcgtgtgccagagcagcgtggtggccggcaccgccagattcagctgcagatgccccagaggcttcagaggccccgactgcagcctgcccgacccctgcctgagcagcccctgcgcccacggcgccagatgcagcgtgggccccgacggcagattcctgtgcagctgcccccccggctaccagggcagaagctgcagaagcgacgtggacgagtgcagagtgggcgagccctgcagacacggcggcacctgcctgaacacccccggcagcttcagatgccagtgccccgccggctacaccggccccctgtgcgagaaccccgccgtgccctgcgcccccagcccctgcagaaacggcggcacctgcagacagagcggcgacctgacctacgactgcgcctgcctgcccggcttcgagggccagaactgcgaggtgaacgtggacgactgccccggccacagatgcctgaacggcggcacctgcgtggacggcgtgaacacctacaactgccagtgcccccccgagtggaccggccagttctgcaccgaggacgtggacgagtgccagctgcagcccaacgcctgccacaacggcggcacctgcttcaacaccctgggcggccacagctgcgtgtgcgtgaacggctggaccggcgagagctgcagccagaacatcgacgactgcgccaccgccgtgtgcttccacggcgccacctgccacgacagagtggccagcttctactgcgcctgccccatgggcaagaccggcctgctgtgccacctggacgacgcctgcgtgagcaacccctgccacgaggacgccatctgcgacaccaaccccgtgaacggcagagccatctgcacctgcccccccggcttcaccggcggcgcctgcgaccaggacgtggacgagtgcagcatcggcgccaacccctgcgagcacctgggcagatgcgtgaacacccagggcagcttcctgtgccagtgcggcagaggctacaccggccccagatgcgagaccgacgtgaacgagtgcctgagcggcccctgcagaaaccaggccacctgcctggacagaatcggccagttcacctgcatctgcatggccggcttcaccggcacctactgcgaggtggacatcgacgagtgccagagcagcccctgcgtgaacggcggcgtgtgcaaggacagagtgaacggcttcagctgcacctgccccagcggcttcagcggcagcacctgccagctggacgtggacgagtgcgccagcaccccctgcagaaacggcgccaagtgcgtggaccagcccgacggctacgagtgcagatgcgccgagggcttcgagggcaccctgtgcgacagaaacgtggacgactgcagccccgacccctgccaccacggcagatgcgtggacggcatcgccagcttcagctgcgcctgcgcccccggctacaccggcaccagatgcgagagccaggtggacgagtgcagaagccagccctgcagacacggcggcaagtgcctggacctggtggacaagtacctgtgcagatgccccagcggcaccaccggcgtgaactgcgaggtgaacatcgacgactgcgccagcaacccctgcaccttcggcgtgtgcagagacggcatcaacagatacgactgcgtgtgccagcccggcttcaccggccccctgtgcaacgtggagatcaacgagtgcgccagcagcccctgcggcgagggcggcagctgcgtggacggcgagaacggcttcagatgcctgtgcccccccggcagcctgccccccctgtgcctgccccccagccacccctgcgcccacgagccctgcagccacggcatctgctacgacgcccccggcggcttcagatgcgtgtgcgagcccggctggagcggccccagatgcagccagagcctggccagagacgcctgcgagagccagccctgcagagccggcggcacctgcagcagcgacggcatgggcttccactgcacctgcccccccggcgtgcagggcagacagtgcgagctgctgagcccctgcacccccaacccctgcgagcacggcggcagatgcgagagcgcccccggccagctgcccgtgtgcagctgcccccagggctggcaggacccctgcctgaacggcggcagctgccaggacggcgtgggcagcttcagctgcagctgcctgcccggcttcgccggccccagatgcgccagagacgtggacgagtgcctgagcaacccctgcggccccggcacctgcaccgaccacgtggccagcttcacctgcacctgcccccccggctacggcggcttccactgcgagcaggacctgcccgactgcagccccagcagctgcttcaacggcggcacctgcgtggacggcgtgaacagcttcagctgcctgtgcagacccggctacaccggcgcccactgccagcacgaggccgacccctgcctgagcagaccctgcctgcacggcggcgtgtgcagcgccgcccaccccggcttcagatgcacctgcctggagagcttcaccggcccccagtgccagaccctggtggactggtgcagcagacagccctgccagaacggcggcagatgcgtgcagaccggcgcctactgcctgtgcccccccggctggagcggcagactgtgcgacatcagaagcctgccctgcagagaggccgccgcccagatcggcgtgagactggagcagctgtgccaggccggcggccagtgcgtggacgaggacagcagccactactgcgtgtgccccgagggcagaaccggcagccactgcgagcaggaggtggacccctgcctggcccagccctgccagcacggcggcacctgcagaggctacatgggcggctacatgtgcgagtgcctgcccggctacaacggcgacaactgcgaggacgacgtggacgagtgcgccagccagccctgccagcacggcggcagctgcatcgacctggtggccagatacctgtgcagctgcccccccggcaccctgggcgtgctgtgcgagatcaacgaggacgactgcggccccggcccccccctggacagcggccccagatgcctgcacaacggcacctgcgtggacctggtgggcggcttcagatgcacctgcccccccggctacaccggcctgagatgcgaggccgacatcaacgagtgcagaagcggcgcctgccacgccgcccacaccagagactgcctgcaggaccccggcggcggcttcagatgcctgtgccacgccggcttcagcggccccagatgccagaccgtgctgagcccctgcgagagccagccctgccagcacggcggccagtgcagacccagccccggccccggcggcggcctgaccttcacctgccactgcgcccagcccttctggggccccagatgcgagagagtggccagaagctgcagagagctgcagtgccccgtgggcgtgccctgccagcagacccccagaggccccagatgcgcctgcccccccggcctgagcggccccagctgcagaagcttccccggcagcccccccggcgccagcaacgccagctag

SEQ ID NO: 91332 - DNA, 6012 bp, synthetic construct
  misc_feature 1..6012: note = Description of Artificial Sequence: Synthetic coding sequence
  source 1..6012: mol_type = other DNA
atgcagccccccagcctgctgctgctgctgctgctgctgctgctgctgtgcgtgagcgtggtgagacccagaggcctgctgtgcggcagcttccccgagccctgcgccaacggcggcacctgcctgagcctgagcctgggccagggcacctgccagtgcgcccccggcttcctgggcgagacctgccagttccccgacccctgccagaacgcccagctgtgccagaacggcggcagctgccaggccctgctgcccgcccccctgggcctgcccagcagccccagccccctgacccccagcttcctgtgcacctgcctgcccggcttcaccggcgagagatgccaggccaagctggaggacccctgcccccccagcttctgcagcaagagaggcagatgccacatccaggccagcggcagaccccagtgcagctgcatgcccggctggaccggcgagcagtgccagctgagagacttctgcagcgccaacccctgcgtgaacggcggcgtgtgcctggccacctacccccagatccagtgccactgcccccccggcttcgagggccacgcctgcgagagagacgtgaacgagtgcttccaggaccccggcccctgccccaagggcaccagctgccacaacaccctgggcagcttccagtgcctgtgccccgtgggccaggagggccccagatgcgagctgagagccggcccctgcccccccagaggctgcagcaacggcggcacctgccagctgatgcccgagaaggacagcaccttccacctgtgcctgtgcccccccggcttcatcggccccgactgcgaggtgaaccccgacaactgcgtgagccaccagtgccagaacggcggcacctgccaggacggcctggacacctacacctgcctgtgccccgagacctggaccggctgggactgcagcgaggacgtggacgagtgcgagacccagggccccccccactgcagaaacggcggcacctgccagaacagcgccggcagcttccactgcgtgtgcgtgagcggctggggcggcaccagctgcgaggagaacctggacgactgcatcgccgccacctgcgcccccggcagcacctgcatcgacagagtgggcagcttcagctgcctgtgcccccccggcagaaccggcctgctgtgccacctggaggacatgtgcctgagccagccctgccacggcgacgcccagtgcagcaccaaccccctgaccggcagcaccctgtgcctgtgccagcccggctacagcggccccacctgccaccaggacctggacgagtgcctgatggcccagcagggccccagcccctgcgagcacggcggcagctgcctgaacacccccggcagcttcaactgcctgtgcccccccggctacaccggcagcagatgcgaggccgaccacaacgagtgcctgagccagccctgccaccccggcagcacctgcctggacctgctggccaccttccactgcctgtgcccccccggcctggagggccagctgtgcgaggtggagaccaacgagtgcgccagcgccccctgcctgaaccacgccgactgccacgacctgctgaacggcttccagtgcatctgcctgcccggcttcagcggcaccagatgcgaggaggacatcgacgagtgcagaagcagcccctgcgccaacggcggccagtgccaggaccagcccggcgccttccactgcaagtgcctgcccggcttcgagggccccagatgccagaccgaggtggacgagtgcctgagcgacccctgccccgtgggcgccagctgcctggacctgcccggcgccttcttctgcctgtgccccagcggcttcaccggccagctgtgcgaggtgcccctgtgcgcccccaacctgtgccagcccaagcagatctgcaaggaccagaaggacaaggccaactgcctgtgccccgacggcagccccggctgcgccccccccgaggacaactgcacctgccaccacggccactgccagagaagcagctgcgtgtgcgacgtgggctggaccggccccgagtgcgaggccgagctgggcggctgcatcagcgccccctgcgcccacggcggcacctgctacccccagcccagcggctacaactgcacctgccccaccggctacaccggccccacctgcagcgaggagatgaccgcctgccacagcggcccctgcctgaacggcggcagctgcaaccccagccccggcggctactactgcacctgcccccccagccacaccggcccccagtgccagaccagcaccgactactgcgtgagcgccccctgcttcaacggcggcacctgcgtgaacagacccggcaccttcagctgcctgtgcgccatgggcttccagggccccagatgcgagggcaagctgagacccagctgcgccgacagcccctgcagaaacagagccacctgccaggacagcccccagggccccagatgcctgtgccccaccggctacaccggcggcagctgccagaccctgatggacctgtgcgcccagaagccctgccccagaaacagccactgcctgcagaccggccccagcttccactgcctgtgcctgcagggctggaccggccccctgtgcaacctgcccctgagcagctgccagaaggccgccctgagccagggcatcgacgtgagcagcctgtgccacaacggcggcctgtgcgtggacagcggccccagctacttctgccactgcccccccggcttccagggcagcctgtgccaggaccacgtgaacccctgcgagagcagaccctgccagaacggcgccacctgcatggcccagcccagcggctacctgtgccagtgcgcccccggctacgacggccagaactgcagcaaggagctggacgcctgccagagccagccctgccacaaccacggcacctgcacccccaagcccggcggcttccactgcgcctgcccccccggcttcgtgggcctgagatgcgagggcgacgtggacgagtgcctggaccagccctgccaccccaccggcaccgccgcctgccacagcctggccaacgccttctactgccagtgcctgcccggccacaccggccagtggtgcgaggtggagatcgacccctgccacagccagccctgcttccacggcggcacctgcgaggccaccgccggcagccccctgggcttcatctgccactgccccaagggcttcgagggccccacctgcagccacagagcccccagctgcggcttccaccactgccaccacggcggcctgtgcctgcccagccccaagcccggcttcccccccagatgcgcctgcctgagcggctacggcggccccgactgcctgaccccccccgcccccaagggctgcggcccccccagcccctgcctgtacaacggcagctgcagcgagaccaccggcctgggcggccccggcttcagatgcagctgcccccacagcagccccggccccagatgccagaagcccggcgccaagggctgcgagggcagaagcggcgacggcgcctgcgacgccggctgcagcggccccggcggcaactgggacggcggcgactgcagcctgggcgtgcccgacccctggaagggctgccccagccacagcagatgctggctgctgttcagagacggccagtgccacccccagtgcgacagcgaggagtgcctgttcgacggctacgactgcgagaccccccccgcctgcacccccgcctacgaccagtactgccacgaccacttccacaacggccactgcgagaagggctgcaacaccgccgagtgcggctgggacggcggcgactgcagacccgaggacggcgaccccgagtggggccccagcctggccctgctggtggtgctgagcccccccgccctggaccagcagctgttcgccctggccagagtgctgagcctgaccctgagagtgggcctgtgggtgagaaaggacagagacggcagagacatggtgtacccctaccccggcgccagagccgaggagaagctgggcggcaccagagaccccacctaccaggagagagccgccccccagacccagcccctgggcaaggagaccgacagcctgagcgccggcttcgtggtggtgatgggcgtggacctgagcagatgcggccccgaccaccccgccagcagatgcccctgggaccccggcctgctgctgagattcctggccgccatggccgccgtgggcgccctggagcccctgctgcccggccccctgctggccgtgcacccccacgccggcaccgccccccccgccaaccagctgccctggcccgtgctgtgcagccccgtggccggcgtgatcctgctggccctgggcgccctgctggtgctgcagctgatcagaagaagaagaagagagcacggcgccctgtggctgccccccggcttcaccagaagacccagaacccagagcgccccccacagaagaagaccccccctgggcgaggacagcatcggcctgaaggccctgaagcccaaggccgaggtggacgaggacggcgtggtgatgtgcagcggccccgaggagggcgaggaggtgggccaggccgaggagaccggcccccccagcacctgccagctgtggagcctgagcggcggctgcggcgccctgccccaggccgccatgctgacccccccccaggagagcgagatggaggcccccgacctggacaccagaggccccgacggcgtgacccccctgatgagcgccgtgtgctgcggcgaggtgcagagcggcaccttccagggcgcctggctgggctgccccgagccctgggagcccctgctggacggcggcgcctgcccccaggcccacaccgtgggcaccggcgagacccccctgcacctggccgccagattcagcagacccaccgccgccagaagactgctggaggccggcgccaaccccaaccagcccgacagagccggcagaacccccctgcacgccgccgtggccgccgacgccagagaggtgtgccagctgctgctgagaagcagacagaccgccgtggacgccagaaccgaggacggcaccacccccctgatgctggccgccagactggccgtggaggacctggtggaggagctgatcgccgcccaggccgacgtgggcgccagagacaagtggggcaagaccgccctgcactgggccgccgccgtgaacaacgccagagccgccagaagcctgctgcaggccggcgccgacaaggacgcccaggacaacagagagcagacccccctgttcctggccgccagagagggcgccgtggaggtggcccagctgctgctgggcctgggcgccgccagagagctgagagaccaggccggcctggcccccgccgacgtggcccaccagagaaaccactgggacctgctgaccctgctggagggcgccggcccccccgaggccagacacaaggccacccccggcagagaggccggccccttccccagagccagaaccgtgagcgtgagcgtgcccccccacggcggcggcgccctgcccagatgcagaaccctgagcgccggcgccggccccagaggcggcggcgcctgcctgcaggccagaacctggagcgtggacctggccgccagaggcggcggcgcctacagccactgcagaagcctgagcggcgtgggcgccggcggcggccccacccccagaggcagaagattcagcgccggcatgagaggccccagacccaaccccgccatcatgagaggcagatacggcgtggccgccggcagaggcggcagagtgagcaccgacgactggccctgcgactgggtggccctgggcgcctgcggcagcgccagcaacatccccatcccccccccctgcctgacccccagccccgagagaggcagcccccagctggactgcggcccccccgccctgcaggagatgcccatcaaccagggcggcgagggcaagaagtag

SEQ ID NO: 91333 - DNA, 3147 bp, synthetic construct
  misc_feature 1..3147: note = Description of Artificial Sequence: Synthetic coding sequence
  source 1..3147: mol_type = other DNA
tgcgcccccggctacgacggccagaactgcagcaaggagctggacgcctgccagagccagccctgccacaaccacggcacctgcacccccaagcccggcggcttccactgcgcctgcccccccggcttcgtgggcctgagatgcgagggcgacgtggacgagtgcctggaccagccctgccaccccaccggcaccgccgcctgccacagcctggccaacgccttctactgccagtgcctgcccggccacaccggccagtggtgcgaggtggagatcgacccctgccacagccagccctgcttccacggcggcacctgcgaggccaccgccggcagccccctgggcttcatctgccactgccccaagggcttcgagggccccacctgcagccacagagcccccagctgcggcttccaccactgccaccacggcggcctgtgcctgcccagccccaagcccggcttcccccccagatgcgcctgcctgagcggctacggcggccccgactgcctgaccccccccgcccccaagggctgcggcccccccagcccctgcctgtacaacggcagctgcagcgagaccaccggcctgggcggccccggcttcagatgcagctgcccccacagcagccccggccccagatgccagaagcccggcgccaagggctgcgagggcagaagcggcgacggcgcctgcgacgccggctgcagcggccccggcggcaactgggacggcggcgactgcagcctgggcgtgcccgacccctggaagggctgccccagccacagcagatgctggctgctgttcagagacggccagtgccacccccagtgcgacagcgaggagtgcctgttcgacggctacgactgcgagaccccccccgcctgcacccccgcctacgaccagtactgccacgaccacttccacaacggccactgcgagaagggctgcaacaccgccgagtgcggctgggacggcggcgactgcagacccgaggacggcgaccccgagtggggccccagcctggccctgctggtggtgctgagcccccccgccctggaccagcagctgttcgccctggccagagtgctgagcctgaccctgagagtgggcctgtgggtgagaaaggacagagacggcagagacatggtgtacccctaccccggcgccagagccgaggagaagctgggcggcaccagagaccccacctaccaggagagagccgccccccagacccagcccctgggcaaggagaccgacagcctgagcgccggcttcgtggtggtgatgggcgtggacctgagcagatgcggccccgaccaccccgccagcagatgcccctgggaccccggcctgctgctgagattcctggccgccatggccgccgtgggcgccctggagcccctgctgcccggccccctgctggccgtgcacccccacgccggcaccgccccccccgccaaccagctgccctggcccgtgctgtgcagccccgtggccggcgtgatcctgctggccctgggcgccctgctggtgctgcagctgatcagaagaagaagaagagagcacggcgccctgtggctgccccccggcttcaccagaagacccagaacccagagcgccccccacagaagaagaccccccctgggcgaggacagcatcggcctgaaggccctgaagcccaaggccgaggtggacgaggacggcgtggtgatgtgcagcggccccgaggagggcgaggaggtgggccaggccgaggagaccggcccccccagcacctgccagctgtggagcctgagcggcggctgcggcgccctgccccaggccgccatgctgacccccccccaggagagcgagatggaggcccccgacctggacaccagaggccccgacggcgtgacccccctgatgagcgccgtgtgctgcggcgaggtgcagagcggcaccttccagggcgcctggctgggctgccccgagccctgggagcccctgctggacggcggcgcctgcccccaggcccacaccgtgggcaccggcgagacccccctgcacctggccgccagattcagcagacccaccgccgccagaagactgctggaggccggcgccaaccccaaccagcccgacagagccggcagaacccccctgcacgccgccgtggccgccgacgccagagaggtgtgccagctgctgctgagaagcagacagaccgccgtggacgccagaaccgaggacggcaccacccccctgatgctggccgccagactggccgtggaggacctggtggaggagctgatcgccgcccaggccgacgtgggcgccagagacaagtggggcaagaccgccctgcactgggccgccgccgtgaacaacgccagagccgccagaagcctgctgcaggccggcgccgacaaggacgcccaggacaacagagagcagacccccctgttcctggccgccagagagggcgccgtggaggtggcccagctgctgctgggcctgggcgccgccagagagctgagagaccaggccggcctggcccccgccgacgtggcccaccagagaaaccactgggacctgctgaccctgctggagggcgccggcccccccgaggccagacacaaggccacccccggcagagaggccggccccttccccagagccagaaccgtgagcgtgagcgtgcccccccacggcggcggcgccctgcccagatgcagaaccctgagcgccggcgccggccccagaggcggcggcgcctgcctgcaggccagaacctggagcgtggacctggccgccagaggcggcggcgcctacagccactgcagaagcctgagcggcgtgggcgccggcggcggccccacccccagaggcagaagattcagcgccggcatgagaggccccagacccaaccccgccatcatgagaggcagatacggcgtggccgccggcagaggcggcagagtgagcaccgacgactggccctgcgactgggtggccctgggcgcctgcggcagcgccagcaacatccccatcccccccccctgcctgacccccagccccgagagaggcagcccccagctggactgcggcccccccgccctgcaggagatgcccatcaaccagggcggcgagggcaagaagtag

SEQ ID NO: 91334 - DNA, 6018 bp, synthetic construct
  misc_feature 1..6018: note = Description of Artificial Sequence: Synthetic coding sequence
  source 1..6018: mol_type = other DNA
atgcagccccccagcctgctgctgctgctgctgctgctgctgctgctgctgctgtgcgtgagcgtggtgagacccagaggcctgctgtgcggcagcttccccgagccctgcgccaacggcggcacctgcctgagcctgagcctgggccagggcacctgccagtgcgcccccggcttcctgggcgagacctgccagttccccgacccctgccagaacgcccagctgtgccagaacggcggcagctgccaggccctgctgcccgcccccctgggcctgcccagcagccccagccccctgacccccagcttcctgtgcacctgcctgcccggcttcaccggcgagagatgccaggcccagctggaggacccctgcccccccagcttctgcagcaagagaggcagatgccacatccaggccagcggcagaccccagtgcagctgcatgcccggctggaccggcgagcagtgccagctgagagacttctgcagcgccaacccctgcgtgaacggcggcgtgtgcctggccacctacccccagatccagtgccactgcccccccggcttcgagggccacgcctgcgagagagacgtgaacgagtgcttccaggaccccggcccctgccccaagggcaccagctgccacaacaccctgggcagcttccagtgcctgtgccccgtgggccaggagggccccagatgcgagctgagagccggcccctgcccccccagaggctgcagcaacggcggcacctgccagctgatgcccgagaaggacagcaccttccacctgtgcctgtgcccccccggcttcatcggccccgactgcgaggtgaaccccgacaactgcgtgagccaccagtgccagaacggcggcacctgccaggacggcctggacacctacacctgcctgtgccccgagacctggaccggctgggactgcagcgaggacgtggacgagtgcgaggcccagggccccccccactgcagaaacggcggcacctgccagaacagcgccggcagcttccactgcgtgtgcgtgagcggctggggcggcaccagctgcgaggagaacctggacgactgcatcgccgccacctgcgcccccggcagcacctgcatcgacagagtgggcagcttcagctgcctgtgcccccccggcagaaccggcctgctgtgccacctggaggacatgtgcctgagccagccctgccacggcgacgcccagtgcagcaccaaccccctgaccggcagcaccctgtgcctgtgccagcccggctacagcggccccacctgccaccaggacctggacgagtgcctgatggcccagcagggccccagcccctgcgagcacggcggcagctgcctgaacacccccggcagcttcaactgcctgtgcccccccggctacaccggcagcagatgcgaggccgaccacaacgagtgcctgagccagccctgccaccccggcagcacctgcctggacctgctggccaccttccactgcctgtgcccccccggcctggagggccagctgtgcgaggtggagaccaacgagtgcgccagcgccccctgcctgaaccacgccgactgccacgacctgctgaacggcttccagtgcatctgcctgcccggcttcagcggcaccagatgcgaggaggacatcgacgagtgcagaagcagcccctgcgccaacggcggccagtgccaggaccagcccggcgccttccactgcaagtgcctgcccggcttcgagggccccagatgccagaccgaggtggacgagtgcctgagcgacccctgccccgtgggcgccagctgcctggacctgcccggcgccttcttctgcctgtgccccagcggcttcaccggccagctgtgcgaggtgcccctgtgcgcccccaacctgtgccagcccaagcagatctgcaaggaccagaaggacaaggccaactgcctgtgccccgacggcagccccggctgcgccccccccgaggacaactgcacctgccaccacggccactgccagagaagcagctgcgtgtgcgacgtgggctggaccggccccgagtgcgaggccgagctgggcggctgcatcagcgccccctgcgcccacggcggcacctgctacccccagcccagcggctacaactgcacctgccccaccggctacaccggccccacctgcagcgaggagatgaccgcctgccacagcggcccctgcctgaacggcggcagctgcaaccccagccccggcggctactactgcacctgcccccccagccacaccggcccccagtgccagaccagcaccgactactgcgtgagcgccccctgcttcaacggcggcacctgcgtgaacagacccggcaccttcagctgcctgtgcgccatgggcttccagggccccagatgcgagggcaagctgagacccagctgcgccgacagcccctgcagaaacagagccacctgccaggacagcccccagggccccagatgcctgtgccccaccggctacaccggcggcagctgccagaccctgatggacctgtgcgcccagaagccctgccccagaaacagccactgcctgcagaccggccccagcttccactgcctgtgcctgcagggctggaccggccccctgtgcaacctgcccctgagcagctgccagaaggccgccctgagccagggcatcgacgtgagcagcctgtgccacaacggcggcctgtgcgtggacagcggccccagctacttctgccactgcccccccggcttccagggcagcctgtgccaggaccacgtgaacccctgcgagagcagaccctgccagaacggcgccacctgcatggcccagcccagcggctacctgtgccagtgcgcccccggctacgacggccagaactgcagcaaggagctggacgcctgccagagccagccctgccacaaccacggcacctgcacccccaagcccggcggcttccactgcgcctgcccccccggcttcgtgggcctgagatgcgagggcgacgtggacgagtgcctggaccagccctgccaccccaccggcaccgccgcctgccacagcctggccaacgccttctactgccagtgcctgcccggccacaccggccagtggtgcgaggtggagatcgacccctgccacagccagccctgcttccacggcggcacctgcgaggccaccgccggcagccccctgggcttcatctgccactgccccaagggcttcgagggccccacctgcagccacagagcccccagctgcggcttccaccactgccaccacggcggcctgtgcctgcccagccccaagcccggcttcccccccagatgcgcctgcctgagcggctacggcggccccgactgcctgaccccccccgcccccaagggctgcggcccccccagcccctgcctgtacaacggcagctgcagcgagaccaccggcctgggcggccccggcttcagatgcagctgcccccacagcagccccggccccagatgccagaagcccggcgccaagggctgcgagggcagaagcggcgacggcgcctgcgacgccggctgcagcggccccggcggcaactgggacggcggcgactgcagcctgggcgtgcccgacccctggaagggctgccccagccacagcagatgctggctgctgttcagagacggccagtgccacccccagtgcgacagcgaggagtgcctgttcgacggctacgactgcgagaccccccccgcctgcacccccgcctacgaccagtactgccacgaccacttccacaacggccactgcgagaagggctgcaacaccgccgagtgcggctgggacggcggcgactgcagacccgaggacggcgaccccgagtggggccccagcctggccctgctggtggtgctgagcccccccgccctggaccagcagctgttcgccctggccagagtgctgagcctgaccctgagagtgggcctgtgggtgagaaaggacagagacggcagagacatggtgtacccctaccccggcgccagagccgaggagaagctgggcggcaccagagaccccacctaccaggagagagccgccccccagacccagcccctgggcaaggagaccgacagcctgagcgccggcttcgtggtggtgatgggcgtggacctgagcagatgcggccccgaccaccccgccagcagatgcccctgggaccccggcctgctgctgagattcctggccgccatggccgccgtgggcgccctggagcccctgctgcccggccccctgctggccgtgcacccccacgccggcaccgccccccccgccaaccagctgccctggcccgtgctgtgcagccccgtggccggcgtgatcctgctggccctgggcgccctgctggtgctgcagctgatcagaagaagaagaagagagcacggcgccctgtggctgccccccggcttcaccagaagacccagaacccagagcgccccccacagaagaagaccccccctgggcgaggacagcatcggcctgaaggccctgaagcccaaggccgaggtggacgaggacggcgtggtgatgtgcagcggccccgaggagggcgaggaggtgggccaggccgaggagaccggcccccccagcacctgccagctgtggagcctgagcggcggctgcggcgccctgccccaggccgccatgctgacccccccccaggagagcgagatggaggcccccgacctggacaccagaggccccgacggcgtgacccccctgatgagcgccgtgtgctgcggcgaggtgcagagcggcaccttccagggcgcctggctgggctgccccgagccctgggagcccctgctggacggcggcgcctgcccccaggcccacaccgtgggcaccggcgagacccccctgcacctggccgccagattcagcagacccaccgccgccagaagactgctggaggccggcgccaaccccaaccagcccgacagagccggcagaacccccctgcacgccgccgtggccgccgacgccagagaggtgtgccagctgctgctgagaagcagacagaccgccgtggacgccagaaccgaggacggcaccacccccctgatgctggccgccagactggccgtggaggacctggtggaggagctgatcgccgcccaggccgacgtgggcgccagagacaagtggggcaagaccgccctgcactgggccgccgccgtgaacaacgccagagccgccagaagcctgctgcaggccggcgccgacaaggacgcccaggacaacagagagcagacccccctgttcctggccgccagagagggcgccgtggaggtggcccagctgctgctgggcctgggcgccgccagagagctgagagaccaggccggcctggcccccgccgacgtggcccaccagagaaaccactgggacctgctgaccctgctggagggcgccggcccccccgaggccagacacaaggccacccccggcagagaggccggccccttccccagagccagaaccgtgagcgtgagcgtgcccccccacggcggcggcgccctgcccagatgcagaaccctgagcgccggcgccggccccagaggcggcggcgcctgcctgcaggccagaacctggagcgtggacctggccgccagaggcggcggcgcctacagccactgcagaagcctgagcggcgtgggcgccggcggcggccccacccccagaggcagaagattcagcgccggcatgagaggccccagacccaaccccgccatcatgagaggcagatacggcgtggccgccggcagaggcggcagagtgagcaccgacgactggccctgcgactgggtggccctgggcgcctgcggcagcgccagcaacatccccatcccccccccctgcctgacccccagccccgagagaggcagcccccagctggactgcggcccccccgccctgcaggagatgcccatcaaccagggcggcgagggcaagaagtag

SEQ ID NO: 91335 - DNA, 6012 bp, synthetic construct
  misc_feature 1..6012: note = Description of Artificial Sequence: Synthetic coding sequence
  source 1..6012: mol_type = other DNA
atgcagccccccagcctgctgctgctgctgctgctgctgctgctgctgtgcgtgagcgtggtgagacccagaggcctgctgtgcggcagcttccccgagccctgcgccaacggcggcacctgcctgagcctgagcctgggccagggcacctgccagtgcgcccccggcttcctgggcgagacctgccagttccccgacccctgccagaacgcccagctgtgccagaacggcggcagctgccaggccctgctgcccgcccccctgggcctgcccagcagccccagccccctgacccccagcttcctgtgcacctgcctgcccggcttcaccggcgagagatgccaggcccagctggaggacccctgcccccccagcttctgcagcaagagaggcagatgccacatccaggccagcggcagaccccagtgcagctgcatgcccggctggaccggcgagcagtgccagctgagagacttctgcagcgccaacccctgcgtgaacggcggcgtgtgcctggccacctacccccagatccagtgccactgcccccccggcttcgagggccacgcctgcgagagagacgtgaacgagtgcttccaggaccccggcccctgccccaagggcaccagctgccacaacaccctgggcagcttccagtgcctgtgccccgtgggccaggagggccccagatgcgagctgagagccggcccctgcccccccagaggctgcagcaacggcggcacctgccagctgatgcccgagaaggacagcaccttccacctgtgcctgtgcccccccggcttcatcggccccgactgcgaggtgaaccccgacaactgcgtgagccaccagtgccagaacggcggcacctgccaggacggcctggacacctacacctgcctgtgccccgagacctggaccggctgggactgcagcgaggacgtggacgagtgcgagacccagggccccccccactgcagaaacggcggcacctgccagaacagcgccggcagcttccactgcgtgtgcgtgagcggctggggcggcaccagctgcgaggagaacctggacgactgcatcgccgccacctgcgcccccggcagcacctgcatcgacagagtgggcagcttcagctgcctgtgcccccccggcagaaccggcctgctgtgccacctggaggacatgtgcctgagccagccctgccacggcgacgcccagtgcagcaccaaccccctgaccggcagcaccctgtgcctgtgccagcccggctacagcggccccacctgccaccaggacctggacgagtgcctgatggcccagcagggccccagcccctgcgagcacggcggcagctgcctgaacacccccggcagcttcaactgcctgtgcccccccggctacaccggcagcagatgcgaggccgaccacaacgagtgcctgagccagccctgccaccccggcagcacctgcctggacctgctggccaccttccactgcctgtgcccccccggcctggagggccagctgtgcgaggtggagaccaacgagtgcgccagcgccccctgcctgaaccacgccgactgccacgacctgctgaacggcttccagtgcatctgcctgcccggcttcagcggcaccagatgcgaggaggacatcgacgagtgcagaagcagcccctgcgccaacggcggccagtgccaggaccagcccggcgccttccactgcaagtgcctgcccggcttcgagggccccagatgccagaccgaggtggacgagtgcctgagcgacccctgccccgtgggcgccagctgcctggacctgcccggcgccttcttctgcctgtgccccagcggcttcaccggccagctgtgcgaggtgcccctgtgcgcccccaacctgtgccagcccaagcagatctgcaaggaccagaaggacaaggccaactgcctgtgccccgacggcagccccggctgcgccccccccgaggacaactgcacctgccaccacggccactgccagagaagcagctgcgtgtgcgacgtgggctggaccggccccgagtgcgaggccgagctgggcggctgcatcagcgccccctgcgcccacggcggcacctgctacccccagcccagcggctacaactgcacctgccccaccggctacaccggccccacctgcagcgaggagatgaccgcctgccacagcggcccctgcctgaacggcggcagctgcaaccccagccccggcggctactactgcacctgcccccccagccacaccggcccccagtgccagaccagcaccgactactgcgtgagcgccccctgcttcaacggcggcacctgcgtgaacagacccggcaccttcagctgcctgtgcgccatgggcttccagggccccagatgcgagggcaagctgagacccagctgcgccgacagcccctgcagaaacagagccacctgccaggacagcccccagggccccagatgcctgtgccccaccggctacaccggcggcagctgccagaccctgatggacctgtgcgcccagaagccctgccccagaaacagccactgcctgcagaccggccccagcttccactgcctgtgcctgcagggctggaccggccccctgtgcaacctgcccctgagcagctgccagaaggccgccctgagccagggcatcgacgtgagcagcctgtgccacaacggcggcctgtgcgtggacagcggccccagctacttctgccactgcccccccggcttccagggcagcctgtgccaggaccacgtgaacccctgcgagagcagaccctgccagaacggcgccacctgcatggcccagcccagcggctacctgtgccagtgcgcccccggctacgacggccagaactgcagcaaggagctggacgcctgccagagccagccctgccacaaccacggcacctgcacccccaagcccggcggcttccactgcgcctgcccccccggcttcgtgggcctgagatgcgagggcgacgtggacgagtgcctggaccagccctgccaccccaccggcaccgccgcctgccacagcctggccaacgccttctactgccagtgcctgcccggccacaccggccagtggtgcgaggtggagatcgacccctgccacagccagccctgcttccacggcggcacctgcgaggccaccgccggcagccccctgggcttcatctgccactgccccaagggcttcgagggccccacctgcagccacagagcccccagctgcggcttccaccactgccaccacggcggcctgtgcctgcccagccccaagcccggcttcccccccagatgcgcctgcctgagcggctacggcggccccgactgcctgaccccccccgcccccaagggctgcggcccccccagcccctgcctgtacaacggcagctgcagcgagaccaccggcctgggcggccccggcttcagatgcagctgcccccacagcagccccggccccagatgccagaagcccggcgccaagggctgcgagggcagaagcggcgacggcgcctgcgacgccggctgcagcggccccggcggcaactgggacggcggcgactgcagcctgggcgtgcccgacccctggaagggctgccccagccacagcagatgctggctgctgttcagagacggccagtgccacccccagtgcgacagcgaggagtgcctgttcgacggctacgactgcgagaccccccccgcctgcacccccgcctacgaccagtactgccacgaccacttccacaacggccactgcgagaagggctgcaacaccgccgagtgcggctgggacggcggcgactgcagacccgaggacggcgaccccgagtggggccccagcctggccctgctggtggtgctgagcccccccgccctggaccagcagctgttcgccctggccagagtgctgagcctgaccctgagagtgggcctgtgggtgagaaaggacagagacggcagagacatggtgtacccctaccccggcgccagagccgaggagaagctgggcggcaccagagaccccacctaccaggagagagccgccccccagacccagcccctgggcaaggagaccgacagcctgagcgccggcttcgtggtggtgatgggcgtggacctgagcagatgcggccccgaccaccccgccagcagatgcccctgggaccccggcctgctgctgagattcctggccgccatggccgccgtgggcgccctggagcccctgctgcccggccccctgctggccgtgcacccccacgccggcaccgccccccccgccaaccagctgccctggcccgtgctgtgcagccccgtggccggcgtgatcctgctggccctgggcgccctgctggtgctgcagctgatcagaagaagaagaagagagcacggcgccctgtggctgccccccggcttcaccagaagacccagaacccagagcgccccccacagaagaagaccccccctgggcgaggacagcatcggcctgaaggccctgaagcccaaggccgaggtggacgaggacggcgtggtgatgtgcagcggccccgaggagggcgaggaggtgggccaggccgaggagaccggcccccccagcacctgccagctgtggagcctgagcggcggctgcggcgccctgccccaggccgccatgctgacccccccccaggagagcgagatggaggcccccgacctggacaccagaggccccgacggcgtgacccccctgatgagcgccgtgtgctgcggcgaggtgcagagcggcaccttccagggcgcctggctgggctgccccgagccctgggagcccctgctggacggcggcgcctgcccccaggcccacaccgtgggcaccggcgagacccccctgcacctggccgccagattcagcagacccaccgccgccagaagactgctggaggccggcgccaaccccaaccagcccgacagagccggcagaacccccctgcacgccgccgtggccgccgacgccagagaggtgtgccagctgctgctgagaagcagacagaccgccgtggacgccagaaccgaggacggcaccacccccctgatgctggccgccagactggccgtggaggacctggtggaggagctgatcgccgcccaggccgacgtgggcgccagagacaagtggggcaagaccgccctgcactgggccgccgccgtgaacaacgccagagccgccagaagcctgctgcaggccggcgccgacaaggacgcccaggacaacagagagcagacccccctgttcctggccgccagagagggcgccgtggaggtggcccagctgctgctgggcctgggcgccgccagagagctgagagaccaggccggcctggcccccgccgacgtggcccaccagagaaaccactgggacctgctgaccctgctggagggcgccggcccccccgaggccagacacaaggccacccccggcagagaggccggccccttccccagagccagaaccgtgagcgtgagcgtgcccccccacggcggcggcgccctgcccagatgcagaaccctgagcgccggcgccggccccagaggcggcggcgcctgcctgcaggccagaacctggagcgtggacctggccgccagaggcggcggcgcctacagccactgcagaagcctgagcggcgtgggcgccggcggcggccccacccccagaggcagaagattcagcgccggcatgagaggccccagacccaaccccgccatcatgagaggcagatacggcgtggccgccggcagaggcggcagagtgagcaccgacgactggccctgcgactgggtggccctgggcgcctgcggcagcgccagcaacatccccatcccccccccctgcctgacccccagccccgagagaggcagcccccagctggactgcggcccccccgccctgcaggagatgcccatcaaccagggcggcgagggcaagaagtag

SEQ ID NO: 91336 - DNA, 561 bp, synthetic construct
  misc_feature 1..561: note = Description of Artificial Sequence: Synthetic coding sequence
  source 1..561: mol_type = other DNA
atgagcgccgtgtgctgcggcgaggtgcagagcggcaccttccagggcgcctggctgggctgccccgagccctgggagcccctgctggacggcggcgcctgcccccaggcccacaccgtgggcaccggcgagacccccctgcacctggccgccagattcagcagacccaccgccgccagaagactgctggaggccggcgccaaccccaaccagcccgacagagccggcagaacccccctgcacgccgccgtggccgccgacgccagagaggtgtgccagctgctgctgagaagcagacagaccgccgtggacgccagaaccgaggacggcaccacccccctgatgctggccgccagactggccgtggaggacctggtggaggagctgatcgccgcccaggccgacgtgggcgccagagacaagtggggcgccgacgccgccatccccggcggcgccggcagaagcggcggcagcagccccgccaccgccggcgccggcggcagccccagagccgccggccccggctgggccagcgccggcggcagaagaagccccacctag

SEQ ID NO: 91337 - DNA, 6009 bp, synthetic construct
  misc_feature 1..6009: note = Description of Artificial Sequence: Synthetic coding sequence
  source 1..6009: mol_type = other DNA
atgcagccccccagcctgctgctgctgctgctgctgctgctgctgtgcgtgagcgtggtgagacccagaggcctgctgtgcggcagcttccccgagccctgcgccaacggcggcacctgcctgagcctgagcctgggccagggcacctgccagtgcgcccccggcttcctgggcgagacctgccagttccccgacccctgccagaacgcccagctgtgccagaacggcggcagctgccaggccctgctgcccgcccccctgggcctgcccagcagccccagccccctgacccccagcttcctgtgcacctgcctgcccggcttcaccggcgagagatgccaggcccagctggaggacccctgcccccccagcttctgcagcaagagaggcagatgccacatccaggccagcggcagaccccagtgcagctgcatgcccggctggaccggcgagcagtgccagctgagagacttctgcagcgccaacccctgcgtgaacggcggcgtgtgcctggccacctacccccagatccagtgccactgcccccccggcttcgagggccacgcctgcgagagagacgtgaacgagtgcttccaggaccccggcccctgccccaagggcaccagctgccacaacaccctgggcagcttccagtgcctgtgccccgtgggccaggagggccccagatgcgagctgagagccggcccctgcccccccagaggctgcagcaacggcggcacctgccagctgatgcccgagaaggacagcaccttccacctgtgcctgtgcccccccggcttcatcggccccgactgcgaggtgaaccccgacaactgcgtgagccaccagtgccagaacggcggcacctgccaggacggcctggacacctacacctgcctgtgccccgagacctggaccggctgggactgcagcgaggacgtggacgagtgcgagacccagggccccccccactgcagaaacggcggcacctgccagaacagcgccggcagcttccactgcgtgtgcgtgagcggctggggcggcaccagctgcgaggagaacctggacgactgcatcgccgccacctgcgcccccggcagcacctgcatcgacagagtgggcagcttcagctgcctgtgcccccccggcagaaccggcctgctgtgccacctggaggacatgtgcctgagccagccctgccacggcgacgcccagtgcagcaccaaccccctgaccggcagcaccctgtgcctgtgccagcccggctacagcggccccacctgccaccaggacctggacgagtgcctgatggcccagcagggccccagcccctgcgagcacggcggcagctgcctgaacacccccggcagcttcaactgcctgtgcccccccggctacaccggcagcagatgcgaggccgaccacaacgagtgcctgagccagccctgccaccccggcagcacctgcctggacctgctggccaccttccactgcctgtgcccccccggcctggagggccagctgtgcgaggtggagaccaacgagtgcgccagcgccccctgcctgaaccacgccgactgccacgacctgctgaacggcttccagtgcatctgcctgcccggcttcagcggcaccagatgcgaggaggacatcgacgagtgcagaagcagcccctgcgccaacggcggccagtgccaggaccagcccggcgccttccactgcaagtgcctgcccggcttcgagggccccagatgccagaccgaggtggacgagtgcctgagcgacccctgccccgtgggcgccagctgcctggacctgcccggcgccttcttctgcctgtgccccagcggcttcaccggccagctgtgcgaggtgcccctgtgcgcccccaacctgtgccagcccaagcagatctgcaaggaccagaaggacaaggccaactgcctgtgccccgacggcagccccggctgcgccccccccgaggacaactgcacctgccaccacggccactgccagagaagcagctgcgtgtgcgacgtgggctggaccggccccgagtgcgaggccgagctgggcggctgcatcagcgccccctgcgcccacggcggcacctgctacccccagcccagcggctacaactgcacctgccccaccggctacaccggccccacctgcagcgaggagatgaccgcctgccacagcggcccctgcctgaacggcggcagctgcaaccccagccccggcggctactactgcacctgcccccccagccacaccggcccccagtgccagaccagcaccgactactgcgtgagcgccccctgcttcaacggcggcacctgcgtgaacagacccggcaccttcagctgcctgtgcgccatgggcttccagggccccagatgcgagggcaagctgagacccagctgcgccgacagcccctgcagaaacagagccacctgccaggacagcccccagggccccagatgcctgtgccccaccggctacaccggcggcagctgccagaccctgatggacctgtgcgcccagaagccctgccccagaaacagccactgcctgcagaccggccccagcttccactgcctgtgcctgcagggctggaccggccccctgtgcaacctgcccctgagcagctgccagaaggccgccctgagccagggcatcgacgtgagcagcctgtgccacaacggcggcctgtgcgtggacagcggccccagctacttctgccactgcccccccggcttccagggcagcctgtgccaggaccacgtgaacccctgcgagagcagaccctgccagaacggcgccacctgcatggcccagcccagcggctacctgtgccagtgcgcccccggctacgacggccagaactgcagcaaggagctggacgcctgccagagccagccctgccacaaccacggcacctgcacccccaagcccggcggcttccactgcgcctgcccccccggcttcgtgggcctgagatgcgagggcgacgtggacgagtgcctggaccagccctgccaccccaccggcaccgccgcctgccacagcctggccaacgccttctactgccagtgcctgcccggccacaccggccagtggtgcgaggtggagatcgacccctgccacagccagccctgcttccacggcggcacctgcgaggccaccgccggcagccccctgggcttcatctgccactgccccaagggcttcgagggccccacctgcagccacagagcccccagctgcggcttccaccactgccaccacggcggcctgtgcctgcccagccccaagcccggcttcccccccagatgcgcctgcctgagcggctacggcggccccgactgcctgaccccccccgcccccaagggctgcggcccccccagcccctgcctgtacaacggcagctgcagcgagaccaccggcctgggcggccccggcttcagatgcagctgcccccacagcagccccggccccagatgccagaagcccggcgccaagggctgcgagggcagaagcggcgacggcgcctgcgacgccggctgcagcggccccggcggcaactgggacggcggcgactgcagcctgggcgtgcccgacccctggaagggctgccccagccacagcagatgctggctgctgttcagagacggccagtgccacccccagtgcgacagcgaggagtgcctgttcgacggctacgactgcgagaccccccccgcctgcacccccgcctacgaccagtactgccacgaccacttccacaacggccactgcgagaagggctgcaacaccgccgagtgcggctgggacggcggcgactgcagacccgaggacggcgaccccgagtggggccccagcctggccctgctggtggtgctgagcccccccgccctggaccagcagctgttcgccctggccagagtgctgagcctgaccctgagagtgggcctgtgggtgagaaaggacagagacggcagagacatggtgtacccctaccccggcgccagagccgaggagaagctgggcggcaccagagaccccacctaccaggagagagccgccccccagacccagcccctgggcaaggagaccgacagcctgagcgccggcttcgtggtggtgatgggcgtggacctgagcagatgcggccccgaccaccccgccagcagatgcccctgggaccccggcctgctgctgagattcctggccgccatggccgccgtgggcgccctggagcccctgctgcccggccccctgctggccgtgcacccccacgccggcaccgccccccccgccaaccagctgccctggcccgtgctgtgcagccccgtggccggcgtgatcctgctggccctgggcgccctgctggtgctgcagctgatcagaagaagaagaagagagcacggcgccctgtggctgccccccggcttcaccagaagacccagaacccagagcgccccccacagaagaagaccccccctgggcgaggacagcatcggcctgaaggccctgaagcccaaggccgaggtggacgaggacggcgtggtgatgtgcagcggccccgaggagggcgaggaggtgggccaggccgaggagaccggcccccccagcacctgccagctgtggagcctgagcggcggctgcggcgccctgccccaggccgccatgctgacccccccccaggagagcgagatggaggcccccgacctggacaccagaggccccgacggcgtgacccccctgatgagcgccgtgtgctgcggcgaggtgcagagcggcaccttccagggcgcctggctgggctgccccgagccctgggagcccctgctggacggcggcgcctgcccccaggcccacaccgtgggcaccggcgagacccccctgcacctggccgccagattcagcagacccaccgccgccagaagactgctggaggccggcgccaaccccaaccagcccgacagagccggcagaacccccctgcacgccgccgtggccgccgacgccagagaggtgtgccagctgctgctgagaagcagacagaccgccgtggacgccagaaccgaggacggcaccacccccctgatgctggccgccagactggccgtggaggacctggtggaggagctgatcgccgcccaggccgacgtgggcgccagagacaagtggggcaagaccgccctgcactgggccgccgccgtgaacaacgccagagccgccagaagcctgctgcaggccggcgccgacaaggacgcccaggacaacagagagcagacccccctgttcctggccgccagagagggcgccgtggaggtggcccagctgctgctgggcctgggcgccgccagagagctgagagaccaggccggcctggcccccgccgacgtggcccaccagagaaaccactgggacctgctgaccctgctggagggcgccggcccccccgaggccagacacaaggccacccccggcagagaggccggccccttccccagagccagaaccgtgagcgtgagcgtgcccccccacggcggcggcgccctgcccagatgcagaaccctgagcgccggcgccggccccagaggcggcggcgcctgcctgcaggccagaacctggagcgtggacctggccgccagaggcggcggcgcctacagccactgcagaagcctgagcggcgtgggcgccggcggcggccccacccccagaggcagaagattcagcgccggcatgagaggccccagacccaaccccgccatcatgagaggcagatacggcgtggccgccggcagaggcggcagagtgagcaccgacgactggccctgcgactgggtggccctgggcgcctgcggcagcgccagcaacatccccatcccccccccctgcctgacccccagccccgagagaggcagcccccagctggactgcggcccccccgccctgcaggagatgcccatcaaccagggcggcgagggcaagaagtag

SEQ ID NO: 91338 - DNA, 6012 bp, synthetic construct; identical to SEQ ID NO: 91332
  misc_feature 1..6012: note = Description of Artificial Sequence: Synthetic coding sequence
  source 1..6012: mol_type = other DNA

SEQ ID NO: 91339 - DNA, 561 bp, synthetic construct; identical to SEQ ID NO: 91336
  misc_feature 1..561: note = Description of Artificial Sequence: Synthetic coding sequence
  source 1..561: mol_type = other DNA

SEQ ID NO: 91340 - DNA, 561 bp, synthetic construct; identical to SEQ ID NO: 91336
  misc_feature 1..561: note = Description of Artificial Sequence: Synthetic coding sequence
  source 1..561: mol_type = other DNA

SEQ ID NO: 91341 - DNA, 561 bp, synthetic construct; identical to SEQ ID NO: 91336
  misc_feature 1..561: note = Description of Artificial Sequence: Synthetic coding sequence
  source 1..561: mol_type = other DNA

SEQ ID NO: 91342 - DNA, 561 bp, synthetic construct; identical to SEQ ID NO: 91336
  misc_feature 1..561: note = Description of Artificial Sequence: Synthetic coding sequence
  source 1..561: mol_type = other DNA

SEQ ID NO: 91343 - DNA, 561 bp, synthetic construct; identical to SEQ ID NO: 91336
  misc_feature 1..561: note = Description of Artificial Sequence: Synthetic coding sequence
  source 1..561: mol_type = other DNA

SEQ ID NO: 91344 - DNA, 1491 bp, synthetic construct
  misc_feature 1..1491: note = Description of Artificial Sequence: Synthetic coding sequence
  source 1..1491: mol_type = other DNA
atgggcagaggcgtgagagtgctgctgctgctgagcctgctgcactgcgccggcggcagcgagggcagaaagacctggagaagaagaggccagcagcccccccccccccccagaaccgaggccgcccccgccgccggccagcccgtggagagcttccccctggacttcaccgccgtggagggcaacatggacagcttcatggcccaggtgaagagcctggcccagagcctgtacccctgcagcgcccagcagctgaacgaggacctgagactgcacctgctgctgaacaccagcgtgacctgcaacgacggcagccccgccggctactacctgaaggagagcagaggcagcagaagatggctgctgttcctggagggcggctggtactgcttcaacagagagaactgcgacagcagatacgacaccatgagaagactgatgagcagcagagactggcccagaaccagaaccggcaccggcatcctgagcagccagcccgaggagaacccctactggtggaacgccaacatggtgttcatcccctactgcagcagcgacgtgtggagcggcgccagcagcaagagcgagaagaacgagtacgccttcatgggcgccctgatcatccaggaggtggtgagagagctgctgggcagaggcctgagcggcgccaaggtgctgctgctggccggcagcagcgccggcggcaccggcgtgctgctgaacgtggacagagtggccgagcagctggagaagctgggctaccccgccatccaggtgagaggcctggccgacagcggctggttcctggacaacaagcagtacagacacaccgactgcgtggacaccatcacctgcgcccccaccgaggccatcagaagaggcatcagatactggaacggcgtggtgcccgagagatgcagaagacagttccaggagggcgaggagtggaactgcttcttcggctacaaggtgtaccccaccctgagatgccccgtgttcgtggtgcagtggctgttcgacgaggcccagctgaccgtggacaacgtgcacctgaccggccagcccgtgcaggagggcctgagactgtacatccagaacctgggcagagagctgagacacaccctgaaggacgtgcccgccagcttcgcccccgcctgcctgagccacgagatcatcatcagaagccactggaccgacgtgcaggtgaagggcaccagcctgcccagagccctgcactgctgggacagaagcctgcacgacagccacaaggccagcaagacccccctgaagggctgccccgtgcacctggtggacagctgcccctggccccactgcaaccccagctgccccaccgtgagagaccagttcaccggccaggagatgaacgtggcccagttcctgatgcacatgggcttcgacatgcagaccgtggcccagccccagggcctggagcccagcgagctgctgggcatgctgagcaacggcagctag

SEQ ID NO: 91345 - DNA, 888 bp, synthetic construct
  misc_feature 1..888: note = Description of Artificial Sequence: Synthetic coding sequence
  source 1..888: mol_type = other DNA
atgggcagaggcgtgagagtgctgctgctgctgagcctgctgcactgcgccggcggcagcgagggcagaaagacctggagaagaagaggccagcagcccccccccccccccagaaccgaggccgcccccgccgccggccagcccgtggagagcttccccctggacttcaccgccgtggagggcaacatggacagcttcatggcccaggtgaagagcctggcccagagcctgtacccctgcagcgcccagcagctgaacgaggacctgagactgcacctgctgctgaacaccagcgtgacctgcaacgacggcagccccgccggctactacctgaaggagagcagaggcagcagaagatggctgctgttcctggagggcggctggtactgcttcaacagagagaactgcgacagcagatacgacaccatgagaagactgatgagcagcagagactggcccagaaccagaaccggcaccggcatcctgagcagccagcccgaggagaacccctactggtggaacgccaacatggtgttcatcccctactgcagcagcgacgtgtggagcggcgccagcagcaagagcgagaagaacgagtacgccttcatgggcgccctgatcatccaggaggtggtgagagagctgctgggcagaggcctgagcggcgccaaggtgctgctgctggccggcagcagcgccggcggcaccggcgtgctgctgaacgtggacagagtggccgagcagctggagaagctgggctaccccgccatccaggtgagaggcctggccgacagcggctggttcctggacaacaagcagtacagacacaccgactgcgtggacaccatcacctgcgcccccaccgaggccatcagaagaggcatctag

SEQ ID NO: 91346 - DNA, 4080 bp, synthetic construct
  misc_feature 1..4080: note = Description of Artificial Sequence: Synthetic coding sequence
  source 1..4080: mol_type = other DNA
atggccgaggccggcctgagaggctggctgctgtgggccctgctgctgagactggcccagagcgagccctacaccaccatccaccagcccggctactgcgccttctacgacgagtgcggcaagaaccccgagctgagcggcagcctgatgaccctgagcaacgtgagctgcctgagcaacacccccgccagaaagatcaccggcgaccacctgatcctgctgcagaagatctgccccagactgtacaccggccccaacacccaggcctgctgcagcgccaagcagctggtgagcctggaggccagcctgagcatcaccaaggccctgctgaccagatgccccgcctgcagcgacaacttcgtgaacctgcactgccacaacacctgcagccccaaccagagcctgttcatcaacgtgaccagagtggcccagctgggcgccggccagctgcccgccgtggtggcctacgaggccttctaccagcacagcttcgccgagcagagctacgacagctgcagcagagtgagagtgcccgccgccgccaccctggccgtgggcaccatgtgcggcgtgtacggcagcgccctgtgcaacgcccagagatggctgaacttccagggcgacaccggcaacggcctggcccccctggacatcaccttccacctgctggagcccggccaggccgtgggcagcggcatccagcccctgaacgagggcgtggccagatgcaacgagagccagggcgacgacgtggccacctgcagctgccaggactgcgccgccagctgccccgccatcgccagaccccaggccctggacagcaccttctacctgggccagatgcccggcagcctggtgctgatcatcatcctgtgcagcgtgttcgccgtggtgaccatcctgctggtgggcttcagagtggcccccgccagagacaagagcaagatggtggaccccaagaagggcaccagcctgagcgacaagctgagcttcagcacccacaccctgctgggccagttcttccagggctggggcacctgggtggccagctggcccctgaccatcctggtgctgagcgtgatccccgtggtggccctggccgccggcctggtgttcaccgagctgaccaccgaccccgtggagctgtggagcgcccccaacagccaggccagaagcgagaaggccttccacgaccagcacttcggccccttcttcagaaccaaccaggtgatcctgaccgcccccaacagaagcagctacagatacgacagcctgctgctgggccccaagaacttcagcggcatcctggacctggacctgctgctggagctgctggagctgcaggagagactgagacacctgcaggtgtggagccccgaggcccagagaaacatcagcctgcaggacatctgctacgcccccctgaaccccgacaacaccagcctgtacgactgctgcatcaacagcctgctgcagtacttccagaacaacagaaccctgctgctgctgaccgccaaccagaccctgatgggccagaccagccaggtggactggaaggaccacttcctgtactgcgccaacgcccccctgaccttcaaggacggcaccgccctggccctgagctgcatggccgactacggcgcccccgtgttccccttcctggccatcggcggctacaagggcaaggactacagcgaggccgaggccctgatcatgaccttcagcctgaacaactaccccgccggcgaccccagactggcccaggccaagctgtgggaggaggccttcctggaggagatgagagccttccagagaagaatggccggcatgttccaggtgaccttcatggccgagagaagcctggaggacgagatcaacagaaccaccgccgaggacctgcccatcttcgccaccagctacatcgtgatcttcctgtacatcagcctggccctgggcagctacagcagctggagcagagtgatggtggacagcaaggccaccctgggcctgggcggcgtggccgtggtgctgggcgccgtgatggccgccatgggcttcttcagctacctgggcatcagaagcagcctggtgatcctgcaggtggtgcccttcctggtgctgagcgtgggcgccgacaacatcttcatcttcgtgctggagtaccagagactgcccagaagacccggcgagcccagagaggtgcacatcggcagagccctgggcagagtggcccccagcatgctgctgtgcagcctgagcgaggccatctgcttcttcctgggcgccctgacccccatgcccgccgtgagaaccttcgccctgaccagcggcctggccgtgatcctggacttcctgctgcagatgagcgccttcgtggccctgctgagcctggacagcaagagacaggaggccagcagactggacgtgtgctgctgcgtgaagccccaggagctgcccccccccggccagggcgagggcctgctgctgggcttcttccagaaggcctacgcccccttcctgctgcactggatcaccagaggcgtggtgctgctgctgttcctggccctgttcggcgtgagcctgtacagcatgtgccacatcagcgtgggcctggaccaggagctggccctgcccaaggacagctacctgctggactacttcctgttcctgaacagatacttcgaggtgggcgcccccgtgtacttcgtgaccaccctgggctacaacttcagcagcgaggccggcatgaacgccatctgcagcagcgccggctgcaacaacttcagcttcacccagaagatccagtacgccaccgagttccccgagcagagctacctggccatccccgccagcagctgggtggacgacttcatcgactggctgacccccagcagctgctgcagactgtacatcagcggccccaacaaggacaagttctgccccagcaccgtgaacagcctgaactgcctgaagaactgcatgagcatcaccatgggcagcgtgagacccagcgtggagcagttccacaagtacctgccctggttcctgaacgacagacccaacatcaagtgccccaagggcggcctggccgcctacagcaccagcgtgaacctgaccagcgacggccaggtgctggacaccgtggccatcctgagccccagactggagtacagcggcaccatcagcgcccactgcaacctgtacctgctggacagcaccagcagattcatggcctaccacaagcccctgaagaacagccaggactacaccgaggccctgagagccgccagagagctggccgccaacatcaccgccgacctgagaaaggtgcccggcaccgaccccgccttcgaggtgttcccctacaccatcaccaacgtgttctacgagcagtacctgaccatcctgcccgagggcctgttcatgctgagcctgtgcctggtgcccaccttcgccgtgagctgcctgctgctgggcctggacctgagaagcggcctgctgaacctgctgagcatcgtgatgatcctggtggacaccgtgggcttcatggccctgtggggcatcagctacaacgccgtgagcctgatcaacctggtgagcgccgtgggcatgagcgtggagttcgtgagccacatcaccagaagcttcgccatcagcaccaagcccacctggctggagagagccaaggaggccaccatcagcatgggcagcgccgtgttcgccggcgtggccatgaccaacctgcccggcatcctggtgctgggcctggccaaggcccagctgatccagatcttcttcttcagactgaacctgctgatcaccctgctgggcctgctgcacggcctggtgttcctgcccgtgatcctgagctacgtgggccccgacgtgaaccccgccctggccctggagcagaagagagccgaggaggccgtggccgccgtgatggtggccagctgccccaaccaccccagcagagtgagcaccgccgacaacatctacgtgaaccacagcttcgagggcagcatcaagggcgccggcgccatcagcaacttcctgcccaacaacggcagacagttctag

SEQ ID NO: 91347 - DNA, 3999 bp, synthetic construct
  misc_feature 1..3999: note = Description of Artificial Sequence: Synthetic coding sequence
  source 1..3999: mol_type = other DNA
atggccgaggccggcctgagaggctggctgctgtgggccctgctgctgagactggcccagagcgagccctacaccaccatccaccagcccggctactgcgccttctacgacgagtgcggcaagaaccccgagctgagcggcagcctgatgaccctgagcaacgtgagctgcctgagcaacacccccgccagaaagatcaccggcgaccacctgatcctgctgcagaagatctgccccagactgtacaccggccccaacacccaggcctgctgcagcgccaagcagctggtgagcctggaggccagcctgagcatcaccaaggccctgctgaccagatgccccgcctgcagcgacaacttcgtgaacctgcactgccacaacacctgcagccccaaccagagcctgttcatcaacgtgaccagagtggcccagctgggcgccggccagctgcccgccgtggtggcctacgaggccttctaccagcacagcttcgccgagcagagctacgacagctgcagcagagtgagagtgcccgccgccgccaccctggccgtgggcaccatgtgcggcgtgtacggcagcgccctgtgcaacgcccagagatggctgaacttccagggcgacaccggcaacggcctggcccccctggacatcaccttccacctgctggagcccggccaggccgtgggcagcggcatccagcccctgaacgagggcgtggccagatgcaacgagagccagggcgacgacgtggccacctgcagctgccaggactgcgccgccagctgccccgccatcgccagaccccaggccctggacagcaccttctacctgggccagatgcccggcagcctggtgctgatcatcatcctgtgcagcgtgttcgccgtggtgaccatcctgctggtgggcttcagagtggcccccgccagagacaagagcaagatggtggaccccaagaagggcaccagcctgagcgacaagctgagcttcagcacccacaccctgctgggccagttcttccagggctggggcacctgggtggccagctggcccctgaccatcctggtgctgagcgtgatccccgtggtggccctggccgccggcctggtgttcaccgagctgaccaccgaccccgtggagctgtggagcgcccccaacagccaggccagaagcgagaaggccttccacgaccagcacttcggccccttcttcagaaccaaccaggtgatcctgaccgcccccaacagaagcagctacagatacgacagcctgctgctgggccccaagaacttcagcggcatcctggacctggacctgctgctggagctgctggagctgcaggagagactgagacacctgcaggtgtggagccccgaggcccagagaaacatcagcctgcaggacatctgctacgcccccctgaaccccgacaacaccagcctgtacgactgctgcatcaacagcctgctgcagtacttccagaacaacagaaccctgctgctgctgaccgccaaccagaccctgatgggccagaccagccaggtggactggaaggaccacttcctgtactgcgccaacgcccccctgaccttcaaggacggcaccgccctggccctgagctgcatggccgactacggcgcccccgtgttccccttcctggccatcggcggctacaagggcaaggactacagcgaggccgaggccctgatcatgaccttcagcctgaacaactaccccgccggcgaccccagactggcccaggccaagctgtgggaggaggccttcctggaggagatgagagccttccagagaagaatggccggcatgttccaggtgaccttcatggccgagagaagcctggaggacgagatcaacagaaccaccgccgaggacctgcccatcttcgccaccagctacatcgtgatcttcctgtacatcagcctggccctgggcagctacagcagctggagcagagtgatggtggacagcaaggccaccctgggcctgggcggcgtggccgtggtgctgggcgccgtgatggccgccatgggcttcttcagctacctgggcatcagaagcagcctggtgatcctgcaggtggtgcccttcctggtgctgagcgtgggcgccgacaacatcttcatcttcgtgctggagtaccagagactgcccagaagacccggcgagcccagagaggtgcacatcggcagagccctgggcagagtggcccccagcatgctgctgtgcagcctgagcgaggccatctgcttcttcctgggcgccctgacccccatgcccgccgtgagaaccttcgccctgaccagcggcctggccgtgatcctggacttcctgctgcagatgagcgccttcgtggccctgctgagcctggacagcaagagacaggaggccagcagactggacgtgtgctgctgcgtgaagccccaggagctgcccccccccggccagggcgagggcctgctgctgggcttcttccagaaggcctacgcccccttcctgctgcactggatcaccagaggcgtggtgctgctgctgttcctggccctgttcggcgtgagcctgtacagcatgtgccacatcagcgtgggcctggaccaggagctggccctgcccaaggacagctacctgctggactacttcctgttcctgaacagatacttcgaggtgggcgcccccgtgtacttcgtgaccaccctgggctacaacttcagcagcgaggccggcatgaacgccatctgcagcagcgccggctgcaacaacttcagcttcacccagaagatccagtacgccaccgagttccccgagcagagctacctggccatccccgccagcagctgggtggacgacttcatcgactggctgacccccagcagctgctgcagactgtacatcagcggccccaacaaggacaagttctgccccagcaccgtgaacagcctgaactgcctgaagaactgcatgagcatcaccatgggcagcgtgagacccagcgtggagcagttccacaagtacctgccctggttcctgaacgacagacccaacatcaagtgccccaagggcggcctggccgcctacagcaccagcgtgaacctgaccagcgacggccaggtgctggccagcagattcatggcctaccacaagcccctgaagaacagccaggactacaccgaggccctgagagccgccagagagctggccgccaacatcaccgccgacctgagaaaggtgcccggcaccgaccccgccttcgaggtgttcccctacaccatcaccaacgtgttctacgagcagtacctgaccatcctgcccgagggcctgttcatgctgagcctgtgcctggtgcccaccttcgccgtgagctgcctgctgctgggcctggacctgagaagcggcctgctgaacctgctgagcatcgtgatgatcctggtggacaccgtgggcttcatggccctgtggggcatcagctacaacgccgtgagcctgatcaacctggtgagcgccgtgggcatgagcgtggagttcgtgagccacatcaccagaagcttcgccatcagcaccaagcccacctggctggagagagccaaggaggccaccatcagcatgggcagcgccgtgttcgccggcgtggccatgaccaacctgcccggcatcctggtgctgggcctggccaaggcccagctgatccagatcttcttcttcagactgaacctgctgatcaccctgctgggcctgctgcacggcctggtgttcctgcccgtgatcctgagctacgtgggccccgacgtgaaccccgccctggccctggagcagaagagagccgaggaggccgtggccgccgtgatggtggccagctgccccaaccaccccagcagagtgagcaccgccgacaacatctacgtgaaccacagcttcgagggcagcatcaagggcgccggcgccatcagcaacttcctgcccaacaacggcagacagttctag

SEQ ID NO: 91348 - DNA, 3861 bp, synthetic construct
  misc_feature 1..3861: note = Description of Artificial Sequence: Synthetic coding sequence
  source 1..3861: mol_type = other DNA
atggccgaggccggcctgagaggctggctgctgtgggccctgctgctgagactggcccagagcgagccctacaccaccatccaccagcccggctactgcgccttctacgacgagtgcggcaagaaccccgagctgagcggcagcctgatgaccctgagcaacgtgagctgcctgagcaacacccccgccagaaagatcaccggcgaccacctgatcctgctgcagaagatctgccccagactgtacaccggccccaacacccaggcctgctgcagcgccaagcagctggtgagcctggaggccagcctgagcatcaccaaggccctgctgaccagatgccccgcctgcagcgacaacttcgtgaacctgcactgccacaacacctgcagccccaaccagagcctgttcatcaacgtgaccagagtggcccagctgggcgccggccagctgcccgccgtggtggcctacgaggccttctaccagcacagcttcgccgagcagagctacgacagctgcagcagagtgagagtgcccgccgccgccaccctggccgtgggcaccatgtgcggcgtgtacggcagcgccctgtgcaacgcccagagatggctgaacttccagggcgacaccggcaacggcctggcccccctggacatcaccttccacctgctggagcccggccaggccgtgggcagcggcatccagcccctgaacgagggcgtggccagatgcaacgagagccagggcgacgacgtggccacctgcagctgccaggactgcgccgccagctgccccgccatcgccagaccccaggccctggacagcaccttctacctgggccagatgcccggcagcctggtgctgatcatcatcctgtgcagcgtgttcgccgtggtgaccatcctgctggtgggcttcagagtggcccccgccagagacaagagcaagatggtggaccccaagaagggcaccagcctgagcgacaagctgagcttcagcacccacaccctgctgggccagttcttccagggctggggcacctgggtggccagctggcccctgaccatcctggtgctgagcgtgatccccgtggtggccctggccgccggcctggtgttcaccgagctgaccaccgaccccgtggagctgtggagcgcccccaacagccaggccagaagcgagaaggccttccacgaccagcacttcggccccttcttcagaaccaaccaggtgatcctgaccgcccccaacagaagcagctacagatacgacagcctgctgctgggccccaagaacttcagcggcatcctggacctggacctgctgctggagctgctggagctgcaggagagactgagacacctgcaggtgtggagccccgaggcccagagaaacatcagcctgcaggacatctgctacgcccccctgaaccccgacaacaccagcctgtacgactgctgcatcaacagcctgctgcagtacttccagaacaacagaaccctgctgctgctgaccgccaaccagaccctgatgggccagaccagccaggtggactggaaggaccacttcctgtactgcgccaacgcccccctgaccttcaaggacggcaccgccctggccctgagctgcatggccgactacggcgcccccgtgttccccttcctggccatcggcggctacaagggcaaggactacagcgaggccgaggccctgatcatgaccttcagcctgaacaactaccccgccggcgaccccagactggcccaggccaagctgtgggaggaggccttcctggaggagatgagagccttccagagaagaatggccggcatgttccaggtgaccttcatggccgagagaagcctggaggacgagatcaacagaaccaccgccgaggacctgcccatcttcgccaccagctacatcgtgatcttcctgtacatcagcctggccctgggcagctacagcagctggagcagagtgatggtggacagcaaggccaccctgggcctgggcggcgtggccgtggtgctgggcgccgtgatggccgccatgggcttcttcagctacctgggcatcagaagcagcctggtgatcctgcaggtggtgcccttcctggtgctgagcgtgggcgccgacaacatcttcatcttcgtgctggagtaccagagactgcccagaagacccggcgagcccagagaggtgcacatcggcagagccctgggcagagtggcccccagcatgctgctgtgcagcctgagcgaggccatctgcttcttcctgggcgccctgacccccatgcccgccgtgagaaccttcgccctgaccagcggcctggccgtgatcctggacttcctgctgcagatgagcgccttcgtggccctgctgagcctggacagcaagagacaggaggccagcagactggacgtgtgctgctgcgtgaagccccaggagctgcccccccccggccagggcgagggcctgctgctgggcttcttccagaaggcctacgcccccttcctgctgcactggatcaccagaggcgtggtggtgggcgcccccgtgtacttcgtgaccaccctgggctacaacttcagcagcgaggccggcatgaacgccatctgcagcagcgccggctgcaacaacttcagcttcacccagaagatccagtacgccaccgagttccccgagcagagctacctggccatccccgccagcagctgggtggacgacttcatcgactggctgacccccagcagctgctgcagactgtacatcagcggccccaacaaggacaagttctgccccagcaccgtgaacagcctgaactgcctgaagaactgcatgagcatcaccatgggcagcgtgagacccagcgtggagcagttccacaagtacctgccctggttcctgaacgacagacccaacatcaagtgccccaagggcggcctggccgcctacagcaccagcgtgaacctgaccagcgacggccaggtgctggccagcagattcatggcctaccacaagcccctgaagaacagccaggactacaccgaggccctgagagccgccagagagctggccgccaacatcaccgccgacctgagaaaggtgcccggcaccgaccccgccttcgaggtgttcccctacaccatcaccaacgtgttctacgagcagtacctgaccatcctgcccgagggcctgttcatgctgagcctgtgcctggtgcccaccttcgccgtgagctgcctgctgctgggcctggacctgagaagcggcctgctgaacctgctgagcatcgtgatgatcctggtggacaccgtgggcttcatggccctgtggggcatcagctacaacgccgtgagcctgatcaacctggtgagcgccgtgggcatgagcgtggagttcgtgagccacatcaccagaagcttcgccatcagcaccaagcccacctggctggagagagccaaggaggccaccatcagcatgggcagcgccgtgttcgccggcgtggccatgaccaacctgcccggcatcctggtgctgggcctggccaaggcccagctgatccagatcttcttcttcagactgaacctgctgatcaccctgctgggcctgctgcacggcctggtgttcctgcccgtgatcctgagctacgtgggccccgacgtgaaccccgccctggccctggagcagaagagagccgaggaggccgtggccgccgtgatggtggccagctgccccaaccaccccagcagagtgagcaccgccgacaacatctacgtgaaccacagcttcgagggcagcatcaagggcgccggcgccatcagcaacttcctgcccaacaacggcagacagttctag

SEQ ID NO: 91349 - DNA, 783 bp, synthetic construct
  misc_feature 1..783: note = Description of Artificial Sequence: Synthetic coding sequence
  source 1..783: mol_type = other DNA
atgccccagaacgagtacatcgagctgcacagaaagagatacggctacagactggactaccacgagaagaagagaaagaaggagagcagagaggcccacgagagaagcaagaaggccaagaagatgatcggcctgaaggccaagctgtaccacaagcagagacacgccgagaagatccagatgaagaagaccatcaagatgcacgagaagagaaacaccaagcagaagaacgacgagaagaccccccagggcgccgtgcccgcctacctgctggacagagagggccagagcagagccaaggtgctgagcaacatgatcaagcagaagagaaaggagaaggccggcaagtgggaggtgcccctgcccaaggtgagagcccagggcgagaccgaggtgctgaaggtgatcagaaccggcaagagaaagaagaaggcctggaagagaatggtgaccaaggtgtgcttcgtgggcgacggcttcaccagaaagccccccaagtacgagagattcatcagacccatgggcctgagattcaagaaggcccacgtgacccaccccgagctgaaggccaccttctgcctgcccatcctgggcgtgaagaagaaccccagcagccccctgtacaccaccctgggcgtgatcaccaagggcaccgtgatcgaggtgaacgtgagcgagctgggcctggtgacccagggcggcaaggtgatctggggcaagtacgcccaggtgaccaacaaccccgagaacgacggctgcatcaacgccgtgctgctggtgtag

SEQ ID NO: 91350 - DNA, 1509 bp, synthetic construct
  misc_feature 1..1509: note = Description of Artificial Sequence: Synthetic coding sequence
  source 1..1509: mol_type = other DNA
atgagctgccccgtgcccgcctgctgcgccctgctgctggtgctgggcctgtgcagagccagacccagaaacgccctgctgctgctggccgacgacggcggcttcgagagcggcgcctacaacaacagcgccatcgccaccccccacctggacgccctggccagaagaagcctgctgttcagaaacgccttcaccagcgtgagcagctgcagccccagcagagccagcctgctgaccggcctgccccagcaccagaacggcatgtacggcctgcaccaggacgtgcaccacttcaacagcttcgacaaggtgagaagcctgcccctgctgctgagccaggccggcgtgagaaccggcatcatcggcaagaagcacgtgggccccgagaccgtgtaccccttcgacttcgcctacaccgaggagaacggcagcgtgctgcaggtgggcagaaacatcaccagaatcaagctgctggtgagaaagttcctgcagacccaggacgacagacccttcttcctgtacgtggccttccacgacccccacagatgcggccacagccagccccagtacggcaccttctgcgagaagttcggcaacggcgagagcggcatgggcagaatccccgactggaccccccaggcctacgaccccctggacgtgctggtgccctacttcgtgcccaacacccccgccgccagagccgacctggccgcccagtacaccaccgtgggcagaatggaccagggcgtgggcctggtgctgcaggagctgagagacgccggcgtgctgaacgacaccctggtgatcttcaccagcgacaacggcatccccttccccagcggcagaaccaacctgtactggcccggcaccgccgagcccctgctggtgagcagccccgagcaccccaagagatggggccaggtgagcgaggcctacgtgagcctgctggacctgacccccaccatcctggactggttcagcatcccctaccccagctacgccatcttcggcagcaagaccatccacctgaccggcagaagcctgctgcccgccctggaggccgagcccctgtgggccaccgtgttcggcagccagagccaccacgaggtgaccatgagctaccccatgagaagcgtgcagcacagacacttcagactggtgcacaacctgaacttcaagatgcccttccccatcgaccaggacttctacgtgagccccaccttccaggacctgctgaacagaaccaccgccggccagcccaccggctggtacaaggacctgagacactactactacagagccagatgggagctgtacgacagaagcagagacccccacgagacccagaacctggccaccgaccccagattcgcccagctgctggagatgctgagagaccagctggccaagtggcagtgggagacccacgacccctgggtgtgcgcccccgacggcgtgctggaggagaagctgagcccccagtgccagcccctgcacaacgagctgtag

SEQ ID NO: 91351 - DNA, 900 bp, synthetic construct
  misc_feature 1..900: note = Description of Artificial Sequence: Synthetic coding sequence
  source 1..900: mol_type = other DNA
atgggcagaatccccgactggaccccccaggcctacgaccccctggacgtgctggtgccctacttcgtgcccaacacccccgccgccagagccgacctggccgcccagtacaccaccgtgggcagaatggaccagggcgtgggcctggtgctgcaggagctgagagacgccggcgtgctgaacgacaccctggtgatcttcaccagcgacaacggcatccccttccccagcggcagaaccaacctgtactggcccggcaccgccgagcccctgctggtgagcagccccgagcaccccaagagatggggccaggtgagcgaggcctacgtgagcctgctggacctgacccccaccatcctggactggttcagcatcccctaccccagctacgccatcttcggcagcaagaccatccacctgaccggcagaagcctgctgcccgccctggaggccgagcccctgtgggccaccgtgttcggcagccagagccaccacgaggtgaccatgagctaccccatgagaagcgtgcagcacagacacttcagactggtgcacaacctgaacttcaagatgcccttccccatcgaccaggacttctacgtgagccccaccttccaggacctgctgaacagaaccaccgccggccagcccaccggctggtacaaggacctgagacactactactacagagccagatgggagctgtacgacagaagcagagacccccacgagacccagaacctggccaccgaccccagattcgcccagctgctggagatgctgagagaccagctggccaagtggcagtgggagacccacgacccctgggtgtgcgcccccgacggcgtgctggaggagaagctgagcccccagtgccagcccctgcacaacgagctgtag

SEQ ID NO: 91352 - DNA, 618 bp, synthetic construct
  misc_feature 1..618: note = Description of Artificial Sequence: Synthetic coding sequence
  source 1..618: mol_type = other DNA
atgagctgccccgtgcccgcctgctgcgccctgctgctggtgctgggcctgtgcagagccagacccagaaacgccctgctgctgctggccgacagagccctgagcgtgagccacctgacccagagaatgaccgaggccctgagagtggccagaaccaccaccgcccccagcccccccagaacctggaccccctggcccgccgccgccagcagcttcgccatgcccagccccagaagcgccgccgccctgcccgccgcccccgccagcagcctggcctgccccagcatcagaatgggctgcaccggctgcaccagaacctgcaccaccagcacccccagcaccagatgcggcgcctgcagatgctgcagcgccaagctggtgtgcgcccaggccagcagcggcagaagcacctggggcagaagaccctgcaccagactgaccctgagaaccagaagaagaatggcccccagcagcagatggggcggcaccagcctggagctgagctgcagcagcggcaacagctgcagactgagaatgaccggcctgagcagcagcaccagccccagcaccacccccaccctgtgggccctgcccgcccccgtgagaaacctgctgtag

SEQ ID NO: 91353 - DNA, 1191 bp, synthetic construct
  misc_feature 1..1191: note = Description of Artificial Sequence: Synthetic coding sequence
  source 1..1191: mol_type = other DNA
atggcctgcgccggcctgctgaccgtgtgcctgctgagaccccccgccccccagccccagccccagacccccagacacccccagctggcccccgaccccggccccgccggccacaccctgttccaggacgtgttcagaagagccgacaagaacgacgacggcaagctgagcttcgaggagttccagaactacttcgccgacggcgtgctgagcctgggcgagctgcaggagctgttcagcggcatcgacggccacctgaccgacaacctggagaccgagaagctgtgcgactacttcagcgagcacctgggcgtgtacagacccgtgctggccgccctggagagcctgaacagagccgtgctggccgccatggacgccaccaagctggagtacgagagagccagcaaggtggaccagttcgtgaccagattcctgctgagagagaccgtgagccagctgcaggccctgcagagcagcctggagggcgccagcgacaccctggaggcccaggcccacggctggagaagcgacgccgagagcgtggaggcccagagcagactgtgcggcagcagaagagccggcagaagagccctgagaagcgtgagcagaagcagcacctggagccccggcagcagcgacaccggcagaagcagcgaggccgagatgcagtggagactgcaggtgaacagactgcaggagctgatcgaccagctggagtgcaaggtgagagccgtgggccccggcccccacaagggcggccccagctggtacccccccgagcccggcccctgctggagacccggcccccacagcgtgcccagccaggcccccagactggagcccctgagagaggaggacctggccaagggccccgacctgcacatcctgatggcccagagacaggtgcaggtggccgaggagggcctgcaggacttccacagagccctgagatgctacgtggacttcaccggcgcccagagccactgcctgcacgtgagcgcccagaagatgctggacggcgccagcttcaccctgtacgagttctggcaggacgaggccagctggagaagacaccagcagagccccggcagcaaggccttccagagaatcctgatcgaccacctgagagcccccgacaccctgaccaccgtgttcttccccgccagctggtggatcatgaacaacaactag

SEQ ID NO: 91354 - DNA, 1089 bp, synthetic construct
  misc_feature 1..1089: note = Description of Artificial Sequence: Synthetic coding sequence
  source 1..1089: mol_type = other DNA
atggcctgcgccggcctgctgaccgtgtgcctgctgagaccccccgccccccagccccagccccagacccccagacacccccagctggcccccgaccccggccccgccggccacaccctgttccaggacgtgttcagaagagccgacaagaacgacgacggcaagctgagcttcgaggagttccagaactacttcgccgacggcgtgctgagcctgggcgagctgcaggagctgttcagcggcatcgacggccacctgaccgacaacctggagaccgagaagctgtgcgactacttcagcgagcacctgggcgtgtacagacccgtgctggccgccctggagagcctgaacagagccgtgctggccgccatggacgccaccaagctggagtacgagagagccagcaaggtggaccagttcgtgaccagattcctgctgagagagaccgtgagccagctgcaggccctgcagagcagcctggagggcgccagcgacaccctggaggcccaggcccacggctggagaagcgacgccgagagcgtggaggcccagagcagactgtgcggcagcagaagagccggcagaagagccctgagaagcgtgagcagaagcagcacctggagccccggcagcagcgacaccggcagaagcagcgaggccgagatgcagtggagactgcaggtgaacagactgcaggagctgatcgaccagctggagtgcaaggcccccagactggagcccctgagagaggaggacctggccaagggccccgacctgcacatcctgatggcccagagacaggtgcaggtggccgaggagggcctgcaggacttccacagagccctgagatgctacgtggacttcaccggcgcccagagccactgcctgcacgtgagcgcccagaagatgctggacggcgccagcttcaccctgtacgagttctggcaggacgaggccagctggagaagacaccagcagagccccggcagcaaggccttccagagaatcctgatcgaccacctgagagcccccgacaccctgaccaccgtgttcttccccgccagctggtggatcatgaacaacaactag

SEQ ID NO: 91355 - DNA, 870 bp, synthetic construct
  misc_feature 1..870: note = Description of Artificial Sequence: Synthetic coding sequence
  source 1..870: mol_type = other DNA
atggcctgcgccggcctgctgaccgtgtgcctgctgagaccccccgccccccagccccagccccagacccccagacacccccagctggcccccgaccccggccccgccggccacaccctgttccaggacgtgttcagaagagccgacaagaacgacgacggcaagctgagcttcgaggagttccagaactacttcgccgacggcgtgctgagcctgggcgagctgcaggagctgttcagcggcatcgacggccacctgaccgacaacctggagaccgagaagctgtgcgactacttcagcgagcacctgggcgtgtacagacccgtgctggccgccctggagagcctgaacagagccgtgctggccgccatggacgccaccaagctggagtacgagagagccagcaaggtggaccagttcgtgaccagattcctgctgagagagaccgtgagccagctgcaggccctgcagagcagcctggagggcgccagcgacaccctggaggcccaggcccacggctggagaagcgacgccgagagcgtggaggcccagagcagactgtgcggcagcagaagagccggcagaagagccctgagaagcgtgagcagaagcagcacctggagccccggcagcagcgacaccggcagaagcagcgaggccgagatgcagtggagactgcaggtgaacagactgcaggagctgatcgaccagctggagtgcaagcacatcctgatggcccagagacaggtgcaggtggccgaggagggcctgcaggacttccacagagccctgagatgctacgtggacttcaccggcgcccagagccactgcctgcacgtgagcgcccagaagatgctggacggcgcctag

SEQ ID NO: 91356 - DNA, 423 bp, synthetic construct
  misc_feature 1..423: note = Description of Artificial Sequence: Synthetic coding sequence
  source 1..423: mol_type = other DNA
atggccagcgtggacttcaagacctacgtggaccaggcctgcagagccgccgaggagttcgtgaacgtgtactacaccaccatggacaagagaagaagactgctgagcagactgtacatgggcaccgccaccctggtgtggaacggcaacgccgtgagcggccaggagagcctgagcgagttcttcgagatgctgcccagcagcgagttccagatcagcgtggtggactgccagcccgtgcacgacgaggccacccccagccagaccaccgtgctggtggtgatctgcggcagcgtgaagttcgagggcaacaagcagagagacttcaaccagaacttcatcctgaccgcccaggccagccccagcaacaccgtgtggaagatcgccagcgactgcttcagattccaggactgggccagctag

SEQ ID NO: 91357 - DNA, 984 bp, synthetic construct
  misc_feature 1..984: note = Description of Artificial Sequence: Synthetic coding sequence
  source 1..984: mol_type = other DNA
atggccgtgcccgccaagaagagaaagatgaacttcagcgagagagaggtggagatcatcgtggaggagctggagctgaagaagcacctgctggtgaaccacttcaacgccggcgtgcccctggccgccaagagcgccgcctggcacggcatcctgagaagagtgaacgccgtggccacctgcagaagagagctgcccgaggtgaagaagaagtggagcgacctgaagaccgaggtgagaagaaaggtggcccaggtgagagccgccgtggagggcggcgaggcccccggccccaccgaggaggacggcgccggcggccccggcaccggcggcggcagcggcggcggcggccccgccgtggcccccgtgctgctgacccccatgcagcagagaatctgcaacctgctgggcgaggccaccatcatcagcctgcccagcaccaccgagatccaccccgtggccctgggccccagcgccaccgccgccgccgccaccgtgaccctgacccagatccccaccgagaccacctaccacaccctggaggagggcgtggtggagtactgcaccgccgaggcccccccccccctgccccccgagacccccgtggacatgatggcccagcacgccgacaccagcgtgaagccccaggccctgaagagcagaatcgccctgaacagcgccaagctgatccaggagcagagagtgaccaacctgcacgtgaaggagatcgcccagcacctggagcagcagaacgacctgctgcagatgatcagaagaagccaggaggtgcaggcctgcgcccaggagagacaggcccaggccatggagggcacccaggccgccctgagcgtgctgatccaggtgctgagacccatgatcaaggacttcagaagatacctgcagagcaacaccgccaaccccgcccccgccagcgaccccggccaggtggcccagaacggccagcccgacagcatcatccagtag

SEQ ID NO: 91358 - DNA, 1485 bp, synthetic construct
  misc_feature 1..1485: note = Description of Artificial Sequence: Synthetic coding sequence
  source 1..1485: mol_type = other DNA
atggaggtggtggaggccgccgccgcccagctggagaccctgaagttcaacggcaccgacttcggcgtgggcgagggccccgccgcccccagccccggcagcgcccccgtgcccggcacccagccccccctgcagagcttcgagggcagccccgacgccggccagaccgtggaggtgaagcccgccggcgagcagcccctgcagcccgtgctgaacgccgtggccgccggcacccccgccccccagccccagccccccgccgagagccccgcctgcggcgactgcgtgaccagccccggcgccgccgagcccgccagagcccccgacagcctggagaccagcgacagcgacagcgacagcgacagcgagaccgacagcgacagcagcagcagcagcagcagcagcagcagcagcagcagcagcagcagcagcagctgcatcagcctgccccccgtgctgagcgacggcgacgacgacctgcagatcgagaaggagaacaagaacttccccctgaagaccaaggacgagctgctgctgaacgagctgcccagcgtggaggagctgaccatcatcctgcccgaggacatcgagctgaagcccctgggcatggtgagcagcatcatcgagcagctggtgatcatcgagagcatgaccaacctgccccccgtgaacgaggagaccgtgatcttcaagagcgacagacaggccgccggcaagatcttcgagatcttcggccccgtggcccaccccttctacgtgctgagattcaacagcagcgaccacatcgagagcaagggcatcaagatcaaggagaccatgtacttcgcccccagcatgaaggacttcacccagtacatcttcaccgagaagctgaagcaggacaagggcagcgacgccagctggaagaacgaccaggagcccccccccgaggccctggacttcagcgacgacgagaaggagaaggaggccaagcagagaaagaagagccagatccagggcagaaagaagctgaagagcgagttcaacgagcccggcgaggacttcaccgaggtgcaccagaactggaacgcccacagcagcgccagcgagcacgccaagggctacagaaacagagagttcaccagaggcttcagcagagccagataccccagaagctgccacggcagaccccccccccagcacttctacaacagcgagcacatggtgagccaggagaccagcggcttccccagccagagacagaacaaccccatcatgccccagtaccccttccccctgcccgtgttcgacatgcacaacttccccctgagacccccccccccccccccccccccccccgtgaacatgggctgggccacccccaacatggccgcccaccccctgctgaacctgccctacagcctgccccccccccccccccccccccccctgccccccccccccagcagcggcgacagcaacagccacttcggcccctactactag

SEQ ID NO: 91359 - DNA, 1170 bp, synthetic construct
  misc_feature 1..1170: note = Description of Artificial Sequence: Synthetic coding sequence
  source 1..1170: mol_type = other DNA
atggaggtggtggaggccgccgccgcccagctggagaccctgaagttcaacggcaccgacttcggcgtgggcgagggccccgccgcccccagccccggcagcgcccccgtgcccggcacccagccccccctgcagagcttcgagggcagccccgacgccggccagaccgtggaggtgaagcccgccggcgagcagcccctgcagcccgtgctgaacgccgtggccgccggcacccccgccccccagccccagccccccgccgagagccccgcctgcggcgactgcgtgaccagccccggcgccgccgagcccgccagagcccccgacagcctggagaccagcgacagcgacagcgacagcgacagcgagaccgacagcgacagcagcagcagcagcagcagcagcagcagcagcagcagcagcagcagcagcagctgcatcagcctgccccccgtgctgagcgacggcgacgacgacctgcagatcgagaaggagaacaagaacttccccctgaagaccaaggacgagctgctgctgaacgagctgcccagcgtggaggagctgaccatcatcctgcccgaggacatcgagctgaagcccctgggcatggtgagcagcatcatcgagcagctggtgatcatcgagagcatgaccaacctgccccccgtgaacgaggagaccgtgatcttcaagagcgacagacaggccgccggcaagatcttcgagatcttcggccccgtggcccaccccttctacgtgctgagattcaacagcagcgaccacatcgagagcaagggcatcaagatcaaggagaccatgtacttcgcccccagcatgaaggacttcacccagtacatcttcaccgagaagctgaagcaggacaagggcagcgacgccagctggaagaacgaccaggagcccccccccgaggccctggacttcagcgacgacgagaaggagaaggaggccaagcagagaaagaagagccagatccagggcagaaagaagctgaagagcgagttcaacgagcccggcaccggcatcagccacagatactgcggcctgggcagcagacccctgcagagcagcgagagccacaagctgttcggcttccagatgcacatcaaggtgaccttcacctgctacttcagcctgctgagcatgcagtag

SEQ ID NO: 91360 - DNA, 345 bp, synthetic construct
  misc_feature 1..345: note = Description of Artificial Sequence: Synthetic coding sequence
  source 1..345: mol_type = other DNA
ctggccagcagactgggccccgtgagcaccgccaacatgagcagacccgtgagaaacagaaaggtggtggactacagccagttccaggagagcgacgacgccgacttcgagagcgaggacagcgaggacaaggacgtgaagaccaagaaggacgacagccacagcgccgaggacagcgaggacgagaaggaggaccacaagaacgtgagacagcagagacaggccgccagcaaggccgccagcaagcagagagagatgctgatggaggacgtgggcagcgaggaggagcaggaggaggaggacgaggcccccttccaggagagaaaggacagcttcagccagtag

SEQ ID NO: 91361 - DNA, 732 bp, synthetic construct
  misc_feature 1..732: note = Description of Artificial Sequence: Synthetic coding sequence
  source 1..732: mol_type = other DNA
atgagcagacccgtgagaaacagaaaggtggtggactacagccagttccaggagagcgacgacgccgacgaggactacggcagagacagcggcccccccaccaagaagatcagaagcagccccagagaggccaagaacaagagaagaagcggcaagaacagccaggaggacagcgaggacagcgaggacaaggacgtgaagaccaagaaggacgacagccacagcgccgaggacagcgaggacgagaaggaggaccacaagaacgtgagacagcagagacaggccgccagcaaggccgccagcaagcagagagagatgctgatggaggacgtgggcagcgaggaggagcaggaggaggaggacgaggcccccttccaggagaaggacagcggcagcgacgaggacttcctgatggaggacgacgacgacagcgactacggcagcagcaagaagaagaacaagaagatggtgaagaagagcaagcccgagagaaaggagaagaagatgcccaagcccagactgaaggccaccgtgacccccagccccgtgaagggcaagggcaaggtgggcagacccaccgccagcaaggccagcaaggagaagacccccagccccaaggaggaggacgaggagcccgagagcccccccgagaagaagaccagcaccagccccccccccgagaagagcggcgacgagggcagcgaggacgaggcccccagcggcgaggactag

SEQ ID NO: 91362 - DNA, 1122 bp, synthetic construct
  misc_feature 1..1122: note = Description of Artificial Sequence: Synthetic coding sequence
  source 1..1122: mol_type = other DNA
atgagcccctgccccccccagcagagcagaaacagagtgatccagctgagcaccagcgagctgggcgagatggagctgacctggcaggagatcatgagcatcaccgagctgcagggcctgaacgcccccagcgagcccagcttcgagccccaggcccccgccccctacctgggcccccccccccccaccacctactgcccctgcagcatccaccccgacagcggcttccccctgcccccccccccctacgagctgcccgccagcaccagccacgtgcccgaccccccctacagctacggcaacatggccatccccgtgagcaagcccctgagcctgagcggcctgctgagcgagcccctgcaggaccccctggccctgctggacatcggcctgcccgccggcccccccaagccccaggaggaccccgagagcgacagcggcctgagcctgaactacagcgacgccgagagcctggagctggagggcaccgaggccggcagaagaagaagcgagtacgtggagatgtaccccgtggagtacccctacagcctgatgcccaacagcctggcccacagcaactacaccctgcccgccgccgagacccccctggccctggagcccagcagcggccccgtgagagccaagcccaccgccagaggcgaggccggcagcagagacgagagaagagccctggccatgaagatccccttccccaccgacaagatcgtgaacctgcccgtggacgacttcaacgagctgctggccagataccccctgaccgagagccagctggccctggtgagagacatcagaagaagaggcaagaacaaggtggccgcccagaactgcagaaagagaaagctggagaccatcgtgcagctggagagagagctggagagactgaccaacgagagagagagactgctgagagccagaggcgaggccgacagaaccctggaggtgatgagacagcagctgaccgagctgtacagagacatcttccagcacctgagagacgagagcggcaacagctacagccccgaggagtacgccctgcagcaggccgccgacggcaccatcttcctggtgcccagaggcaccaagatggaggccaccgactag

SEQ ID NO: 91363 - DNA, 1122 bp, synthetic construct; identical to SEQ ID NO: 91362
  misc_feature 1..1122: note = Description of Artificial Sequence: Synthetic coding sequence
  source 1..1122: mol_type = other DNA

SEQ ID NO: 91364 - DNA, 1122 bp, synthetic construct; identical to SEQ ID NO: 91362
  misc_feature 1..1122: note = Description of Artificial Sequence: Synthetic coding sequence
  source 1..1122: mol_type = other DNA

SEQ ID NO: 91365 - DNA, 1122 bp, synthetic construct; identical to SEQ ID NO: 91362
  misc_feature 1..1122: note = Description of Artificial Sequence: Synthetic coding sequence
  source 1..1122: mol_type = other DNA

SEQ ID NO: 91366 - DNA, 1032 bp, synthetic construct
  misc_feature 1..1032: note = Description of Artificial Sequence: Synthetic coding sequence
  source 1..1032: mol_type = other DNA
atgagcccctgccccccccagcagagcagaaacagagtgatccagctgagcaccagcgagctgggcgagatggagctgacctggcaggagatcatgagcatcaccgagctgcagggcctgaacgcccccagcgagcccagcttcgagccccaggcccccgccccctacctgggcccccccccccccaccacctactgcccctgcagcatccaccccgacagcggcttccccctgcccccccccccctacgagctgcccgccagcaccagccacgtgcccgaccccccctacagctacggcaacatggccatccccgtgagcaagcccctgagcctgagcggcctgctgagcgagcccctgcaggaccccctggccctgctggacatcggcctgcccgccggcccccccaagccccaggaggaccccgagagcgacagcggcctgagcctgaactacagcgacgccgagagcctggagctggagggcaccgaggccggcagaagaagaagcgagtacgtggagatgtaccccgtggagtacccctacagcctgatgcccaacagcctggcccacagcaactacaccctgcccgccgccgagacccccctggccctggagcccagcagcggccccgtgagagccaagcccaccgccagaggcgaggccggcagcagagacgagagaagagccctggccatgaagatccccttccccaccgacaagatcgtgaacctgcccgtggacgacttcaacgagctgctggccagataccccctgaccgagagccagctggccctggtgagagacatcagaagaagaggcaagaacaaggtggccgcccagaactgcagaaagagaaagctggagaccatcgtgcagctggagagagagctggagagactgaccaacgagagagagagactgctgagagccagaggcgaggccgacagaaccctggaggtgatgagacagcagctgaccgagctgtacagagacatcttccagcacctgagagacgagagcggcaactag

SEQ ID NO: 91367 - DNA, 2229 bp, synthetic construct
  misc_feature 1..2229: note = Description of Artificial Sequence: Synthetic coding sequence
  source 1..2229: mol_type = other DNA
atgctgagcctgaagaagtacctgaccgagggcctgctgcagttcaccatcctgctgagcctgatcggcgtgagagtggacgtggacacctacctgaccagccagctgccccccctgagagagatcatcctgggccccagcagcgcctacacccagacccagttccacaacctgagaaacaccctggacggctacggcatccaccccaagagcatcgacctggacaactacttcaccgccagaagactgctgagccaggtgagagccctggacagattccaggtgcccaccaccgaggtgaacgcctggctggtgcacagagaccccgagggcagcgtgagcggcagccagcccaacagcggcctggccctggagagcagcagcggcctgcaggacgtgaccggccccgacaacggcgtgagagagagcgagaccgagcagggcttcggcgaggacctggaggacctgggcgccgtggccccccccgtgagcggcgacctgaccaaggaggacatcgacctgatcgacatcctgtggagacaggacatcgacctgggcgccggcagagaggtgttcgactacagccacagacagaaggagcaggacgtggagaaggagctgagagacggcggcgagcaggacacctgggccggcgagggcgccgaggccctggccagaaacctgctggtggacggcgagaccggcgagagcttccccgcccagttccccgccgacatcagcagcatcaccgaggccgtgcccagcgagagcgagccccccgccctgcagaacaacctgctgagccccctgctgaccggcaccgagagccccttcgacctggagcagcagtggcaggacctgatgagcatcatggagatgcaggccatggaggtgaacaccagcgccagcgagatcctgtacagcgccccccccggcgaccccctgagcaccaactacagcctggcccccaacacccccatcaaccagaacgtgagcctgcaccaggccagcctgggcggctgcagccaggacttcctgctgttcagccccgaggtggagagcctgcccgtggccagcagcagcaccctgctgcccctggcccccagcaacagcaccagcctgaacagcaccttcggcagcaccaacctgaccggcctgttcttccccccccagctgaacggcaccgccaacgacaccgccggccccgagctgcccgaccccctgggcggcctgctggacgaggccatgctggacgagatcagcctgatggacctggccatcgaggagggcttcaaccccgtgcaggccagccagctggaggaggagttcgacagcgacagcggcctgagcctggacagcagccacagccccagcagcctgagcagcagcgagggcagcagcagcagcagcagcagcagcagcagcagcagcagcagcgccagcagcagcgccagcagcagcttcagcgaggagggcgccgtgggctacagcagcgacagcgagaccctggacctggaggaggccgagggcgccgtgggctaccagcccgagtacagcaagttctgcagaatgagctaccaggaccccgcccagctgagctgcctgccctacctggagcacgtgggccacaaccacacctacaacatggcccccagcgccctggacagcgccgacctgcccccccccagcgccctgaagaagggcagcaaggagaagcaggccgacttcctggacaagcagatgagcagagacgagcacagagccagagccatgaagatccccttcaccaacgacaagatcatcaacctgcccgtggaggagttcaacgagctgctgagcaagtaccagctgagcgaggcccagctgagcctgatcagagacatcagaagaagaggcaagaacaagatggccgcccagaactgcagaaagagaaagctggacaccatcctgaacctggagagagacgtggaggacctgcagagagacaaggccagactgctgagagagaaggtggagttcctgagaagcctgagacagatgaagcagaaggtgcagagcctgtaccaggaggtgttcggcagactgagagacgagaacggcagaccctacagccccagccagtacgccctgcagtacgccggcgacggcagcgtgctgctgatccccagaaccatggccgaccagcaggccagaagacaggagagaaagcccaaggacagaagaaagtag

SEQ ID NO: 91368 - DNA, 2319 bp, synthetic construct
  misc_feature 1..2319: note = Description of Artificial Sequence: Synthetic coding sequence
  source 1..2319: mol_type = other DNA
atgctgagcctgaagaagtacctgaccgagggcctgctgcagttcaccatcctgctgagcctgatcggcgtgagagtggacgtggacacctacctgaccagccagctgccccccctgagagagatcatcctgggccccagcagcgcctacacccagacccagttccacaacctgagaaacaccctggacggctacggcatccaccccaagagcatcgacctggacaactacttcaccgccagaagactgctgagccaggtgagagccctggacagattccaggtgcccaccaccgaggtgaacgcctggctggtgcacagagaccccgagggcagcgtgagcggcagccagcccaacagcggcctggccctggagagcagcagcggcctgcaggacgtgaccggccccgacaacggcgtgagagagagcgagaccgagcagggcttcggcgaggacctggaggacctgggcgccgtggccccccccgtgagcggcgacctgaccaaggaggacatcgacctgatcgacatcctgtggagacaggacatcgacctgggcgccggcagagaggtgttcgactacagccacagacagaaggagcaggacgtggagaaggagctgagagacggcggcgagcaggacacctgggccggcgagggcgccgaggccctggccagaaacctgctggtggacggcgagaccggcgagagcttccccgcccaggtgcccagcggcgaggaccagaccgccctgagcctggaggagtgcctgagactgctggaggccacctgccccttcggcgagaacgccgagttccccgccgacatcagcagcatcaccgaggccgtgcccagcgagagcgagccccccgccctgcagaacaacctgctgagccccctgctgaccggcaccgagagccccttcgacctggagcagcagtggcaggacctgatgagcatcatggagatgcaggccatggaggtgaacaccagcgccagcgagatcctgtacagcgccccccccggcgaccccctgagcaccaactacagcctggcccccaacacccccatcaaccagaacgtgagcctgcaccaggccagcctgggcggctgcagccaggacttcctgctgttcagccccgaggtggagagcctgcccgtggccagcagcagcaccctgctgcccctggcccccagcaacagcaccagcctgaacagcaccttcggcagcaccaacctgaccggcctgttcttccccccccagctgaacggcaccgccaacgacaccgccggccccgagctgcccgaccccctgggcggcctgctggacgaggccatgctggacgagatcagcctgatggacctggccatcgaggagggcttcaaccccgtgcaggccagccagctggaggaggagttcgacagcgacagcggcctgagcctggacagcagccacagccccagcagcctgagcagcagcgagggcagcagcagcagcagcagcagcagcagcagcagcagcagcagcgccagcagcagcgccagcagcagcttcagcgaggagggcgccgtgggctacagcagcgacagcgagaccctggacctggaggaggccgagggcgccgtgggctaccagcccgagtacagcaagttctgcagaatgagctaccaggaccccgcccagctgagctgcctgccctacctggagcacgtgggccacaaccacacctacaacatggcccccagcgccctggacagcgccgacctgcccccccccagcgccctgaagaagggcagcaaggagaagcaggccgacttcctggacaagcagatgagcagagacgagcacagagccagagccatgaagatccccttcaccaacgacaagatcatcaacctgcccgtggaggagttcaacgagctgctgagcaagtaccagctgagcgaggcccagctgagcctgatcagagacatcagaagaagaggcaagaacaagatggccgcccagaactgcagaaagagaaagctggacaccatcctgaacctggagagagacgtggaggacctgcagagagacaaggccagactgctgagagagaaggtggagttcctgagaagcctgagacagatgaagcagaaggtgcagagcctgtaccaggaggtgttcggcagactgagagacgagaacggcagaccctacagccccagccagtacgccctgcagtacgccggcgacggcagcgtgctgctgatccccagaaccatggccgaccagcaggccagaagacaggagagaaagcccaaggacagaagaaagtag

SEQ ID NO: 91369 - DNA, 2376 bp, synthetic construct
  misc_feature 1..2376: note = Description of Artificial Sequence: Synthetic coding sequence
  source 1..2376: mol_type = other DNA
ttcgtgttctggaagatcctgaagaccaagaagcacaagcacagcggccccagcgccatgctgagcctgaagaagtacctgaccgagggcctgctgcagttcaccatcctgctgagcctgatcggcgtgagagtggacgtggacacctacctgaccagccagctgccccccctgagagagatcatcctgggccccagcagcgcctacacccagacccagttccacaacctgagaaacaccctggacggctacggcatccaccccaagagcatcgacctggacaactacttcaccgccagaagactgctgagccaggtgagagccctggacagattccaggtgcccaccaccgaggtgaacgcctggctggtgcacagagaccccgagggcagcgtgagcggcagccagcccaacagcggcctggccctggagagcagcagcggcctgcaggacgtgaccggccccgacaacggcgtgagagagagcgagaccgagcagggcttcggcgaggacctggaggacctgggcgccgtggccccccccgtgagcggcgacctgaccaaggaggacatcgacctgatcgacatcctgtggagacaggacatcgacctgggcgccggcagagaggtgttcgactacagccacagacagaaggagcaggacgtggagaaggagctgagagacggcggcgagcaggacacctgggccggcgagggcgccgaggccctggccagaaacctgctggtggacggcgagaccggcgagagcttccccgcccaggtgcccagcggcgaggaccagaccgccctgagcctggaggagtgcctgagactgctggaggccacctgccccttcggcgagaacgccgagttccccgccgacatcagcagcatcaccgaggccgtgcccagcgagagcgagccccccgccctgcagaacaacctgctgagccccctgctgaccggcaccgagagccccttcgacctggagcagcagtggcaggacctgatgagcatcatggagatgcaggccatggaggtgaacaccagcgccagcgagatcctgtacagcgccccccccggcgaccccctgagcaccaactacagcctggcccccaacacccccatcaaccagaacgtgagcctgcaccaggccagcctgggcggctgcagccaggacttcctgctgttcagccccgaggtggagagcctgcccgtggccagcagcagcaccctgctgcccctggcccccagcaacagcaccagcctgaacagcaccttcggcagcaccaacctgaccggcctgttcttccccccccagctgaacggcaccgccaacgacaccgccggccccgagctgcccgaccccctgggcggcctgctggacgaggccatgctggacgagatcagcctgatggacctggccatcgaggagggcttcaaccccgtgcaggccagccagctggaggaggagttcgacagcgacagcggcctgagcctggacagcagccacagccccagcagcctgagcagcagcgagggcagcagcagcagcagcagcagcagcagcagcagcagcagcagcgccagcagcagcgccagcagcagcttcagcgaggagggcgccgtgggctacagcagcgacagcgagaccctggacctggaggaggccgagggcgccgtgggctaccagcccgagtacagcaagttctgcagaatgagctaccaggaccccgcccagctgagctgcctgccctacctggagcacgtgggccacaaccacacctacaacatggcccccagcgccctggacagcgccgacctgcccccccccagcgccctgaagaagggcagcaaggagaagcaggccgacttcctggacaagcagatgagcagagacgagcacagagccagagccatgaagatccccttcaccaacgacaagatcatcaacctgcccgtggaggagttcaacgagctgctgagcaagtaccagctgagcgaggcccagctgagcctgatcagagacatcagaagaagaggcaagaacaagatggccgcccagaactgcagaaagagaaagctggacaccatcctgaacctggagagagacgtggaggacctgcagagagacaaggccagactgctgagagagaaggtggagttcctgagaagcctgagacagatgaagcagaaggtgcagagcctgtaccaggaggtgttcggcagactgagagacgagaacggcagaccctacagccccagccagtacgccctgcagtacgccggcgacggcagcgtgctgctgatccccagaaccatggccgaccagcaggccagaagacaggagagaaagcccaaggacagaagaaagtag

SEQ ID NO: 91370 - DNA, 1851 bp, synthetic construct
  misc_feature 1..1851: note = Description of Artificial Sequence: Synthetic coding sequence
  source 1..1851: mol_type = other DNA
atgaccagactggacagaagcagccacagcggcggcggccacgccaagggcagcagacccctgaacagcctgctggccggccacagagtggcccagcccgccagcgcccccggcagcagagccagcgtgcaggacatcgacctgatcgacatcctgtggagacaggacatcgacctgggcgccggcagagaggtgttcgactacagccacagacagaaggagcaggacgtggagaaggagctgagagacggcggcgagcaggacacctgggccggcgagggcgccgaggccctggccagaaacctgctggtggacggcgagaccggcgagagcttccccgcccagttccccgccgacatcagcagcatcaccgaggccgtgcccagcgagagcgagccccccgccctgcagaacaacctgctgagccccctgctgaccggcaccgagagccccttcgacctggagcagcagtggcaggacctgatgagcatcatggagatgcaggccatggaggtgaacaccagcgccagcgagatcctgtacagcgccccccccggcgaccccctgagcaccaactacagcctggcccccaacacccccatcaaccagaacgtgagcctgcaccaggccagcctgggcggctgcagccaggacttcctgctgttcagccccgaggtggagagcctgcccgtggccagcagcagcaccctgctgcccctggcccccagcaacagcaccagcctgaacagcaccttcggcagcaccaacctgaccggcctgttcttccccccccagctgaacggcaccgccaacgacaccgccggccccgagctgcccgaccccctgggcggcctgctggacgaggccatgctggacgagatcagcctgatggacctggccatcgaggagggcttcaaccccgtgcaggccagccagctggaggaggagttcgacagcgacagcggcctgagcctggacagcagccacagccccagcagcctgagcagcagcgagggcagcagcagcagcagcagcagcagcagcagcagcagcagcagcgccagcagcagcgccagcagcagcttcagcgaggagggcgccgtgggctacagcagcgacagcgagaccctggacctggaggaggccgagggcgccgtgggctaccagcccgagtacagcaagttctgcagaatgagctaccaggaccccgcccagctgagctgcctgccctacctggagcacgtgggccacaaccacacctacaacatggcccccagcgccctggacagcgccgacctgcccccccccagcgccctgaagaagggcagcaaggagaagcaggccgacttcctggacaagcagatgagcagagacgagcacagagccagagccatgaagatccccttcaccaacgacaagatcatcaacctgcccgtggaggagttcaacgagctgctgagcaagtaccagctgagcgaggcccagctgagcctgatcagagacatcagaagaagaggcaagaacaagatggccgcccagaactgcagaaagagaaagctggacaccatcctgaacctggagagagacgtggaggacctgcagagagacaaggccagactgctgagagagaaggtggagttcctgagaagcctgagacagatgaagcagaaggtgcagagcctgtaccaggaggtgttcggcagactgagagacgagaacggcagaccctacagccccagccagtacgccctgcagtacgccggcgacggcagcgtgctgctgatccccagaaccatggccgaccagcaggccagaagacaggagagaaagcccaaggacagaagaaagtag

SEQ ID NO: 91371 - DNA, 1818 bp, synthetic construct
  misc_feature 1..1818: note = Description of Artificial Sequence: Synthetic coding sequence
  source 1..1818: mol_type = other DNA
atgatggacctggagctgcccccccccggcctgcccagccagcaggacatggacctgatcgacatcctgtggagacaggacatcgacctgggcgtgagcagagaggtgttcgacttcagccagagaagaaaggagtacgagctggagaagcagaagaagctggagaaggagagacaggagcagctgcagaaggagcaggagaaggccttcttcgcccagctgcagctggacgaggagaccggcgagttcctgcccatccagcccgcccagcacatccagagcgagaccagcggcagcgccaactacagccaggtggcccacatccccaagagcgacgccctgtacttcgacgactgcatgcagctgctggcccagaccttccccttcgtggacgacaacgaggtgagcagcgccaccttccagagcctggtgcccgacatccccggccacatcgagagccccgtgttcatcgccaccaaccaggcccagagccccgagaccagcgtggcccaggtggcccccgtggacctggacggcatgcagcaggacatcgagcaggtgtgggaggagctgctgagcatccccgagctgcagtgcctgaacatcgagaacgacaagctggtggagaccaccatggtgcccagccccgaggccaagctgaccgaggtggacaactaccacttctacagcagcatccccagcatggagaaggaggtgggcaactgcagcccccacttcctgaacgccttcgaggacagcttcagcagcatcctgagcaccgaggaccccaaccagctgaccgtgaacagcctgaacagcgacgccaccgtgaacaccgacttcggcgacgagttctacagcgccttcatcgccgagcccagcatcagcaacagcatgcccagccccgccaccctgagccacagcctgagcgagctgctgaacggccccatcgacgtgagcgacctgagcctgtgcaaggccttcaaccagaaccaccccgagagcaccgccgagttcaacgacagcgacagcggcatcagcctgaacaccagccccagcgtggccagccccgagcacagcgtggagagcagcagctacggcgacaccctgctgggcctgagcgacagcgaggtggaggagctggacagcgcccccggcagcgtgaagcagaacggccccaagacccccgtgcacagcagcggcgacatggtgcagcccctgagccccagccagggccagagcacccacgtgcacgacgcccagtgcgagaacacccccgagaaggagctgcccgtgagccccggccacagaaagacccccttcaccaaggacaagcacagcagcagactggaggcccacctgaccagagacgagctgagagccaaggccctgcacatccccttccccgtggagaagatcatcaacctgcccgtggtggacttcaacgagatgatgagcaaggagcagttcaacgaggcccagctggccctgatcagagacatcagaagaagaggcaagaacaaggtggccgcccagaactgcagaaagagaaagctggagaacatcgtggagctggagcaggacctggaccacctgaaggacgagaaggagaagctgctgaaggagaagggcgagaacgacaagagcctgcacctgctgaagaagcagctgagcaccctgtacctggaggtgttcagcatgctgagagacgaggacggcaagccctacagccccagcgagtacagcctgcagcagaccagagacggcaacgtgttcctggtgcccaagagcaagaagcccgacgtgaagaagaactag

SEQ ID NO: 91372 - DNA, 1770 bp, synthetic construct
  misc_feature 1..1770: note = Description of Artificial Sequence: Synthetic coding sequence
  source 1..1770: mol_type = other DNA
atggacctgatcgacatcctgtggagacaggacatcgacctgggcgtgagcagagaggtgttcgacttcagccagagaagaaaggagtacgagctggagaagcagaagaagctggagaaggagagacaggagcagctgcagaaggagcaggagaaggccttcttcgcccagctgcagctggacgaggagaccggcgagttcctgcccatccagcccgcccagcacatccagagcgagaccagcggcagcgccaactacagccaggtggcccacatccccaagagcgacgccctgtacttcgacgactgcatgcagctgctggcccagaccttccccttcgtggacgacaacgaggtgagcagcgccaccttccagagcctggtgcccgacatccccggccacatcgagagccccgtgttcatcgccaccaaccaggcccagagccccgagaccagcgtggcccaggtggcccccgtggacctggacggcatgcagcaggacatcgagcaggtgtgggaggagctgctgagcatccccgagctgcagtgcctgaacatcgagaacgacaagctggtggagaccaccatggtgcccagccccgaggccaagctgaccgaggtggacaactaccacttctacagcagcatccccagcatggagaaggaggtgggcaactgcagcccccacttcctgaacgccttcgaggacagcttcagcagcatcctgagcaccgaggaccccaaccagctgaccgtgaacagcctgaacagcgacgccaccgtgaacaccgacttcggcgacgagttctacagcgccttcatcgccgagcccagcatcagcaacagcatgcccagccccgccaccctgagccacagcctgagcgagctgctgaacggccccatcgacgtgagcgacctgagcctgtgcaaggccttcaaccagaaccaccccgagagcaccgccgagttcaacgacagcgacagcggcatcagcctgaacaccagccccagcgtggccagccccgagcacagcgtggagagcagcagctacggcgacaccctgctgggcctgagcgacagcgaggtggaggagctggacagcgcccccggcagcgtgaagcagaacggccccaagacccccgtgcacagcagcggcgacatggtgcagcccctgagccccagccagggccagagcacccacgtgcacgacgcccagtgcgagaacacccccgagaaggagctgcccgtgagccccggccacagaaagacccccttcaccaaggacaagcacagcagcagactggaggcccacctgaccagagacgagctgagagccaaggccctgcacatccccttccccgtggagaagatcatcaacctgcccgtggtggacttcaacgagatgatgagcaaggagcagttcaacgaggcccagctggccctgatcagagacatcagaagaagaggcaagaacaaggtggccgcccagaactgcagaaagagaaagctggagaacatcgtggagctggagcaggacctggaccacctgaaggacgagaaggagaagctgctgaaggagaagggcgagaacgacaagagcctgcacctgctgaagaagcagctgagcaccctgtacctggaggtgttcagcatgctgagagacgaggacggcaagccctacagccccagcgagtacagcctgcagcagaccagagacggcaacgtgttcctggtgcccaagagcaagaagcccgacgtgaagaagaactag

SEQ ID NO: 91373 - DNA, 705 bp, synthetic construct
  misc_feature 1..705: note = Description of Artificial Sequence: Synthetic coding sequence
  source 1..705: mol_type = other DNA
atggacctgatcgacatcctgtggagacaggacatcgacctgggcgtgagcagagaggtgttcgacttcagccagagaagaaaggagtacgagctggagaagcagaagaagctggagaaggagagacaggagcagctgcagaaggagcaggagaaggccttcttcgcccagctgcagctggacgaggagaccggcgagttcctgcccatccagcccgcccagcacatccagagcgagaccagcggcagcgccaactacagccaggtggcccacatccccaagagcgacgccctgtacttcgacgactgcatgcagctgctggcccagaccttccccttcgtggacgacaacgaggtgagcagcgccaccttccagagcctggtgcccgacatccccggccacatcgagagccccgtgttcatcgccaccaaccaggcccagagccccgagaccagcgtggcccaggtggcccccgtggacctggacggcatgcagcaggacatcgagcaggtgtgggaggagctgctgagcatccccgagctgcagtgcctgaacatcgagaacgacaagctggtggagaccaccatggtgcccagccccgaggccaagctgaccgaggtggacaactaccacttctacagcagcatccccagcatggagaaggaggtgggcaactgcagcccccacttcctgaacgccttctag

SEQ ID NO: 91374 - DNA, 843 bp, synthetic construct
  misc_feature 1..843: note = Description of Artificial Sequence: Synthetic coding sequence
  source 1..843: mol_type = other DNA
atggacctgatcgacatcctgtggagacaggacatcgacctgggcgtgagcagagaggtgttcgacttcagccagagaagaaaggagtacgagctggagaagcagaagaagctggagaaggagagacaggagcagctgcagaaggagcaggagaaggccttcttcgcccagctgcagctggacgaggagaccggcgagttcctgcccatccagcccgcccagcacatccagagcgagaccagcggcagcgccaactacagccaggtggcccacatccccaagagcgacgccctgtacttcgacgactgcatgcagctgctggcccagaccttccccttcgtggacgacaacgaggtgagcagcgccaccttccagagcctggtgcccgacatccccggccacatcgagagccccgtgttcatcgccaccaaccaggcccagagccccgagaccagcgtggcccaggtggcccccgtggacctggacggcatgcagcaggacatcgagcaggtgtgggaggagctgctgagcatccccgagctgcagtgcctgaacatcgagaacgacaagctggtggagaccaccatggtgcccagccccgaggccaagctgaccgaggtggacaactaccacttctacagcagcatccccagcatggagaaggaggtgggcaactgcagcccccacttcctgaacgccttcgaggacagcttcagcagcatcctgagcaccgaggaccccaaccagctgaccgtgaacagcctgaacagcgacgccaccgtgaacaccgacttcggcgacgagttctacagcgccttcatcgccgagcccagcatcagctag

SEQ ID NO: 91375 - DNA, 1749 bp, synthetic construct
  misc_feature 1..1749: note = Description of Artificial Sequence: Synthetic coding sequence
  source 1..1749: mol_type = other DNA
atggacctgatcgacatcctgtggagacaggacatcgacctgggcgtgagcagagaggtgttcgacttcagccagagaagaaaggagtacgagctggagaagcagaagaagctggagaaggagagacaggagcagctgcagaaggagcaggagaaggccttcttcgcccagctgcagctggacgaggagaccggcgagttcctgcccatccagcccgcccagcacatccagagcgagaccagcggcagcgccaactacagccaggtggcccacatccccaagagcgacgccctgtacttcgacgactgcatgcagctgctggcccagaccttccccttcgtggacgacaacgagagcctggtgcccgacatccccggccacatcgagagccccgtgttcatcgccaccaaccaggcccagagccccgagaccagcgtggcccaggtggcccccgtggacctggacggcatgcagcaggacatcgagcaggtgtgggaggagctgctgagcatccccgagctgcagtgcctgaacatcgagaacgacaagctggtggagaccaccatggtgcccagccccgaggccaagctgaccgaggtggacaactaccacttctacagcagcatccccagcatggagaaggaggtgggcaactgcagcccccacttcctgaacgccttcgaggacagcttcagcagcatcctgagcaccgaggaccccaaccagctgaccgtgaacagcctgaacagcgacgccaccgtgaacaccgacttcggcgacgagttctacagcgccttcatcgccgagcccagcatcagcaacagcatgcccagccccgccaccctgagccacagcctgagcgagctgctgaacggccccatcgacgtgagcgacctgagcctgtgcaaggccttcaaccagaaccaccccgagagcaccgccgagttcaacgacagcgacagcggcatcagcctgaacaccagccccagcgtggccagccccgagcacagcgtggagagcagcagctacggcgacaccctgctgggcctgagcgacagcgaggtggaggagctggacagcgcccccggcagcgtgaagcagaacggccccaagacccccgtgcacagcagcggcgacatggtgcagcccctgagccccagccagggccagagcacccacgtgcacgacgcccagtgcgagaacacccccgagaaggagctgcccgtgagccccggccacagaaagacccccttcaccaaggacaagcacagcagcagactggaggcccacctgaccagagacgagctgagagccaaggccctgcacatccccttccccgtggagaagatcatcaacctgcccgtggtggacttcaacgagatgatgagcaaggagcagttcaacgaggcccagctggccctgatcagagacatcagaagaagaggcaagaacaaggtggccgcccagaactgcagaaagagaaagctggagaacatcgtggagctggagcaggacctggaccacctgaaggacgagaaggagaagctgctgaaggagaagggcgagaacgacaagagcctgcacctgctgaagaagcagctgagcaccctgtacctggaggtgttcagcatgctgagagacgaggacggcaagccctacagccccagcgagtacagcctgcagcagaccagagacggcaacgtgttcctggtgcccaagagcaagaagcccgacgtgaagaagaactag

SEQ ID NO: 91376 - DNA, 2085 bp, synthetic construct
  misc_feature 1..2085: note = Description of Artificial Sequence: Synthetic coding sequence
  source 1..2085: mol_type = other DNA
atgaagcacctgaagagatggtggagcgccggcggcggcctgctgcacctgaccctgctgctgagcctggccggcctgagagtggacctggacctgtacctgctgctgcccccccccaccctgctgcaggacgagctgctgttcctgggcggccccgccagcagcgcctacgccctgagccccttcagcgccagcggcggctggggcagagccggccacctgcaccccaagggcagagagctggaccccgccgccccccccgagggccagctgctgagagaggtgagagccctgggcgtgcccttcgtgcccagaaccagcgtggacgcctggctggtgcacagcgtggccgccggcagcgccgacgaggcccacggcctgctgggcgccgccgccgccagcagcaccggcggcgccggcgccagcgtggacggcggcagccaggccgtgcagggcggcggcggcgaccccagagccgccagaagcggccccctggacgccggcgaggaggagaaggcccccgccgagcccaccgcccaggtgcccgacgccggcggctgcgccagcgaggagaacggcgtgctgagagagaagcacgaggccgtggaccacagcagccagcacgaggagaacgaggagagagtgagcgcccagaaggagaacagcctgcagcagaacgacgacgacgagaacaagatcgccgagaagcccgactgggaggccgagaagaccaccgagagcagaaacgagagacacctgaacggcaccgacaccagcttcagcctggaggacctgttccagctgctgagcagccagcccgagaacagcctggagggcatcagcctgggcgacatccccctgcccggcagcatcagcgacggcatgaacagcagcgcccactaccacgtgaacttcagccaggccatcagccaggacgtgaacctgcacgaggccatcctgctgtgccccaacaacaccttcagaagagaccccaccgccagaaccagccagagccaggagcccttcctgcagctgaacagccacaccaccaaccccgagcagaccctgcccggcaccaacctgaccggcttcctgagccccgtggacaaccacatgagaaacctgaccagccaggacctgctgtacgacctggacatcaacatcttcgacgagatcaacctgatgagcctggccaccgaggacaacttcgaccccatcgacgtgagccagctgttcgacgagcccgacagcgacagcggcctgagcctggacagcagccacaacaacaccagcgtgatcaagagcaacagcagccacagcgtgtgcgacgagggcgccatcggctactgcaccgaccacgagagcagcagccaccacgacctggagggcgccgtgggcggctactaccccgagcccagcaagctgtgccacctggaccagagcgacagcgacttccacggcgacctgaccttccagcacgtgttccacaaccacacctaccacctgcagcccaccgcccccgagagcaccagcgagcccttcccctggcccggcaagagccagaagatcagaagcagatacctggaggacaccgacagaaacctgagcagagacgagcagagagccaaggccctgcacatccccttcagcgtggacgagatcgtgggcatgcccgtggacagcttcaacagcatgctgagcagatactacctgaccgacctgcaggtgagcctgatcagagacatcagaagaagaggcaagaacaaggtggccgcccagaactgcagaaagagaaagctggacatcatcctgaacctggaggacgacgtgtgcaacctgcaggccaagaaggagaccctgaagagagagcaggcccagtgcaacaaggccatcaacatcatgaagcagaagctgcacgacctgtaccacgacatcttcagcagactgagagacgaccagggcagacccgtgaaccccaaccactacgccctgcagtgcacccacgacggcagcatcctgatcgtgcccaaggagctggtggccagcggccacaagaaggagacccagaagggcaagagaaagtag

SEQ ID NO: 91377 - DNA, 1200 bp, synthetic construct
  misc_feature 1..1200: note = Description of Artificial Sequence: Synthetic coding sequence
  source 1..1200: mol_type = other DNA
atgaacagcagcgcccactaccacgtgaacttcagccaggccatcagccaggacgtgaacctgcacgaggccatcctgctgtgccccaacaacaccttcagaagagaccccaccgccagaaccagccagagccaggagcccttcctgcagctgaacagccacaccaccaaccccgagcagaccctgcccggcaccaacctgaccggcttcctgagccccgtggacaaccacatgagaaacctgaccagccaggacctgctgtacgacctggacatcaacatcttcgacgagatcaacctgatgagcctggccaccgaggacaacttcgaccccatcgacgtgagccagctgttcgacgagcccgacagcgacagcggcctgagcctggacagcagccacaacaacaccagcgtgatcaagagcaacagcagccacagcgtgtgcgacgagggcgccatcggctactgcaccgaccacgagagcagcagccaccacgacctggagggcgccgtgggcggctactaccccgagcccagcaagctgtgccacctggaccagagcgacagcgacttccacggcgacctgaccttccagcacgtgttccacaaccacacctaccacctgcagcccaccgcccccgagagcaccagcaacctgttcagacccggcaagagccagaagatcagaagcagatacctggaggacaccgacagaaacctgagcagagacgagcagagagccaaggccctgcacatccccttcagcgtggacgagatcgtgggcatgcccgtggacagcttcaacagcatgctgagcagatactacctgaccgacctgcaggtgagcctgatcagagacatcagaagaagaggcaagaacaaggtggccgcccagaactgcagaaagagaaagctggacatcatcctgaacctggaggacgacgtgtgcaacctgcaggccaagaaggagaccctgaagagagagcaggcccagtgcaacaaggccatcaacatcatgaagcagaagctgcacgacctgtaccacgacatcttcagcagactgagagacgaccagggcagacccgtgaaccccaaccactacgccctgcagtgcacccacgacggcagcatcctgatcgtgcccaaggagctggtggccagcggccacaagaaggagacccagaagggcaagagaaagtag

SEQ ID NO: 91378 - DNA, 1143 bp, synthetic construct
  misc_feature 1..1143: note = Description of Artificial Sequence: Synthetic coding sequence
  source 1..1143: mol_type = other DNA
atgtacagccccctgtgcctgacccaggacgagttccaccccttcatcgaggccctgctgccccacgtgagagccttcgcctacacctggttcaacctgcaggccagaaagagaaagtacttcaagaagcacgagaagagaatgagcaaggaggaggagagagccgtgaaggacgagctgctgagcgagaagcccgaggtgaagcagaagtgggccagcagactgctggccaagctgagaaaggacatcagacccgagtacagagaggacttcgtgctgaccgtgaccggcaagaagcccccctgctgcgtgctgagcaaccccgaccagaagggcaagatgagaagaatcgactgcctgagacaggccgacaaggtgtggagactggacctggtgatggtgatcctgttcaagggcatccccctggagagcaccgacggcgagagactggtgaagagcccccagtgcagcaaccccggcctgtgcgtgcagccccaccacatcggcgtgagcgtgaaggagctggacctgtacctggcctacttcgtgcacgccgccggcatgcccagccccaccaccctgaagaagagcgagaagagcggcttcagcagccccagccccagccagaccagcagcctgggcaccgccttcacccagcaccacagacccgtgatcaccggccccagagccagcccccacgccacccccagcaccctgcacttccccaccagccccatcatccagcagcccggcccctacttcagccaccccgccatcagataccacccccaggagaccctgaaggagttcgtgcagctggtgtgccccgacgccggccagcaggccggccaggtgggcttcctgaaccccaacggcagcagccagggcaaggtgcacaaccccttcctgcccacccccatgctgcccccccccccccccccccccatggccagacccgtgcccctgcccgtgcccgacaccaagccccccaccaccagcaccgagggcggcgccgccagccccaccagccccacctacagcacccccagcaccagccccgccaacagattcgtgagcgtgggccccagagaccccagcttcgtgaacatcccccagcagacccagagctggtacctgggctag

SEQ ID NO: 91379 - DNA, 1464 bp, synthetic construct
  misc_feature 1..1464: note = Description of Artificial Sequence: Synthetic coding sequence
  source 1..1464: mol_type = other DNA
atgtacagccccctgtgcctgacccaggacgagttccaccccttcatcgaggccctgctgccccacgtgagagccttcgcctacacctggttcaacctgcaggccagaaagagaaagtacttcaagaagcacgagaagagaatgagcaaggaggaggagagagccgtgaaggacgagctgctgagcgagaagcccgaggtgaagcagaagtgggccagcagactgctggccaagctgagaaaggacatcagacccgagtacagagaggacttcgtgctgaccgtgaccggcaagaagcccccctgctgcgtgctgagcaaccccgaccagaagggcaagatgagaagaatcgactgcctgagacaggccgacaaggtgtggagactggacctggtgatggtgatcctgttcaagggcatccccctggagagcaccgacggcgagagactggtgaagagcccccagtgcagcaaccccggcctgtgcgtgcagccccaccacatcggcgtgagcgtgaaggagctggacctgtacctggcctacttcgtgcacgccgccggccacctgggcttccaggacagcttcgtgaccagcggcgtgttcagcgtgaccgagctggtgagagtgagccagacccccatcgccgccggcaccggccccaacttcagcctgagcgacctggagagcagcagctactacagcatgagccccggcgccatgagaagaagcctgcccagcaccagcagcaccagcagcaccaagagactgaagagcgtggaggacgagatggacagccccggcgaggagcccttctacaccggccagggcagaagccccggcagcggcagccagagcagcggctggcacgaggtggagcccggcatgcccagccccaccaccctgaagaagagcgagaagagcggcttcagcagccccagccccagccagaccagcagcctgggcaccgccttcacccagcaccacagacccgtgatcaccggccccagagccagcccccacgccacccccagcaccctgcacttccccaccagccccatcatccagcagcccggcccctacttcagccaccccgccatcagataccacccccaggagaccctgaaggagttcgtgcagctggtgtgccccgacgccggccagcaggccggccaggtgggcttcctgaaccccaacggcagcagccagggcaaggtgcacaaccccttcctgcccacccccatgctgcccccccccccccccccccccatggccagacccgtgcccctgcccgtgcccgacaccaagccccccaccaccagcaccgagggcggcgccgccagccccaccagccccacctacagcacccccagcaccagccccgccaacagattcgtgagcgtgggccccagagaccccagcttcgtgaacatcccccagcagacccagagctggtacctgggctag

SEQ ID NO: 91380 - DNA, 1401 bp, synthetic construct
  misc_feature 1..1401: note = Description of Artificial Sequence: Synthetic coding sequence
  source 1..1401: mol_type = other DNA
atgtacagccccctgtgcctgacccaggacgagttccaccccttcatcgaggccctgctgccccacgtgagagccttcgcctacacctggttcaacctgcaggccagaaagagaaagtacttcaagaagcacgagaagagaatgagcaaggaggaggagagagccgtgaaggacgagctgctgagcgagaagcccgaggtgaagcagaagtgggccagcagactgctggccaagctgagaaaggacatcagacccgagtacagagaggacttcgtgctgaccgtgaccggcaagaagcccccctgctgcgtgctgagcaaccccgaccagaagggcaagatgagaagaatcgactgcctgagacaggccgacaaggtgtggagactggacctggtgatggtgatcctgttcaagggcatccccctggagagcaccgacggcgagagactggtgaagagcccccagtgcagcaaccccggcctgtgcgtgcagccccaccacatcggcgtgagcgtgaaggagctggacctgtacctggcctacttcgtgcacgccgccgacagcagccagagcgagagccccagccagcccagcgacgccgacatcaaggaccagcccgagaacggccacctgggcttccaggacagcttcgtgaccagcggcgtgttcagcgtgaccgagctggtgagagtgagccagacccccatcgccgccggcaccggccccaacttcagcctgagcgacctggagagcagcagctactacagcatgagccccggcgccatgagaagaagcctgcccagcaccagcagcaccagcagcaccaagagactgaagagcgtggaggacgagatggacagccccggcgaggagcccttctacaccggccagggcagaagccccggcagcggcagccagagcagcggctggcacgaggtggagcccgccagcccccacgccacccccagcaccctgcacttccccaccagccccatcatccagcagcccggcccctacttcagccaccccgccatcagataccacccccaggagaccctgaaggagttcgtgcagctggtgtgccccgacgccggccagcaggccggccaggtgggcttcctgaaccccaacggcagcagccagggcaaggtgcacaaccccttcctgcccacccccatgctgcccccccccccccccccccccatggccagacccgtgcccctgcccgtgcccgacaccaagccccccaccaccagcaccgagggcggcgccgccagccccaccagccccacctacagcacccccagcaccagccccgccaacagattcgtgagcgtgggccccagagaccccagcttcgtgaacatcccccagcagacccagagctggtacctgggctag

SEQ ID NO: 91381 - DNA, 1665 bp, synthetic construct
  misc_feature 1..1665: note = Description of Artificial Sequence: Synthetic coding sequence
  source 1..1665: mol_type = other DNA
atgcagatgtgcagacccgccagcagcagcgtgctgtacgtgcccaccagatggcccggcggctgcggcgccacctggcagagctgccccagccccccccccagaagaaccagaatcccccagagacccgccgtgatgtacagccccctgtgcctgacccaggacgagttccaccccttcatcgaggccctgctgccccacgtgagagccttcgcctacacctggttcaacctgcaggccagaaagagaaagtacttcaagaagcacgagaagagaatgagcaaggaggaggagagagccgtgaaggacgagctgctgagcgagaagcccgaggtgaagcagaagtgggccagcagactgctggccaagctgagaaaggacatcagacccgagtacagagaggacttcgtgctgaccgtgaccggcaagaagcccccctgctgcgtgctgagcaaccccgaccagaagggcaagatgagaagaatcgactgcctgagacaggccgacaaggtgtggagactggacctggtgatggtgatcctgttcaagggcatccccctggagagcaccgacggcgagagactggtgaagagcccccagtgcagcaaccccggcctgtgcgtgcagccccaccacatcggcgtgagcgtgaaggagctggacctgtacctggcctacttcgtgcacgccgccgacagcagccagagcgagagccccagccagcccagcgacgccgacatcaaggaccagcccgagaacggccacctgggcttccaggacagcttcgtgaccagcggcgtgttcagcgtgaccgagctggtgagagtgagccagacccccatcgccgccggcaccggccccaacttcagcctgagcgacctggagagcagcagctactacagcatgagccccggcgccatgagaagaagcctgcccagcaccagcagcaccagcagcaccaagagactgaagagcgtggaggacgagatggacagccccggcgaggagcccttctacaccggccagggcagaagccccggcagcggcagccagagcagcggctggcacgaggtggagcccggcatgcccagccccaccaccctgaagaagagcgagaagagcggcttcagcagccccagccccagccagaccagcagcctgggcaccgccttcacccagcaccacagacccgtgatcaccggccccagagccagcccccacgccacccccagcaccctgcacttccccaccagccccatcatccagcagcccggcccctacttcagccaccccgccatcagataccacccccaggagaccctgaaggagttcgtgcagctggtgtgccccgacgccggccagcaggccggccaggtgggcttcctgaaccccaacggcagcagccagggcaaggtgcacaaccccttcctgcccacccccatgctgcccccccccccccccccccccatggccagacccgtgcccctgcccgtgcccgacaccaagccccccaccaccagcaccgagggcggcgccgccagccccaccagccccacctacagcacccccagcaccagccccgccaacagattcgtgagcgtgggccccagagaccccagcttcgtgaacatcccccagcagacccagagctggtacctgggctag

SEQ ID NO: 91382 - DNA, 1599 bp, synthetic construct
  misc_feature 1..1599: note = Description of Artificial Sequence: Synthetic coding sequence
  source 1..1599: mol_type = other DNA
atgaagctggccgacagcgtgatggccggcaaggccagcgacggcagcatcaagtggcagctgtgctacgacatcagcgccagaacctggtggatggacgagttccaccccttcatcgaggccctgctgccccacgtgagagccttcgcctacacctggttcaacctgcaggccagaaagagaaagtacttcaagaagcacgagaagagaatgagcaaggaggaggagagagccgtgaaggacgagctgctgagcgagaagcccgaggtgaagcagaagtgggccagcagactgctggccaagctgagaaaggacatcagacccgagtacagagaggacttcgtgctgaccgtgaccggcaagaagcccccctgctgcgtgctgagcaaccccgaccagaagggcaagatgagaagaatcgactgcctgagacaggccgacaaggtgtggagactggacctggtgatggtgatcctgttcaagggcatccccctggagagcaccgacggcgagagactggtgaagagcccccagtgcagcaaccccggcctgtgcgtgcagccccaccacatcggcgtgagcgtgaaggagctggacctgtacctggcctacttcgtgcacgccgccgacagcagccagagcgagagccccagccagcccagcgacgccgacatcaaggaccagcccgagaacggccacctgggcttccaggacagcttcgtgaccagcggcgtgttcagcgtgaccgagctggtgagagtgagccagacccccatcgccgccggcaccggccccaacttcagcctgagcgacctggagagcagcagctactacagcatgagccccggcgccatgagaagaagcctgcccagcaccagcagcaccagcagcaccaagagactgaagagcgtggaggacgagatggacagccccggcgaggagcccttctacaccggccagggcagaagccccggcagcggcagccagagcagcggctggcacgaggtggagcccggcatgcccagccccaccaccctgaagaagagcgagaagagcggcttcagcagccccagccccagccagaccagcagcctgggcaccgccttcacccagcaccacagacccgtgatcaccggccccagagccagcccccacgccacccccagcaccctgcacttccccaccagccccatcatccagcagcccggcccctacttcagccaccccgccatcagataccacccccaggagaccctgaaggagttcgtgcagctggtgtgccccgacgccggccagcaggccggccaggtgggcttcctgaaccccaacggcagcagccagggcaaggtgcacaaccccttcctgcccacccccatgctgcccccccccccccccccccccatggccagacccgtgcccctgcccgtgcccgacaccaagccccccaccaccagcaccgagggcggcgccgccagccccaccagccccacctacagcacccccagcaccagccccgccaacagattcgtgagcgtgggccccagagaccccagcttcgtgaacatcccccagcagacccagagctggtacctgggctag

SEQ ID NO: 91383 - DNA, 1530 bp, synthetic construct
  misc_feature 1..1530: note = Description of Artificial Sequence: Synthetic coding sequence
  source 1..1530: mol_type = other DNA
atgtacagccccctgtgcctgacccaggacgagttccaccccttcatcgaggccctgctgccccacgtgagagccttcgcctacacctggttcaacctgcaggccagaaagagaaagtacttcaagaagcacgagaagagaatgagcaaggaggaggagagagccgtgaaggacgagctgctgagcgagaagcccgaggtgaagcagaagtgggccagcagactgctggccaagctgagaaaggacatcagacccgagtacagagaggacttcgtgctgaccgtgaccggcaagaagcccccctgctgcgtgctgagcaaccccgaccagaagggcaagatgagaagaatcgactgcctgagacaggccgacaaggtgtggagactggacctggtgatggtgatcctgttcaagggcatccccctggagagcaccgacggcgagagactggtgaagagcccccagtgcagcaaccccggcctgtgcgtgcagccccaccacatcggcgtgagcgtgaaggagctggacctgtacctggcctacttcgtgcacgccgccgacagcagccagagcgagagccccagccagcccagcgacgccgacatcaaggaccagcccgagaacggccacctgggcttccaggacagcttcgtgaccagcggcgtgttcagcgtgaccgagctggtgagagtgagccagacccccatcgccgccggcaccggccccaacttcagcctgagcgacctggagagcagcagctactacagcatgagccccggcgccatgagaagaagcctgcccagcaccagcagcaccagcagcaccaagagactgaagagcgtggaggacgagatggacagccccggcgaggagcccttctacaccggccagggcagaagccccggcagcggcagccagagcagcggctggcacgaggtggagcccggcatgcccagccccaccaccctgaagaagagcgagaagagcggcttcagcagccccagccccagccagaccagcagcctgggcaccgccttcacccagcaccacagacccgtgatcaccggccccagagccagcccccacgccacccccagcaccctgcacttccccaccagccccatcatccagcagcccggcccctacttcagccaccccgccatcagataccacccccaggagaccctgaaggagttcgtgcagctggtgtgccccgacgccggccagcaggccggccaggtgggcttcctgaaccccaacggcagcagccagggcaaggtgcacaaccccttcctgcccacccccatgctgcccccccccccccccccccccatggccagacccgtgcccctgcccgtgcccgacaccaagccccccaccaccagcaccgagggcggcgccgccagccccaccagccccacctacagcacccccagcaccagccccgccaacagattcgtgagcgtgggccccagagaccccagcttcgtgaacatcccccagcagacccagagctggtacctgggctag

SEQ ID NO: 91384 - DNA, 1506 bp, synthetic construct
  misc_feature 1..1506: note = Description of Artificial Sequence: Synthetic coding sequence
  source 1..1506: mol_type = other DNA
atggacgagttccaccccttcatcgaggccctgctgccccacgtgagagccttcgcctacacctggttcaacctgcaggccagaaagagaaagtacttcaagaagcacgagaagagaatgagcaaggaggaggagagagccgtgaaggacgagctgctgagcgagaagcccgaggtgaagcagaagtgggccagcagactgctggccaagctgagaaaggacatcagacccgagtacagagaggacttcgtgctgaccgtgaccggcaagaagcccccctgctgcgtgctgagcaaccccgaccagaagggcaagatgagaagaatcgactgcctgagacaggccgacaaggtgtggagactggacctggtgatggtgatcctgttcaagggcatccccctggagagcaccgacggcgagagactggtgaagagcccccagtgcagcaaccccggcctgtgcgtgcagccccaccacatcggcgtgagcgtgaaggagctggacctgtacctggcctacttcgtgcacgccgccgacagcagccagagcgagagccccagccagcccagcgacgccgacatcaaggaccagcccgagaacggccacctgggcttccaggacagcttcgtgaccagcggcgtgttcagcgtgaccgagctggtgagagtgagccagacccccatcgccgccggcaccggccccaacttcagcctgagcgacctggagagcagcagctactacagcatgagccccggcgccatgagaagaagcctgcccagcaccagcagcaccagcagcaccaagagactgaagagcgtggaggacgagatggacagccccggcgaggagcccttctacaccggccagggcagaagccccggcagcggcagccagagcagcggctggcacgaggtggagcccggcatgcccagccccaccaccctgaagaagagcgagaagagcggcttcagcagccccagccccagccagaccagcagcctgggcaccgccttcacccagcaccacagacccgtgatcaccggccccagagccagcccccacgccacccccagcaccctgcacttccccaccagccccatcatccagcagcccggcccctacttcagccaccccgccatcagataccacccccaggagaccctgaaggagttcgtgcagctggtgtgccccgacgccggccagcaggccggccaggtgggcttcctgaaccccaacggcagcagccagggcaaggtgcacaaccccttcctgcccacccccatgctgcccccccccccccccccccccatggccagacccgtgcccctgcccgtgcccgacaccaagccccccaccaccagcaccgagggcggcgccgccagccccaccagccccacctacagcacccccagcaccagccccgccaacagattcgtgagcgtgggccccagagaccccagcttcgtgaacatcccccagcagacccagagctggtacctgggctag

SEQ ID NO: 91385 - DNA, 1497 bp, synthetic construct
  misc_feature 1..1497: note = Description of Artificial Sequence: Synthetic coding sequence
  source 1..1497: mol_type = other DNA
atgtacagccccctgtgcctgacccaggacgagttccaccccttcatcgaggccctgctgccccacgtgagagccttcgcctacacctggttcaacctgcaggccagaaagagaaagtacttcaagaagcacgagaagagaatgagcaaggaggaggagagagccgtgaaggacgagctgctgagcgagaagcccgaggtgaagcagaagtgggccagcagactgctggccaagctgagaaaggacatcagacccgagtacagagaggacttcgtgctgaccgtgaccggcaagaagcccccctgctgcgtgctgagcaaccccgaccagaagggcaagatgagaagaatcgactgcctgagacaggccgacaaggtgtggagactggacctggtgatggtgatcctgttcaagggcatccccctggagagcaccgacggcgagagactggtgaagagcccccagtgcagcaaccccggcctgtgcgtgcagccccaccacatcggcgtgagcgtgaaggagctggacctgtacctggcctacttcgtgcacgccgccgacagcagccagagcgagagccccagccagcccagcgacgccgacatcaaggaccagcccgagaacggccacctgggcttccaggacagcttcgtgaccagcggcgtgttcagcgtgaccgagctggtgagagtgagccagacccccatcgccgccggcaccggccccaacttcagcctgagcgacctggagagcagcagctactacagcatgagccccggcgccatgagaagaagcctgcccagcaccagcagcaccagcagcaccaagagactgaagagcgtggaggacgagatggacagccccggcgaggagcccttctacaccggccagggcagaagccccggcagcggcagccagagcagcggctggcacgaggtggagcccggcatgcccagccccaccaccctgaagaagagcgagaagagcggcttcagcagccccagccccagccagaccagcagcctgggcaccgccttcacccagcaccacagacccgtgatcaccggccccagagccagcccccacgccacccccagcaccctgcacttccccaccagccccatcatccagcagcccggcccctacttcagccaccccgccatcagataccacccccaggagaccctgaaggagttcgtgcagctggtgtgccccgacgccggccagcaggccggccaggtgggcttcctgaaccccaacggcagcagccagggcaaggtgcacaaccccttcctgcccacccccatgctgcccccccccccccccccccccatggccagacccgtgcccctgcccgtgcccgacaccaagccccccaccaccagcaccgagggcggcgccgccagccccaccagccccatcctggtgcccggcatcaaggtggccgccagccaccacccccccgacagaccccccgaccccttcagcaccctgtag

SEQ ID NO: 91386 - DNA, 603 bp, synthetic construct
  misc_feature 1..603: note = Description of Artificial Sequence: Synthetic coding sequence
  source 1..603: mol_type = other DNA
atgatgtacagccccatctgcctgacccaggacgagttccaccccttcatcgaggccctgctgccccacgtgagagccatcgcctacacctggttcaacctgcaggccagaaagagaaagtacttcaagaagcacgagaagagaatgagcaaggacgaggagagagccgtgaaggacgagctgctgagcgagaagcccgagatcaagcagaagtgggccagcagactgctggccaagctgagaaaggacatcagacaggagtacagagaggacttcgtgctgaccgtgaccggcaagaagcacccctgctgcgtgctgagcaaccccgaccagaagggcaagatcagaagaatcgactgcctgagacaggccgacaaggtgtggagactggacctggtgatggtgatcctgttcaagggcatccccctggagagcaccgacggcgagagactgatgaagagcccccactgcaccaaccccgccctgtgcgtgcagccccaccacatcaccgtgagcgtgaaggagctggacctgttcctggcctactacgtgcaggagcagggcaagaacttcttcagcagcaacaagtgcatcaagatctag

SEQ ID NO: 91387 - DNA, 507 bp, synthetic construct
  misc_feature 1..507: note = Description of Artificial Sequence: Synthetic coding sequence
  source 1..507: mol_type = other DNA
atgaacagcggcgtgaacctgcagagaagcctgagcagcccccccagcagcaagagacccaagaccatcagcatcgacgagaacatggagcccagccccaccggcgacttctaccccagccccagcagccccgccgccggcagcagaacctggcacgagagagaccaggacatgagcagccccaccaccatgaagaagcccgagaagcccctgttcagcagcgccagcccccaggacagcagccccagactgagcaccttcccccagcaccaccaccccggcatccccggcgtggcccacagcgtgatcagcaccagaaccccccccccccccagccccctgcccttccccacccaggccatcctgccccccgcccccagcagctacttcagccaccccaccatcagataccccccccacctgaacccccaggacaccctgaagaactacgtgcccagctacgaccccagcagcccccagaccagccagagctggtacctgggctag

SEQ ID NO: 91388 - DNA, 1341 bp, synthetic construct
  misc_feature 1..1341: note = Description of Artificial Sequence: Synthetic coding sequence
  source 1..1341: mol_type = other DNA
atggagagaatccccgtgagcgtggacttctgggtggtgtgctgcgccgtgctgaagtgcaaccccggcatccccaagagaatgagcaccctgtgcttcggcttcagcgacgagttccaccccttcatcgaggccctgctgccccacgtgagagccatcgcctacacctggttcaacctgcaggccagaaagagaaagtacttcaagaagcacgagaagagaatgagcaaggacgaggagagagccgtgaaggacgagctgctgagcgagaagcccgagatcaagcagaagtgggccagcagactgctggccaagctgagaaaggacatcagacaggagtacagagaggacttcgtgctgaccgtgaccggcaagaagcacccctgctgcgtgctgagcaaccccgaccagaagggcaagatcagaagaatcgactgcctgagacaggccgacaaggtgtggagactggacctggtgatggtgatcctgttcaagggcatccccctggagagcaccgacggcgagagactgatgaagagcccccactgcaccaaccccgccctgtgcgtgcagccccaccacatcaccgtgagcgtgaaggagctggacctgttcctggcctactacgtgcaggagcaggacagcggccagagcggcagccccagccacaacgaccccgccaagaacccccccggctacctggaggacagcttcgtgaagagcggcgtgttcaacgtgagcgagctggtgagagtgagcagaacccccatcacccagggcaccggcgtgaacttccccatcggcgagatccccagccagccctactaccacgacatgaacagcggcgtgaacctgcagagaagcctgagcagcccccccagcagcaagagacccaagaccatcagcatcgacgagaacatggagcccagccccaccggcgacttctaccccagccccagcagccccgccgccggcagcagaacctggcacgagagagaccaggacatgagcagccccaccaccatgaagaagcccgagaagcccctgttcagcagcgccagcccccaggacagcagccccagactgagcaccttcccccagcaccaccaccccggcatccccggcgtggcccacagcgtgatcagcaccagaaccccccccccccccagccccctgcccttccccacccaggccatcctgccccccgcccccagcagctacttcagccaccccaccatcagataccccccccacctgaacccccaggacaccctgaagaactacgtgcccagctacgaccccagcagcccccagaccagccagagctggtacctgggctag

SEQ ID NO: 91389 - DNA, 1485 bp, synthetic construct
  misc_feature 1..1485: note = Description of Artificial Sequence: Synthetic coding sequence
  source 1..1485: mol_type = other DNA
atgatgtacagccccatctgcctgacccaggacgagttccaccccttcatcgaggccctgctgccccacgtgagagccatcgcctacacctggttcaacctgcaggccagaaagagaaagtacttcaagaagcacgagaagagaatgagcaaggacgaggagagagccgtgaaggacgagctgctgagcgagaagcccgagatcaagcagaagtgggccagcagactgctggccaagctgagaaaggacatcagacaggagtacagagaggacttcgtgctgaccgtgaccggcaagaagcacccctgctgcgtgctgagcaaccccgaccagaagggcaagatcagaagaatcgactgcctgagacaggccgacaaggtgtggagactggacctggtgatggtgatcctgttcaagggcatccccctggagagcaccgacggcgagagactgatgaagagcccccactgcaccaaccccgccctgtgcgtgcagccccaccacatcaccgtgagcgtgaaggagctggacctgttcctggcctactacgtgcaggagcaggacagcggccagagcggcagccccagccacaacgaccccgccaagaacccccccggctacctggaggacagcttcgtgaagagcggcgtgttcaacgtgagcgagctggtgagagtgagcagaacccccatcacccagggcaccggcgtgaacttccccatcggcgagatccccagccagccctactaccacgacatgaacagcggcgtgaacctgcagagaagcctgagcagcccccccagcagcaagagacccaagaccatcagcatcgacgagaacatggagcccagccccaccggcgacttctaccccagccccagcagccccgccgccggcagcagaacctggcacgagagagaccaggacatgagcagccccaccaccatgaagaagcccgagaagcccctgttcagcagcgccagcccccaggacagcagccccagactgagcaccttcccccagcaccaccaccccggcatccccggcgtggcccacagcgtgatcagcaccagaaccccccccccccccagccccctgcccttccccacccaggccatcctgccccccgcccccagcagctacttcagccaccccaccatcagataccccccccacctgaacccccaggacaccctgaagaactacgtgcccagctacgaccccagcagcccccagaccagccagcccaacggcagcggccaggtggtgggcaaggtgcccggccacttcacccccgtgctggcccccagcccccaccccagcgccgtgagacccgtgaccctgagcatgaccgacaccaagcccatcaccaccagcaccgaggcctacaccgccagcggcaccagccaggccaacagatacgtgggcctgagccccagagaccccagcttcctgcaccagcagcagagctggtacctgggctag

SEQ ID NO: 91390 - DNA, 1263 bp, synthetic construct
  misc_feature 1..1263: note = Description of Artificial Sequence: Synthetic coding sequence
  source 1..1263: mol_type = other DNA
atgatgtacagccccatctgcctgacccaggacgagttccaccccttcatcgaggccctgctgccccacgtgagagccatcgcctacacctggttcaacctgcaggccagaaagagaaagtacttcaagaagcacgagaagagaatgagcaaggacgaggagagagccgtgaaggacgagctgctgagcgagaagcccgagatcaagcagaagtgggccagcagactgctggccaagctgagaaaggacatcagacaggagtacagagaggacttcgtgctgaccgtgaccggcaagaagcacccctgctgcgtgctgagcaaccccgaccagaagggcaagatcagaagaatcgactgcctgagacaggccgacaaggtgtggagactggacctggtgatggtgatcctgttcaagggcatccccctggagagcaccgacggcgagagactgatgaagagcccccactgcaccaaccccgccctgtgcgtgcagccccaccacatcaccgtgagcgtgaaggagctggacctgttcctggcctactacgtgcaggagcaggacagcggccagagcggcagccccagccacaacgaccccgccaagaacccccccggctacctggaggacagcttcgtgaagagcggcgtgttcaacgtgagcgagctggtgagagtgagcagaacccccatcacccagggcaccggcgtgaacttccccatcggcgagatccccagccagccctactaccacgacatgaacagcggcgtgaacctgcagagaagcctgagcagcccccccagcagcaagagacccaagaccatcagcatcgacgagaacatggagcccagccccaccggcgacttctaccccagccccagcagccccgccgccggcagcagaacctggcacgagagagaccaggacatgagcagccccaccaccatgaagaagcccgagaagcccctgttcagcagcgccagcccccaggacagcagccccagactgagcaccttcccccagcaccaccaccccggcatccccggcgtggcccacagcgtgatcagcaccagaaccccccccccccccagccccctgcccttccccacccaggccatcctgccccccgcccccagcagctacttcagccaccccaccatcagataccccccccacctgaacccccaggacaccctgaagaactacgtgcccagctacgaccccagcagcccccagaccagccagagctggtacctgggctag

SEQ ID NO: 91391 - DNA, 1686 bp, synthetic construct
  misc_feature 1..1686: note = Description of Artificial Sequence: Synthetic coding sequence
  source 1..1686: mol_type = other DNA
atgatgtacagccccatctgcctgacccaggacgagttccaccccttcatcgaggccctgctgccccacgtgagagccatcgcctacacctggttcaacctgcaggccagaaagagaaagtacttcaagaagcacgagaagagaatgagcaaggacgaggagagagccgtgaaggacgagctgctgagcgagaagcccgagatcaagcagaagtgggccagcagactgctggccaagctgagaaaggacatcagacaggagtacagagaggacttcgtgctgaccgtgaccggcaagaagcacccctgctgcgtgctgagcaaccccgaccagaagggcaagatcagaagaatcgactgcctgagacaggccgacaaggtgtggagactggacctggtgatggtgatcctgttcaagggcatccccctggagagcaccgacggcgagagactgatgaagagcccccactgcaccaaccccgccctgtgcgtgcagccccaccacatcaccgtgagcgtgaaggagctggacctgttcctggcctactacgtgcaggagcaggacagcggccagagcggcagccccagccacaacgaccccgccaagaacccccccggctacctggaggacagcttcgtgaagagcggcgtgttcaacgtgagcgagctggtgagagtgagcagaacccccatcacccagggcaccggcgtgaacttccccatcggcgagatccccagccagccctactaccacgacatgaacagcggcgtgaacctgcagagaagcctgagcagcccccccagcagcaagagacccaagaccatcagcatcgacgagaacatggagcccagccccaccggcgacttctaccccagccccagcagccccgccgccggcagcagaacctggcacgagagagaccaggacatgagcagccccaccaccatgaagaagcccgagaagcccctgttcagcagcgccagcccccaggacagcagccccagactgagcaccttcccccagcaccaccaccccggcatccccggcgtggcccacagcgtgatcagcaccagaaccccccccccccccagccccctgcccttccccacccaggccatcctgccccccgcccccagcagctacttcagccaccccaccatcagataccccccccacctgaacccccaggacaccctgaagaactacgtgcccagctacgaccccagcagcccccagaccagccagcccaacggcagcggccaggtggtgggcaaggtgcccggccacttcacccccgtgctggcccccagcccccaccccagcgccgtgagacccgtgaccctgagcatgaccgacaccaagcccatcaccaccagcaccgaggcctacaccgccagcggcaccagccaggccaacagatacgtgggcctgagccccagagaccccagcttcctgcaccagcagcagctgagaatctgcgactggaccatgaaccagaacggcagacacctgtaccccagcaccagcgaggacaccctgggcatcacctggcagagccccggcacctgggccagcctggtgcccttccaggtgagcaacagaacccccatcctgcccgccaacgtgcagaactacggcctgaacatcatcggcgagcccttcctgcaggccgagaccagcaactag

SEQ ID NO: 91392 - DNA, 1464 bp, synthetic construct
  misc_feature 1..1464: note = Description of Artificial Sequence: Synthetic coding sequence
  source 1..1464: mol_type = other DNA
atgatgtacagccccatctgcctgacccaggacgagttccaccccttcatcgaggccctgctgccccacgtgagagccatcgcctacacctggttcaacctgcaggccagaaagagaaagtacttcaagaagcacgagaagagaatgagcaaggacgaggagagagccgtgaaggacgagctgctgagcgagaagcccgagatcaagcagaagtgggccagcagactgctggccaagctgagaaaggacatcagacaggagtacagagaggacttcgtgctgaccgtgaccggcaagaagcacccctgctgcgtgctgagcaaccccgaccagaagggcaagatcagaagaatcgactgcctgagacaggccgacaaggtgtggagactggacctggtgatggtgatcctgttcaagggcatccccctggagagcaccgacggcgagagactgatgaagagcccccactgcaccaaccccgccctgtgcgtgcagccccaccacatcaccgtgagcgtgaaggagctggacctgttcctggcctactacgtgcaggagcaggacagcggccagagcggcagccccagccacaacgaccccgccaagaacccccccggctacctggaggacagcttcgtgaagagcggcgtgttcaacgtgagcgagctggtgagagtgagcagaacccccatcacccagggcaccggcgtgaacttccccatcggcgagatccccagccagccctactaccacgacatgaacagcggcgtgaacctgcagagaagcctgagcagcccccccagcagcaagagacccaagaccatcagcatcgacgagaacatggagcccagccccaccggcgacttctaccccagccccagcagccccgccgccggcagcagaacctggcacgagagagaccaggacatgagcagccccaccaccatgaagaagcccgagaagcccctgttcagcagcgccagcccccaggacagcagccccagactgagcaccttcccccagcaccaccaccccggcatccccggcgtggcccacagcgtgatcagcaccagaaccccccccccccccagccccctgcccttccccacccaggccatcctgccccccgcccccagcagctacttcagccaccccaccatcagataccccccccacctgaacccccaggacaccctgaagaactacgtgcccagctacgaccccagcagcccccagaccagccagctgagaatctgcgactggaccatgaaccagaacggcagacacctgtaccccagcaccagcgaggacaccctgggcatcacctggcagagccccggcacctgggccagcctggtgcccttccaggtgagcaacagaacccccatcctgcccgccaacgtgcagaactacggcctgaacatcatcggcgagcccttcctgcaggccgagaccagcaactag

SEQ ID NO: 91393 - DNA, 1713 bp, synthetic construct
  misc_feature 1..1713: note = Description of Artificial Sequence: Synthetic coding sequence
  source 1..1713: mol_type = other DNA
atgatgtacagccccatctgcctgacccaggacgagttccaccccttcatcgaggccctgctgccccacgtgagagccatcgcctacacctggttcaacctgcaggccagaaagagaaagtacttcaagaagcacgagaagagaatgagcaaggacgaggagagagccgtgaaggacgagctgctgagcgagaagcccgagatcaagcagaagtgggccagcagactgctggccaagctgagaaaggacatcagacaggagtacagagaggacttcgtgctgaccgtgaccggcaagaagcacccctgctgcgtgctgagcaaccccgaccagaagggcaagatcagaagaatcgactgcctgagacaggccgacaaggtgtggagactggacctggtgatggtgatcctgttcaagggcatccccctggagagcaccgacggcgagagactgatgaagagcccccactgcaccaaccccgccctgtgcgtgcagccccaccacatcaccgtgagcgtgaaggagctggacctgttcctggcctactacgtgcaggagcaggacagcggccagagcggcagccccagccacaacgaccccgccaagaacccccccggctacctggaggacagcttcgtgaagagcggcgtgttcaacgtgagcgagctggtgagagtgagcagaacccccatcacccagggcaccggcgtgaacttccccatcggcgagatccccagccagccctactaccacgacatgaacagcggcgtgaacctgcagagaagcctgagcagcccccccagcagcaagagacccaagaccatcagcatcgacgagaacatggagcccagccccaccggcgacttctaccccagccccagcagccccgccgccggcagcagaacctggcacgagagagaccaggacatgagcagccccaccaccatgaagaagcccgagaagcccctgttcagcagcgccagcccccaggacagcagccccagactgagcaccttcccccagcaccaccaccccggcatccccggcgtggcccacagcgtgatcagcaccagaaccccccccccccccagccccctgcccttccccacccaggccatcctgccccccgcccccagcagctacttcagccaccccaccatcagataccccccccacctgaacccccaggacaccctgaagaactacgtgcccagctacgaccccagcagcccccagaccagccagcccaacggcagcggccaggtggtgggcaaggtgcccggccacttcacccccgtgctggcccccagcccccaccccagcgccgtgagacccgtgaccctgagcatgaccgacaccaagcccatcaccaccagcaccgagggcgaggccgccagccccaccgccaccacctacaccgccagcggcaccagccaggccaacagatacgtgggcctgagccccagagaccccagcttcctgcaccagcagcagctgagaatctgcgactggaccatgaaccagaacggcagacacctgtaccccagcaccagcgaggacaccctgggcatcacctggcagagccccggcacctgggccagcctggtgcccttccaggtgagcaacagaacccccatcctgcccgccaacgtgcagaactacggcctgaacatcatcggcgagcccttcctgcaggccgagaccagcaactag

SEQ ID NO: 91394 - DNA, 930 bp, synthetic construct
  misc_feature 1..930: note = Description of Artificial Sequence: Synthetic coding sequence
  source 1..930: mol_type = other DNA
atgaacagcggcgtgaacctgcagagaagcctgagcagcccccccagcagcaagagacccaagaccatcagcatcgacgagaacatggagcccagccccaccggcgacttctaccccagccccagcagccccgccgccggcagcagaacctggcacgagagagaccaggacatgagcagccccaccaccatgaagaagcccgagaagcccctgttcagcagcgccagcccccaggacagcagccccagactgagcaccttcccccagcaccaccaccccggcatccccggcgtggcccacagcgtgatcagcaccagaaccccccccccccccagccccctgcccttccccacccaggccatcctgccccccgcccccagcagctacttcagccaccccaccatcagataccccccccacctgaacccccaggacaccctgaagaactacgtgcccagctacgaccccagcagcccccagaccagccagcccaacggcagcggccaggtggtgggcaaggtgcccggccacttcacccccgtgctggcccccagcccccaccccagcgccgtgagacccgtgaccctgagcatgaccgacaccaagcccatcaccaccagcaccgaggcctacaccgccagcggcaccagccaggccaacagatacgtgggcctgagccccagagaccccagcttcctgcaccagcagcagctgagaatctgcgactggaccatgaaccagaacggcagacacctgtaccccagcaccagcgaggacaccctgggcatcacctggcagagccccggcacctgggccagcctggtgcccttccaggtgagcaacagaacccccatcctgcccgccaacgtgcagaactacggcctgaacatcatcggcgagcccttcctgcaggccgagaccagcaactag

SEQ ID NO: 91395 - DNA, 1272 bp, synthetic construct
  misc_feature 1..1272: note = Description of Artificial Sequence: Synthetic coding sequence
  source 1..1272: mol_type = other DNA
atgtacagcagccccctgtgcctgacccaggacgagttccaccccttcatcgaggccctgctgccccacgtgagagccttcgcctacacctggttcaacctgcaggccagaaagagaaagtacttcaagaagcacgagaagagaatgagcaaggacgaggagagagccgtgaaggacgagctgctgggcgagaagcccgaggtgaagcagaagtgggccagcagactgctggccaagctgagaaaggacatcagacccgagtgcagagaggacttcgtgctgagcatcaccggcaagaaggcccccggctgcgtgctgagcaaccccgaccagaagggcaagatgagaagaatcgactgcctgagacaggccgacaaggtgtggagactggacctggtgatggtgatcctgttcaagggcatccccctggagagcaccgacggcgagagactggtgaaggccgcccagtgcggccaccccgtgctgtgcgtgcagccccaccacatcggcgtggccgtgaaggagctggacctgtacctggcctacttcgtgagagagagagacgccgagcagagcggcagccccagaaccggcatgggcagcgaccaggaggacagcaagcccatcaccctggacaccaccgacttccaggagagcttcgtgaccagcggcgtgttcagcgtgaccgagctgatccaggtgagcagaacccccgtggtgaccggcaccggccccaacttcagcctgggcgagctgcagggccacctggcctacgacctgaaccccgccagcaccggcctgagaagaaccctgcccagcaccagcagcagcggcagcaagagacacaagagcggcagcatggaggaggacgtggacaccagccccggcggcgactactacaccagccccagcagccccaccagcagcagcagaaactggaccgaggacatggagggcggcatcagcagccccgtgaagaagaccgagatggacaagagccccttcaacagccccagcccccaggacagccccagactgagcagcttcacccagcaccacagacccgtgatcgccgtgcacagcggcatcgccagaagcccccaccccagcagcgccctgcacttccccaccaccagcatcctgccccagaccgccagcacctacttcccccacaccgccatcagataccccccccacctgaacccccaggaccccctgaaggacctggtgagcctggcctgcgaccccgccagccagcagcccggcccctag

SEQ ID NO: 91396 - DNA, 1287 bp, synthetic construct
  misc_feature 1..1287: note = Description of Artificial Sequence: Synthetic coding sequence
  source 1..1287: mol_type = other DNA
atgtacagcagccccctgtgcctgacccaggacgagttccaccccttcatcgaggccctgctgccccacgtgagagccttcgcctacacctggttcaacctgcaggccagaaagagaaagtacttcaagaagcacgagaagagaatgagcaaggacgaggagagagccgtgaaggacgagctgctgggcgagaagcccgaggtgaagcagaagtgggccagcagactgctggccaagctgagaaaggacatcagacccgagtgcagagaggacttcgtgctgagcatcaccggcaagaaggcccccggctgcgtgctgagcaaccccgaccagaagggcaagatgagaagaatcgactgcctgagacaggccgacaaggtgtggagactggacctggtgatggtgatcctgttcaagggcatccccctggagagcaccgacggcgagagactggtgaaggccgcccagtgcggccaccccgtgctgtgcgtgcagccccaccacatcggcgtggccgtgaaggagctggacctgtacctggcctacttcgtgagagagagagacgccgagcagagcggcagccccagaaccggcatgggcagcgaccaggaggacagcaagcccatcaccctggacaccaccgacttccaggagagcttcgtgaccagcggcgtgttcagcgtgaccgagctgatccaggtgagcagaacccccgtggtgaccggcaccggccccaacttcagcctgggcgagctgcagggccacctggcctacgacctgaaccccgccagcaccggcctgagaagaaccctgcccagcaccagcagcagcggcagcaagagacacaagagcggcagcatggaggaggacgtggacaccagccccggcggcgactactacaccagccccagcagccccaccagcagcagcagaaactggaccgaggacatggagggcggcatcagcagccccgtgaagaagaccgagatggacaagagccccttcaacagccccagcccccaggacagccccagactgagcagcttcacccagcaccacagacccgtgatcgccgtgcacagcggcatcgccagaagcccccaccccagcagcgccctgcacttccccaccaccagcatcctgccccagaccgccagcacctacttcccccacaccgccatcagataccccccccacctgaacccccaggaccccctgaaggacctggtgagcctggcctgcgaccccgccagccagcagcccggccccagctggtacctgggctag

SEQ ID NO: 91397 - DNA, 1527 bp, synthetic construct
  misc_feature 1..1527: note = Description of Artificial Sequence: Synthetic coding sequence
  source 1..1527: mol_type = other DNA
atgtacagcagccccctgtgcctgacccaggacgagttccaccccttcatcgaggccctgctgccccacgtgagagccttcgcctacacctggttcaacctgcaggccagaaagagaaagtacttcaagaagcacgagaagagaatgagcaaggacgaggagagagccgtgaaggacgagctgctgggcgagaagcccgaggtgaagcagaagtgggccagcagactgctggccaagctgagaaaggacatcagacccgagtgcagagaggacttcgtgctgagcatcaccggcaagaaggcccccggctgcgtgctgagcaaccccgaccagaagggcaagatgagaagaatcgactgcctgagacaggccgacaaggtgtggagactggacctggtgatggtgatcctgttcaagggcatccccctggagagcaccgacggcgagagactggtgaaggccgcccagtgcggccaccccgtgctgtgcgtgcagccccaccacatcggcgtggccgtgaaggagctggacctgtacctggcctacttcgtgagagagagagacgccgagcagagcggcagccccagaaccggcatgggcagcgaccaggaggacagcaagcccatcaccctggacaccaccgacttccaggagagcttcgtgaccagcggcgtgttcagcgtgaccgagctgatccaggtgagcagaacccccgtggtgaccggcaccggccccaacttcagcctgggcgagctgcagggccacctggcctacgacctgaaccccgccagcaccggcctgagaagaaccctgcccagcaccagcagcagcggcagcaagagacacaagagcggcagcatggaggaggacgtggacaccagccccggcggcgactactacaccagccccagcagccccaccagcagcagcagaaactggaccgaggacatggagggcggcatcagcagccccgtgaagaagaccgagatggacaagagccccttcaacagccccagcccccaggacagccccagactgagcagcttcacccagcaccacagacccgtgatcgccgtgcacagcggcatcgccagaagcccccaccccagcagcgccctgcacttccccaccaccagcatcctgccccagaccgccagcacctacttcccccacaccgccatcagataccccccccacctgaacccccaggaccccctgaaggacctggtgagcctggcctgcgaccccgccagccagcagcccggccccctgaacggcagcggccagctgaagatgcccagccactgcctgagcgcccagatgctggccccccccccccccggcctgcccagactggccctgccccccgccaccaagcccgccaccaccagcgagggcggcgccaccagccccaccagccccagctacagcccccccgacaccagccccgccaacagaagcttcgtgggcctgggccccagagaccccgccggcatctaccaggcccagagctggggcgacggctag

SEQ ID NO: 91398 - DNA, 1221 bp, synthetic construct
  misc_feature 1..1221: note = Description of Artificial Sequence: Synthetic coding sequence
  source 1..1221: mol_type = other DNA
atggacgagttccaccccttcatcgaggccctgctgccccacgtgagagccttcgcctacacctggttcaacctgcaggccagaaagagaaagtacttcaagaagcacgagaagagaatgagcaaggacgaggagagagccgtgaaggacgagctgctgggcgagaagcccgaggtgaagcagaagtgggccagcagactgctggccaagctgagaaaggacatcagacccgagtgcagagaggacttcgtgctgagcatcaccggcaagaaggcccccggctgcgtgctgagcaaccccgaccagaagggcaagatgagaagaatcgactgcctgagacaggccgacaaggtgtggagactggacctggtgatggtgatcctgttcaagggcatccccctggagagcaccgacggcgagagactggtgaaggccgcccagtgcggccaccccgtgctgtgcgtgcagccccaccacatcggcgtggccgtgaaggagctggacctgtacctggcctacttcgtgagagagagagacaccaccgacttccaggagagcttcgtgaccagcggcgtgttcagcgtgaccgagctgatccaggtgagcagaacccccgtggtgaccggcaccggccccaacttcagcctgggcgagctgcagggccacctggcctacgacctgaaccccgccagcaccggcctgagaagaaccctgcccagcaccagcagcagcggcagcaagagacacaagagcggcagcatggaggaggacgtggacaccagccccggcggcgactactacaccagccccagcagccccaccagcagcagcagaaactggaccgaggacatggagggcggcatcagcagccccgtgaagaagaccgagatggacaagagccccttcaacagccccagcccccaggacagccccagactgagcagcttcacccagcaccacagacccgtgatcgccgtgcacagcggcatcgccagaagcccccaccccagcagcgccctgcacttccccaccaccagcatcctgccccagaccgccagcacctacttcccccacaccgccatcagataccccccccacctgaacccccaggaccccctgaaggacctggtgagcctggcctgcgaccccgccagccagcagcccggcccccccaccctgagacccaccagacccctgcagaccgtgcccctgtgggactag

SEQ ID NO: 91399 - DNA, 1293 bp, synthetic construct
  misc_feature 1..1293: note = Description of Artificial Sequence: Synthetic coding sequence
  source 1..1293: mol_type = other DNA
atggacgagttccaccccttcatcgaggccctgctgccccacgtgagagccttcgcctacacctggttcaacctgcaggccagaaagagaaagtacttcaagaagcacgagaagagaatgagcaaggacgaggagagagccgtgaaggacgagctgctgggcgagaagcccgaggtgaagcagaagtgggccagcagactgctggccaagctgagaaaggacatcagacccgagtgcagagaggacttcgtgctgagcatcaccggcaagaaggcccccggctgcgtgctgagcaaccccgaccagaagggcaagatgagaagaatcgactgcctgagacaggccgacaaggtgtggagactggacctggtgatggtgatcctgttcaagggcatccccctggagagcaccgacggcgagagactggtgaaggccgcccagtgcggccaccccgtgctgtgcgtgcagccccaccacatcggcgtggccgtgaaggagctggacctgtacctggcctacttcgtgagagagagagacgccgagcagagcggcagccccagaaccggcatgggcagcgaccaggaggacagcaagcccatcaccctggacaccaccgacttccaggagagcttcgtgaccagcggcgtgttcagcgtgaccgagctgatccaggtgagcagaacccccgtggtgaccggcaccggccccaacttcagcctgggcgagctgcagggccacctggcctacgacctgaaccccgccagcaccggcctgagaagaaccctgcccagcaccagcagcagcggcagcaagagacacaagagcggcagcatggaggaggacgtggacaccagccccggcggcgactactacaccagccccagcagccccaccagcagcagcagaaactggaccgaggacatggagggcggcatcagcagccccgtgaagaagaccgagatggacaagagccccttcaacagccccagcccccaggacagccccagactgagcagcttcacccagcaccacagacccgtgatcgccgtgcacagcggcatcgccagaagcccccaccccagcagcgccctgcacttccccaccaccagcatcctgccccagaccgccagcacctacttcccccacaccgccatcagataccccccccacctgaacccccaggaccccctgaaggacctggtgagcctggcctgcgaccccgccagccagcagcccggcccccccaccctgagacccaccagacccctgcagaccgtgcccctgtgggactag

SEQ ID NO: 91400 - DNA, 1500 bp, synthetic construct
  misc_feature 1..1500: note = Description of Artificial Sequence: Synthetic coding sequence
  source 1..1500: mol_type = other DNA
atggacgagttccaccccttcatcgaggccctgctgccccacgtgagagccttcgcctacacctggttcaacctgcaggccagaaagagaaagtacttcaagaagcacgagaagagaatgagcaaggacgaggagagagccgtgaaggacgagctgctgggcgagaagcccgaggtgaagcagaagtgggccagcagactgctggccaagctgagaaaggacatcagacccgagtgcagagaggacttcgtgctgagcatcaccggcaagaaggcccccggctgcgtgctgagcaaccccgaccagaagggcaagatgagaagaatcgactgcctgagacaggccgacaaggtgtggagactggacctggtgatggtgatcctgttcaagggcatccccctggagagcaccgacggcgagagactggtgaaggccgcccagtgcggccaccccgtgctgtgcgtgcagccccaccacatcggcgtggccgtgaaggagctggacctgtacctggcctacttcgtgagagagagagacgccgagcagagcggcagccccagaaccggcatgggcagcgaccaggaggacagcaagcccatcaccctggacaccaccgacttccaggagagcttcgtgaccagcggcgtgttcagcgtgaccgagctgatccaggtgagcagaacccccgtggtgaccggcaccggccccaacttcagcctgggcgagctgcagggccacctggcctacgacctgaaccccgccagcaccggcctgagaagaaccctgcccagcaccagcagcagcggcagcaagagacacaagagcggcagcatggaggaggacgtggacaccagccccggcggcgactactacaccagccccagcagccccaccagcagcagcagaaactggaccgaggacatggagggcggcatcagcagccccgtgaagaagaccgagatggacaagagccccttcaacagccccagcccccaggacagccccagactgagcagcttcacccagcaccacagacccgtgatcgccgtgcacagcggcatcgccagaagcccccaccccagcagcgccctgcacttccccaccaccagcatcctgccccagaccgccagcacctacttcccccacaccgccatcagataccccccccacctgaacccccaggaccccctgaaggacctggtgagcctggcctgcgaccccgccagccagcagcccggccccctgaacggcagcggccagctgaagatgcccagccactgcctgagcgcccagatgctggccccccccccccccggcctgcccagactggccctgccccccgccaccaagcccgccaccaccagcgagggcggcgccaccagccccaccagccccagctacagcccccccgacaccagccccgccaacagaagcttcgtgggcctgggccccagagaccccgccggcatctaccaggcccagagctggtacctgggctag

SEQ ID NO: 91401 - DNA, 1500 bp, synthetic construct; identical to SEQ ID NO: 91400
  misc_feature 1..1500: note = Description of Artificial Sequence: Synthetic coding sequence
  source 1..1500: mol_type = other DNA

SEQ ID NO: 91402 - DNA, 1212 bp, synthetic construct
  misc_feature 1..1212: note = Description of Artificial Sequence: Synthetic coding sequence
  source 1..1212: mol_type = other DNA
atgggcgccaccgagcccggcggcgacaccagcagcgacgagttccaccccttcatcgaggccctgctgccccacgtgagagccttcagctacacctggttcaacctgcaggccagaaagagaaagtacttcaagaagcacgagaagagaatgagcaaggacgaggagagagccgtgaaggacgagctgctgggcgagaagcccgagatcaagcagaagtgggccagcagactgctggccaagctgagaaaggacatcagacccgagttcagagaggacttcgtgctgaccatcaccggcaagaagcccccctgctgcgtgctgagcaaccccgaccagaagggcaagatcagaagaatcgactgcctgagacaggccgacaaggtgtggagactggacctggtgatggtgatcctgttcaagggcatccccctggagagcaccgacggcgagagactgtacaagagcccccagtgcagcaaccccggcctgtgcgtgcagccccaccacatcggcgtgaccatcaaggagctggacctgtacctggcctacttcgtgcacacccccgagagcggccagagcgacagcagcaaccagcagggcgacgccgacatcaagcccctgcccaacggccacctgagcttccaggactgcttcgtgaccagcggcgtgtggaacgtgaccgagctggtgagagtgagccagacccccgtggccaccgccagcggccccaacttcagcctggccgacctggagagccccagctactacaacatcaaccaggtgaccctgggcagaagaagcatcaccagcccccccagcaccagcaccaccaagagacccaagagcatcgacgacagcgagatggagagccccgtggacgacgtgttctaccccggcaccggcagaagccccgccgccggcagcagccagagcagcggctggcccaacgacgtggacgccggcagccccagagccaccgccagcgccctgcacttccccagcaccagcatcatccagcagagcagcccctacttcacccaccccaccatcagataccaccaccaccacggccaggacagcctgaaggagttcgtgcagttcgtgtgcagcgacggcagcggccaggccaccggccagcacagccagagacaggccccccccctgcccaccggcctgagcgccagcgaccccggcaccgccaccttctag

SEQ ID NO: 91403 - DNA, 1383 bp, synthetic construct
  misc_feature 1..1383: note = Description of Artificial Sequence: Synthetic coding sequence
  source 1..1383: mol_type = other DNA
atgctgcccgcctgcagactgcaggacgagttccaccccttcatcgaggccctgctgccccacgtgagagccttcagctacacctggttcaacctgcaggccagaaagagaaagtacttcaagaagcacgagaagagaatgagcaaggacgaggagagagccgtgaaggacgagctgctgggcgagaagcccgagatcaagcagaagtgggccagcagactgctggccaagctgagaaaggacatcagacccgagttcagagaggacttcgtgctgaccatcaccggcaagaagcccccctgctgcgtgctgagcaaccccgaccagaagggcaagatcagaagaatcgactgcctgagacaggccgacaaggtgtggagactggacctggtgatggtgatcctgttcaagggcatccccctggagagcaccgacggcgagagactgtacaagagcccccagtgcagcaaccccggcctgtgcgtgcagccccaccacatcggcgtgaccatcaaggagctggacctgtacctggcctacttcgtgcacacccccgagagcggccagagcgacagcagcaaccagcagggcgacgccgacatcaagcccctgcccaacggccacctgagcttccaggactgcttcgtgaccagcggcgtgtggaacgtgaccgagctggtgagagtgagccagacccccgtggccaccgccagcggccccaacttcagcctggccgacctggagagccccagctactacaacatcaaccaggtgaccctgggcagaagaagcatcaccagcccccccagcaccagcaccaccaagagacccaagagcatcgacgacagcgagatggagagccccgtggacgacgtgttctaccccggcaccggcagaagccccgccgccggcagcagccagagcagcggctggcccaacgacgtggacgccggcagccccagagccaccgccagcgccctgcacttccccagcaccagcatcatccagcagagcagcccctacttcacccaccccaccatcagataccaccaccaccacggccaggacagcctgaaggagttcgtgcagttcgtgtgcagcgacggcagcggccaggccaccggccagcccaacggcagcggccagggcaaggtgcccggcagcttcctgctgcccccccccccccccgtggccagacccgtgcccctgcccatgcccgacagcaagagcaccagcaccgcccccgacggcgccgccctgaccccccccagccccagcttcgccaccaccggcgccagcagcgccaacagattcgtgagcatcggccccagagacggcaacttcctgaacatcccccagcagagccagagctggttcctgtag

SEQ ID NO: 91404 - DNA, 1326 bp, synthetic construct
  misc_feature 1..1326: note = Description of Artificial Sequence: Synthetic coding sequence
  source 1..1326: mol_type = other DNA
atgtacagcccctactgcctgacccaggacgagttccaccccttcatcgaggccctgctgccccacgtgagagccttcagctacacctggttcaacctgcaggccagaaagagaaagtacttcaagaagcacgagaagagaatgagcaaggacgaggagagagccgtgaaggacgagctgctgggcgagaagcccgagatcaagcagaagtgggccagcagactgctggccaagctgagaaaggacatcagacccgagttcagagaggacttcgtgctgaccatcaccggcaagaagcccccctgctgcgtgctgagcaaccccgaccagaagggcaagatcagaagaatcgactgcctgagacaggccgacaaggtgtggagactggacctggtgatggtgatcctgttcaagggcatccccctggagagcaccgacggcgagagactgtacaagagcccccagtgcagcaaccccggcctgtgcgtgcagccccaccacatcggcgtgaccatcaaggagctggacctgtacctggcctacttcgtgcacacccccgagagcggccagagcgacagcagcaaccagcagggcgacgccgacatcaagcccctgcccaacggccacctgagcttccaggactgcttcgtgaccagcggcgtgtggaacgtgaccgagctggtgagagtgagccagacccccgtggccaccgccagcggccccaacttcagcctggccgacctggagagccccagctactacaacatcaaccaggtgaccctgggcagaagaagcatcaccagcccccccagcaccagcaccaccaagagacccaagagcatcgacgacagcgagatggagagccccgtggacgacgtgttctaccccggcaccggcagaagccccgccgccggcagcagccagagcagcggctggcccaacgacgtggacgccggccccgccagcctgaagaagagcggcaagctggacttctgcagcgccctgagcagccagggcagcagccccagaatggccttcacccaccaccccctgcccgtgctggccggcgtgagacccggcagccccagagccaccgccagcgccctgcacttccccagcaccagcatcatccagcagagcagcccctacttcacccaccccaccatcagataccaccaccaccacggccaggacagcctgaaggagttcgtgcagttcgtgtgcagcgacggcagcggccaggccaccggccagcacagccagagacaggccccccccctgcccaccggcctgagcgccagcgaccccggcaccgccaccttctag

SEQ ID NO: 91405 - DNA, 1509 bp, synthetic construct
  misc_feature 1..1509: note = Description of Artificial Sequence: Synthetic coding sequence
  source 1..1509: mol_type = other DNA
atgtacagcccctactgcctgacccaggacgagttccaccccttcatcgaggccctgctgccccacgtgagagccttcagctacacctggttcaacctgcaggccagaaagagaaagtacttcaagaagcacgagaagagaatgagcaaggacgaggagagagccgtgaaggacgagctgctgggcgagaagcccgagatcaagcagaagtgggccagcagactgctggccaagctgagaaaggacatcagacccgagttcagagaggacttcgtgctgaccatcaccggcaagaagcccccctgctgcgtgctgagcaaccccgaccagaagggcaagatcagaagaatcgactgcctgagacaggccgacaaggtgtggagactggacctggtgatggtgatcctgttcaagggcatccccctggagagcaccgacggcgagagactgtacaagagcccccagtgcagcaaccccggcctgtgcgtgcagccccaccacatcggcgtgaccatcaaggagctggacctgtacctggcctacttcgtgcacacccccgagagcggccagagcgacagcagcaaccagcagggcgacgccgacatcaagcccctgcccaacggccacctgagcttccaggactgcttcgtgaccagcggcgtgtggaacgtgaccgagctggtgagagtgagccagacccccgtggccaccgccagcggccccaacttcagcctggccgacctggagagccccagctactacaacatcaaccaggtgaccctgggcagaagaagcatcaccagcccccccagcaccagcaccaccaagagacccaagagcatcgacgacagcgagatggagagccccgtggacgacgtgttctaccccggcaccggcagaagccccgccgccggcagcagccagagcagcggctggcccaacgacgtggacgccggccccgccagcctgaagaagagcggcaagctggacttctgcagcgccctgagcagccagggcagcagccccagaatggccttcacccaccaccccctgcccgtgctggccggcgtgagacccggcagccccagagccaccgccagcgccctgcacttccccagcaccagcatcatccagcagagcagcccctacttcacccaccccaccatcagataccaccaccaccacggccaggacagcctgaaggagttcgtgcagttcgtgtgcagcgacggcagcggccaggccaccggccagcccaacggcagcggccagggcaaggtgcccggcagcttcctgctgcccccccccccccccgtggccagacccgtgcccctgcccatgcccgacagcaagagcaccagcaccgcccccgacggcgccgccctgaccccccccagccccagcttcgccaccaccggcgccagcagcgccaacagattcgtgagcatcggccccagagacggcaacttcctgaacatcccccagcagagccagagctggttcctgtag

SEQ ID NO: 91406 - DNA, 633 bp, synthetic construct
  misc_feature 1..633: note = Description of Artificial Sequence: Synthetic coding sequence
  source 1..633: mol_type = other DNA
atgagcaaggacgaggagagagccgtgaaggacgagctgctgggcgagaagcccgagatcaagcagaagtgggccagcagactgctggccaagctgagaaaggacatcagacccgagttcagagaggacttcgtgctgaccatcaccggcaagaagcccccctgctgcgtgctgagcaaccccgaccagaagggcaagatcagaagaatcgactgcctgagacaggccgacaaggtgtggagactggacctggtgatggtgatcctgttcaagggcatccccctggagagcaccgacggcgagagactgtacaagagcccccagtgcagcaaccccggcctgtgcgtgcagccccaccacatcggcgtgaccatcaaggagctggacctgtacctggcctacttcgtgcacacccccgagagcggccagagcgacagcagcaaccagcagggcgacgccgacatcaagcccctgcccaacggccacctgagcttccaggactgcttcgtgaccagcggcgtgtggaacgtgaccgagctggtgtaccacagactgctgctgcagcagcaccagggccccaccagcccctggagaacctggagagtgcccgccaccaccaccagcaccagatag

SEQ ID NO: 91407 - DNA, 1071 bp, synthetic construct
  misc_feature 1..1071: note = Description of Artificial Sequence: Synthetic coding sequence
  source 1..1071: mol_type = other DNA
atggccggcgtggcctgcctgggcaaggccgccgacgccgacgagtggtgcgacagcggcctgggcagcctgggccccgacgccgccgcccccggcggccccggcctgggcgccgagctgggccccggcctgagctgggcccccctggtgttcggctacgtgaccgaggacggcgacaccgccctgcacctggccgtgatccaccagcacgagcccttcctggacttcctgctgggcttcagcgccggcaccgagtacatggacctgcagaacgacctgggccagaccgccctgcacctggccgccatcctgggcgagaccagcaccgtggagaagctgtacgccgccggcgccggcctgtgcgtggccgagagaagaggccacaccgccctgcacctggcctgcagagtgggcgcccacgcctgcgccagagccctgctgcagcccagacccagaagacccagagaggcccccgacacctacctggcccagggccccgacagaacccccgacaccaaccacacccccgtggccctgtaccccgacagcgacctggagaaggaggaggaggagagcgaggaggactggaagctgcagctggaggccgagaactacgagggccacacccccctgcacgtggccgtgatccacaaggacgtggagatggtgagactgctgagagacgccggcgccgacctggacaagcccgagcccacctgcggcagaagccccctgcacctggccgtggaggcccaggccgccgacgtgctggagctgctgctgagagccggcgccaaccccgccgccagaatgtacggcggcagaacccccctgggcagcgccatgctgagacccaaccccatcctggccagactgctgagagcccacggcgcccccgagcccgagggcgaggacgagaagagcggcccctgcagcagcagcagcgacagcgacagcggcgacgagggcgacgagtacgacgacatcgtggtgcacagcagcagaagccagaccagactgccccccacccccgccagcaagcccctgcccgacgaccccagacccgtgtag

SEQ ID NO: 91408 - DNA, 921 bp, synthetic construct
  misc_feature 1..921: note = Description of Artificial Sequence: Synthetic coding sequence
  source 1..921: mol_type = other DNA
atgaacggcgccaccgccgcctgggccccctgggtgagaacccagagaccccccgaggacctgggctgggccagaagctgggccagaggctgcagaggcctgcccagcagcagcgccaccagcctgagaatgggcaccagattcagcgccggcaccgagtacatggacctgcagaacgacctgggccagaccgccctgcacctggccgccatcctgggcgagaccagcaccgtggagaagctgtacgccgccggcgccggcctgtgcgtggccgagagaagaggccacaccgccctgcacctggcctgcagagtgggcgcccacgcctgcgccagagccctgctgcagcccagacccagaagacccagagaggcccccgacacctacctggcccagggccccgacagaacccccgacaccaaccacacccccgtggccctgtaccccgacagcgacctggagaaggaggaggaggagagcgaggaggactggaagctgcagctggaggccgagaactacgagggccacacccccctgcacgtggccgtgatccacaaggacgtggagatggtgagactgctgagagacgccggcgccgacctggacaagcccgagcccacctgcggcagaagccccctgcacctggccgtggaggcccaggccgccgacgtgctggagctgctgctgagagccggcgccaaccccgccgccagaatgtacggcggcagaacccccctgggcagcgccatgctgagacccaaccccatcctggccagactgctgagagcccacggcgcccccgagcccgagggcgaggacgagaagagcggcccctgcagcagcagcagcgacagcgacagcggcgacgagggcgtgagccaggaggagagacagggcagccccgccggcggcagcggctag

SEQ ID NO: 91409 - DNA, 1086 bp, synthetic construct
  misc_feature 1..1086: note = Description of Artificial Sequence: Synthetic coding sequence
  source 1..1086: mol_type = other DNA
ctgcagaacagcagacagagccccgccaccggcggcagactgagaggcgcccccgaggccgccggcgccatggccggcgtggcctgcctgggcaaggccgccgacgccgacgagtggtgcgacagcggcctgggcagcctgggccccgacgccgccgcccccggcggccccggcctgggcgccgagctgggccccggcctgagctgggcccccctggtgttcggctacgtgaccgaggacggcgacaccgccctgcacctggccgtgatccaccagcacgagcccttcctggacttcctgctgggcttcagcgccggcaccgagtacatggacctgcagaacgacctgggccagaccgccctgcacctggccgccatcctgggcgagaccagcaccgtggagaagctgtacgccgccggcgccggcctgtgcgtggccgagagaagaggccacaccgccctgcacctggcctgcagagtgggcgcccacgcctgcgccagagccctgctgcagcccagacccagaagacccagagaggcccccgacacctacctggcccagggccccgacagaacccccgacaccaaccacacccccgtggccctgtaccccgacagcgacctggagaaggaggaggaggagagcgaggaggactggaagctgcagctggaggccgagaactacgagggccacacccccctgcacgtggccgtgatccacaaggacgtggagatggtgagactgctgagagacgccggcgccgacctggacaagcccgagcccacctgcggcagaagccccctgcacctggccgtggaggcccaggccgccgacgtgctggagctgctgctgagagccggcgccaaccccgccgccagaatgtacggcggcagaacccccctgggcagcgccatgctgagacccaaccccatcctggccagactgctgagagcccacggcgcccccgagcccgagggcgaggacgagaagagcggcccctgcagcagcagcagcgacagcgacagcggcgacgagggcgtgagccaggaggagagacagggcagccccgccggcggcagcggctag

SEQ ID NO: 91410 - DNA, 1791 bp, synthetic construct
  misc_feature 1..1791: note = Description of Artificial Sequence: Synthetic coding sequence
  source 1..1791: mol_type = other DNA
atgatcgtggacaagctgctggacgacagcagaggcggcgagggcctgagagacgccgccggcggctgcggcctgatgaccagccccctgaacctgagctacttctacggcgccagcccccccgccgccgcccccggcgcctgcgacgccagctgcagcgtgctgggccccagcgcccccggcagccccggcagcgacagcagcgacttcagcagcgccagcagcgtgagcagctgcggcgccgtggagagcagaagcagaggcggcgccagagccgagagacagcccgtggagccccacatgggcgtgggcagacagcagagaggccccttccagggcgtgagagtgaagaacagcgtgaaggagctgctgctgcacatcagaagccacaagcagaaggccagcggccaggccgtggacgacttcaagacccagggcgtgaacatcgagcagttcagagagctgaagaacaccgtgagctacagcggcaagagaaagggccccgacagcctgagcgacggccccgcctgcaagagacccgccctgctgcacagccagttcctgacccccccccagacccccacccccggcgagagcatggaggacgtgcacctgaacgagcccaagcaggagagcagcgccgacctgctgcagaacatcatcaacatcaagaacgagtgcagccccgtgagcctgaacaccgtgcagaccagcagcagcgtgcagcagcagaacgacgcccacctgcacagcttcagcatgatgcccagcagcgcctgcgaggccatggtgggccacgagatggccagcgacagcagcaacaccagcctgcccttcagcaacatgggcaaccccatgaacaccacccagctgggcaagagcctgttccagtggcaggtggagcaggaggagagcaagctggccaacatcagccaggaccagttcctgagcaaggacgccgacggcgacaccttcctgcacatcgccgtggcccagggcagaagagccctgagctacgtgctggccagaaagatgaacgccctgcacatgctggacatcaaggagcacaacggccagagcgccttccaggtggccgtggccgccaaccagcacctgatcgtgcaggacctggtgaacatcggcgcccaggtgaacaccaccgactgctggggcagaacccccctgcacgtgtgcgccgagaagggccacagccaggtgctgcaggccatccagaagggcgccgtgggcagcaaccagttcgtggacctggaggccaccaactacgacggcctgacccccctgcactgcgccgtgatcgcccacaacgccgtggtgcacgagctgcagagaaaccagcagccccacagccccgaggtgcaggagctgctgctgaagaacaagagcctggtggacaccatcaagtgcctgatccagatgggcgccgccgtggaggccaaggacagaaagagcggcagaaccgccctgcacctggccgccgaggaggccaacctggagctgatcagactgttcctggagctgcccagctgcctgagcttcgtgaacgccaaggcctacaacggcaacaccgccctgcacgtggccgccagcctgcagtacagactgacccagctggacgccgtgagactgctgatgagaaagggcgccgaccccagcaccagaaacctggagaacgagcagcccgtgcacctggtgcccgacggccccgtgggcgagcagatcagaagaatcctgaagggcaagagcatccagcagagagcccccccctactag

SEQ ID NO: 91411 - DNA, 2157 bp, synthetic construct
  misc_feature 1..2157: note = Description of Artificial Sequence: Synthetic coding sequence
  source 1..2157: mol_type = other DNA
atgatcgtggacaagctgctggacgacagcagaggcggcgagggcctgagagacgccgccggcggctgcggcctgatgaccagccccctgaacctgagctacttctacggcgccagcccccccgccgccgcccccggcgcctgcgacgccagctgcagcgtgctgggccccagcgcccccggcagccccggcagcgacagcagcgacttcagcagcgccagcagcgtgagcagctgcggcgccgtggagagcagaagcagaggcggcgccagagccgagagacagcccgtggagccccacatgggcgtgggcagacagcagagaggccccttccagggcgtgagagtgaagaacagcgtgaaggagctgctgctgcacatcagaagccacaagcagaaggccagcggccaggccgtggacgacttcaagacccagggcgtgaacatcgagcagttcagagagctgaagaacaccgtgagctacagcggcaagagaaagggccccgacagcctgagcgacggccccgcctgcaagagacccgccctgctgcacagccagttcctgacccccccccagacccccacccccggcgagagcatggaggacgtgcacctgaacgagcccaagcaggagagcagcgccgacctgctgcagaacatcatcaacatcaagaacgagtgcagccccgtgagcctgaacaccgtgcaggtgagctggctgaaccccgtggtggtgccccagagcagccccgccgagcagtgccaggacttccacggcggccaggtgttcagccccccccagaagtgccagcccttccaggtgagaggcagccagcagatgatcgaccaggccagcctgtaccagtacagcccccagaaccagcacgtggagcagcagccccactacacccacaagcccaccctggagtacagccccttccccatccccccccagagccccgcctacgagcccaacctgttcgacggccccgagagccagttctgccccaaccagagcctggtgagcctgctgggcgaccagagagagagcgagaacatcgccaaccccatgcagaccagcagcagcgtgcagcagcagaacgacgcccacctgcacagcttcagcatgatgcccagcagcgcctgcgaggccatggtgggccacgagatggccagcgacagcagcaacaccagcctgcccttcagcaacatgggcaaccccatgaacaccacccagctgggcaagagcctgttccagtggcaggtggagcaggaggagagcaagctggccaacatcagccaggaccagttcctgagcaaggacgccgacggcgacaccttcctgcacatcgccgtggcccagggcagaagagccctgagctacgtgctggccagaaagatgaacgccctgcacatgctggacatcaaggagcacaacggccagagcgccttccaggtggccgtggccgccaaccagcacctgatcgtgcaggacctggtgaacatcggcgcccaggtgaacaccaccgactgctggggcagaacccccctgcacgtgtgcgccgagaagggccacagccaggtgctgcaggccatccagaagggcgccgtgggcagcaaccagttcgtggacctggaggccaccaactacgacggcctgacccccctgcactgcgccgtgatcgcccacaacgccgtggtgcacgagctgcagagaaaccagcagccccacagccccgaggtgcaggagctgctgctgaagaacaagagcctggtggacaccatcaagtgcctgatccagatgggcgccgccgtggaggccaaggacagaaagagcggcagaaccgccctgcacctggccgccgaggaggccaacctggagctgatcagactgttcctggagctgcccagctgcctgagcttcgtgaacgccaaggcctacaacggcaacaccgccctgcacgtggccgccagcctgcagtacagactgacccagctggacgccgtgagactgctgatgagaaagggcgccgaccccagcaccagaaacctggagaacgagcagcccgtgcacctggtgcccgacggccccgtgggcgagcagatcagaagaatcctgaagggcaagagcatccagcagagagcccccccctactag

SEQ ID NO: 91412 - DNA, 1857 bp, synthetic construct
  misc_feature 1..1857: note = Description of Artificial Sequence: Synthetic coding sequence
  source 1..1857: mol_type = other DNA
atgggcgtgggcagacagcagagaggccccttccagggcgtgagagtgaagaacagcgtgaaggagctgctgctgcacatcagaagccacaagcagaaggccagcggccaggccgtggacgacttcaagacccagggcgtgaacatcgagcagttcagagagctgaagaacaccgtgagctacagcggcaagagaaagggccccgacagcctgagcgacggccccgcctgcaagagacccgccctgctgcacagccagttcctgacccccccccagacccccacccccggcgagagcatggaggacgtgcacctgaacgagcccaagcaggagagcagcgccgacctgctgcagaacatcatcaacatcaagaacgagtgcagccccgtgagcctgaacaccgtgcaggtgagctggctgaaccccgtggtggtgccccagagcagccccgccgagcagtgccaggacttccacggcggccaggtgttcagccccccccagaagtgccagcccttccaggtgagaggcagccagcagatgatcgaccaggccagcctgtaccagtacagcccccagaaccagcacgtggagcagcagccccactacacccacaagcccaccctggagtacagccccttccccatccccccccagagccccgcctacgagcccaacctgttcgacggccccgagagccagttctgccccaaccagagcctggtgagcctgctgggcgaccagagagagagcgagaacatcgccaaccccatgcagaccagcagcagcgtgcagcagcagaacgacgcccacctgcacagcttcagcatgatgcccagcagcgcctgcgaggccatggtgggccacgagatggccagcgacagcagcaacaccagcctgcccttcagcaacatgggcaaccccatgaacaccacccagctgggcaagagcctgttccagtggcaggtggagcaggaggagagcaagctggccaacatcagccaggaccagttcctgagcaaggacgccgacggcgacaccttcctgcacatcgccgtggcccagggcagaagagccctgagctacgtgctggccagaaagatgaacgccctgcacatgctggacatcaaggagcacaacggccagagcgccttccaggtggccgtggccgccaaccagcacctgatcgtgcaggacctggtgaacatcggcgcccaggtgaacaccaccgactgctggggcagaacccccctgcacgtgtgcgccgagaagggccacagccaggtgctgcaggccatccagaagggcgccgtgggcagcaaccagttcgtggacctggaggccaccaactacgacggcctgacccccctgcactgcgccgtgatcgcccacaacgccgtggtgcacgagctgcagagaaaccagcagccccacagccccgaggtgcaggagctgctgctgaagaacaagagcctggtggacaccatcaagtgcctgatccagatgggcgccgccgtggaggccaaggacagaaagagcggcagaaccgccctgcacctggccgccgaggaggccaacctggagctgatcagactgttcctggagctgcccagctgcctgagcttcgtgaacgccaaggcctacaacggcaacaccgccctgcacgtggccgccagcctgcagtacagactgacccagctggacgccgtgagactgctgatgagaaagggcgccgaccccagcaccagaaacctggagaacgagcagcccgtgcacctggtgcccgacggccccgtgggcgagcagatcagaagaatcctgaagggcaagagcatccagcagagagcccccccctactag

SEQ ID NO: 91413 - DNA, 333 bp, synthetic construct
  misc_feature 1..333: note = Description of Artificial Sequence: Synthetic coding sequence
  source 1..333: mol_type = other DNA
atgatcgtggacaagctgctggacgacagcagaggcggcgagggcctgagagacgccgccggcggctgcggcctgatgaccagccccctgaacctgagctacttctacggcgccagcccccccgccgccgcccccggcgcctgcgacgccagctgcagcgtgctgggccccagcgcccccggcagccccggcagcgacagcagcgacttcagcagcgccagcagcgtgagcagctgcggcgccgtggagagcagaagcagaggcggcgccagagccgagagacagcccgtggagccccacatgggcgtgggcagacagcagagaggcccctag

SEQ ID NO: 91414 - DNA, 1806 bp, synthetic construct
  misc_feature 1..1806: note = Description of Artificial Sequence: Synthetic coding sequence
  source 1..1806: mol_type = other DNA
atgggcgtgggcagacagcagagaggccccttccagggcgtgagagtgaagaacagcgtgaaggagctgctgctgcacatcagaagccacaagcagaaggccagcggccaggccgtggacgacttcaagacccagggcgtgaacatcgagcagttcagagagctgaagaacaccgtgagctacagcggcaagagaaagggccccgacagcctgagcgacggccccgcctgcaagagacccgccctgctgcacagccagttcctgacccccccccagacccccacccccggcgagagcatggaggacgtgcacctgaacgagcccaagcaggagagcagcgccgacctgctgcagaacatcatcaacatcaagaacgagtgcagccccgtgagcctgaacaccgtgcaggtgagctggctgaaccccgtggtggtgccccagagcagccccgccgagcagtgccaggacttccacggcggccaggtgttcagccccccccagaagtgccagcccttccaggtgagaggcagccagcagatgatcgaccaggccagcctgtaccagtacagcccccagaaccagcacgtggagcagcagccccactacacccacaagcccaccctggagtacagccccttccccatccccccccagagccccgcctacgagcccaacctgttcgacggccccgagagccagttctgccccaaccagagcctggtgagcctgctgggcgaccagagagagagcgagaacatcgccaaccccatgcagaccagcagcagcgtgcagcagcagaacgacgcccacctgcacagcttcagcatgatgcccagcagcgcctgcgaggccatggtgggccacgagatggccagcgacagcagcaacaccagcctgcccttcagcaacatgggcaaccccatgaacaccacccagctgggcaagagcctgttccagtggcaggtggagcaggaggagagcaagctggccaacatcagccaggaccagttcctgagcaaggacgccgacggcgacaccttcctgcacatcgccgtggcccagggcagaagagccctgagctacgtgctggccagaaagatgaacgccctgcacatgctggacatcaaggagcacaacggccagagcgccttccaggtggccgtggccgccaaccagcacctgatcgtgcaggacctggtgaacatcggcgcccaggtgaacaccaccgactgctggggcagaacccccctgcacgtgtgcgccgagaagggccacagccaggtgctgcaggccatccagaagggcgccgtgggcagcaaccagttcgtggacctggaggccaccaactacgacggcctgacccccctgcactgcgccgtgatcgcccacaacgccgtggtgcacgagctgcagagaaaccagcagccccacagccccgaggtgcaggagctgctgctgaagaacaagagcctggtggacaccatcaagtgcctgatccagatgggcgccgccgtggaggccaaggacagaaagagcggcagaaccgccctgcacctggccgccgaggaggccaacctggagctgatcagactgttcctggagctgcccagctgcctgagcttcgtgaacgccaaggcctacaacggcaacaccgccctgcacgtggccgccagcctgcagtacagactgacccagctggacgccgtgagactgctgatgagaaagggcgccgaccccagcaccagaaacctggagaacgagcagcccgtgcacctggtgcccgacggccccgtgggcgagcagtag

SEQ ID NO: 91415 - DNA, 393 bp, synthetic construct
  misc_feature 1..393: note = Description of Artificial Sequence: Synthetic coding sequence
  source 1..393: mol_type = other DNA
atgggcgtgggcagacagcagagaggccccttccagggcgtgagagtgaagaacagcgtgaaggagctgctgctgcacatcagaagccacaagcagaaggccagcggccaggccgtggacgacttcaagacccagggcgtgaacatcgagcagttcagagagctgaagaacaccgtgagctacagcggcaagagaaagggccccgacagcctgagcgacggccccgcctgcaagagacccgccctgctgcacagccagttcctgacccccccccagacccccacccccggcgagagcatggaggacgtgcacctgaacgagcccaagcaggagagcagcgccgacctgctgcagaacatcatcaacatcaagaacgagtgcagccccgtgtag

SEQ ID NO: 91416 - DNA, 1101 bp, synthetic construct
  misc_feature 1..1101: note = Description of Artificial Sequence: Synthetic coding sequence
  source 1..1101: mol_type = other DNA
atgagcaaccccagcccccaggtgcccgaggaggaggccagcaccagcgtgtgcagacccaagagcagcatggccagcaccagcagaagacagagaagagagagaagattcagaagatacctgagcgccggcagactggtgagagcccaggccctgctgcagagacaccccggcctggacgtggacgccggccagcccccccccctgcacagagcctgcgccagacacgacgcccccgccctgtgcctgctgctgagactgggcgccgaccccgcccaccaggacagacacggcgacaccgccctgcacgccgccgccagacagggccccgacgcctacaccgacttcttcctgcccctgctgagcagatgccccagcgccatgggcatcaagaacaaggacggcgagacccccggccagatcctgggctggggccccccctgggacagcgccgaggaggaggaggaggacgacgccagcaaggagagagagtggagacagaagctgcagggcgacgccagccacgagacccaggagcccgagagcttcagcgcctggagcgacagactggccagagagcacgcccagaagtgccagcagcagcagagagaggccgagggcagcagaagaccccccagagccgagggcagcagccagagctggagacagcaggaggaggagcagagactgttcagagagagagccagagccaaggaggaggagctgagagagagcagagccagaagagcccaggaggccctgggcgacagagagcccaagcccaccagagccggccccagagaggagcaccccagaggcgccggcagaggcagcctgtggagattcggcgacgtgccctggccctgccccggcggcggcgaccccgaggccatggccgccgccctggtggccagaggcccccccctggaggagcagggcgccctgagaagatacctgagagtgcagcaggtgagatggcaccccgacagattcctgcagagattcagaagccagatcgagacctgggagctgggcagagtgatgggcgccgtgaccgccctgagccaggccctgaacagacacgccgaggccctgaagtag

SEQ ID NO: 91417 - DNA, 1077 bp, synthetic construct
  misc_feature 1..1077: note = Description of Artificial Sequence: Synthetic coding sequence
  source 1..1077: mol_type = other DNA
atggccagcaccagcagaagacagagaagagagagaagattcagaagatacctgagcgccggcagactggtgagagcccaggccctgctgcagagacaccccggcctggacgtggacgccggccagcccccccccctgcacagagcctgcgccagacacgacgcccccgccctgtgcctgctgctgagactgggcgccgaccccgcccaccaggacagacacggcgacaccgccctgcacgccgccgccagacagggccccgacgcctacaccgacttcttcctgcccctgctgagcagatgccccagcgccatgggcatcaagaacaaggacggcgagacccccggccagatcctgggctggggccccccctgggacagcgccgaggaggaggaggaggacgacgccagcaaggagagagagtggagacagaagctgcagggcgagctggaggacgagtggcaggaggtgatgggcagattcgagggcgacgccagccacgagacccaggagcccgagagcttcagcgcctggagcgacagactggccagagagcacgcccagaagtgccagcagcagcagagagaggccgagggcagcagaagaccccccagagccgagggcagcagccagagctggagacagcaggaggaggagcagagactgttcagagagagagccagagccaaggaggaggagctgagagagagcagagccagaagagcccaggaggccctgggcgacagagagcccaagcccaccagagccggccccagagaggagcaccccagaggcgccggcagaggcagcctgtggagattcggcgacgtgccctggccctgccccggcggcggcgaccccgaggccatggccgccgccctggtggccagaggcccccccctggaggagcagggcgccctgagaagatacctgagagtgcagcaggtgagatggcaccccgacagattcctgcagagattcagaagccagatcgagacctgggagctgggcagagtgatgggcgccgtgaccgccctgagccaggccctgaacagacacgccgaggccctgaagtag

SEQ ID NO: 91418 - DNA, 1146 bp, synthetic construct
  misc_feature 1..1146: note = Description of Artificial Sequence: Synthetic coding sequence
  source 1..1146: mol_type = other DNA
atgagcaaccccagcccccaggtgcccgaggaggaggccagcaccagcgtgtgcagacccaagagcagcatggccagcaccagcagaagacagagaagagagagaagattcagaagatacctgagcgccggcagactggtgagagcccaggccctgctgcagagacaccccggcctggacgtggacgccggccagcccccccccctgcacagagcctgcgccagacacgacgcccccgccctgtgcctgctgctgagactgggcgccgaccccgcccaccaggacagacacggcgacaccgccctgcacgccgccgccagacagggccccgacgcctacaccgacttcttcctgcccctgctgagcagatgccccagcgccatgggcatcaagaacaaggacggcgagacccccggccagatcctgggctggggccccccctgggacagcgccgaggaggaggaggaggacgacgccagcaaggagagagagtggagacagaagctgcagggcgagctggaggacgagtggcaggaggtgatgggcagattcgagggcgacgccagccacgagacccaggagcccgagagcttcagcgcctggagcgacagactggccagagagcacgcccagaagtgccagcagcagcagagagaggccgagggcagcagaagaccccccagagccgagggcagcagccagagctggagacagcaggaggaggagcagagactgttcagagagagagccagagccaaggaggaggagctgagagagagcagagccagaagagcccaggaggccctgggcgacagagagcccaagcccaccagagccggccccagagaggagcaccccagaggcgccggcagaggcagcctgtggagattcggcgacgtgccctggccctgccccggcggcggcgaccccgaggccatggccgccgccctggtggccagaggcccccccctggaggagcagggcgccctgagaagatacctgagagtgcagcaggtgagatggcaccccgacagattcctgcagagattcagaagccagatcgagacctgggagctgggcagagtgatgggcgccgtgaccgccctgagccaggccctgaacagacacgccgaggccctgaagtag

SEQ ID NO: 91419 - DNA, 1101 bp, synthetic construct
  misc_feature 1..1101: note = Description of Artificial Sequence: Synthetic coding sequence
  source 1..1101: mol_type = other DNA
atgagcaaccccagcccccaggtgcccgaggaggaggccagcaccagcgtgtgcagacccaagagcagcatggccagcaccagcagaagacagagaagagagagaagattcagaagatacctgagcgccggcagactggtgagagcccaggccctgctgcagagacaccccggcctggacgtggacgccggccagcccccccccctgcacagagcctgcgccagacacgacgcccccgccctgtgcctgctgctgagactgggcgccgaccccgcccaccaggacagacacggcgacaccgccctgcacgccgccgccagacagggccccgacgcctacaccgacttcttcctgcccctgctgagcagatgccccagcgccatgggcatcaagaacaaggacggcgagacccccggccagatcctgggctggggccccccctgggacagcgccgaggaggaggaggaggacgacgccagcaaggagagagagtggagacagaagctgcagggcgacgccagccacgagacccaggagcccgagagcttcagcgcctggagcgacagactggccagagagcacgcccagaagtgccagcagcagcagagagaggccgagggcagctgcagaccccccagagccgagggcagcagccagagctggagacagcaggaggaggagcagagactgttcagagagagagccagagccaaggaggaggagctgagagagagcagagccagaagagcccaggaggccctgggcgacagagagcccaagcccaccagagccggccccagagaggagcaccccagaggcgccggcagaggcagcctgtggagattcggcgacgtgccctggccctgccccggcggcggcgaccccgaggccatggccgccgccctggtggccagaggcccccccctggaggagcagggcgccctgagaagatacctgagagtgcagcaggtgagatggcaccccgacagattcctgcagagattcagaagccagatcgagacctgggagctgggcagagtgatgggcgccgtgaccgccctgagccaggccctgaacagacacgccgaggccctgaagtag

SEQ ID NO: 91420 - DNA, 1077 bp, synthetic construct
  misc_feature 1..1077: note = Description of Artificial Sequence: Synthetic coding sequence
  source 1..1077: mol_type = other DNA
atggccagcaccagcagaagacagagaagagagagaagattcagaagatacctgagcgccggcagactggtgagagcccaggccctgctgcagagacaccccggcctggacgtggacgccggccagcccccccccctgcacagagcctgcgccagacacgacgcccccgccctgtgcctgctgctgagactgggcgccgaccccgcccaccaggacagacacggcgacaccgccctgcacgccgccgccagacagggccccgacgcctacaccgacttcttcctgcccctgctgagcagatgccccagcgccatgggcatcaagaacaaggacggcgagacccccggccagatcctgggctggggccccccctgggacagcgccgaggaggaggaggaggacgacgccagcaaggagagagagtggagacagaagctgcagggcgagctggaggacgagtggcaggaggtgatgggcagattcgagggcgacgccagccacgagacccaggagcccgagagcttcagcgcctggagcgacagactggccagagagcacgcccagaagtgccagcagcagcagagagaggccgagggcagctgcagaccccccagagccgagggcagcagccagagctggagacagcaggaggaggagcagagactgttcagagagagagccagagccaaggaggaggagctgagagagagcagagccagaagagcccaggaggccctgggcgacagagagcccaagcccaccagagccggccccagagaggagcaccccagaggcgccggcagaggcagcctgtggagattcggcgacgtgccctggccctgccccggcggcggcgaccccgaggccatggccgccgccctggtggccagaggcccccccctggaggagcagggcgccctgagaagatacctgagagtgcagcaggtgagatggcaccccgacagattcctgcagagattcagaagccagatcgagacctgggagctgggcagagtgatgggcgccgtgaccgccctgagccaggccctgaacagacacgccgaggccctgaagtag

SEQ ID NO: 91421 - DNA, 1146 bp, synthetic construct
  misc_feature 1..1146: note = Description of Artificial Sequence: Synthetic coding sequence
  source 1..1146: mol_type = other DNA
atgagcaaccccagcccccaggtgcccgaggaggaggccagcaccagcgtgtgcagacccaagagcagcatggccagcaccagcagaagacagagaagagagagaagattcagaagatacctgagcgccggcagactggtgagagcccaggccctgctgcagagacaccccggcctggacgtggacgccggccagcccccccccctgcacagagcctgcgccagacacgacgcccccgccctgtgcctgctgctgagactgggcgccgaccccgcccaccaggacagacacggcgacaccgccctgcacgccgccgccagacagggccccgacgcctacaccgacttcttcctgcccctgctgagcagatgccccagcgccatgggcatcaagaacaaggacggcgagacccccggccagatcctgggctggggccccccctgggacagcgccgaggaggaggaggaggacgacgccagcaaggagagagagtggagacagaagctgcagggcgagctggaggacgagtggcaggaggtgatgggcagattcgagggcgacgccagccacgagacccaggagcccgagagcttcagcgcctggagcgacagactggccagagagcacgcccagaagtgccagcagcagcagagagaggccgagggcagctgcagaccccccagagccgagggcagcagccagagctggagacagcaggaggaggagcagagactgttcagagagagagccagagccaaggaggaggagctgagagagagcagagccagaagagcccaggaggccctgggcgacagagagcccaagcccaccagagccggccccagagaggagcaccccagaggcgccggcagaggcagcctgtggagattcggcgacgtgccctggccctgccccggcggcggcgaccccgaggccatggccgccgccctggtggccagaggcccccccctggaggagcagggcgccctgagaagatacctgagagtgcagcaggtgagatggcaccccgacagattcctgcagagattcagaagccagatcgagacctgggagctgggcagagtgatgggcgccgtgaccgccctgagccaggccctgaacagacacgccgaggccctgaagtag

SEQ ID NO: 91422 - DNA, 1101 bp, synthetic construct; identical to SEQ ID NO: 91419
  misc_feature 1..1101: note = Description of Artificial Sequence: Synthetic coding sequence
  source 1..1101: mol_type = other DNA

SEQ ID NO: 91423 - DNA, 1146 bp, synthetic construct; identical to SEQ ID NO: 91421
  misc_feature 1..1146: note = Description of Artificial Sequence: Synthetic coding sequence
  source 1..1146: mol_type = other DNA

SEQ ID NO: 91424 - DNA, 1101 bp, synthetic construct; identical to SEQ ID NO: 91419
  misc_feature 1..1101: note = Description of Artificial Sequence: Synthetic coding sequence
  source 1..1101: mol_type = other DNA

SEQ ID NO: 91425 - DNA, 1101 bp, synthetic construct; identical to SEQ ID NO: 91419
  misc_feature 1..1101: note = Description of Artificial Sequence: Synthetic coding sequence
  source 1..1101: mol_type = other DNA

SEQ ID NO: 91426 - DNA, 1146 bp, synthetic construct; identical to SEQ ID NO: 91421
  misc_feature 1..1146: note = Description of Artificial Sequence: Synthetic coding sequence
  source 1..1146: mol_type = other DNA

SEQ ID NO: 91427 - DNA, 1077 bp, synthetic construct; identical to SEQ ID NO: 91420
  misc_feature 1..1077: note = Description of Artificial Sequence: Synthetic coding sequence
  source 1..1077: mol_type = other DNA

SEQ ID NO: 91428 - DNA, 1101 bp, synthetic construct; identical to SEQ ID NO: 91419
  misc_feature 1..1101: note = Description of Artificial Sequence: Synthetic coding sequence
  source 1..1101: mol_type = other DNA

SEQ ID NO: 91429 - DNA, 1077 bp, synthetic construct; identical to SEQ ID NO: 91420
  misc_feature 1..1077: note = Description of Artificial Sequence: Synthetic coding sequence
  source 1..1077: mol_type = other DNA

SEQ ID NO: 91430 - DNA, 1146 bp, synthetic construct; identical to SEQ ID NO: 91421
  misc_feature 1..1146: note = Description of Artificial Sequence: Synthetic coding sequence
  source 1..1146: mol_type = other DNA

SEQ ID NO: 91431 - DNA, 1077 bp, synthetic construct; identical to SEQ ID NO: 91420
  misc_feature 1..1077: note = Description of Artificial Sequence: Synthetic coding sequence
  source 1..1077: mol_type = other DNA

SEQ ID NO: 91432 - DNA, 1146 bp, synthetic construct; identical to SEQ ID NO: 91421
  misc_feature 1..1146: note = Description of Artificial Sequence: Synthetic coding sequence
  source 1..1146: mol_type = other DNA

SEQ ID NO: 91433 - DNA, 1101 bp, synthetic construct; identical to SEQ ID NO: 91419
  misc_feature 1..1101: note = Description of Artificial Sequence: Synthetic coding sequence
  source 1..1101: mol_type = other DNA

SEQ ID NO: 91434 - DNA, 1077 bp, synthetic construct; identical to SEQ ID NO: 91420
  misc_feature 1..1077: note = Description of Artificial Sequence: Synthetic coding sequence
  source 1..1077: mol_type = other DNA

SEQ ID NO: 91435 - DNA, 1146 bp, synthetic construct; identical to SEQ ID NO: 91421
  misc_feature 1..1146: note = Description of Artificial Sequence: Synthetic coding sequence
  source 1..1146: mol_type = other DNA

SEQ ID NO: 91436 - DNA, 1077 bp, synthetic construct; identical to SEQ ID NO: 91420
  misc_feature 1..1077: note = Description of Artificial Sequence: Synthetic coding sequence
  source 1..1077: mol_type = other DNA

SEQ ID NO: 91437 - DNA, 699 bp, synthetic construct
  misc_feature 1..699: note = Description of Artificial Sequence: Synthetic coding sequence
  source 1..699: mol_type = other DNA
atggccagcaccagcagaagacagagaagagagagaagattcagaagatacctgagcgccggcagactggtgagagcccaggccctgctgcagagacaccccggcctggacgtggacgccggccagcccccccccctgcacagagcctgcgccagacacgacgcccccgccctgtgcctgctgctgagactgggcgccgaccccgcccaccaggacagacacggcgacaccgccctgcacgccgccgccagacagggccccgacgcctacaccgacttcttcctgcccctgctgagcagatgccccagcgccatgggcatcaagaacaaggacggcgagacccccggccagatcctgggctggggccccccctgggacagcgccgaggaggaggaggaggacgacgccagcaaggagagagagtggagacagaagctgcagggcgagctggaggacgagtggcaggaggtgatgggcagattcgagggcgacgccagccacgagacccaggagcccgagagcttcagcgcctggagcgacagactggccagagagcacgcccagaagtgccagcagcagcagagagaggccgagggcagcagaagaccccccagagccgagggcagcagccagagctggagacagcaggaggaggagcagagactgttcagagagagagccagagccaaggaggagtag

SEQ ID NO: 91438 - DNA, 699 bp, synthetic construct
  misc_feature 1..699: note = Description of Artificial Sequence: Synthetic coding sequence
  source 1..699: mol_type = other DNA
atggccagcaccagcagaagacagagaagagagagaagattcagaagatacctgagcgccggcagactggtgagagcccaggccctgctgcagagacaccccggcctggacgtggacgccggccagcccccccccctgcacagagcctgcgccagacacgacgcccccgccctgtgcctgctgctgagactgggcgccgaccccgcccaccaggacagacacggcgacaccgccctgcacgccgccgccagacagggccccgacgcctacaccgacttcttcctgcccctgctgagcagatgccccagcgccatgggcatcaagaacaaggacggcgagacccccggccagatcctgggctggggccccccctgggacagcgccgaggaggaggaggaggacgacgccagcaaggagagagagtggagacagaagctgcagggcgagctggaggacgagtggcaggaggtgatgggcagattcgagggcgacgccagccacgagacccaggagcccgagagcttcagcgcctggagcgacagactggccagagagcacgcccagaagtgccagcagcagcagagagaggccgagggcagctgcagaccccccagagccgagggcagcagccagagctggagacagcaggaggaggagcagagactgttcagagagagagccagagccaaggaggagtag

SEQ ID NO: 91439 - DNA, 699 bp, synthetic construct; identical to SEQ ID NO: 91438
  misc_feature 1..699: note = Description of Artificial Sequence: Synthetic coding sequence
  source 1..699: mol_type = other DNA

SEQ ID NO: 91440 - DNA, 699 bp, synthetic construct; identical to SEQ ID NO: 91438
  misc_feature 1..699: note = Description of Artificial Sequence: Synthetic coding sequence
  source 1..699: mol_type = other DNA

SEQ ID NO: 91441 - DNA, 699 bp, synthetic construct; identical to SEQ ID NO: 91438
  misc_feature 1..699: note = Description of Artificial Sequence: Synthetic coding sequence
  source 1..699: mol_type = other DNA

SEQ ID NO: 91442 - DNA, 699 bp, synthetic construct; identical to SEQ ID NO: 91438
  misc_feature 1..699: note = Description of Artificial Sequence: Synthetic coding sequence
  source 1..699: mol_type = other DNA

SEQ ID NO: 91443 - DNA, 699 bp, synthetic construct; identical to SEQ ID NO: 91438
  misc_feature 1..699: note = Description of Artificial Sequence: Synthetic coding sequence
  source 1..699: mol_type = other DNA

SEQ ID NO: 91444 - DNA, 3900 bp, synthetic construct
  misc_feature 1..3900: note = Description of Artificial Sequence: Synthetic coding sequence
  source 1..3900: mol_type = other DNA
atggacagcctggaccacatgctgaccgaccccctggagctgggcccctgcggcgacggccacggcaccagaatcatggaggactgcctgctgggcggcaccagagtgagcctgcccgaggacctgctggaggaccccgagatcttcttcgacgtggtgagcctgagcacctggcaggaggtgctgagcgacagccagagagagcacctgcagcagttcctgccccagttccccgaggacagcgccgagcagcagaacgagctgatcctggccctgttcagcggcgagaacttcagattcggcaaccccctgcacatcgcccagaagctgttcagagacggccacttcaaccccgaggtggtgaagtacagacagctgtgcttcaagagccagtacaagagatacctgaacagccagcagcagtacttccacagactgctgaagcagatcctggccagcagaagcgacctgctggagatggccagaagaagcggccccgccctgcccttcagacagaagagacccagccccagcagaacccccgaggagagagagtggagaacccagcagagatacctgaaggtgctgagagaggtgaaggaggagtgcggcgacaccgccctgagcagcgacgaggaggacctgagcagctggctgcccagcagccccgccagaagccccagccccgccgtgcccctgagagtggtgcccaccctgagcaccaccgacatgaagaccgccgacaaggtggagctgggcgacagcgacctgaagatcatgctgaagaagcaccacgagaagagaaagcaccagcccgaccaccccgacctgctgaccggcgacctgaccctgaacgacatcatgaccagagtgaacgccggcagaaagggcagcctggccgccctgtacgacctggccgtgctgaagaagaaggtgaaggagaaggaggagaagaagaagaagaagatcaagaccatcaagagcgaggccgaggacctggccgagcccctgagcagcaccgagggcgtggcccccctgagccaggcccccagccccctggccatccccgccatcaaggaggagcccctggaggacctgaagccctgcctgggcatcaacgagatcagcagcagcttcttcagcctgctgctggagatcctgctgctggagagccaggccagcctgcccatgctggaggagagagtgctggactggcagagcagccccgccagcagcctgaacagctggttcagcgccgcccccaactgggccgagctggtgctgcccgccctgcagtacctggccggcgagagcagagccgtgcccagcagcttcagccccttcgtggagttcaaggagaagacccagcagtggaagctgctgggccagagccaggacaacgagaaggagctggccgccctgttccagctgtggctggagaccaaggaccaggccttctgcaagcaggagaacgaggacagcagcgacgccaccacccccgtgcccagagtgagaaccgactacgtggtgagacccagcaccggcgaggagaagagagtgttccaggagcaggagagatacagatacagccagccccacaaggccttcaccttcagaatgcacggcttcgagagcgtggtgggccccgtgaagggcgtgttcgacaaggagaccagcctgaacaaggccagagagcacagcctgctgagaagcgacagacccgcctacgtgaccatcctgagcctggtgagagacgccgccgccagactgcccaacggcgagggcaccagagccgagatctgcgagctgctgaaggacagccagttcctggcccccgacgtgaccagcacccaggtgaacaccgtggtgagcggcgccctggacagactgcactacgagaaggacccctgcgtgaagtacgacatcggcagaaagctgtggatctacctgcacagagacagaagcgaggaggagttcgagagaatccaccaggcccaggccgccgccgccaaggccagaaaggccctgcagcagaagcccaagccccccagcaaggtgaagagcagcagcaaggagagcagcatcaaggtgctgagcagcggccccagcgagcagagccagatgagcctgagcgacagcagcatgccccccacccccgtgacccccgtgacccccaccacccccgccctgcccgccatccccatcagccccccccccgtgagcgccgtgaacaagagcggccccagcaccgtgagcgagcccgccaagagcagcagcggcgtgctgctggtgagcagccccaccatgccccacctgggcaccatgctgagccccgccagcagccagaccgcccccagcagccaggccgccgccagagtggtgagccacagcggcagcgccggcctgagccaggtgagagtggtggcccagcccagcctgcccgccgtgccccagcagagcggcggccccgcccagaccctgccccagatgcccgccggcccccagatcagagtgcccgccaccgccacccagaccaaggtggtgccccagaccgtgatggccaccgtgcccgtgaaggcccagaccaccgccgccaccgtgcagagacccggccccggccagaccggcctgaccgtgaccagcctgcccgccaccgccagccccgtgagcaagcccgccaccagcagccccggcaccagcgcccccagcgccagcaccgccgccgtgatccagaacgtgaccggccagaacatcatcaagcaggtggccatcaccggccagctgggcgtgaagccccagaccggcaacagcatccccctgaccgccaccaacttcagaatccagggcaaggacgtgctgagactgccccccagcagcatcaccaccgacgccaagggccagaccgtgctgagaatcacccccgacatgatggccaccctggccaagagccaggtgaccaccgtgaagctgacccaggacctgttcggcaccggcggcaacaccaccggcaagggcatcagcgccaccctgcacgtgaccagcaaccccgtgcacgccgccgacagccccgccaaggccagcagcgccagcgcccccagcagcacccccaccggcaccaccgtggtgaaggtgacccccgacctgaagcccaccgaggccagcagcagcgccttcagactgatgcccgccctgggcgtgagcgtggccgaccagaagggcaagagcaccgtggccagcagcgaggccaagcccgccgccaccatcagaatcgtgcagggcctgggcgtgatgccccccaaggccggccagaccatcaccgtggccacccacgccaagcagggcgccagcgtggccagcggcagcggcaccgtgcacaccagcgccgtgagcctgcccagcatgaacgccgccgtgagcaagaccgtggccgtggccagcggcgccgccagcacccccatcagcatcagcaccggcgcccccaccgtgagacaggtgcccgtgagcaccaccgtggtgagcaccagccaggccggcaagctgcccaccagaatcaccgtgcccctgagcgtgatcagccagcccatgaagggcaagagcgtggtgaccgcccccatcatcaagggcaacctgggcgccaacctgagcggcctgggcagaaacatcatcctgaccaccatgcccgccggcaccaagctgatcgccggcaacaagcccgtgagcttcctgaccgcccagcagctgcagcagctgcagcagcagggccaggccacccaggtgagaatccagaccgtgcccgccagccacctgcagcagggcaccgccagcggcagcagcaaggccgtgagcaccgtggtggtgaccaccgcccccagccccaagcaggcccccgagcagcagtag

SEQ ID NO: 91445 - DNA, 3900 bp, synthetic construct; identical to SEQ ID NO: 91444
  misc_feature 1..3900: note = Description of Artificial Sequence: Synthetic coding sequence
  source 1..3900: mol_type = other DNA

SEQ ID NO: 91446 - DNA, 3900 bp, synthetic construct; identical to SEQ ID NO: 91444
  misc_feature 1..3900: note = Description of Artificial Sequence: Synthetic coding sequence
  source 1..3900: mol_type = other DNA

SEQ ID NO: 91447 - DNA, 3975 bp, synthetic construct
  misc_feature 1..3975: note = Description of Artificial Sequence: Synthetic coding sequence
  source 1..3975: mol_type = other DNA
atgcacgtgttcgtgcagagcacctgcggcgaggagaccatggacagcctggaccacatgctgaccgaccccctggagctgggcccctgcggcgacggccacggcaccagaatcatggaggactgcctgctgggcggcaccagagtgagcctgcccgaggacctgctggaggaccccgagatcttcttcgacgtggtgagcctgagcacctggcaggaggtgctgagcgacagccagagagagcacctgcagcagttcctgccccagttccccgaggacagcgccgagcagcagaacgagctgatcctggccctgttcagcggcgagaacttcagattcggcaaccccctgcacatcgcccagaagctgttcagagacggccacttcaaccccgaggtggtgaagtacagacagctgtgcttcaagagccagtacaagagatacctgaacagccagcagcagtacttccacagactgctgaagcagatcctggccagcagaagcgacctgctggagatggccagaagaagcggccccgccctgcccttcagacagaagagacccagccccagcagaacccccgaggagagagagtggagaacccagcagagatacctgaaggtgctgagagaggtgaaggaggagtgcggcgacaccgccctgagcagcgacgaggaggccaccctggacctgcaggagcagttcagcttcgaggacctgagcagctggctgcccagcagccccgccagaagccccagccccgccgtgcccctgagagtggtgcccaccctgagcaccaccgacatgaagaccgccgacaaggtggagctgggcgacagcgacctgaagatcatgctgaagaagcaccacgagaagagaaagcaccagcccgaccaccccgacctgctgaccggcgacctgaccctgaacgacatcatgaccagagtgaacgccggcagaaagggcagcctggccgccctgtacgacctggccgtgctgaagaagaaggtgaaggagaaggaggagaagaagaagaagaagatcaagaccatcaagagcgaggccgaggacctggccgagcccctgagcagcaccgagggcgtggcccccctgagccaggcccccagccccctggccatccccgccatcaaggaggagcccctggaggacctgaagccctgcctgggcatcaacgagatcagcagcagcttcttcagcctgctgctggagatcctgctgctggagagccaggccagcctgcccatgctggaggagagagtgctggactggcagagcagccccgccagcagcctgaacagctggttcagcgccgcccccaactgggccgagctggtgctgcccgccctgcagtacctggccggcgagagcagagccgtgcccagcagcttcagccccttcgtggagttcaaggagaagacccagcagtggaagctgctgggccagagccaggacaacgagaaggagctggccgccctgttccagctgtggctggagaccaaggaccaggccttctgcaagcaggagaacgaggacagcagcgacgccaccacccccgtgcccagagtgagaaccgactacgtggtgagacccagcaccggcgaggagaagagagtgttccaggagcaggagagatacagatacagccagccccacaaggccttcaccttcagaatgcacggcttcgagagcgtggtgggccccgtgaagggcgtgttcgacaaggagaccagcctgaacaaggccagagagcacagcctgctgagaagcgacagacccgcctacgtgaccatcctgagcctggtgagagacgccgccgccagactgcccaacggcgagggcaccagagccgagatctgcgagctgctgaaggacagccagttcctggcccccgacgtgaccagcacccaggtgaacaccgtggtgagcggcgccctggacagactgcactacgagaaggacccctgcgtgaagtacgacatcggcagaaagctgtggatctacctgcacagagacagaagcgaggaggagttcgagagaatccaccaggcccaggccgccgccgccaaggccagaaaggccctgcagcagaagcccaagccccccagcaaggtgaagagcagcagcaaggagagcagcatcaaggtgctgagcagcggccccagcgagcagagccagatgagcctgagcgacagcagcatgccccccacccccgtgacccccgtgacccccaccacccccgccctgcccgccatccccatcagccccccccccgtgagcgccgtgaacaagagcggccccagcaccgtgagcgagcccgccaagagcagcagcggcgtgctgctggtgagcagccccaccatgccccacctgggcaccatgctgagccccgccagcagccagaccgcccccagcagccaggccgccgccagagtggtgagccacagcggcagcgccggcctgagccaggtgagagtggtggcccagcccagcctgcccgccgtgccccagcagagcggcggccccgcccagaccctgccccagatgcccgccggcccccagatcagagtgcccgccaccgccacccagaccaaggtggtgccccagaccgtgatggccaccgtgcccgtgaaggcccagaccaccgccgccaccgtgcagagacccggccccggccagaccggcctgaccgtgaccagcctgcccgccaccgccagccccgtgagcaagcccgccaccagcagccccggcaccagcgcccccagcgccagcaccgccgccgtgatccagaacgtgaccggccagaacatcatcaagcaggtggccatcaccggccagctgggcgtgaagccccagaccggcaacagcatccccctgaccgccaccaacttcagaatccagggcaaggacgtgctgagactgccccccagcagcatcaccaccgacgccaagggccagaccgtgctgagaatcacccccgacatgatggccaccctggccaagagccaggtgaccaccgtgaagctgacccaggacctgttcggcaccggcggcaacaccaccggcaagggcatcagcgccaccctgcacgtgaccagcaaccccgtgcacgccgccgacagccccgccaaggccagcagcgccagcgcccccagcagcacccccaccggcaccaccgtggtgaaggtgacccccgacctgaagcccaccgaggccagcagcagcgccttcagactgatgcccgccctgggcgtgagcgtggccgaccagaagggcaagagcaccgtggccagcagcgaggccaagcccgccgccaccatcagaatcgtgcagggcctgggcgtgatgccccccaaggccggccagaccatcaccgtggccacccacgccaagcagggcgccagcgtggccagcggcagcggcaccgtgcacaccagcgccgtgagcctgcccagcatgaacgccgccgtgagcaagaccgtggccgtggccagcggcgccgccagcacccccatcagcatcagcaccggcgcccccaccgtgagacaggtgcccgtgagcaccaccgtggtgagcaccagccaggccggcaagctgcccaccagaatcaccgtgcccctgagcgtgatcagccagcccatgaagggcaagagcgtggtgaccgcccccatcatcaagggcaacctgggcgccaacctgagcggcctgggcagaaacatcatcctgaccaccatgcccgccggcaccaagctgatcgccggcaacaagcccgtgagcttcctgaccgcccagcagctgcagcagctgcagcagcagggccaggccacccaggtgagaatccagaccgtgcccgccagccacctgcagcagggcaccgccagcggcagcagcaaggccgtgagcaccgtggtggtgaccaccgcccccagccccaagcaggcccccgagcagcagtag

SEQ ID NO: 91448 - DNA, 1389 bp, synthetic construct
  misc_feature 1..1389: note = Description of Artificial Sequence: Synthetic coding sequence
  source 1..1389: mol_type = other DNA
atgcagctgagaaagatgcagaccgtgaagaaggagcaggccagcctggacgccagcagcaacgtggacaagatgatggtgctgaacagcgccctgaccgaggtgagcgaggacagcaccaccggcgaggagctgctgctgagcgagggcagcgtgggcaagaacaagagcagcgcctgcagaagaaagagagagttcatccccgacgagaagaaggacgccatgtactgggagaagagaagaaagaacaacgaggccgccaagagaagcagagagaagagaagactgaacgacctggtgctggagaacaagctgatcgccctgggcgaggagaacgccaccctgaaggccgagctgctgagcctgaagctgaagttcggcctgatcagcagcaccgcctacgcccaggagatccagaagctgagcaacagcaccgccgtgtacttccaggactaccagaccagcaagagcaacgtgagcagcttcgtggacgagcacgagcccagcatggtgagcagcagctgcatcagcgtgatcaagcacagcccccagagcagcctgagcgacgtgagcgaggtgagcagcgtggagcacacccaggagagcagcgtgcagggcagctgcagaagccccgagaacaagttccagatcatcaagcaggagcccatggagctggagagctacaccagagagcccagagacgacagaggcagctacaccgccagcatctaccagaactacatgggcaacagcttcagcggctacagccacagcccccccctgctgcaggtgaacagaagcagcagcaacagccccagaaccagcgagaccgacgacggcgtggtgggcaagagcagcgacggcgaggacgagcagcaggtgcccaagggccccatccacagccccgtggagctgaagcacgtgcacgccaccgtggtgaaggtgcccgaggtgaacagcagcgccctgccccacaagctgagaatcaaggccaaggccatgcagatcaaggtggaggccttcgacaacgagttcgaggccacccagaagctgagcagccccatcgacatgaccagcaagagacacttcgagctggagaagcacagcgcccccagcatggtgcacagcagcctgacccccttcagcgtgcaggtgaccaacatccaggactggagcctgaagagcgagcactggcaccagaaggagctgagcggcaagacccagaacagcttcaagaccggcgtggtggagatgaaggacagcggctacaaggtgagcgaccccgagaacctgtacctgaagcagggcatcgccaacctgagcgccgaggtggtgagcctgaagagactgatcgccacccagcccatcagcgccagcgacagcggctag

SEQ ID NO: 91449 - DNA, 1389 bp, synthetic construct; identical to SEQ ID NO: 91448
  misc_feature 1..1389: note = Description of Artificial Sequence: Synthetic coding sequence
  source 1..1389: mol_type = other DNA

SEQ ID NO: 91450 - DNA, 1488 bp, synthetic construct
  misc_feature 1..1488: note = Description of Artificial Sequence: Synthetic coding sequence
  source 1..1488: mol_type = other DNA
atggccgagcccaccagcgacttcgagacccccatcggctggcacgccagccccgagctgacccccaccctgggccccctgagcgacaccgccccccccagagacagctggatgttctgggccatgctgccccccccccccccccccctgaccagcagcctgcccgccgccggcagcaagcccagcagcgagagccagccccccatggaggcccagagcctgcccggcgcccccccccccttcgacgcccagatcctgcccggcgcccagccccccttcgacgcccagagccccctggacagccagccccagcccagcggccagccctggaacttccacgccagcaccagctggtactggagacagagcagcgacagattccccagacaccagaagagcttcaaccccgccgtgaagaacagctactaccccagaaagtacgacgccaagttcaccgacttcagcctgccccccagcagaaagcagaagaagaagaagagaaaggagcccgtgttccacttcttctgcgacacctgcgacagaggcttcaagaaccaggagaagtacgacaagcacatgagcgagcacaccaagtgccccgagctggactgcagcttcaccgcccacgagaagatcgtgcagttccactggagaaacatgcacgcccccggcatgaagaagatcaagctggacacccccgaggagatcgccagatggagagaggagagaagaaagaactaccccaccctggccaacatcgagagaaagaagaagctgaagctggagaaggagaagagaggcgccgtgctgaccaccacccagtacggcaagatgaagggcatgagcagacacagccagatggccaagatcagaagccccggcaagaaccacaagtggaagaacgacaacagcagacagagagccgtgaccggcagcggcagccacctgtgcgacctgaagctggagggcccccccgaggccaacgccgaccccctgggcgtgctgatcaacagcgacagcgagagcgacaaggaggagaagccccagcacagcgtgatccccaaggaggtgacccccgccctgtgcagcctgatgagcagctacggcagcctgagcggcagcgagagcgagcccgaggagacccccatcaagaccgaggccgacgtgctggccgagaaccaggtgctggacagcagcgcccccaagagccccagccaggacgtgaaggccaccgtgagaaacttcagcgaggccaagagcgagaacagaaagaagagcttcgagaagaccaaccccaagagaaagaaggactaccacaactaccagaccctgttcgagcccagaacccaccacccctacctgctggagatgctgctggcccccgacatcagacacgagagaaacgtgatcctgcagtgcgtgagatacatcatcaagaaggacttcttcggcctggacaccaacagcgccaagagcaaggacgtgtag

SEQ ID NO: 91451 - DNA, 648 bp, synthetic construct
  misc_feature 1..648: note = Description of Artificial Sequence: Synthetic coding sequence
  source 1..648: mol_type = other DNA
atggagacccaggccgagcagcaggagctggagaccctgcccaccaccaagatggcccagaccaaccccacccccggcagcctgggcccctggaagatcaccatctacgaccaggagaacttccagggcaagagaatggagttcaccagcagctgccccaacgtgagcgagagaagcttcgacaacgtgagaagcctgaaggtggagagcggcgcctggatcggctacgagcacaccagcttctgcggccagcagttcatcctggagagaggcgagtaccccagatgggacgcctggagcggcagcaacgcctaccacatcgagagactgatgagcttcagacccatctgcagcgccaaccacaaggagagcaagatgaccatcttcgagaaggagaacttcatcggcagacagtgggagatcagcgacgactaccccagcctgcaggccatgggctggttcaacaacgaggtgggcagcatgaagatccagagcggcgcctgggtgtgctaccagtaccccggctacagaggctaccagtacatcctggagtgcgaccaccacggcggcgactacaagcactggagagagtggggcagccacgcccagaccagccagatccagagcatcagaagaatccagcagtag

SEQ ID NO: 91452 - DNA, 2940 bp, synthetic construct
  misc_feature 1..2940: note = Description of Artificial Sequence: Synthetic coding sequence
  source 1..2940: mol_type = other DNA
atgaccctgcacgccaccagaggcgccgccctgctgagctgggtgaacagcctgcacgtggccgaccccgtggaggccgtgctgcagctgcaggactgcagcatcttcatcaagatcatcgacagaatccacggcaccgaggagggccagcagatcctgaagcagcccgtgagcgagagactggacttcgtgtgcagcttcctgcagaagaacagaaagcaccccagcagccccgagtgcctggtgagcgcccagaaggtgctggagggcagcgagctggagctggccaagatgaccatgctgctgctgtaccacagcaccatgagcagcaagagccccagagactgggagcagttcgagtacaagatccaggccgagctggccgtgatcctgaagttcgtgctggaccacgaggacggcctgaacctgaacgaggacctggagaacttcctgcagaaggcccccgtgcccagcacctgcagcagcaccttccccgaggagctgagcccccccagccaccaggccaagagagagatcagattcctggagctgcagaaggtggccagcagcagcagcggcaacaacttcctgagcggcagccccgccagccccatgggcgacatcctgcagaccccccagttccagatgagaagactgaagaagcagctggccgacgagagaagcaacagagacgagctggagctggagctggccgagaacagaaagctgctgaccgagaaggacgcccagatcgccatgatgcagcagagaatcgacagactggccctgctgaacgagaagcaggccgccagccccctggagcccaaggagctggaggagctgagagacaagaacgagagcctgaccatgagactgcacgagaccctgaagcagtgccaggacctgaagaccgagaagagccagatggacagaaagatcaaccagctgagcgaggagaacggcgacctgagcttcaagctgagagagttcgccagccacctgcagcagctgcaggacgccctgaacgagctgaccgaggagcacagcaaggccacccaggagtggctggagaagcaggcccagctggagaaggagctgagcgccgccctgcaggacaagaagtgcctggaggagaagaacgagatcctgcagggcaagctgagccagctggaggagcacctgagccagctgcaggacaaccccccccaggagaagggcgaggtgctgggcgacgtgctgcaggtggaggagctgagcaagaagctggccgacagcgaccaggccagcaaggtgcagcagcagaagctgaaggccgtgcaggcccagggcggcgagagccagcaggaggcccagagactgcaggcccagctgaacgagctgcaggcccagctgagccagaaggagcaggccgccgagcactacaagctgcagatggagaaggccaagacccactacgacgccaagaagcagcagaaccaggagctgcaggagcagctgagaagcctggagcagctgcagaaggagaacaaggagctgagagccgaggccgagagactgggccacgagctgcagcaggccggcctgaagaccaaggaggccgagcagacctgcagacacctgaccgcccaggtgagaagcctggaggcccaggtggcccacgccgaccagcagctgagagacctgggcaagttccaggtggccaccgacgccctgaagagcagagagccccaggccaagccccagctggacctgagcatcgacagcctggacctgagctgcgaggagggcacccccctgagcatcaccagcaagctgcccagaacccagcccgacggcaccagcgtgcccggcgagcccgccagccccatcagccagagactgccccccaaggtggagagcctggagagcctgtacttcacccccatccccgccagaagccaggcccccctggagagcagcctggacagcctgggcgacgtgttcctggacagcggcagaaagaccagaagcgccagaagaagaaccacccagatcatcaacatcaccatgaccaagaagctggacgtggaggagcccgacagcgccaacagcagcttctacagcaccagaagcgcccccgccagccaggccagcctgagagccaccagcagcacccagagcctggccagactgggcagccccgactacggcaacagcgccctgctgagcctgcccggctacagacccaccaccagaagcagcgccagaagaagccaggccggcgtgagcagcggcgccccccccggcagaaacagcttctacatgggcacctgccaggacgagcccgagcagctggacgactggaacagaatcgccgagctgcagcagagaaacagagtgtgccccccccacctgaagacctgctaccccctggagagcagacccagcctgagcctgggcaccatcaccgacgaggagatgaagaccggcgacccccaggagaccctgagaagagccagcatgcagcccatccagatcgccgagggcaccggcatcaccaccagacagcagagaaagagagtgagcctggagccccaccagggccccggcacccccgagagcaagaaggccaccagctgcttccccagacccatgacccccagagacagacacgagggcagaaagcagagcaccaccgaggcccagaagaaggccgcccccgccagcaccaagcaggccgacagaagacagagcatggccttcagcatcctgaacacccccaagaagctgggcaacagcctgctgagaagaggcgccagcaagaaggccctgagcaaggccagccccaacaccagaagcggcaccagaagaagccccagaatcgccaccaccaccgccagcgccgccaccgccgccgccatcggcgccacccccagagccaagggcaaggccaagcactag

SEQ ID NO: 91453 - DNA, 6306 bp, synthetic construct
  misc_feature 1..6306: note = Description of Artificial Sequence: Synthetic coding sequence
  source 1..6306: mol_type = other DNA
atgaccctgcacgccaccagaggcgccgccctgctgagctgggtgaacagcctgcacgtggccgaccccgtggaggccgtgctgcagctgcaggactgcagcatcttcatcaagatcatcgacagaatccacggcaccgaggagggccagcagatcctgaagcagcccgtgagcgagagactggacttcgtgtgcagcttcctgcagaagaacagaaagcaccccagcagccccgagtgcctggtgagcgcccagaaggtgctggagggcagcgagctggagctggccaagatgaccatgctgctgctgtaccacagcaccatgagcagcaagagccccagagactgggagcagttcgagtacaagatccaggccgagctggccgtgatcctgaagttcgtgctggaccacgaggacggcctgaacctgaacgaggacctggagaacttcctgcagaaggcccccgtgcccagcacctgcagcagcaccttccccgaggagctgagcccccccagccaccaggccaagagagagatcagattcctggagctgcagaaggtggccagcagcagcagcggcaacaacttcctgagcggcagccccgccagccccatgggcgacatcctgcagaccccccagttccagatgagaagactgaagaagcagctggccgacgagagaagcaacagagacgagctggagctggagctggccgagaacagaaagctgctgaccgagaaggacgcccagatcgccatgatgcagcagagaatcgacagactggccctgctgaacgagaagcaggccgccagccccctggagcccaaggagctggaggagctgagagacaagaacgagagcctgaccatgagactgcacgagaccctgaagcagtgccaggacctgaagaccgagaagagccagatggacagaaagatcaaccagctgagcgaggagaacggcgacctgagcttcaagctgagagagttcgccagccacctgcagcagctgcaggacgccctgaacgagctgaccgaggagcacagcaaggccacccaggagtggctggagaagcaggcccagctggagaaggagctgagcgccgccctgcaggacaagaagtgcctggaggagaagaacgagatcctgcagggcaagctgagccagctggaggagcacctgagccagctgcaggacaaccccccccaggagaagggcgaggtgctgggcgacgtgctgcagctggagaccctgaagcaggaggccgccaccctggccgccaacaacacccagctgcaggccagagtggagatgctggagaccgagagaggccagcaggaggccaagctgctggccgagagaggccacttcgaggaggagaagcagcagctgagcagcctgatcaccgacctgcagagcagcatcagcaacctgagccaggccaaggaggagctggagcaggccagccaggcccacggcgccagactgaccgcccaggtggccagcctgaccagcgagctgaccaccctgaacgccaccatccagcagcaggaccaggagctggccggcctgaagcagcaggccaaggagaagcaggcccagctggcccagaccctgcagcagcaggagcaggccagccagggcctgagacaccaggtggagcagctgagcagcagcctgaagcagaaggagcagcagctgaaggaggtggccgagaagcaggaggccaccagacaggaccacgcccagcagctggccaccgccgccgaggagagagaggccagcctgagagagagagacgccgccctgaagcagctggaggccctggagaaggagaaggccgccaagctggagatcctgcagcagcagctgcaggtggccaacgaggccagagacagcgcccagaccagcgtgacccaggcccagagagagaaggccgagctgagcagaaaggtggaggagctgcaggcctgcgtggagaccgccagacaggagcagcacgaggcccaggcccaggtggccgagctggagctgcagctgagaagcgagcagcagaaggccaccgagaaggagagagtggcccaggagaaggaccagctgcaggagcagctgcaggccctgaaggagagcctgaaggtgaccaagggcagcctggaggaggagaagagaagagccgccgacgccctggaggagcagcagagatgcatcagcgagctgaaggccgagaccagaagcctggtggagcagcacaagagagagagaaaggagctggaggaggagagagccggcagaaagggcctggaggccagactgcagcagctgggcgaggcccaccaggccgagaccgaggtgctgagaagagagctggccgaggccatggccgcccagcacaccgccgagagcgagtgcgagcagctggtgaaggaggtggccgcctggagagagagatacgaggacagccagcaggaggaggcccagtacggcgccatgttccaggagcagctgatgaccctgaaggaggagtgcgagaaggccagacaggagctgcaggaggccaaggagaaggtggccggcatcgagagccacagcgagctgcagatcagcagacagcagaacgagctggccgagctgcacgccaacctggccagagccctgcagcaggtgcaggagaaggaggtgagagcccagaagctggccgacgacctgagcaccctgcaggagaagatggccgccaccagcaaggaggtggccagactggagaccctggtgagaaaggccggcgagcagcaggagaccgccagcagagagctggtgaaggagcccgccagagccggcgacagacagcccgagtggctggaggagcagcagggcagacagttctgcagcacccaggccgccctgcaggccatggagagagaggccgagcagatgggcaacgagctggagagactgagagccgccctgatggagagccagggccagcagcaggaggagagaggccagcaggagagagaggtggccagactgacccaggagagaggcagagcccaggccgacctggccctggagaaggccgccagagccgagctggagatgagactgcagaacgccctgaacgagcagagagtggagttcgccaccctgcaggaggccctggcccacgccctgaccgagaaggagggcaaggaccaggagctggccaagctgagaggcctggaggccgcccagatcaaggagctggaggagctgagacagaccgtgaagcagctgaaggagcagctggccaagaaggagaaggagcacgccagcggcagcggcgcccagagcgaggccgccggcagaaccgagcccaccggccccaagctggaggccctgagagccgaggtgagcaagctggagcagcagtgccagaagcagcaggagcaggccgacagcctggagagaagcctggaggccgagagagccagcagagccgagagagacagcgccctggagaccctgcagggccagctggaggagaaggcccaggagctgggccacagccagagcgccctggccagcgcccagagagagctggccgccttcagaaccaaggtgcaggaccacagcaaggccgaggacgagtggaaggcccaggtggccagaggcagacaggaggccgagagaaagaacagcctgatcagcagcctggaggaggaggtgagcatcctgaacagacaggtgctggagaaggagggcgagagcaaggagctgaagagactggtgatggccgagagcgagaagagccagaagctggaggagagactgagactgctgcaggccgagaccgccagcaacagcgccagagccgccgagagaagcagcgccctgagagaggaggtgcagagcctgagagaggaggccgagaagcagagagtggccagcgagaacctgagacaggagctgaccagccaggccgagagagccgaggagctgggccaggagctgaaggcctggcaggagaagttcttccagaaggagcaggccctgagcaccctgcagctggagcacaccagcacccaggccctggtgagcgagctgctgcccgccaagcacctgtgccagcagctgcaggccgagcaggccgccgccgagaagagacacagagaggagctggagcagagcaagcaggccgccggcggcctgagagccgagctgctgagagcccagagagagctgggcgagctgatccccctgagacagaaggtggccgagcaggagagaaccgcccagcagctgagagccgagaaggccagctacgccgagcagctgagcatgctgaagaaggcccacggcctgctggccgaggagaacagaggcctgggcgagagagccaacctgggcagacagttcctggaggtggagctggaccaggccagagagaagtacgtgcaggagctggccgccgtgagagccgacgccgagaccagactggccgaggtgcagagagaggcccagagcaccgccagagagctggaggtgatgaccgccaagtacgagggcgccaaggtgaaggtgctggaggagagacagagattccaggaggagagacagaagctgaccgcccaggtggaggagctgagcaagaagctggccgacagcgaccaggccagcaaggtgcagcagcagaagctgaaggccgtgcaggcccagggcggcgagagccagcaggaggcccagagactgcaggcccagctgaacgagctgcaggcccagctgagccagaaggagcaggccgccgagcactacaagctgcagatggagaaggccaagacccactacgacgccaagaagcagcagaaccaggagctgcaggagcagctgagaagcctggagcagctgcagaaggagaacaaggagctgagagccgaggccgagagactgggccacgagctgcagcaggccggcctgaagaccaaggaggccgagcagacctgcagacacctgaccgcccaggtgagaagcctggaggcccaggtggcccacgccgaccagcagctgagagacctgggcaagttccaggtggccaccgacgccctgaagagcagagagccccaggccaagccccagctggacctgagcatcgacagcctggacctgagctgcgaggagggcacccccctgagcatcaccagcaagctgcccagaacccagcccgacggcaccagcgtgcccggcgagcccgccagccccatcagccagagactgccccccaaggtggagagcctggagagcctgtacttcacccccatccccgccagaagccaggcccccctggagagcagcctggacagcctgggcgacgtgttcctggacagcggcagaaagaccagaagcgccagaagaagaaccacccagatcatcaacatcaccatgaccaagaagctggacgtggaggagcccgacagcgccaacagcagcttctacagcaccagaagcgcccccgccagccaggccagcctgagagccaccagcagcacccagagcctggccagactgggcagccccgactacggcaacagcgccctgctgagcctgcccggctacagacccaccaccagaagcagcgccagaagaagccaggccggcgtgagcagcggcgccccccccggcagaaacagcttctacatgggcacctgccaggacgagcccgagcagctggacgactggaacagaatcgccgagctgcagcagagaaacagagtgtgccccccccacctgaagacctgctaccccctggagagcagacccagcctgagcctgggcaccatcaccgacgaggagatgaagaccggcgacccccaggagaccctgagaagagccagcatgcagcccatccagatcgccgagggcaccggcatcaccaccagacagcagagaaagagagtgagcctggagccccaccagggccccggcacccccgagagcaagaaggccaccagctgcttccccagacccatgacccccagagacagacacgagggcagaaagcagagcaccaccgaggcccagaagaaggccgcccccgccagcaccaagcaggccgacagaagacagagcatggccttcagcatcctgaacacccccaagaagctgggcaacagcctgctgagaagaggcgccagcaagaaggccctgagcaaggccagccccaacaccagaagcggcaccagaagaagccccagaatcgccaccaccaccgccagcgccgccaccgccgccgccatcggcgccacccccagagccaagggcaaggccaagcactag

SEQ ID NO: 91454 - DNA, 4995 bp, synthetic construct
  misc_feature 1..4995: note = Description of Artificial Sequence: Synthetic coding sequence
  source 1..4995: mol_type = other DNA
atgctggagaccgagagaggccagcaggaggccaagctgctggccgagagaggccacttcgaggaggagaagcagcagctgagcagcctgatcaccgacctgcagagcagcatcagcaacctgagccaggccaaggaggagctggagcaggccagccaggcccacggcgccagactgaccgcccaggtggccagcctgaccagcgagctgaccaccctgaacgccaccatccagcagcaggaccaggagctggccggcctgaagcagcaggccaaggagaagcaggcccagctggcccagaccctgcagcagcaggagcaggccagccagggcctgagacaccaggtggagcagctgagcagcagcctgaagcagaaggagcagcagctgaaggaggtggccgagaagcaggaggccaccagacaggaccacgcccagcagctggccaccgccgccgaggagagagaggccagcctgagagagagagacgccgccctgaagcagctggaggccctggagaaggagaaggccgccaagctggagatcctgcagcagcagctgcaggtggccaacgaggccagagacagcgcccagaccagcgtgacccaggcccagagagagaaggccgagctgagcagaaaggtggaggagctgcaggcctgcgtggagaccgccagacaggagcagcacgaggcccaggcccaggtggccgagctggagctgcagctgagaagcgagcagcagaaggccaccgagaaggagagagtggcccaggagaaggaccagctgcaggagcagctgcaggccctgaaggagagcctgaaggtgaccaagggcagcctggaggaggagaagagaagagccgccgacgccctggaggagcagcagagatgcatcagcgagctgaaggccgagaccagaagcctggtggagcagcacaagagagagagaaaggagctggaggaggagagagccggcagaaagggcctggaggccagactgcagcagctgggcgaggcccaccaggccgagaccgaggtgctgagaagagagctggccgaggccatggccgcccagcacaccgccgagagcgagtgcgagcagctggtgaaggaggtggccgcctggagagagagatacgaggacagccagcaggaggaggcccagtacggcgccatgttccaggagcagctgatgaccctgaaggaggagtgcgagaaggccagacaggagctgcaggaggccaaggagaaggtggccggcatcgagagccacagcgagctgcagatcagcagacagcagaacgagctggccgagctgcacgccaacctggccagagccctgcagcaggtgcaggagaaggaggtgagagcccagaagctggccgacgacctgagcaccctgcaggagaagatggccgccaccagcaaggaggtggccagactggagaccctggtgagaaaggccggcgagcagcaggagaccgccagcagagagctggtgaaggagcccgccagagccggcgacagacagcccgagtggctggaggagcagcagggcagacagttctgcagcacccaggccgccctgcaggccatggagagagaggccgagcagatgggcaacgagctggagagactgagagccgccctgatggagagccagggccagcagcaggaggagagaggccagcaggagagagaggtggccagactgacccaggagagaggcagagcccaggccgacctggccctggagaaggccgccagagccgagctggagatgagactgcagaacgccctgaacgagcagagagtggagttcgccaccctgcaggaggccctggcccacgccctgaccgagaaggagggcaaggaccaggagctggccaagctgagaggcctggaggccgcccagatcaaggagctggaggagctgagacagaccgtgaagcagctgaaggagcagctggccaagaaggagaaggagcacgccagcggcagcggcgcccagagcgaggccgccggcagaaccgagcccaccggccccaagctggaggccctgagagccgaggtgagcaagctggagcagcagtgccagaagcagcaggagcaggccgacagcctggagagaagcctggaggccgagagagccagcagagccgagagagacagcgccctggagaccctgcagggccagctggaggagaaggcccaggagctgggccacagccagagcgccctggccagcgcccagagagagctggccgccttcagaaccaaggtgcaggaccacagcaaggccgaggacgagtggaaggcccaggtggccagaggcagacaggaggccgagagaaagaacagcctgatcagcagcctggaggaggaggtgagcatcctgaacagacaggtgctggagaaggagggcgagagcaaggagctgaagagactggtgatggccgagagcgagaagagccagaagctggaggagagactgagactgctgcaggccgagaccgccagcaacagcgccagagccgccgagagaagcagcgccctgagagaggaggtgcagagcctgagagaggaggccgagaagcagagagtggccagcgagaacctgagacaggagctgaccagccaggccgagagagccgaggagctgggccaggagctgaaggcctggcaggagaagttcttccagaaggagcaggccctgagcaccctgcagctggagcacaccagcacccaggccctggtgagcgagctgctgcccgccaagcacctgtgccagcagctgcaggccgagcaggccgccgccgagaagagacacagagaggagctggagcagagcaagcaggccgccggcggcctgagagccgagctgctgagagcccagagagagctgggcgagctgatccccctgagacagaaggtggccgagcaggagagaaccgcccagcagctgagagccgagaaggccagctacgccgagcagctgagcatgctgaagaaggcccacggcctgctggccgaggagaacagaggcctgggcgagagagccaacctgggcagacagttcctggaggtggagctggaccaggccagagagaagtacgtgcaggagctggccgccgtgagagccgacgccgagaccagactggccgaggtgcagagagaggcccagagcaccgccagagagctggaggtgatgaccgccaagtacgagggcgccaaggtgaaggtgctggaggagagacagagattccaggaggagagacagaagctgaccgcccaggtggaggagctgagcaagaagctggccgacagcgaccaggccagcaaggtgcagcagcagaagctgaaggccgtgcaggcccagggcggcgagagccagcaggaggcccagagactgcaggcccagctgaacgagctgcaggcccagctgagccagaaggagcaggccgccgagcactacaagctgcagatggagaaggccaagacccactacgacgccaagaagcagcagaaccaggagctgcaggagcagctgagaagcctggagcagctgcagaaggagaacaaggagctgagagccgaggccgagagactgggccacgagctgcagcaggccggcctgaagaccaaggaggccgagcagacctgcagacacctgaccgcccaggtgagaagcctggaggcccaggtggcccacgccgaccagcagctgagagacctgggcaagttccaggtggccaccgacgccctgaagagcagagagccccaggccaagccccagctggacctgagcatcgacagcctggacctgagctgcgaggagggcacccccctgagcatcaccagcaagctgcccagaacccagcccgacggcaccagcgtgcccggcgagcccgccagccccatcagccagagactgccccccaaggtggagagcctggagagcctgtacttcacccccatccccgccagaagccaggcccccctggagagcagcctggacagcctgggcgacgtgttcctggacagcggcagaaagaccagaagcgccagaagaagaaccacccagatcatcaacatcaccatgaccaagaagctggacgtggaggagcccgacagcgccaacagcagcttctacagcaccagaagcgcccccgccagccaggccagcctgagagccaccagcagcacccagagcctggccagactgggcagccccgactacggcaacagcgccctgctgagcctgcccggctacagacccaccaccagaagcagcgccagaagaagccaggccggcgtgagcagcggcgccccccccggcagaaacagcttctacatgggcacctgccaggacgagcccgagcagctggacgactggaacagaatcgccgagctgcagcagagaaacagagtgtgccccccccacctgaagacctgctaccccctggagagcagacccagcctgagcctgggcaccatcaccgacgaggagatgaagaccggcgacccccaggagaccctgagaagagccagcatgcagcccatccagatcgccgagggcaccggcatcaccaccagacagcagagaaagagagtgagcctggagccccaccagggccccggcacccccgagagcaagaaggccaccagctgcttccccagacccatgacccccagagacagacacgagggcagaaagcagagcaccaccgaggcccagaagaaggccgcccccgccagcaccaagcaggccgacagaagacagagcatggccttcagcatcctgaacacccccaagaagctgggcaacagcctgctgagaagaggcgccagcaagaaggccctgagcaaggccagccccaacaccagaagcggcaccagaagaagccccagaatcgccaccaccaccgccagcgccgccaccgccgccgccatcggcgccacccccagagccaagggcaaggccaagcactag

SEQ ID NO: 91455 - DNA, 228 bp, synthetic construct
  misc_feature 1..228: note = Description of Artificial Sequence: Synthetic coding sequence
  source 1..228: mol_type = other DNA
atgaccctgcacgccaccagaggcgccgccctgctgagctgggtgaacagcctgcacgtggccgaccccgtggaggccgtgctgcagctgcaggactgcagcatcttcatcaagatcatcgacagaatccacggcaccgaggagggccagcagatcctgaagcagcccgtgagcgagagactggacttcgtgtgcagcttcctgcagaagaacagaaagcacccctag

SEQ ID NO: 91456 - DNA, 276 bp, synthetic construct
  misc_feature 1..276: note = Description of Artificial Sequence: Synthetic coding sequence
  source 1..276: mol_type = other DNA
atgaccctgcacgccaccagaggcgccgccctgctgagctgggtgaacagcctgcacgtggccgaccccgtggaggccgtgctgcagctgcaggactgcagcatcttcatcaagatcatcgacagaatccacggcaccgaggagggccagcagatcctgaagcagcccgtgagcgagagactggacttcgtgtgcagcttcctgcagaagaacagaaagcaccccagcagccccgagtgcctggtgagcgcccagaaggtgctggagggcagctag

SEQ ID NO: 91457 - DNA, 6348 bp, synthetic construct
  misc_feature 1..6348: note = Description of Artificial Sequence: Synthetic coding sequence
  source 1..6348: mol_type = other DNA
atgaccctgcacgccaccagaggcgccgccctgctgagctgggtgaacagcctgcacgtggccgaccccgtggaggccgtgctgcagctgcaggactgcagcatcttcatcaagatcatcgacagaatccacggcaccgaggagggccagcagatcctgaagcagcccgtgagcgagagactggacttcgtgtgcagcttcctgcagaagaacagaaagcaccccagcagccccgagtgcctggtgagcgcccagaaggtgctggagggcagcgagctggagctggccaagatgaccatgctgctgctgtaccacagcaccatgagcagcaagagccccagagactgggagcagttcgagtacaagatccaggccgagctggccgtgatcctgaagttcgtgctggaccacgaggacggcctgaacctgaacgaggacctggagaacttcctgcagaaggcccccgtgcccagcacctgcagcagcaccttccccgaggagctgagcccccccagccaccaggccaagagagagatcagattcctggagctgcagaaggtggccagcagcagcagcggcaacaacttcctgagcggcagccccgccagccccatgggcgacatcctgcagaccccccagttccagatgagaagactgaagaagcagctggccgacgagagaagcaacagagacgagctggagctggagctggccgagaacagaaagctgctgaccgagaaggacgcccagatcgccatgatgcagcagagaatcgacagactggccctgctgaacgagaagcaggccgccagccccctggagcccaaggagctggaggagctgagagacaagaacgagagcctgaccatgagactgcacgagaccctgaagcagtgccaggacctgaagaccgagaagagccagatggacagaaagatcaaccagctgagcgaggagaacggcgacctgagcttcaagctgagagagttcgccagccacctgcagcagctgcaggacgccctgaacgagctgaccgaggagcacagcaaggccacccaggagtggctggagaagcaggcccagctggagaaggagctgagcgccgccctgcaggacaagaagtgcctggaggagaagaacgagatcctgcagggcaagctgagccagctggaggagcacctgagccagctgcaggacaaccccccccaggagaagggcgaggtgctgggcgacgtgctgcagctggagaccctgaagcaggaggccgccaccctggccgccaacaacacccagctgcaggccagagtggagatgctggagaccgagagaggccagcaggaggccaagctgctggccgagagaggccacttcgaggaggagaagcagcagctgagcagcctgatcaccgacctgcagagcagcatcagcaacctgagccaggccaaggaggagctggagcaggccagccaggcccacggcgccagactgaccgcccaggtggccagcctgaccagcgagctgaccaccctgaacgccaccatccagcagcaggaccaggagctggccggcctgaagcagcaggccaaggagaagcaggcccagctggcccagaccctgcagcagcaggagcaggccagccagggcctgagacaccaggtggagcagctgagcagcagcctgaagcagaaggagcagcagctgaaggaggtggccgagaagcaggaggccaccagacaggaccacgcccagcagctggccaccgccgccgaggagagagaggccagcctgagagagagagacgccgccctgaagcagctggaggccctggagaaggagaaggccgccaagctggagatcctgcagcagcagctgcaggtggccaacgaggccagagacagcgcccagaccagcgtgacccaggcccagagagagaaggccgagctgagcagaaaggtggaggagctgcaggcctgcgtggagaccgccagacaggagcagcacgaggcccaggcccaggtggccgagctggagctgcagctgagaagcgagcagcagaaggccaccgagaaggagagagtggcccaggagaaggaccagctgcaggagcagctgcaggccctgaaggagagcctgaaggtgaccaagggcagcctggaggaggagaagagaagagccgccgacgccctggaggagcagcagagatgcatcagcgagctgaaggccgagaccagaagcctggtggagcagcacaagagagagagaaaggagctggaggaggagagagccggcagaaagggcctggaggccagactgcagcagctgggcgaggcccaccaggccgagaccgaggtgctgagaagagagctggccgaggccatggccgcccagcacaccgccgagagcgagtgcgagcagctggtgaaggaggtggccgcctggagagagagatacgaggacagccagcaggaggaggcccagtacggcgccatgttccaggagcagctgatgaccctgaaggaggagtgcgagaaggccagacaggagctgcaggaggccaaggagaaggtggccggcatcgagagccacagcgagctgcagatcagcagacagcagaacgagctggccgagctgcacgccaacctggccagagccctgcagcaggtgcaggagaaggaggtgagagcccagaagctggccgacgacctgagcaccctgcaggagaagatggccgccaccagcaaggaggtggccagactggagaccctggtgagaaaggccggcgagcagcaggagaccgccagcagagagctggtgaaggagcccgccagagccggcgacagacagcccgagtggctggaggagcagcagggcagacagttctgcagcacccaggccgccctgcaggccatggagagagaggccgagcagatgggcaacgagctggagagactgagagccgccctgatggagagccagggccagcagcaggaggagagaggccagcaggagagagaggtggccagactgacccaggagagaggcagagcccaggccgacctggccctggagaaggccgccagagccgagctggagatgagactgcagaacgccctgaacgagcagagagtggagttcgccaccctgcaggaggccctggcccacgccctgaccgagaaggagggcaaggaccaggagctggccaagctgagaggcctggaggccgcccagatcaaggagctggaggagctgagacagaccgtgaagcagctgaaggagcagctggccaagaaggagaaggagcacgccagcggcagcggcgcccagagcgaggccgccggcagaaccgagcccaccggccccaagctggaggccctgagagccgaggtgagcaagctggagcagcagtgccagaagcagcaggagcaggccgacagcctggagagaagcctggaggccgagagagccagcagagccgagagagacagcgccctggagaccctgcagggccagctggaggagaaggcccaggagctgggccacagccagagcgccctggccagcgcccagagagagctggccgccttcagaaccaaggtgcaggaccacagcaaggccgaggacgagtggaaggcccaggtggccagaggcagacaggaggccgagagaaagaacagcctgatcagcagcctggaggaggaggtgagcatcctgaacagacaggtgctggagaaggagggcgagagcaaggagctgaagagactggtgatggccgagagcgagaagagccagaagctggaggagagactgagactgctgcaggccgagaccgccagcaacagcgccagagccgccgagagaagcagcgccctgagagaggaggtgcagagcctgagagaggaggccgagaagcagagagtggccagcgagaacctgagacaggagctgaccagccaggccgagagagccgaggagctgggccaggagctgaaggcctggcaggagaagttcttccagaaggagcaggccctgagcaccctgcagctggagcacaccagcacccaggccctggtgagcgagctgctgcccgccaagcacctgtgccagcagctgcaggccgagcaggccgccgccgagaagagacacagagaggagctggagcagagcaagcaggccgccggcggcctgagagccgagctgctgagagcccagagagagctgggcgagctgatccccctgagacagaaggtggccgagcaggagagaaccgcccagcagctgagagccgagaaggccagctacgccgagcagctgagcatgctgaagaaggcccacggcctgctggccgaggagaacagaggcctgggcgagagagccaacctgggcagacagttcctggaggtggagctggaccaggccagagagaagtacgtgcaggagctggccgccgtgagagccgacgccgagaccagactggccgaggtgcagagagaggcccagagcaccgccagagagctggaggtgatgaccgccaagtacgagggcgccaaggtgaaggtgctggaggagagacagagattccaggaggagagacagaagctgaccgcccaggtggagcagctggaggtgttccagagagagcagaccaagcaggtggaggagctgagcaagaagctggccgacagcgaccaggccagcaaggtgcagcagcagaagctgaaggccgtgcaggcccagggcggcgagagccagcaggaggcccagagactgcaggcccagctgaacgagctgcaggcccagctgagccagaaggagcaggccgccgagcactacaagctgcagatggagaaggccaagacccactacgacgccaagaagcagcagaaccaggagctgcaggagcagctgagaagcctggagcagctgcagaaggagaacaaggagctgagagccgaggccgagagactgggccacgagctgcagcaggccggcctgaagaccaaggaggccgagcagacctgcagacacctgaccgcccaggtgagaagcctggaggcccaggtggcccacgccgaccagcagctgagagacctgggcaagttccaggtggccaccgacgccctgaagagcagagagccccaggccaagccccagctggacctgagcatcgacagcctggacctgagctgcgaggagggcacccccctgagcatcaccagcaagctgcccagaacccagcccgacggcaccagcgtgcccggcgagcccgccagccccatcagccagagactgccccccaaggtggagagcctggagagcctgtacttcacccccatccccgccagaagccaggcccccctggagagcagcctggacagcctgggcgacgtgttcctggacagcggcagaaagaccagaagcgccagaagaagaaccacccagatcatcaacatcaccatgaccaagaagctggacgtggaggagcccgacagcgccaacagcagcttctacagcaccagaagcgcccccgccagccaggccagcctgagagccaccagcagcacccagagcctggccagactgggcagccccgactacggcaacagcgccctgctgagcctgcccggctacagacccaccaccagaagcagcgccagaagaagccaggccggcgtgagcagcggcgccccccccggcagaaacagcttctacatgggcacctgccaggacgagcccgagcagctggacgactggaacagaatcgccgagctgcagcagagaaacagagtgtgccccccccacctgaagacctgctaccccctggagagcagacccagcctgagcctgggcaccatcaccgacgaggagatgaagaccggcgacccccaggagaccctgagaagagccagcatgcagcccatccagatcgccgagggcaccggcatcaccaccagacagcagagaaagagagtgagcctggagccccaccagggccccggcacccccgagagcaagaaggccaccagctgcttccccagacccatgacccccagagacagacacgagggcagaaagcagagcaccaccgaggcccagaagaaggccgcccccgccagcaccaagcaggccgacagaagacagagcatggccttcagcatcctgaacacccccaagaagctgggcaacagcctgctgagaagaggcgccagcaagaaggccctgagcaaggccagccccaacaccagaagcggcaccagaagaagccccagaatcgccaccaccaccgccagcgccgccaccgccgccgccatcggcgccacccccagagccaagggcaaggccaagcactag

SEQ ID NO: 91458 - DNA, 330 bp, synthetic construct
  misc_feature 1..330: note = Description of Artificial Sequence: Synthetic coding sequence
  source 1..330: mol_type = other DNA
atgaccctgcacgccaccagaggcgccgccctgctgagctgggtgaacagcctgcacgtggccgaccccgtggaggccgtgctgcagctgcaggactgcagcatcttcatcaagatcatcgacagaatccacggcaccgaggagggccagcagatcctgaagcagcccgtgagcgagagactggacttcgtgtgcagcttcctgcagaagaacagaaagcaccccagcagccccgagtgcctggtgagcgcccagaaggtgctggagggcagcgagctggagctggccaagatgaccatgctgctgctgtaccacagcaccatgagctag

SEQ ID NO: 91459 - DNA, 186 bp, synthetic construct
  misc_feature 1..186: note = Description of Artificial Sequence: Synthetic coding sequence
  source 1..186: mol_type = other DNA
atgaccctgcacgccaccagaggcgccgccctgctgagctgggtgaacagcctgcacgtggccgaccccgtggaggccgtgctgcagctgcaggactgcagcatcttcatcaagatcatcgacagaatccacggcaccgaggagggccagcagatcctgaagcagcccgtgagcgagagactgtag

SEQ ID NO: 91460 - DNA, 180 bp, synthetic construct
  misc_feature 1..180: note = Description of Artificial Sequence: Synthetic coding sequence
  source 1..180: mol_type = other DNA
atgaccctgcacgccaccagaggcgccgccctgctgagctgggtgaacagcctgcacgtggccgaccccgtggaggccgtgctgcagctgcaggactgcagcatcttcatcaagatcatcgacagaatccacggcaccgaggagggccagcagatcctgaagcagcccgtgagcgagtag

SEQ ID NO: 91461 - DNA, 441 bp, synthetic construct
  misc_feature 1..441: note = Description of Artificial Sequence: Synthetic coding sequence
  source 1..441: mol_type = other DNA
atgaccctgcacgccaccagaggcgccgccctgctgagctgggtgaacagcctgcacgtggccgaccccgtggaggccgtgctgcagctgcaggactgcagcatcttcatcaagatcatcgacagaatccacggcaccgaggagggccagcagatcctgaagcagcccgtgagcgagagactggacttcgtgtgcagcttcctgcagaagaacagaaagcaccccagcagccccgagtgcctggtgagcgcccagaaggtgctggagggcagcgagctggagctggccaagatgaccatgctgctgctgtaccacagcaccatgagcagcaagagccccagagactgggagcagttcgagtacaagatccaggccgagctggccgtgatcctgaagttcgtgctggaccacgaggacggcctgaacctgaacgaggactag

SEQ ID NO: 91462 - DNA, 3267 bp, synthetic construct
  misc_feature 1..3267: note = Description of Artificial Sequence: Synthetic coding sequence
  source 1..3267: mol_type = other DNA
atgagactgcagaacgccctgaacgagcagagagtggagttcgccaccctgcaggaggccctggcccacgccctgaccgagaaggagggcaaggaccaggagctggccaagctgagaggcctggaggccgcccagatcaaggagctggaggagctgagacagaccgtgaagcagctgaaggagcagctggccaagaaggagaaggagcacgccagcggcagcggcgcccagagcgaggccgccggcagaaccgagcccaccggccccaagctggaggccctgagagccgaggtgagcaagctggagcagcagtgccagaagcagcaggagcaggccgacagcctggagagaagcctggaggccgagagagccagcagagccgagagagacagcgccctggagaccctgcagggccagctggaggagaaggcccaggagctgggccacagccagagcgccctggccagcgcccagagagagctggccgccttcagaaccaaggtgcaggaccacagcaaggccgaggacgagtggaaggcccaggtggccagaggcagacaggaggccgagagaaagaacagcctgatcagcagcctggaggaggaggtgagcatcctgaacagacaggtgctggagaaggagggcgagagcaaggagctgaagagactggtgatggccgagagcgagaagagccagaagctggaggagagactgagactgctgcaggccgagaccgccagcaacagcgccagagccgccgagagaagcagcgccctgagagaggaggtgcagagcctgagagaggaggccgagaagcagagagtggccagcgagaacctgagacaggagctgaccagccaggccgagagagccgaggagctgggccaggagctgaaggcctggcaggagaagttcttccagaaggagcaggccctgagcaccctgcagctggagcacaccagcacccaggccctggtgagcgagctgctgcccgccaagcacctgtgccagcagctgcaggccgagcaggccgccgccgagaagagacacagagaggagctggagcagagcaagcaggccgccggcggcctgagagccgagctgctgagagcccagagagagctgggcgagctgatccccctgagacagaaggtggccgagcaggagagaaccgcccagcagctgagagccgagaaggccagctacgccgagcagctgagcatgctgaagaaggcccacggcctgctggccgaggagaacagaggcctgggcgagagagccaacctgggcagacagttcctggaggtggagctggaccaggccagagagaagtacgtgcaggagctggccgccgtgagagccgacgccgagaccagactggccgaggtgcagagagaggcccagagcaccgccagagagctggaggtgatgaccgccaagtacgagggcgccaaggtgaaggtgctggaggagagacagagattccaggaggagagacagaagctgaccgcccaggtggaggagctgagcaagaagctggccgacagcgaccaggccagcaaggtgcagcagcagaagctgaaggccgtgcaggcccagggcggcgagagccagcaggaggcccagagactgcaggcccagctgaacgagctgcaggcccagctgagccagaaggagcaggccgccgagcactacaagctgcagatggagaaggccaagacccactacgacgccaagaagcagcagaaccaggagctgcaggagcagctgagaagcctggagcagctgcagaaggagaacaaggagctgagagccgaggccgagagactgggccacgagctgcagcaggccggcctgaagaccaaggaggccgagcagacctgcagacacctgaccgcccaggtgagaagcctggaggcccaggtggcccacgccgaccagcagctgagagacctgggcaagttccaggtggccaccgacgccctgaagagcagagagccccaggccaagccccagctggacctgagcatcgacagcctggacctgagctgcgaggagggcacccccctgagcatcaccagacacaaggccctgatgaccatcatccccgacctgagccccaacaaccccctgagcaagctgcccagaacccagcccgacggcaccagcgtgcccggcgagcccgccagccccatcagccagagactgccccccaaggtggagagcctggagagcctgtacttcacccccatccccgccagaagccaggcccccctggagagcagcctggacagcctgggcgacgtgttcctggacagcggcagaaagaccagaagcgccagaagaagaaccacccagatcatcaacatcaccatgaccaagaagctggacgtggaggagcccgacagcgccaacagcagcttctacagcaccagaagcgcccccgccagccaggccagcctgagagccaccagcagcacccagagcctggccagactgggcagccccgactacggcaacagcgccctgctgagcctgcccggctacagacccaccaccagaagcagcgccagaagaagccaggccggcgtgagcagcggcgccccccccggcagaaacagcttctacatgggcacctgccaggacgagcccgagcagctggacgactggaacagaatcgccgagctgcagcagagaaacagagtgtgccccccccacctgaagacctgctaccccctggagagcagacccagcctgagcctgggcaccatcaccgacgaggagatgaagaccggcgacccccaggagaccctgagaagagccagcatgcagcccatccagatcgccgagggcaccggcatcaccaccagacagcagagaaagagagtgagcctggagccccaccagggccccggcacccccgagagcaagaaggccaccagctgcttccccagacccatgacccccagagacagacacgagggcagaaagcagagcaccaccgaggcccagaagaaggccgcccccgccagcaccaagcaggccgacagaagacagagcatggccttcagcatcctgaacacccccaagaagctgggcaacagcctgctgagaagaggcgccagcaagaaggccctgagcaaggccagccccaacaccagaagcggcaccagaagaagccccagaatcgccaccaccaccgccagcgccgccaccgccgccgccatcggcgccacccccagagccaagggcaaggccaagcactag

SEQ ID NO: 91463 - DNA, 2076 bp, synthetic construct
  misc_feature 1..2076: note = Description of Artificial Sequence: Synthetic coding sequence
  source 1..2076: mol_type = other DNA
atgaccctgcacgccaccagaggcgccgccctgctgagctgggtgaacagcctgcacgtggccgaccccgtggaggccgtgctgcagctgcaggactgcagcatcttcatcaagatcatcgacagaatccacggcaccgaggagggccagcagatcctgaagcagcccgtgagcgagagactggacttcgtgtgcagcttcctgcagaagaacagaaagcaccccagcagccccgagtgcctggtgagcgcccagaaggtgctggagggcagcgagctggagctggccaagatgaccatgctgctgctgtaccacagcaccatgagcagcaagagccccagagactgggagcagttcgagtacaagatccaggccgagctggccgtgatcctgaagttcgtgctggaccacgaggacggcctgaacctgaacgaggacctggagaacttcctgcagaaggcccccgtgcccagcacctgcagcagcaccttccccgaggagctgagcccccccagccaccaggccaagagagagatcagattcctggagctgcagaaggtggccagcagcagcagcggcaacaacttcctgagcggcagccccgccagccccatgggcgacatcctgcagaccccccagttccagatgagaagactgaagaagcagctggccgacgagagaagcaacagagacgagctggagctggagctggccgagaacagaaagctgctgaccgagaaggacgcccagatcgccatgatgcagcagagaatcgacagactggccctgctgaacgagaagcaggccgccagccccctggagcccaaggagctggaggagctgagagacaagaacgagagcctgaccatgagactgcacgagaccctgaagcagtgccaggacctgaagaccgagaagagccagatggacagaaagatcaaccagctgagcgaggagaacggcgacctgagcttcaagctgagagagttcgccagccacctgcagcagctgcaggacgccctgaacgagctgaccgaggagcacagcaaggccacccaggagtggctggagaagcaggcccagctggagaaggagctgagcgccgccctgcaggacaagaagtgcctggaggagaagaacgagatcctgcagggcaagctgagccagctggaggagcacctgagccagctgcaggacaaccccccccaggagaagggcgaggtgctgggcgacgtgctgcagctggagaccctgaagcaggaggccgccaccctggccgccaacaacacccagctgcaggccagagtggagatgctggagaccgagagaggccagcaggaggccaagctgctggccgagagaggccacttcgaggaggagaagcagcagctgagcagcctgatcaccgacctgcagagcagcatcagcaacctgagccaggccaaggaggagctggagcaggccagccaggcccacggcgccagactgaccgcccaggtggccagcctgaccagcgagctgaccaccctgaacgccaccatccagcagcaggaccaggagctggccggcctgaagcagcaggccaaggagaagcaggcccagctggcccagaccctgcagcagcaggagcaggccagccagggcctgagacaccaggtggagcagctgagcagcagcctgaagcagaaggagcagcagctgaaggaggtggccgagaagcaggaggccaccagacaggaccacgcccagcagctggccaccgccgccgaggagagagaggccagcctgagagagagagacgccgccctgaagcagctggaggccctggagaaggagaaggccgccaagctggagatcctgcagcagcagctgcaggtggccaacgaggccagagacagcgcccagaccagcgtgacccaggcccagagagagaaggccgagctgagcagaaaggtggaggagctgcaggcctgcgtggagaccgccagacaggagcagcacgaggcccaggcccaggtggccgagctggagctgcagctgagaagcgagcagcagaaggccaccgagaaggagtag

SEQ ID NO: 91464 - DNA, 480 bp, synthetic construct
  misc_feature 1..480: note = Description of Artificial Sequence: Synthetic coding sequence
  source 1..480: mol_type = other DNA
atgaccctgcacgccaccagaggcgccgccctgctgagctgggtgaacagcctgcacgtggccgaccccgtggaggccgtgctgcagctgcaggactgcagcatcttcatcaagatcatcgacagaatccacggcaccgaggagggccagcagatcctgaagcagcccgtgagcgagagactggacttcgtgtgcagcttcctgcagaagaacagaaagcaccccagcagccccgagtgcctggtgagcgcccagaaggtgctggagggcagcgagctggagctggccaagatgaccatgctgctgctgtaccacagcaccatgagcagcaagagccccagagactgggagcagttcgagtacaagatccaggccgagctggccgtgatcctgaagttcgtgctggaccacgaggacggcctgaacctgaacgaggacctggagaacttcctgcagaaggcccccgtgcccagcacctag

SEQ ID NO: 91465 - DNA, 219 bp, synthetic construct
  misc_feature 1..219: note = Description of Artificial Sequence: Synthetic coding sequence
  source 1..219: mol_type = other DNA
atgaccctgcacgccaccagaggcgccgccctgctgagctgggtgaacagcctgcacgtggccgaccccgtggaggccgtgctgcagctgcaggactgcagcatcttcatcaagatcatcgacagaatccacggcaccgaggagggccagcagatcctgaagcagcccgtgagcgagagactggacttcgtgtgcagcttcctgcagaagaacagatag

SEQ ID NO: 91466 - DNA, 252 bp, synthetic construct
  misc_feature 1..252: note = Description of Artificial Sequence: Synthetic coding sequence
  source 1..252: mol_type = other DNA
atgaccctgcacgccaccagaggcgccgccctgctgagctgggtgaacagcctgcacgtggccgaccccgtggaggccgtgctgcagctgcaggactgcagcatcttcatcaagatcatcgacagaatccacggcaccgaggagggccagcagatcctgaagcagcccgtgagcgagagactggacttcgtgtgcagcttcctgcagaagaacagaaagcaccccagcagccccgagtgcctggtgagctag

SEQ ID NO: 91467 - DNA, 2559 bp, synthetic construct
  misc_feature 1..2559: note = Description of Artificial Sequence: Synthetic coding sequence
  source 1..2559: mol_type = other DNA
atgaccctgcacgccaccagaggcgccgccctgctgagctgggtgaacagcctgcacgtggccgaccccgtggaggccgtgctgcagctgcaggactgcagcatcttcatcaagatcatcgacagaatccacggcaccgaggagggccagcagatcctgaagcagcccgtgagcgagagactggacttcgtgtgcagcttcctgcagaagaacagaaagcaccccagcagccccgagtgcctggtgagcgcccagaaggtgctggagggcagcgagctggagctggccaagatgaccatgctgctgctgtaccacagcaccatgagcagcaagagccccagagactgggagcagttcgagtacaagatccaggccgagctggccgtgatcctgaagttcgtgctggaccacgaggacggcctgaacctgaacgaggacctggagaacttcctgcagaaggcccccgtgcccagcacctgcagcagcaccttccccgaggagctgagcccccccagccaccaggccaagagagagatcagattcctggagctgcagaaggtggccagcagcagcagcggcaacaacttcctgagcggcagccccgccagccccatgggcgacatcctgcagaccccccagttccagatgagaagactgaagaagcagctggccgacgagagaagcaacagagacgagctggagctggagctggccgagaacagaaagctgctgaccgagaaggacgcccagatcgccatgatgcagcagagaatcgacagactggccctgctgaacgagaagcaggccgccagccccctggagcccaaggagctggaggagctgagagacaagaacgagagcctgaccatgagactgcacgagaccctgaagcagtgccaggacctgaagaccgagaagagccagatggacagaaagatcaaccagctgagcgaggagaacggcgacctgagcttcaagctgagagagttcgccagccacctgcagcagctgcaggacgccctgaacgagctgaccgaggagcacagcaaggccacccaggagtggctggagaagcaggcccagctggagaaggagctgagcgccgccctgcaggacaagaagtgcctggaggagaagaacgagatcctgcagggcaagctgagccagctggaggagcacctgagccagctgcaggacaaccccccccaggagaagggcgaggtgctgggcgacgtgctgcagctggagaccctgaagcaggaggccgccaccctggccgccaacaacacccagctgcaggccagagtggagatgctggagaccgagagaggccagcaggaggccaagctgctggccgagagaggccacttcgaggaggagaagcagcagctgagcagcctgatcaccgacctgcagagcagcatcagcaacctgagccaggccaaggaggagctggagcaggccagccaggcccacggcgccagactgaccgcccaggtggccagcctgaccagcgagctgaccaccctgaacgccaccatccagcagcaggaccaggagctggccggcctgaagcagcaggccaaggagaagcaggcccagctggcccagaccctgcagcagcaggagcaggccagccagggcctgagacaccaggtggagcagctgagcagcagcctgaagcagaaggagcagcagctgaaggaggtggccgagaagcaggaggccaccagacaggaccacgcccagcagctggccaccgccgccgaggagagagaggccagcctgagagagagagacgccgccctgaagcagctggaggccctggagaaggagaaggccgccaagctggagatcctgcagcagcagctgcaggtggccaacgaggccagagacagcgcccagaccagcgtgacccaggcccagagagagaaggccgagctgagcagaaaggtggaggagctgcaggcctgcgtggagaccgccagacaggagcagcacgaggcccaggcccaggtggccgagctggagctgcagctgagaagcgagcagcagaaggccaccgagaaggagagagtggcccaggagaaggaccagctgcaggagcagctgcaggccctgaaggagagcctgaaggtgaccaagggcagcctggaggaggagaagagaagagccgccgacgccctggaggagcagcagagatgcatcagcgagctgaaggccgagaccagaagcctggtggagcagcacaagagagagagaaaggagctggaggaggagagagccggcagaaagggcctggaggccagactgcagcagctgggcgaggcccaccaggccgagaccgaggtgctgagaagagagctggccgaggccatggccgcccagcacaccgccgagagcgagtgcgagcagctggtgaaggaggtggccgcctggagagagagatacgaggacagccagcaggaggaggcccagtacggcgccatgttccaggagcagctgatgaccctgaaggaggagtgcgagaaggccagacaggagctgcaggaggcctag

SEQ ID NO: 91468 - DNA, 525 bp, synthetic construct
  misc_feature 1..525: note = Description of Artificial Sequence: Synthetic coding sequence
  source 1..525: mol_type = other DNA
atgaccctgcacgccaccagaggcgccgccctgctgagctgggtgaacagcctgcacgtggccgaccccgtggaggccgtgctgcagctgcaggactgcagcatcttcatcaagatcatcgacagaatccacggcaccgaggagggccagcagatcctgaagcagcccgtgagcgagagactggacttcgtgtgcagcttcctgcagaagaacagaaagcaccccagcagccccgagtgcctggtgagcgcccagaaggtgctggagggcagcgagctggagctggccaagatgaccatgctgctgctgtaccacagcaccatgagcagcaagagccccagagactgggagcagttcgagtacaagatccaggccgagctggccgtgatcctgaagttcgtgctggaccacgaggacggcctgaacctgaacgaggacctggagaacttcctgcagaaggcccccgtgcccagcacctgcagcagcaccttccccgaggagctgagcccccccagccaccagtag

SEQ ID NO: 91469 - DNA, 606 bp, synthetic construct
  misc_feature 1..606: note = Description of Artificial Sequence: Synthetic coding sequence
  source 1..606: mol_type = other DNA
atgaccctgcacgccaccagaggcgccgccctgctgagctgggtgaacagcctgcacgtggccgaccccgtggaggccgtgctgcagctgcaggactgcagcatcttcatcaagatcatcgacagaatccacggcaccgaggagggccagcagatcctgaagcagcccgtgagcgagagactggacttcgtgtgcagcttcctgcagaagaacagaaagcaccccagcagccccgagtgcctggtgagcgcccagaaggtgctggagggcagcgagctggagctggccaagatgaccatgctgctgctgtaccacagcaccatgagcagcaagagccccagagactgggagcagttcgagtacaagatccaggccgagctggccgtgatcctgaagttcgtgctggaccacgaggacggcctgaacctgaacgaggacctggagaacttcctgcagaaggcccccgtgcccagcacctgcagcagcaccttccccgaggagctgagcccccccagccaccaggccaagagagagatcagattcctggagctgcagaaggtggccagcagcagcagcggcaacaacttcctgagcggcagcccctag

SEQ ID NO: 91470 - DNA, 480 bp, synthetic construct; identical to SEQ ID NO: 91464
  misc_feature 1..480: note = Description of Artificial Sequence: Synthetic coding sequence
  source 1..480: mol_type = other DNA

SEQ ID NO: 91471 - DNA, 663 bp, synthetic construct
  misc_feature 1..663: note = Description of Artificial Sequence: Synthetic coding sequence
  source 1..663: mol_type = other DNA
atgaccctgcacgccaccagaggcgccgccctgctgagctgggtgaacagcctgcacgtggccgaccccgtggaggccgtgctgcagctgcaggactgcagcatcttcatcaagatcatcgacagaatccacggcaccgaggagggccagcagatcctgaagcagcccgtgagcgagagactggacttcgtgtgcagcttcctgcagaagaacagaaagcaccccagcagccccgagtgcctggtgagcgcccagaaggtgctggagggcagcgagctggagctggccaagatgaccatgctgctgctgtaccacagcaccatgagcagcaagagccccagagactgggagcagttcgagtacaagatccaggccgagctggccgtgatcctgaagttcgtgctggaccacgaggacggcctgaacctgaacgaggacctggagaacttcctgcagaaggcccccgtgcccagcacctgcagcagcaccttccccgaggagctgagcccccccagccaccaggccaagagagagatcagattcctggagctgcagaaggtggccagcagcagcagcggcaacaacttcctgagcggcagccccgccagccccatgggcgacatcctgcagaccccccagttccagatgagaagactgaagtag

SEQ ID NO: 91472 - DNA, 171 bp, synthetic construct
  misc_feature 1..171: note = Description of Artificial Sequence: Synthetic coding sequence
  source 1..171: mol_type = other DNA
atgaccctgcacgccaccagaggcgccgccctgctgagctgggtgaacagcctgcacgtggccgaccccgtggaggccgtgctgcagctgcaggactgcagcatcttcatcaagatcatcgacagaatccacggcaccgaggagggccagcagatcctgaagcagccctag

SEQ ID NO: 91473 - DNA, 1053 bp, synthetic construct
  misc_feature 1..1053: note = Description of Artificial Sequence: Synthetic coding sequence
  source 1..1053: mol_type = other DNA
atgttctgctgcctgggctacgagtggctgagcggcggctgcaagacctggcacagcgcctgggtgatcaacaccctggccgaccacagacacagaggcaccgacttcggcggcagcccctggctgctgatcatcaccgtgttcctgagaagctacaagttcgccatcagcctgtgcaccagctacctgtgcgtgagcttcctgaagaccatcttccccagccagaacggccacgacggcagcaccgacgtgcagcagagagccagaagaagcaacagaagaagacaggagggcatcaagatcgtgctggaggacatcttcaccctgtggagacaggtggagaccaaggtgagagccaagatcagaaagatgaaggtgaccaccaaggtgaacagacacgacaagatcaacggcaagagaaagaccgccaaggagcacctgagaaagctgagcatgaaggagagagagcacggcgagaaggagagacaggtgagcgaggccgaggagaacggcaagctggacatgaaggagatccacacctacatggagatgttccagagagcccaggccctgagaagaagagccgaggactactacagatgcaagatcacccccagcgccagaaagcccctgtgcaacagagtgagaatggccgccgtggagcacagacacagcagcggcctgccctactggccctacctgaccgccgagaccctgaagaacagaatgggccaccagccccccccccccacccagcagcacagcatcatcgacaacagcctgagcctgaagacccccagcgagtgcctgctgacccccctgccccccagcgccctgcccagcgccgacgacaacctgaagacccccgccgagtgcctgctgtaccccctgccccccagcgccgacgacaacctgaagaccccccccgagtgcctgctgacccccctgccccccagcgccccccccagcgtggacgacaacctgaagaccccccccgagtgcgtgtgcagcctgcccttccacccccagagaatgatcatcagcagaaactag

SEQ ID NO: 91474 - DNA, 1053 bp, synthetic construct; identical to SEQ ID NO: 91473
  misc_feature 1..1053: note = Description of Artificial Sequence: Synthetic coding sequence
  source 1..1053: mol_type = other DNA

SEQ ID NO: 91475 - DNA, 1431 bp, synthetic construct
  misc_feature 1..1431: note = Description of Artificial Sequence: Synthetic coding sequence
  source 1..1431: mol_type = other DNA
atggccagccccttcagcggcgccctgcagctgaccgacctggacgacttcatcggccccagccaggagtgcatcaagcccgtgaaggtggagaagagagccggcagcggcgtggccaagatcagaatcgaggacgacggcagctacttccagatcaaccaggacggcggcaccagaagactggagaaggccaaggtgagcctgaacgactgcctggcctgcagcggctgcatcaccagcgccgagaccgtgctgatcacccagcagagccacgaggagctgaagaaggtgctggacgccaacaagatggccgcccccagccagcagagactggtggtggtgagcgtgagcccccagagcagagccagcctggccgccagattccagctgaaccccaccgacaccgccagaaagctgaccagcttcttcaagaagatcggcgtgcacttcgtgttcgacaccgccttcagcagacacttcagcctgctggagagccagagagagttcgtgagaagattcagaggccaggccgactgcagacaggccctgcccctgctggccagcgcctgccccggctggatctgctacgccgagaagacccacggcagcttcatcctgccccacatcagcaccgccagaagcccccagcaggtgatgggcagcctggtgaaggacttcttcgcccagcagcagcacctgacccccgacaagatctaccacgtgaccgtgatgccctgctacgacaagaagctggaggccagcagacccgacttcttcaaccaggagcaccagaccagagacgtggactgcgtgctgaccaccggcgaggtgttcagactgctggaggaggagggcgtgagcctgcccgacctggagcccgcccccctggacagcctgtgcagcggcgccagcgccgaggagcccaccagccacagaggcggcggcagcggcggctacctggagcacgtgttcagacacgccgccagagagctgttcggcatccacgtggccgaggtgacctacaagcccctgagaaacaaggacttccaggaggtgaccctggagaaggagggccaggtgctgctgcacttcgccatggcctacggcttcagaaacatccagaacctggtgcagagactgaagagaggcagatgcccctaccactacgtggaggtgatggcctgccccagcggctgcctgaacggcggcggccagctgcaggcccccgacagacccagcagagagctgctgcagcacgtggagagactgtacggcatggtgagagccgaggcccccgaggacgcccccggcgtgcaggagctgtacacccactggctgcagggcaccgacagcgagtgcgccggcagactgctgcacacccagtaccacgccgtggagaaggccagcaccggcctgggcatcagatggtag

SEQ ID NO: 91476 - DNA, 567 bp, synthetic construct
  misc_feature 1..567: note = Description of Artificial Sequence: Synthetic coding sequence
  source 1..567: mol_type = other DNA
atggccagccccttcagcggcgccctgcagctgaccgacctggacgacttcatcggccccagccaggagtgcatcaagcccgtgaaggtggagaagagagccggcagcggcgtggccaagatcagaatcgaggacgacggcagctacttccagatcaaccaggacggcggcaccagaagactggagaaggccaaggtgagcctgaacgactgcctggcctgcagcggctgcatcaccagcgccgagaccgtgctgatcacccagcagagccacgaggagctgaagaaggtgctggacgccaacaagggctgcaccagcagcagcaccccccccagccagggcaccagcgccagctggagagccagcgagagcctgtgcggcgacagcgaggacagacccaccgccgacagaagatgcccctgctggcccctgcccgcccaggccggcagcgccatgcccagaagactgaccgccgccagcagcagccccaccagcgccccccccggccccagaagcagaagctgggccccctggagcagaaccagcagccccagcagcagcacctag

SEQ ID NO: 91477 - DNA, 1125 bp, synthetic construct
  misc_feature 1..1125: note = Description of Artificial Sequence: Synthetic coding sequence
  source 1..1125: mol_type = other DNA
atggccgcccccagccagcagagactggtggtggtgagcgtgagcccccagagcagagccagcctggccgccagattccagctgaaccccaccgacaccgccagaaagctgaccagcttcttcaagaagatcggcgtgcacttcgtgttcgacaccgccttcagcagacacttcagcctgctggagagccagagagagttcgtgagaagattcagaggccaggccgactgcagacaggccctgcccctgctggccagcgcctgccccggctggatctgctacgccgagaagacccacggcagcttcatcctgccccacatcagcaccgccagaagcccccagcaggtgatgggcagcctggtgaaggacttcttcgcccagcagcagcacctgacccccgacaagatctaccacgtgaccgtgatgccctgctacgacaagaagctggaggccagcagacccgacttcttcaaccaggagcaccagaccagagacgtggactgcgtgctgaccaccggcgaggtgttcagactgctggaggaggagggcgtgagcctgcccgacctggagcccgcccccctggacagcctgtgcagcggcgccagcgccgaggagcccaccagccacagaggcggcggcagcggcggctacctggagcacgtgttcagacacgccgccagagagctgttcggcatccacgtggccgaggtgacctacaagcccctgagaaacaaggacttccaggaggtgaccctggagaaggagggccaggtgctgctgcacttcgccatggcctacggcttcagaaacatccagaacctggtgcagagactgaagagaggcagatgcccctaccactacgtggaggtgatggcctgccccagcggctgcctgaacggcggcggccagctgcaggcccccgacagacccagcagagagctgctgcagcacgtggagagactgtacggcatggtgagagccgaggcccccgaggacgcccccggcgtgcaggagctgtacacccactggctgcagggcaccgacagcgagtgcgccggcagactgctgcacacccagtaccacgccgtggagaaggccagcaccggcctgggcatcagatggtag

SEQ ID NO: 91478 - DNA, 4284 bp, synthetic construct
  misc_feature 1..4284: note = Description of Artificial Sequence: Synthetic coding sequence
  source 1..4284: mol_type = other DNA
atgctgctgcccagcgacgtggccagactggtgctgggctacctgcagcaggagaacctgatcagcacctgccagaccttcatcctggagagcagcgacctgaaggagtacgccgagcactgcaccgacgagggcttcatccccgcctgcctgctgagcctgttcggcaagaacctgaccaccatcctgaacgagtacgtggccatgaagaccaaggagaccagcaacaacgtgcccgccatcatgagcagcctgtggaagaagctggaccacaccctgagccagatcagaagcatgcagagcagccccagattcgccggcagccagagagccagaaccagaaccggcatcgccgagatcaagagacagagaaagctggccagccagaccgcccccgccagcgccgagctgctgaccctgccctacctgagcggccagttcaccaccccccccagcaccggcacccaggtgaccagacccagcggccagatcagcgaccccagcagaagctacttcgtggtggtgaaccacagccagagccaggacaccgtgaccaccggcgaggccctgaacgtgatccccggcgcccaggagaagaaggcccacgccagcctgatgagccccggcagaagaaagagcgagagccagagaaagagcaccaccctgagcggcccccacagcaccatcagaaacttccaggaccccaacgccttcgccgtggagaagcagatggtgatcgagaacgccagagagaagatcctgagcaacaagagcctgcaggagaagctggccgagaacatcaacaagttcctgaccagcgacaacaacatcgcccaggtgcccaagcagaccgacaacaaccccaccgagcccgagaccagcatcgacgagttcctgggcctgcccagcgagatccacatgagcgaggaggccatccaggacatcctggagcagaccgagagcgaccccgccttccaggccctgttcgacctgttcgactacggcaagaccaagaacaacaagaacatcagccagagcatcagcagccagcccatggagagcaaccccagcatcgtgctggccgacgagaccaacctggccgtgaagggcagcttcgagaccgaggagagcgacggccagagcggccagcccgccttctgcaccagctaccagaacgacgaccccctgaacgccctgaagaacagcaacaaccacgacgtgctgagacaggaggaccaggagaacttcagccagatcagcaccagcatccagaagaaggccttcaagaccgccgtgcccaccgagcagaagtgcgacatcgacatcaccttcgagagcgtgcccaacctgaacgacttcaaccagagaggcaacagcaacgccgagtgcaacccccactgcgccgagctgtacaccaaccagatgagcaccgagaccgagatggccatcggcatcgagaagaacagcctgagcagcaacgtgcccagcgagagccagctgcagcccgaccagcccgacatccccatcaccagcttcgtgagcctgggctgcgaggccaacaacgagaacctgatcctgagcggcaagagcagccagctgctgagccaggacaccagcctgaccggcaagcccagcaagaagagccagttctgcgagaacagcaacgacaccgtgaagctgaagatcaacttccacggcagcaagagcagcgacagcagcgaggtgcacaagagcaagatcgagatcaacgtgctggagcccgtgatgagccagctgagcaactgccaggacaacagctgcctgcagagcgagatcctgcccgtgagcgtggagagcagccacctgaacgtgagcggccaggtggagatccacctgggcgacagcctgagcagcaccaagcagcccagcaacgacagcgccagcgtggagctgaaccacaccgagaacgaggcccaggccagcaagagcgagaacagccaggagcccagcagcagcgtgaaggaggagaacaccatcttcctgagcctgggcggcaacgccaactgcgagaaggtggccctgaccccccccgagggcacccccgtggagaacagccacagcctgccccccgagagcgtgtgcagcagcgtgggcgacagccaccccgagagccagaacaccgacgacaagcccagcagcaacaacagcgccgagatcgacgccagcaacatcgtgagcctgaaggtgatcatcagcgacgaccccttcgtgagcagcgacaccgagctgaccagcgccgtgagcagcatcaacggcgagaacctgcccaccatcatcctgagcagccccaccaagagccccaccaagaacgccgagctggtgaagtgcctgagcagcgaggagaccgtgggcgccgtggtgtacgccgaggtgggcgacagcgccagcatggagcagagcctgctgaccttcaagagcgaggacagcgccgtgaacaacacccagaacgaggacggcatcgccttcagcgccaacgtgaccccctgcgtgagcaaggacggcggctacatccagctgatgcccgccaccagcaccgccttcggcaacagcaacaacatcctgatcgccacctgcgtgaccgaccccaccgccctgggcaccagcgtgagccagagcaacgtggtggtgctgcccggcaacagcgcccccatgaccgcccagcccctgcccccccagctgcagaccccccccagaagcaacagcgtgttcgccgtgaaccaggccgtgagccccaacttcagccagggcagcgccatcatcatcgccagccccgtgcagcccgtgctgcagggcatggtgggcatgatccccgtgagcgtggtgggccagaacggcaacaacttcagcaccccccccagacaggtgctgcacatgcccctgaccgcccccgtgtgcaacagaagcatcccccagttccccgtgccccccaagagccagaaggcccagggcctgagaaacaagccctgcatcggcaagcaggtgaacaacctggtggacagcagcggccacagcgtgggctgccacgcccagaagaccgaggtgagcgacaagagcatcgccaccgacctgggcaagaagagcgaggagaccaccgtgcccttccccgaggagagcatcgtgcccgccgccaagccctgccacagaagagtgctgtgcttcgacagcaccaccgcccccgtggccaacacccagggccccaaccacaagatggtgagccagaacaaggagagaaacgccgtgagcttccccaacctggacagccccaacgtgagcagcaccctgaagccccccagcaacaacgccatcaagagagagaaggagaagccccccctgcccaagatcctgagcaagagcgagagcgccatcagcagacacaccaccatcagagagacccagagcgagaagaaggtgagccccaccgagatcgtgctggagagcttccacaaggccaccgccaacaaggagaacgagctgtgcagcgacgtggagagacagaagaaccccgagaacagcaagctgagcatcggccagcagaacggcggcctgagaagcgagaagagcatcgccagcctgcaggagatgaccaagaagcagggcaccagcagcaacaacaagaacgtgctgagcgtgggcaccgccgtgaaggacctgaagcaggagcagaccaagagcgccagcagcctgatcaccaccgagatgctgcaggacatccagagacacagcagcgtgagcagactggccgacagcagcgacctgcccgtgcccagaacccccggcagcggcgccggcgagaagcacaaggaggagcccatcgacatcatcaaggcccccagcagcagaagattcagcgaggacagcagcaccagcaaggtgatggtgccccccgtgacccccgacctgcccgcctgcagccccgccagcgagaccggcagcgagaacagcgtgaacatggccgcccacaccctgatgatcctgagcagagccgccatcagcagaaccaccagcgccacccccctgaaggacaacacccagcagttcagagccagcagcagaagcaccaccaagaagagaaagatcgaggagctggacgagagagagagaaacagcagacccagcagcaagaacctgaccaacagcagcatccccatgaagaagaagaagatcaagaagaagaagctgcccagcagcttccccgccggcatggacgtggacaagttcctgctgagcctgcactacgacgagtag

SEQ ID NO: 91479 - DNA, 7284 bp, synthetic construct
  misc_feature 1..7284: note = Description of Artificial Sequence: Synthetic coding sequence
  source 1..7284: mol_type = other DNA
atgcccctgaagaccagaaccgccctgagcgacgaccccgacagcagcaccagcaccctgggcaacatgctggagctgcccggcaccagcagcagcagcaccagccaggagctgcccttctgccagcccaagaagaagagcacccccctgaagtacgaggtgggcgacctgatctgggccaagttcaagagaagaccctggtggccctgcagaatctgcagcgaccccctgatcaacacccacagcaagatgaaggtgagcaacagaagaccctacagacagtactacgtggaggccttcggcgaccccagcgagagagcctgggtggccggcaaggccatcgtgatgttcgagggcagacaccagttcgaggagctgcccgtgctgagaagaagaggcaagcagaaggagaagggctacagacacaaggtgccccagaagatcctgagcaagtgggaggccagcgtgggcctggccgagcagtacgacgtgcccaagggcagcaagaacagaaagtgcatccccggcagcatcaagctggacagcgaggaggacatgcccttcgaggactgcaccaacgaccccgagagcgagcacgacctgctgctgaacggctgcctgaagagcctggccttcgacagcgagcacagcgccgacgagaaggagaagccctgcgccaagagcagagccagaaagagcagcgacaaccccaagagaaccagcgtgaagaagggccacatccagttcgaggcccacaaggacgagagaagaggcaagatccccgagaacctgggcctgaacttcatcagcggcgacatcagcgacacccaggccagcaacgagctgagcagaatcgccaacagcctgaccggcagcaacaccgcccccggcagcttcctgttcagcagctgcggcaagaacaccgccaagaaggagttcgagaccagcaacggcgacagcctgctgggcctgcccgagggcgccctgatcagcaagtgcagcagagagaagaacaagccccagagaagcctggtgtgcggcagcaaggtgaagctgtgctacatcggcgccggcgacgaggagaagagaagcgacagcatcagcatctgcaccaccagcgacgacggcagcagcgacctggaccccatcgagcacagcagcgagagcgacaacagcgtgctggagatccccgacgccttcgacagaaccgagaacatgctgagcatgcagaagaacgagaagatcaagtacagcagattcgccgccaccaacaccagagtgaaggccaagcagaagcccctgatcagcaacagccacaccgaccacctgatgggctgcaccaagagcgccgagcccggcaccgagaccagccaggtgaacctgagcgacctgaaggccagcaccctggtgcacaagccccagagcgacttcaccaacgacgccctgagccccaagttcaacctgagcagcagcatcagcagcgagaacagcctgatcaagggcggcgccgccaaccaggccctgctgcacagcaagagcaagcagcccaagttcagaagcatcaagtgcaagcacaaggagaaccccgtgatggccgagccccccgtgatcaacgaggagtgcagcctgaagtgctgcagcagcgacaccaagggcagccccctggccagcatcagcaagagcggcaaggtggacggcctgaagctgctgaacaacatgcacgagaagaccagagacagcagcgacatcgagaccgccgtggtgaagcacgtgctgagcgagctgaaggagctgagctacagaagcctgggcgaggacgtgagcgacagcggcaccagcaagcccagcaagcccctgctgttcagcagcgccagcagccagaaccacatccccatcgagcccgactacaagttcagcaccctgctgatgatgctgaaggacatgcacgacagcaagaccaaggagcagagactgatgaccgcccagaacctggtgagctacagaagccccggcagaggcgactgcagcaccaacagccccgtgggcgtgagcaaggtgctggtgagcggcggcagcacccacaacagcgagaagaagggcgacggcacccagaacagcgccaaccccagccccagcggcggcgacagcgccctgagcggcgagctgagcgccagcctgcccggcctgctgagcgacaagagagacctgcccgccagcggcaagagcagaagcgactgcgtgaccagaagaaactgcggcagaagcaagcccagcagcaagctgagagacgccttcagcgcccagatggtgaagaacaccgtgaacagaaaggccctgaagaccgagagaaagagaaagctgaaccagctgcccagcgtgaccctggacgccgtgctgcagggcgacagagagagaggcggcagcctgagaggcggcgccgaggaccccagcaaggaggaccccctgcagatcatgggccacctgaccagcgaggacggcgaccacttcagcgacgtgcacttcgacagcaaggtgaagcagagcgaccccggcaagatcagcgagaagggcctgagcttcgagaacggcaagggccccgagctggacagcgtgatgaacagcgagaacgacgagctgaacggcgtgaaccaggtggtgcccaagaagagatggcagagactgaaccagagaagaaccaagcccagaaagagaatgaacagattcaaggagaaggagaacagcgagtgcgccttcagagtgctgctgcccagcgaccccgtgcaggagggcagagacgagttccccgagcacagaacccccagcgccagcatcctggaggagcccctgaccgagcagaaccacgccgactgcctggacagcgccggccccagactgaacgtgtgcgacaagagcagcgccagcatcggcgacatggagaaggagcccggcatccccagcctgaccccccaggccgagctgcccgagcccgccgtgagaagcgagaagaagagactgagaaagcccagcaagtggctgctggagtacaccgaggagtacgaccagatcttcgcccccaagaagaagcagaagaaggtgcaggagcaggtgcacaaggtgagcagcagatgcgaggaggagagcctgctggccagaggcagaagcagcgcccagaacaagcaggtggacgagaacagcctgatcagcaccaaggaggagccccccgtgctggagagagaggcccccttcctggagggccccctggcccagagcgagctgggcggcggccacgccgagctgccccagctgaccctgagcgtgcccgtggcccccgaggtgagccccagacccgccctggagagcgaggagctgctggtgaagacccccggcaactacgagagcaagagacagagaaagcccaccaagaagctgctggagagcaacgacctggaccccggcttcatgcccaagaagggcgacctgggcctgagcaagaagtgctacgaggccggccacctggagaacggcatcaccgagagctgcgccaccagctacagcaaggacttcggcggcggcaccaccaagatcttcgacaagcccagaaagagaaagagacagagacacgccgccgccaagatgcagtgcaagaaggtgaagaacgacgacagcagcaaggagatccccggcagcgagggcgagctgatgccccacagaaccgccaccagccccaaggagaccgtggaggagggcgtggagcacgaccccggcatgcccgccagcaagaagatgcagggcgagagaggcggcggcgccgccctgaaggagaacgtgtgccagaactgcgagaagctgggcgagctgctgctgtgcgaggcccagtgctgcggcgccttccacctggagtgcctgggcctgaccgagatgcccagaggcaagttcatctgcaacgagtgcagaaccggcatccacacctgcttcgtgtgcaagcagagcggcgaggacgtgaagagatgcctgctgcccctgtgcggcaagttctaccacgaggagtgcgtgcagaagtacccccccaccgtgatgcagaacaagggcttcagatgcagcctgcacatctgcatcacctgccacgccgccaaccccgccaacgtgagcgccagcaagggcagactgatgagatgcgtgagatgccccgtggcctaccacgccaacgacttctgcctggccgccggcagcaagatcctggccagcaacagcatcatctgccccaaccacttcacccccagaagaggctgcagaaaccacgagcacgtgaacgtgagctggtgcttcgtgtgcagcgagggcggcagcctgctgtgctgcgacagctgccccgccgccttccacagagagtgcctgaacatcgacatccccgagggcaactggtactgcaacgactgcaaggccggcaagaagccccactacagagagatcgtgtgggtgaaggtgggcagatacagatggtggcccgccgagatctgccaccccagagccgtgcccagcaacatcgacaagatgagacacgacgtgggcgagttccccgtgctgttcttcggcagcaacgactacctgtggacccaccaggccagagtgttcccctacatggagggcgacgtgagcagcaaggacaagatgggcaagggcgtggacggcacctacaagaaggccctgcaggaggccgccgccagattcgaggagctgaaggcccagaaggagctgagacagctgcaggaggacagaaagaacgacaagaagccccccccctacaagcacatcaaggtgaacagacccatcggcagagtgcagatcttcaccgccgacctgagcgagatccccagatgcaactgcaaggccaccgacgagaacccctgcggcatcgacagcgagtgcatcaacagaatgctgctgtacgagtgccaccccaccgtgtgccccgccggcggcagatgccagaaccagtgcttcagcaagagacagtaccccgaggtggagatcttcagaaccctgcagagaggctggggcctgagaaccaagaccgacatcaagaagggcgagttcgtgaacgagtacgtgggcgagctgatcgacgaggaggagtgcagagccagaatcagatacgcccaggagcacgacatcaccaacttctacatgctgaccctggacaaggacagaatcatcgacgccggccccaagggcaactacgccagattcatgaaccactgctgccagcccaactgcgagacccagaagtggagcgtgaacggcgacaccagagtgggcctgttcgccctgagcgacatcaaggccggcaccgagctgaccttcaactacaacctggagtgcctgggcaacggcaagaccgtgtgcaagtgcggcgcccccaactgcagcggcttcctgggcgtgagacccaagaaccagcccatcgccaccgaggagaagagcaagaagttcaagaagaagcagcagggcaagagaagaacccagggcgagatcaccaaggagagagaggacgagtgcttcagctgcggcgacgccggccagctggtgagctgcaagaagcccggctgccccaaggtgtaccacgccgactgcctgaacctgaccaagagacccgccggcaagtgggagtgcccctggcaccagtgcgacatctgcggcaaggaggccgccagcttctgcgagatgtgccccagcagcttctgcaagcagcacagagagggcatgctgttcatcagcaagctggacggcagactgagctgcaccgagcacgacccctgcggccccaaccccctggagcccggcgagatcagagagtacgtgcccccccccgtgcccctgccccccggccccagcacccacctggccgagcagagcaccggcatggccgcccaggcccccaagatgagcgacaagccccccgccgacaccaaccagatgctgagcctgagcaagaaggccctggccggcacctgccagagacccctgctgcccgagagacccctggagagaaccgacagcagaccccagcccctggacaaggtgagagacctggccggcagcggcaccaagagccagagcctggtgagcagccagagacccctggacagaccccccgccgtggccggccccagaccccagctgagcgacaagcccagccccgtgaccagccccagcagcagccccagcgtgagaagccagcccctggagagacccctgggcaccgccgaccccagactggacaagagcatcggcgccgccagccccagaccccagagcctggagaagaccagcgtgcccaccggcctgagactgcccccccccgacagactgctgatcaccagcagccccaagccccagaccagcgacagacccaccgacaagccccacgccagcctgagccagagactgcccccccccgagaaggtgctgagcgccgtggtgcagaccctggtggccaaggagaaggccctgagacccgtggaccagaacacccagagcaagaacagagccgccctggtgatggacctgatcgacctgacccccagacagaaggagagagccgccagcccccaccaggtgaccccccaggccgacgagaagatgcccgtgctggagagcagcagctggcccgccagcaagggcctgggccacatgcccagagccgtggagaagggctgcgtgagcgaccccctgcagaccagcggcaaggccgccgcccccagcgaggacccctggcaggccgtgaagagcctgacccaggccagactgctgagccagccccccgccaaggccttcctgtacgagcccaccacccaggccagcggcagagccagcgccggcgccgagcagacccccggccccctgagccagagccccggcctggtgaagcaggccaagcagatggtgggcggccagcagctgcccgccctggccgccaagagcggccagagcttcagaagcctgggcaaggcccccgccagcctgcccaccgaggagaagaagctggtgaccaccgagcagagcccctgggccctgggcaaggccagcagcagagccggcctgtggcccatcgtggccggccagaccctggcccagagctgctggagcgccggcagcacccagaccctggcccagacctgctggagcctgggcagaggccaggaccccaagcccgagcagaacaccctgcccgccctgaaccaggcccccagcagccacaagtgcgccgagagcgagcagaagtag

SEQ ID NO: 91480 - DNA, 7284 bp, synthetic construct; identical to SEQ ID NO: 91479
  misc_feature 1..7284: note = Description of Artificial Sequence: Synthetic coding sequence
  source 1..7284: mol_type = other DNA

SEQ ID NO: 91481 - DNA, 1692 bp, synthetic construct
  misc_feature 1..1692: note = Description of Artificial Sequence: Synthetic coding sequence
  source 1..1692: mol_type = other DNA
atgcccctgaagaccagaaccgccctgagcgacgaccccgacagcagcaccagcaccctgggcaacatgctggagctgcccggcaccagcagcagcagcaccagccaggagctgcccttctgccagcccaagaagaagagcacccccctgaagtacgaggtgggcgacctgatctgggccaagttcaagagaagaccctggtggccctgcagaatctgcagcgaccccctgatcaacacccacagcaagatgaaggtgagcaacagaagaccctacagacagtactacgtggaggccttcggcgaccccagcgagagagcctgggtggccggcaaggccatcgtgatgttcgagggcagacaccagttcgaggagctgcccgtgctgagaagaagaggcaagcagaaggagaagggctacagacacaaggtgccccagaagatcctgagcaagtgggaggccagcgtgggcctggccgagcagtacgacgtgcccaagggcagcaagaacagaaagtgcatccccggcagcatcaagctggacagcgaggaggacatgcccttcgaggactgcaccaacgaccccgagagcgagcacgacctgctgctgaacggctgcctgaagagcctggccttcgacagcgagcacagcgccgacgagaaggagaagccctgcgccaagagcagagccagaaagagcagcgacaaccccaagagaaccagcgtgaagaagggccacatccagttcgaggcccacaaggacgagagaagaggcaagatccccgagaacctgggcctgaacttcatcagcggcgacatcagcgacacccaggccagcaacgagctgagcagaatcgccaacagcctgaccggcagcaacaccgcccccggcagcttcctgttcagcagctgcggcaagaacaccgccaagaaggagttcgagaccagcaacggcgacagcctgctgggcctgcccgagggcgccctgatcagcaagtgcagcagagagaagaacaagccccagagaagcctggtgtgcggcagcaaggtgaagctgtgctacatcggcgccggcgacgaggagaagagaagcgacagcatcagcatctgcaccaccagcgacgacggcagcagcgacctggaccccatcgagcacagcagcgagagcgacaacagcgtgctggagatccccgacgccttcgacagaaccgagaacatgctgagcatgcagaagaacgagaagatcaagtacagcagattcgccgccaccaacaccagagtgaaggccaagcagaagcccctgatcagcaacagccacaccgaccacctgatgggctgcaccaagagcgccgagcccggcaccgagaccagccaggtgaacctgagcgacctgaaggccagcaccctggtgcacaagccccagagcgacttcaccaacgacgccctgagccccaagttcaacctgagcagcagcatcagcagcgagaacagcctgatcaagggcggcgccgccaaccaggccctgctgcacagcaagagcaagcagcccaagttcagaagcatcaagtgcaagcacaaggagaaccccgtgatggccgagccccccgtgatcaacgaggagtgcagcctgaagtgctgcagcagcgacaccaagggcagccccctggccagcatcagcaagacccccccctag

SEQ ID NO: 91482 - DNA, 7782 bp, synthetic construct
  misc_feature 1..7782: note = Description of Artificial Sequence: Synthetic coding sequence
  source 1..7782: mol_type = other DNA
atggaccagacctgcgagctgcccagaagaaactgcctgctgcccttcagcaaccccgtgaacctggacgcccccgaggacaaggacagccccttcggcaacggccagagcaacttcagcgagcccctgaacggctgcaccatgcagctgagcaccgtgagcggcaccagccagaacgcctacggccaggacagccccagctgctacatccccctgagaagactgcaggacctggccagcatgatcaacgtggagtacctgaacggcagcgccgacggcagcgagagcttccaggaccccgagaagagcgacagcagagcccagacccccatcgtgtgcaccagcctgagccccggcggccccaccgccctggccatgaagcaggagcccagctgcaacaacagccccgagctgcaggtgaaggtgaccaagaccatcaagaacggcttcctgcacttcgagaacttcacctgcgtggacgacgccgacgtggacagcgagatggaccccgagcagcccgtgaccgaggacgagagcatcgaggagatcttcgaggagacccagaccaacgccacctgcaactacgagaccaagagcgagaacggcgtgaaggtggccatgggcagcgagcaggacagcacccccgagagcagacacggcgccgtgaagagccccttcctgcccctggccccccagaccgagacccagaagaacaagcagagaaacgaggtggacggcagcaacgagaaggccgccctgctgcccgcccccttcagcctgggcgacaccaacatcaccatcgaggagcagctgaacagcatcaacctgagcttccaggacgaccccgacagcagcaccagcaccctgggcaacatgctggagctgcccggcaccagcagcagcagcaccagccaggagctgcccttcgtgccccagaagatcctgagcaagtgggaggccagcgtgggcctggccgagcagtacgacgtgcccaagggcagcaagaacagaaagtgcatccccggcagcatcaagctggacagcgaggaggacatgcccttcgaggactgcaccaacgaccccgagagcgagcacgacctgctgctgaacggctgcctgaagagcctggccttcgacagcgagcacagcgccgacgagaaggagaagccctgcgccaagagcagagccagaaagagcagcgacaaccccaagagaaccagcgtgaagaagggccacatccagttcgaggcccacaaggacgagagaagaggcaagatccccgagaacctgggcctgaacttcatcagcggcgacatcagcgacacccaggccagcaacgagctgagcagaatcgccaacagcctgaccggcagcaacaccgcccccggcagcttcctgttcagcagctgcggcaagaacaccgccaagaaggagttcgagaccagcaacggcgacagcctgctgggcctgcccgagggcgccctgatcagcaagtgcagcagagagaagaacaagccccagagaagcctggtgtgcggcagcaaggtgaagctgtgctacatcggcgccggcgacgaggagaagagaagcgacagcatcagcatctgcaccaccagcgacgacggcagcagcgacctggaccccatcgagcacagcagcgagagcgacaacagcgtgctggagatccccgacgccttcgacagaaccgagaacatgctgagcatgcagaagaacgagaagatcaagtacagcagattcgccgccaccaacaccagagtgaaggccaagcagaagcccctgatcagcaacagccacaccgaccacctgatgggctgcaccaagagcgccgagcccggcaccgagaccagccaggtgaacctgagcgacctgaaggccagcaccctggtgcacaagccccagagcgacttcaccaacgacgccctgagccccaagttcaacctgagcagcagcatcagcagcgagaacagcctgatcaagggcggcgccgccaaccaggccctgctgcacagcaagagcaagcagcccaagttcagaagcatcaagtgcaagcacaaggagaaccccgtgatggccgagccccccgtgatcaacgaggagtgcagcctgaagtgctgcagcagcgacaccaagggcagccccctggccagcatcagcaagagcggcaaggtggacggcctgaagctgctgaacaacatgcacgagaagaccagagacagcagcgacatcgagaccgccgtggtgaagcacgtgctgagcgagctgaaggagctgagctacagaagcctgggcgaggacgtgagcgacagcggcaccagcaagcccagcaagcccctgctgttcagcagcgccagcagccagaaccacatccccatcgagcccgactacaagttcagcaccctgctgatgatgctgaaggacatgcacgacagcaagaccaaggagcagagactgatgaccgcccagaacctggtgagctacagaagccccggcagaggcgactgcagcaccaacagccccgtgggcgtgagcaaggtgctggtgagcggcggcagcacccacaacagcgagaagaagggcgacggcacccagaacagcgccaaccccagccccagcggcggcgacagcgccctgagcggcgagctgagcgccagcctgcccggcctgctgagcgacaagagagacctgcccgccagcggcaagagcagaagcgactgcgtgaccagaagaaactgcggcagaagcaagcccagcagcaagctgagagacgccttcagcgcccagatggtgaagaacaccgtgaacagaaaggccctgaagaccgagagaaagagaaagctgaaccagctgcccagcgtgaccctggacgccgtgctgcagggcgacagagagagaggcggcagcctgagaggcggcgccgaggaccccagcaaggaggaccccctgcagatcatgggccacctgaccagcgaggacggcgaccacttcagcgacgtgcacttcgacagcaaggtgaagcagagcgaccccggcaagatcagcgagaagggcctgagcttcgagaacggcaagggccccgagctggacagcgtgatgaacagcgagaacgacgagctgaacggcgtgaaccaggtggtgcccaagaagagatggcagagactgaaccagagaagaaccaagcccagaaagagaatgaacagattcaaggagaaggagaacagcgagtgcgccttcagagtgctgctgcccagcgaccccgtgcaggagggcagagacgagttccccgagcacagaacccccagcgccagcatcctggaggagcccctgaccgagcagaaccacgccgactgcctggacagcgccggccccagactgaacgtgtgcgacaagagcagcgccagcatcggcgacatggagaaggagcccggcatccccagcctgaccccccaggccgagctgcccgagcccgccgtgagaagcgagaagaagagactgagaaagcccagcaagtggctgctggagtacaccgaggagtacgaccagatcttcgcccccaagaagaagcagaagaaggtgcaggagcaggtgcacaaggtgagcagcagatgcgaggaggagagcctgctggccagaggcagaagcagcgcccagaacaagcaggtggacgagaacagcctgatcagcaccaaggaggagccccccgtgctggagagagaggcccccttcctggagggccccctggcccagagcgagctgggcggcggccacgccgagctgccccagctgaccctgagcgtgcccgtggcccccgaggtgagccccagacccgccctggagagcgaggagctgctggtgaagacccccggcaactacgagagcaagagacagagaaagcccaccaagaagctgctggagagcaacgacctggaccccggcttcatgcccaagaagggcgacctgggcctgagcaagaagtgctacgaggccggccacctggagaacggcatcaccgagagctgcgccaccagctacagcaaggacttcggcggcggcaccaccaagatcttcgacaagcccagaaagagaaagagacagagacacgccgccgccaagatgcagtgcaagaaggtgaagaacgacgacagcagcaaggagatccccggcagcgagggcgagctgatgccccacagaaccgccaccagccccaaggagaccgtggaggagggcgtggagcacgaccccggcatgcccgccagcaagaagatgcagggcgagagaggcggcggcgccgccctgaaggagaacgtgtgccagaactgcgagaagctgggcgagctgctgctgtgcgaggcccagtgctgcggcgccttccacctggagtgcctgggcctgaccgagatgcccagaggcaagttcatctgcaacgagtgcagaaccggcatccacacctgcttcgtgtgcaagcagagcggcgaggacgtgaagagatgcctgctgcccctgtgcggcaagttctaccacgaggagtgcgtgcagaagtacccccccaccgtgatgcagaacaagggcttcagatgcagcctgcacatctgcatcacctgccacgccgccaaccccgccaacgtgagcgccagcaagggcagactgatgagatgcgtgagatgccccgtggcctaccacgccaacgacttctgcctggccgccggcagcaagatcctggccagcaacagcatcatctgccccaaccacttcacccccagaagaggctgcagaaaccacgagcacgtgaacgtgagctggtgcttcgtgtgcagcgagggcggcagcctgctgtgctgcgacagctgccccgccgccttccacagagagtgcctgaacatcgacatccccgagggcaactggtactgcaacgactgcaaggccggcaagaagccccactacagagagatcgtgtgggtgaaggtgggcagatacagatggtggcccgccgagatctgccaccccagagccgtgcccagcaacatcgacaagatgagacacgacgtgggcgagttccccgtgctgttcttcggcagcaacgactacctgtggacccaccaggccagagtgttcccctacatggagggcgacgtgagcagcaaggacaagatgggcaagggcgtggacggcacctacaagaaggccctgcaggaggccgccgccagattcgaggagctgaaggcccagaaggagctgagacagctgcaggaggacagaaagaacgacaagaagccccccccctacaagcacatcaaggtgaacagacccatcggcagagtgcagatcttcaccgccgacctgagcgagatccccagatgcaactgcaaggccaccgacgagaacccctgcggcatcgacagcgagtgcatcaacagaatgctgctgtacgagtgccaccccaccgtgtgccccgccggcggcagatgccagaaccagtgcttcagcaagagacagtaccccgaggtggagatcttcagaaccctgcagagaggctggggcctgagaaccaagaccgacatcaagaagggcgagttcgtgaacgagtacgtgggcgagctgatcgacgaggaggagtgcagagccagaatcagatacgcccaggagcacgacatcaccaacttctacatgctgaccctggacaaggacagaatcatcgacgccggccccaagggcaactacgccagattcatgaaccactgctgccagcccaactgcgagacccagaagtggagcgtgaacggcgacaccagagtgggcctgttcgccctgagcgacatcaaggccggcaccgagctgaccttcaactacaacctggagtgcctgggcaacggcaagaccgtgtgcaagtgcggcgcccccaactgcagcggcttcctgggcgtgagacccaagaaccagcccatcgccaccgaggagaagagcaagaagttcaagaagaagcagcagggcaagagaagaacccagggcgagatcaccaaggagagagaggacgagtgcttcagctgcggcgacgccggccagctggtgagctgcaagaagcccggctgccccaaggtgtaccacgccgactgcctgaacctgaccaagagacccgccggcaagtgggagtgcccctggcaccagtgcgacatctgcggcaaggaggccgccagcttctgcgagatgtgccccagcagcttctgcaagcagcacagagagggcatgctgttcatcagcaagctggacggcagactgagctgcaccgagcacgacccctgcggccccaaccccctggagcccggcgagatcagagagtacgtgcccccccccgtgcccctgccccccggccccagcacccacctggccgagcagagcaccggcatggccgcccaggcccccaagatgagcgacaagccccccgccgacaccaaccagatgctgagcctgagcaagaaggccctggccggcacctgccagagacccctgctgcccgagagacccctggagagaaccgacagcagaccccagcccctggacaaggtgagagacctggccggcagcggcaccaagagccagagcctggtgagcagccagagacccctggacagaccccccgccgtggccggccccagaccccagctgagcgacaagcccagccccgtgaccagccccagcagcagccccagcgtgagaagccagcccctggagagacccctgggcaccgccgaccccagactggacaagagcatcggcgccgccagccccagaccccagagcctggagaagaccagcgtgcccaccggcctgagactgcccccccccgacagactgctgatcaccagcagccccaagccccagaccagcgacagacccaccgacaagccccacgccagcctgagccagagactgcccccccccgagaaggtgctgagcgccgtggtgcagaccctggtggccaaggagaaggccctgagacccgtggaccagaacacccagagcaagaacagagccgccctggtgatggacctgatcgacctgacccccagacagaaggagagagccgccagcccccaccaggtgaccccccaggccgacgagaagatgcccgtgctggagagcagcagctggcccgccagcaagggcctgggccacatgcccagagccgtggagaagggctgcgtgagcgaccccctgcagaccagcggcaaggccgccgcccccagcgaggacccctggcaggccgtgaagagcctgacccaggccagactgctgagccagccccccgccaaggccttcctgtacgagcccaccacccaggccagcggcagagccagcgccggcgccgagcagacccccggccccctgagccagagccccggcctggtgaagcaggccaagcagatggtgggcggccagcagctgcccgccctggccgccaagagcggccagagcttcagaagcctgggcaaggcccccgccagcctgcccaccgaggagaagaagctggtgaccaccgagcagagcccctgggccctgggcaaggccagcagcagagccggcctgtggcccatcgtggccggccagaccctggcccagagctgctggagcgccggcagcacccagaccctggcccagacctgctggagcctgggcagaggccaggaccccaagcccgagcagaacaccctgcccgccctgaaccaggcccccagcagccacaagtgcgccgagagcgagcagaagtag

SEQ ID NO: 91483 - DNA, 8091 bp, synthetic construct
  misc_feature 1..8091: note = Description of Artificial Sequence: Synthetic coding sequence
  source 1..8091: mol_type = other DNA
atggaccagacctgcgagctgcccagaagaaactgcctgctgcccttcagcaaccccgtgaacctggacgcccccgaggacaaggacagccccttcggcaacggccagagcaacttcagcgagcccctgaacggctgcaccatgcagctgagcaccgtgagcggcaccagccagaacgcctacggccaggacagccccagctgctacatccccctgagaagactgcaggacctggccagcatgatcaacgtggagtacctgaacggcagcgccgacggcagcgagagcttccaggaccccgagaagagcgacagcagagcccagacccccatcgtgtgcaccagcctgagccccggcggccccaccgccctggccatgaagcaggagcccagctgcaacaacagccccgagctgcaggtgaaggtgaccaagaccatcaagaacggcttcctgcacttcgagaacttcacctgcgtggacgacgccgacgtggacagcgagatggaccccgagcagcccgtgaccgaggacgagagcatcgaggagatcttcgaggagacccagaccaacgccacctgcaactacgagaccaagagcgagaacggcgtgaaggtggccatgggcagcgagcaggacagcacccccgagagcagacacggcgccgtgaagagccccttcctgcccctggccccccagaccgagacccagaagaacaagcagagaaacgaggtggacggcagcaacgagaaggccgccctgctgcccgcccccttcagcctgggcgacaccaacatcaccatcgaggagcagctgaacagcatcaacctgagcttccaggacgaccccgacagcagcaccagcaccctgggcaacatgctggagctgcccggcaccagcagcagcagcaccagccaggagctgcccttctgccagcccaagaagaagagcacccccctgaagtacgaggtgggcgacctgatctgggccaagttcaagagaagaccctggtggccctgcagaatctgcagcgaccccctgatcaacacccacagcaagatgaaggtgagcaacagaagaccctacagacagtactacgtggaggccttcggcgaccccagcgagagagcctgggtggccggcaaggccatcgtgatgttcgagggcagacaccagttcgaggagctgcccgtgctgagaagaagaggcaagcagaaggagaagggctacagacacaaggtgccccagaagatcctgagcaagtgggaggccagcgtgggcctggccgagcagtacgacgtgcccaagggcagcaagaacagaaagtgcatccccggcagcatcaagctggacagcgaggaggacatgcccttcgaggactgcaccaacgaccccgagagcgagcacgacctgctgctgaacggctgcctgaagagcctggccttcgacagcgagcacagcgccgacgagaaggagaagccctgcgccaagagcagagccagaaagagcagcgacaaccccaagagaaccagcgtgaagaagggccacatccagttcgaggcccacaaggacgagagaagaggcaagatccccgagaacctgggcctgaacttcatcagcggcgacatcagcgacacccaggccagcaacgagctgagcagaatcgccaacagcctgaccggcagcaacaccgcccccggcagcttcctgttcagcagctgcggcaagaacaccgccaagaaggagttcgagaccagcaacggcgacagcctgctgggcctgcccgagggcgccctgatcagcaagtgcagcagagagaagaacaagccccagagaagcctggtgtgcggcagcaaggtgaagctgtgctacatcggcgccggcgacgaggagaagagaagcgacagcatcagcatctgcaccaccagcgacgacggcagcagcgacctggaccccatcgagcacagcagcgagagcgacaacagcgtgctggagatccccgacgccttcgacagaaccgagaacatgctgagcatgcagaagaacgagaagatcaagtacagcagattcgccgccaccaacaccagagtgaaggccaagcagaagcccctgatcagcaacagccacaccgaccacctgatgggctgcaccaagagcgccgagcccggcaccgagaccagccaggtgaacctgagcgacctgaaggccagcaccctggtgcacaagccccagagcgacttcaccaacgacgccctgagccccaagttcaacctgagcagcagcatcagcagcgagaacagcctgatcaagggcggcgccgccaaccaggccctgctgcacagcaagagcaagcagcccaagttcagaagcatcaagtgcaagcacaaggagaaccccgtgatggccgagccccccgtgatcaacgaggagtgcagcctgaagtgctgcagcagcgacaccaagggcagccccctggccagcatcagcaagagcggcaaggtggacggcctgaagctgctgaacaacatgcacgagaagaccagagacagcagcgacatcgagaccgccgtggtgaagcacgtgctgagcgagctgaaggagctgagctacagaagcctgggcgaggacgtgagcgacagcggcaccagcaagcccagcaagcccctgctgttcagcagcgccagcagccagaaccacatccccatcgagcccgactacaagttcagcaccctgctgatgatgctgaaggacatgcacgacagcaagaccaaggagcagagactgatgaccgcccagaacctggtgagctacagaagccccggcagaggcgactgcagcaccaacagccccgtgggcgtgagcaaggtgctggtgagcggcggcagcacccacaacagcgagaagaagggcgacggcacccagaacagcgccaaccccagccccagcggcggcgacagcgccctgagcggcgagctgagcgccagcctgcccggcctgctgagcgacaagagagacctgcccgccagcggcaagagcagaagcgactgcgtgaccagaagaaactgcggcagaagcaagcccagcagcaagctgagagacgccttcagcgcccagatggtgaagaacaccgtgaacagaaaggccctgaagaccgagagaaagagaaagctgaaccagctgcccagcgtgaccctggacgccgtgctgcagggcgacagagagagaggcggcagcctgagaggcggcgccgaggaccccagcaaggaggaccccctgcagatcatgggccacctgaccagcgaggacggcgaccacttcagcgacgtgcacttcgacagcaaggtgaagcagagcgaccccggcaagatcagcgagaagggcctgagcttcgagaacggcaagggccccgagctggacagcgtgatgaacagcgagaacgacgagctgaacggcgtgaaccaggtggtgcccaagaagagatggcagagactgaaccagagaagaaccaagcccagaaagagaatgaacagattcaaggagaaggagaacagcgagtgcgccttcagagtgctgctgcccagcgaccccgtgcaggagggcagagacgagttccccgagcacagaacccccagcgccagcatcctggaggagcccctgaccgagcagaaccacgccgactgcctggacagcgccggccccagactgaacgtgtgcgacaagagcagcgccagcatcggcgacatggagaaggagcccggcatccccagcctgaccccccaggccgagctgcccgagcccgccgtgagaagcgagaagaagagactgagaaagcccagcaagtggctgctggagtacaccgaggagtacgaccagatcttcgcccccaagaagaagcagaagaaggtgcaggagcaggtgcacaaggtgagcagcagatgcgaggaggagagcctgctggccagaggcagaagcagcgcccagaacaagcaggtggacgagaacagcctgatcagcaccaaggaggagccccccgtgctggagagagaggcccccttcctggagggccccctggcccagagcgagctgggcggcggccacgccgagctgccccagctgaccctgagcgtgcccgtggcccccgaggtgagccccagacccgccctggagagcgaggagctgctggtgaagacccccggcaactacgagagcaagagacagagaaagcccaccaagaagctgctggagagcaacgacctggaccccggcttcatgcccaagaagggcgacctgggcctgagcaagaagtgctacgaggccggccacctggagaacggcatcaccgagagctgcgccaccagctacagcaaggacttcggcggcggcaccaccaagatcttcgacaagcccagaaagagaaagagacagagacacgccgccgccaagatgcagtgcaagaaggtgaagaacgacgacagcagcaaggagatccccggcagcgagggcgagctgatgccccacagaaccgccaccagccccaaggagaccgtggaggagggcgtggagcacgaccccggcatgcccgccagcaagaagatgcagggcgagagaggcggcggcgccgccctgaaggagaacgtgtgccagaactgcgagaagctgggcgagctgctgctgtgcgaggcccagtgctgcggcgccttccacctggagtgcctgggcctgaccgagatgcccagaggcaagttcatctgcaacgagtgcagaaccggcatccacacctgcttcgtgtgcaagcagagcggcgaggacgtgaagagatgcctgctgcccctgtgcggcaagttctaccacgaggagtgcgtgcagaagtacccccccaccgtgatgcagaacaagggcttcagatgcagcctgcacatctgcatcacctgccacgccgccaaccccgccaacgtgagcgccagcaagggcagactgatgagatgcgtgagatgccccgtggcctaccacgccaacgacttctgcctggccgccggcagcaagatcctggccagcaacagcatcatctgccccaaccacttcacccccagaagaggctgcagaaaccacgagcacgtgaacgtgagctggtgcttcgtgtgcagcgagggcggcagcctgctgtgctgcgacagctgccccgccgccttccacagagagtgcctgaacatcgacatccccgagggcaactggtactgcaacgactgcaaggccggcaagaagccccactacagagagatcgtgtgggtgaaggtgggcagatacagatggtggcccgccgagatctgccaccccagagccgtgcccagcaacatcgacaagatgagacacgacgtgggcgagttccccgtgctgttcttcggcagcaacgactacctgtggacccaccaggccagagtgttcccctacatggagggcgacgtgagcagcaaggacaagatgggcaagggcgtggacggcacctacaagaaggccctgcaggaggccgccgccagattcgaggagctgaaggcccagaaggagctgagacagctgcaggaggacagaaagaacgacaagaagccccccccctacaagcacatcaaggtgaacagacccatcggcagagtgcagatcttcaccgccgacctgagcgagatccccagatgcaactgcaaggccaccgacgagaacccctgcggcatcgacagcgagtgcatcaacagaatgctgctgtacgagtgccaccccaccgtgtgccccgccggcggcagatgccagaaccagtgcttcagcaagagacagtaccccgaggtggagatcttcagaaccctgcagagaggctggggcctgagaaccaagaccgacatcaagaagggcgagttcgtgaacgagtacgtgggcgagctgatcgacgaggaggagtgcagagccagaatcagatacgcccaggagcacgacatcaccaacttctacatgctgaccctggacaaggacagaatcatcgacgccggccccaagggcaactacgccagattcatgaaccactgctgccagcccaactgcgagacccagaagtggagcgtgaacggcgacaccagagtgggcctgttcgccctgagcgacatcaaggccggcaccgagctgaccttcaactacaacctggagtgcctgggcaacggcaagaccgtgtgcaagtgcggcgcccccaactgcagcggcttcctgggcgtgagacccaagaaccagcccatcgccaccgaggagaagagcaagaagttcaagaagaagcagcagggcaagagaagaacccagggcgagatcaccaaggagagagaggacgagtgcttcagctgcggcgacgccggccagctggtgagctgcaagaagcccggctgccccaaggtgtaccacgccgactgcctgaacctgaccaagagacccgccggcaagtgggagtgcccctggcaccagtgcgacatctgcggcaaggaggccgccagcttctgcgagatgtgccccagcagcttctgcaagcagcacagagagggcatgctgttcatcagcaagctggacggcagactgagctgcaccgagcacgacccctgcggccccaaccccctggagcccggcgagatcagagagtacgtgcccccccccgtgcccctgccccccggccccagcacccacctggccgagcagagcaccggcatggccgcccaggcccccaagatgagcgacaagccccccgccgacaccaaccagatgctgagcctgagcaagaaggccctggccggcacctgccagagacccctgctgcccgagagacccctggagagaaccgacagcagaccccagcccctggacaaggtgagagacctggccggcagcggcaccaagagccagagcctggtgagcagccagagacccctggacagaccccccgccgtggccggccccagaccccagctgagcgacaagcccagccccgtgaccagccccagcagcagccccagcgtgagaagccagcccctggagagacccctgggcaccgccgaccccagactggacaagagcatcggcgccgccagccccagaccccagagcctggagaagaccagcgtgcccaccggcctgagactgcccccccccgacagactgctgatcaccagcagccccaagccccagaccagcgacagacccaccgacaagccccacgccagcctgagccagagactgcccccccccgagaaggtgctgagcgccgtggtgcagaccctggtggccaaggagaaggccctgagacccgtggaccagaacacccagagcaagaacagagccgccctggtgatggacctgatcgacctgacccccagacagaaggagagagccgccagcccccaccaggtgaccccccaggccgacgagaagatgcccgtgctggagagcagcagctggcccgccagcaagggcctgggccacatgcccagagccgtggagaagggctgcgtgagcgaccccctgcagaccagcggcaaggccgccgcccccagcgaggacccctggcaggccgtgaagagcctgacccaggccagactgctgagccagccccccgccaaggccttcctgtacgagcccaccacccaggccagcggcagagccagcgccggcgccgagcagacccccggccccctgagccagagccccggcctggtgaagcaggccaagcagatggtgggcggccagcagctgcccgccctggccgccaagagcggccagagcttcagaagcctgggcaaggcccccgccagcctgcccaccgaggagaagaagctggtgaccaccgagcagagcccctgggccctgggcaaggccagcagcagagccggcctgtggcccatcgtggccggccagaccctggcccagagctgctggagcgccggcagcacccagaccctggcccagacctgctggagcctgggcagaggccaggaccccaagcccgagcagaacaccctgcccgccctgaaccaggcccccagcagccacaagtgcgccgagagcgagcagaagtag

SEQ ID NO: 91484 - DNA, 468 bp, synthetic construct
  misc_feature 1..468: note = Description of Artificial Sequence: Synthetic coding sequence
  source 1..468: mol_type = other DNA
atgcccctgaagaccagaaccgccctgagcgacgaccccgacagcagcaccagcaccctgggcaacatgctggagctgcccggcaccagcagcagcagcaccagccaggagctgcccttctgccagcccaagaagaagagcacccccctgaagtacgaggtgggcgacctgatctgggccaagttcaagagaagaccctggtggccctgcagaatctgcagcgaccccctgatcaacacccacagcaagatgaaggtgagcaacagaagaccctacagacagtactacgtggaggccttcggcgaccccagcgagagagcctgggtggccggcaaggccatcgtgatgttcgagggcagacaccagttcgaggagctgcccgtgctgagaagaagaggcaagcagaaggagaagggctacagacacaaggtgccccagaagatcctgagcaagtgggaggccagctag

SEQ ID NO: 91485 - DNA, 375 bp, synthetic construct
  misc_feature 1..375: note = Description of Artificial Sequence: Synthetic coding sequence
  source 1..375: mol_type = other DNA
atgcccctgaagaccagaaccgccctgagcgacgaccccgacagcagcaccagcaccctgggcaacatgctggagctgcccggcaccagcagcagcagcaccagccaggagctgcccttctgccagcccaagaagaagagcacccccctgaagtacgaggtgggcgacctgatctgggccaagttcaagagaagaccctggtggccctgcagaatctgcagcgaccccctgatcaacacccacagcaagatgaaggtgagcaacagaagaccctacagacagtactacgtggaggccttcggcgaccccagcgagagagcctgggtggccggcaaggccatcgtgatgttcgagggcagacaccagttcgagtag

SEQ ID NO: 91486 - DNA, 4200 bp, synthetic construct
  misc_feature 1..4200: note = Description of Artificial Sequence: Synthetic coding sequence
  source 1..4200: mol_type = other DNA
atgagcggcctgggcgacagcagcagcgaccccgccaaccccgacagccacaagagaaagggcagcccctgcgacaccctggccagcagcaccgagaagagaagaagagagcaggagaacaagtacctggaggagctggccgagctgctgagcgccaacatcagcgacatcgacagcctgagcgtgaagcccgacaagtgcaagatcctgaagaagaccgtggaccagatccagctgatgaagagaatggagcaggagaagagcaccaccgacgacgacgtgcagaagagcgacatcagcagcagcagccagggcgtgatcgagaaggagagcctgggccccctgctgctggaggccctggacggcttcttcttcgtggtgaactgcgagggcagaatcgtgttcgtgagcgagaacgtgaccagctacctgggctacaaccaggaggagctgatgaacaccagcgtgtacagcatcctgcacgtgggcgaccacgccgagttcgtgaagaacctgctgcccaagagcctggtgaacggcgtgccctggccccaggaggccaccagaagaaacagccacaccttcaactgcagaatgctgatccacccccccgacgagcccggcaccgagaaccaggaggcctgccagagatacgaggtgatgcagtgcttcaccgtgagccagcccaagagcatccaggaggacggcgaggacttccagagctgcctgatctgcatcgccagaagactgcccagaccccccgccatcaccggcgtggagagcttcatgaccaagcaggacaccaccggcaagatcatcagcatcgacaccagcagcctgagagccgccggcagaaccggctgggaggacctggtgagaaagtgcatctacgccttcttccagccccagggcagagagcccagctacgccagacagctgttccaggaggtgatgaccagaggcaccgccagcagccccagctacagattcatcctgaacgacggcaccatgctgagcgcccacaccaagtgcaagctgtgctacccccagagccccgacatgcagcccttcatcatgggcatccacatcatcgacagagagcacagcggcctgagcccccaggacgacaccaacagcggcatgagcatccccagagtgaaccccagcgtgaaccccagcatcagccccgcccacggcgtggccagaagcagcaccctgccccccagcaacagcaacatggtgagcaccagaatcaacagacagcagagcagcgacctgcacagcagcagccacagcaacagcagcaacagccagggcagcttcggctgcagccccggcagccagatcgtggccaacgtggccctgaaccagggccaggccagcagccagagcagcaaccccagcctgaacctgaacaacagccccatggagggcaccggcatcagcctggcccagttcatgagccccagaagacaggtgaccagcggcctggccaccagacccagaatgcccaacaacagcttcccccccaacatcagcaccctgagcagccccgtgggcatgaccagcagcgcctgcaacaacaacaacagaagctacagcaacatccccgtgaccagcctgcagggcatgaacgagggccccaacaacagcgtgggcttcagcgccagcagccccgtgctgagacagatgagcagccagaacagccccagcagactgaacatccagcccgccaaggccgagagcaaggacaacaaggagatcgccagcatcctgaacgagatgatccagagcgacaacagcagcagcgacggcaagcccctggacagcggcctgctgcacaacaacgacagactgagcgacggcgacagcaagtacagccagaccagccacaagctggtgcagctgctgaccaccaccgccgagcagcagctgagacacgccgacatcgacaccagctgcaaggacgtgctgagctgcaccggcaccagcaacagcgccagcgccaacagcagcggcggcagctgccccagcagccacagcagcctgaccgagagacacaagatcctgcacagactgctgcaggagggcagccccagcgacatcaccaccctgagcgtggagcccgacaagaaggacagcgccagcaccagcgtgagcgtgaccggccaggtgcagggcaacagcagcatcaagctggagctggacgccagcaagaagaaggagagcaaggaccaccagctgctgagatacctgctggacaaggacgagaaggacctgagaagcacccccaacctgagcctggacgacgtgaaggtgaaggtggagaagaaggagcagatggacccctgcaacaccaaccccacccccatgaccaagcccacccccgaggagatcaagctggaggcccagagccagttcaccgccgacctggaccagttcgaccagctgctgcccaccctggagaaggccgcccagctgcccggcctgtgcgagaccgacagaatggacggcgccgtgaccagcgtgaccatcaagagcgagatcctgcccgccagcctgcagagcgccaccgccagacccaccagcagactgaacagactgcccgagctggagctggaggccatcgacaaccagttcggccagcccggcaccggcgaccagatcccctggaccaacaacaccgtgaccgccatcaaccagagcaagagcgaggaccagtgcatcagcagccagctggacgagctgctgtgcccccccaccaccgtggagggcagaaacgacgagaaggccctgctggagcagctggtgagcttcctgagcggcaaggacgagaccgagctggccgagctggacagagccctgggcatcgacaagctggtgcagggcggcggcctggacgtgctgagcgagagattccccccccagcaggccaccccccccctgatcatggaggagagacccaacctgtacagccagccctacagcagccccagccccaccgccaacctgcccagccccttccagggcatggtgagacagaagcccagcctgggcaccatgcccgtgcaggtgaccccccccagaggcgccttcagccccggcatgggcatgcagcccagacagaccctgaacagaccccccgccgcccccaaccagctgagactgcagctgcagcagagactgcagggccagcagcagctgatccaccagaacagacaggccatcctgaaccagttcgccgccaccgcccccgtgggcatcaacatgagaagcggcatgcagcagcagatcaccccccagccccccctgaacgcccagatgctggcccagagacagagagagctgtacagccagcagcacagacagagacagctgatccagcagcagagagccatgctgatgagacagcagagcttcggcaacaacctgccccccagcagcggcctgcccgtgcagatgggcaaccccagactgccccagggcgccccccagcagttcccctacccccccaactacggcaccaaccccggcaccccccccgccagcaccagccccttcagccagctggccgccaaccccgaggccagcctggccaacagaaacagcatggtgagcagaggcatgaccggcaacatcggcggccagttcggcaccggcatcaacccccagatgcagcagaacgtgttccagtaccccggcgccggcatggtgccccagggcgaggccaacttcgcccccagcctgagccccggcagcagcatggtgcccatgcccatcccccccccccagagcagcctgctgcagcagaccccccccgccagcggctaccagagccccgacatgaaggcctggcagcagggcgccatcggcaacaacaacgtgttcagccaggccgtgcagaaccagcccacccccgcccagcccggcgtgtacaacaacatgagcatcaccgtgagcatggccggcggcaacaccaacgtgcagaacatgaaccccatgatggcccagatgcagatgagcagcctgcagatgcccggcatgaacaccgtgtgccccgagcagatcaacgaccccgccctgagacacaccggcctgtactgcaaccagctgagcagcaccgacctgctgaagaccgaggccgacggcacccaggacaagaagaccgaggagttcttcagcgtggtgaccaccgactag

SEQ ID NO: 91487 - DNA, 4326 bp, synthetic construct
  misc_feature 1..4326: note = Description of Artificial Sequence: Synthetic coding sequence
  source 1..4326: mol_type = other DNA
atgagcggcctgggcgacagcagcagcgaccccgccaaccccgacagccacaagagaaagggcagcccctgcgacaccctggccagcagcaccgagaagagaagaagagagcaggagaacaagtacctggaggagctggccgagctgctgagcgccaacatcagcgacatcgacagcctgagcgtgaagcccgacaagtgcaagatcctgaagaagaccgtggaccagatccagctgatgaagagaatggagcaggagaagagcaccaccgacgacgacgtgcagaagagcgacatcagcagcagcagccagggcgtgatcgagaaggagagcctgggccccctgctgctggaggccctggacggcttcttcttcgtggtgaactgcgagggcagaatcgtgttcgtgagcgagaacgtgaccagctacctgggctacaaccaggaggagctgatgaacaccagcgtgtacagcatcctgcacgtgggcgaccacgccgagttcgtgaagaacctgctgcccaagagcctggtgaacggcgtgccctggccccaggaggccaccagaagaaacagccacaccttcaactgcagaatgctgatccacccccccgacgagcccggcaccgagaaccaggaggcctgccagagatacgaggtgatgcagtgcttcaccgtgagccagcccaagagcatccaggaggacggcgaggacttccagagctgcctgatctgcatcgccagaagactgcccagaccccccgccatcaccggcgtggagagcttcatgaccaagcaggacaccaccggcaagatcatcagcatcgacaccagcagcctgagagccgccggcagaaccggctgggaggacctggtgagaaagtgcatctacgccttcttccagccccagggcagagagcccagctacgccagacagctgttccaggaggtgatgaccagaggcaccgccagcagccccagctacagattcatcctgaacgacggcaccatgctgagcgcccacaccaagtgcaagctgtgctacccccagagccccgacatgcagcccttcatcatgggcatccacatcatcgacagagagcacagcggcctgagcccccaggacgacaccaacagcggcatgagcatccccagagtgaaccccagcgtgaaccccagcatcagccccgcccacggcgtggccagaagcagcaccctgccccccagcaacagcaacatggtgagcaccagaatcaacagacagcagagcagcgacctgcacagcagcagccacagcaacagcagcaacagccagggcagcttcggctgcagccccggcagccagatcgtggccaacgtggccctgaaccagggccaggccagcagccagagcagcaaccccagcctgaacctgaacaacagccccatggagggcaccggcatcagcctggcccagttcatgagccccagaagacaggtgaccagcggcctggccaccagacccagaatgcccaacaacagcttcccccccaacatcagcaccctgagcagccccgtgggcatgaccagcagcgcctgcaacaacaacaacagaagctacagcaacatccccgtgaccagcctgcagggcatgaacgagggccccaacaacagcgtgggcttcagcgccagcagccccgtgctgagacagatgagcagccagaacagccccagcagactgaacatccagcccgccaaggccgagagcaaggacaacaaggagatcgccagcatcctgaacgagatgatccagagcgacaacagcagcagcgacggcaagcccctggacagcggcctgctgcacaacaacgacagactgagcgacggcgacagcaagtacagccagaccagccacaagctggtgcagctgctgaccaccaccgccgagcagcagctgagacacgccgacatcgacaccagctgcaaggacgtgctgagctgcaccggcaccagcaacagcgccagcgccaacagcagcggcggcagctgccccagcagccacagcagcctgaccgagagacacaagatcctgcacagactgctgcaggagggcagccccagcgacatcaccaccctgagcgtggagcccgacaagaaggacagcgccagcaccagcgtgagcgtgaccggccaggtgcagggcaacagcagcatcaagctggagctggacgccagcaagaagaaggagagcaaggaccaccagctgctgagatacctgctggacaaggacgagaaggacctgagaagcacccccaacctgagcctggacgacgtgaaggtgaaggtggagaagaaggagcagatggacccctgcaacaccaaccccacccccatgaccaagcccacccccgaggagatcaagctggaggcccagagccagttcaccgccgacctggaccagttcgaccagctgctgcccaccctggagaaggccgcccagctgcccggcctgtgcgagaccgacagaatggacggcgccgtgaccagcgtgaccatcaagagcgagatcctgcccgccagcctgcagagcgccaccgccagacccaccagcagactgaacagactgcccgagctggagctggaggccatcgacaaccagttcggccagcccggcaccggcgaccagatcccctggaccaacaacaccgtgaccgccatcaaccagagcaagagcgaggaccagtgcatcagcagccagctggacgagctgctgtgcccccccaccaccgtggagggcagaaacgacgagaaggccctgctggagcagctggtgagcttcctgagcggcaaggacgagaccgagctggccgagctggacagagccctgggcatcgacaagctggtgcagggcggcggcctggacgtgctgagcgagagattccccccccagcaggccaccccccccctgatcatggaggagagacccaacctgtacagccagccctacagcagccccagccccaccgccaacctgcccagccccttccagggcatggtgagacagaagcccagcctgggcaccatgcccgtgcaggtgaccccccccagaggcgccttcagccccggcatgggcatgcagcccagacagaccctgaacagaccccccgccgcccccaaccagctgagactgcagctgcagcagagactgcagggccagcagcagctgatccaccagaacagacaggccatcctgaaccagttcgccgccaccgcccccgtgggcatcaacatgagaagcggcatgcagcagcagatcaccccccagccccccctgaacgcccagatgctggcccagagacagagagagctgtacagccagcagcacagacagagacagctgatccagcagcagagagccatgctgatgagacagcagagcttcggcaacaacctgccccccagcagcggcctgcccgtgcagatgggcaaccccagactgccccagggcgccccccagcagttcccctacccccccaactacggcaccaaccccggcaccccccccgccagcaccagccccttcagccagctggccgccaaccccgaggccagcctggccaacagaaacagcatggtgagcagaggcatgaccggcaacatcggcggccagttcggcaccggcatcaacccccagatgcagcagaacgtgttccagtaccccggcgccggcatggtgccccagggcgaggccaacttcgcccccagcctgagccccggcagcagcatggtgcccatgcccatcccccccccccagagcagcctgctgcagcagaccccccccgccagcggctaccagagccccgacatgaaggcctggcagcagggcgccatcggcaacaacaacgtgttcagccaggccgtgcagaaccagcccacccccgcccagcccggcgtgtacaacaacatgagcatcaccgtgagcatggccggcggcaacaccaacgtgcagaacatgaaccccatgatggcccagatgcagatgagcagcctgcagatgcccggcatgaacaccgtgtgccccgagcagatcaacgaccccgccctgagacacaccggcctgtactgcaaccagctgagcagcaccgacctgctgaagaccgaggccgacggcacccagcaggtgcagcaggtgcaggtgttcgccgacgtgcagtgcaccgtgaacctggtgggcggcgacccctacctgaaccagcccggccccctgggcacccagaagcccaccagcggcccccagaccccccaggcccagcagaagagcctgctgcagcagctgctgaccgagtag

SEQ ID NO: 91488 - DNA, 4323 bp, synthetic construct
  misc_feature 1..4323: note = Description of Artificial Sequence: Synthetic coding sequence
  source 1..4323: mol_type = other DNA
atgagcggcctgggcgacagcagcagcgaccccgccaaccccgacagccacaagagaaagggcagcccctgcgacaccctggccagcagcaccgagaagagaagaagagagcaggagaacaagtacctggaggagctggccgagctgctgagcgccaacatcagcgacatcgacagcctgagcgtgaagcccgacaagtgcaagatcctgaagaagaccgtggaccagatccagctgatgaagagaatggagcaggagaagagcaccaccgacgacgacgtgcagaagagcgacatcagcagcagcagccagggcgtgatcgagaaggagagcctgggccccctgctgctggaggccctggacggcttcttcttcgtggtgaactgcgagggcagaatcgtgttcgtgagcgagaacgtgaccagctacctgggctacaaccaggaggagctgatgaacaccagcgtgtacagcatcctgcacgtgggcgaccacgccgagttcgtgaagaacctgctgcccaagagcctggtgaacggcgtgccctggccccaggaggccaccagaagaaacagccacaccttcaactgcagaatgctgatccacccccccgacgagcccggcaccgagaaccaggaggcctgccagagatacgaggtgatgcagtgcttcaccgtgagccagcccaagagcatccaggaggacggcgaggacttccagagctgcctgatctgcatcgccagaagactgcccagaccccccgccatcaccggcgtggagagcttcatgaccaagcaggacaccaccggcaagatcatcagcatcgacaccagcagcctgagagccgccggcagaaccggctgggaggacctggtgagaaagtgcatctacgccttcttccagccccagggcagagagcccagctacgccagacagctgttccaggaggtgatgaccagaggcaccgccagcagccccagctacagattcatcctgaacgacggcaccatgctgagcgcccacaccaagtgcaagctgtgctacccccagagccccgacatgcagcccttcatcatgggcatccacatcatcgacagagagcacagcggcctgagcccccaggacgacaccaacagcggcatgagcatccccagagtgaaccccagcgtgaaccccagcatcagccccgcccacggcgtggccagaagcagcaccctgccccccagcaacagcaacatggtgagcaccagaatcaacagacagcagagcagcgacctgcacagcagcagccacagcaacagcagcaacagccagggcagcttcggctgcagccccggcagccagatcgtggccaacgtggccctgaaccagggccaggccagcagccagagcagcaaccccagcctgaacctgaacaacagccccatggagggcaccggcatcagcctggcccagttcatgagccccagaagacaggtgaccagcggcctggccaccagacccagaatgcccaacaacagcttcccccccaacatcagcaccctgagcagccccgtgggcatgaccagcagcgcctgcaacaacaacaacagaagctacagcaacatccccgtgaccagcctgcagggcatgaacgagggccccaacaacagcgtgggcttcagcgccagcagccccgtgctgagacagatgagcagccagaacagccccagcagactgaacatccagcccgccaaggccgagagcaaggacaacaaggagatcgccagcatcctgaacgagatgatccagagcgacaacagcagcagcgacggcaagcccctggacagcggcctgctgcacaacaacgacagactgagcgacggcgacagcaagtacagccagaccagccacaagctggtgcagctgctgaccaccaccgccgagcagcagctgagacacgccgacatcgacaccagctgcaaggacgtgctgagctgcaccggcaccagcaacagcgccagcgccaacagcagcggcggcagctgccccagcagccacagcagcctgaccgagagacacaagatcctgcacagactgctgcaggagggcagccccagcgacatcaccaccctgagcgtggagcccgacaagaaggacagcgccagcaccagcgtgagcgtgaccggccaggtgcagggcaacagcagcatcaagctggagctggacgccagcaagaagaaggagagcaaggaccaccagctgctgagatacctgctggacaaggacgagaaggacctgagaagcacccccaacctgagcctggacgacgtgaaggtgaaggtggagaagaaggagcagatggacccctgcaacaccaaccccacccccatgaccaagcccacccccgaggagatcaagctggaggcccagagccagttcaccgccgacctggaccagttcgaccagctgctgcccaccctggagaaggccgcccagctgcccggcctgtgcgagaccgacagaatggacggcgccgtgaccagcgtgaccatcaagagcgagatcctgcccgccagcctgcagagcgccaccgccagacccaccagcagactgaacagactgcccgagctggagctggaggccatcgacaaccagttcggccagcccggcaccggcgaccagatcccctggaccaacaacaccgtgaccgccatcaaccagagcaagagcgaggaccagtgcatcagcagccagctggacgagctgctgtgcccccccaccaccgtggagggcagaaacgacgagaaggccctgctggagcagctggtgagcttcctgagcggcaaggacgagaccgagctggccgagctggacagagccctgggcatcgacaagctggtgcagggcggcggcctggacgtgctgagcgagagattccccccccagcaggccaccccccccctgatcatggaggagagacccaacctgtacagccagccctacagcagccccagccccaccgccaacctgcccagccccttccagggcatggtgagacagaagcccagcctgggcaccatgcccgtgcaggtgaccccccccagaggcgccttcagccccggcatgggcatgcagcccagacagaccctgaacagaccccccgccgcccccaaccagctgagactgcagctgcagcagagactgcagggccagcagcagctgatccaccagaacagacaggccatcctgaaccagttcgccgccaccgcccccgtgggcatcaacatgagaagcggcatgcagcagcagatcaccccccagccccccctgaacgcccagatgctggcccagagacagagagagctgtacagccagcagcacagacagagacagctgatccagcagcagagagccatgctgatgagacagcagagcttcggcaacaacctgccccccagcagcggcctgcccgtgcagatgggcaaccccagactgccccagggcgccccccagcagttcccctacccccccaactacggcaccaaccccggcaccccccccgccagcaccagccccttcagccagctggccgccaaccccgaggccagcctggccaacagaaacagcatggtgagcagaggcatgaccggcaacatcggcggccagttcggcaccggcatcaacccccagatgcagcagaacgtgttccagtaccccggcgccggcatggtgccccagggcgaggccaacttcgcccccagcctgagccccggcagcagcatggtgcccatgcccatcccccccccccagagcagcctgctgcagcagaccccccccgccagcggctaccagagccccgacatgaaggcctggcagcagggcgccatcggcaacaacaacgtgttcagccaggccgtgcagaaccagcccacccccgcccagcccggcgtgtacaacaacatgagcatcaccgtgagcatggccggcggcaacaccaacgtgcagaacatgaaccccatgatggcccagatgcagatgagcagcctgcagatgcccggcatgaacaccgtgtgccccgagcagatcaacgaccccgccctgagacacaccggcctgtactgcaaccagctgagcagcaccgacctgctgaagaccgaggccgacggcacccaggtgcagcaggtgcaggtgttcgccgacgtgcagtgcaccgtgaacctggtgggcggcgacccctacctgaaccagcccggccccctgggcacccagaagcccaccagcggcccccagaccccccaggcccagcagaagagcctgctgcagcagctgctgaccgagtag

SEQ ID NO: 91489 - DNA, 4200 bp, synthetic construct; identical to SEQ ID NO: 91486
  misc_feature 1..4200: note = Description of Artificial Sequence: Synthetic coding sequence
  source 1..4200: mol_type = other DNA

SEQ ID NO: 91490 - DNA, 4326 bp, synthetic construct; identical to SEQ ID NO: 91487
  misc_feature 1..4326: note = Description of Artificial Sequence: Synthetic coding sequence
  source 1..4326: mol_type = other DNA

SEQ ID NO: 91491 - DNA, 4200 bp, synthetic construct; identical to SEQ ID NO: 91486
  misc_feature 1..4200: note = Description of Artificial Sequence: Synthetic coding sequence
  source 1..4200: mol_type = other DNA

SEQ ID NO: 91492 - DNA, 1659 bp, synthetic construct
  misc_feature 1..1659: note = Description of Artificial Sequence: Synthetic coding sequence
  source 1..1659: mol_type = other DNA
atgcagctgaccgccgagaacagccccgtgacccccgtgggcgcccagaagaccgccctgagaatcagccagagcagaatgatcggcaacagcgccagcagacccaccatgcccagcggcgagtgggccccccagagcagcgccgtgagagtgacctgcgccgccaccaccagcgccatgaacagacccgtgcagggcggcatgatcagaaaccccgccgccagcatccccatgagacccagcagccagcccggccagagacagaccctgcagagccaggtgatgaacatcggccccagcgagctggagatgaacatgggcggcccccagtacagccagcagcaggccccccccaaccagaccgccccctggcccgagagcatcctgcccatcgaccaggccagcttcgccagccagaacagacagcccttcggcagcagccccgacgacctgctgtgcccccaccccgccgccgagagccccagcgacgagggcgccctgctggaccagctgtacctggccctgagaaacttcgacggcctggaggagatcgacagagccctgggcatccccgagctggtgagccagagccaggccgtggaccccgagcagttcagcagccaggacagcaacatcatgctggagcagaaggcccccgtgttcccccagcagtacgccagccaggcccagatggcccagggcagctacagccccatgcaggaccccaacttccacaccatgggccagagacccagctacgccaccctgagaatgcagcccagacccggcctgagacccaccggcctggtgcagaaccagcccaaccagctgagactgcagctgcagcacagactgcaggcccagcagaacagacagcccctgatgaaccagatcagcaacgtgagcaacgtgaacctgaccctgagacccggcgtgcccacccaggcccccatcaacgcccagatgctggcccagagacagagagagatcctgaaccagcacctgagacagagacagatgcaccagcagcagcaggtgcagcagagaaccctgatgatgagaggccagggcctgaacatgacccccagcatggtggcccccagcggcatgcccgccaccatgagcaaccccagaatcccccaggccaacgcccagcagttccccttcccccccaactacggcatcagccagcagcccgaccccggcttcaccggcgccaccaccccccagagccccctgatgagccccagaatggcccacacccagagccccatgatgcagcagagccaggccaaccccgcctaccaggcccccagcgacatcaacggctgggcccagggcaacatgggcggcaacagcatgttcagccagcagagccccccccacttcggccagcaggccaacaccagcatgtacagcaacaacatgaacatcaacgtgagcatggccaccaacaccggcggcatgagcagcatgaaccagatgaccggccagatcagcatgaccagcgtgaccagcgtgcccaccagcggcctgagcagcatgggccccgagcaggtgaacgaccccgccctgagaggcggcaacctgttccccaaccagctgcccggcatggacatgatcaagcaggagggcgacaccaccagaaagtactgctag

SEQ ID NO: 91493 - DNA, 4395 bp, synthetic construct
  misc_feature 1..4395: note = Description of Artificial Sequence: Synthetic coding sequence
  source 1..4395: mol_type = other DNA
atgagcggcatgggcgagaacaccagcgaccccagcagagccgagaccagaaagagaaaggagtgccccgaccagctgggccccagccccaagagaaacaccgagaagagaaacagagagcaggagaacaagtacatcgaggagctggccgagctgatcttcgccaacttcaacgacatcgacaacttcaacttcaagcccgacaagtgcgccatcctgaaggagaccgtgaagcagatcagacagatcaaggagcaggagaaggccgccgccgccaacatcgacgaggtgcagaagagcgacgtgagcagcaccggccagggcgtgatcgacaaggacgccctgggccccatgatgctggaggccctggacggcttcttcttcgtggtgaacctggagggcaacgtggtgttcgtgagcgagaacgtgacccagtacctgagatacaaccaggaggagctgatgaacaagagcgtgtacagcatcctgcacgtgggcgaccacaccgagttcgtgaagaacctgctgcccaagagcatcgtgaacggcggcagctggagcggcgagccccccagaagaaacagccacaccttcaactgcagaatgctggtgaagcccctgcccgacagcgaggaggagggccacgacaaccaggaggcccaccagaagtacgagaccatgcagtgcttcgccgtgagccagcccaagagcatcaaggaggagggcgaggacctgcagagctgcctgatctgcgtggccagaagagtgcccatgaaggagagacccgtgctgcccagcagcgagagcttcaccaccagacaggacctgcagggcaagatcaccagcctggacaccagcaccatgagagccgccatgaagcccggctgggaggacctggtgagaagatgcatccagaagttccacgcccagcacgagggcgagagcgtgagctacgccaagagacaccaccacgaggtgctgagacagggcctggccttcagccagatctacagattcagcctgagcgacggcaccctggtggccgcccagaccaagagcaagctgatcagaagccagaccaccaacgagccccagctggtgatcagcctgcacatgctgcacagagagcagaacgtgtgcgtgatgaaccccgacctgaccggccagaccatgggcaagcccctgaaccccatcagcagcaacagccccgcccaccaggccctgtgcagcggcaaccccggccaggacatgaccctgagcagcaacatcaacttccccatcaacggccccaaggagcagatgggcatgcccatgggcagattcggcggcagcggcggcatgaaccacgtgagcggcatgcaggccaccaccccccagggcagcaactacgccctgaagatgaacagccccagccagagcagccccggcatgaaccccggccagcccaccagcatgctgagccccagacacagaatgagccccggcgtggccggcagccccagaatcccccccagccagttcagccccgccggcagcctgcacagccccgtgggcgtgtgcagcagcaccggcaacagccacagctacaccaacagcagcctgaacgccctgcaggccctgagcgagggccacggcgtgagcctgggcagcagcctggccagccccgacctgaagatgggcaacctgcagaacagccccgtgaacatgaaccccccccccctgagcaagatgggcagcctggacagcaaggactgcttcggcctgtacggcgagcccagcgagggcaccaccggccaggccgagagcagctgccaccccggcgagcagaaggagaccaacgaccccaacctgccccccgccgtgagcagcgagagagccgacggccagagcagactgcacgacagcaagggccagaccaagctgctgcagctgctgaccaccaagagcgaccagatggagcccagccccctggccagcagcctgagcgacaccaacaaggacagcaccggcagcctgcccggcagcggcagcacccacggcaccagcctgaaggagaagcacaagatcctgcacagactgctgcaggacagcagcagccccgtggacctggccaagctgaccgccgaggccaccggcaaggacctgagccaggagagcagcagcaccgcccccggcagcgaggtgaccatcaagcaggagcccgtgagccccaagaagaaggagaacgccctgctgagatacctgctggacaaggacgacaccaaggacatcggcctgcccgagatcacccccaagctggagagactggacagcaagaccgaccccgccagcaacaccaagctgatcgccatgaagaccgagaaggaggagatgagcttcgagcccggcgaccagcccggcagcgagctggacaacctggaggagatcctggacgacctgcagaacagccagctgccccagctgttccccgacaccagacccggcgcccccgccggcagcgtggacaagcaggccatcatcaacgacctgatgcagctgaccgccgagaacagccccgtgacccccgtgggcgcccagaagaccgccctgagaatcagccagagcaccttcaacaaccccagacccggccagctgggcagactgctgcccaaccagaacctgcccctggacatcaccctgcagagccccaccggcgccggccccttcccccccatcagaaacagcagcccctacagcgtgatcccccagcccggcatgatgggcaaccagggcatgatcggcaaccagggcaacctgggcaacagcagcaccggcatgatcggcaacagcgccagcagacccaccatgcccagcggcgagtgggccccccagagcagcgccgtgagagtgacctgcgccgccaccaccagcgccatgaacagacccgtgcagggcggcatgatcagaaaccccgccgccagcatccccatgagacccagcagccagcccggccagagacagaccctgcagagccaggtgatgaacatcggccccagcgagctggagatgaacatgggcggcccccagtacagccagcagcaggccccccccaaccagaccgccccctggcccgagagcatcctgcccatcgaccaggccagcttcgccagccagaacagacagcccttcggcagcagccccgacgacctgctgtgcccccaccccgccgccgagagccccagcgacgagggcgccctgctggaccagctgtacctggccctgagaaacttcgacggcctggaggagatcgacagagccctgggcatccccgagctggtgagccagagccaggccgtggaccccgagcagttcagcagccaggacagcaacatcatgctggagcagaaggcccccgtgttcccccagcagtacgccagccaggcccagatggcccagggcagctacagccccatgcaggaccccaacttccacaccatgggccagagacccagctacgccaccctgagaatgcagcccagacccggcctgagacccaccggcctggtgcagaaccagcccaaccagctgagactgcagctgcagcacagactgcaggcccagcagaacagacagcccctgatgaaccagatcagcaacgtgagcaacgtgaacctgaccctgagacccggcgtgcccacccaggcccccatcaacgcccagatgctggcccagagacagagagagatcctgaaccagcacctgagacagagacagatgcaccagcagcagcaggtgcagcagagaaccctgatgatgagaggccagggcctgaacatgacccccagcatggtggcccccagcggcatgcccgccaccatgagcaaccccagaatcccccaggccaacgcccagcagttccccttcccccccaactacggcatcagccagcagcccgaccccggcttcaccggcgccaccaccccccagagccccctgatgagccccagaatggcccacacccagagccccatgatgcagcagagccaggccaaccccgcctaccaggcccccagcgacatcaacggctgggcccagggcaacatgggcggcaacagcatgttcagccagcagagccccccccacttcggccagcaggccaacaccagcatgtacagcaacaacatgaacatcaacgtgagcatggccaccaacaccggcggcatgagcagcatgaaccagatgaccggccagatcagcatgaccagcgtgaccagcgtgcccaccagcggcctgagcagcatgggccccgagcaggtgaacgaccccgccctgagaggcggcaacctgttccccaaccagctgcccggcatggacatgatcaagcaggagggcgacaccaccagaaagtactgctag

SEQ ID NO: 91494 - DNA, 51 bp, synthetic construct
  misc_feature 1..51: note = Description of Artificial Sequence: Synthetic coding sequence
  source 1..51: mol_type = other DNA
atgagcggcatgggcgagaacaccagcgaccccagcagagccgagacctag

SEQ ID NO: 91495 - DNA, 27 bp, synthetic construct
  misc_feature 1..27: note = Description of Artificial Sequence: Synthetic coding sequence
  source 1..27: mol_type = other DNA
atgagcggcatgggcgagaacacctag

SEQ ID NO: 91496 - DNA, 4263 bp, synthetic construct
  misc_feature 1..4263: note = Description of Artificial Sequence: Synthetic coding sequence
  source 1..4263: mol_type = other DNA
atgagcggcctgggcgagaacctggaccccctggccagcgacagcagaaagagaaagctgccctgcgacacccccggccagggcctgacctgcagcggcgagaagagaagaagagagcaggagagcaagtacatcgaggagctggccgagctgatcagcgccaacctgagcgacatcgacaacttcaacgtgaagcccgacaagtgcgccatcctgaaggagaccgtgagacagatcagacagatcaaggagcagggcaagaccatcagcaacgacgacgacgtgcagaaggccgacgtgagcagcaccggccagggcgtgatcgacaaggacagcctgggccccctgctgctgcaggccctggacggcttcctgttcgtggtgaacagagacggcaacatcgtgttcgtgagcgagaacgtgacccagtacctgcagtacaagcaggaggacctggtgaacaccagcgtgtacaacatcctgcacgaggaggacagaaaggacttcctgaagaacctgcccaagagcaccgtgaacggcgtgagctggaccaacgagacccagagacagaagagccacaccttcaactgcagaatgctgatgaagaccccccacgacatcctggaggacatcaacgccagccccgagatgagacagagatacgagaccatgcagtgcttcgccctgagccagcccagagccatgatggaggagggcgaggacctgcagagctgcatgatctgcgtggccagaagaatcaccaccggcgagagaaccttccccagcaaccccgagagcttcatcaccagacacgacctgagcggcaaggtggtgaacatcgacaccaacagcctgagaagcagcatgagacccggcttcgaggacatcatcagaagatgcatccagagattcttcagcctgaacgacggccagagctggagccagaagagacactaccaggaggcctacctgaacggccacgccgagacccccgtgtacagattcagcctggccgacggcaccatcgtgaccgcccagaccaagagcaagctgttcagaaaccccgtgaccaacgacagacacggcttcgtgagcacccacttcctgcagagagagcagaacggctacagacccaaccccaaccccgtgggccagggcatcagaccccccatggccggctgcaacagcagcgtgggcggcatgagcatgagccccaaccagggcctgcagatgcccagcagcagagcctacggcctggccgaccccagcaccaccggccagatgagcggcgccagatacggcggcagcagcaacatcgccagcctgacccccggccccggcatgcagagccccagcagctaccagaacaacaactacggcctgaacatgagcagccccccccacggcagccccggcctggcccccaaccagcagaacatcatgatcagccccagaaacagaggcagccccaagatcgccagccaccagttcagccccgtggccggcgtgcacagccccatggccagcagcggcaacaccggcaaccacagcttcagcagcagcagcctgagcgccctgcaggccatcagcgagggcgtgggcaccagcctgctgagcaccctgagcagccccggccccaagctggacaacagccccaacatgaacatcacccagcccagcaaggtgagcaaccaggacagcaagagccccctgggcttctactgcgaccagaaccccgtggagagcagcatgtgccagagcaacagcagagaccacctgagcgacaaggagagcaaggagagcagcgtggagggcgccgagaaccagagaggccccctggagagcaagggccacaagaagctgctgcagctgctgacctgcagcagcgacgacagaggccacagcagcctgaccaacagccccctggacagcagctgcaaggagagcagcgtgagcgtgaccagccccagcggcgtgagcagcagcaccagcggcggcgtgagcagcaccagcaacatgcacggcagcctgctgcaggagaagcacagaatcctgcacaagctgctgcagaacggcaacagccccgccgaggtggccaagatcaccgccgaggccaccggcaaggacaccagcagcatcaccagctgcggcgacggcaacgtggtgaagcaggagcagctgagccccaagaagaaggagaacaacgccctgctgagatacctgctggacagagacgaccccagcgacgccctgagcaaggagctgcagccccaggtggagggcgtggacaacaagatgagccagtgcaccagcagcaccatccccagcagcagccaggagaaggaccccaagatcaagaccgagaccagcgaggagggcagcggcgacctggacaacctggacgccatcctgggcgacctgaccagcagcgacttctacaacaacagcatcagcagcaacggcagccacctgggcaccaagcagcaggtgttccagggcaccaacagcctgggcctgaagagcagccagagcgtgcagagcatcagacccccctacaacagagccgtgagcctggacagccccgtgagcgtgggcagcagcccccccgtgaagaacatcagcgccttccccatgctgcccaagcagcccatgctgggcggcaaccccagaatgatggacagccaggagaactacggcagcagcatgggcggccccaacagaaacgtgaccgtgacccagacccccagcagcggcgactggggcctgcccaacagcaaggccggcagaatggagcccatgaacagcaacagcatgggcagacccggcggcgactacaacaccagcctgcccagacccgccctgggcggcagcatccccaccctgcccctgagaagcaacagcatccccggcgccagacccgtgctgcagcagcagcagcagatgctgcagatgagacccggcgagatccccatgggcatgggcgccaacccctacggccaggccgccgccagcaaccagctgggcagctggcccgacggcatgctgagcatggagcaggtgagccacggcacccagaacagacccctgctgagaaacagcctggacgacctggtgggcccccccagcaacctggagggccagagcgacgagagagccctgctggaccagctgcacaccctgctgagcaacaccgacgccaccggcctggaggagatcgacagagccctgggcatccccgagctggtgaaccagggccaggccctggagcccaagcaggacgccttccagggccaggaggccgccgtgatgatggaccagaaggccggcctgtacggccagacctaccccgcccagggcccccccatgcagggcggcttccacctgcagggccagagccccagcttcaacagcatgatgaaccagatgaaccagcagggcaacttccccctgcagggcatgcaccccagagccaacatcatgagacccagaaccaacacccccaagcagctgagaatgcagctgcagcagagactgcagggccagcagttcctgaaccagagcagacaggccctggagctgaagatggagaaccccaccgccggcggcgccgccgtgatgagacccatgatgcagccccagcagggcttcctgaacgcccagatggtggcccagagaagcagagagctgctgagccaccacttcagacagcagagagtggccatgatgatgcagcagcagcagcagcagcagcagcagcagcagcagcagcagcagcagcagcagcagcagcagcagcagcagcagcagcagcagcagacccaggccttcagccccccccccaacgtgaccgccagccccagcatggacggcctgctggccggccccaccatgccccaggcccccccccagcagttcccctaccagcccaactacggcatgggccagcagcccgaccccgccttcggcagagtgagcagcccccccaacgccatgatgagcagcagaatgggccccagccagaaccccatgatgcagcacccccaggccgccagcatctaccagagcagcgagatgaagggctggcccagcggcaacctggccagaaacagcagcttcagccagcagcagttcgcccaccagggcaaccccgccgtgtacagcatggtgcacatgaacggcagcagcggccacatgggccagatgaacatgaaccccatgcccatgagcggcatgcccatgggccccgaccagaagtactgctag

SEQ ID NO: 91497 - DNA, 4053 bp, synthetic construct
  misc_feature 1..4053: note = Description of Artificial Sequence: Synthetic coding sequence
  source 1..4053: mol_type = other DNA
atgagcggcctgggcgagaacctggaccccctggccagcgacagcagaaagagaaagctgccctgcgacacccccggccagggcctgacctgcagcggcgagaagagaagaagagagcaggagagcaagtacatcgaggagctggccgagctgatcagcgccaacctgagcgacatcgacaacttcaacgtgaagcccgacaagtgcgccatcctgaaggagaccgtgagacagatcagacagatcaaggagcagggcaagaccatcagcaacgacgacgacgtgcagaaggccgacgtgagcagcaccggccagggcgtgatcgacaaggacagcctgggccccctgctgctgcaggccctggacggcttcctgttcgtggtgaacagagacggcaacatcgtgttcgtgagcgagaacgtgacccagtacctgcagtacaagcaggaggacctggtgaacaccagcgtgtacaacatcctgcacgaggaggacagaaaggacttcctgaagaacctgcccaagagcaccgtgaacggcgtgagctggaccaacgagacccagagacagaagagccacaccttcaactgcagaatgctgatgaagaccccccacgacatcctggaggacatcaacgccagccccgagatgagacagagatacgagaccatgcagtgcttcgccctgagccagcccagagccatgatggaggagggcgaggacctgcagagctgcatgatctgcgtggccagaagaatcaccaccggcgagagaaccttccccagcaaccccgagagcttcatcaccagacacgacctgagcggcaaggtggtgaacatcgacaccaacagcctgagaagcagcatgagacccggcttcgaggacatcatcagaagatgcatccagagattcttcagcctgaacgacggccagagctggagccagaagagacactaccaggaggtgaccagcgacggcatcttcagccccaccgcctacctgaacggccacgccgagacccccgtgtacagattcagcctggccgacggcaccatcgtgaccgcccagaccaagagcaagctgttcagaaaccccgtgaccaacgacagacacggcttcgtgagcacccacttcctgcagagagagcagaacggctacagacccaaccccaaccccgtgggccagggcatcagaccccccatggccggctgcaacagcagcgtgggcggcatgagcatgagccccaaccagggcctgcagatgcccagcagcagagcctacggcctggccgaccccagcaccaccggccagatgagcggcgccagatacggcggcagcagcaacatcgccagcctgacccccggccccggcatgcagagccccagcagctaccagaacaacaactacggcctgaacatgagcagccccccccacggcagccccggcctggcccccaaccagcagaacatcatgatcagccccagaaacagaggcagccccaagatcgccagccaccagttcagccccgtggccggcgtgcacagccccatggccagcagcggcaacaccggcaaccacagcttcagcagcagcagcctgagcgccctgcaggccatcagcgagggcgtgggcaccagcctgctgagcaccctgagcagccccggccccaagctggacaacagccccaacatgaacatcacccagcccagcaaggtgagcaaccaggacagcaagagccccctgggcttctactgcgaccagaaccccgtggagagcagcatgtgccagagcaacagcagagaccacctgagcgacaaggagagcaaggagagcagcgtggagggcgccgagaaccagagaggccccctggagagcaagggccacaagaagctgctgcagctgctgacctgcagcagcgacgacagaggccacagcagcctgaccaacagccccctggacagcagctgcaaggagagcagcgtgagcgtgaccagccccagcggcgtgagcagcagcaccagcggcggcgtgagcagcaccagcaacatgcacggcagcctgctgcaggagaagcacagaatcctgcacaagctgctgcagaacggcaacagccccgccgaggtggccaagatcaccgccgaggccaccggcaaggacaccagcagcatcaccagctgcggcgacggcaacgtggtgaagcaggagcagctgagccccaagaagaaggagaacaacgccctgctgagatacctgctggacagagacgaccccagcgacgccctgagcaaggagctgcagccccaggtggagggcgtggacaacaagatgagccagtgcaccagcagcaccatccccagcagcagccaggagaaggaccccaagatcaagaccgagaccagcgaggagggcagcggcgacctggacaacctggacgccatcctgggcgacctgaccagcagcgacttctacaacaacagcatcagcagcaacggcagccacctgggcaccaagcagcaggtgttccagggcaccaacagcctgggcgactggggcctgcccaacagcaaggccggcagaatggagcccatgaacagcaacagcatgggcagacccggcggcgactacaacaccagcctgcccagacccgccctgggcggcagcatccccaccctgcccctgagaagcaacagcatccccggcgccagacccgtgctgcagcagcagcagcagatgctgcagatgagacccggcgagatccccatgggcatgggcgccaacccctacggccaggccgccgccagcaaccagctgggcagctggcccgacggcatgctgagcatggagcaggtgagccacggcacccagaacagacccctgctgagaaacagcctggacgacctggtgggcccccccagcaacctggagggccagagcgacgagagagccctgctggaccagctgcacaccctgctgagcaacaccgacgccaccggcctggaggagatcgacagagccctgggcatccccgagctggtgaaccagggccaggccctggagcccaagcaggacgccttccagggccaggaggccgccgtgatgatggaccagaaggccggcctgtacggccagacctaccccgcccagggcccccccatgcagggcggcttccacctgcagggccagagccccagcttcaacagcatgatgaaccagatgaaccagcagggcaacttccccctgcagggcatgcaccccagagccaacatcatgagacccagaaccaacacccccaagcagctgagaatgcagctgcagcagagactgcagggccagcagttcctgaaccagagcagacaggccctggagctgaagatggagaaccccaccgccggcggcgccgccgtgatgagacccatgatgcagccccagcagggcttcctgaacgcccagatggtggcccagagaagcagagagctgctgagccaccacttcagacagcagagagtggccatgatgatgcagcagcagcagcagcagcagcagcagcagcagcagcagcagcagcagcagcagcagcagcagcagcagcagcagcagcagcagcagacccaggccttcagccccccccccaacgtgaccgccagccccagcatggacggcctgctggccggccccaccatgccccaggcccccccccagcagttcccctaccagcccaactacggcatgggccagcagcccgaccccgccttcggcagagtgagcagcccccccaacgccatgatgagcagcagaatgggccccagccagaaccccatgatgcagcacccccaggccgccagcatctaccagagcagcgagatgaagggctggcccagcggcaacctggccagaaacagcagcttcagccagcagcagttcgcccaccagggcaaccccgccgtgtacagcatggtgcacatgaacggcagcagcggccacatgggccagatgaacatgaaccccatgcccatgagcggcatgcccatgggccccgaccagaagtactgctag

SEQ ID NO: 91498 - DNA, 4248 bp, synthetic construct
  misc_feature 1..4248: note = Description of Artificial Sequence: Synthetic coding sequence
  source 1..4248: mol_type = other DNA
atgagcggcctgggcgagaacctggaccccctggccagcgacagcagaaagagaaagctgccctgcgacacccccggccagggcctgacctgcagcggcgagaagagaagaagagagcaggagagcaagtacatcgaggagctggccgagctgatcagcgccaacctgagcgacatcgacaacttcaacgtgaagcccgacaagtgcgccatcctgaaggagaccgtgagacagatcagacagatcaaggagcagggcaagaccatcagcaacgacgacgacgtgcagaaggccgacgtgagcagcaccggccagggcgtgatcgacaaggacagcctgggccccctgctgctgcaggccctggacggcttcctgttcgtggtgaacagagacggcaacatcgtgttcgtgagcgagaacgtgacccagtacctgcagtacaagcaggaggacctggtgaacaccagcgtgtacaacatcctgcacgaggaggacagaaaggacttcctgaagaacctgcccaagagcaccgtgaacggcgtgagctggaccaacgagacccagagacagaagagccacaccttcaactgcagaatgctgatgaagaccccccacgacatcctggaggacatcaacgccagccccgagatgagacagagatacgagaccatgcagtgcttcgccctgagccagcccagagccatgatggaggagggcgaggacctgcagagctgcatgatctgcgtggccagaagaatcaccaccggcgagagaaccttccccagcaaccccgagagcttcatcaccagacacgacctgagcggcaaggtggtgaacatcgacaccaacagcctgagaagcagcatgagacccggcttcgaggacatcatcagaagatgcatccagagattcttcagcctgaacgacggccagagctggagccagaagagacactaccaggaggtgaccagcgacggcatcttcagccccaccgcctacctgaacggccacgccgagacccccgtgtacagattcagcctggccgacggcaccatcgtgaccgcccagaccaagagcaagctgttcagaaaccccgtgaccaacgacagacacggcttcgtgagcacccacttcctgcagagagagcagaacggctacagacccaaccccaaccccgtgggccagggcatcagaccccccatggccggctgcaacagcagcgtgggcggcatgagcatgagccccaaccagggcctgcagatgcccagcagcagagcctacggcctggccgaccccagcaccaccggccagatgagcggcgccagatacggcggcagcagcaacatcgccagcctgacccccggccccggcatgcagagccccagcagctaccagaacaacaactacggcctgaacatgagcagccccccccacggcagccccggcctggcccccaaccagcagaacatcatgatcagccccagaaacagaggcagccccaagatcgccagccaccagttcagccccgtggccggcgtgcacagccccatggccagcagcggcaacaccggcaaccacagcttcagcagcagcagcctgagcgccctgcaggccatcagcgagggcgtgggcaccagcctgctgagcaccctgagcagccccggccccaagctggacaacagccccaacatgaacatcacccagcccagcaaggtgagcaaccaggacagcaagagccccctgggcttctactgcgaccagaaccccgtggagagcagcatgtgccagagcaacagcagagaccacctgagcgacaaggagagcaaggagagcagcgtggagggcgccgagaaccagagaggccccctggagagcaagggccacaagaagctgctgcagctgctgacctgcagcagcgacgacagaggccacagcagcctgaccaacagccccctggacagcagctgcaaggagagcagcgtgagcgtgaccagccccagcggcgtgagcagcagcaccagcggcggcgtgagcagcaccagcaacatgcacggcagcctgctgcaggagaagcacagaatcctgcacaagctgctgcagaacggcaacagccccgccgaggtggccaagatcaccgccgaggccaccggcaaggacaccagcagcatcaccagctgcggcgacggcaacgtggtgaagcaggagcagctgagccccaagaagaaggagaacaacgccctgctgagatacctgctggacagagacgaccccagcgacgccctgagcaaggagctgcagccccaggtggagggcgtggacaacaagatgagccagtgcaccagcagcaccatccccagcagcagccaggagaaggaccccaagatcaagaccgagaccagcgaggagggcagcggcgacctggacaacctggacgccatcctgggcgacctgaccagcagcgacttctacaacaacagcatcagcagcaacggcagccacctgggcaccaagcagcaggtgttccagggcaccaacagcctgggcctgaagagcagccagagcgtgcagagcatcagacccccctacaacagagccgtgagcctggacagccccgtgagcgtgggcagcagcccccccgtgaagaacatcagcgccttccccatgctgcccaagcagcccatgctgggcggcaaccccagaatgatggacagccaggagaactacggcagcagcatgggcgactggggcctgcccaacagcaaggccggcagaatggagcccatgaacagcaacagcatgggcagacccggcggcgactacaacaccagcctgcccagacccgccctgggcggcagcatccccaccctgcccctgagaagcaacagcatccccggcgccagacccgtgctgcagcagcagcagcagatgctgcagatgagacccggcgagatccccatgggcatgggcgccaacccctacggccaggccgccgccagcaaccagctgggcagctggcccgacggcatgctgagcatggagcaggtgagccacggcacccagaacagacccctgctgagaaacagcctggacgacctggtgggcccccccagcaacctggagggccagagcgacgagagagccctgctggaccagctgcacaccctgctgagcaacaccgacgccaccggcctggaggagatcgacagagccctgggcatccccgagctggtgaaccagggccaggccctggagcccaagcaggacgccttccagggccaggaggccgccgtgatgatggaccagaaggccggcctgtacggccagacctaccccgcccagggcccccccatgcagggcggcttccacctgcagggccagagccccagcttcaacagcatgatgaaccagatgaaccagcagggcaacttccccctgcagggcatgcaccccagagccaacatcatgagacccagaaccaacacccccaagcagctgagaatgcagctgcagcagagactgcagggccagcagttcctgaaccagagcagacaggccctggagctgaagatggagaaccccaccgccggcggcgccgccgtgatgagacccatgatgcagccccagcagggcttcctgaacgcccagatggtggcccagagaagcagagagctgctgagccaccacttcagacagcagagagtggccatgatgatgcagcagcagcagcagcagcagcagcagcagcagcagcagcagcagcagcagcagcagcagcagcagcagcagcagcagcagcagcagacccaggccttcagccccccccccaacgtgaccgccagccccagcatggacggcctgctggccggccccaccatgccccaggcccccccccagcagttcccctaccagcccaactacggcatgggccagcagcccgaccccgccttcggcagagtgagcagcccccccaacgccatgatgagcagcagaatgggccccagccagaaccccatgatgcagcacccccaggccgccagcatctaccagagcagcgagatgaagggctggcccagcggcaacctggccagaaacagcagcttcagccagcagcagttcgcccaccagggcaaccccgccgtgtacagcatggtgcacatgaacggcagcagcggccacatgggccagatgaacatgaaccccatgcccatgagcggcatgcccatgggccccgaccagaagtactgctag

SEQ ID NO: 91499 - DNA, 4275 bp, synthetic construct
  misc_feature 1..4275: note = Description of Artificial Sequence: Synthetic coding sequence
  source 1..4275: mol_type = other DNA
atgagcggcctgggcgagaacctggaccccctggccagcgacagcagaaagagaaagctgccctgcgacacccccggccagggcctgacctgcagcggcgagaagagaagaagagagcaggagagcaagtacatcgaggagctggccgagctgatcagcgccaacctgagcgacatcgacaacttcaacgtgaagcccgacaagtgcgccatcctgaaggagaccgtgagacagatcagacagatcaaggagcagggcaagaccatcagcaacgacgacgacgtgcagaaggccgacgtgagcagcaccggccagggcgtgatcgacaaggacagcctgggccccctgctgctgcaggccctggacggcttcctgttcgtggtgaacagagacggcaacatcgtgttcgtgagcgagaacgtgacccagtacctgcagtacaagcaggaggacctggtgaacaccagcgtgtacaacatcctgcacgaggaggacagaaaggacttcctgaagaacctgcccaagagcaccgtgaacggcgtgagctggaccaacgagacccagagacagaagagccacaccttcaactgcagaatgctgatgaagaccccccacgacatcctggaggacatcaacgccagccccgagatgagacagagatacgagaccatgcagtgcttcgccctgagccagcccagagccatgatggaggagggcgaggacctgcagagctgcatgatctgcgtggccagaagaatcaccaccggcgagagaaccttccccagcaaccccgagagcttcatcaccagacacgacctgagcggcaaggtggtgaacatcgacaccaacagcctgagaagcagcatgagacccggcttcgaggacatcatcagaagatgcatccagagattcttcagcctgaacgacggccagagctggagccagaagagacactaccaggaggcctacctgaacggccacgccgagacccccgtgtacagattcagcctggccgacggcaccatcgtgaccgcccagaccaagagcaagctgttcagaaaccccgtgaccaacgacagacacggcttcgtgagcacccacttcctgcagagagagcagaacggctacagacccaaccccaaccccgtgggccagggcatcagaccccccatggccggctgcaacagcagcgtgggcggcatgagcatgagccccaaccagggcctgcagatgcccagcagcagagcctacggcctggccgaccccagcaccaccggccagatgagcggcgccagatacggcggcagcagcaacatcgccagcctgacccccggccccggcatgcagagccccagcagctaccagaacaacaactacggcctgaacatgagcagccccccccacggcagccccggcctggcccccaaccagcagaacatcatgatcagccccagaaacagaggcagccccaagatcgccagccaccagttcagccccgtggccggcgtgcacagccccatggccagcagcggcaacaccggcaaccacagcttcagcagcagcagcctgagcgccctgcaggccatcagcgagggcgtgggcaccagcctgctgagcaccctgagcagccccggccccaagctggacaacagccccaacatgaacatcacccagcccagcaaggtgagcaaccaggacagcaagagccccctgggcttctactgcgaccagaaccccgtggagagcagcatgtgccagagcaacagcagagaccacctgagcgacaaggagagcaaggagagcagcgtggagggcgccgagaaccagagaggccccctggagagcaagggccacaagaagctgctgcagctgctgacctgcagcagcgacgacagaggccacagcagcctgaccaacagccccctggacagcagctgcaaggagagcagcgtgagcgtgaccagccccagcggcgtgagcagcagcaccagcggcggcgtgagcagcaccagcaacatgcacggcagcctgctgcaggagaagcacagaatcctgcacaagctgctgcagaacggcaacagccccgccgaggtggccaagatcaccgccgaggccaccggcaaggacaccagcagcatcaccagctgcggcgacggcaacgtggtgaagcaggagcagctgagccccaagaagaaggagaacaacgccctgctgagatacctgctggacagagacgaccccagcgacgccctgagcaaggagctgcagccccaggtggagggcgtggacaacaagatgagccagtgcaccagcagcaccatccccagcagcagccaggagaaggaccccaagatcaagaccgagaccagcgaggagggcagcggcgacctggacaacctggacgccatcctgggcgacctgaccagcagcgacttctacaacaacagcatcagcagcaacggcagccacctgggcaccaagcagcaggtgttccagggcaccaacagcctgggcctgaagagcagccagagcgtgcagagcatcagacccccctacaacagagccgtgagcctggacagccccgtgagcgtgggcagcagcccccccgtgaagaacatcagcgccttccccatgctgcccaagcagcccatgctgggcggcaaccccagaatgatggacagccaggagaactacggcagcagcatgggcggccccaacagaaacgtgaccgtgacccagacccccagcagcggcgactggggcctgcccaacagcaaggccggcagaatggagcccatgaacagcaacagcatgggcagacccggcggcgactacaacaccagcctgcccagacccgccctgggcggcagcatccccaccctgcccctgagaagcaacagcatccccggcgccagacccgtgctgcagcagcagcagcagatgctgcagatgagacccggcgagatccccatgggcatgggcgccaacccctacggccaggccgccgccagcaaccagctgggcagctggcccgacggcatgctgagcatggagcaggtgagccacggcacccagaacagacccctgctgagaaacagcctggacgacctggtgggcccccccagcaacctggagggccagagcgacgagagagccctgctggaccagctgcacaccctgctgagcaacaccgacgccaccggcctggaggagatcgacagagccctgggcatccccgagctggtgaaccagggccaggccctggagcccaagcaggacgccttccagggccaggaggccgccgtgatgatggaccagaaggccggcctgtacggccagacctaccccgcccagggcccccccatgcagggcggcttccacctgcagggccagagccccagcttcaacagcatgatgaaccagatgaaccagcagggcaacttccccctgcagggcatgcaccccagagccaacatcatgagacccagaaccaacacccccaagcagctgagaatgcagctgcagcagagactgcagggccagcagttcctgaaccagagcagacaggccctggagctgaagatggagaaccccaccgccggcggcgccgccgtgatgagacccatgatgcagccccaggtgagcagccagcagggcttcctgaacgcccagatggtggcccagagaagcagagagctgctgagccaccacttcagacagcagagagtggccatgatgatgcagcagcagcagcagcagcagcagcagcagcagcagcagcagcagcagcagcagcagcagcagcagcagcagcagcagcagcagcagacccaggccttcagccccccccccaacgtgaccgccagccccagcatggacggcctgctggccggccccaccatgccccaggcccccccccagcagttcccctaccagcccaactacggcatgggccagcagcccgaccccgccttcggcagagtgagcagcccccccaacgccatgatgagcagcagaatgggccccagccagaaccccatgatgcagcacccccaggccgccagcatctaccagagcagcgagatgaagggctggcccagcggcaacctggccagaaacagcagcttcagccagcagcagttcgcccaccagggcaaccccgccgtgtacagcatggtgcacatgaacggcagcagcggccacatgggccagatgaacatgaaccccatgcccatgagcggcatgcccatgggccccgaccagaagtactgctag

SEQ ID NO: 91500 - DNA, 4263 bp, synthetic construct; identical to SEQ ID NO: 91496
  misc_feature 1..4263: note = Description of Artificial Sequence: Synthetic coding sequence
  source 1..4263: mol_type = other DNA

SEQ ID NO: 91501 - DNA, 774 bp, synthetic construct
  misc_feature 1..774: note = Description of Artificial Sequence: Synthetic coding sequence
  source 1..774: mol_type = other DNA
atgatggaggagggcgaggacctgcagagctgcatgatctgcgtggccagaagaatcaccaccggcgagagaaccttccccagcaaccccgagagcttcatcaccagacacgacctgagcggcaaggtggtgaacatcgacaccaacagcctgagaagcagcatgagacccggcttcgaggacatcatcagaagatgcatccagagattcttcagcctgaacgacggccagagctggagccagaagagacactaccaggaggcctacctgaacggccacgccgagacccccgtgtacagattcagcctggccgacggcaccatcgtgaccgcccagaccaagagcaagctgttcagaaaccccgtgaccaacgacagacacggcttcgtgagcacccacttcctgcagagagagcagaacggctacagacccaaccccaaccccgtgggccagggcatcagaccccccatggccggctgcaacagcagcgtgggcggcatgagcatgagccccaaccagggcctgcagatgcccagcagcagagcctacggcctggccgaccccagcaccaccggccagatgagcggcgccagatacggcggcagcagcaacatcgccagcctgacccccggccccggcatgcagagccccagcagctaccagaacaacaactacggcctgaacatgagcagccccccccacggcagccccggcctggcccccaaccagcagaacatcatgatcctgctggtgatcgtgggcgtgcagagatag

SEQ ID NO: 91502 - DNA, 864 bp, synthetic construct
  misc_feature 1..864: note = Description of Artificial Sequence: Synthetic coding sequence
  source 1..864: mol_type = other DNA
atgaacaccttccaggaccagagcggcagcagcagcaacagagagcccctgctgagatgcagcgacgccagaagagacctggagctggccatcggcggcgtgctgagagccgagcagcagatcaaggacaacctgagagaggtgaaggcccagatccacagctgcatcagcagacacctggagtgcctgagaagcagagaggtgtggctgtacgagcaggtggacctgatctaccagctgaaggaggagaccctgcagcagcaggcccagcagctgtacagcctgctgggccagttcaactgcctgacccaccagctggagtgcacccagaacaaggacctggccaaccaggtgagcgtgtgcctggagagactgggcagcctgaccctgaagcccgaggacagcaccgtgctgctgttcgaggccgacaccatcaccctgagacagaccatcaccaccttcggcagcctgaagaccatccagatccccgagcacctgatggcccacgccagcagcgccaacatcggccccttcctggagaagagaggctgcatcagcatgcccgagcagaagagcgccagcggcatcgtggccgtgcccttcagcgagtggctgctgggcagcaagcccgccagcggctaccaggccccctacatccccagcaccgacccccaggactggctgacccagaagcagaccctggagaacagccagcaggaggtgctgctgaacagccccctgcaggaggagcacaacttcccccccgaccactacggcctgcccgccgtgtgcgacctgttcgcctgcatgcagctgaaggtggacaaggagaagtggctgtacagaacccccctgcaggtgtag

SEQ ID NO: 91503 - DNA, 1845 bp, synthetic construct
  misc_feature 1..1845: note = Description of Artificial Sequence: Synthetic coding sequence
  source 1..1845: mol_type = other DNA
atgaacaccttccaggaccagagcggcagcagcagcaacagagagcccctgctgagatgcagcgacgccagaagagacctggagctggccatcggcggcgtgctgagagccgagcagcagatcaaggacaacctgagagaggtgaaggcccagatccacagctgcatcagcagacacctggagtgcctgagaagcagagaggtgtggctgtacgagcaggtggacctgatctaccagctgaaggaggagaccctgcagcagcaggcccagcagctgtacagcctgctgggccagttcaactgcctgacccaccagctggagtgcacccagaacaaggacctggccaaccaggtgagcgtgtgcctggagagactgggcagcctgaccctgaagcccgaggacagcaccgtgctgctgttcgaggccgacaccatcaccctgagacagaccatcaccaccttcggcagcctgaagaccatccagatccccgagcacctgatggcccacgccagcagcgccaacatcggccccttcctggagaagagaggctgcatcagcatgcccgagcagaagagcgccagcggcatcgtggccgtgcccttcagcgagtggctgctgggcagcaagcccgccagcggctaccaggccccctacatccccagcaccgacccccaggactggctgacccagaagcagaccctggagaacagccagaccagcagcagagcctgcaacttcttcaacaacgtgggcggcaacctgaagggcctggagaactggctgctgaagagcgagaagagcagctaccagaagtgcaacagccacagcaccaccagcagcttcagcatcgagatggagaaggtgggcgaccaggagctgcccgaccaggacgagatggacctgagcgactggctggtgaccccccaggagagccacaagctgagaaagcccgagaacggcagcagagagaccagcgagaagttcaagctgctgttccagagctacaacgtgaacgactggctggtgaagaccgacagctgcaccaactgccagggcaaccagcccaagggcgtggagatcgagaacctgggcaacctgaagtgcctgaacgaccacctggaggccaagaagcccctgagcacccccagcatggtgaccgaggactggctggtgcagaaccaccaggacccctgcaaggtggaggaggtgtgcagagccaacgagccctgcaccagcttcgccgagtgcgtgtgcgacgagaactgcgagaaggaggccctgtacaagtggctgctgaagaaggagggcaaggacaagaacggcatgcccgtggagcccaagcccgagcccgagaagcacaaggacagcctgaacatgtggctgtgccccagaaaggaggtgatcgagcagaccaaggcccccaaggccatgacccccagcagaatcgccgacagcttccaggtgatcaagaacagccccctgagcgagtggctgatcagacccccctacaaggagggcagccccaaggaggtgcccggcaccgaggacagagccggcaagcagaagttcaagagccccatgaacaccagctggtgcagcttcaacaccgccgactgggtgctgcccggcaagaagatgggcaacctgagccagctgagcagcggcgaggacaagtggctgctgagaaagaaggcccaggaggtgctgctgaacagccccctgcaggaggagcacaacttcccccccgaccactacggcctgcccgccgtgtgcgacctgttcgcctgcatgcagctgaaggtggacaaggagaagtggctgtacagaacccccctgcagatgtag

SEQ ID NO: 91504 - DNA, 1728 bp, synthetic construct
  misc_feature 1..1728: note = Description of Artificial Sequence: Synthetic coding sequence
  source 1..1728: mol_type = other DNA
atgaacaccttccaggaccagagcggcagcagcagcaacagagagcccctgctgagatgcagcgacgccagaagagacctggagctggccatcggcggcgtgctgagagccgagcagcagatcaaggacaacctgagagaggtgaaggcccagatccacagctgcatcagcagacacctggagtgcctgagaagcagagaggtgtggctgtacgagcaggtggacctgatctaccagctgaaggaggagaccctgcagcagcaggcccagcagctgtacagcctgctgggccagttcaactgcctgacccaccagctggagtgcacccagaacaaggacctggccaaccaggtgagcgtgtgcctggagagactgggcagcctgaccctgaagcccgaggacagcaccgtgctgctgttcgaggccgacaccatcaccctgagacagaccatcaccaccttcggcagcctgaagaccatccagatccccgagcacctgatggcccacgccagcagcgccaacatcggccccttcctggagaagagaggctgcatcagcatgcccgagcagaagagcgccagcggcatcgtggccgtgcccttcagcgagtggctgctgggcagcaagcccgccagcggctaccaggccccctacatccccagcaccgacccccaggactggctgacccagaagcagaccctggagaacagccagaccagcagcagagcctgcaacttcttcaacaacgtgggcggcaacctgaagggcctggagaactggctgctgaagagcgagaagagcagctaccagaagtgcaacagccacagcaccaccagcagcttcagcatcgagatggagaaggtgggcgaccaggagctgcccgaccaggacgagatggacctgagcgactggctggtgaccccccaggagagccacaagctgagaaagcccgagaacggcagcagagagaccagcgagaagttcaagctgctgttccagagctacaacgtgaacgactggctggtgaagaccgacagctgcaccaactgccagggcaaccagcccaagggcgtggagatcgagaacctgggcaacctgaagtgcctgaacgaccacctggaggccaagaagcccctgagcacccccagcatggtgaccgaggactggctggtgcagaaccaccaggacccctgcaaggtggaggaggtgtgcagagccaacgagccctgcaccagcttcgccgagtgcgtgtgcgacgagaactgcgagaaggaggccctgtacaagtggctgctgaagaaggagggcaaggacaagaacggcatgcccgtggagcccaagcccgagcccgagaagcacaaggacagcctgaacatgtggctgtgccccagaaaggaggtgatcgagcagaccaaggcccccaaggccatgacccccagcagaatcgccgacagcttccaggtgatcaagaacagccccctgagcgagtggctgatcagacccccctacaaggagggcagccccaaggaggtgcccggcaccgaggacagagccggcaagcagaagtactacctgatccacctgtacagaagaaacatcaccagcccccagaccatcatggccagcctgcagttcgtgatcagcctgcccgtgtgcagcctgaagctgatcaagagaagcggctacatcgagctgctgtacagatgcgagggcatggacaagagctag

SEQ ID NO: 91505 - DNA, 1845 bp, synthetic construct; identical to SEQ ID NO: 91503
  misc_feature 1..1845: note = Description of Artificial Sequence: Synthetic coding sequence
  source 1..1845: mol_type = other DNA

SEQ ID NO: 91506 - DNA, 1347 bp, synthetic construct
  misc_feature 1..1347: note = Description of Artificial Sequence: Synthetic coding sequence
  source 1..1347: mol_type = other DNA
atggcccacgccagcagcgccaacatcggccccttcctggagaagagaggctgcatcagcatgcccgagcagaagagcgccagcggcatcgtggccgtgcccttcagcgagtggctgctgggcagcaagcccgccagcggctaccaggccccctacatccccagcaccgacccccaggactggctgacccagaagcagaccctggagaacagccagaccagcagcagagcctgcaacttcttcaacaacgtgggcggcaacctgaagggcctggagaactggctgctgaagagcgagaagagcagctaccagaagtgcaacagccacagcaccaccagcagcttcagcatcgagatggagaaggtgggcgaccaggagctgcccgaccaggacgagatggacctgagcgactggctggtgaccccccaggagagccacaagctgagaaagcccgagaacggcagcagagagaccagcgagaagttcaagctgctgttccagagctacaacgtgaacgactggctggtgaagaccgacagctgcaccaactgccagggcaaccagcccaagggcgtggagatcgagaacctgggcaacctgaagtgcctgaacgaccacctggaggccaagaagcccctgagcacccccagcatggtgaccgaggactggctggtgcagaaccaccaggacccctgcaaggtggaggaggtgtgcagagccaacgagccctgcaccagcttcgccgagtgcgtgtgcgacgagaactgcgagaaggaggccctgtacaagtggctgctgaagaaggagggcaaggacaagaacggcatgcccgtggagcccaagcccgagcccgagaagcacaaggacagcctgaacatgtggctgtgccccagaaaggaggtgatcgagcagaccaaggcccccaaggccatgacccccagcagaatcgccgacagcttccaggtgatcaagaacagccccctgagcgagtggctgatcagacccccctacaaggagggcagccccaaggaggtgcccggcaccgaggacagagccggcaagcagaagttcaagagccccatgaacaccagctggtgcagcttcaacaccgccgactgggtgctgcccggcaagaagatgggcaacctgagccagctgagcagcggcgaggacaagtggctgctgagaaagaaggcccaggaggtgctgctgaacagccccctgcaggaggagcacaacttcccccccgaccactacggcctgcccgccgtgtgcgacctgttcgcctgcatgcagctgaaggtggacaaggagaagtggctgtacagaacccccctgcagatgtag

SEQ ID NO: 91507 - DNA, 1545 bp, synthetic construct
  misc_feature 1..1545: note = Description of Artificial Sequence: Synthetic coding sequence
  source 1..1545: mol_type = other DNA
atgaacagatggaccctgttcatcagcctgaagagaagacacttcaacagcagactgagcagcagcaccagactgggcagcctgaccctgaagcccgaggacagcaccgtgctgctgttcgaggccgacaccatcaccctgagacagaccatcaccaccttcggcagcctgaagaccatccagatccccgagcacctgatggcccacgccagcagcgccaacatcggccccttcctggagaagagaggctgcatcagcatgcccgagcagaagagcgccagcggcatcgtggccgtgcccttcagcgagtggctgctgggcagcaagcccgccagcggctaccaggccccctacatccccagcaccgacccccaggactggctgacccagaagcagaccctggagaacagccagaccagcagcagagcctgcaacttcttcaacaacgtgggcggcaacctgaagggcctggagaactggctgctgaagagcgagaagagcagctaccagaagtgcaacagccacagcaccaccagcagcttcagcatcgagatggagaaggtgggcgaccaggagctgcccgaccaggacgagatggacctgagcgactggctggtgaccccccaggagagccacaagctgagaaagcccgagaacggcagcagagagaccagcgagaagttcaagctgctgttccagagctacaacgtgaacgactggctggtgaagaccgacagctgcaccaactgccagggcaaccagcccaagggcgtggagatcgagaacctgggcaacctgaagtgcctgaacgaccacctggaggccaagaagcccctgagcacccccagcatggtgaccgaggactggctggtgcagaaccaccaggacccctgcaaggtggaggaggtgtgcagagccaacgagccctgcaccagcttcgccgagtgcgtgtgcgacgagaactgcgagaaggaggccctgtacaagtggctgctgaagaaggagggcaaggacaagaacggcatgcccgtggagcccaagcccgagcccgagaagcacaaggacagcctgaacatgtggctgtgccccagaaaggaggtgatcgagcagaccaaggcccccaaggccatgacccccagcagaatcgccgacagcttccaggtgatcaagaacagccccctgagcgagtggctgatcagacccccctacaaggagggcagccccaaggaggtgcccggcaccgaggacagagccggcaagcagaagttcaagagccccatgaacaccagctggtgcagcttcaacaccgccgactgggtgctgcccggcaagaagatgggcaacctgagccagctgagcagcggcgaggacaagtggctgctgagaaagaaggcccaggaggtgctgctgaacagccccctgcaggaggagcacaacttcccccccgaccactacggcctgcccgccgtgtgcgacctgttcgcctgcatgcagctgaaggtggacaaggagaagtggctgtacagaacccccctgcagatgtag

SEQ ID NO: 91508 - DNA, 795 bp, synthetic construct
  misc_feature 1..795: note = Description of Artificial Sequence: Synthetic coding sequence
  source 1..795: mol_type = other DNA
tgatgcacccccgcctgggccgccgagctggacagcgtgagcaagcagaagaagaaccccaagcccaccttcaagaagaagaccgaggagagaacctgcgaggtgaagaaggtgagcagactgggcagcctgaccctgaagcccgaggacagcaccgtgctgctgttcgaggccgacaccatcaccctgagacagaccatcaccaccttcggcagcctgaagaccatccagatccccgagcacctgatggcccacgccagcagcgccaacatcggccccttcctggagaagagaggctgcatcagcatgcccgagcagaagagcgccagcggcatcgtggccgtgcccttcagcgagtggctgctgggcagcaagcccgccagcggctaccaggccccctacatccccagcaccgacccccaggactggctgacccagaagcagaccctggagaacagccagaccagcagcagagcctgcaacttcttcaacaacgtgggcggcaacctgaagggcctggagaactggctgctgaagagcgagaagagcagctaccagaagtgcaacagccacagcaccaccagcagcttcagcatcgagatggagaaggtgggcgaccaggagctgcccgaccaggacgagatggacctgagcgactggctggtgaccccccaggagagccacaagctgagaaagcccgagaacggcagcagagagaccagcgagaagttcaagctgctgttccagagctacaacgtgaacgactggctggtgaagaccgacagctgcacctag

SEQ ID NO: 91509 - DNA, 1893 bp, synthetic construct
  misc_feature 1..1893: note = Description of Artificial Sequence: Synthetic coding sequence
  source 1..1893: mol_type = other DNA
atgggcgcccagctgaccaccttcgccctggccggcgccgtgagaagaatgaacaccttccaggaccagagcggcagcagcagcaacagagagcccctgctgagatgcagcgacgccagaagagacctggagctggccatcggcggcgtgctgagagccgagcagcagatcaaggacaacctgagagaggtgaaggcccagatccacagctgcatcagcagacacctggagtgcctgagaagcagagaggtgtggctgtacgagcaggtggacctgatctaccagctgaaggaggagaccctgcagcagcaggcccagcagctgtacagcctgctgggccagttcaactgcctgacccaccagctggagtgcacccagaacaaggacctggccaaccaggtgagcgtgtgcctggagagactgggcagcctgaccctgaagcccgaggacagcaccgtgctgctgttcgaggccgacaccatcaccctgagacagaccatcaccaccttcggcagcctgaagaccatccagatccccgagcacctgatggcccacgccagcagcgccaacatcggccccttcctggagaagagaggctgcatcagcatgcccgagcagaagagcgccagcggcatcgtggccgtgcccttcagcgagtggctgctgggcagcaagcccgccagcggctaccaggccccctacatccccagcaccgacccccaggactggctgacccagaagcagaccctggagaacagccagaccagcagcagagcctgcaacttcttcaacaacgtgggcggcaacctgaagggcctggagaactggctgctgaagagcgagaagagcagctaccagaagtgcaacagccacagcaccaccagcagcttcagcatcgagatggagaaggtgggcgaccaggagctgcccgaccaggacgagatggacctgagcgactggctggtgaccccccaggagagccacaagctgagaaagcccgagaacggcagcagagagaccagcgagaagttcaagctgctgttccagagctacaacgtgaacgactggctggtgaagaccgacagctgcaccaactgccagggcaaccagcccaagggcgtggagatcgagaacctgggcaacctgaagtgcctgaacgaccacctggaggccaagaagcccctgagcacccccagcatggtgaccgaggactggctggtgcagaaccaccaggacccctgcaaggtggaggaggtgtgcagagccaacgagccctgcaccagcttcgccgagtgcgtgtgcgacgagaactgcgagaaggaggccctgtacaagtggctgctgaagaaggagggcaaggacaagaacggcatgcccgtggagcccaagcccgagcccgagaagcacaaggacagcctgaacatgtggctgtgccccagaaaggaggtgatcgagcagaccaaggcccccaaggccatgacccccagcagaatcgccgacagcttccaggtgatcaagaacagccccctgagcgagtggctgatcagacccccctacaaggagggcagccccaaggaggtgcccggcaccgaggacagagccggcaagcagaagttcaagagccccatgaacaccagctggtgcagcttcaacaccgccgactgggtgctgcccggcaagaagatgggcaacctgagccagctgagcagcggcgaggacaagtggctgctgagaaagaaggcccaggaggtgctgctgaacagccccctgcaggaggagcacaacttcccccccgaccactacggcctgcccgccgtgtgcgacctgttcgcctgcatgcagctgaaggtggacaaggagaagtggctgtacagaacccccctgcagatgtag

SEQ ID NO: 91510 - DNA, 1845 bp, synthetic construct; identical to SEQ ID NO: 91503
  misc_feature 1..1845: note = Description of Artificial Sequence: Synthetic coding sequence
  source 1..1845: mol_type = other DNA

SEQ ID NO: 91511 - DNA, 1953 bp, synthetic construct
  misc_feature 1..1953: note = Description of Artificial Sequence: Synthetic coding sequence
  source 1..1953: mol_type = other DNA
atgggcgcccagctgaccaccttcgccctggccggcgccgtgagaagaatgaacaccttccaggaccagagcggcagcagcagcaacagagagcccctgctgagatgcagcgacgccagaagagacctggagctggccatcggcggcgtgctgagagccgagcagcagatcaaggacaacctgagagaggtgaaggcccagatccacagctgcatcagcagacacctggagtgcctgagaagcagagaggtgtggctgtacgagcaggtggacctgatctaccagctgaaggaggagaccctgcagcagcaggcccagcagctgtacagcctgctgggccagttcaactgcctgacccaccagctggagtgcacccagaacaaggacctggccaaccaggtgagcgtgtgcctggagagactgggcagcctgaccctgaagcccgaggacagcaccgtgctgctgttcgaggccgacaccatcaccctgagacagaccatcaccaccttcggcagcctgaagaccatccagatccccgagcacctgatggcccacgccagcagcgccaacatcggccccttcctggagaagagaggctgcatcagcatgcccgagcagaagagcgccagcggcatcgtggccgtgcccttcagcgagtggctgctgggcagcaagcccgccagcggctaccaggccccctacatccccagcaccgacccccaggactggctgacccagaagcagaccctggagaacagccagaccagcagcagagcctgcaacttcttcaacaacgtgggcggcaacctgaagggcctggagaactggctgctgaagagcgagaagagcagctaccagaagtgcaacagccacagcaccaccagcagcttcagcatcgagatggagaaggtgggcgaccaggagctgcccgaccaggacgagatggacctgagcgactggctggtgaccccccaggagagccacaagctgagaaagcccgagaacggcagcagagagaccagcgagaagttcaagctgctgttccagagctacaacgtgaacgactggctggtgaagaccgacagctgcaccaactgccagggcaaccagcccaagggcgtggagatcgagaacctgggcaacctgaagtgcctgaacgaccacctggaggccaagaagcccctgagcacccccagcatggtgaccgaggactggctggtgcagaaccaccaggacccctgcaaggtggaggaggtgtgcagagccaacgagccctgcaccagcttcgccgagtgcgtgtgcgacgagaactgcgagaaggaggccctgtacaagtggctgctgaagaaggagggcaaggacaagaacggcatgcccgtggagcccaagcccgagcccgagaagcacaaggacagcctgaacatgtggctgtgccccagaaaggaggtgatcgagcagaccaaggcccccaaggccatgacccccagcagaatcgccgacagcttccaggtgatcaagaacagccccctgagcgagtggctgatcagacccccctacaaggagggcagccccaaggaggtgcccggcaccgaggacagagccggcaagcagaagttcaagagccccatgaacaccagctggtgcagcttcaacaccgccgactgggtgctgcccggcaagaagatgggcaacctgagccagctgagcagcggcgaggacaagtggctgctgagaaagaaggcccaggaggtgctgctgaacagccccctgcaggaggagcacaacttcccccccgaccactacggcctgcccgccgtgtgcgacctgttcgcctgcatgcagctgaaggtggacaaggagaagtggctgtacagaacccccctgcaggcctacttcaagatgaacttccaggacgtgaccgtgggcaacttccagatcccctgcggcttctag

SEQ ID NO: 91512 - DNA, 6192 bp, synthetic construct
  misc_feature 1..6192: note = Description of Artificial Sequence: Synthetic coding sequence
  source 1..6192: mol_type = other DNA
atggtgctggacgacctgcccaacctggaggacatctacaccagcctgtgcagcagcaccatggaggacagcgagatggacttcgacagcggcctggaggacgacgacaccaagagcgacagcatcctggaggacagcaccatcttcgtggccttcaagggcaacatcgacgacaaggacttcaagtggaagctggacgccatcctgaagaacgtgcccaacctgctgcacatggagagcagcaagctgaaggtgcagaaggtggagccctggaacagcgtgagagtgaccttcaacatccccagagaggccgccgagagactgagaatcctggcccagagcaacaaccagcagctgagagacctgggcatcctgagcgtgcagatcgagggcgagggcgccatcaacctggccctggcccagaacagaagccaggacgtgagaatgaacggccccatgggcgccggcaacagcgtgagaatggaggccggcttccccatggccagcggccccggcatcatcagaatgaacaaccccgccaccgtgatgatcccccccggcggcaacgtgagcagcagcatgatggcccccggccccaaccccgagctgcagcccagaacccccagacccgccagccagagcgacgccatggaccccctgctgagcggcctgcacatccagcagcagagccaccccagcggcagcctggcccccccccaccaccccatgcagcccgtgagcgtgaacagacagatgaaccccgccaacttcccccagctgcagcagcagcagcagcagcagcagcagcagcagcagcagcagcagcagcagcagcagcagcagcagcagcagcagctgcaggccagacccccccagcagcaccagcagcagcagccccagggcatcagaccccagttcaccgcccccacccaggtgcccgtgccccccggctggaaccagctgcccagcggcgccctgcagcccccccccgcccagggcagcctgggcaccatgaccgccaaccagggctggaagaaggcccccctgcccggccccatgcagcagcagctgcaggccagacccagcctggccaccgtgcagacccccagccaccccccccccccctaccccttcggcagccagcaggccagccaggcccacaccaacttcccccagatgagcaaccccggccagttcaccgccccccagatgaagagcctgcagggcggccccagcagagtgcccacccccctgcagcagccccacctgaccaacaagagccccgccagcagccccagcagcttccagcagggcagccccgccagcagccccaccgtgaaccagacccagcagcagatgggccccagacccccccagaacaaccccctgccccagggcttccagcagcccgtgagcagccccggcagaaaccccatggtgcagcagggcaacgtgccccccaacttcatggtgatgcagcagcagccccccaaccagggcccccagagcctgcaccccggcctgggcggcatgcccaagagactgccccccggcttcagcgccggccaggccaaccccaacttcatgcagggccaggtgcccagcaccaccgccaccacccccggcaacagcggcgccccccagctgcaggccaaccagaacgtgcagcacgccggcggccagggcgccggccccccccagaaccagatgcaggtgagccacggcccccccaacatgatgcagcccagcctgatgggcatccacggcaacatgaacaaccagcaggccggcaccagcggcgtgccccaggtgaacctgagcaacatgcagggccagccccagcagggcccccccagccagctgatgggcatgcaccagcagatcgtgcccagccagggccagatggtgcagcagcagggcaccctgaacccccagaaccccatgatcctgagcagagcccagctgatgccccagggccagatgatggtgaacccccccagccagaacctgggccccagcccccagagaatgaccccccccaagcagatgctgagccagcagggcccccagatgatggccccccacaaccagatgatgggcccccagggccaggtgctgctgcagcagaaccccatgatcgagcagatcatgaccaaccagatgcagggcaacaagcagcagttcaacacccagaaccagagcaacgtgatgcccggccccgcccagatcatgagaggccccacccccaacatgcagggcaacatggtgcagttcaccggccagatgagcggccagatgctgccccagcagggccccgtgaacaacagccccagccaggtgatgggcatccagggccaggtgctgagaccccccggccccagcccccacatggcccagcagcacggcgaccccgccaccaccgccaacaacgacgtgagcctgagccagatgatgcccgacgtgagcatccagcagaccaacatggtgcccccccacgtgcaggccatgcagggcaacagcgccagcggcaaccacttcagcggccacggcatgagcttcaacgcccccttcagcggcgcccccaacggcaaccagatgagctgcggccagaaccccggcttccccgtgaacaaggacgtgaccctgaccagccccctgctggtgaacctgctgcagagcgacatcagcgccggccacttcggcgtgaacaacaagcagaacaacaccaacgccaacaagcccaagaagaagaagccccccagaaagaagaagaacagccagcaggacctgaacacccccgacaccagacccgccggcctggaggaggccgaccagccccccctgcccggcgagcagggcatcaacctggacaacagcggccccaagctgcccgagttcagcaacagaccccccggctaccccagccagcccgtggagcagagacccctgcagcagatgcccccccagctgatgcagcacgtggccccccccccccagcccccccagcagcagccccagccccagctgccccagcagcagcagccccccccccccagccagccccagagccagcagcagcagcagcagcagcagcagatgatgatgatgctgatgatgcagcaggaccccaagagcgtgagactgcccgtgagccagaacgtgcacccccccagaggccccctgaaccccgacagccagagaatgcccatgcagcagagcggcagcgtgcccgtgatggtgagcctgcagggccccgccagcgtgccccccagccccgacaagcagagaatgcccatgcccgtgaacacccccctgggcagcaacagcagaaagatggtgtaccaggagagcccccagaaccccagcagcagccccctggccgagatggccagcctgcccgaggccagcggcagcgaggcccccagcgtgcccggcggccccaacaacatgcccagccacgtggtgctgccccagaaccagctgatgatgaccggccccaagcccggccccagccccctgagcgccacccagggcgccaccccccagcagccccccgtgaacagcctgcccagcagccacggccaccacttccccaacgtggccgcccccacccagaccagcagacccaagacccccaacagagccagccccagaccctactacccccagacccccaacaacagaccccccagcaccgagcccagcgagatcagcctgagccccgagagactgaacgccagcatcgccggcctgttccccccccagatcaacatccccctgccccccagacccaacctgaacagaggcttcgaccagcagggcctgaaccccaccaccctgaaggccatcggccaggcccccagcaacctgaccatgaaccccagcaacttcgccaccccccagacccacaagctggacagcgtggtggtgaacagcggcaagcagagcaacagcggcgccaccaagagagccagccccagcaacagcagaagaagcagccccggcagcagcagaaagaccacccccagccccggcagacagaacagcaaggcccccaagctgaccctggccagccagaccaacgccgccctgctgcagaacgtggagctgcccagaaacgtgctggtgagccccacccccctggccaacccccccgtgcccggcagcttccccaacaacagcggcctgaacccccagaacagcaccgtgagcgtggccgccgtgggcggcgtggtggaggacaacaaggagagcctgaacgtgccccaggacagcgactgccagaacagccagagcagaaaggagcaggtgaacatcgagctgaaggccgtgcccgcccaggaggtgaagatggtggtgcccgaggaccagagcaagaaggacggccagcccagcgaccccaacaagctgcccagcgtggaggagaacaagaacctggtgagccccgccatgagagaggcccccaccagcctgagccagctgctggacaacagcggcgcccccaacgtgaccatcaagccccccggcctgaccgacctggaggtgaccccccccgtggtgagcggcgaggacctgaagaaggccagcgtgatccccaccctgcaggacctgagcagcagcaaggagcccagcaacagcctgaacctgccccacagcaacgagctgtgcagcagcctggtgcaccccgagctgagcgaggtgagcagcaacgtggcccccagcatcccccccgtgatgagcagacccgtgagcagcagcagcatcagcacccccctgccccccaaccagatcaccgtgttcgtgaccagcaaccccatcaccaccagcgccaacaccagcgccgccctgcccacccacctgcagagcgccctgatgagcaccgtggtgaccatgcccaacgccggcagcaaggtgatggtgagcgagggccagagcgccgcccagagcaacgccagaccccagttcatcacccccgtgttcatcaacagcagcagcatcatccaggtgatgaagggcagccagcccagcaccatccccgccgcccccctgaccaccaacagcggcctgatgccccccagcgtggccgtggtgggccccctgcacatcccccagaacatcaagttcagcagcgcccccgtgccccccaacgccctgagcagcagccccgcccccaacatccagaccggcagacccctggtgctgagcagcagagccacccccgtgcagctgcccagccccccctgcaccagcagccccgtggtgcccagccacccccccgtgcagcaggtgaaggagctgaaccccgacgaggccagcccccaggtgaacaccagcgccgaccagaacaccctgcccagcagccagagcaccaccatggtgagccccctgctgaccaacagccccggcagcagcggcaacagaagaagccccgtgagcagcagcaagggcaagggcaaggtggacaagatcggccagatcctgctgaccaaggcctgcaagaaggtgaccggcagcctggagaagggcgaggagcagtacggcgccgacggcgagaccgagggccagggcctggacaccaccgcccccggcctgatgggcaccgagcagctgagcaccgagctggacagcaagacccccaccccccccgcccccaccctgctgaagatgaccagcagccccgtgggccccggcaccgccagcgccggccccagcctgcccggcggcgccctgcccaccagcgtgagaagcatcgtgaccaccctggtgcccagcgagctgatcagcgccgtgcccaccaccaagagcaaccacggcggcatcgccagcgagagcctggccggcggcctggtggaggagaaggtgggcagccaccccgagctgctgcccagcatcgcccccagccagaacctggtgagcaaggagaccagcaccaccgccctgcaggccagcgtggccagacccgagctggaggtgaacgccgccatcgtgagcggccagagcagcgagcccaaggagatcgtggagaagagcaagatccccggcagaagaaacagcagaaccgaggagcccaccgtggccagcgagagcgtggagaacggccacagaaagagaagcagcagacccgccagcgccagcagcagcaccaaggacatcaccagcgccgtgcagagcaagagaagaaagagcaagtag

SEQ ID NO: 91513 - DNA, 6192 bp, synthetic construct; identical to SEQ ID NO: 91512
  misc_feature 1..6192: note = Description of Artificial Sequence: Synthetic coding sequence
  source 1..6192: mol_type = other DNA

SEQ ID NO: 91514 - DNA, 1086 bp, synthetic construct
  misc_feature 1..1086: note = Description of Artificial Sequence: Synthetic coding sequence
  source 1..1086: mol_type = other DNA
atggtgctggacgacctgcccaacctggaggacatctacaccagcctgtgcagcagcaccatggaggacagcgagatggacttcgacagcggcctggaggacgacgacaccaagagcgacagcatcctggaggacagcaccatcttcgtggccttcaagggcaacatcgacgacaaggacttcaagtggaagctggacgccatcctgaagaacgtgcccaacctgctgcacatggagagcagcaagctgaaggtgcagaaggtggagccctggaacagcgtgagagtgaccttcaacatccccagagaggccgccgagagactgagaatcctggcccagagcaacaaccagcagctgagagacctgggcatcctgagcgtgcagatcgagggcgagggcgccatcaacctggccctggcccagaacagaagccaggacgtgagaatgaacggccccatgggcgccggcaacagcgtgagaatggaggccggcttccccatggccagcggccccgacgccatggaccccctgctgagcggcctgcacatccagcagcagagccaccccagcggcagcctggcccccccccaccaccccatgcagcccgtgagcgtgaacagacagatgaaccccgccaacttcccccagctgcagcagcagcagcagcagcagcagcagcagcagcagcagcagcagcagcagcagcagcagcagcagcagcagcagctgcaggccagacccccccagcagcaccagcagcagcagccccagggcatcagaccccagttcaccgcccccacccaggtgcccgtgccccccggctggaaccagctgcccagcggcgccctgcagcccccccccgcccagggcagcctgggcaccatgaccgccaaccagggctggaagaaggcccccctgcccggccccatgcagcagcagctgcaggccagacccagcctggccaccgtgcagacccccagccaccccccccccccctaccccttcggcagccagcaggccagccaggcccacaccaacttcccccagatgagcaaccccggccagttcaccgccccccagatgtag

SEQ ID NO: 91515 - DNA, 549 bp, synthetic construct
  misc_feature 1..549: note = Description of Artificial Sequence: Synthetic coding sequence
  source 1..549: mol_type = other DNA
atggccgaggagcaggtgaacagaagcgccggcctggcccccgactgcgaggccagcgccaccgccgagaccaccgtgagcagcgtgggcacctgcgaggccgccggcaagagccccgagcccaaggactacgacagcacctgcgtgttctgcagaatcgccggcagacaggaccccggcaccgagctgctgcactgcgagaacgaggacctgatctgcttcaaggacatcaagcccgccgccacccaccactacctggtggtgcccaagaagcacatcggcaactgcagaaccctgagaaaggaccaggtggagctggtggagaacatggtgaccgtgggcaagaccatcctggagagaaacaacttcaccgacttcaccaacgtgagaatgggcttccacatgccccccttctgcagcatcagccacctgcacctgcacgtgctggcccccgtggaccagctgggcttcctgagcaagctggtgtacagagtgaacagctactggttcatcaccgccgaccacctgatcgagaagctgagaacctag

SEQ ID NO: 91516 - DNA, 552 bp, synthetic construct
  misc_feature 1..552: note = Description of Artificial Sequence: Synthetic coding sequence
  source 1..552: mol_type = other DNA
atgggcgccgcccacagcgtgtgggaggtggaccacctgtacaccttcttcgtgcagtggagccccgacgtgtacggcaaggacgccaaggagcagggcttcgtggtggtggagaaggaggagctgaacatgatcgacaacttcttcagcgagcccaccaccaagagctgggagatcatcaccgtggaggaggccaagagaagaaagagcacctgcagctactacgaggacgaggacgaggaggtgctgcccgtgctgagaccccacagcgccctgctggagaacatgcacatcgagcagctggccagaagactgcccgccagagtgcagggctacccctggagactggcctacagcaccctggagcacggcaccagcctgaagaccctgtacagaaagagcgccagcctggacagccccgtgctgctggtgatcaaggacatggacaaccagatcttcggcgcctacgccacccaccccttcaagttcagcgaccactactacggcaccggcgagaccttcctgtacaccttcagcccccacttcaagtag

SEQ ID NO: 91517 - DNA, 2829 bp, synthetic construct
  misc_feature 1..2829: note = Description of Artificial Sequence: Synthetic coding sequence
  source 1..2829: mol_type = other DNA
atggacaccaaggaggagaagaaggagagaaagcagagctacttcgccagactgaagaagaagaagcaggccaagcagaacgccgagaccgccagcgccgtggccaccagaacccacaccggcaaggaggacaacaacaccgtggtgctggagcccgacaagtgcaacatcgccgtggaggaggagtacatgaccgacgagaagaagaagagaaagagcaaccagctgaaggagatcagaagaaccgagctgaagagatactacagcatcgacgacaaccagaacaagacccacgacaagaaggagaagaagatggtggtgcagaagccccacggcaccatggagtacaccgccggcaaccaggacaccctgaacagcatcgccctgaagttcaacatcacccccaacaagctggtggagctgaacaagctgttcacccacaccatcgtgcccggccaggtgctgttcgtgcccgacgccaacagccccagcagcaccctgagactgagcagcagcagccccggcgccaccgtgagccccagcagcagcgacgccgagtacgacaagctgcccgacgccgacctggccagaaaggccctgaagcccatcgagagagtgctgagcagcaccagcgaggaggacgagcccggcgtggtgaagttcctgaagatgaactgcagatacttcaccgacggcaagggcgtggtgggcggcgtgatgatcgtgacccccaacaacatcatgttcgacccccacaagagcgaccccctggtgatcgagaacggctgcgaggagtacggcctgatctgccccatggaggaggtggtgagcatcgccctgtacaacgacatcagccacatgaagatcaaggacgccctgcccagcgacctgccccaggacctgtgccccctgtacagacccggcgagtgggaggacctggccagcgagaaggacatcaaccccttcagcaagttcaagagcatcaacaaggagaagagacagcagaacggcgagaagatcatgaccagcgacagcagacccatcgtgcccctggagaagagcaccggccacacccccaccaagcccagcggcagcagcgtgagcgagaagctgaagaagctggacagcagcagagagaccagccacggcagccccaccgtgaccaagctgagcaaggagcccagcgacaccagcagcgccttcgagagcaccgccaaggagaacttcctgggcgaggacgacgacttcgtggacctggaggagctgagcagccagaccggcggcggcatgcacaagaaggacaccctgaaggagtgcctgagcctggaccccgaggagagaaagaaggccgagagccagatcaacaacagcgccgtggagatgcaggtgcagagcgccctggccttcctgggcaccgagaacgacgtggagctgaagggcgccctggacctggagacctgcgagaagcaggacatcatgcccgaggtggacaagcagagcggcagccccgagagcagagtggagaacaccctgaacatccacgaggacctggacaaggtgaagctgatcgagtactacctgaccaagaacaaggagggcccccaggtgagcgagaacctgcagaagaccgagctgagcgacggcaagagcatcgagcccggcggcatcgacatcaccctgagcagcagcctgagccaggccggcgaccccatcaccgagggcaacaaggagcccgacaagacctgggtgaagaagggcgagcccctgcccgtgaagctgaacagcagcaccgaggccaacgtgatcaaggaggccctggacagcagcctggagagcaccctggacaacagctgccagggcgcccagatggacaacaagagcgaggtgcagctgtggctgctgaagagaatccaggtgcccatcgaggacatcctgcccagcaaggaggagaagagcaagaccccccccatgttcctgtgcatcaaggtgggcaagcccatgagaaagagcttcgccacccacaccgccgccatggtgcagcagtacggcaagagaagaaagcagcccgagtactggttcgccgtgcccagagagagagtggaccacctgtacaccttcttcgtgcagtggagccccgacgtgtacggcaaggacgccaaggagcagggcttcgtggtggtggagaaggaggagctgaacatgatcgacaacttcttcagcgagcccaccaccaagagctgggagatcatcaccgtggaggaggccaagagaagaaagagcacctgcagctactacgaggacgaggacgaggaggtgctgcccgtgctgagaccccacagcgccctgctggagaacatgcacatcgagcagctggccagaagactgcccgccagagtgcagggctacccctggagactggcctacagcaccctggagcacggcaccagcctgaagaccctgtacagaaagagcgccagcctggacagccccgtgctgctggtgatcaaggacatggacaaccagatcttcggcgcctacgccacccaccccttcaagttcagcgaccactactacggcaccggcgagaccttcctgtacaccttcagcccccacttcaaggtgttcaagtggagcggcgagaacagctacttcatcaacggcgacatcagcagcctggagctgggcggcggcggcggcagattcggcctgtggctggacgccgacctgtaccacggcagaagcaacagctgcagcaccttcaacaacgacatcctgagcaagaaggaggacttcatcgtgcaggacctggaggtgtgggccttcgactag

SEQ ID NO: 91518 - DNA, 2829 bp, synthetic construct; identical to SEQ ID NO: 91517
  misc_feature 1..2829: note = Description of Artificial Sequence: Synthetic coding sequence
  source 1..2829: mol_type = other DNA

SEQ ID NO: 91519 - DNA, 1323 bp, synthetic construct
  misc_feature 1..1323: note = Description of Artificial Sequence: Synthetic coding sequence
  source 1..1323: mol_type = other DNA
gacgccgacctggccagaaaggccctgaagcccatcgagagagtgctgagcagcaccagcgaggaggacgagcccggcgtggtgaagttcctgaagatgaactgcagatacttcaccgacggcaagggcgtggtgggcggcgtgatgatcgtgacccccaacaacatcatgttcgacccccacaagagcgaccccctggtgatcgagaacggctgcgaggagtacggcctgatctgccccatggaggaggtggtgagcatcgccctgtacaacgacatcagccacatgaagatcaaggacgccctgcccagccccggcgagtgggaggacctggccagcgagaaggacatcaaccccttcagcaagttcaagagcatcaacaaggagaagagacagcagaacggcgagaagatcatgaccagcgacagcagacccatcgtgcccctggagaagagcaccggccacacccccaccaagcccagcggcagcagcgtgagcgagaagctgaagaagctggacagcagcagagagaccagccacggcagccccaccgtgaccaagctgagcaaggagcccagcgacaccagcagcgccttcgagagcaccgccaaggagaacttcctgggcgaggacgacgacttcgtggacctggaggagctgagcagccagaccggcggcggcatgcacaagaaggacaccctgaaggagtgcctgagcctggaccccgaggagagaaagaaggccgagagccagatcaacaacagcgccgtggagatgcaggtgcagagcgccctggccttcctgggcaccgagaacgacgtggagctgaagggcgccctggacctggagacctgcgagaagcaggacatcatgcccgaggtggacaagcagagcggcagccccgagagcagagtggagaacaccctgaacatccacgaggacctggacaaggtgaagctgatcgagtactacctgaccaagaacaaggagggcccccaggtgagcgagaacctgcagaagaccgagctgagcgacggcaagagcatcgagcccggcggcatcgacatcaccctgagcagcagcctgagccaggccggcgaccccatcaccgagggcaacaaggagcccgacaagacctgggtgaagaagggcgagcccctgcccgtgaagctgaacagcagcaccgaggccaacgtgatcaaggaggccctggacagcagcctggagagcaccctggacaacagctgccagggcgcccagatggacaacaagagcgaggtgcagctgtggctgctgaagagaatccaggtgcccatcgagtag

SEQ ID NO: 91520 - DNA, 576 bp, synthetic construct
  misc_feature 1..576: note = Description of Artificial Sequence: Synthetic coding sequence
  source 1..576: mol_type = other DNA
atggacaccaaggaggagaagaaggagagaaagcagagctacttcgccagactgaagaagaagaagcaggccaagcagaacgccgagaccgccagcgccgtggccaccagaacccacaccggcaaggaggacaacaacaccgtggtgctggagcccgacaagtgcaacatcgccgtggaggaggagtacatgaccgacgagaagaagaagagaaagagcaaccagctgaaggagatcagaagaaccgagctgaagagatactacagcatcgacgacaaccagaacaagacccacgacaagaaggagaagaagatggtggtgcagaagccccacggcaccatggagtacaccgccggcaaccaggacaccctgaacagcatcgccctgaagttcaacatcacccccaacaagctggtggagctgaacaagctgttcacccacaccatcgtgcccggccaggtgctgttcgtgcccgacgccaacagccccagcagcaccctgagactgagcagcagcagccccggcgccaccgtgagccccagcagcagcgacgccgagtacgacaagctgccctag

SEQ ID NO: 91521 - DNA, 354 bp, synthetic construct
  misc_feature 1..354: note = Description of Artificial Sequence: Synthetic coding sequence
  source 1..354: mol_type = other DNA
atggacaccaaggaggagaagaaggagagaaagcagagctacttcgccagactgaagaagaagaagcaggccaagcagaacgccgagaccgccagcgccgtggccaccagaacccacaccggcaaggaggacaacaacaccgtggtgctggagcccgacaagtgcaacatcgccgtggaggaggagtacatgaccgacgagaagaagaagagaaagagcaaccagctgaaggagatcagaagaaccgagctgaagagatactacagcatcgacgacaaccagaacaagacccacgacaagaaggagaagaagatggtggtgcagaagccccacggcaccatggagtacacctag

SEQ ID NO: 91522 - DNA, 273 bp, synthetic construct
  misc_feature 1..273: note = Description of Artificial Sequence: Synthetic coding sequence
  source 1..273: mol_type = other DNA
atggacaccaaggaggagaagaaggagagaaagcagagctacttcgccagactgaagaagaagaagcaggccaagcagaacgccgagaccgccagcgccgtggccaccagaacccacaccggcaaggaggacaacaacaccgtggtgctggagcccgacaagtgcaacatcgccgtggaggaggagtacatgaccgacgagaagaagaagagaaagagcaaccagctgaaggagatcagaagaaccgagctgaagagatactacagcatctag

SEQ ID NO: 91523 - DNA, 273 bp, synthetic construct; identical to SEQ ID NO: 91522
  misc_feature 1..273: note = Description of Artificial Sequence: Synthetic coding sequence
  source 1..273: mol_type = other DNA

SEQ ID NO: 91524 - DNA, 552 bp, synthetic construct; identical to SEQ ID NO: 91516
  misc_feature 1..552: note = Description of Artificial Sequence: Synthetic coding sequence
  source 1..552: mol_type = other DNA

SEQ ID NO: 91525 - DNA, 714 bp, synthetic construct
  misc_feature 1..714: note = Description of Artificial Sequence: Synthetic coding sequence
  source 1..714: mol_type = other DNA
tgagagaagacctgcagcagcctggagagagagccccacttcagcctgctgaccatgagaggccagagactgcccctggacatccagatcttctactgcgccagacccgacgaggagcccttcgtgaagatcatcaccgtggaggaggccaagagaagaaagagcacctgcagctactacgaggacgaggacgaggaggtgctgcccgtgctgagaccccacagcgccctgctggagaacatgcacatcgagcagctggccagaagactgcccgccagagtgcagggctacccctggagactggcctacagcaccctggagcacggcaccagcctgaagaccctgtacagaaagagcgccagcctggacagccccgtgctgctggtgatcaaggacatggacaaccagatcttcggcgcctacgccacccaccccttcaagttcagcgaccactactacggcaccggcgagaccttcctgtacaccttcagcccccacttcaaggtgttcaagtggagcggcgagaacagctacttcatcaacggcgacatcagcagcctggagctgggcggcggcggcggcagattcggcctgtggctggacgccgacctgtaccacggcagaagcaacagctgcagcaccttcaacaacgacatcctgagcaagaaggaggacttcatcgtgcaggacctggaggtgtgggccttcgactag

SEQ ID NO: 91526 - DNA, 534 bp, synthetic construct
  misc_feature 1..534: note = Description of Artificial Sequence: Synthetic coding sequence
  source 1..534: mol_type = other DNA
tgagagaagacctgcagcagcctggagagagagccccacttcagcctgctgaccatgagaggccagagactgcccctggacatccagatcttctactgcgccagacccgacgaggagcccttcgtgaagatcatcaccgtggaggaggccaagagaagaaagagcacctgcagctactacgaggacgaggacgaggaggtgctgcccgtgctgagaccccacagcgccctgctggagaacatgcacatcgagcagctggccagaagactgcccgccagagtgcagggctacccctggagactggcctacagcaccctggagcacggcaccagcctgaagaccctgtacagaaagagcgccagcctggacagccccgtgctgctggtgatcaaggacatggacaaccagatcttcggcgcctacgccacccaccccttcaagttcagcgaccactactacggcaccggcgagaccttcctgtacaccttcagcccccacttcaagggcaccatctggttcatggccagatgctag

SEQ ID NO: 91527 - DNA, 573 bp, synthetic construct
  misc_feature 1..573: note = Description of Artificial Sequence: Synthetic coding sequence
  source 1..573: mol_type = other DNA
tgagagaagacctgcagcagcctggagagagagccccacttcagcctgctgaccatgagaggccagagactgcccctggacatccagatcttctactgcgccagacccgacgaggagcccttcgtgaagatcatcaccgtggaggaggccaagagaagaaagagcacctgcagctactacgaggacgaggacgaggaggtgctgcccgtgctgagaccccacagcgccctgctggagaacatgcacatcgagcagctggccagaagactgcccgccagagtgcagggctacccctggagactggcctacagcaccctggagcacggcaccagcctgaagaccctgtacagaaagagcgccagcctggacagccccgtgctgctggtgatcaaggacatggacaaccagatcttcggcgcctacgccacccaccccttcaagttcagcgaccactactacggcaccggcgagaccttcctgtacaccttcagcccccacttcaagtggagcggcgagaacagctacttcatcaacggcgacatcagcagcctggagctgggcggcggcggctag

SEQ ID NO: 91528 - DNA, 273 bp, synthetic construct; identical to SEQ ID NO: 91522
  misc_feature 1..273: note = Description of Artificial Sequence: Synthetic coding sequence
  source 1..273: mol_type = other DNA

SEQ ID NO: 91529 - DNA, 7566 bp, synthetic construct
  misc_feature 1..7566: note = Description of Artificial Sequence: Synthetic coding sequence
  source 1..7566: mol_type = other DNA
atgagcggcagcacccagcccgtggcccagacctggagagccaccgagcccagataccccccccacagcctgagctaccccgtgcagatcgccagaacccacaccgacgtgggcctgctggagtaccagcaccacagcagagactacgccagccacctgagccccggcagcatcatccagccccagagaagaagacccagcctgctgagcgagttccagcccggcaacgagagaagccaggagctgcacctgagacccgagagccacagctacctgcccgagctgggcaagagcgagatggagttcatcgagagcaagagacccagactggagctgctgcccgaccccctgctgagacccagccccctgctggccaccggccagcccgccggcagcgaggacctgaccaaggacagaagcctgaccggcaagctggagcccgtgagcccccccagccccccccacaccgaccccgagctggagctggtgccccccagactgagcaaggaggagctgatccagaacatggacagagtggacagagagatcaccatggtggagcagcagatcagcaagctgaagaagaagcagcagcagctggaggaggaggccgccaagccccccgagcccgagaagcccgtgagccccccccccatcgagagcaagcacagaagcctggtgcagatcatctacgacgagaacagaaagaaggccgaggccgcccacagaatcctggagggcctgggcccccaggtggagctgcccctgtacaaccagcccagcgacaccagacagtaccacgagaacatcaagatcaaccaggccatgagaaagaagctgatcctgtacttcaagagaagaaaccacgccagaaagcagtgggagcagaagttctgccagagatacgaccagctgatggaggcctgggagaagaaggtggagagaatcgagaacaaccccagaagaagagccaaggagagcaaggtgagagagtactacgagaagcagttccccgagatcagaaagcagagagagctgcaggagagaatgcagagcagagtgggccagagaggcagcggcctgagcatgagcgccgccagaagcgagcacgaggtgagcgagatcatcgacggcctgagcgagcaggagaacctggagaagcagatgagacagctggccgtgatcccccccatgctgtacgacgccgaccagcagagaatcaagttcatcaacatgaacggcctgatggccgaccccatgaaggtgtacaaggacagacaggtgatgaacatgtggagcgagcaggagaaggagaccttcagagagaagttcatgcagcaccccaagaacttcggcctgatcgccagcttcctggagagaaagaccgtggccgagtgcgtgctgtactactacctgaccaagaagaacgagaactacaagagcctggtgagaagaagctacagaagaagaggcaagagccagcagcagcagcagcagcagcagcagcagcagcagcagcagcagcagcagcccatgcccagaagcagccaggaggagaaggacgagaaggagaaggagaaggaggccgagaaggaggaggagaagcccgaggtggagaacgacaaggaggacctgctgaaggagaagaccgacgacaccagcggcgaggacaacgacgagaaggaggccgtggccagcaagggcagaaagaccgccaacagccagggcagaagaaagggcagaatcaccagaagcatggccaacgaggccaacagcgaggaggccatcaccccccagcagagcgccgagctggccagcatggagctgaacgagagcagcagatggaccgaggaggagatggagaccgccaagaagggcctgctggagcacggcagaaactggagcgccatcgccagaatggtgggcagcaagaccgtgagccagtgcaagaacttctacttcaactacaagaagagacagaacctggacgagatcctgcagcagcacaagctgaagatggagaaggagagaaacgccagaagaaagaagaagaaggcccccgccgccgccagcgaggaggccgccttcccccccgtggtggaggacgaggagatggaggccagcggcgtgagcggcaacgaggaggagatggtggaggaggccgaggccctgcacgccagcggcaacgaggtgcccagaggcgagtgcagcggccccgccaccgtgaacaacagcagcgacaccgagagcatccccagcccccacaccgaggccgccaaggacaccggccagaacggccccaagccccccgccaccctgggcgccgacggccccccccccggcccccccacccccccccccgaggacatccccgcccccaccgagcccacccccgccagcgaggccaccggcgcccccacccccccccccgccccccccagccccagcgcccccccccccgtggtgcccaaggaggagaaggaggaggagaccgccgccgccccccccgtggaggagggcgaggagcagaagccccccgccgccgaggagctggccgtggacaccggcaaggccgaggagcccgtgaagagcgagtgcaccgaggaggccgaggagggccccgccaagggcaaggacgccgaggccgccgaggccaccgccgagggcgccctgaaggccgagaagaaggagggcggcagcggcagagccaccaccgccaagagcagcggcgccccccaggacagcgacagcagcgccacctgcagcgccgacgaggtggacgaggccgagggcggcgacaagaacagactgctgagccccagacccagcctgctgacccccaccggcgaccccagagccaacgccagcccccagaagcccctggacctgaagcagctgaagcagagagccgccgccatcccccccatcgtgaccaaggtgcacgagccccccagagaggacgccgcccccaccaagcccgccccccccgcccccccccccccccagaacctgcagcccgagagcgacgccccccagcagcccggcagcagccccagaggcaagagcagaagccccgccccccccgccgacaaggaggccgagaagcccgtgttcttccccgccttcgccgccgaggcccagaagctgcccggcgaccccccctgctggaccagcggcctgcccttccccgtgccccccagagaggtgatcaaggccagcccccacgcccccgaccccagcgccttcagctacgccccccccggccaccccctgcccctgggcctgcacgacaccgccagacccgtgctgcccagaccccccaccatcagcaaccccccccccctgatcagcagcgccaagcaccccagcgtgctggagagacagatcggcgccatcagccagggcatgagcgtgcagctgcacgtgccctacagcgagcacgccaaggcccccgtgggccccgtgaccatgggcctgcccctgcccatggaccccaagaagctggcccccttcagcggcgtgaagcaggagcagctgagccccagaggccaggccggcccccccgagagcctgggcgtgcccaccgcccaggaggccagcgtgctgagaggcaccgccctgggcagcgtgcccggcggcagcatcaccaagggcatccccagcaccagagtgcccagcgacagcgccatcacctacagaggcagcatcacccacggcacccccgccgacgtgctgtacaagggcaccatcaccagaatcatcggcgaggacagccccagcagactggacagaggcagagaggacagcctgcccaagggccacgtgatctacgagggcaagaagggccacgtgctgagctacgagggcggcatgagcgtgacccagtgcagcaaggaggacggcagaagcagcagcggccccccccacgagaccgccgcccccaagagaacctacgacatgatggagggcagagtgggcagagccatcagcagcgccagcatcgagggcctgatgggcagagccatcccccccgagagacacagcccccaccacctgaaggagcagcaccacatcagaggcagcatcacccagggcatccccagaagctacgtggaggcccaggaggactacctgagaagagaggccaagctgctgaagagagagggcaccccccccccccccccccccagcagagacctgaccgaggcctacaagacccaggccctgggccccctgaagctgaagcccgcccacgagggcctggtggccaccgtgaaggaggccggcagaagcatccacgagatccccagagaggagctgagacacacccccgagctgcccctggcccccagacccctgaaggagggcagcatcacccagggcacccccctgaagtacgacaccggcgccagcaccaccggcagcaagaagcacgacgtgagaagcctgatcggcagccccggcagaaccttcccccccgtgcaccccctggacgtgatggccgacgccagagccctggagagagcctgctacgaggagagcctgaagagcagacccggcaccgccagcagcagcggcggcagcatcgccagaggcgcccccgtgatcgtgcccgagctgggcaagcccagacagagccccctgacctacgaggaccacggcgcccccttcgccggccacctgcccagaggcagccccgtgaccaccagagagcccacccccagactgcaggagggcagcctgagcagcagcaaggccagccaggacagaaagctgaccagcacccccagagagatcgccaagagcccccacagcaccgtgcccgagcaccacccccaccccatcagcccctacgagcacctgctgagaggcgtgagcggcgtggacctgtacagaagccacatccccctggccttcgaccccaccagcatccccagaggcatccccctggacgccgccgccgcctactacctgcccagacacctggcccccaaccccacctacccccacctgtaccccccctacctgatcagaggctaccccgacaccgccgccctggagaacagacagaccatcatcaacgactacatcaccagccagcagatgcaccacaacgccgccaccgccatggcccagagagccgacatgctgagaggcctgagccccagagagagcagcctggccctgaactacgccgccggccccagaggcatcatcgacctgagccaggtgccccacctgcccgtgctggtgccccccacccccggcacccccgccaccgccatggacagactggcctacctgcccaccgccccccagcccttcagcagcagacacagcagcagccccctgagccccggcggccccacccacctgaccaagcccaccaccaccagcagcagcgagagagagagagacagagacagagagagagacagagacagagagagagagaagagcatcctgaccagcaccaccaccgtggagcacgcccccatctggagacccggcaccgagcagagcagcggcagcagcggcggcggcggcggcagcagcagcagacccgccagccacagccacgcccaccagcacagccccatcagccccagaacccaggacgccctgcagcagagacccagcgtgctgcacaacaccggcatgaagggcatcatcaccgccgtggagcccagcacccccaccgtgctgagaagcaccagcaccagcagccccgtgagacccgccgccaccttcccccccgccacccactgccccctgggcggcaccctggacggcgtgtaccccaccctgatggagcccgtgctgctgcccaaggaggcccccagagtggccagacccgagagacccagagccgacaccggccacgccttcctggccaagccccccgccagaagcggcctggagcccgccagcagccccagcaagggcagcgagcccagacccctggtgccccccgtgagcggccacgccaccatcgccagaacccccgccaagaacctggccccccaccacgccagccccgacccccccgccccccccgccagcgccagcgacccccacagagagaagacccagagcaagcccttcagcatccaggagctggagctgagaagcctgggctaccacggcagcagctacagccccgagggcgtggagcccgtgagccccgtgagcagccccagcctgacccacgacaagggcctgcccaagcacctggaggagctggacaagagccacctggagggcgagctgagacccaagcagcccggccccgtgaagctgggcggcgaggccgcccacctgccccacctgagacccctgcccgagagccagcccagcagcagccccctgctgcagaccgcccccggcgtgaagggccaccagagagtggtgaccctggcccagcacatcagcgaggtgatcacccaggactacaccagacaccacccccagcagctgagcgcccccctgcccgcccccctgtacagcttccccggcgccagctgccccgtgctggacctgagaagaccccccagcgacctgtacctgcccccccccgaccacggcgcccccgccagaggcagcccccacagcgagggcggcaagagaagccccgagcccaacaagaccagcgtgctgggcggcggcgaggacggcatcgagcccgtgagcccccccgagggcatgaccgagcccggccacagcagaagcgccgtgtaccccctgctgtacagagacggcgagcagaccgagcccagcagaatgggcagcaagagccccggcaacaccagccagccccccgccttcttcagcaagctgaccgagagcaacagcgccatggtgaagagcaagaagcaggagatcaacaagaagctgaacacccacaacagaaacgagcccgagtacaacatcagccagcccggcaccgagatcttcaacatgcccgccatcaccggcaccggcctgatgacctacagaagccaggccgtgcaggagcacgccagcaccaacatgggcctggaggccatcatcagaaaggccctgatgggcaagtacgaccagtgggaggagagcccccccctgagcgccaacgccttcaaccccctgaacgccagcgccagcctgcccgccgccatgcccatcaccgccgccgacggcagaagcgaccacaccctgaccagccccggcggcggcggcaaggccaaggtgagcggcagacccagcagcagaaaggccaagagccccgcccccggcctggccagcggcgacagaccccccagcgtgagcagcgtgcacagcgagggcgactgcaacagaagaacccccctgaccaacagagtgtgggaggacagacccagcagcgccggcagcacccccttcccctacaaccccctgatcatgagactgcaggccggcgtgatggccagcccccccccccccggcctgcccgccggcagcggccccctggccggcccccaccacgcctgggacgaggagcccaagcccctgctgtgcagccagtacgagaccctgagcgacagcgagtag

SEQ ID NO: 91530 - DNA, 7380 bp, synthetic construct
  misc_feature 1..7380: note = Description of Artificial Sequence: Synthetic coding sequence
  source 1..7380: mol_type = other DNA
atgagcggcagcacccagcccgtggcccagacctggagagccaccgagcccagataccccccccacagcctgagctaccccgtgcagatcgccagaacccacaccgacgtgggcctgctggagtaccagcaccacagcagagactacgccagccacctgagccccggcagcatcatccagccccagagaagaagacccagcctgctgagcgagttccagcccggcaacgagagaagccaggagctgcacctgagacccgagagccacagctacctgcccgagctgggcaagagcgagatggagttcatcgagagcaagagacccagactggagctgctgcccgaccccctgctgagacccagccccctgctggccaccggccagcccgccggcagcgaggacctgaccaaggacagaagcctgaccggcaagctggagcccgtgagcccccccagccccccccacaccgaccccgagctggagctggtgccccccagactgagcaaggaggagctgatccagaacatggacagagtggacagagagatcaccatggtggagcagcagatcagcaagctgaagaagaagcagcagcagctggaggaggaggccgccaagccccccgagcccgagaagcccgtgagccccccccccatcgagagcaagcacagaagcctggtgcagatcatctacgacgagaacagaaagaaggccgaggccgcccacagaatcctggagggcctgggcccccaggtggagctgcccctgtacaaccagcccagcgacaccagacagtaccacgagaacatcaagatcaaccaggccatgagaaagaagctgatcctgtacttcaagagaagaaaccacgccagaaagcagtgggagcagaagttctgccagagatacgaccagctgatggaggcctgggagaagaaggtggagagaatcgagaacaaccccagaagaagagccaaggagagcaaggtgagagagtactacgagaagcagttccccgagatcagaaagcagagagagctgcaggagagaatgcagagcagagtgggccagagaggcagcggcctgagcatgagcgccgccagaagcgagcacgaggtgagcgagatcatcgacggcctgagcgagcaggagaacctggagaagcagatgagacagctggccgtgatcccccccatgctgtacgacgccgaccagcagagaatcaagttcatcaacatgaacggcctgatggccgaccccatgaaggtgtacaaggacagacaggtgatgaacatgtggagcgagcaggagaaggagaccttcagagagaagttcatgcagcaccccaagaacttcggcctgatcgccagcttcctggagagaaagaccgtggccgagtgcgtgctgtactactacctgaccaagaagaacgagaactacaagagcctggtgagaagaagctacagaagaagaggcaagagccagcagcagcagcagcagcagcagcagcagcagcagcagcagcagcagcagcccatgcccagaagcagccaggaggagaaggacgagaaggagaaggagaaggaggccgagaaggaggaggagaagcccgaggtggagaacgacaaggaggacctgctgaaggagaagaccgacgacaccagcggcgaggacaacgacgagaaggaggccgtggccagcaagggcagaaagaccgccaacagccagggcagaagaaagggcagaatcaccagaagcatggccaacgaggccaacagcgaggaggccatcaccccccagcagagcgccgagctggccagcatggagctgaacgagagcagcagatggaccgaggaggagatggagaccgccaagaagggcctgctggagcacggcagaaactggagcgccatcgccagaatggtgggcagcaagaccgtgagccagtgcaagaacttctacttcaactacaagaagagacagaacctggacgagatcctgcagcagcacaagctgaagatggagaaggagagaaacgccagaagaaagaagaagaaggcccccgccgccgccagcgaggaggccgccttcccccccgtggtggaggacgaggagatggaggccagcggcgtgagcggcaacgaggaggagatggtggaggaggccgaggccaccgtgaacaacagcagcgacaccgagagcatccccagcccccacaccgaggccgccaaggacaccggccagaacggccccaagccccccgccaccctgggcgccgacggccccccccccggcccccccacccccccccccgaggacatccccgcccccaccgagcccacccccgccagcgaggccaccggcgcccccacccccccccccgccccccccagccccagcgcccccccccccgtggtgcccaaggaggagaaggaggaggagaccgccgccgccccccccgtggaggagggcgaggagcagaagccccccgccgccgaggagctggccgtggacaccggcaaggccgaggagcccgtgaagagcgagtgcaccgaggaggccgaggagggccccgccaagggcaaggacgccgaggccgccgaggccaccgccgagggcgccctgaaggccgagaagaaggagggcggcagcggcagagccaccaccgccaagagcagcggcgccccccaggacagcgacagcagcgccacctgcagcgccgacgaggtggacgaggccgagggcggcgacaagaacagactgctgagccccagacccagcctgctgacccccaccggcgaccccagagccaacgccagcccccagaagcccctggacctgaagcagctgaagcagagagccgccgccatcccccccatccaggtgaccaaggtgcacgagccccccagagaggacgccgcccccaccaagcccgccccccccgcccccccccccccccagaacctgcagcccgagagcgacgccccccagcagcccggcagcagccccagaggcaagagcagaagccccgccccccccgccgacaaggaggccgagaagcccgtgttcttccccgccttcgccgccgaggcccagaagctgcccggcgaccccccctgctggaccagcggcctgcccttccccgtgccccccagagaggtgatcaaggccagcccccacgcccccgaccccagcgccttcagctacgccccccccggccaccccctgcccctgggcctgcacgacaccgccagacccgtgctgcccagaccccccaccatcagcaaccccccccccctgatcagcagcgccaagcaccccagcgtgctggagagacagatcggcgccatcagccagggcatgagcgtgcagctgcacgtgccctacagcgagcacgccaaggcccccgtgggccccgtgaccatgggcctgcccctgcccatggaccccaagaagctggcccccttcagcggcgtgaagcaggagcagctgagccccagaggccaggccggcccccccgagagcctgggcgtgcccaccgcccaggaggccagcgtgctgagaggcaccgccctgggcagcgtgcccggcggcagcatcaccaagggcatccccagcaccagagtgcccagcgacagcgccatcacctacagaggcagcatcacccacggcacccccgccgacgtgctgtacaagggcaccatcaccagaatcatcggcgaggacagccccagcagactggacagaggcagagaggacagcctgcccaagggccacgtgatctacgagggcaagaagggccacgtgctgagctacgagggcggcatgagcgtgacccagtgcagcaaggaggacggcagaagcagcagcggccccccccacgagaccgccgcccccaagagaacctacgacatgatggagggcagagtgggcagagccatcagcagcgccagcatcgagggcctgatgggcagagccatcccccccgagagacacagcccccaccacctgaaggagcagcaccacatcagaggcagcatcacccagggcatccccagaagctacgtggaggcccaggaggactacctgagaagagaggccaagctgctgaagagagagggcaccccccccccccccccccccagcagagacctgaccgaggcctacaagacccaggccctgggccccctgaagctgaagcccgcccacgagggcctggtggccaccgtgaaggaggccggcagaagcatccacgagatccccagagaggagctgagacacacccccgagctgcccctggcccccagacccctgaaggagggcagcatcacccagggcacccccctgaagtacgacaccggcgccagcaccaccggcagcaagaagcacgacgtgagaagcctgatcggcagccccggcagaaccttcccccccgtgcaccccctggacgtgatggccgacgccagagccctggagagagcctgctacgaggagagcctgaagagcagacccggcaccgccagcagcagcggcggcagcatcgccagaggcgcccccgtgatcgtgcccgagctgggcaagcccagacagagccccctgacctacgaggaccacggcgcccccttcgccggccacctgcccagaggcagccccgtgaccaccagagagcccacccccagactgcaggagggcagcctgagcagcagcaaggccagccaggacagaaagctgaccagcacccccagagagatcgccaagagcccccacagcaccgtgcccgagcaccacccccaccccatcagcccctacgagcacctgctgagaggcgtgagcggcgtggacctgtacagaagccacatccccctggccttcgaccccaccagcatccccagaggcatccccctggacgccgccgccgcctactacctgcccagacacctggcccccaaccccacctacccccacctgtaccccccctacctgatcagaggctaccccgacaccgccgccctggagaacagacagaccatcatcaacgactacatcaccagccagcagatgcaccacaacgccgccaccgccatggcccagagagccgacatgctgagaggcctgagccccagagagagcagcctggccctgaactacgccgccggccccagaggcatcatcgacctgagccaggtgccccacctgcccgtgctggtgccccccacccccggcacccccgccaccgccatggacagactggcctacctgcccaccgccccccagcccttcagcagcagacacagcagcagccccctgagccccggcggccccacccacctgaccaagcccaccaccaccagcagcagcgagagagagagagacagagacagagagagagacagagacagagagagagagaagagcatcctgaccagcaccaccaccgtggagcacgcccccatctggagacccggcaccgagcagagcagcggcagcagcggcggcggcggcggcagcagcagcagacccgccagccacagccacgcccaccagcacagccccatcagccccagaacccaggacgccctgcagcagagacccagcgtgctgcacaacaccggcatgaagggcatcatcaccgccgtggagcccagcacccccaccgtgctgagaagcaccagcaccagcagccccgtgagacccgccgccaccttcccccccgccacccactgccccctgggcggcaccctggacggcgtgtaccccaccctgatggagcccgtgctgctgcccaaggaggcccccagagtggccagacccgagagacccagagccgacaccggccacgccttcctggccaagccccccgccagaagcggcctggagcccgccagcagccccagcaagggcagcgagcccagacccctggtgccccccgtgagcggccacgccaccatcgccagaacccccgccaagaacctggccccccaccacgccagccccgacccccccgccccccccgccagcgccagcgacccccacagagagaagacccagagcaagcccttcagcatccaggagctggagctgagaagcctgggctaccacggcagcagctacagccccgagggcgtggagcccgtgagccccgtgagcagccccagcctgacccacgacaagggcctgcccaagcacctggaggagctggacaagagccacctggagggcgagctgagacccaagcagcccggccccgtgaagctgggcggcgaggccgcccacctgccccacctgagacccctgcccgagagccagcccagcagcagccccctgctgcagaccgcccccggcgtgaagggccaccagagagtggtgaccctggcccagcacatcagcgaggtgatcacccaggactacaccagacaccacccccagcagctgagcgcccccctgcccgcccccctgtacagcttccccggcgccagctgccccgtgctggacctgagaagaccccccagcgacctgtacctgcccccccccgaccacggcgcccccgccagaggcagcccccacagcgagggcggcaagagaagccccgagcccaacaagaccagcgtgctgggcggcggcgaggacggcatcgagcccgtgagcccccccgagggcatgaccgagcccggccacagcagaagcgccgtgtaccccctgctgtacagagacggcgagcagaccgagcccagcagaatgggcagcaagagccccggcaacaccagccagccccccgccttcttcagcaagctgaccgagagcaacagcgccatggtgaagagcaagaagcaggagatcaacaagaagctgaacacccacaacagaaacgagcccgagtacaacatcagccagcccggcaccgagatcttcaacatgcccgccatcaccggcaccggcctgatgacctacagaagccaggccgtgcaggagcacgccagcaccaacatgggcctggaggccatcatcagaaaggccctgatgggcggcggcggcaaggccaaggtgagcggcagacccagcagcagaaaggccaagagccccgcccccggcctggccagcggcgacagaccccccagcgtgagcagcgtgcacagcgagggcgactgcaacagaagaacccccctgaccaacagagtgtgggaggacagacccagcagcgccggcagcacccccttcccctacaaccccctgatcatgagactgcaggccggcgtgatggccagcccccccccccccggcctgcccgccggcagcggccccctggccggcccccaccacgcctgggacgaggagcccaagcccctgctgtgcagccagtacgagaccctgagcgacagcgagtag

SEQ ID NO: 91531 - DNA, 6228 bp, synthetic construct
  misc_feature 1..6228: note = Description of Artificial Sequence: Synthetic coding sequence
  source 1..6228: mol_type = other DNA
atgtggagcgagcaggagaaggagaccttcagagagaagttcatgcagcaccccaagaacttcggcctgatcgccagcttcctggagagaaagaccgtggccgagtgcgtgctgtactactacctgaccaagaagaacgagaactacaagagcctggtgagaagaagctacagaagaagaggcaagagccagcagcagcagcagcagcagcagcagcagcagcagcagcagcagcagcagcccatgcccagaagcagccaggaggagaaggacgagaaggagaaggagaaggaggccgagaaggaggaggagaagcccgaggtggagaacgacaaggaggacctgctgaaggagaagaccgacgacaccagcggcgaggacaacgacgagaaggaggccgtggccagcaagggcagaaagaccgccaacagccagggcagaagaaagggcagaatcaccagaagcatggccaacgaggccaacagcgaggaggccatcaccccccagcagagcgccgagctggccagcatggagctgaacgagagcagcagatggaccgaggaggagatggagaccgccaagaagggcctgctggagcacggcagaaactggagcgccatcgccagaatggtgggcagcaagaccgtgagccagtgcaagaacttctacttcaactacaagaagagacagaacctggacgagatcctgcagcagcacaagctgaagatggagaaggagagaaacgccagaagaaagaagaagaaggcccccgccgccgccagcgaggaggccgccttcccccccgtggtggaggacgaggagatggaggccagcggcgtgagcggcaacgaggaggagatggtggaggaggccgaggccaccgtgaacaacagcagcgacaccgagagcatccccagcccccacaccgaggccgccaaggacaccggccagaacggccccaagccccccgccaccctgggcgccgacggccccccccccggcccccccacccccccccccgaggacatccccgcccccaccgagcccacccccgccagcgaggccaccggcgcccccacccccccccccgccccccccagccccagcgcccccccccccgtggtgcccaaggaggagaaggaggaggagaccgccgccgccccccccgtggaggagggcgaggagcagaagccccccgccgccgaggagctggccgtggacaccggcaaggccgaggagcccgtgaagagcgagtgcaccgaggaggccgaggagggccccgccaagggcaaggacgccgaggccgccgaggccaccgccgagggcgccctgaaggccgagaagaaggagggcggcagcggcagagccaccaccgccaagagcagcggcgccccccaggacagcgacagcagcgccacctgcagcgccgacgaggtggacgaggccgagggcggcgacaagaacagactgctgagccccagacccagcctgctgacccccaccggcgaccccagagccaacgccagcccccagaagcccctggacctgaagcagctgaagcagagagccgccgccatcccccccatccaggtgaccaaggtgcacgagccccccagagaggacgccgcccccaccaagcccgccccccccgcccccccccccccccagaacctgcagcccgagagcgacgccccccagcagcccggcagcagccccagaggcaagagcagaagccccgccccccccgccgacaaggaggccgagaagcccgtgttcttccccgccttcgccgccgaggcccagaagctgcccggcgaccccccctgctggaccagcggcctgcccttccccgtgccccccagagaggtgatcaaggccagcccccacgcccccgaccccagcgccttcagctacgccccccccggccaccccctgcccctgggcctgcacgacaccgccagacccgtgctgcccagaccccccaccatcagcaaccccccccccctgatcagcagcgccaagcaccccagcgtgctggagagacagatcggcgccatcagccagggcatgagcgtgcagctgcacgtgccctacagcgagcacgccaaggcccccgtgggccccgtgaccatgggcctgcccctgcccatggaccccaagaagctggcccccttcagcggcgtgaagcaggagcagctgagccccagaggccaggccggcccccccgagagcctgggcgtgcccaccgcccaggaggccagcgtgctgagaggcaccgccctgggcagcgtgcccggcggcagcatcaccaagggcatccccagcaccagagtgcccagcgacagcgccatcacctacagaggcagcatcacccacggcacccccgccgacgtgctgtacaagggcaccatcaccagaatcatcggcgaggacagccccagcagactggacagaggcagagaggacagcctgcccaagggccacgtgatctacgagggcaagaagggccacgtgctgagctacgagggcggcatgagcgtgacccagtgcagcaaggaggacggcagaagcagcagcggccccccccacgagaccgccgcccccaagagaacctacgacatgatggagggcagagtgggcagagccatcagcagcgccagcatcgagggcctgatgggcagagccatcccccccgagagacacagcccccaccacctgaaggagcagcaccacatcagaggcagcatcacccagggcatccccagaagctacgtggaggcccaggaggactacctgagaagagaggccaagctgctgaagagagagggcaccccccccccccccccccccagcagagacctgaccgaggcctacaagacccaggccctgggccccctgaagctgaagcccgcccacgagggcctggtggccaccgtgaaggaggccggcagaagcatccacgagatccccagagaggagctgagacacacccccgagctgcccctggcccccagacccctgaaggagggcagcatcacccagggcacccccctgaagtacgacaccggcgccagcaccaccggcagcaagaagcacgacgtgagaagcctgatcggcagccccggcagaaccttcccccccgtgcaccccctggacgtgatggccgacgccagagccctggagagagcctgctacgaggagagcctgaagagcagacccggcaccgccagcagcagcggcggcagcatcgccagaggcgcccccgtgatcgtgcccgagctgggcaagcccagacagagccccctgacctacgaggaccacggcgcccccttcgccggccacctgcccagaggcagccccgtgaccaccagagagcccacccccagactgcaggagggcagcctgagcagcagcaaggccagccaggacagaaagctgaccagcacccccagagagatcgccaagagcccccacagcaccgtgcccgagcaccacccccaccccatcagcccctacgagcacctgctgagaggcgtgagcggcgtggacctgtacagaagccacatccccctggccttcgaccccaccagcatccccagaggcatccccctggacgccgccgccgcctactacctgcccagacacctggcccccaaccccacctacccccacctgtaccccccctacctgatcagaggctaccccgacaccgccgccctggagaacagacagaccatcatcaacgactacatcaccagccagcagatgcaccacaacgccgccaccgccatggcccagagagccgacatgctgagaggcctgagccccagagagagcagcctggccctgaactacgccgccggccccagaggcatcatcgacctgagccaggtgccccacctgcccgtgctggtgccccccacccccggcacccccgccaccgccatggacagactggcctacctgcccaccgccccccagcccttcagcagcagacacagcagcagccccctgagccccggcggccccacccacctgaccaagcccaccaccaccagcagcagcgagagagagagagacagagacagagagagagacagagacagagagagagagaagagcatcctgaccagcaccaccaccgtggagcacgcccccatctggagacccggcaccgagcagagcagcggcagcagcggcggcggcggcggcagcagcagcagacccgccagccacagccacgcccaccagcacagccccatcagccccagaacccaggacgccctgcagcagagacccagcgtgctgcacaacaccggcatgaagggcatcatcaccgccgtggagcccagcacccccaccgtgctgagaagcaccagcaccagcagccccgtgagacccgccgccaccttcccccccgccacccactgccccctgggcggcaccctggacggcgtgtaccccaccctgatggagcccgtgctgctgcccaaggaggcccccagagtggccagacccgagagacccagagccgacaccggccacgccttcctggccaagccccccgccagaagcggcctggagcccgccagcagccccagcaagggcagcgagcccagacccctggtgccccccgtgagcggccacgccaccatcgccagaacccccgccaagaacctggccccccaccacgccagccccgacccccccgccccccccgccagcgccagcgacccccacagagagaagacccagagcaagcccttcagcatccaggagctggagctgagaagcctgggctaccacggcagcagctacagccccgagggcgtggagcccgtgagccccgtgagcagccccagcctgacccacgacaagggcctgcccaagcacctggaggagctggacaagagccacctggagggcgagctgagacccaagcagcccggccccgtgaagctgggcggcgaggccgcccacctgccccacctgagacccctgcccgagagccagcccagcagcagccccctgctgcagaccgcccccggcgtgaagggccaccagagagtggtgaccctggcccagcacatcagcgaggtgatcacccaggactacaccagacaccacccccagcagctgagcgcccccctgcccgcccccctgtacagcttccccggcgccagctgccccgtgctggacctgagaagaccccccagcgacctgtacctgcccccccccgaccacggcgcccccgccagaggcagcccccacagcgagggcggcaagagaagccccgagcccaacaagaccagcgtgctgggcggcggcgaggacggcatcgagcccgtgagcccccccgagggcatgaccgagcccggccacagcagaagcgccgtgtaccccctgctgtacagagacggcgagcagaccgagcccagcagaatgggcagcaagagccccggcaacaccagccagccccccgccttcttcagcaagctgaccgagagcaacagcgccatggtgaagagcaagaagcaggagatcaacaagaagctgaacacccacaacagaaacgagcccgagtacaacatcagccagcccggcaccgagatcttcaacatgcccgccatcaccggcaccggcctgatgacctacagaagccaggccgtgcaggagcacgccagcaccaacatgggcctggaggccatcatcagaaaggccctgatgggcaagtacgaccagtgggaggagagcccccccctgagcgccaacgccttcaaccccctgaacgccagcgccagcctgcccgccgccatgcccatcaccgccgccgacggcagaagcgaccacaccctgaccagccccggcggcggcggcaaggccaaggtgagcggcagacccagcagcagaaaggccaagagccccgcccccggcctggccagcggcgacagaccccccagcgtgagcagcgtgcacagcgagggcgactgcaacagaagaacccccctgaccaacagagtgtgggaggacagacccagcagcgccggcagcacccccttcccctacaaccccctgatcatgagactgcaggccggcgtgatggccagcccccccccccccggcctgcccgccggcagcggccccctggccggcccccaccacgcctgggacgaggagcccaagcccctgctgtgcagccagtacgagaccctgagcgacagcgagtag

SEQ ID NO: 91532 - DNA, 7377 bp, synthetic construct
  misc_feature 1..7377: note = Description of Artificial Sequence: Synthetic coding sequence
  source 1..7377: mol_type = other DNA
atgagcggcagcacccagcccgtggcccagacctggagagccaccgagcccagataccccccccacagcctgagctaccccgtgcagatcgccagaacccacaccgacgtgggcctgctggagtaccagcaccacagcagagactacgccagccacctgagccccggcagcatcatccagccccagagaagaagacccagcctgctgagcgagttccagcccggcaacgagagaagccaggagctgcacctgagacccgagagccacagctacctgcccgagctgggcaagagcgagatggagttcatcgagagcaagagacccagactggagctgctgcccgaccccctgctgagacccagccccctgctggccaccggccagcccgccggcagcgaggacctgaccaaggacagaagcctgaccggcaagctggagcccgtgagcccccccagccccccccacaccgaccccgagctggagctggtgccccccagactgagcaaggaggagctgatccagaacatggacagagtggacagagagatcaccatggtggagcagcagatcagcaagctgaagaagaagcagcagcagctggaggaggaggccgccaagccccccgagcccgagaagcccgtgagccccccccccatcgagagcaagcacagaagcctggtgcagatcatctacgacgagaacagaaagaaggccgaggccgcccacagaatcctggagggcctgggcccccaggtggagctgcccctgtacaaccagcccagcgacaccagacagtaccacgagaacatcaagatcaaccaggccatgagaaagaagctgatcctgtacttcaagagaagaaaccacgccagaaagcagtgggagcagaagttctgccagagatacgaccagctgatggaggcctgggagaagaaggtggagagaatcgagaacaaccccagaagaagagccaaggagagcaaggtgagagagtactacgagaagcagttccccgagatcagaaagcagagagagctgcaggagagaatgcagagagtgggccagagaggcagcggcctgagcatgagcgccgccagaagcgagcacgaggtgagcgagatcatcgacggcctgagcgagcaggagaacctggagaagcagatgagacagctggccgtgatcccccccatgctgtacgacgccgaccagcagagaatcaagttcatcaacatgaacggcctgatggccgaccccatgaaggtgtacaaggacagacaggtgatgaacatgtggagcgagcaggagaaggagaccttcagagagaagttcatgcagcaccccaagaacttcggcctgatcgccagcttcctggagagaaagaccgtggccgagtgcgtgctgtactactacctgaccaagaagaacgagaactacaagagcctggtgagaagaagctacagaagaagaggcaagagccagcagcagcagcagcagcagcagcagcagcagcagcagcagcagcagcagcccatgcccagaagcagccaggaggagaaggacgagaaggagaaggagaaggaggccgagaaggaggaggagaagcccgaggtggagaacgacaaggaggacctgctgaaggagaagaccgacgacaccagcggcgaggacaacgacgagaaggaggccgtggccagcaagggcagaaagaccgccaacagccagggcagaagaaagggcagaatcaccagaagcatggccaacgaggccaacagcgaggaggccatcaccccccagcagagcgccgagctggccagcatggagctgaacgagagcagcagatggaccgaggaggagatggagaccgccaagaagggcctgctggagcacggcagaaactggagcgccatcgccagaatggtgggcagcaagaccgtgagccagtgcaagaacttctacttcaactacaagaagagacagaacctggacgagatcctgcagcagcacaagctgaagatggagaaggagagaaacgccagaagaaagaagaagaaggcccccgccgccgccagcgaggaggccgccttcccccccgtggtggaggacgaggagatggaggccagcggcgtgagcggcaacgaggaggagatggtggaggaggccgaggccaccgtgaacaacagcagcgacaccgagagcatccccagcccccacaccgaggccgccaaggacaccggccagaacggccccaagccccccgccaccctgggcgccgacggccccccccccggcccccccacccccccccccgaggacatccccgcccccaccgagcccacccccgccagcgaggccaccggcgcccccacccccccccccgccccccccagccccagcgcccccccccccgtggtgcccaaggaggagaaggaggaggagaccgccgccgccccccccgtggaggagggcgaggagcagaagccccccgccgccgaggagctggccgtggacaccggcaaggccgaggagcccgtgaagagcgagtgcaccgaggaggccgaggagggccccgccaagggcaaggacgccgaggccgccgaggccaccgccgagggcgccctgaaggccgagaagaaggagggcggcagcggcagagccaccaccgccaagagcagcggcgccccccaggacagcgacagcagcgccacctgcagcgccgacgaggtggacgaggccgagggcggcgacaagaacagactgctgagccccagacccagcctgctgacccccaccggcgaccccagagccaacgccagcccccagaagcccctggacctgaagcagctgaagcagagagccgccgccatcccccccatccaggtgaccaaggtgcacgagccccccagagaggacgccgcccccaccaagcccgccccccccgcccccccccccccccagaacctgcagcccgagagcgacgccccccagcagcccggcagcagccccagaggcaagagcagaagccccgccccccccgccgacaaggaggccgagaagcccgtgttcttccccgccttcgccgccgaggcccagaagctgcccggcgaccccccctgctggaccagcggcctgcccttccccgtgccccccagagaggtgatcaaggccagcccccacgcccccgaccccagcgccttcagctacgccccccccggccaccccctgcccctgggcctgcacgacaccgccagacccgtgctgcccagaccccccaccatcagcaaccccccccccctgatcagcagcgccaagcaccccagcgtgctggagagacagatcggcgccatcagccagggcatgagcgtgcagctgcacgtgccctacagcgagcacgccaaggcccccgtgggccccgtgaccatgggcctgcccctgcccatggaccccaagaagctggcccccttcagcggcgtgaagcaggagcagctgagccccagaggccaggccggcccccccgagagcctgggcgtgcccaccgcccaggaggccagcgtgctgagaggcaccgccctgggcagcgtgcccggcggcagcatcaccaagggcatccccagcaccagagtgcccagcgacagcgccatcacctacagaggcagcatcacccacggcacccccgccgacgtgctgtacaagggcaccatcaccagaatcatcggcgaggacagccccagcagactggacagaggcagagaggacagcctgcccaagggccacgtgatctacgagggcaagaagggccacgtgctgagctacgagggcggcatgagcgtgacccagtgcagcaaggaggacggcagaagcagcagcggccccccccacgagaccgccgcccccaagagaacctacgacatgatggagggcagagtgggcagagccatcagcagcgccagcatcgagggcctgatgggcagagccatcccccccgagagacacagcccccaccacctgaaggagcagcaccacatcagaggcagcatcacccagggcatccccagaagctacgtggaggcccaggaggactacctgagaagagaggccaagctgctgaagagagagggcaccccccccccccccccccccagcagagacctgaccgaggcctacaagacccaggccctgggccccctgaagctgaagcccgcccacgagggcctggtggccaccgtgaaggaggccggcagaagcatccacgagatccccagagaggagctgagacacacccccgagctgcccctggcccccagacccctgaaggagggcagcatcacccagggcacccccctgaagtacgacaccggcgccagcaccaccggcagcaagaagcacgacgtgagaagcctgatcggcagccccggcagaaccttcccccccgtgcaccccctggacgtgatggccgacgccagagccctggagagagcctgctacgaggagagcctgaagagcagacccggcaccgccagcagcagcggcggcagcatcgccagaggcgcccccgtgatcgtgcccgagctgggcaagcccagacagagccccctgacctacgaggaccacggcgcccccttcgccggccacctgcccagaggcagccccgtgaccaccagagagcccacccccagactgcaggagggcagcctgagcagcagcaaggccagccaggacagaaagctgaccagcacccccagagagatcgccaagagcccccacagcaccgtgcccgagcaccacccccaccccatcagcccctacgagcacctgctgagaggcgtgagcggcgtggacctgtacagaagccacatccccctggccttcgaccccaccagcatccccagaggcatccccctggacgccgccgccgcctactacctgcccagacacctggcccccaaccccacctacccccacctgtaccccccctacctgatcagaggctaccccgacaccgccgccctggagaacagacagaccatcatcaacgactacatcaccagccagcagatgcaccacaacgccgccaccgccatggcccagagagccgacatgctgagaggcctgagccccagagagagcagcctggccctgaactacgccgccggccccagaggcatcatcgacctgagccaggtgccccacctgcccgtgctggtgccccccacccccggcacccccgccaccgccatggacagactggcctacctgcccaccgccccccagcccttcagcagcagacacagcagcagccccctgagccccggcggccccacccacctgaccaagcccaccaccaccagcagcagcgagagagagagagacagagacagagagagagacagagacagagagagagagaagagcatcctgaccagcaccaccaccgtggagcacgcccccatctggagacccggcaccgagcagagcagcggcagcagcggcggcggcggcggcagcagcagcagacccgccagccacagccacgcccaccagcacagccccatcagccccagaacccaggacgccctgcagcagagacccagcgtgctgcacaacaccggcatgaagggcatcatcaccgccgtggagcccagcacccccaccgtgctgagaagcaccagcaccagcagccccgtgagacccgccgccaccttcccccccgccacccactgccccctgggcggcaccctggacggcgtgtaccccaccctgatggagcccgtgctgctgcccaaggaggcccccagagtggccagacccgagagacccagagccgacaccggccacgccttcctggccaagccccccgccagaagcggcctggagcccgccagcagccccagcaagggcagcgagcccagacccctggtgccccccgtgagcggccacgccaccatcgccagaacccccgccaagaacctggccccccaccacgccagccccgacccccccgccccccccgccagcgccagcgacccccacagagagaagacccagagcaagcccttcagcatccaggagctggagctgagaagcctgggctaccacggcagcagctacagccccgagggcgtggagcccgtgagccccgtgagcagccccagcctgacccacgacaagggcctgcccaagcacctggaggagctggacaagagccacctggagggcgagctgagacccaagcagcccggccccgtgaagctgggcggcgaggccgcccacctgccccacctgagacccctgcccgagagccagcccagcagcagccccctgctgcagaccgcccccggcgtgaagggccaccagagagtggtgaccctggcccagcacatcagcgaggtgatcacccaggactacaccagacaccacccccagcagctgagcgcccccctgcccgcccccctgtacagcttccccggcgccagctgccccgtgctggacctgagaagaccccccagcgacctgtacctgcccccccccgaccacggcgcccccgccagaggcagcccccacagcgagggcggcaagagaagccccgagcccaacaagaccagcgtgctgggcggcggcgaggacggcatcgagcccgtgagcccccccgagggcatgaccgagcccggccacagcagaagcgccgtgtaccccctgctgtacagagacggcgagcagaccgagcccagcagaatgggcagcaagagccccggcaacaccagccagccccccgccttcttcagcaagctgaccgagagcaacagcgccatggtgaagagcaagaagcaggagatcaacaagaagctgaacacccacaacagaaacgagcccgagtacaacatcagccagcccggcaccgagatcttcaacatgcccgccatcaccggcaccggcctgatgacctacagaagccaggccgtgcaggagcacgccagcaccaacatgggcctggaggccatcatcagaaaggccctgatgggcggcggcggcaaggccaaggtgagcggcagacccagcagcagaaaggccaagagccccgcccccggcctggccagcggcgacagaccccccagcgtgagcagcgtgcacagcgagggcgactgcaacagaagaacccccctgaccaacagagtgtgggaggacagacccagcagcgccggcagcacccccttcccctacaaccccctgatcatgagactgcaggccggcgtgatggccagcccccccccccccggcctgcccgccggcagcggccccctggccggcccccaccacgcctgggacgaggagcccaagcccctgctgtgcagccagtacgagaccctgagcgacagcgagtag

SEQ ID NO: 91533 - DNA, 7545 bp, synthetic construct
  misc_feature 1..7545: note = Description of Artificial Sequence: Synthetic coding sequence
  source 1..7545: mol_type = other DNA
atgagcggcagcacccagcccgtggcccagacctggagagccaccgagcccagataccccccccacagcctgagctaccccgtgcagatcgccagaacccacaccgacgtgggcctgctggagtaccagcaccacagcagagactacgccagccacctgagccccggcagcatcatccagccccagagaagaagacccagcctgctgagcgagttccagcccggcaacgagagaagccaggagctgcacctgagacccgagagccacagctacctgcccgagctgggcaagagcgagatggagttcatcgagagcaagagacccagactggagctgctgcccgaccccctgctgagacccagccccctgctggccaccggccagcccgccggcagcgaggacctgaccaaggacagaagcctgaccggcaagctggagcccgtgagcccccccagccccccccacaccgaccccgagctggagctggtgccccccagactgagcaaggaggagctgatccagaacatggacagagtggacagagagatcaccatggtggagcagcagatcagcaagctgaagaagaagcagcagcagctggaggaggaggccgccaagccccccgagcccgagaagcccgtgagccccccccccatcgagagcaagcacagaagcctggtgcagatcatctacgacgagaacagaaagaaggccgaggccgcccacagaatcctggagggcctgggcccccaggtggagctgcccctgtacaaccagcccagcgacaccagacagtaccacgagaacatcaagatcaaccaggccatgagaaagaagctgatcctgtacttcaagagaagaaaccacgccagaaagcagtgggagcagaagttctgccagagatacgaccagctgatggaggcctgggagaagaaggtggagagaatcgagaacaaccccagaagaagagccaaggagagcaaggtgagagagtactacgagaagcagttccccgagatcagaaagcagagagagctgcaggagagaatgcagagcagagtgggccagagaggcagcggcctgagcatgagcgccgccagaagcgagcacgaggtgagcgagatcatcgacggcctgagcgagcaggagaacctggagaagcagatgagacagctggccgtgatcccccccatgctgtacgacgccgaccagcagagaatcaagttcatcaacatgaacggcctgatggccgaccccatgaaggtgtacaaggacagacaggtgatgaacatgtggagcgagcaggagaaggagaccttcagagagaagttcatgcagcaccccaagaacttcggcctgatcgccagcttcctggagagaaagaccgtggccgagtgcgtgctgtactactacctgaccaagaagaacgagaactacaagagcctggtgagaagaagctacagaagaagaggcaagagccagcagcagcagcagcagcagcagcagcagcagcagcagcagcagcagcagcccatgcccagaagcagccaggaggagaaggacgagaaggagaaggagaaggaggccgagaaggaggaggagaagcccgaggtggagaacgacaaggaggacctgctgaaggagaagaccgacgacaccagcggcgaggacaacgacgagaaggaggccgtggccagcaagggcagaaagaccgccaacagccagggcagaagaaagggcagaatcaccagaagcatggccaacgaggccaacagcgaggaggccatcaccccccagcagagcgccgagctggccagcatggagctgaacgagagcagcagatggaccgaggaggagatggagaccgccaagaagggcctgctggagcacggcagaaactggagcgccatcgccagaatggtgggcagcaagaccgtgagccagtgcaagaacttctacttcaactacaagaagagacagaacctggacgagatcctgcagcagcacaagctgaagatggagaaggagagaaacgccagaagaaagaagaagaaggcccccgccgccgccagcgaggaggccgccttcccccccgtggtggaggacgaggagatggaggccagcggcgtgagcggcaacgaggaggagatggtggaggaggccgaggccctgcacgccagcggcaacgaggtgcccagaggcgagtgcagcggccccgccaccgtgaacaacagcagcgacaccgagagcatccccagcccccacaccgaggccgccaaggacaccggccagaacggccccaagccccccgccaccctgggcgccgacggccccccccccggcccccccacccccccccccgaggacatccccgcccccaccgagcccacccccgccagcgaggccaccggcgcccccacccccccccccgccccccccagccccagcgcccccccccccgtggtgcccaaggaggagaaggaggaggagaccgccgccgccccccccgtggaggagggcgaggagcagaagccccccgccgccgaggagctggccgtggacaccggcaaggccgaggagcccgtgaagagcgagtgcaccgaggaggccgaggagggccccgccaagggcaaggacgccgaggccgccgaggccaccgccgagggcgccctgaaggccgagaagaaggagggcggcagcggcagagccaccaccgccaagagcagcggcgccccccaggacagcgacagcagcgccacctgcagcgccgacgaggtggacgaggccgagggcggcgacaagaacagactgctgagccccagacccagcctgctgacccccaccggcgaccccagagccaacgccagcccccagaagcccctggacctgaagcagctgaagcagagagccgccgccatcccccccatccaggtgaccaaggtgcacgagccccccagagaggacgccgcccccaccaagcccgccccccccgcccccccccccccccagaacctgcagcccgagagcgacgccccccagcagcccggcagcagccccagaggcaagagcagaagccccgccccccccgccgacaaggaggccttcgccgccgaggcccagaagctgcccggcgaccccccctgctggaccagcggcctgcccttccccgtgccccccagagaggtgatcaaggccagcccccacgcccccgaccccagcgccttcagctacgccccccccggccaccccctgcccctgggcctgcacgacaccgccagacccgtgctgcccagaccccccaccatcagcaaccccccccccctgatcagcagcgccaagcaccccagcgtgctggagagacagatcggcgccatcagccagggcatgagcgtgcagctgcacgtgccctacagcgagcacgccaaggcccccgtgggccccgtgaccatgggcctgcccctgcccatggaccccaagaagctggcccccttcagcggcgtgaagcaggagcagctgagccccagaggccaggccggcccccccgagagcctgggcgtgcccaccgcccaggaggccagcgtgctgagaggcaccgccctgggcagcgtgcccggcggcagcatcaccaagggcatccccagcaccagagtgcccagcgacagcgccatcacctacagaggcagcatcacccacggcacccccgccgacgtgctgtacaagggcaccatcaccagaatcatcggcgaggacagccccagcagactggacagaggcagagaggacagcctgcccaagggccacgtgatctacgagggcaagaagggccacgtgctgagctacgagggcggcatgagcgtgacccagtgcagcaaggaggacggcagaagcagcagcggccccccccacgagaccgccgcccccaagagaacctacgacatgatggagggcagagtgggcagagccatcagcagcgccagcatcgagggcctgatgggcagagccatcccccccgagagacacagcccccaccacctgaaggagcagcaccacatcagaggcagcatcacccagggcatccccagaagctacgtggaggcccaggaggactacctgagaagagaggccaagctgctgaagagagagggcaccccccccccccccccccccagcagagacctgaccgaggcctacaagacccaggccctgggccccctgaagctgaagcccgcccacgagggcctggtggccaccgtgaaggaggccggcagaagcatccacgagatccccagagaggagctgagacacacccccgagctgcccctggcccccagacccctgaaggagggcagcatcacccagggcacccccctgaagtacgacaccggcgccagcaccaccggcagcaagaagcacgacgtgagaagcctgatcggcagccccggcagaaccttcccccccgtgcaccccctggacgtgatggccgacgccagagccctggagagagcctgctacgaggagagcctgaagagcagacccggcaccgccagcagcagcggcggcagcatcgccagaggcgcccccgtgatcgtgcccgagctgggcaagcccagacagagccccctgacctacgaggaccacggcgcccccttcgccggccacctgcccagaggcagccccgtgaccaccagagagcccacccccagactgcaggagggcagcctgagcagcagcaaggccagccaggacagaaagctgaccagcacccccagagagatcgccaagagcccccacagcaccgtgcccgagcaccacccccaccccatcagcccctacgagcacctgctgagaggcgtgagcggcgtggacctgtacagaagccacatccccctggccttcgaccccaccagcatccccagaggcatccccctggacgccgccgccgcctactacctgcccagacacctggcccccaaccccacctacccccacctgtaccccccctacctgatcagaggctaccccgacaccgccgccctggagaacagacagaccatcatcaacgactacatcaccagccagcagatgcaccacaacgccgccaccgccatggcccagagagccgacatgctgagaggcctgagccccagagagagcagcctggccctgaactacgccgccggccccagaggcatcatcgacctgagccaggtgccccacctgcccgtgctggtgccccccacccccggcacccccgccaccgccatggacagactggcctacctgcccaccgccccccagcccttcagcagcagacacagcagcagccccctgagccccggcggccccacccacctgaccaagcccaccaccaccagcagcagcgagagagagagagacagagacagagagagagacagagacagagagagagagaagagcatcctgaccagcaccaccaccgtggagcacgcccccatctggagacccggcaccgagcagagcagcggcagcagcggcggcggcggcggcagcagcagcagacccgccagccacagccacgcccaccagcacagccccatcagccccagaacccaggacgccctgcagcagagacccagcgtgctgcacaacaccggcatgaagggcatcatcaccgccgtggagcccagcacccccaccgtgctgagaagcaccagcaccagcagccccgtgagacccgccgccaccttcccccccgccacccactgccccctgggcggcaccctggacggcgtgtaccccaccctgatggagcccgtgctgctgcccaaggaggcccccagagtggccagacccgagagacccagagccgacaccggccacgccttcctggccaagccccccgccagaagcggcctggagcccgccagcagccccagcaagggcagcgagcccagacccctggtgccccccgtgagcggccacgccaccatcgccagaacccccgccaagaacctggccccccaccacgccagccccgacccccccgccccccccgccagcgccagcgacccccacagagagaagacccagagcaagcccttcagcatccaggagctggagctgagaagcctgggctaccacggcagcagctacagccccgagggcgtggagcccgtgagccccgtgagcagccccagcctgacccacgacaagggcctgcccaagcacctggaggagctggacaagagccacctggagggcgagctgagacccaagcagcccggccccgtgaagctgggcggcgaggccgcccacctgccccacctgagacccctgcccgagagccagcccagcagcagccccctgctgcagaccgcccccggcgtgaagggccaccagagagtggtgaccctggcccagcacatcagcgaggtgatcacccaggactacaccagacaccacccccagcagctgagcgcccccctgcccgcccccctgtacagcttccccggcgccagctgccccgtgctggacctgagaagaccccccagcgacctgtacctgcccccccccgaccacggcgcccccgccagaggcagcccccacagcgagggcggcaagagaagccccgagcccaacaagaccagcgtgctgggcggcggcgaggacggcatcgagcccgtgagcccccccgagggcatgaccgagcccggccacagcagaagcgccgtgtaccccctgctgtacagagacggcgagcagaccgagcccagcagaatgggcagcaagagccccggcaacaccagccagccccccgccttcttcagcaagctgaccgagagcaacagcgccatggtgaagagcaagaagcaggagatcaacaagaagctgaacacccacaacagaaacgagcccgagtacaacatcagccagcccggcaccgagatcttcaacatgcccgccatcaccggcaccggcctgatgacctacagaagccaggccgtgcaggagcacgccagcaccaacatgggcctggaggccatcatcagaaaggccctgatgggcaagtacgaccagtgggaggagagcccccccctgagcgccaacgccttcaaccccctgaacgccagcgccagcctgcccgccgccatgcccatcaccgccgccgacggcagaagcgaccacaccctgaccagccccggcggcggcggcaaggccaaggtgagcggcagacccagcagcagaaaggccaagagccccgcccccggcctggccagcggcgacagaccccccagcgtgagcagcgtgcacagcgagggcgactgcaacagaagaacccccctgaccaacagagtgtgggaggacagacccagcagcgccggcagcacccccttcccctacaaccccctgatcatgagactgcaggccggcgtgatggccagcccccccccccccggcctgcccgccggcagcggccccctggccggcccccaccacgcctgggacgaggagcccaagcccctgctgtgcagccagtacgagaccctgagcgacagcgagtag

SEQ ID NO: 91534 - DNA, 7515 bp, synthetic construct
  misc_feature 1..7515: note = Description of Artificial Sequence: Synthetic coding sequence
  source 1..7515: mol_type = other DNA
atgagcggcagcacccagcccgtggcccagacctggagagccaccgagcccagataccccccccacagcctgagctaccccgtgcagatcgccagaacccacaccgacgtgggcctgctggagtaccagcaccacagcagagactacgccagccacctgagccccggcagcatcatccagccccagagaagaagacccagcctgctgagcgagttccagcccggcaacgagagaagccaggagctgcacctgagacccgagagccacagctacctgcccgagctgggcaagagcgagatggagttcatcgagagcaagagacccagactggagctgctgcccgaccccctgctgagacccagccccctgctggccaccggccagcccgccggcagcgaggacctgaccaaggacagaagcctgaccggcaagctggagcccgtgagcccccccagccccccccacaccgaccccgagctggagctggtgccccccagactgagcaaggaggagctgatccagaacatggacagagtggacagagagatcaccatggtggagcagcagatcagcaagctgaagaagaagcagcagcagctggaggaggaggccgccaagccccccgagcccgagaagcccgtgagccccccccccatcgagagcaagcacagaagcctggtgcagatcatctacgacgagaacagaaagaaggccgaggccgcccacagaatcctggagggcctgggcccccaggtggagctgcccctgtacaaccagcccagcgacaccagacagtaccacgagaacatcaagatcaaccaggccatgagaaagaagctgatcctgtacttcaagagaagaaaccacgccagaaagcagtgggagcagaagttctgccagagatacgaccagctgatggaggcctgggagaagaaggtggagagaatcgagaacaaccccagaagaagagccaaggagagcaaggtgagagagtactacgagaagcagttccccgagatcagaaagcagagagagctgcaggagagaatgcagagagtgggccagagaggcagcggcctgagcatgagcgccgccagaagcgagcacgaggtgagcgagatcatcgacggcctgagcgagcaggagaacctggagaagcagatgagacagctggccgtgatcccccccatgctgtacgacgccgaccagcagagaatcaagttcatcaacatgaacggcctgatggccgaccccatgaaggtgtacaaggacagacaggtgatgaacatgtggagcgagcaggagaaggagaccttcagagagaagttcatgcagcaccccaagaacttcggcctgatcgccagcttcctggagagaaagaccgtggccgagtgcgtgctgtactactacctgaccaagaagaacgagaactacaagagcctggtgagaagaagctacagaagaagaggcaagagccagcagcagcagcagcagcagcagcagcagcagcagcagcagcagcagcagcccatgcccagaagcagccaggaggagaaggacgagaaggagaaggagaaggaggccgagaaggaggaggagaagcccgaggtggagaacgacaaggaggacctgctgaaggagaagaccgacgacaccagcggcgaggacaacgacgagaaggaggccgtggccagcaagggcagaaagaccgccaacagccagggcagaagaaagggcagaatcaccagaagcatggccaacgaggccaacagcgaggaggccatcaccccccagcagagcgccgagctggccagcatggagctgaacgagagcagcagatggaccgaggaggagatggagaccgccaagaagggcctgctggagcacggcagaaactggagcgccatcgccagaatggtgggcagcaagaccgtgagccagtgcaagaacttctacttcaactacaagaagagacagaacctggacgagatcctgcagcagcacaagctgaagatggagaaggagagaaacgccagaagaaagaagaagaaggcccccgccgccgccagcgaggaggccgccttcccccccgtggtggaggacgaggagatggaggccagcggcgtgagcggcaacgaggaggagatggtggaggaggccgaggccaccgtgaacaacagcagcgacaccgagagcatccccagcccccacaccgaggccgccaaggacaccggccagaacggccccaagccccccgccaccctgggcgccgacggccccccccccggcccccccacccccccccccgaggacatccccgcccccaccgagcccacccccgccagcgaggccaccggcgcccccacccccccccccgccccccccagccccagcgcccccccccccgtggtgcccaaggaggagaaggaggaggagaccgccgccgccccccccgtggaggagggcgaggagcagaagccccccgccgccgaggagctggccgtggacaccggcaaggccgaggagcccgtgaagagcgagtgcaccgaggaggccgaggagggccccgccaagggcaaggacgccgaggccgccgaggccaccgccgagggcgccctgaaggccgagaagaaggagggcggcagcggcagagccaccaccgccaagagcagcggcgccccccaggacagcgacagcagcgccacctgcagcgccgacgaggtggacgaggccgagggcggcgacaagaacagactgctgagccccagacccagcctgctgacccccaccggcgaccccagagccaacgccagcccccagaagcccctggacctgaagcagctgaagcagagagccgccgccatcccccccatccaggtgaccaaggtgcacgagccccccagagaggacgccgcccccaccaagcccgccccccccgcccccccccccccccagaacctgcagcccgagagcgacgccccccagcagcccggcagcagccccagaggcaagagcagaagccccgccccccccgccgacaaggaggccgagaagcccgtgttcttccccgccttcgccgccgaggcccagaagctgcccggcgaccccccctgctggaccagcggcctgcccttccccgtgccccccagagaggtgatcaaggccagcccccacgcccccgaccccagcgccttcagctacgccccccccggccaccccctgcccctgggcctgcacgacaccgccagacccgtgctgcccagaccccccaccatcagcaaccccccccccctgatcagcagcgccaagcaccccagcgtgctggagagacagatcggcgccatcagccagggcatgagcgtgcagctgcacgtgccctacagcgagcacgccaaggcccccgtgggccccgtgaccatgggcctgcccctgcccatggaccccaagaagctggcccccttcagcggcgtgaagcaggagcagctgagccccagaggccaggccggcccccccgagagcctgggcgtgcccaccgcccaggaggccagcgtgctgagaggcaccgccctgggcagcgtgcccggcggcagcatcaccaagggcatccccagcaccagagtgcccagcgacagcgccatcacctacagaggcagcatcacccacggcacccccgccgacgtgctgtacaagggcaccatcaccagaatcatcggcgaggacagccccagcagactggacagaggcagagaggacagcctgcccaagggccacgtgatctacgagggcaagaagggccacgtgctgagctacgagggcggcatgagcgtgacccagtgcagcaaggaggacggcagaagcagcagcggccccccccacgagaccgccgcccccaagagaacctacgacatgatggagggcagagtgggcagagccatcagcagcgccagcatcgagggcctgatgggcagagccatcccccccgagagacacagcccccaccacctgaaggagcagcaccacatcagaggcagcatcacccagggcatccccagaagctacgtggaggcccaggaggactacctgagaagagaggccaagctgctgaagagagagggcaccccccccccccccccccccagcagagacctgaccgaggcctacaagacccaggccctgggccccctgaagctgaagcccgcccacgagggcctggtggccaccgtgaaggaggccggcagaagcatccacgagatccccagagaggagctgagacacacccccgagctgcccctggcccccagacccctgaaggagggcagcatcacccagggcacccccctgaagtacgacaccggcgccagcaccaccggcagcaagaagcacgacgtgagaagcctgatcggcagccccggcagaaccttcccccccgtgcaccccctggacgtgatggccgacgccagagccctggagagagcctgctacgaggagagcctgaagagcagacccggcaccgccagcagcagcggcggcagcatcgccagaggcgcccccgtgatcgtgcccgagctgggcaagcccagacagagccccctgacctacgaggaccacggcgcccccttcgccggccacctgcccagaggcagccccgtgaccaccagagagcccacccccagactgcaggagggcagcctgagcagcagcaaggccagccaggacagaaagctgaccagcacccccagagagatcgccaagagcccccacagcaccgtgcccgagcaccacccccaccccatcagcccctacgagcacctgctgagaggcgtgagcggcgtggacctgtacagaagccacatccccctggccttcgaccccaccagcatccccagaggcatccccctggacgccgccgccgcctactacctgcccagacacctggcccccaaccccacctacccccacctgtaccccccctacctgatcagaggctaccccgacaccgccgccctggagaacagacagaccatcatcaacgactacatcaccagccagcagatgcaccacaacgccgccaccgccatggcccagagagccgacatgctgagaggcctgagccccagagagagcagcctggccctgaactacgccgccggccccagaggcatcatcgacctgagccaggtgccccacctgcccgtgctggtgccccccacccccggcacccccgccaccgccatggacagactggcctacctgcccaccgccccccagcccttcagcagcagacacagcagcagccccctgagccccggcggccccacccacctgaccaagcccaccaccaccagcagcagcgagagagagagagacagagacagagagagagacagagacagagagagagagaagagcatcctgaccagcaccaccaccgtggagcacgcccccatctggagacccggcaccgagcagagcagcggcagcagcggcggcggcggcggcagcagcagcagacccgccagccacagccacgcccaccagcacagccccatcagccccagaacccaggacgccctgcagcagagacccagcgtgctgcacaacaccggcatgaagggcatcatcaccgccgtggagcccagcacccccaccgtgctgagaagcaccagcaccagcagccccgtgagacccgccgccaccttcccccccgccacccactgccccctgggcggcaccctggacggcgtgtaccccaccctgatggagcccgtgctgctgcccaaggaggcccccagagtggccagacccgagagacccagagccgacaccggccacgccttcctggccaagccccccgccagaagcggcctggagcccgccagcagccccagcaagggcagcgagcccagacccctggtgccccccgtgagcggccacgccaccatcgccagaacccccgccaagaacctggccccccaccacgccagccccgacccccccgccccccccgccagcgccagcgacccccacagagagaagacccagagcaagcccttcagcatccaggagctggagctgagaagcctgggctaccacggcagcagctacagccccgagggcgtggagcccgtgagccccgtgagcagccccagcctgacccacgacaagggcctgcccaagcacctggaggagctggacaagagccacctggagggcgagctgagacccaagcagcccggccccgtgaagctgggcggcgaggccgcccacctgccccacctgagacccctgcccgagagccagcccagcagcagccccctgctgcagaccgcccccggcgtgaagggccaccagagagtggtgaccctggcccagcacatcagcgaggtgatcacccaggactacaccagacaccacccccagcagctgagcgcccccctgcccgcccccctgtacagcttccccggcgccagctgccccgtgctggacctgagaagaccccccagcgacctgtacctgcccccccccgaccacggcgcccccgccagaggcagcccccacagcgagggcggcaagagaagccccgagcccaacaagaccagcgtgctgggcggcggcgaggacggcatcgagcccgtgagcccccccgagggcatgaccgagcccggccacagcagaagcgccgtgtaccccctgctgtacagagacggcgagcagaccgagcccagcagaatgggcagcaagagccccggcaacaccagccagccccccgccttcttcagcaagctgaccgagagcaacagcgccatggtgaagagcaagaagcaggagatcaacaagaagctgaacacccacaacagaaacgagcccgagtacaacatcagccagcccggcaccgagatcttcaacatgcccgccatcaccggcaccggcctgatgacctacagaagccaggccgtgcaggagcacgccagcaccaacatgggcctggaggccatcatcagaaaggccctgatgggcaagtacgaccagtgggaggagagcccccccctgagcgccaacgccttcaaccccctgaacgccagcgccagcctgcccgccgccatgcccatcaccgccgccgacggcagaagcgaccacaccctgaccagccccggcggcggcggcaaggccaaggtgagcggcagacccagcagcagaaaggccaagagccccgcccccggcctggccagcggcgacagaccccccagcgtgagcagcgtgcacagcgagggcgactgcaacagaagaacccccctgaccaacagagtgtgggaggacagacccagcagcgccggcagcacccccttcccctacaaccccctgatcatgagactgcaggccggcgtgatggccagcccccccccccccggcctgcccgccggcagcggccccctggccggcccccaccacgcctgggacgaggagcccaagcccctgctgtgcagccagtacgagaccctgagcgacagcgagtag

SEQ ID NO: 91535 - DNA, 7542 bp, synthetic construct
  misc_feature 1..7542: note = Description of Artificial Sequence: Synthetic coding sequence
  source 1..7542: mol_type = other DNA
atgagcggcagcacccagcccgtggcccagacctggagagccaccgagcccagataccccccccacagcctgagctaccccgtgcagatcgccagaacccacaccgacgtgggcctgctggagtaccagcaccacagcagagactacgccagccacctgagccccggcagcatcatccagccccagagaagaagacccagcctgctgagcgagttccagcccggcaacgagagaagccaggagctgcacctgagacccgagagccacagctacctgcccgagctgggcaagagcgagatggagttcatcgagagcaagagacccagactggagctgctgcccgaccccctgctgagacccagccccctgctggccaccggccagcccgccggcagcgaggacctgaccaaggacagaagcctgaccggcaagctggagcccgtgagcccccccagccccccccacaccgaccccgagctggagctggtgccccccagactgagcaaggaggagctgatccagaacatggacagagtggacagagagatcaccatggtggagcagcagatcagcaagctgaagaagaagcagcagcagctggaggaggaggccgccaagccccccgagcccgagaagcccgtgagccccccccccatcgagagcaagcacagaagcctggtgcagatcatctacgacgagaacagaaagaaggccgaggccgcccacagaatcctggagggcctgggcccccaggtggagctgcccctgtacaaccagcccagcgacaccagacagtaccacgagaacatcaagatcaaccaggccatgagaaagaagctgatcctgtacttcaagagaagaaaccacgccagaaagcagtgggagcagaagttctgccagagatacgaccagctgatggaggcctgggagaagaaggtggagagaatcgagaacaaccccagaagaagagccaaggagagcaaggtgagagagtactacgagaagcagttccccgagatcagaaagcagagagagctgcaggagagaatgcagagcagagtgggccagagaggcagcggcctgagcatgagcgccgccagaagcgagcacgaggtgagcgagatcatcgacggcctgagcgagcaggagaacctggagaagcagatgagacagctggccgtgatcccccccatgctgtacgacgccgaccagcagagaatcaagttcatcaacatgaacggcctgatggccgaccccatgaaggtgtacaaggacagacaggtgatgaacatgtggagcgagcaggagaaggagaccttcagagagaagttcatgcagcaccccaagaacttcggcctgatcgccagcttcctggagagaaagaccgtggccgagtgcgtgctgtactactacctgaccaagaagaacgagaactacaagagcctggtgagaagaagctacagaagaagaggcaagagccagcagcagcagcagcagcagcagcagcagcagcagcagcagcagcagcagcccatgcccagaagcagccaggaggagaaggacgagaaggagaaggagaaggaggccgagaaggaggaggagaagcccgaggtggagaacgacaaggaggacctgctgaaggagaagaccgacgacaccagcggcgaggacaacgacgagaaggaggccgtggccagcaagggcagaaagaccgccaacagccagggcagaagaaagggcagaatcaccagaagcatggccaacgaggccaacagcgaggaggccatcaccccccagcagagcgccgagctggccagcatggagctgaacgagagcagcagatggaccgaggaggagatggagaccgccaagaagggcctgctggagcacggcagaaactggagcgccatcgccagaatggtgggcagcaagaccgtgagccagtgcaagaacttctacttcaactacaagaagagacagaacctggacgagatcctgcagcagcacaagctgaagatggagaaggagagaaacgccagaagaaagaagaagaaggcccccgccgccgccagcgaggaggccgccttcccccccgtggtggaggacgaggagatggaggccagcggcgtgagcggcaacgaggaggagatggtggaggaggccgaggccctgcacgccagcggcaacgaggtgcccagaggcgagtgcagcggccccgccaccgtgaacaacagcagcgacaccgagagcatccccagcccccacaccgaggccgccaaggacaccggccagaacggccccaagccccccgccaccctgggcgccgacggccccccccccggcccccccaccccccccagaagaaccagcagacccaccgagcccacccccgccagcgaggccaccggcgcccccacccccccccccgccccccccagccccagcgcccccccccccgtggtgcccaaggaggagaaggaggaggagaccgccgccgccccccccgtggaggagggcgaggagcagaagccccccgccgccgaggagctggccgtggacaccggcaaggccgaggagcccgtgaagagcgagtgcaccgaggaggccgaggagggccccgccaagggcaaggacgccgaggccgccgaggccaccgccgagggcgccctgaaggccgagaagaaggagggcggcagcggcagagccaccaccgccaagagcagcggcgccccccaggacagcgacagcagcgccacctgcagcgccgacgaggtggacgaggccgagggcggcgacaagaacagactgctgagccccagacccagcctgctgacccccaccggcgaccccagagccaacgccagcccccagaagcccctggacctgaagcagctgaagcagagagccgccgccatcccccccatccaggtgaccaaggtgcacgagccccccagagaggacgccgcccccaccaagcccgccccccccgcccccccccccccccagaacctgcagcccgagagcgacgccccccagcagcccggcagcagccccagaggcaagagcagaagccccgccccccccgccgacaaggaggccttcgccgccgaggcccagaagctgcccggcgaccccccctgctggaccagcggcctgcccttccccgtgccccccagagaggtgatcaaggccagcccccacgcccccgaccccagcgccttcagctacgccccccccggccaccccctgcccctgggcctgcacgacaccgccagacccgtgctgcccagaccccccaccatcagcaaccccccccccctgatcagcagcgccaagcaccccagcgtgctggagagacagatcggcgccatcagccagggcatgagcgtgcagctgcacgtgccctacagcgagcacgccaaggcccccgtgggccccgtgaccatgggcctgcccctgcccatggaccccaagaagctggcccccttcagcggcgtgaagcaggagcagctgagccccagaggccaggccggcccccccgagagcctgggcgtgcccaccgcccaggaggccagcgtgctgagaggcaccgccctgggcagcgtgcccggcggcagcatcaccaagggcatccccagcaccagagtgcccagcgacagcgccatcacctacagaggcagcatcacccacggcacccccgccgacgtgctgtacaagggcaccatcaccagaatcatcggcgaggacagccccagcagactggacagaggcagagaggacagcctgcccaagggccacgtgatctacgagggcaagaagggccacgtgctgagctacgagggcggcatgagcgtgacccagtgcagcaaggaggacggcagaagcagcagcggccccccccacgagaccgccgcccccaagagaacctacgacatgatggagggcagagtgggcagagccatcagcagcgccagcatcgagggcctgatgggcagagccatcccccccgagagacacagcccccaccacctgaaggagcagcaccacatcagaggcagcatcacccagggcatccccagaagctacgtggaggcccaggaggactacctgagaagagaggccaagctgctgaagagagagggcaccccccccccccccccccccagcagagacctgaccgaggcctacaagacccaggccctgggccccctgaagctgaagcccgcccacgagggcctggtggccaccgtgaaggaggccggcagaagcatccacgagatccccagagaggagctgagacacacccccgagctgcccctggcccccagacccctgaaggagggcagcatcacccagggcacccccctgaagtacgacaccggcgccagcaccaccggcagcaagaagcacgacgtgagaagcctgatcggcagccccggcagaaccttcccccccgtgcaccccctggacgtgatggccgacgccagagccctggagagagcctgctacgaggagagcctgaagagcagacccggcaccgccagcagcagcggcggcagcatcgccagaggcgcccccgtgatcgtgcccgagctgggcaagcccagacagagccccctgacctacgaggaccacggcgcccccttcgccggccacctgcccagaggcagccccgtgaccaccagagagcccacccccagactgcaggagggcagcctgagcagcagcaaggccagccaggacagaaagctgaccagcacccccagagagatcgccaagagcccccacagcaccgtgcccgagcaccacccccaccccatcagcccctacgagcacctgctgagaggcgtgagcggcgtggacctgtacagaagccacatccccctggccttcgaccccaccagcatccccagaggcatccccctggacgccgccgccgcctactacctgcccagacacctggcccccaaccccacctacccccacctgtaccccccctacctgatcagaggctaccccgacaccgccgccctggagaacagacagaccatcatcaacgactacatcaccagccagcagatgcaccacaacgccgccaccgccatggcccagagagccgacatgctgagaggcctgagccccagagagagcagcctggccctgaactacgccgccggccccagaggcatcatcgacctgagccaggtgccccacctgcccgtgctggtgccccccacccccggcacccccgccaccgccatggacagactggcctacctgcccaccgccccccagcccttcagcagcagacacagcagcagccccctgagccccggcggccccacccacctgaccaagcccaccaccaccagcagcagcgagagagagagagacagagacagagagagagacagagacagagagagagagaagagcatcctgaccagcaccaccaccgtggagcacgcccccatctggagacccggcaccgagcagagcagcggcagcagcggcggcggcggcggcagcagcagcagacccgccagccacagccacgcccaccagcacagccccatcagccccagaacccaggacgccctgcagcagagacccagcgtgctgcacaacaccggcatgaagggcatcatcaccgccgtggagcccagcacccccaccgtgctgagaagcaccagcaccagcagccccgtgagacccgccgccaccttcccccccgccacccactgccccctgggcggcaccctggacggcgtgtaccccaccctgatggagcccgtgctgctgcccaaggaggcccccagagtggccagacccgagagacccagagccgacaccggccacgccttcctggccaagccccccgccagaagcggcctggagcccgccagcagccccagcaagggcagcgagcccagacccctggtgccccccgtgagcggccacgccaccatcgccagaacccccgccaagaacctggccccccaccacgccagccccgacccccccgccccccccgccagcgccagcgacccccacagagagaagacccagagcaagcccttcagcatccaggagctggagctgagaagcctgggctaccacggcagcagctacagccccgagggcgtggagcccgtgagccccgtgagcagccccagcctgacccacgacaagggcctgcccaagcacctggaggagctggacaagagccacctggagggcgagctgagacccaagcagcccggccccgtgaagctgggcggcgaggccgcccacctgccccacctgagacccctgcccgagagccagcccagcagcagccccctgctgcagaccgcccccggcgtgaagggccaccagagagtggtgaccctggcccagcacatcagcgaggtgatcacccaggactacaccagacaccacccccagcagctgagcgcccccctgcccgcccccctgtacagcttccccggcgccagctgccccgtgctggacctgagaagaccccccagcgacctgtacctgcccccccccgaccacggcgcccccgccagaggcagcccccacagcgagggcggcaagagaagccccgagcccaacaagaccagcgtgctgggcggcggcgaggacggcatcgagcccgtgagcccccccgagggcatgaccgagcccggccacagcagaagcgccgtgtaccccctgctgtacagagacggcgagcagaccgagcccagcagaatgggcagcaagagccccggcaacaccagccagccccccgccttcttcagcaagctgaccgagagcaacagcgccatggtgaagagcaagaagcaggagatcaacaagaagctgaacacccacaacagaaacgagcccgagtacaacatcagccagcccggcaccgagatcttcaacatgcccgccatcaccggcaccggcctgatgacctacagaagccaggccgtgcaggagcacgccagcaccaacatgggcctggaggccatcatcagaaaggccctgatgggcaagtacgaccagtgggaggagagcccccccctgagcgccaacgccttcaaccccctgaacgccagcgccagcctgcccgccgccatgcccatcaccgccgccgacggcagaagcgaccacaccctgaccagccccggcggcggcggcaaggccaaggtgagcggcagacccagcagcagaaaggccaagagccccgcccccggcctggccagcggcgacagaccccccagcgtgagcagcgtgcacagcgagggcgactgcaacagaagaacccccctgaccaacagagtgtgggaggacagacccagcagcgccggcagcacccccttcccctacaaccccctgatcatgagactgcaggccggcgtgatggccagcccccccccccccggcctgcccgccggcagcggccccctggccggcccccaccacgcctgggacgaggagcccaagcccctgctgtgcagccagtacgagaccctgagcgacagcgagtag

SEQ ID NO: 91536 - DNA, 1821 bp, synthetic construct
  misc_feature 1..1821: note = Description of Artificial Sequence: Synthetic coding sequence
  source 1..1821: mol_type = other DNA
ctgcagagcggcgccacccactgccccctgggcggcaccctggacggcgtgtaccccaccctgatggagcccgtgctgctgcccaaggaggcccccagagtggccagacccgagagacccagagccgacaccggccacgccttcctggccaagccccccgccagaagcggcctggagcccgccagcagccccagcaagggcagcgagcccagacccctggtgccccccgtgagcggccacgccaccatcgccagaacccccgccaagaacctggccccccaccacgccagccccgacccccccgccccccccgccagcgccagcgacccccacagagagaagacccagagcaagcccttcagcatccaggagctggagctgagaagcctgggctaccacggcagcagctacagccccgagggcgtggagcccgtgagccccgtgagcagccccagcctgacccacgacaagggcctgcccaagcacctggaggagctggacaagagccacctggagggcgagctgagacccaagcagcccggccccgtgaagctgggcggcgaggccgcccacctgccccacctgagacccctgcccgagagccagcccagcagcagccccctgctgcagaccgcccccggcgtgaagggccaccagagagtggtgaccctggcccagcacatcagcgaggtgatcacccaggactacaccagacaccacccccagcagctgagcgcccccctgcccgcccccctgtacagcttccccggcgccagctgccccgtgctggacctgagaagaccccccagcgacctgtacctgcccccccccgaccacggcgcccccgccagaggcagcccccacagcgagggcggcaagagaagccccgagcccaacaagaccagcgtgctgggcggcggcgaggacggcatcgagcccgtgagcccccccgagggcatgaccgagcccggccacagcagaagcgccgtgtaccccctgctgtacagagacggcgagcagaccgagcccagcagaatgggcagcaagagccccggcaacaccagccagccccccgccttcttcagcaagctgaccgagagcaacagcgccatggtgaagagcaagaagcaggagatcaacaagaagctgaacacccacaacagaaacgagcccgagtacaacatcagccagcccggcaccgagatcttcaacatgcccgccatcaccggcaccggcctgatgacctacagaagccaggccgtgcaggagcacgccagcaccaacatgggcctggaggccatcatcagaaaggccctgatgggcaagtacgaccagtgggaggagagcccccccctgagcgccaacgccttcaaccccctgaacgccagcgccagcctgcccgccgccatgcccatcaccgccgccgacggcagaagcgaccacaccctgaccagccccggcggcggcggcaaggccaaggtgagcggcagacccagcagcagaaaggccaagagccccgcccccggcctggccagcggcgacagaccccccagcgtgagcagcgtgcacagcgagggcgactgcaacagaagaacccccctgaccaacagagtgtgggaggacagacccagcagcgccggcagcacccccttcccctacaaccccctgatcatgagactgcaggccggcgtgatggccagcccccccccccccggcctgcccgccggcagcggccccctggccggcccccaccacgcctgggacgaggagcccaagcccctgctgtgcagccagtacgagaccctgagcgacagcgagtag

SEQ ID NO: 91537 - DNA, 726 bp, synthetic construct
  misc_feature 1..726: note = Description of Artificial Sequence: Synthetic coding sequence
  source 1..726: mol_type = other DNA
atgttctacagcggcctgctgaccgagggcggcagaaaggagaccgacatgagagaggccgccagcctgagacagcagagaagaatgaagcaggccgtgcagttcatccacaaggacagcgccgacctgctgcccctggacggcctgaagaagctgggcagcagcaaggacatgcagccccacaacatcctgcagagaagactgatggagaccaacctgagcaagctgagaagcggccccagagtgccctgggccagcaagaccaacaagctgaaccaggccaagagcgagggcctgaagaagagcgaggaggacgacatgatcctggtgagctgccagtgcgccggcaaggacgtgaaggccctggtggacaccggctgcctgtacaacctgatcagcctggcctgcgtggacagactgggcctgaaggagcacgtgaagagccacaagcacgagggcgagaagctgagcctgcccagacacctgaaggtggtgggccagatcgagcacctggtgatcaccctgggcagcctgagactggactgccccgccgccgtggtggacgacaacgagaagaacctgagcctgggcctgcagaccctgagaagcctgaagtgcatcatcaacctggacaagcacagactgatcatgggcaagaccgacaaggaggagatccccttcgtggagaccgtgagcctgaacgaggacaacaccagcgaggcctag

SEQ ID NO: 91538 - DNA, 774 bp, synthetic construct
  misc_feature 1..774: note = Description of Artificial Sequence: Synthetic coding sequence
  source 1..774: mol_type = other DNA
atgagcaccagccagcccggcgcctgcccctgccagggcgccgccagcagacccgccatcctgtacgccctgctgagcagcagcctgaaggccgtgcccagacccagaagcagatgcctgtgcagacagcacagacccgtgcagctgtgcgccccccacagaacctgcagagaggccctggacgtgctggccaagaccgtggccttcctgagaaacctgcccagcttctggcagctgcccccccaggaccagagaagactgctgcagggctgctggggccccctgttcctgctgggcctggcccaggacgccgtgaccttcgaggtggccgaggcccccgtgcccagcatcctgaagaagatcctgctggaggagcccagcagcagcggcggcagcggccagctgcccgacagaccccagcccagcctggccgccgtgcagtggctgcagtgctgcctggagagcttctggagcctggagctgagccccaaggagtacgcctgcctgaagggcaccatcctgttcaaccccgacgtgcccggcctgcaggccgccagccacatcggccacctgcagcaggaggcccactgggtgctgtgcgaggtgctggagccctggtgccccgccgcccagggcagactgaccagagtgctgctgaccgccagcaccctgaagagcatccccaccagcctgctgggcgacctgttcttcagacccatcatcggcgacgtggacatcgccggcctgctgggcgacatgctgctgctgagatag

SEQ ID NO: 91539 - DNA, 1845 bp, synthetic construct
  misc_feature 1..1845: note = Description of Artificial Sequence: Synthetic coding sequence
  source 1..1845: mol_type = other DNA
atgaccaccctggacagcaacaacaacaccggcggcgtgatcacctacatcggcagcagcggcagcagccccagcagaaccagccccgagagcctgtacagcgacaacagcaacggcagcttccagagcctgacccagggctgccccacctacttcccccccagccccaccggcagcctgacccaggaccccgccagaagcttcggcagcatcccccccagcctgagcgacgacggcagccccagcagcagcagcagcagcagcagcagcagcagcagcttctacaacggcagcccccccggcagcctgcaggtggccatggaggacagcagcagagtgagccccagcaagagcaccagcaacatcaccaagctgaacggcatggtgctgctgtgcaaggtgtgcggcgacgtggccagcggcttccactacggcgtgcacgcctgcgagggctgcaagggcttcttcagaagaagcatccagcagaacatccagtacaagagatgcctgaagaacgagaactgcagcatcgtgagaatcaacagaaacagatgccagcagtgcagattcaagaagtgcctgagcgtgggcatgagcagagacgccgtgagattcggcagaatccccaagagagagaagcagagaatgctggccgagatgcagagcgccatgaacctggccaacaaccagctgagcagccagtgccccctggagaccagccccacccagcaccccacccccggccccatgggccccagccccccccccgcccccgtgcccagccccctggtgggcttcagccagttcccccagcagctgaccccccccagaagccccagccccgagcccaccgtggaggacgtgatcagccaggtggccagagcccacagagagatcttcacctacgcccacgacaagctgggcagcagccccggcaacttcaacgccaaccacgccagcggcagcccccccgccaccaccccccacagatgggagaaccagggctgcccccccgcccccaacgacaacaacaccctggccgcccagagacacaacgaggccctgaacggcctgagacaggcccccagcagctacccccccacctggccccccggccccgcccaccacagctgccaccagagcaacagcaacggccacagactgtgccccacccacgtgtacgccgcccccgagggcaaggcccccgccaacagccccagacagggcaacagcaagaacgtgctgctggcctgccccatgaacatgtacccccacggcagaagcggcagaaccgtgcaggagatctgggaggacttcagcatgagcttcacccccgccgtgagagaggtggtggagttcgccaagcacatccccggcttcagagacctgagccagcacgaccaggtgaccctgctgaaggccggcaccttcgaggtgctgatggtgagattcgccagcctgttcaacgtgaaggaccagaccgtgatgttcctgagcagaaccacctacagcctgcaggagctgggcgccatgggcatgggcgacctgctgagcgccatgttcgacttcagcgagaagctgaacagcctggccctgaccgaggaggagctgggcctgttcaccgccgtggtgctggtgagcgccgacagaagcggcatggagaacagcgccagcgtggagcagctgcaggagaccctgctgagagccctgagagccctggtgctgaagaacagacccctggagaccagcagattcaccaagctgctgctgaagctgcccgacctgagaaccctgaacaacatgcacagcgagaagctgctgagcttcagagtggacgcccagtag

SEQ ID NO: 91540 - DNA, 1383 bp, synthetic construct
  misc_feature 1..1383: note = Description of Artificial Sequence: Synthetic coding sequence
  source 1..1383: mol_type = other DNA
atgagcagccccaccaccagcagcctggacacccccctgcccggcaacggccccccccagcccggcgcccccagcagcagccccaccgtgaaggaggagggccccgagccctggcccggcggccccgaccccgacgtgcccggcaccgacgaggccagcagcgcctgcagcaccgactgggtgatccccgaccccgaggaggagcccgagagaaagagaaagaagggccccgcccccaagatgctgggccacgagctgtgcagagtgtgcggcgacaaggccagcggcttccactacaacgtgctgagctgcgagggctgcaagggcttcttcagaagaagcgtggtgagaggcggcgccagaagatacgcctgcagaggcggcggcacctgccagatggacgccttcatgagaagaaagtgccagcagtgcagactgagaaagtgcaaggaggccggcatgagagagcagtgcgtgctgagcgaggagcagatcagaaagaagaagatcagaaagcagcagcaggagagccagagccagagccagagccccgtgggcccccagggcagcagcagcagcgccagcggccccggcgccagccccggcggcagcgaggccggcagccagggcagcggcgagggcgagggcgtgcagctgaccgccgcccaggagctgatgatccagcagctggtggccgcccagctgcagtgcaacaagagaagcttcagcgaccagcccaaggtgaccccctggcccctgggcgccgacccccagagcagagacgccagacagcagagattcgcccacttcaccgagctggccatcatcagcgtgcaggagatcgtggacttcgccaagcaggtgcccggcttcctgcagctgggcagagaggaccagatcgccctgctgaaggccagcaccatcgagatcatgctgctggagaccgccagaagatacaaccacgagaccgagtgcatcaccttcctgaaggacttcacctacagcaaggacgacttccacagagccggcctgcaggtggagttcatcaaccccatcttcgagttcagcagagccatgagaagactgggcctggacgacgccgagtacgccctgctgatcgccatcaacatcttcagcgccgacagacccaacgtgcaggagcccggcagagtggaggccctgcagcagccctacgtggaggccctgctgagctacaccagaatcaagagaccccaggaccagctgagattccccagaatgctgatgaagctggtgagcctgagaaccctgagcagcgtgcacagcgagcaggtgttcgccctgagactgcaggacaagaagctgccccccctgctgagcgagatctgggacgtgcacgagtag

SEQ ID NO: 91541 - DNA, 1377 bp, synthetic construct
  misc_feature 1..1377: note = Description of Artificial Sequence: Synthetic coding sequence
  source 1..1377: mol_type = other DNA
atgagcagccccaccaccagcagcctggacacccccctgcccggcaacggccccccccagcccggcgcccccagcagcagccccaccgtgaaggaggagggccccgagccctggcccggcggccccgaccccgacgtgcccggcaccgacgaggccagcagcgcctgcagcaccgactgggtgatccccgaccccgaggaggagcccgagagaaagagaaagaagggccccgcccccaagatgctgggccacgagctgtgcagagtgtgcggcgacaaggccagcggcttccactacaacgtgctgagctgcgagggctgcaagggcttcttcagaagaagcgtggtgagaggcggcgccagaagatacgcctgcagaggcggcggcacctgccagatggacgccttcatgagaagaaagtgccagcagtgcagactgagaaagtgcaaggaggccggcatgagagagcagtgcgtgctgagcgaggagcagatcagaaagaagaagatcagaaagcagcagcaggagagccagagccagagccagagccccgtgggcccccagggcagcagcagcagcgccagcggccccggcgccagccccggcggcagcgaggccggcagccagggcagcggcgagggcgagggcgtgcagctgaccgccgcccaggagctgatgatccagcagctggtggccgcccagctgcagtgcaacaagagaagcttcagcgaccagcccaaggtgaccccctggcccctgggcgccgacccccagagcagagacgccagacagcagagattcgcccacttcaccgagctggccatcatcagcgtgcaggagatcgtggacttcgccaagcaggtgcccggcttcctgcagctgggcagagaggaccagatcgccctgctgaaggccagcaccatcgagatcatgctgctggagaccgccagaagatacaaccacgagaccgagtgcatcaccttcctgaaggacttcacctacagcaaggacgacttccacagagccggcctgcaggtggagttcatcaaccccatcttcgagttcagcagagccatgagaagactgggcctggacgacgccgagtacgccctgctgatcgccatcaacatcttcagcgccgacagacccaacggcgccggccccagaggcggcgtggccgccgccctgagaggcggcgccgccgtgctgcacgcccaccaggaggccgccgaccagctgagattccccagaatgctgatgaagctggtgagcctgagaaccctgagcagcgtgcacagcgagcaggtgttcgccctgagactgcaggacaagaagctgccccccctgctgagcgagatctgggacgtgcacgagtag

SEQ ID NO: 91542 - DNA, 1092 bp, synthetic construct
  misc_feature 1..1092: note = Description of Artificial Sequence: Synthetic coding sequence
  source 1..1092: mol_type = other DNA
atgagcagccccaccaccagcagcctggacacccccctgcccggcaacggccccccccagcccggcgcccccagcagcagccccaccgtgaaggaggagggccccgagccctggcccggcggccccgaccccgacgtgcccggcaccgacgaggccagcagcgcctgcagcaccgactggggcgtgctgagcgaggagcagatcagaaagaagaagatcagaaagcagcagcaggagagccagagccagagccagagccccgtgggcccccagggcagcagcagcagcgccagcggccccggcgccagccccggcggcagcgaggccggcagccagggcagcggcgagggcgagggcgtgcagctgaccgccgcccaggagctgatgatccagcagctggtggccgcccagctgcagtgcaacaagagaagcttcagcgaccagcccaaggtgaccccctggcccctgggcgccgacccccagagcagagacgccagacagcagagattcgcccacttcaccgagctggccatcatcagcgtgcaggagatcgtggacttcgccaagcaggtgcccggcttcctgcagctgggcagagaggaccagatcgccctgctgaaggccagcaccatcgagatcatgctgctggagaccgccagaagatacaaccacgagaccgagtgcatcaccttcctgaaggacttcacctacagcaaggacgacttccacagagccggcctgcaggtggagttcatcaaccccatcttcgagttcagcagagccatgagaagactgggcctggacgacgccgagtacgccctgctgatcgccatcaacatcttcagcgccgacagacccaacgtgcaggagcccggcagagtggaggccctgcagcagccctacgtggaggccctgctgagctacaccagaatcaagagaccccaggaccagctgagattccccagaatgctgatgaagctggtgagcctgagaaccctgagcagcgtgcacagcgagcaggtgttcgccctgagactgcaggacaagaagctgccccccctgctgagcgagatctgggacgtgcacgagtag

SEQ ID NO: 91543 - DNA, 576 bp, synthetic construct
  misc_feature 1..576: note = Description of Artificial Sequence: Synthetic coding sequence
  source 1..576: mol_type = other DNA
atgatccagcagctggtggccgcccagctgcagtgcaacaagagaagcttcagcgaccagcccaaggtgaccctgggcagagaggaccagatcgccctgctgaaggccagcaccatcgagatcatgctgctggagaccgccagaagatacaaccacgagaccgagtgcatcaccttcctgaaggacttcacctacagcaaggacgacttccacagagccggcctgcaggtggagttcatcaaccccatcttcgagttcagcagagccatgagaagactgggcctggacgacgccgagtacgccctgctgatcgccatcaacatcttcagcgccgacagacccaacgtgcaggagcccggcagagtggaggccctgcagcagccctacgtggaggccctgctgagctacaccagaatcaagagaccccaggaccagctgagattccccagaatgctgatgaagctggtgagcctgagaaccctgagcagcgtgcacagcgagcaggtgttcgccctgagactgcaggacaagaagctgccccccctgctgagcgagatctgggacgtgcacgagtag

SEQ ID NO: 91544 - DNA, 1422 bp, synthetic construct
  misc_feature 1..1422: note = Description of Artificial Sequence: Synthetic coding sequence
  source 1..1422: mol_type = other DNA
atgaccgtgaccagaacccaccacttcaaggagggcagcctgagagcccccgccatccccctgcacagcgccgccgccgagctggccagcaaccaccccagaggccccgaggccaacctggaggtgagacccaaggagagctggaaccacgccgacttcgtgcactgcgaggacaccgagagcgtgcccggcaagcccagcgtgaacgccgacgaggaggtgggcggcccccagatctgcagagtgtgcggcgacaaggccaccggctaccacttcaacgtgatgacctgcgagggctgcaagggcttcttcagaagagccatgaagagaaacgccagactgagatgccccttcagaaagggcgcctgcgagatcaccagaaagaccagaagacagtgccaggcctgcagactgagaaagtgcctggagagcggcatgaagaaggagatgatcatgagcgacgaggccgtggaggagagaagagccctgatcaagagaaagaagagcgagagaaccggcacccagcccctgggcgtgcagggcctgaccgaggagcagagaatgatgatcagagagctgatggacgcccagatgaagaccttcgacaccaccttcagccacttcaagaacttcagactgcccggcgtgctgagcagcggctgcgagctgcccgagagcctgcaggcccccagcagagaggaggccgccaagtggagccaggtgagaaaggacctgtgcagcctgaaggtgagcctgcagctgagaggcgaggacggcagcgtgtggaactacaagccccccgccgacagcggcggcaaggagatcttcagcctgctgccccacatggccgacatgagcacctacatgttcaagggcatcatcagcttcgccaaggtgatcagctacttcagagacctgcccatcgaggaccagatcagcctgctgaagggcgccgccttcgagctgtgccagctgagattcaacaccgtgttcaacgccgagaccggcacctgggagtgcggcagactgagctactgcctggaggacaccgccggcggcttccagcagctgctgctggagcccatgctgaagttccactacatgctgaagaagctgcagctgcacgaggaggagtacgtgctgatgcaggccatcagcctgttcagccccgacagacccggcgtgctgcagcacagagtggtggaccagctgcaggagcagttcgccatcaccctgaagagctacatcgagtgcaacagaccccagcccgcccacagattcctgttcctgaagatcatggccatgctgaccgagctgagaagcatcaacgcccagcacacccagagactgctgagaatccaggacatccaccccttcgccacccccctgatgcaggagctgttcggcatcaccggcagctag

SEQ ID NO: 91545 - DNA, 1305 bp, synthetic construct
  misc_feature 1..1305: note = Description of Artificial Sequence: Synthetic coding sequence
  source 1..1305: mol_type = other DNA
ctggaggtgagacccaaggagagctggaaccacgccgacttcgtgcactgcgaggacaccgagagcgtgcccggcaagcccagcgtgaacgccgacgaggaggtgggcggcccccagatctgcagagtgtgcggcgacaaggccaccggctaccacttcaacgtgatgacctgcgagggctgcaagggcttcttcagaagagccatgaagagaaacgccagactgagatgccccttcagaaagggcgcctgcgagatcaccagaaagaccagaagacagtgccaggcctgcagactgagaaagtgcctggagagcggcatgaagaaggagatgatcatgagcgacgaggccgtggaggagagaagagccctgatcaagagaaagaagagcgagagaaccggcacccagcccctgggcgtgcagggcctgaccgaggagcagagaatgatgatcagagagctgatggacgcccagatgaagaccttcgacaccaccttcagccacttcaagaacttcagactgcccggcgtgctgagcagcggctgcgagctgcccgagagcctgcaggcccccagcagagaggaggccgccaagtggagccaggtgagaaaggacctgtgcagcctgaaggtgagcctgcagctgagaggcgaggacggcagcgtgtggaactacaagccccccgccgacagcggcggcaaggagatcttcagcctgctgccccacatggccgacatgagcacctacatgttcaagggcatcatcagcttcgccaaggtgatcagctacttcagagacctgcccatcgaggaccagatcagcctgctgaagggcgccgccttcgagctgtgccagctgagattcaacaccgtgttcaacgccgagaccggcacctgggagtgcggcagactgagctactgcctggaggacaccgccggcggcttccagcagctgctgctggagcccatgctgaagttccactacatgctgaagaagctgcagctgcacgaggaggagtacgtgctgatgcaggccatcagcctgttcagccccgacagacccggcgtgctgcagcacagagtggtggaccagctgcaggagcagttcgccatcaccctgaagagctacatcgagtgcaacagaccccagcccgcccacagattcctgttcctgaagatcatggccatgctgaccgagctgagaagcatcaacgcccagcacacccagagactgctgagaatccaggacatccaccccttcgccacccccctgatgcaggagctgttcggcatcaccggcagctag

SEQ ID NO: 91546 - DNA, 1194 bp, synthetic construct
  misc_feature 1..1194: note = Description of Artificial Sequence: Synthetic coding sequence
  source 1..1194: mol_type = other DNA
ctggaggtgagacccaaggagagctggaaccacgccgacttcgtgcactgcgaggacaccgagagcgtgcccggcaagcccagcgtgaacgccgacgaggaggtgggcggcccccagatctgcagagtgtgcggcgacaaggccaccggctaccacttcaacgtgatgacctgcgagggctgcaagggcttcttcagaagagccatgaagagaaacgccagactgagatgccccttcagaaagggcgcctgcgagatcaccagaaagaccagaagacagtgccaggcctgcagactgagaaagtgcctggagagcggcatgaagaaggagatgatcatgagcgacgaggccgtggaggagagaagagccctgatcaagagaaagaagagcgagagaaccggcacccagcccctgggcgtgcagggcctgaccgaggagcagagaatgatgatcagagagctgatggacgcccagatgaagaccttcgacaccaccttcagccacttcaagaacttcagagtgagcctgcagctgagaggcgaggacggcagcgtgtggaactacaagccccccgccgacagcggcggcaaggagatcttcagcctgctgccccacatggccgacatgagcacctacatgttcaagggcatcatcagcttcgccaaggtgatcagctacttcagagacctgcccatcgaggaccagatcagcctgctgaagggcgccgccttcgagctgtgccagctgagattcaacaccgtgttcaacgccgagaccggcacctgggagtgcggcagactgagctactgcctggaggacaccgccggcggcttccagcagctgctgctggagcccatgctgaagttccactacatgctgaagaagctgcagctgcacgaggaggagtacgtgctgatgcaggccatcagcctgttcagccccgacagacccggcgtgctgcagcacagagtggtggaccagctgcaggagcagttcgccatcaccctgaagagctacatcgagtgcaacagaccccagcccgcccacagattcctgttcctgaagatcatggccatgctgaccgagctgagaagcatcaacgcccagcacacccagagactgctgagaatccaggacatccaccccttcgccacccccctgatgcaggagctgttcggcatcaccggcagctag

SEQ ID NO: 91547 - DNA, 1848 bp, synthetic construct
  misc_feature 1..1848: note = Description of Artificial Sequence: Synthetic coding sequence
  source 1..1848: mol_type = other DNA
atgaccagccccagccccagaatccagatcatcagcaccgacagcgccgtggccagcccccagagaatccagggcagcgagcccgccagcggccccctgagcgtgttcaccagcctgaacaaggagaagatcgtgaccgaccagcagaccggccagaagatccagatcgtgaccgccgtggacgccagcggcagccccaagcagcagttcatcctgaccagccccgacggcgccggcaccggcaaggtgatcctggccagccccgagaccagcagcgccaagcagctgatcttcaccaccagcgacaacctggtgcccggcagaatccagatcgtgaccgacagcgccagcgtggagagactgctgggcaagaccgacgtgcagagaccccaggtggtggagtactgcgtggtgtgcggcgacaaggccagcggcagacactacggcgccgtgagctgcgagggctgcaagggcttcttcaagagaagcgtgagaaagaacctgacctacagctgcagaagcaaccaggactgcatcatcaacaagcaccacagaaacagatgccagttctgcagactgaagaagtgcctggagatgggcatgaagatggagagcgtgcagagcgagagaaagcccttcgacgtgcagagagagaagcccagcaactgcgccgccagcaccgagaagatctacatcagaaaggacctgagaagccccctgatcgccacccccaccttcgtggccgacaaggacggcgccagacagaccggcctgctggaccccggcatgctggtgaacatccagcagcccctgatcagagaggacggcaccgtgctgctggccaccgacagcaaggccgagaccagccagggcgccctgggcaccctggccaacgtggtgaccagcctggccaacctgagcgagagcctgaacaacggcgacaccagcgagatccagcccgaggaccagagcgccagcgagatcaccagagccttcgacaccctggccaaggccctgaacaccaccgacagcagcagcagccccagcctggccgacggcatcgacaccagcggcggcggcagcatccacgtgatcagcagagaccagagcacccccatcatcgaggtggagggccccctgctgagcgacacccacgtgaccttcaagctgaccatgcccagccccatgcccgagtacctgaacgtgcactacatctgcgagagcgccagcagactgctgttcctgagcatgcactgggccagaagcatccccgccttccaggccctgggccaggactgcaacaccagcctggtgagagcctgctggaacgagctgttcaccctgggcctggcccagtgcgcccaggtgatgagcctgagcaccatcctggccgccatcgtgaaccacctgcagaacagcatccaggaggacaagctgagcggcgacagaatcaagcaggtgatggagcacatctggaagctgcaggagttctgcaacagcatggccaagctggacatcgacggctacgagtacgcctacctgaaggccatcgtgctgttcagccccgaccaccccggcctgaccagcaccagccagatcgagaagttccaggagaaggcccagatggagctgcaggactacgtgcagaagacctacagcgaggacacctacagactggccagaatcctggtgagactgcccgccctgagactgatgagcagcaacatcaccgaggagctgttcttcaccggcctgatcggcaacgtgagcatcgacagcatcatcccctacatcctgaagatggagaccgccgagtacaacggccagatcaccggcgccagcctgtag

SEQ ID NO: 91548 - DNA, 1791 bp, synthetic construct
  misc_feature 1..1791: note = Description of Artificial Sequence: Synthetic coding sequence
  source 1..1791: mol_type = other DNA
atgaccagccccagccccagaatccagatcatcagcaccgacagcgccgtggccagcccccagagaatccagatcgtgaccgaccagcagaccggccagaagatccagatcgtgaccgccgtggacgccagcggcagccccaagcagcagttcatcctgaccagccccgacggcgccggcaccggcaaggtgatcctggccagccccgagaccagcagcgccaagcagctgatcttcaccaccagcgacaacctggtgcccggcagaatccagatcgtgaccgacagcgccagcgtggagagactgctgggcaagaccgacgtgcagagaccccaggtggtggagtactgcgtggtgtgcggcgacaaggccagcggcagacactacggcgccgtgagctgcgagggctgcaagggcttcttcaagagaagcgtgagaaagaacctgacctacagctgcagaagcaaccaggactgcatcatcaacaagcaccacagaaacagatgccagttctgcagactgaagaagtgcctggagatgggcatgaagatggagagcgtgcagagcgagagaaagcccttcgacgtgcagagagagaagcccagcaactgcgccgccagcaccgagaagatctacatcagaaaggacctgagaagccccctgatcgccacccccaccttcgtggccgacaaggacggcgccagacagaccggcctgctggaccccggcatgctggtgaacatccagcagcccctgatcagagaggacggcaccgtgctgctggccaccgacagcaaggccgagaccagccagggcgccctgggcaccctggccaacgtggtgaccagcctggccaacctgagcgagagcctgaacaacggcgacaccagcgagatccagcccgaggaccagagcgccagcgagatcaccagagccttcgacaccctggccaaggccctgaacaccaccgacagcagcagcagccccagcctggccgacggcatcgacaccagcggcggcggcagcatccacgtgatcagcagagaccagagcacccccatcatcgaggtggagggccccctgctgagcgacacccacgtgaccttcaagctgaccatgcccagccccatgcccgagtacctgaacgtgcactacatctgcgagagcgccagcagactgctgttcctgagcatgcactgggccagaagcatccccgccttccaggccctgggccaggactgcaacaccagcctggtgagagcctgctggaacgagctgttcaccctgggcctggcccagtgcgcccaggtgatgagcctgagcaccatcctggccgccatcgtgaaccacctgcagaacagcatccaggaggacaagctgagcggcgacagaatcaagcaggtgatggagcacatctggaagctgcaggagttctgcaacagcatggccaagctggacatcgacggctacgagtacgcctacctgaaggccatcgtgctgttcagccccgaccaccccggcctgaccagcaccagccagatcgagaagttccaggagaaggcccagatggagctgcaggactacgtgcagaagacctacagcgaggacacctacagactggccagaatcctggtgagactgcccgccctgagactgatgagcagcaacatcaccgaggagctgttcttcaccggcctgatcggcaacgtgagcatcgacagcatcatcccctacatcctgaagatggagaccgccgagtacaacggccagatcaccggcgccagcctgtag

SEQ ID NO: 91549 - DNA, 1791 bp, synthetic construct; identical to SEQ ID NO: 91548
  misc_feature 1..1791: note = Description of Artificial Sequence: Synthetic coding sequence
  source 1..1791: mol_type = other DNA

SEQ ID NO: 91550 - DNA, 1791 bp, synthetic construct; identical to SEQ ID NO: 91548
  misc_feature 1..1791: note = Description of Artificial Sequence: Synthetic coding sequence
  source 1..1791: mol_type = other DNA

SEQ ID NO: 91551 - DNA, 111 bp, synthetic construct
  misc_feature 1..111: note = Description of Artificial Sequence: Synthetic coding sequence
  source 1..111: mol_type = other DNA
atgaccagccccagccccagaatccagatcatcagcaccgacagcgccgtggccagcccccagagaatccagggcagcgagcccgccagcggccccctgagcgtgttctag

SEQ ID NO: 91552 - DNA, 618 bp, synthetic construct
  misc_feature 1..618: note = Description of Artificial Sequence: Synthetic coding sequence
  source 1..618: mol_type = other DNA
atgaccagccccagccccagaatccagatcatcagcaccgacagcgccgtggccagcccccagagaatccagggcagcgagcccgccagcggccccctgagcgtgttcaccagcctgaacaaggagaagatcgtgaccgaccagcagaccggccagaagatccagatcgtgaccgccgtggacgccagcggcagccccaagcagcagttcatcctgaccagccccgacggcgccggcaccggcaaggtgatcctggccagccccgagaccagcagcgccaagcagctgatcttcaccaccagcgacaacctggtgcccggcagaatccagatcgtgaccgacagcgccagcgtggagagactgctgggcaagaccgacgtgcagagaccccaggtggtggagtactgcgtggtgtgcggcgacaaggccagcggcagacactacggcgccgtgagctgcgagggctgcaagggcttcttcaagagaagcgtgagaaagaacctgacctacagctgcagaagcaaccaggactgcatcatcaacaagcaccacagaaacagatgccagttctgcagactgaagaagtgcctggagatgggcatgaagatggagtgctag

SEQ ID NO: 91553 - DNA, 1269 bp, synthetic construct
  misc_feature 1..1269: note = Description of Artificial Sequence: Synthetic coding sequence
  source 1..1269: mol_type = other DNA
atgttcagagccggcgccgagggcgccgagaaggagcccagccccagacccgagtgcagagccgaccccggccccggcctgggcttccccctgggcagcggcctgccctggcccagcctgctggagagccccggcggcagaatcctggacatcccctgcaaggtgtgcggcgacagaagcagcggcaagcactacggcgtgtacgcctgcgacggctgcagcggcttcttcaagagaagcatcagaagaaacagaacctacgtgtgcaagagcggcaaccagggcggctgccccgtggacaagacccacagaaaccagtgcagagcctgcagactgaagaagtgcctggaggtgaacatgaacaaggacgccgtgcagcacgagagaggccccagaaccagcaccatcagaaagcaggtggccctgtacttcagaggccacaaggaggagaacggcgccgccgcccacttccccagcgccgccctgcccgcccccgccttcttcaccgccgtgacccagctggagccccacggcctggagctggccgccgtgagcaccacccccgagagacagaccctggtgagcctggcccagcccacccccaagtacccccacgaggtgaacggcacccccatgtacctgtacgaggtggccaccgagagcgtgtgcgagagcgccgccagactgctgttcatgagcatcaagtgggccaagagcgtgcccgccttcagcaccctgagcctgcaggaccagctgatgctgctggaggacgcctggagagagctgttcgtgctgggcatcgcccagtgggccatccccgtggacgccaacaccctgctggccgtgagcggcatgaacggcgacaacaccgacagccagaagctgaacaagatcatcagcgagatccaggccctgcaggaggtggtggccagattcagacagctgagactggacgccaccgagttcgcctgcctgaagtgcatcgtgaccttcaaggccgtgcccacccacagcggcagcgagctgagaagcttcagaaacgccgccgccatcgccgccctgcaggacgaggcccagctgaccctgaacagctacatccacaccagataccccacccagccctgcagattcggcaagctgctgctgctgctgcccgccctgagaagcatcagccccagcaccatcgaggaggtgttcttcaagaagaccatcggcaacgtgcccatcaccagactgctgagcgacatgtacaagagcagcgacatctag

SEQ ID NO: 91554 - DNA, 1158 bp, synthetic construct
  misc_feature 1..1158: note = Description of Artificial Sequence: Synthetic coding sequence
  source 1..1158: mol_type = other DNA
atgagcaagcccgccggcagcaccagcagaatcctggacatcccctgcaaggtgtgcggcgacagaagcagcggcaagcactacggcgtgtacgcctgcgacggctgcagcggcttcttcaagagaagcatcagaagaaacagaacctacgtgtgcaagagcggcaaccagggcggctgccccgtggacaagacccacagaaaccagtgcagagcctgcagactgaagaagtgcctggaggtgaacatgaacaaggacgccgtgcagcacgagagaggccccagaaccagcaccatcagaaagcaggtggccctgtacttcagaggccacaaggaggagaacggcgccgccgcccacttccccagcgccgccctgcccgcccccgccttcttcaccgccgtgacccagctggagccccacggcctggagctggccgccgtgagcaccacccccgagagacagaccctggtgagcctggcccagcccacccccaagtacccccacgaggtgaacggcacccccatgtacctgtacgaggtggccaccgagagcgtgtgcgagagcgccgccagactgctgttcatgagcatcaagtgggccaagagcgtgcccgccttcagcaccctgagcctgcaggaccagctgatgctgctggaggacgcctggagagagctgttcgtgctgggcatcgcccagtgggccatccccgtggacgccaacaccctgctggccgtgagcggcatgaacggcgacaacaccgacagccagaagctgaacaagatcatcagcgagatccaggccctgcaggaggtggtggccagattcagacagctgagactggacgccaccgagttcgcctgcctgaagtgcatcgtgaccttcaaggccgtgcccacccacagcggcagcgagctgagaagcttcagaaacgccgccgccatcgccgccctgcaggacgaggcccagctgaccctgaacagctacatccacaccagataccccacccagccctgcagattcggcaagctgctgctgctgctgcccgccctgagaagcatcagccccagcaccatcgaggaggtgttcttcaagaagaccatcggcaacgtgcccatcaccagactgctgagcgacatgtacaagagcagcgacatctag

SEQ ID NO: 91555 - DNA, 141 bp, synthetic construct
  misc_feature 1..141: note = Description of Artificial Sequence: Synthetic coding sequence
  source 1..141: mol_type = other DNA
atgaacaaggacgccgtgcagcacgagagaggccccagaaccagcaccatcagaaagcaggtggccctgtacttcagaggccacaaggaggagaacggcgccgccgcccacttccccagcgccgccctgcccgccccctag

SEQ ID NO: 91556 - DNA, 1272 bp, synthetic construct
  misc_feature 1..1272: note = Description of Artificial Sequence: Synthetic coding sequence
  source 1..1272: mol_type = other DNA
atggccatggtggtgagcagctggagagacccccaggacgacgtggccggcggcaaccccggcggccccaaccccgccgcccaggccgccagaggcggcggcggcggcgccggcgagcagcagcagcaggccggcagcggcgccccccacaccccccagacccccggccagcccggcgcccccgccacccccggcaccgccggcgacaagggccagggcccccccggcagcggccagagccagcagcacatcgagtgcgtggtgtgcggcgacaagagcagcggcaagcactacggccagttcacctgcgagggctgcaagagcttcttcaagagaagcgtgagaagaaacctgacctacacctgcagagccaacagaaactgccccatcgaccagcaccacagaaaccagtgccagtactgcagactgaagaagtgcctgaaggtgggcatgagaagagaggccgtgcagagaggcagaatgccccccacccagcccaaccccggccagtacgccctgaccaacggcgaccccctgaacggccactgctacctgagcggctacatcagcctgctgctgagagccgagccctaccccaccagcagatacggcagccagtgcatgcagcccaacaacatcatgggcatcgagaacatctgcgagctggccgccagactgctgttcagcgccgtggagtgggccagaaacatccccttcttccccgacctgcagatcaccgaccaggtgagcctgctgagactgacctggagcgagctgttcgtgctgaacgccgcccagtgcagcatgcccctgcacgtggcccccctgctggccgccgccggcctgcacgccagccccatgagcgccgacagagtggtggccttcatggaccacatcagaatcttccaggagcaggtggagaagctgaaggccctgcacgtggacagcgccgagtacagctgcctgaaggccatcgtgctgttcaccagcgacgcctgcggcctgagcgacgccgcccacatcgagagcctgcaggagaagagccagtgcgccctggaggagtacgtgagaagccagtaccccaaccagcccagcagattcggcaagctgctgctgagactgcccagcctgagaaccgtgagcagcagcgtgatcgagcagctgttcttcgtgagactggtgggcaagacccccatcgagaccctgatcagagacatgctgctgagcggcagcagcttcaactggccctacatgagcatccagtgcagctag

SEQ ID NO: 91557 - DNA, 1245 bp, synthetic construct
  misc_feature 1..1245: note = Description of Artificial Sequence: Synthetic coding sequence
  source 1..1245: mol_type = other DNA
atggccatggtggtgagcacctggagagacccccaggacgaggtgcccggcagccagggcagccaggccagccaggccccccccgtgcccggccccccccccggcgccccccacaccccccagacccccggccagggcggccccgccagcacccccgcccagaccgccgccggcggccagggcggccccggcggccccggcagcgacaagcagcagcagcagcagcacatcgagtgcgtggtgtgcggcgacaagagcagcggcaagcactacggccagttcacctgcgagggctgcaagagcttcttcaagagaagcgtgagaagaaacctgagctacacctgcagagccaacagaaactgccccatcgaccagcaccacagaaaccagtgccagtactgcagactgaagaagtgcctgaaggtgggcatgagaagagaggccgtgcagagaggcagaatgccccccacccagcccacccacggccagttcgccctgaccaacggcgaccccctgaactgccacagctacctgagcggctacatcagcctgctgctgagagccgagccctaccccaccagcagattcggcagccagtgcatgcagcccaacaacatcatgggcatcgagaacatctgcgagctggccgccagaatgctgttcagcgccgtggagtgggccagaaacatccccttcttccccgacctgcagatcaccgaccaggtggccctgctgagactgacctggagcgagctgttcgtgctgaacgccgcccagtgcagcatgcccctgcacgtggcccccctgctggccgccgccggcctgcacgccagccccatgagcgccgacagagtggtggccttcatggaccacatcagaatcttccaggagcaggtggagaagctgaaggccctgcacgtggacagcgccgagtacagctgcctgaaggccatcgtgctgttcaccagcgacgcctgcggcctgagcgacgtggcccacgtggagagcctgcaggagaagagccagtgcgccctggaggagtacgtgagaagccagtaccccaaccagcccaccagattcggcaagctgctgctgagactgcccagcctgagaaccgtgagcagcagcgtgatcgagcagctgttcttcgtgagactggtgggcaagacccccatcgagaccctgatcagagacatgctgctgagcggcagcagcttcaactggccctacatggccatccagtag

SEQ ID NO: 91558 - DNA, 786 bp, synthetic construct
  misc_feature 1..786: note = Description of Artificial Sequence: Synthetic coding sequence
  source 1..786: mol_type = other DNA
atgccccccacccagcccacccacggccagttcgccctgaccaacggcgaccccctgaactgccacagctacctgagcggctacatcagcctgctgctgagagccgagccctaccccaccagcagattcggcagccagtgcatgcagcccaacaacatcatgggcatcgagaacatctgcgagctggccgccagaatgctgttcagcgccgtggagtgggccagaaacatccccttcttccccgacctgcagatcaccgaccaggtggccctgctgagactgacctggagcgagctgttcgtgctgaacgccgcccagtgcagcatgcccctgcacgtggcccccctgctggccgccgccggcctgcacgccagccccatgagcgccgacagagtggtggccttcatggaccacatcagaatcttccaggagcaggtggagaagctgaaggccctgcacgtggacagcgccgagtacagctgcctgaaggccatcgtgctgttcaccagcgacgcctgcggcctgagcgacgtggcccacgtggagagcctgcaggagaagagccagtgcgccctggaggagtacgtgagaagccagtaccccaaccagcccaccagattcggcaagctgctgctgagactgcccagcctgagaaccgtgagcagcagcgtgatcgagcagctgttcttcgtgagactggtgggcaagacccccatcgagaccctgatcagagacatgctgctgagcggcagcagcttcaactggccctacatggccatccagtag

SEQ ID NO: 91559 - DNA, 846 bp, synthetic construct
  misc_feature 1..846: note = Description of Artificial Sequence: Synthetic coding sequence
  source 1..846: mol_type = other DNA
atgcaggccgtgtgggacctggagcagggcaagtacggcttcgccgtgcagagaggcagaatgccccccacccagcccacccacggccagttcgccctgaccaacggcgaccccctgaactgccacagctacctgagcggctacatcagcctgctgctgagagccgagccctaccccaccagcagattcggcagccagtgcatgcagcccaacaacatcatgggcatcgagaacatctgcgagctggccgccagaatgctgttcagcgccgtggagtgggccagaaacatccccttcttccccgacctgcagatcaccgaccaggtggccctgctgagactgacctggagcgagctgttcgtgctgaacgccgcccagtgcagcatgcccctgcacgtggcccccctgctggccgccgccggcctgcacgccagccccatgagcgccgacagagtggtggccttcatggaccacatcagaatcttccaggagcaggtggagaagctgaaggccctgcacgtggacagcgccgagtacagctgcctgaaggccatcgtgctgttcaccagcgacgcctgcggcctgagcgacgtggcccacgtggagagcctgcaggagaagagccagtgcgccctggaggagtacgtgagaagccagtaccccaaccagcccaccagattcggcaagctgctgctgagactgcccagcctgagaaccgtgagcagcagcgtgatcgagcagctgttcttcgtgagactggtgggcaagacccccatcgagaccctgatcagagacatgctgctgagcggcagcagcttcaactggccctacatggccatccagtag

SEQ ID NO: 91560 - DNA, 786 bp, synthetic construct; identical to SEQ ID NO: 91558
  misc_feature 1..786: note = Description of Artificial Sequence: Synthetic coding sequence
  source 1..786: mol_type = other DNA

SEQ ID NO: 91561 - DNA, 1215 bp, synthetic construct
  misc_feature 1..1215: note = Description of Artificial Sequence: Synthetic coding sequence
  source 1..1215: mol_type = other DNA
atggccatggtgaccggcggctggggcggccccggcggcgacaccaacggcgtggacaaggccggcggctaccccagagccgccgaggacgacagcgccagcccccccggcgccgccagcgacgccgagcccggcgacgaggagagacccggcctgcaggtggactgcgtggtgtgcggcgacaagagcagcggcaagcactacggcgtgttcacctgcgagggctgcaagagcttcttcaagagaagcatcagaagaaacctgagctacacctgcagaagcaacagagactgccagatcgaccagcaccacagaaaccagtgccagtactgcagactgaagaagtgcttcagagtgggcatgagaaaggaggccgtgcagagaggcagaatcccccacagcctgcccggcgccgtggccgccagcagcggcagcccccccggcagcgccctggccgccgtggccagcggcggcgacctgttccccggccagcccgtgagcgagctgatcgcccagctgctgagagccgagccctaccccgccgccgccggcagattcggcgccggcggcggcgccgccggcgccgtgctgggcatcgacaacgtgtgcgagctggccgccagactgctgttcagcaccgtggagtgggccagacacgcccccttcttccccgagctgcccgtggccgaccaggtggccctgctgagactgagctggagcgagctgttcgtgctgaacgccgcccaggccgccctgcccctgcacaccgcccccctgctggccgccgccggcctgcacgccgcccccatggccgccgagagagccgtggccttcatggaccaggtgagagccttccaggagcaggtggacaagctgggcagactgcaggtggacagcgccgagtacggctgcctgaaggccatcgccctgttcacccccgacgcctgcggcctgagcgaccccgcccacgtggagagcctgcaggagaaggcccaggtggccctgaccgagtacgtgagagcccagtaccccagccagccccagagattcggcagactgctgctgagactgcccgccctgagagccgtgcccgccagcctgatcagccagctgttcttcatgagactggtgggcaagacccccatcgagaccctgatcagagacatgctgctgagcggcagcaccttcaactggccctacggcagcggccagtag

SEQ ID NO: 91562 - DNA, 1134 bp, synthetic construct
  misc_feature 1..1134: note = Description of Artificial Sequence: Synthetic coding sequence
  source 1..1134: mol_type = other DNA
atggccatggtgaccggcggctggggcggccccggcggcgacgccgagcccggcgacgaggagagacccggcctgcaggtggactgcgtggtgtgcggcgacaagagcagcggcaagcactacggcgtgttcacctgcgagggctgcaagagcttcttcaagagaagcatcagaagaaacctgagctacacctgcagaagcaacagagactgccagatcgaccagcaccacagaaaccagtgccagtactgcagactgaagaagtgcttcagagtgggcatgagaaaggaggccgtgcagagaggcagaatcccccacagcctgcccggcgccgtggccgccagcagcggcagcccccccggcagcgccctggccgccgtggccagcggcggcgacctgttccccggccagcccgtgagcgagctgatcgcccagctgctgagagccgagccctaccccgccgccgccggcagattcggcgccggcggcggcgccgccggcgccgtgctgggcatcgacaacgtgtgcgagctggccgccagactgctgttcagcaccgtggagtgggccagacacgcccccttcttccccgagctgcccgtggccgaccaggtggccctgctgagactgagctggagcgagctgttcgtgctgaacgccgcccaggccgccctgcccctgcacaccgcccccctgctggccgccgccggcctgcacgccgcccccatggccgccgagagagccgtggccttcatggaccaggtgagagccttccaggagcaggtggacaagctgggcagactgcaggtggacagcgccgagtacggctgcctgaaggccatcgccctgttcacccccgacgcctgcggcctgagcgaccccgcccacgtggagagcctgcaggagaaggcccaggtggccctgaccgagtacgtgagagcccagtaccccagccagccccagagattcggcagactgctgctgagactgcccgccctgagagccgtgcccgccagcctgatcagccagctgttcttcatgagactggtgggcaagacccccatcgagaccctgatcagagacatgctgctgagcggcagcaccttcaactggccctacggcagcggccagtag

SEQ ID NO: 91563 - DNA, 2121 bp, synthetic construct
  misc_feature 1..2121: note = Description of Artificial Sequence: Synthetic coding sequence
  source 1..2121: mol_type = other DNA
atggagaccaagggctaccacagcctgcccgagggcctggacatggagagaagatggggccaggtgagccaggccgtggagagaagcagcctgggccccaccgagagaaccgacgagaacaactacatggagatcgtgaacgtgagctgcgtgagcggcgccatccccaacaacagcacccagggcagcagcaaggagaagcaggagctgctgccctgcctgcagcaggacaacaacagacccggcatcctgaccagcgacatcaagaccgagctggagagcaaggagctgagcgccaccgtggccgagagcatgggcctgtacatggacagcgtgagagacgccgactacagctacgagcagcagaaccagcagggcagcatgagccccgccaagatctaccagaacgtggagcagctggtgaagttctacaagggcaacggccacagacccagcaccctgagctgcgtgaacacccccctgagaagcttcatgagcgacagcggcagcagcgtgaacggcggcgtgatgagagccgtggtgaagagccccatcatgtgccacgagaagagccccagcgtgtgcagccccctgaacatgaccagcagcgtgtgcagccccgccggcatcaacagcgtgagcagcaccaccgccagcttcggcagcttccccgtgcacagccccatcacccagggcacccccctgacctgcagccccaacgtggagaacagaggcagcagaagccacagccccgcccacgccagcaacgtgggcagccccctgagcagccccctgagcagcatgaagagcagcatcagcagcccccccagccactgcagcgtgaagagccccgtgagcagccccaacaacgtgaccctgagaagcagcgtgagcagccccgccaacatcaacaacagcagatgcagcgtgagcagccccagcaacaccaacaacagaagcaccctgagcagccccgccgccagcaccgtgggcagcatctgcagccccgtgaacaacgccttcagctacaccgccagcggcaccagcgccggcagcagcaccctgagagacgtggtgcccagccccgacacccaggagaagggcgcccaggaggtgcccttccccaagaccgaggaggtggagagcgccatcagcaacggcgtgaccggccagctgaacatcgtgcagtacatcaagcccgagcccgacggcgccttcagcagcagctgcctgggcggcaacagcaagatcaacagcgacagcagcttcagcgtgcccatcaagcaggagagcaccaagcacagctgcagcggcaccagcttcaagggcaaccccaccgtgaaccccttccccttcatggacggcagctacttcagcttcatggacgacaaggactactacagcctgagcggcatcctgggcccccccgtgcccggcttcgacggcaactgcgagggcagcggcttccccgtgggcatcaagcaggagcccgacgacggcagctactaccccgaggccagcatccccagcagcgccatcgtgggcgtgaacagcggcggccagagcttccactacagaatcggcgcccagggcaccatcagcctgagcagaagcgccagagaccagagcttccagcacctgagcagcttcccccccgtgaacaccctggtggagagctggaagagccacggcgacctgagcagcagaagaagcgacggctaccccgtgctggagtacatccccgagaacgtgagcagcagcaccctgagaagcgtgagcaccggcagcagcagacccagcaagatctgcctggtgtgcggcgacgaggccagcggctgccactacggcgtggtgacctgcggcagctgcaaggtgttcttcaagagagccgtggagggccagcacaactacctgtgcgccggcagaaacgactgcatcatcgacaagatcagaagaaagaactgccccgcctgcagactgcagaagtgcctgcaggccggcatgaacctgggcgagagaagatgcatcagcctgccctgcatgaactacgccagaggctgcaccaagagcgccttcagcagcttcgactgcagcagccccctgaagaacacccccagctag

SEQ ID NO: 91564 - DNA, 2955 bp, synthetic construct
  misc_feature 1..2955: note = Description of Artificial Sequence: Synthetic coding sequence
  source 1..2955: mol_type = other DNA
atggagaccaagggctaccacagcctgcccgagggcctggacatggagagaagatggggccaggtgagccaggccgtggagagaagcagcctgggccccaccgagagaaccgacgagaacaactacatggagatcgtgaacgtgagctgcgtgagcggcgccatccccaacaacagcacccagggcagcagcaaggagaagcaggagctgctgccctgcctgcagcaggacaacaacagacccggcatcctgaccagcgacatcaagaccgagctggagagcaaggagctgagcgccaccgtggccgagagcatgggcctgtacatggacagcgtgagagacgccgactacagctacgagcagcagaaccagcagggcagcatgagccccgccaagatctaccagaacgtggagcagctggtgaagttctacaagggcaacggccacagacccagcaccctgagctgcgtgaacacccccctgagaagcttcatgagcgacagcggcagcagcgtgaacggcggcgtgatgagagccgtggtgaagagccccatcatgtgccacgagaagagccccagcgtgtgcagccccctgaacatgaccagcagcgtgtgcagccccgccggcatcaacagcgtgagcagcaccaccgccagcttcggcagcttccccgtgcacagccccatcacccagggcacccccctgacctgcagccccaacgtggagaacagaggcagcagaagccacagccccgcccacgccagcaacgtgggcagccccctgagcagccccctgagcagcatgaagagcagcatcagcagcccccccagccactgcagcgtgaagagccccgtgagcagccccaacaacgtgaccctgagaagcagcgtgagcagccccgccaacatcaacaacagcagatgcagcgtgagcagccccagcaacaccaacaacagaagcaccctgagcagccccgccgccagcaccgtgggcagcatctgcagccccgtgaacaacgccttcagctacaccgccagcggcaccagcgccggcagcagcaccctgagagacgtggtgcccagccccgacacccaggagaagggcgcccaggaggtgcccttccccaagaccgaggaggtggagagcgccatcagcaacggcgtgaccggccagctgaacatcgtgcagtacatcaagcccgagcccgacggcgccttcagcagcagctgcctgggcggcaacagcaagatcaacagcgacagcagcttcagcgtgcccatcaagcaggagagcaccaagcacagctgcagcggcaccagcttcaagggcaaccccaccgtgaaccccttccccttcatggacggcagctacttcagcttcatggacgacaaggactactacagcctgagcggcatcctgggcccccccgtgcccggcttcgacggcaactgcgagggcagcggcttccccgtgggcatcaagcaggagcccgacgacggcagctactaccccgaggccagcatccccagcagcgccatcgtgggcgtgaacagcggcggccagagcttccactacagaatcggcgcccagggcaccatcagcctgagcagaagcgccagagaccagagcttccagcacctgagcagcttcccccccgtgaacaccctggtggagagctggaagagccacggcgacctgagcagcagaagaagcgacggctaccccgtgctggagtacatccccgagaacgtgagcagcagcaccctgagaagcgtgagcaccggcagcagcagacccagcaagatctgcctggtgtgcggcgacgaggccagcggctgccactacggcgtggtgacctgcggcagctgcaaggtgttcttcaagagagccgtggagggccagcacaactacctgtgcgccggcagaaacgactgcatcatcgacaagatcagaagaaagaactgccccgcctgcagactgcagaagtgcctgcaggccggcatgaacctgggcgccagaaagagcaagaagctgggcaagctgaagggcatccacgaggagcagccccagcagcagcagcccccccccccccccccccccccccagagccccgaggagggcaccacctacatcgcccccgccaaggagcccagcgtgaacaccgccctggtgccccagctgagcaccatcagcagagccctgacccccagccccgtgatggtgctggagaacatcgagcccgagatcgtgtacgccggctacgacagcagcaagcccgacaccgccgagaacctgctgagcaccctgaacagactggccggcaagcagatgatccaggtggtgaagtgggccaaggtgctgcccggcttcaagaacctgcccctggaggaccagatcaccctgatccagtacagctggatgtgcctgagcagcttcgccctgagctggagaagctacaagcacaccaacagccagttcctgtacttcgcccccgacctggtgttcaacgaggagaagatgcaccagagcgccatgtacgagctgtgccagggcatgcaccagatcagcctgcagttcgtgagactgcagctgaccttcgaggagtacaccatcatgaaggtgctgctgctgctgagcaccatccccaaggacggcctgaagagccaggccgccttcgaggagatgagaaccaactacatcaaggagctgagaaagatggtgaccaagtgccccaacaacagcggccagagctggcagagattctaccagctgaccaagctgctggacagcatgcacgacctggtgagcgacctgctggagttctgcttctacaccttcagagagagccacgccctgaaggtggagttccccgccatgctggtggagatcatcagcgaccagctgcccaaggtggagagcggcaacgccaagcccctgtacttccacagaaagtag

SEQ ID NO: 91565 - DNA, 2967 bp, synthetic construct
  misc_feature 1..2967: note = Description of Artificial Sequence: Synthetic coding sequence
  source 1..2967: mol_type = other DNA
atggagaccaagggctaccacagcctgcccgagggcctggacatggagagaagatggggccaggtgagccaggccgtggagagaagcagcctgggccccaccgagagaaccgacgagaacaactacatggagatcgtgaacgtgagctgcgtgagcggcgccatccccaacaacagcacccagggcagcagcaaggagaagcaggagctgctgccctgcctgcagcaggacaacaacagacccggcatcctgaccagcgacatcaagaccgagctggagagcaaggagctgagcgccaccgtggccgagagcatgggcctgtacatggacagcgtgagagacgccgactacagctacgagcagcagaaccagcagggcagcatgagccccgccaagatctaccagaacgtggagcagctggtgaagttctacaagggcaacggccacagacccagcaccctgagctgcgtgaacacccccctgagaagcttcatgagcgacagcggcagcagcgtgaacggcggcgtgatgagagccgtggtgaagagccccatcatgtgccacgagaagagccccagcgtgtgcagccccctgaacatgaccagcagcgtgtgcagccccgccggcatcaacagcgtgagcagcaccaccgccagcttcggcagcttccccgtgcacagccccatcacccagggcacccccctgacctgcagccccaacgtggagaacagaggcagcagaagccacagccccgcccacgccagcaacgtgggcagccccctgagcagccccctgagcagcatgaagagcagcatcagcagcccccccagccactgcagcgtgaagagccccgtgagcagccccaacaacgtgaccctgagaagcagcgtgagcagccccgccaacatcaacaacagcagatgcagcgtgagcagccccagcaacaccaacaacagaagcaccctgagcagccccgccgccagcaccgtgggcagcatctgcagccccgtgaacaacgccttcagctacaccgccagcggcaccagcgccggcagcagcaccctgagagacgtggtgcccagccccgacacccaggagaagggcgcccaggaggtgcccttccccaagaccgaggaggtggagagcgccatcagcaacggcgtgaccggccagctgaacatcgtgcagtacatcaagcccgagcccgacggcgccttcagcagcagctgcctgggcggcaacagcaagatcaacagcgacagcagcttcagcgtgcccatcaagcaggagagcaccaagcacagctgcagcggcaccagcttcaagggcaaccccaccgtgaaccccttccccttcatggacggcagctacttcagcttcatggacgacaaggactactacagcctgagcggcatcctgggcccccccgtgcccggcttcgacggcaactgcgagggcagcggcttccccgtgggcatcaagcaggagcccgacgacggcagctactaccccgaggccagcatccccagcagcgccatcgtgggcgtgaacagcggcggccagagcttccactacagaatcggcgcccagggcaccatcagcctgagcagaagcgccagagaccagagcttccagcacctgagcagcttcccccccgtgaacaccctggtggagagctggaagagccacggcgacctgagcagcagaagaagcgacggctaccccgtgctggagtacatccccgagaacgtgagcagcagcaccctgagaagcgtgagcaccggcagcagcagacccagcaagatctgcctggtgtgcggcgacgaggccagcggctgccactacggcgtggtgacctgcggcagctgcaaggtgttcttcaagagagccgtggagggcaagtgcagctggcagcacaactacctgtgcgccggcagaaacgactgcatcatcgacaagatcagaagaaagaactgccccgcctgcagactgcagaagtgcctgcaggccggcatgaacctgggcgccagaaagagcaagaagctgggcaagctgaagggcatccacgaggagcagccccagcagcagcagcccccccccccccccccccccccccagagccccgaggagggcaccacctacatcgcccccgccaaggagcccagcgtgaacaccgccctggtgccccagctgagcaccatcagcagagccctgacccccagccccgtgatggtgctggagaacatcgagcccgagatcgtgtacgccggctacgacagcagcaagcccgacaccgccgagaacctgctgagcaccctgaacagactggccggcaagcagatgatccaggtggtgaagtgggccaaggtgctgcccggcttcaagaacctgcccctggaggaccagatcaccctgatccagtacagctggatgtgcctgagcagcttcgccctgagctggagaagctacaagcacaccaacagccagttcctgtacttcgcccccgacctggtgttcaacgaggagaagatgcaccagagcgccatgtacgagctgtgccagggcatgcaccagatcagcctgcagttcgtgagactgcagctgaccttcgaggagtacaccatcatgaaggtgctgctgctgctgagcaccatccccaaggacggcctgaagagccaggccgccttcgaggagatgagaaccaactacatcaaggagctgagaaagatggtgaccaagtgccccaacaacagcggccagagctggcagagattctaccagctgaccaagctgctggacagcatgcacgacctggtgagcgacctgctggagttctgcttctacaccttcagagagagccacgccctgaaggtggagttccccgccatgctggtggagatcatcagcgaccagctgcccaaggtggagagcggcaacgccaagcccctgtacttccacagaaagtag

SEQ ID NO: 91566 - DNA, 2955 bp, synthetic construct; identical to SEQ ID NO: 91564
  misc_feature 1..2955: note = Description of Artificial Sequence: Synthetic coding sequence
  source 1..2955: mol_type = other DNA

SEQ ID NO: 91567 - DNA, 2967 bp, synthetic construct; identical to SEQ ID NO: 91565
  misc_feature 1..2967: note = Description of Artificial Sequence: Synthetic coding sequence
  source 1..2967: mol_type = other DNA

SEQ ID NO: 91568 - DNA, 2604 bp, synthetic construct
  misc_feature 1..2604: note = Description of Artificial Sequence: Synthetic coding sequence
  source 1..2604: mol_type = other DNA
atggagaccaagggctaccacagcctgcccgagggcctggacatggagagaagatggggccaggtgagccaggccgtggagagaagcagcctgggccccaccgagagaaccgacgagaacaactacatggagatcgtgaacgtgagctgcgtgagcggcgccatccccaacaacagcacccagggcagcagcaaggagaagcaggagctgctgccctgcctgcagcaggacaacaacagacccggcatcctgaccagcgacatcaagaccgagctggagagcaaggagctgagcgccaccgtggccgagagcatgggcctgtacatggacagcgtgagagacgccgactacagctacgagcagcagaaccagcagggcagcatgagccccgccaagatctaccagaacgtggagcagctggtgaagttctacaagggcaacggccacagacccagcaccctgagctgcgtgaacacccccctgagaagcttcatgagcgacagcggcagcagcgtgaacggcggcgtgatgagagccgtggtgaagagccccatcatgtgccacgagaagagccccagcgtgtgcagccccctgaacatgaccagcagcgtgtgcagccccgccggcatcaacagcgtgagcagcaccaccgccagcttcggcagcttccccgtgcacagccccatcacccagggcacccccctgacctgcagccccaacgtggagaacagaggcagcagaagccacagccccgcccacgccagcaacgtgggcagccccctgagcagccccctgagcagcatgaagagcagcatcagcagcccccccagccactgcagcgtgaagagccccgtgagcagccccaacaacgtgaccctgagaagcagcgtgagcagccccgccaacatcaacaacagcagatgcagcgtgagcagccccagcaacaccaacaacagaagcaccctgagcagccccgccgccagcaccgtgggcagcatctgcagccccgtgaacaacgccttcagctacaccgccagcggcaccagcgccggcagcagcaccctgagagacgtggtgcccagccccgacacccaggagaagggcgcccaggaggtgcccttccccaagaccgaggaggtggagagcgccatcagcaacggcgtgaccggccagctgaacatcgtgcagtacatcaagcccgagcccgacggcgccttcagcagcagctgcctgggcggcaacagcaagatcaacagcgacagcagcttcagcgtgcccatcaagcaggagagcaccaagcacagctgcagcggcaccagcttcaagggcaaccccaccgtgaaccccttccccttcatggacggcagctacttcagcttcatggacgacaaggactactacagcctgagcggcatcctgggcccccccgtgcccggcttcgacggcaactgcgagggcagcggcttccccgtgggcatcaagcaggagcccgacgacggcagctactaccccgaggccagcatccccagcagcgccatcgtgggcgtgaacagcggcggccagagcttccactacagaatcggcgcccagggcaccatcagcctgagcagaagcgccagagaccagagcttccagcacctgagcagcttcccccccgtgaacaccctggtggagagctggaagagccacggcgacctgagcagcagaagaagcgacggctaccccgtgctggagtacatccccgagaacgtgagcagcagcaccctgagaagcgtgagcaccggcagcagcagacccagcaagatctgcctggtgtgcggcgacgaggccagcggctgccactacggcgtggtgacctgcggcagctgcaaggtgttcttcaagagagccgtggagggccagcacaactacctgtgcgccggcagaaacgactgcatcatcgacaagatcagaagaaagaactgccccgcctgcagactgcagaagtgcctgcaggccggcatgaacctgggcggcttcaagaacctgcccctggaggaccagatcaccctgatccagtacagctggatgtgcctgagcagcttcgccctgagctggagaagctacaagcacaccaacagccagttcctgtacttcgcccccgacctggtgttcaacgaggagaagatgcaccagagcgccatgtacgagctgtgccagggcatgcaccagatcagcctgcagttcgtgagactgcagctgaccttcgaggagtacaccatcatgaaggtgctgctgctgctgagcaccatccccaaggacggcctgaagagccaggccgccttcgaggagatgagaaccaactacatcaaggagctgagaaagatggtgaccaagtgccccaacaacagcggccagagctggcagagattctaccagctgaccaagctgctggacagcatgcacgacctggtgagcgacctgctggagttctgcttctacaccttcagagagagccacgccctgaaggtggagttccccgccatgctggtggagatcatcagcgaccagctgcccaaggtggagagcggcaacgccaagcccctgtacttccacagaaagtag

SEQ ID NO: 91569 - DNA, 1920 bp, synthetic construct
  misc_feature 1..1920: note = Description of Artificial Sequence: Synthetic coding sequence
  source 1..1920: mol_type = other DNA
atggagaccaagggctaccacagcctgcccgagggcctggacatggagagaagatggggccaggtgagccaggccgtggagagaagcagcctgggccccaccgagagaaccgacgagaacaactacatggagatcgtgaacgtgagctgcgtgagcggcgccatccccaacaacagcacccagggcagcagcaaggagaagcaggagctgctgccctgcctgcagcaggacaacaacagacccggcatcctgaccagcgacatcaagaccgagctggagagcaaggagctgagcgccaccgtggccgagagcatgggcctgtacatggacagcgtgagagacgccgactacagctacgagcagcagaaccagcagggcagcatgagccccgccaagatctaccagaacgtggagcagctggtgaagttctacaagggcaacggccacagacccagcaccctgagctgcgtgaacacccccctgagaagcttcatgagcgacagcggcagcagcgtgaacggcggcgtgatgagagccgtggtgaagagccccatcatgtgccacgagaagagccccagcgtgtgcagccccctgaacatgaccagcagcgtgtgcagccccgccggcatcaacagcgtgagcagcaccaccgccagcttcggcagcttccccgtgcacagccccatcacccagggcacccccctgacctgcagccccaacgtggagaacagaggcagcagaagccacagccccgcccacgccagcaacgtgggcagccccctgagcagccccctgagcagcatgaagagcagcatcagcagcccccccagccactgcagcgtgaagagccccgtgagcagccccaacaacgtgaccctgagaagcagcgtgagcagccccgccaacatcaacaacagcagatgcagcgtgagcagccccagcaacaccaacaacagaagcaccctgagcagccccgccgccagcaccgtgggcagcatctgcagccccgtgaacaacgccttcagctacaccgccagcggcaccagcgccggcagcagcaccctgagagacgtggtgcccagccccgacacccaggagaagggcgcccaggaggtgcccttccccaagaccgaggaggtggagagcgccatcagcaacggcgtgaccggccagctgaacatcgtgcagtacatcaagcccgagcccgacggcgccttcagcagcagctgcctgggcggcaacagcaagatcaacagcgacagcagcttcagcgtgcccatcaagcaggagagcaccaagcacagctgcagcggcaccagcttcaagggcaaccccaccgtgaaccccttccccttcatggacggcagctacttcagcttcatggacgacaaggactactacagcctgagcggcatcctgggcccccccgtgcccggcttcgacggcaactgcgagggcagcggcttccccgtgggcatcaagcaggagcccgacgacggcagctactaccccgaggccagcatccccagcagcgccatcgtgggcgtgaacagcggcggccagagcttccactacagaatcggcgcccagggcaccatcagcctgagcagaagcgccagagaccagagcttccagcacctgagcagcttcccccccgtgaacaccctggtggagagctggaagagccacggcgacctgagcagcagaagaagcgacggctaccccgtgctggagtacatccccgagaacgtgagcagcagcaccctgagaagcgtgagcaccggcagcagcagacccagcaagaagaacatctacagattcctgctgtgcaacaacagaaccagaggcgtgggccagcagctgcccctgagccccagaagcagcaccgtgttctgcatcaccggcatccacaccagatag

SEQ ID NO: 91570 - DNA, 1797 bp, synthetic construct
  misc_feature 1..1797: note = Description of Artificial Sequence: Synthetic coding sequence
  source 1..1797: mol_type = other DNA
atgccctgcatccaggcccagtacggcacccccgcccccagccccggccccagagaccacctggccagcgaccccctgacccccgagttcatcaagcccaccatggacctggccagccccgaggccgcccccgccgcccccaccgccctgcccagcttcagcaccttcatggacggctacaccggcgagttcgacaccttcctgtaccagctgcccggcaccgtgcagccctgcagcagcgccagcagcagcgccagcagcaccagcagcagcagcgccaccagccccgccagcgccagcttcaagttcgaggacttccaggtgtacggctgctaccccggccccctgagcggccccgtggacgaggccctgagcagcagcggcagcgactactacggcagcccctgcagcgcccccagccccagcacccccagcttccagcccccccagctgagcccctgggacggcagcttcggccacttcagccccagccagacctacgagggcctgagagcctggaccgagcagctgcccaaggccagcggccccccccagccccccgccttcttcagcttcagcccccccaccggccccagccccagcctggcccagagccccctgaagctgttccccagccaggccacccaccagctgggcgagggcgagagctacagcatgcccaccgccttccccggcctggcccccaccagcccccacctggagggcagcggcatcctggacacccccgtgaccagcaccaaggccagaagcggcgcccccggcggcagcgagggcagatgcgccgtgtgcggcgacaacgccagctgccagcactacggcgtgagaacctgcgagggctgcaagggcttcttcaagagaaccgtgcagaagaacgccaagtacatctgcctggccaacaaggactgccccgtggacaagagaagaagaaacagatgccagttctgcagattccagaagtgcctggccgtgggcatggtgaaggaggtggtgagaaccgacagcctgaagggcagaagaggcagactgcccagcaagcccaagcagccccccgacgccagccccgccaacctgctgaccagcctggtgagagcccacctggacagcggccccagcaccgccaagctggactacagcaagttccaggagctggtgctgccccacttcggcaaggaggacgccggcgacgtgcagcagttctacgacctgctgagcggcagcctggaggtgatcagaaagtgggccgagaagatccccggcttcgccgagctgagccccgccgaccaggacctgctgctggagagcgccttcctggagctgttcatcctgagactggcctacagaagcaagcccggcgagggcaagctgatcttctgcagcggcctggtgctgcacagactgcagtgcgccagaggcttcggcgactggatcgacagcatcctggccttcagcagaagcctgcacagcctgctggtggacgtgcccgccttcgcctgcctgagcgccctggtgctgatcaccgacagacacggcctgcaggagcccagaagagtggaggagctgcagaacagaatcgccagctgcctgaaggagcacgtggccgccgtggccggcgagccccagcccgccagctgcctgagcagactgctgggcaagctgcccgagctgagaaccctgtgcacccagggcctgcagagaatcttctacctgaagctggaggacctggtgccccccccccccatcatcgacaagatcttcatggacaccctgcccttctag

SEQ ID NO: 91571 - DNA, 1836 bp, synthetic construct
  misc_feature 1..1836: note = Description of Artificial Sequence: Synthetic coding sequence
  source 1..1836: mol_type = other DNA
atgtggctggccaaggcctgctggagcatccagagcgagatgccctgcatccaggcccagtacggcacccccgcccccagccccggccccagagaccacctggccagcgaccccctgacccccgagttcatcaagcccaccatggacctggccagccccgaggccgcccccgccgcccccaccgccctgcccagcttcagcaccttcatggacggctacaccggcgagttcgacaccttcctgtaccagctgcccggcaccgtgcagccctgcagcagcgccagcagcagcgccagcagcaccagcagcagcagcgccaccagccccgccagcgccagcttcaagttcgaggacttccaggtgtacggctgctaccccggccccctgagcggccccgtggacgaggccctgagcagcagcggcagcgactactacggcagcccctgcagcgcccccagccccagcacccccagcttccagcccccccagctgagcccctgggacggcagcttcggccacttcagccccagccagacctacgagggcctgagagcctggaccgagcagctgcccaaggccagcggccccccccagccccccgccttcttcagcttcagcccccccaccggccccagccccagcctggcccagagccccctgaagctgttccccagccaggccacccaccagctgggcgagggcgagagctacagcatgcccaccgccttccccggcctggcccccaccagcccccacctggagggcagcggcatcctggacacccccgtgaccagcaccaaggccagaagcggcgcccccggcggcagcgagggcagatgcgccgtgtgcggcgacaacgccagctgccagcactacggcgtgagaacctgcgagggctgcaagggcttcttcaagagaaccgtgcagaagaacgccaagtacatctgcctggccaacaaggactgccccgtggacaagagaagaagaaacagatgccagttctgcagattccagaagtgcctggccgtgggcatggtgaaggaggtggtgagaaccgacagcctgaagggcagaagaggcagactgcccagcaagcccaagcagccccccgacgccagccccgccaacctgctgaccagcctggtgagagcccacctggacagcggccccagcaccgccaagctggactacagcaagttccaggagctggtgctgccccacttcggcaaggaggacgccggcgacgtgcagcagttctacgacctgctgagcggcagcctggaggtgatcagaaagtgggccgagaagatccccggcttcgccgagctgagccccgccgaccaggacctgctgctggagagcgccttcctggagctgttcatcctgagactggcctacagaagcaagcccggcgagggcaagctgatcttctgcagcggcctggtgctgcacagactgcagtgcgccagaggcttcggcgactggatcgacagcatcctggccttcagcagaagcctgcacagcctgctggtggacgtgcccgccttcgcctgcctgagcgccctggtgctgatcaccgacagacacggcctgcaggagcccagaagagtggaggagctgcagaacagaatcgccagctgcctgaaggagcacgtggccgccgtggccggcgagccccagcccgccagctgcctgagcagactgctgggcaagctgcccgagctgagaaccctgtgcacccagggcctgcagagaatcttctacctgaagctggaggacctggtgccccccccccccatcatcgacaagatcttcatggacaccctgcccttctag

SEQ ID NO: 91572 - DNA, 1797 bp, synthetic construct; identical to SEQ ID NO: 91570
  misc_feature 1..1797: note = Description of Artificial Sequence: Synthetic coding sequence
  source 1..1797: mol_type = other DNA

SEQ ID NO: 91573 - DNA, 1797 bp, synthetic construct; identical to SEQ ID NO: 91570
  misc_feature 1..1797: note = Description of Artificial Sequence: Synthetic coding sequence
  source 1..1797: mol_type = other DNA

SEQ ID NO: 91574 - DNA, 1959 bp, synthetic construct
  misc_feature 1..1959: note = Description of Artificial Sequence: Synthetic coding sequence
  source 1..1959: mol_type = other DNA
atgaccagcgcccagtacaagatcaagatcctgatcgagggcctgcaccacggccagagacccggccccgccccccccagacagcccggcagcttctgctgggccctgaaggccgacggcatcatgtggctggccaaggcctgctggagcatccagagcgagatgccctgcatccaggcccagtacggcacccccgcccccagccccggccccagagaccacctggccagcgaccccctgacccccgagttcatcaagcccaccatggacctggccagccccgaggccgcccccgccgcccccaccgccctgcccagcttcagcaccttcatggacggctacaccggcgagttcgacaccttcctgtaccagctgcccggcaccgtgcagccctgcagcagcgccagcagcagcgccagcagcaccagcagcagcagcgccaccagccccgccagcgccagcttcaagttcgaggacttccaggtgtacggctgctaccccggccccctgagcggccccgtggacgaggccctgagcagcagcggcagcgactactacggcagcccctgcagcgcccccagccccagcacccccagcttccagcccccccagctgagcccctgggacggcagcttcggccacttcagccccagccagacctacgagggcctgagagcctggaccgagcagctgcccaaggccagcggccccccccagccccccgccttcttcagcttcagcccccccaccggccccagccccagcctggcccagagccccctgaagctgttccccagccaggccacccaccagctgggcgagggcgagagctacagcatgcccaccgccttccccggcctggcccccaccagcccccacctggagggcagcggcatcctggacacccccgtgaccagcaccaaggccagaagcggcgcccccggcggcagcgagggcagatgcgccgtgtgcggcgacaacgccagctgccagcactacggcgtgagaacctgcgagggctgcaagggcttcttcaagagaaccgtgcagaagaacgccaagtacatctgcctggccaacaaggactgccccgtggacaagagaagaagaaacagatgccagttctgcagattccagaagtgcctggccgtgggcatggtgaaggaggtggtgagaaccgacagcctgaagggcagaagaggcagactgcccagcaagcccaagcagccccccgacgccagccccgccaacctgctgaccagcctggtgagagcccacctggacagcggccccagcaccgccaagctggactacagcaagttccaggagctggtgctgccccacttcggcaaggaggacgccggcgacgtgcagcagttctacgacctgctgagcggcagcctggaggtgatcagaaagtgggccgagaagatccccggcttcgccgagctgagccccgccgaccaggacctgctgctggagagcgccttcctggagctgttcatcctgagactggcctacagaagcaagcccggcgagggcaagctgatcttctgcagcggcctggtgctgcacagactgcagtgcgccagaggcttcggcgactggatcgacagcatcctggccttcagcagaagcctgcacagcctgctggtggacgtgcccgccttcgcctgcctgagcgccctggtgctgatcaccgacagacacggcctgcaggagcccagaagagtggaggagctgcagaacagaatcgccagctgcctgaaggagcacgtggccgccgtggccggcgagccccagcccgccagctgcctgagcagactgctgggcaagctgcccgagctgagaaccctgtgcacccagggcctgcagagaatcttctacctgaagctggaggacctggtgccccccccccccatcatcgacaagatcttcatggacaccctgcccttctag

SEQ ID NO: 91575 - DNA, 978 bp, synthetic construct
  misc_feature 1..978: note = Description of Artificial Sequence: Synthetic coding sequence
  source 1..978: mol_type = other DNA
atgccctgcatccaggcccagtacggcacccccgcccccagccccggccccagagaccacctggccagcgaccccctgacccccgagttcatcaagcccaccatggacctggccagccccgaggccgcccccgccgcccccaccgccctgcccagcttcagcaccttcatggacggctacaccggcgagttcgacaccttcctgtaccagctgcccggcaccgtgcagccctgcagcagcgccagcagcagcgccagcagcaccagcagcagcagcgccaccagccccgccagcgccagcttcaagttcgaggacttccaggtgtacggctgctaccccggccccctgagcggccccgtggacgaggccctgagcagcagcggcagcgactactacggcagcccctgcagcgcccccagccccagcacccccagcttccagcccccccagctgagcccctgggacggcagcttcggccacttcagccccagccagacctacgagggcctgagagcctggaccgagcagctgcccaaggccagcggccccccccagccccccgccttcttcagcttcagcccccccaccggccccagccccagcctggcccagagccccctgaagctgttccccagccaggccacccaccagctgggcgagggcgagagctacagcatgcccaccgccttccccggcctggcccccaccagcccccacctggagggcagcggcatcctggacacccccgtgaccagcaccaaggccagaagcggcgcccccggcggcagcgagggcagatgcgccgtgtgcggcgacaacgccagctgccagcactacggcgtgagaacctgcgagggctgcaagggcttcttcaaggtgcccagaagccccagatggggcctgctgctggagatggagagaggctggccccaccccatcggcacctgcggcctgcccctgggcagcccccccagctag

SEQ ID NO: 91576 - DNA, 1836 bp, synthetic construct; identical to SEQ ID NO: 91571
  misc_feature 1..1836: note = Description of Artificial Sequence: Synthetic coding sequence
  source 1..1836: mol_type = other DNA

SEQ ID NO: 91577 - DNA, 1797 bp, synthetic construct
  misc_feature 1..1797: note = Description of Artificial Sequence: Synthetic coding sequence
  source 1..1797: mol_type = other DNA
atgccctgcgtgcaggcccagtacggcagcagcccccagggcgccagccccgccagccagagctacagctaccacagcagcggcgagtacagcagcgacttcctgacccccgagttcgtgaagttcagcatggacctgaccaacaccgagatcaccgccaccaccagcctgcccagcttcagcaccttcatggacaactacagcaccggctacgacgtgaagcccccctgcctgtaccagatgcccctgagcggccagcagagcagcatcaaggtggaggacatccagatgcacaactaccagcagcacagccacctgcccccccagagcgaggagatgatgccccacagcggcagcgtgtactacaagcccagcagcccccccacccccaccacccccggcttccaggtgcagcacagccccatgtgggacgaccccggcagcctgcacaacttccaccagaactacgtggccaccacccacatgatcgagcagagaaagacccccgtgagcagactgagcctgttcagcttcaagcagagcccccccggcacccccgtgagcagctgccagatgagattcgacggccccctgcacgtgcccatgaaccccgagcccgccggcagccaccacgtggtggacggccagaccttcgccgtgcccaaccccatcagaaagcccgccagcatgggcttccccggcctgcagatcggccacgccagccagctgctggacacccaggtgcccagcccccccagcagaggcagccccagcaacgagggcctgtgcgccgtgtgcggcgacaacgccgcctgccagcactacggcgtgagaacctgcgagggctgcaagggcttcttcaagagaaccgtgcagaagaacgccaagtacgtgtgcctggccaacaagaactgccccgtggacaagagaagaagaaacagatgccagtactgcagattccagaagtgcctggccgtgggcatggtgaaggaggtggtgagaaccgacagcctgaagggcagaagaggcagactgcccagcaagcccaagagcccccaggagcccagcccccccagcccccccgtgagcctgatcagcgccctggtgagagcccacgtggacagcaaccccgccatgaccagcctggactacagcagattccaggccaaccccgactaccagatgagcggcgacgacacccagcacatccagcagttctacgacctgctgaccggcagcatggagatcatcagaggctgggccgagaagatccccggcttcgccgacctgcccaaggccgaccaggacctgctgttcgagagcgccttcctggagctgttcgtgctgagactggcctacagaagcaaccccgtggagggcaagctgatcttctgcaacggcgtggtgctgcacagactgcagtgcgtgagaggcttcggcgagtggatcgacagcatcgtggagttcagcagcaacctgcagaacatgaacatcgacatcagcgccttcagctgcatcgccgccctggccatggtgaccgagagacacggcctgaaggagcccaagagagtggaggagctgcagaacaagatcgtgaactgcctgaaggaccacgtgaccttcaacaacggcggcctgaacagacccaactacctgagcaagctgctgggcaagctgcccgagctgagaaccctgtgcacccagggcctgcagagaatcttctacctgaagctggaggacctggtgcccccccccgccatcatcgacaagctgttcctggacaccctgcccttctag

SEQ ID NO: 91578 - DNA, 1797 bp, synthetic construct; identical to SEQ ID NO: 91577
  misc_feature 1..1797: note = Description of Artificial Sequence: Synthetic coding sequence
  source 1..1797: mol_type = other DNA

SEQ ID NO: 91579 - DNA, 1179 bp, synthetic construct
  misc_feature 1..1179: note = Description of Artificial Sequence: Synthetic coding sequence
  source 1..1179: mol_type = other DNA
atggacaactacagcaccggctacgacgtgaagcccccctgcctgtaccagatgcccctgagcggccagcagagcagcatcaaggtggaggacatccagatgcacaactaccagcagcacagccacctgcccccccagagcgaggagatgatgccccacagcggcagcgtgtactacaagcccagcagcccccccacccccaccacccccggcttccaggtgcagcacagccccatgtgggacgaccccggcagcctgcacaacttccaccagaactacgtggccaccacccacatgatcgagcagagaaagacccccgtgagcagactgagcctgttcagcttcaagcagagcccccccggcacccccgtgagcagctgccagatgagattcgacggccccctgcacgtgcccatgaaccccgagcccgccggcagccaccacgtggtggacggccagaccttcgccgtgcccaaccccatcagaaagcccgccagcatgggcttccccggcctgcagatcggccacgccagccagctgctggacacccaggtgcccagcccccccagcagaggcagccccagcaacgagggcctgtgcgccgtgtgcggcgacaacgccgcctgccagcactacggcgtgagaacctgcgagggctgcaagggcttcttcaagagaaccgtgcagaagaacgccaagtacgtgtgcctggccaacaagaactgccccgtggacaagagaagaagaaacagatgccagtactgcagattccagaagtgcctggccgtgggcatggtgaaggaggtggtgagaaccgacagcctgaagggcagaagaggcagactgcccagcaagcccaagagcccccaggagcccagcccccccagcccccccgtgagcctgatcagcgccctggtgagagcccacgtggacagcaaccccgccatgaccagcctggactacagcagattccaggccaaccccgactaccagatgagcggcgacgacacccagcacatccagcagttctacgacctgctgaccggcagcatggagatcatcagaggctgggccgagaagatccccggcttcgccgacctgcccaaggccgaccaggacctgctgttcgagagcgccttcctggagctgttcgtgctgagactggcctacagaatctag

SEQ ID NO: 91580 - DNA, 1179 bp, synthetic construct; identical to SEQ ID NO: 91579
  misc_feature 1..1179: note = Description of Artificial Sequence: Synthetic coding sequence
  source 1..1179: mol_type = other DNA

SEQ ID NO: 91581 - DNA, 777 bp, synthetic construct
  misc_feature 1..777: note = Description of Artificial Sequence: Synthetic coding sequence
  source 1..777: mol_type = other DNA
atgccctgcgtgcaggcccagtacggcagcagcccccagggcgccagccccgccagccagagctacagctaccacagcagcggcgagtacagcagcgacttcctgacccccgagttcgtgaagttcagcatggacctgaccaacaccgagatcaccgccaccaccagcctgcccagcttcagcaccttcatggacaactacagcaccggctacgacgtgaagcccccctgcctgtaccagatgcccctgagcggccagcagagcagcatcaaggtggaggacatccagatgcacaactaccagcagcacagccacctgcccccccagagcgaggagatgatgccccacagcggcagcgtgtactacaagcccagcagcccccccacccccaccacccccggcttccaggtgcagcacagccccatgtgggacgaccccggcagcctgcacaacttccaccagaactacgtggccaccacccacatgatcgagcagagaaagacccccgtgagcagactgagcctgttcagcttcaagcagagcccccccggcacccccgtgagcagctgccagatgagattcgacggccccctgcacgtgcccatgaaccccgagcccgccggcagccaccacgtggtggacggccagaccttcgccgtgcccaaccccatcagaaagcccgccagcatgggcttccccggcctgcagatcggccacgccagccagctgctggacacccaggtgcccagcccccccagcagaggcagccccagctag

SEQ ID NO: 91582 - DNA, 1608 bp, synthetic construct
  misc_feature 1..1608: note = Description of Artificial Sequence: Synthetic coding sequence
  source 1..1608: mol_type = other DNA
atggacaactacagcaccggctacgacgtgaagcccccctgcctgtaccagatgcccctgagcggccagcagagcagcatcaaggtggaggacatccagatgcacaactaccagcagcacagccacctgcccccccagagcgaggagatgatgccccacagcggcagcgtgtactacaagcccagcagcccccccacccccaccacccccggcttccaggtgcagcacagccccatgtgggacgaccccggcagcctgcacaacttccaccagaactacgtggccaccacccacatgatcgagcagagaaagacccccgtgagcagactgagcctgttcagcttcaagcagagcccccccggcacccccgtgagcagctgccagatgagattcgacggccccctgcacgtgcccatgaaccccgagcccgccggcagccaccacgtggtggacggccagaccttcgccgtgcccaaccccatcagaaagcccgccagcatgggcttccccggcctgcagatcggccacgccagccagctgctggacacccaggtgcccagcccccccagcagaggcagccccagcaacgagggcctgtgcgccgtgtgcggcgacaacgccgcctgccagcactacggcgtgagaacctgcgagggctgcaagggcttcttcaagagaaccgtgcagaagaacgccaagtacgtgtgcctggccaacaagaactgccccgtggacaagagaagaagaaacagatgccagtactgcagattccagaagtgcctggccgtgggcatggtgaaggaggtggtgagaaccgacagcctgaagggcagaagaggcagactgcccagcaagcccaagagcccccaggagcccagcccccccagcccccccgtgagcctgatcagcgccctggtgagagcccacgtggacagcaaccccgccatgaccagcctggactacagcagattccaggccaaccccgactaccagatgagcggcgacgacacccagcacatccagcagttctacgacctgctgaccggcagcatggagatcatcagaggctgggccgagaagatccccggcttcgccgacctgcccaaggccgaccaggacctgctgttcgagagcgccttcctggagctgttcgtgctgagactggcctacagaagcaaccccgtggagggcaagctgatcttctgcaacggcgtggtgctgcacagactgcagtgcgtgagaggcttcggcgagtggatcgacagcatcgtggagttcagcagcaacctgcagaacatgaacatcgacatcagcgccttcagctgcatcgccgccctggccatggtgaccgagagacacggcctgaaggagcccaagagagtggaggagctgcagaacaagatcgtgaactgcctgaaggaccacgtgaccttcaacaacggcggcctgaacagacccaactacctgagcaagctgctgggcaagctgcccgagctgagaaccctgtgcacccagggcctgcagagaatcttctacctgaagctggaggacctggtgcccccccccgccatcatcgacaagctgttcctggacaccctgcccttctag

SEQ ID NO: 91583 - DNA, 1830 bp, synthetic construct
  misc_feature 1..1830: note = Description of Artificial Sequence: Synthetic coding sequence
  source 1..1830: mol_type = other DNA
atgaacgaggacagaagaggcgagctgctgaccatgccctgcgtgcaggcccagtacggcagcagcccccagggcgccagccccgccagccagagctacagctaccacagcagcggcgagtacagcagcgacttcctgacccccgagttcgtgaagttcagcatggacctgaccaacaccgagatcaccgccaccaccagcctgcccagcttcagcaccttcatggacaactacagcaccggctacgacgtgaagcccccctgcctgtaccagatgcccctgagcggccagcagagcagcatcaaggtggaggacatccagatgcacaactaccagcagcacagccacctgcccccccagagcgaggagatgatgccccacagcggcagcgtgtactacaagcccagcagcccccccacccccaccacccccggcttccaggtgcagcacagccccatgtgggacgaccccggcagcctgcacaacttccaccagaactacgtggccaccacccacatgatcgagcagagaaagacccccgtgagcagactgagcctgttcagcttcaagcagagcccccccggcacccccgtgagcagctgccagatgagattcgacggccccctgcacgtgcccatgaaccccgagcccgccggcagccaccacgtggtggacggccagaccttcgccgtgcccaaccccatcagaaagcccgccagcatgggcttccccggcctgcagatcggccacgccagccagctgctggacacccaggtgcccagcccccccagcagaggcagccccagcaacgagggcctgtgcgccgtgtgcggcgacaacgccgcctgccagcactacggcgtgagaacctgcgagggctgcaagggcttcttcaagagaaccgtgcagaagaacgccaagtacgtgtgcctggccaacaagaactgccccgtggacaagagaagaagaaacagatgccagtactgcagattccagaagtgcctggccgtgggcatggtgaaggaggtggtgagaaccgacagcctgaagggcagaagaggcagactgcccagcaagcccaagagcccccaggagcccagcccccccagcccccccgtgagcctgatcagcgccctggtgagagcccacgtggacagcaaccccgccatgaccagcctggactacagcagattccaggccaaccccgactaccagatgagcggcgacgacacccagcacatccagcagttctacgacctgctgaccggcagcatggagatcatcagaggctgggccgagaagatccccggcttcgccgacctgcccaaggccgaccaggacctgctgttcgagagcgccttcctggagctgttcgtgctgagactggcctacagaagcaaccccgtggagggcaagctgatcttctgcaacggcgtggtgctgcacagactgcagtgcgtgagaggcttcggcgagtggatcgacagcatcgtggagttcagcagcaacctgcagaacatgaacatcgacatcagcgccttcagctgcatcgccgccctggccatggtgaccgagagacacggcctgaaggagcccaagagagtggaggagctgcagaacaagatcgtgaactgcctgaaggaccacgtgaccttcaacaacggcggcctgaacagacccaactacctgagcaagctgctgggcaagctgcccgagctgagaaccctgtgcacccagggcctgcagagaatcttctacctgaagctggaggacctggtgcccccccccgccatcatcgacaagctgttcctggacaccctgcccttctag

SEQ ID NO: 91584 - DNA, 738 bp, synthetic construct
  misc_feature 1..738: note = Description of Artificial Sequence: Synthetic coding sequence
  source 1..738: mol_type = other DNA
gtggaggaggagggcgacgtgagcaacagaggcgtggagctgctgcagctggagcccgacgaggaccaggtgagagccagaatcctgggctgcctgcaggagcccaccaagagcagacccgaccagcccgccgccttcggcctgctgtgcagaatggccgaccagaccttcatcagcatcgtggactgggccagaagatgcatggtgttcaaggagctggaggtggccgaccagatgaccctgctgcagaactgctggagcgagctgctggtgttcgaccacatctacagacaggtgcagcacggcaaggagggcagcatcctgctggtgaccggccaggaggtggagctgaccaccgtggccacccaggccggcagcctgctgcacagcctggtgctgagagcccaggagctggtgctgcagctgctggccctgcagctggacagacaggagttcgtgtgcctgaagttcatcatcctgttcagcctggacctgaagttcctgaacaaccacatcctggtgaaggacgcccaggagaaggccaacgccgccctgctggactacaccctgtgccactacccccactgcggcgacaagttccagcagctgctgctgtgcctggtggaggtgagagccctgagcatgcaggccaaggagtacctgtaccacaagcacctgggcaacgagatgcccagaaacaacctgctgatcgagatgctgcaggccaagcagacctag

SEQ ID NO: 91585 - DNA, 1386 bp, synthetic construct
  misc_feature 1..1386: note = Description of Artificial Sequence: Synthetic coding sequence
  source 1..1386: mol_type = other DNA
atggactacagctacgacgaggacctggacgagctgtgccccgtgtgcggcgacaaggtgagcggctaccactacggcctgctgacctgcgagagctgcaagggcttcttcaagagaaccgtgcagaacaacaagcactacacctgcaccgagagccagagctgcaagatcgacaagacccagagaaagagatgccccttctgcagattccagaagtgcctgaccgtgggcatgagactggaggccgtgagagccgacagaatgagaggcggcagaaacaagttcggccccatgtacaagagagacagagccctgaagcagcagaagaaggcccagatcagagccaacggcttcaagctggagaccggcccccccatgggcgtgccccccccccccccccccgcccccgactacgtgctgccccccagcctgcacggccccgagcccaagggcctggccgccggcccccccgccggccccctgggcgacttcggcgcccccgccctgcccatggccgtgcccggcgcccacggccccctggccggctacctgtaccccgccttccccggcagagccatcaagagcgagtaccccgagccctacgccagccccccccagcccggcctgccctacggctaccccgagcccttcagcggcggccccaacgtgcccgagctgatcctgcagctgctgcagctggagcccgacgaggaccaggtgagagccagaatcctgggctgcctgcaggagcccaccaagagcagacccgaccagcccgccgccttcggcctgctgtgcagaatggccgaccagaccttcatcagcatcgtggactgggccagaagatgcatggtgttcaaggagctggaggtggccgaccagatgaccctgctgcagaactgctggagcgagctgctggtgttcgaccacatctacagacaggtgcagcacggcaaggagggcagcatcctgctggtgaccggccaggaggtggagctgaccaccgtggccacccaggccggcagcctgctgcacagcctggtgctgagagcccaggagctggtgctgcagctgctggccctgcagctggacagacaggagttcgtgtgcctgaagttcatcatcctgttcagcctggacctgaagttcctgaacaaccacatcctggtgaaggacgcccaggagaaggccaacgccgccctgctggactacaccctgtgccactacccccactgcggcgacaagttccagcagctgctgctgtgcctggtggaggtgagagccctgagcatgcaggccaaggagtacctgtaccacaagcacctgggcaacgagatgcccagaaacaacctgctgatcgagatgctgcaggccaagcagacctag

SEQ ID NO: 91586 - DNA, 537 bp, synthetic construct
  misc_feature 1..537: note = Description of Artificial Sequence: Synthetic coding sequence
  source 1..537: mol_type = other DNA
atggactacagctacgacgaggacctggacgagctgtgccccgtgtgcggcgacaaggtgagcggctaccactacggcctgctgacctgcgagagctgcaagggcttcttcaagagaaccgtgcagaacaacaagcactacacctgcaccgagagccagagctgcaagatcgacaagacccagagaaagagatgccccttctgcagattccagaagtgcctgaccgtgggcatgagactggaggccgtgagagccgacagaatgagaggcggcagaaacaagttcggccccatgtacaagagagacagagccctgaagcagcagaagaaggcccagatcagagccaacggcttcaagctggagaccggcccccccatgggcgtgccccccccccccccccccgcccccgactacgtgctgccccccagcctgcacggccccgagcccaagggcctggccgccggcccccccgccggccccctgggcgacttcggcgcccccgccctgcccatggccgtgcccggcgcccacggctag

SEQ ID NO: 91587 - DNA, 972 bp, synthetic construct
  misc_feature 1..972: note = Description of Artificial Sequence: Synthetic coding sequence
  source 1..972: mol_type = other DNA
gacctggaggagctgtgccccgtgtgcggcgacaaggtgagcggctaccactacggcctgctgacctgcgagagctgcaagggcttcttcaagagaaccgtgcagaacaacaagagatacacctgcatcgagaaccagaactgccagatcgacaagacccagagaaagagatgcccctactgcagattccagaagtgcctgagcgtgggcatgaagctggaggccgtgagagccgacagaatgagaggcggcagaaacaagttcggccccatgtacaagagagacagagccctgaagcagcagaagaaggccctgatcagagccaacggcctgaagctggaggccatgagccaggtgatccaggccatgcccagcgacctgaccatcagcagcgccatccagaacatccacagcgccagcaagggcctgcccctgaaccacgccgccctgccccccaccgactacgacagaagccccttcgtgaccagccccatcagcatgaccatgcccccccacggcagcctgcagggctaccagacctacggccacttccccagcagagccatcaagagcgagtaccccgacccctacaccagcagccccgagagcatcatgggctacagctacatggacagctaccagaccagcagccccgccagcatcccccacctgatcctggagctgctgaagtgcgagcccgacgagccccaggtgcaggccaagatcatggcctacctgcagcaggagcaggccaacagaagcaagcacgagaagctgagcaccttcggcctgatgtgcaagatggccgaccagaccctgttcagcatcgtggagtgggccagaagcagcatcttcttcagagagctgaagggcctgaccctgagccccagcctggagtgcagcggcagctggctgatggccaccagcaccagctgcatccaggtgatcagactgccccagccccccgagtag

SEQ ID NO: 91588 - DNA, 1488 bp, synthetic construct
  misc_feature 1..1488: note = Description of Artificial Sequence: Synthetic coding sequence
  source 1..1488: mol_type = other DNA
atgagcagcaacagcgacaccggcgacctgcaggagagcctgaagcacggcctgacccccatcgtgagccagttcaagatggtgaactacagctacgacgaggacctggaggagctgtgccccgtgtgcggcgacaaggtgagcggctaccactacggcctgctgacctgcgagagctgcaagggcttcttcaagagaaccgtgcagaacaacaagagatacacctgcatcgagaaccagaactgccagatcgacaagacccagagaaagagatgcccctactgcagattccagaagtgcctgagcgtgggcatgaagctggaggccgtgagagccgacagaatgagaggcggcagaaacaagttcggccccatgtacaagagagacagagccctgaagcagcagaagaaggccctgatcagagccaacggcctgaagctggaggccatgagccaggtgatccaggccatgcccagcgacctgaccatcagcagcgccatccagaacatccacagcgccagcaagggcctgcccctgaaccacgccgccctgccccccaccgactacgacagaagccccttcgtgaccagccccatcagcatgaccatgcccccccacggcagcctgcagggctaccagacctacggccacttccccagcagagccatcaagagcgagtaccccgacccctacaccagcagccccgagagcatcatgggctacagctacatggacagctaccagaccagcagccccgccagcatcccccacctgatcctggagctgctgaagtgcgagcccgacgagccccaggtgcaggccaagatcatggcctacctgcagcaggagcaggccaacagaagcaagcacgagaagctgagcaccttcggcctgatgtgcaagatggccgaccagaccctgttcagcatcgtggagtgggccagaagcagcatcttcttcagagagctgaaggtggacgaccagatgaagctgctgcagaactgctggagcgagctgctgatcctggaccacatctacagacaggtggtgcacggcaaggagggcagcatcttcctggtgaccggccagcaggtggactacagcatcatcgccagccaggccggcgccaccctgaacaacctgatgagccacgcccaggagctggtggccaagctgagaagcctgcagttcgaccagagagagttcgtgtgcctgaagttcctggtgctgttcagcctggacgtgaagaacctggagaacttccagctggtggagggcgtgcaggagcaggtgaacgccgccctgctggactacaccatgtgcaactacccccagcagaccgagaagttcggccagctgctgctgagactgcccgagatcagagccatcagcatgcaggccgaggagtacctgtactacaagcacctgaacggcgacgtgccctacaacaacctgctgatcgagatgctgcacgccaagagagcctag

SEQ ID NO: 91589 - DNA, 1134 bp, synthetic construct
  misc_feature 1..1134: note = Description of Artificial Sequence: Synthetic coding sequence
  source 1..1134: mol_type = other DNA
tgagacctggaggagctgtgccccgtgtgcggcgacaaggtgagcggctaccactacggcctgctgacctgcgagagctgcaagggcttcttcaagagaaccgtgcagaacaacaagagatacacctgcatcgagaaccagaactgccagatcgacaagacccagagaaagagatgcccctactgcagattccagaagtgcctgagcgtgggcatgaagctggaggccgtgagagccgacagaatgagaggcggcagaaacaagttcggccccatgtacaagagagacagagccctgaagcagcagaagaaggccctgatcagagccaacggcctgaagctggaggccatgagccaggtgatccaggccatgcccagcgacctgaccatcagcagcgccatccagaacatccacagcgccagcaagggcctgcccctgaaccacgccgccctgccccccaccgactacgacagaagccccttcgtgaccagccccatcagcatgaccatgcccccccacggcagcctgcagggctaccagacctacggccacttccccagcagagccatcaagagcgagtaccccgacccctacaccagcagccccgagagcatcatgggctacagctacatggacagctaccagaccagcagccccgccagcatcccccacctgatcctggagctgctgaagtgcgagcccgacgagccccaggtgcaggccaagatcatggcctacctgcagcaggagcaggccaacagaagcaagcacgagaagctgagcaccttcggcctgatgtgcaagatggccgaccagaccctgttcagcatcgtggagtgggccagaagcagcatcttcttcagagagctgaagggcctgaccctgagccccagcctggagtgcagcggcaccatcctggcccacggcaacctgcacctgctgcacagcagcgacagccccgccagcgccagcagagtggccggcatcaccggcgtgcaccacaacacccacctgatcttcgtgttcctggtggagatgggcttctgccacgtgggccaggccggcctgaagacccccgacctgagagtgatctgcctgcccagaccccccaaggtgctgggcctgtgggcctag

SEQ ID NO: 91590 - DNA, 1626 bp, synthetic construct
  misc_feature 1..1626: note = Description of Artificial Sequence: Synthetic coding sequence
  source 1..1626: mol_type = other DNA
atgagcagcaacagcgacaccggcgacctgcaggagagcctgaagcacggcctgacccccatcggcgccggcctgcccgacagacacggcagccccatccccgccagaggcagactggtgatgctgcccaaggtggagaccgaggccctgggcctggccagaagccacggcgagcagggccagatgcccgagaacatgcaggtgagccagttcaagatggtgaactacagctacgacgaggacctggaggagctgtgccccgtgtgcggcgacaaggtgagcggctaccactacggcctgctgacctgcgagagctgcaagggcttcttcaagagaaccgtgcagaacaacaagagatacacctgcatcgagaaccagaactgccagatcgacaagacccagagaaagagatgcccctactgcagattccagaagtgcctgagcgtgggcatgaagctggaggccgtgagagccgacagaatgagaggcggcagaaacaagttcggccccatgtacaagagagacagagccctgaagcagcagaagaaggccctgatcagagccaacggcctgaagctggaggccatgagccaggtgatccaggccatgcccagcgacctgaccatcagcagcgccatccagaacatccacagcgccagcaagggcctgcccctgaaccacgccgccctgccccccaccgactacgacagaagccccttcgtgaccagccccatcagcatgaccatgcccccccacggcagcctgcagggctaccagacctacggccacttccccagcagagccatcaagagcgagtaccccgacccctacaccagcagccccgagagcatcatgggctacagctacatggacagctaccagaccagcagccccgccagcatcccccacctgatcctggagctgctgaagtgcgagcccgacgagccccaggtgcaggccaagatcatggcctacctgcagcaggagcaggccaacagaagcaagcacgagaagctgagcaccttcggcctgatgtgcaagatggccgaccagaccctgttcagcatcgtggagtgggccagaagcagcatcttcttcagagagctgaaggtggacgaccagatgaagctgctgcagaactgctggagcgagctgctgatcctggaccacatctacagacaggtggtgcacggcaaggagggcagcatcttcctggtgaccggccagcaggtggactacagcatcatcgccagccaggccggcgccaccctgaacaacctgatgagccacgcccaggagctggtggccaagctgagaagcctgcagttcgaccagagagagttcgtgtgcctgaagttcctggtgctgttcagcctggacgtgaagaacctggagaacttccagctggtggagggcgtgcaggagcaggtgaacgccgccctgctggactacaccatgtgcaactacccccagcagaccgagaagttcggccagctgctgctgagactgcccgagatcagagccatcagcatgcaggccgaggagtacctgtactacaagcacctgaacggcgacgtgccctacaacaacctgctgatcgagatgctgcacgccaagagagcctag

SEQ ID NO: 91591 - DNA, 216 bp, synthetic construct
  misc_feature 1..216: note = Description of Artificial Sequence: Synthetic coding sequence
  source 1..216: mol_type = other DNA
tgaagcctgaagcacggcctgacccccatcgacagaggcaactgcagaagcggctgcttcagcttcgccgccaccctgagacagagaagcctgctgaccagctgcgccggcctgcccgacagacacggcagccccatccccgccagaggcagactggtgatgctgcccaaggtggagaccgaggccctgggcctggccagaagccacggcgagtag

SEQ ID NO: 91592 - DNA, 66 bp, synthetic construct
  misc_feature 1..66: note = Description of Artificial Sequence: Synthetic coding sequence
  source 1..66: mol_type = other DNA
atgagcagcaacagcgacaccggcgacctgcaggagagcctgaagcacggcctgacccccatctag

SEQ ID NO: 91593 - DNA, 249 bp, synthetic construct
  misc_feature 1..249: note = Description of Artificial Sequence: Synthetic coding sequence
  source 1..249: mol_type = other DNA
atgagcagcaacagcgacaccggcgacctgcaggagagcctgaagcacggcctgacccccatcgacagaggcaactgcagaagcggctgcttcagcttcgccgccaccctgagacagagaagcctgctgaccagctgcgccggcctgcccgacagacacggcagccccatccccgccagaggcagactggtgatgctgcccaaggtggagaccgaggccctgggcctggccagaagccacggcgagtag

SEQ ID NO: 91594 - DNA, 1410 bp, synthetic construct
  misc_feature 1..1410: note = Description of Artificial Sequence: Synthetic coding sequence
  source 1..1410: mol_type = other DNA
atggtgaactacagctacgacgaggacctggaggagctgtgccccgtgtgcggcgacaaggtgagcggctaccactacggcctgctgacctgcgagagctgcaagggcttcttcaagagaaccgtgcagaacaacaagagatacacctgcatcgagaaccagaactgccagatcgacaagacccagagaaagagatgcccctactgcagattccagaagtgcctgagcgtgggcatgaagctggaggccgtgagagccgacagaatgagaggcggcagaaacaagttcggccccatgtacaagagagacagagccctgaagcagcagaagaaggccctgatcagagccaacggcctgaagctggaggccatgagccaggtgatccaggccatgcccagcgacctgaccatcagcagcgccatccagaacatccacagcgccagcaagggcctgcccctgaaccacgccgccctgccccccaccgactacgacagaagccccttcgtgaccagccccatcagcatgaccatgcccccccacggcagcctgcagggctaccagacctacggccacttccccagcagagccatcaagagcgagtaccccgacccctacaccagcagccccgagagcatcatgggctacagctacatggacagctaccagaccagcagccccgccagcatcccccacctgatcctggagctgctgaagtgcgagcccgacgagccccaggtgcaggccaagatcatggcctacctgcagcaggagcaggccaacagaagcaagcacgagaagctgagcaccttcggcctgatgtgcaagatggccgaccagaccctgttcagcatcgtggagtgggccagaagcagcatcttcttcagagagctgaaggtggacgaccagatgaagctgctgcagaactgctggagcgagctgctgatcctggaccacatctacagacaggtggtgcacggcaaggagggcagcatcttcctggtgaccggccagcaggtggactacagcatcatcgccagccaggccggcgccaccctgaacaacctgatgagccacgcccaggagctggtggccaagctgagaagcctgcagttcgaccagagagagttcgtgtgcctgaagttcctggtgctgttcagcctggacgtgaagaacctggagaacttccagctggtggagggcgtgcaggagcaggtgaacgccgccctgctggactacaccatgtgcaactacccccagcagaccgagaagttcggccagctgctgctgagactgcccgagatcagagccatcagcatgcaggccgaggagtacctgtactacaagcacctgaacggcgacgtgccctacaacaacctgctgatcgagatgctgcacgccaagagagcctag

SEQ ID NO: 91595 - DNA, 681 bp, synthetic construct
  misc_feature 1..681: note = Description of Artificial Sequence: Synthetic coding sequence
  source 1..681: mol_type = other DNA
atgctgctgagactggtgagcaacagctggccccaggtgatcctgccccccagaccccccaaggtgctgggcctgcaggcccccagaagagccagaaagagagccgagggcaccgccagcagcaacgtgttcagcatgttcgaccagagccagatccaggagttcaaggagagcctggccctgagccccagactggagagaaacggcatgatcagcgcccactgcaacctgtgcctgaccggcagcagcaacagccccgccagcgccagccaggccttcaccatcatggaccagaacagagacggcttcatcgacaaggaggacctgagagacaccttcgccgccctgggcagaatcaacgtgaagaacgaggagctggaggccatggtgaaggaggcccccggccccatcaacttcaccgtgttcctgaccatgttcggcgagaagctgaagggcaccgaccccgaggagaccatcctgcacgccttcaaggtgttcgacaccgagggcaagggcttcgtgaaggccgacgtgatcaaggagaagctgatgacccaggccgacagattcagcgaggaggaggtgaagcagatgttcgccgccttcccccccgacgtgtgcggcaacctggactacagaaacctgtgctacgtgatcacccacggcgaggagaaggactag

SEQ ID NO: 91596 - DNA, 1569 bp, synthetic construct
  misc_feature 1..1569: note = Description of Artificial Sequence: Synthetic coding sequence
  source 1..1569: mol_type = other DNA
atggaggagcacggcgtgacccagaccgagcacatggccaccatcgaggcccacgccgtggcccagcaggtgcagcaggtgcacgtggccacctacaccgagcacagcatgctgagcgccgacgaggacagccccagcagccccgaggacaccagctacgacgacagcgacatcctgaacagcaccgccgccgacgaggtgaccgcccacctggccgccgccggccccgtgggcatggccgccgccgccgccgtggccaccggcaagaagagaaagagaccccacgtgttcgagagcaaccccagcatcagaaagagacagcagaccagactgctgagaaagctgagagccaccctggacgagtacaccaccagagtgggccagcaggccatcgtgctgtgcatcagccccagcaagcccaaccccgtgttcaaggtgttcggcgccgcccccctggagaacgtggtgagaaagtacaagagcatgatcctggaggacctggagagcgccctggccgagcacgcccccgccccccaggaggtgaacagcgagctgccccccctgaccatcgacggcatccccgtgagcgtggacaagatgacccaggcccagctgagagccttcatccccgagatgctgaagtacagcaccggcagaggcaagcccggctggggcaaggagagctgcaagcccatctggtggcccgaggacatcccctgggccaacgtgagaagcgacgtgagaaccgaggagcagaagcagagagtgagctggacccaggccctgagaaccatcgtgaagaactgctacaagcagcacggcagagaggacctgctgtacgccttcgaggaccagcagacccagacccaggccaccgccacccacagcatcgcccacctggtgcccagccagaccgtggtgcagaccttcagcaaccccgacggcaccgtgagcctgatccaggtgggcaccggcgccaccgtggccaccctggccgacgccagcgagctgcccaccaccgtgaccgtggcccaggtgaactacagcgccgtggccgacggcgaggtggagcagaactgggccaccctgcagggcggcgagatgaccatccagaccacccaggccagcgaggccacccaggccgtggccagcctggccgaggccgccgtggccgccagccaggagatgcagcagggcgccaccgtgaccatggccctgaacagcgaggccgccgcccacgccgtggccaccctggccgaggccaccctgcagggcggcggccagatcgtgctgagcggcgagaccgccgccgccgtgggcgccctgaccggcgtgcaggacgccaacggcctgttcatggccgacagagccggcagaaagtggatcctgaccgacaaggccaccggcctggtgcagatccccgtgagcatgtaccagaccgtggtgaccagcctggcccagggcaacggccccgtgcaggtggccatggcccccgtgaccaccagaatcagcgacagcgccgtgaccatggacggccaggccgtggaggtggtgaccctggagcagtag

SEQ ID NO: 91597 - DNA, 1314 bp, synthetic construct
  misc_feature 1..1314: note = Description of Artificial Sequence: Synthetic coding sequence
  source 1..1314: mol_type = other DNA
atggaggagcacggcgtgacccagaccgagcacatggccaccatcgaggcccacgccgtggcccagcaggtgcagcaggtgcacgtggccacctacaccgagcacagcatgctgagcgccgacgaggacagccccagcagccccgaggacaccagctacgacgacagcgacatcctgaacagcaccgccgccgacgaggtgaccgcccacctggccgccgccggccccgtgggcatggccgccgccgccgccgtggccaccggcaagaagagaaagagaccccacgtgttcgagagcaaccccagcatcagaaagagacagcagaccagactgctgagaaagctgagagccaccctggacgagtacaccaccagagtgggccagcaggccatcgtgctgtgcatcagccccagcaagcccaaccccgtgttcaaggtgttcggcgccgcccccctggagaacgtggtgagaaagtacaagagcatgatcctggaggacctggagagcgccctggccgagcacgcccccgccccccaggaggtgaacagcgagctgccccccctgaccatcgacggcatccccgtgagcgtggacaagatgacccaggcccagctgagagccttcatccccgagatgctgaagtacagcaccggcagaggcaagcccggctggggcaaggagagctgcaagcccatctggtggcccgaggacatcccctgggccaacgtgagaagcgacgtgagaaccgaggagcagaagcagagagtgggcaccggcgccaccgtggccaccctggccgacgccagcgagctgcccaccaccgtgaccgtggcccaggtgaactacagcgccgtggccgacggcgaggtggagcagaactgggccaccctgcagggcggcgagatgaccatccagaccacccaggccagcgaggccacccaggccgtggccagcctggccgaggccgccgtggccgccagccaggagatgcagcagggcgccaccgtgaccatggccctgaacagcgaggccgccgcccacgccgtggccaccctggccgaggccaccctgcagggcggcggccagatcgtgctgagcggcgagaccgccgccgccgtgggcgccctgaccggcgtgcaggacgccaacggcctggtgcagatccccgtgagcatgtaccagaccgtggtgaccagcctggcccagggcaacggccccgtgcaggtggccatggcccccgtgaccaccagaatcagcgacagcgccgtgaccatggacggccaggccgtggaggtggtgaccctggagcagtag

SEQ ID NO: 91598 - DNA, 1512 bp, synthetic construct; identical to SEQ ID NO: 76286
  misc_feature 1..1512: note = Description of Artificial Sequence: Synthetic coding sequence
  source 1..1512: mol_type = other DNA

SEQ ID NO: 91599 - DNA, 1569 bp, synthetic construct; identical to SEQ ID NO: 91596
  misc_feature 1..1569: note = Description of Artificial Sequence: Synthetic coding sequence
  source 1..1569: mol_type = other DNA

SEQ ID NO: 91600 - DNA, 1512 bp, synthetic construct; identical to SEQ ID NO: 76286
  misc_feature 1..1512: note = Description of Artificial Sequence: Synthetic coding sequence
  source 1..1512: mol_type = other DNA

SEQ ID NO: 91601 - DNA, 633 bp, synthetic construct
  misc_feature 1..633: note = Description of Artificial Sequence: Synthetic coding sequence
  source 1..633: mol_type = other DNA
atggaggagcacggcgtgacccagaccgagcacatggccaccatcgaggcccacgccgtggcccagcaggtgcagcaggtgcacgtggccacctacaccgagcacagcatgctgagcgccgacgaggacagccccagcagccccgaggacaccagctacgacgacagcgacatcctgaacagcaccgccgccgacgaggtgaccgcccacctggccgccgccggccccgtgggcatggccgccgccgccgccgtggccaccggcaagaagagaaagagaccccacgtgttcgagagcaaccccagcatcagaaagagacagcagaccagactgctgagaaagctgagagccaccctggacgagtacaccaccagagtgggccagcaggccatcgtgctgtgcatcagccccagcaagcccaaccccgtgttcaaggtgttcggcgccgcccccctggagaacgtggtgagaaagtacaagagcatgatcctggaggacctggagagcgccctggccgagcacgcccccgccccccaggaggtgaacagcgagctgccccccctgaccatcgacggcatccccgtgagcgtggacaagatgacccaggcccagctgagagccttcatcccctag

SEQ ID NO: 91602 - DNA, 1029 bp, synthetic construct
  misc_feature 1..1029: note = Description of Artificial Sequence: Synthetic coding sequence
  source 1..1029: mol_type = other DNA
atgatcctggaggacctggagagcgccctggccgagcacgcccccgccccccaggaggtgaacagcgagctgccccccctgaccatcgacggcatccccgtgagcgtggacaagatgacccaggcccagctgagagccttcatccccgagatgctgaagtacagcaccggcagaggcaagcccggctggggcaaggagagctgcaagcccatctggtggcccgaggacatcccctgggccaacgtgagaagcgacgtgagaaccgaggagcagaagcagagagtgagctggacccaggccctgagaaccatcgtgaagaactgctacaagcagcacggcagagaggacctgctgtacgccttcgaggaccagcagacccagacccaggccaccgccacccacagcatcgcccacctggtgcccagccagaccgtggtgcagaccttcagcaaccccgacggcaccgtgagcctgatccaggtgggcaccggcgccaccgtggccaccctggccgacgccagcgagctgcccaccaccgtgaccgtggcccaggtgaactacagcgccgtggccgacggcgaggtggagcagaactgggccaccctgcagggcggcgagatgaccatccagaccacccaggccagcgaggccacccaggccgtggccagcctggccgaggccgccgtggccgccagccaggagatgcagcagggcgccaccgtgaccatggccctgaacagcgaggccgccgcccacgccgtggccaccctggccgaggccaccctgcagggcggcggccagatcgtgctgagcggcgagaccgccgccgccgtgggcgccctgaccggcgtgcaggacgccaacggcctggtgcagatccccgtgagcatgtaccagaccgtggtgaccagcctggcccagggcaacggccccgtgcaggtggccatggcccccgtgaccaccagaatcagcgacagcgccgtgaccatggacggccaggccgtggaggtggtgaccctggagcagtag

SEQ ID NO: 91603 - DNA, 1860 bp, synthetic construct
  misc_feature 1..1860: note = Description of Artificial Sequence: Synthetic coding sequence
  source 1..1860: mol_type = other DNA
atggccgacgagggcaagagctacagcgagcacgacgacgagagagtgaacttcccccagagaaagaagaagggcagaggccccttcagatggaagtacggcgagggcaacagaagaagcggcagaggcggcagcggcatcagaagcagcagactggaggaggacgacggcgacgtggccatgagcgacgcccaggacggccccagagtgagatacaacccctacaccaccagacccaacagaagaggcgacacctggcacgacagagacagaatccacgtgaccgtgagaagagacagagccccccccgagagaggcggcgccggcaccagccaggacggcaccagcaagaactggttcaagatcaccatcccctacggcagaaagtacgacaaggcctggctgctgagcatgatccagagcaagtgcagcgtgcccttcacccccatcgagttccactacgagaacaccagagcccagttcttcgtggaggacgccagcaccgccagcgccctgaaggccgtgaactacaagatcctggacagagagaacagaagaatcagcatcatcatcaacagcagcgcccccccccacaccatcctgaacgagctgaagcccgagcaggtggagcagctgaagctgatcatgagcaagagatacgacggcagccagcaggccctggacctgaagggcctgagaagcgaccccgacctggtggcccagaacatcgacgtggtgctgaacagaagaagctgcatggccgccaccctgagaatcatcgaggagaacatccccgagctgctgagcctgaacctgagcaacaacagactgtacagactggacgacatgagcagcatcgtgcagaaggcccccaacctgaagatcctgaacctgagcggcaacgagctgaagagcgagagagagctggacaagatcaagggcctgaagctggaggagctgtggctggacggcaacagcctgtgcgacaccttcagagaccagagcacctacatcagcgccatcagagagagattccccaagctgctgagactggacggccacgagctgcccccccccatcgccttcgacgtggaggcccccaccaccctgcccccctgcaagggcagctacttcggcaccgagaacctgaagagcctggtgctgcacttcctgcagcagtactacgccatctacgacagcggcgacagacagggcctgctggacgcctaccacgacggcgcctgctgcagcctgagcatccccttcatcccccagaaccccgccagaagcagcctggccgagtacttcaaggacagcagaaacgtgaagaagctgaaggaccccaccctgagattcagactgctgaagcacaccagactgaacgtggtggccttcctgaacgagctgcccaagacccagcacgacgtgaacagcttcgtggtggacatcagcgcccagaccagcaccctgctgtgcttcagcgtgaacggcgtgttcaaggaggtggacggcaagagcagagacagcctgagagccttcaccagaaccttcatcgccgtgcccgccagcaacagcggcctgtgcatcgtgaacgacgagctgttcgtgagaaacgccagcagcgaggagatccagagagccttcgccatgcccgcccccacccccagcagcagccccgtgcccaccctgagccccgagcagcaggagatgctgcaggccttcagcacccagagcggcatgaacctggagtggagccagaagtgcctgcaggacaacaactgggactacaccagaagcgcccaggccttcacccacctgaaggccaagggcgagatccccgaggtggccttcatgaagtag

SEQ ID NO: 91604 - DNA, 1071 bp, synthetic construct
  misc_feature 1..1071: note = Description of Artificial Sequence: Synthetic coding sequence
  source 1..1071: mol_type = other DNA
atggccgacgagggcaagagctacagcgagcacgacgacgagagagtgaacttcccccagagaaagaagaagggcagaggccccttcagatggaagtacggcgagggcaacagaagaagcggcagaggcggcagcggcatcagaagcagcagactggaggaggacgacggcgacgtggccatgagcgacgcccaggacggccccagagtgagatacaacccctacaccaccagacccaacagaagaggcgacacctggcacgacagagacagaatccacgtgaccgtgagaagagacagagccccccccgagagaggcggcgccggcaccagccaggacggcaccagcaagaactggttcaagatcaccatcccctacggcagaaagtacgacaaggcctggctgctgagcatgatccagagcaagtgcagcgtgcccttcacccccatcgagttccactacgagaacaccagagcccagttcttcgtggaggacgccagcaccgccagcgccctgaaggccgtgaactacaagatcctggacagagagaacagaagaatcagcatcatcatcaacagcagcgcccccccccacaccatcctgaacgagctgaagcccgagcaggtggagcagctgaagctgatcatgagcaagagatacgacggcagccagcaggccctggacctgaagggcctgagaagcgaccccgacctggtggcccagaacatcgacgtggtgctgaacagaagaagctgcatggccgccaccctgagaatcatcgaggagaacatccccgagctgctgagcctgaacctgagcaacaacagactgtacagactggacgacatgagcagcatcgtgcagaaggcccccaacctgaagatcctgaacctgagcggcaacgagctgaagagcgagagagagctggacaagatcaagggcctgaagctggaggagctgtggctggacggcaacagcctgtgcgacaccttcagagaccagagcacctacatcagaagcgtggtggcctgcgtgagcccccccggcgacctgcaccccctgggcggctag

SEQ ID NO: 91605 - DNA, 1071 bp, synthetic construct; identical to SEQ ID NO: 91604
  misc_feature 1..1071: note = Description of Artificial Sequence: Synthetic coding sequence
  source 1..1071: mol_type = other DNA

SEQ ID NO: 91606 - DNA, 1860 bp, synthetic construct; identical to SEQ ID NO: 91603
  misc_feature 1..1860: note = Description of Artificial Sequence: Synthetic coding sequence
  source 1..1860: mol_type = other DNA

SEQ ID NO: 91607 - DNA, 1881 bp, synthetic construct
  misc_feature 1..1881: note = Description of Artificial Sequence: Synthetic coding sequence
  source 1..1881: mol_type = other DNA
atgtgcagcaccctgaagaagtgcggcacctacagaaccgaggtggccgagtgccacgaccacggcagcaccttccagggcagaaagaagggcggcagcagcttcagagacaacttcgacaagagaagctgccactacgagcacggcggctacgagagaccccccagccactgccaggagaacgacggcagcgtggagatgagagacgtgcacaaggaccagcagctgagacacaccccctacagcatcagatgcgagagaagaatgaagtggcacagcgaggacgagatcagaatcaccacctggagaaacagaaagccccccgagagaaagatgagccagaacacccaggacggctacaccagaaactggttcaaggtgaccatcccctacggcatcaagtacgacaaggcctggctgatgaacagcatccagagccactgcagcgacagattcacccccgtggacttccactacgtgagaaacagagcctgcttcttcgtgcaggacgccagcgccgccagcgccctgaaggacgtgagctacaagatctacgacgacgagaaccagaagatctgcatcttcgtgaaccacagcaccgccccctacagcgtgaagaacaagctgaagcccggccagatggagatgctgaagctgaccatgaacaagagatacaacgtgagccagcaggccctggacctgcagaacctgagattcgaccccgacctgatgggcagagacatcgacatcatcctgaacagaagaaactgcatggccgccaccctgaagatcatcgagagaaacttccccgagctgctgagcctgaacctgtgcaacaacaagctgtaccagctggacggcctgagcgacatcaccgagaaggcccccaaggtgaagaccctgaacctgagcaagaacaagctggagagcgcctgggagctgggcaaggtgaagggcctgaagctggaggagctgtggctggagggcaaccccctgtgcagcaccttcagcgaccagagcgcctacgtgagcgccatcagagactgcttccccaagctgctgagactggacggcagagagctgagcgcccccgtgatcgtggacatcgacagcagcgagaccatgaagccctgcaaggagaacttcaccggcagcgagaccctgaagcacctggtgctgcagttcctgcagcagtactacagcatctacgacagcggcgacagacagggcctgctgggcgcctaccacgacgaggcctgcttcagcctggccatccccttcgaccccaaggacagcgcccccagcagcctgtgcaagtacttcgaggacagcagaaacatgaagaccctgaaggacccctacctgaagggcgagctgctgagaagaaccaagagagacatcgtggacagcctgagcgccctgcccaagacccagcacgacctgagcagcatcctggtggacgtgtggtgccagaccgagagaatgctgtgcttcagcgtgaacggcgtgttcaaggaggtggagggccagagccagggcagcgtgctggccttcaccagaaccttcatcgccacccccggcagcagcagcagcctgtgcatcgtgaacgacgagctgttcgtgagagacgccagcccccaggagacccagagcgccttcagcatccccgtgagcaccctgagcagcagcagcgagcccagcctgagccaggagcagcaggagatggtgcaggccttcagcgcccagagcggcatgaagctggagtggagccagaagtgcctgcaggacaacgagtggaactacaccagagccggccaggccttcaccatgctgcagaccgagggcaagatccccgccgaggccttcaagcagatcagctag

SEQ ID NO: 91608 - DNA, 1881 bp, synthetic construct; identical to SEQ ID NO: 91607
  misc_feature 1..1881: note = Description of Artificial Sequence: Synthetic coding sequence
  source 1..1881: mol_type = other DNA

SEQ ID NO: 91609 - DNA, 1881 bp, synthetic construct; identical to SEQ ID NO: 91607
  misc_feature 1..1881: note = Description of Artificial Sequence: Synthetic coding sequence
  source 1..1881: mol_type = other DNA

SEQ ID NO: 91610 - DNA, 1230 bp, synthetic construct
  misc_feature 1..1230: note = Description of Artificial Sequence: Synthetic coding sequence
  source 1..1230: mol_type = other DNA
atgaagtggcacagcgaggacgagatcagaatcaccacctggagaaacagaaagccccccgagagaaagatgagccagaacacccaggacggctacaccagaaactggttcaaggtgaccatcccctacggcatcaagtacgacaaggcctggctgatgaacagcatccagagccactgcagcgacagattcacccccgtggacttccactacgtgagaaacagagcctgcttcttcgtgcaggacgccagcgccgccagcgccctgaaggacgtgagctacaagatctacgacgacgagaaccagaagatctgcatcttcgtgaaccacagcaccgccccctacagcgtgaagaacaagctgaagcccggccagatggagatgctgaagctgaccatgaacaagagatacaacgtgagccagcaggccctggacctgcagaacctgagattcgaccccgacctgatgggcagagacatcgacatcatcctgaacagaagaaactgcatggccgccaccctgaagatcatcgagagaaacttccccgagctgctgagcctgaacctgtgcaacaacaagctgtaccagctggacggcctgagcgacatcaccgagaaggcccccaaggtgaagaccctgaacctgagcaagaacaagctggagagcgcctgggagctgggcaaggtgaagggcctgaagctggaggagctgtggctggagggcaaccccctgtgcagcaccttcagcgaccagagcgcctacgtgagcgccatcagagactgcttccccaagctgctgagactggacggcagagagctgagcgcccccgtgatcgtggacatcgacagcagcgagaccatgaagccctgcaaggagaacttcaccggcagcgagaccctgaagcacctggtgctgcagttcctgcagcagtactacagcatctacgacagcggcgacagacagggcctgctgggcgcctaccacgacgaggcctgcttcagcctggccatccccttcgaccccaaggacagcgcccccagcagcctgtgcaagtacttcgaggacagcagaaacatgaagaccctgaaggacccctacctgaagggcgagctgctgagaagaaccaagagagacatcgtggacagcctgagcgccctgcccaagacccagcacgacctgagcagcatcctggtggacgtgtggtgccagaccgtgcccagcggccagtag

SEQ ID NO: 91611 - DNA, 1881 bp, synthetic construct; identical to SEQ ID NO: 91607
  misc_feature 1..1881: note = Description of Artificial Sequence: Synthetic coding sequence
  source 1..1881: mol_type = other DNA

SEQ ID NO: 91612 - DNA, 1596 bp, synthetic construct
  misc_feature 1..1596: note = Description of Artificial Sequence: Synthetic coding sequence
  source 1..1596: mol_type = other DNA
atgagcctgcccagcggccacaccaccggccacaccgaccaggtggtgcagagaagagccagatgctgggacatctaccagagaagattcagcagcagaagcgagcccgtgaaccccggcatgcacagcagcagccaccagcagcaggacggcgacgccgccatgcacggcgcccacatggacagccccgtgagatacaccccctacaccatcagcccctacaacagaaagggcagcttcagaaagcaggaccagacccacgtgaacatggagagagagcagaagccccccgagagaagaatggagggcaacatgcccgacggcaccctgggcagctggttcaagatcaccgtgcccttcggcatcaagtacaacgagaagtggctgctgaacctgatccagaacgagtgcagcgtgcccttcgtgcccgtggagttccactacgagaacatgcacgccagcttcttcgtggagaacgccagcatcgcctacgccctgaagaacgtgagcggcaagatctgggacgaggacaacgagaagatcagcatcttcgtgaaccccgccggcatcccccacttcgtgcacagagagctgaagagcgagaaggtggagcagatcaagctggccatgaaccagcagtgcgacgtgagccaggaggccctggacatccagagactgcccttctaccccgacatggtgaacagagacaccaagatggccagcaaccccagaaagtgcatggccgccagcctggacgtgcacgaggagaacatccccaccgtgatgagcgccggcgagatggacaagtggaagggcatcgagcccggcgagaagtgcgccgacagaagccccgtgtgcaccaccttcagcgacaccagcagcaacatcaacagcatcctggagctgttccccaagctgctgtgcctggacggccagcagagccccagagccaccctgtgcggcaccgaggcccacaagagactgcccacctgcaagggcagcttcttcggcagcgagatgctgaagaacctggtgctgcagttcctgcagcagtactacctgatctacgacagcggcgacagacagggcctgctgagcgcctaccacgacgaggcctgcttcagcctgagcatccccttcaaccccgaggacagcgcccccagcagcttctgcaagttcttcaaggacagcagaaacatcaagatcctgaaggacccctacctgagaggcgagctgctgaagcacaccaagctggacatcgtggacagcctgagcgccctgcccaagacccagcacgacctgagcagcttcctggtggacatgtggtaccagaccgagtggatgctgtgcttcagcgtgaacggcgtgttcaaggaggtggagggccagagccagggcagcgtgctggccttcaccagaaccttcatcgccacccccggcagcagcagcagcctgtgcatcgtgaacgacaagctgttcgtgagagacaccagccaccagggcacccagagcgccctgttcaccctggtgcccaccgccttcagcagcagcgtgcccgccttcagccaggagcagcagaagatgctgcccagctag

SEQ ID NO: 91613 - DNA, 702 bp, synthetic construct
  misc_feature 1..702: note = Description of Artificial Sequence: Synthetic coding sequence
  source 1..702: mol_type = other DNA
atggagagagagcagaagccccccgagagaagaatggagggcaacatgcccgacggcaccctgggcagctggttcaagatcaccgtgcccttcggcatcaagtacaacgagaagtggctgctgaacctgatccagaacgagtgcagcgtgcccttcgtgcccgtggagttccactacgagaacatgcacgccagcttcttcgtggagaacgccagcatcgcctacgccctgaagaacgtgagcggcaagatctgggacgaggacaacgagaagatcagcatcttcgtgaaccccgccggcatcccccacttcgtgcacagagagctgaagagcgagaaggtggagcagatcaagctggccatgaaccagcagtgcgacgtgagccaggaggccctggacatccagagactgcccttctaccccgacatggtgaacagagacaccaagatggccagcaaccccagaaagtgcatggccgccagcctggacgtgcacgaggagaacatccccaccgtgatgagcgccggcgagatggacaagtggaagggcatcgagcccggcgagaagtgcgccgacagaagccccgtgtgcaccaccttcagcgacaccagcagcaacatcaagagcgtggtgcccagcgtgaccacctgggaccccgacctgtgcctgatcgcccccttctgcagaagaagacagcactag

SEQ ID NO: 91614 - DNA, 612 bp, synthetic construct
  misc_feature 1..612: note = Description of Artificial Sequence: Synthetic coding sequence
  source 1..612: mol_type = other DNA
atggccagcagccaccccgagcagctgtacgtggtgctgaagcccaccagaggctaccagcccgtgagatactacctgatctacgacagcggcgacagacagggcctgctgagcgcctaccacgacgaggcctgcttcagcctgagcatccccttcaaccccgaggacagcgcccccagcagcttctgcaagttcttcaaggacagcagaaacatcaagatcctgaaggacccctacctgagaggcgagctgctgaagcacaccaagctggacatcgtggacagcctgagcgccctgcccaagacccagcacgacctgagcagcttcctggtggacatgtggtaccagaccgagtggatgctgtgcttcagcgtgaacggcgtgttcaaggaggtggagggccagagccagggcagcgtgctggccttcaccagaaccttcatcgccacccccggcagcagcagcagcctgtgcatcgtgaacgacaagctgttcgtgagagacaccagccaccagggcacccagagcgccctgttcaccctggtgcccaccgccttcagcagcagcgtgcccgccttcagccaggagcagcagaagatgctgcccagctag

SEQ ID NO: 91615 - DNA, 1086 bp, synthetic construct
  misc_feature 1..1086: note = Description of Artificial Sequence: Synthetic coding sequence
  source 1..1086: mol_type = other DNA
tgaaacgagaagtggctgctgaacctgatccagaacgagtgcagcgtgcccttcgtgcccgtggagttccactacgagaacatgcacgccagcttcttcgtggagaacgccagcatcgcctacgccctgaagaacgtgagcggcaagatctgggacgaggacaacgagaagatcagcatcttcgtgaaccccgccggcatcccccacttcgtgcacagagagctgaagagcgagaaggtggagcagatcaagctggccatgaaccagcagtgcgacgtgagccaggaggccctggacatccagagactgcccttctaccccgacatggtgaacagagacaccaagatggccagcaaccccagaaagtgcatggccgccagcctggacgtgcacgaggagaacatccccaccgtgatgagcgccggcgagatggacaagtggaagggcatcgagcccggcgagaagtgcgccgacagaagccccgtgtgcaccaccttcagcgacaccagcagcaacatcaacagcatcctggagctgttccccaagctgctgtgcctggacggccagcagagccccagagccaccctgtgcggcaccgaggcccacaagagactgcccacctgcaagggcagcttcttcggcagcgagatgctgaagaacctggtgctgcagttcctgcagcagtactacctgatctacgacagcggcgacagacagggcctgctgagcgcctaccacgacgaggcctgcttcagcctgagcatccccttcaaccccgaggacagcgcccccagcagcttctgcaagttcttcaaggacagcagaaacatcaagatcctgaaggacccctacctgagaggcgagctgctgaagcacaccaagctggacatcgtggacagcctgagcgccctgcccaagacccagcacgacctgagcagcttcctggtggacatgtggtaccagaccgagtggatgctgtgcttcagcgtgaacggcgtgttcaaggaggtgagcggcttctgcagcagactgcaccccgacctgcactgctacccctggcagcagttccagagcgtgcacagatag

SEQ ID NO: 91616 - DNA, 1194 bp, synthetic construct
  misc_feature 1..1194: note = Description of Artificial Sequence: Synthetic coding sequence
  source 1..1194: mol_type = other DNA
atgagaagaaacacccaggacgagaacatgagaaagtggttcaaggtgaccatcccctacggcatcaagtacgacaaggcctggctgatgaacagcatccagagcaactgcagcgtgcccttcacccccgtggacttccactacatcagaaacagagcctgcttcttcgtgcaggtggccagcgccgccagcgccctgaaggacgtgagctacaagatctacgacgacgagaaccagaagatctgcatcttcgtgagccacttcaccgccccctacagcgtgaagaacaagctgaagcccggccagatggagatgctgaagctgaccatgaacaagagatacaacgtgagccagcaggccctggacctgcagaacctgagattcgaccccgacctgatgggcagagacatcgacatcatcctgaacagaagaaactgcatggccgccaccctgaagatcaccgagagaaacttccccgagctgctgagcctgaacctgtgcaacaacaagctgtaccagctggacggcctgagcgacatcaccgagaaggcccccaaggtgaagaccctgaacctgagcaagaacaagctggagagcgcctgggagctgggcaaggtgaagggcctgaagctggaggagctgtggctggagggcaaccccctgtgcagcaccttcagcgaccagagcgcctacgtgagcgccatcagagactgcttccccaagctgctgagactggacggcagagagctgagcgcccccgtgatcgtggacatcgacagcagcgagaccatgaagccctgcaaggagaacttcaccggcagcgagaccctgaagcacctggtgctgcagttcctgcagcagagcaacctgtgcaagtacttcaaggacagcagaaacatcaagatcctgaaggacccctacctgcagagaaagctgctgaagcacaccaagtgccccagaaacgtggacagcctgagcgccctgcccgagacccagcacgacttcaccagcatcctggtggacatgtggtaccagaccgtgaacacctgcttcctgcccagagccggccccgagagccagagatggtggtgcctgctgagcctgaagtggaaggacggcctgagagtgctgatcctgcccagctgcggccccagcagcctgcccctggccgccatccccgtgtgcgccagctag

SEQ ID NO: 91617 - DNA, 1194 bp, synthetic construct; identical to SEQ ID NO: 91616
  misc_feature 1..1194: note = Description of Artificial Sequence: Synthetic coding sequence
  source 1..1194: mol_type = other DNA

SEQ ID NO: 91618 - DNA, 1098 bp, synthetic construct
  misc_feature 1..1098: note = Description of Artificial Sequence: Synthetic coding sequence
  source 1..1098: mol_type = other DNA
atgagaagaaacacccaggacgagaacatgagaaagtggttcaaggtgaccatcccctacggcatcaagtacgacaaggcctggctgatgaacagcatccagagcaactgcagcgtgcccttcacccccgtggacttccactacatcagaaacagagcctgcttcttcgtgcaggtggccagcgccgccagcgccctgaaggacgtgagctacaagatctacgacgacgagaaccagaagatctgcatcttcgtgagccacttcaccgccccctacagcgtgaagaacaagctgaagcccggccagatggagatgctgaagctgaccatgaacaagagatacaacgtgagccagcaggccctggacctgcagaacctgagattcgaccccgacctgatgggcagagacatcgacatcatcctgaacagaagaaactgcatggccgccaccctgaagatcaccgagagaaacttccccgagctgctgagcctgaacctgtgcaacaacaagctgtaccagctggacggcctgagcgacatcaccgagaaggcccccaaggtgaagaccctgaacctgagcaagaacaagctggagagcgcctgggagctgggcaaggtgaagggcctgaagctggaggagctgtggctggagggcaaccccctgtgcagcaccttcagcgaccagagcgcctacgtgagcgccatcagagactgcttccccaagctgctgagactggacggcagagagctgagcgcccccgtgatcgtggacatcgacagcagcgagaccatgaagccctgcaaggagaacttcaccggcagcgagaccctgaagcacctggtgctgcagttcctgcagcagagcaacctgtgcaagtacttcaaggacagcagaaacatcaagatcctgaaggacccctacctgcagagaaagctgctgaagcacaccaagtgccccagaaacgtggacagcctgagcgccctgcccgagacccagcacgacttcaccagcatcctggtggacatgtggtaccagaccgtgaacacctgcttcctgcccagagccggccccgagagccagagcctgagacccctgtag

SEQ ID NO: 91619 - DNA, 1098 bp, synthetic construct; identical to SEQ ID NO: 91618
  misc_feature 1..1098: note = Description of Artificial Sequence: Synthetic coding sequence
  source 1..1098: mol_type = other DNA

SEQ ID NO: 91620 - DNA, 1044 bp, synthetic construct
  misc_feature 1..1044: note = Description of Artificial Sequence: Synthetic coding sequence
  source 1..1044: mol_type = other DNA
atggagcagtacaccgccaacagcaacagcagcaccgagcagatcgtggtgcaggccggccagatccagcagcagcagcagggcggcgtgaccgccgtgcagctgcagaccgaggcccaggtggccagcgccagcggccagcaggtgcagaccctgcaggtggtgcagggccagcccctgatggtgcaggtgagcggcggccagctgatcaccagcaccggccagcccatcatggtgcaggccgtgcccggcggccagggccagaccatcatgcaggtgcccgtgagcggcacccagggcctgcagcagatccagctggtgccccccggccagatccagatccagggcggccaggccgtgcaggtgcagggccagcagggccagacccagcagatcatcatccagcagccccagaccgccgtgaccgccggccagacccagacccagcagcagatcgccgtgcagggccagcaggtggcccagaccgccgagggccagaccatcgtgtaccagcccgtgaacgccgacggcaccatcctgcagcaggtgaccgtgcccgtgagcggcatgatcaccatccccgccgccagcctggccggcgcccagatcgtgcagaccggcgccaacaccaacaccaccagcagcggccagggcaccgtgaccgtgaccctgcccgtggccggcaacgtggtgaacagcggcggcatggtgatgatggtgcccggcgccggcagcgtgcccgccatccagagaatccccctgcccggcgccgagatgctggaggaggagcccctgtacgtgaacgccaagcagtaccacagaatcctgaagagaagacaggccagagccaagctggaggccgagggcaagatccccaaggagagaagaaagtacctgcacgagagcagacacagacacgccatggccagaaagagaggcgagggcggcagattcttcagccccaaggagaaggacagcccccacatgcaggaccccaaccaggccgacgaggaggccatgacccagatcatcagagtgagctag

SEQ ID NO: 91621 - DNA, 957 bp, synthetic construct
  misc_feature 1..957: note = Description of Artificial Sequence: Synthetic coding sequence
  source 1..957: mol_type = other DNA
atggagcagtacaccgccaacagcaacagcagcaccgagcagatcgtggtgcaggccggccagatccagcagcaggtgcagggccagcccctgatggtgcaggtgagcggcggccagctgatcaccagcaccggccagcccatcatggtgcaggccgtgcccggcggccagggccagaccatcatgcaggtgcccgtgagcggcacccagggcctgcagcagatccagctggtgccccccggccagatccagatccagggcggccaggccgtgcaggtgcagggccagcagggccagacccagcagatcatcatccagcagccccagaccgccgtgaccgccggccagacccagacccagcagcagatcgccgtgcagggccagcaggtggcccagaccgccgagggccagaccatcgtgtaccagcccgtgaacgccgacggcaccatcctgcagcaggtgaccgtgcccgtgagcggcatgatcaccatccccgccgccagcctggccggcgcccagatcgtgcagaccggcgccaacaccaacaccaccagcagcggccagggcaccgtgaccgtgaccctgcccgtggccggcaacgtggtgaacagcggcggcatggtgatgatggtgcccggcgccggcagcgtgcccgccatccagagaatccccctgcccggcgccgagatgctggaggaggagcccctgtacgtgaacgccaagcagtaccacagaatcctgaagagaagacaggccagagccaagctggaggccgagggcaagatccccaaggagagaagaaagtacctgcacgagagcagacacagacacgccatggccagaaagagaggcgagggcggcagattcttcagccccaaggagaaggacagcccccacatgcaggaccccaaccaggccgacgaggaggccatgacccagatcatcagagtgagctag

SEQ ID NO: 91622 - DNA, 624 bp, synthetic construct
  misc_feature 1..624: note = Description of Artificial Sequence: Synthetic coding sequence
  source 1..624: mol_type = other DNA
atgaccatggacggcgacagcagcaccaccgacgccagccagctgggcatcagcgccgactacatcggcggcagccactacgtgatccagccccacgacgacaccgaggacagcatgaacgaccacgaggacaccaacggcagcaaggagagcttcagagagcaggacatctacctgcccatcgccaacgtggccagaatcatgaagaacgccatcccccagaccggcaagatcgccaaggacgccaaggagtgcgtgcaggagtgcgtgagcgagttcatcagcttcatcaccagcgaggccagcgagagatgccaccaggagaagagaaagaccatcaacggcgaggacatcctgttcgccatgagcaccctgggcttcgacagctacgtggagcccctgaagctgtacctgcagaagttcagagaggccatgaagggcgagaagggcatcggcggcgccgtgaccgccaccgacggcctgagcgaggagctgaccgaggaggccttcaccaaccagctgcccgccggcctgatcaccaccgacggccagcagcagaacgtgatggtgtacaccaccagctaccagcagatcagcggcgtgcagcagatccagttcagctag

SEQ ID NO: 91623 - DNA, 624 bp, synthetic construct; identical to SEQ ID NO: 91622
  misc_feature 1..624: note = Description of Artificial Sequence: Synthetic coding sequence
  source 1..624: mol_type = other DNA

SEQ ID NO: 91624 - DNA, 1377 bp, synthetic construct
  misc_feature 1..1377: note = Description of Artificial Sequence: Synthetic coding sequence
  source 1..1377: mol_type = other DNA
atgagcaccgagggcggcttcggcggcaccagcagcagcgacgcccagcagagcctgcagagcttctggcccagagtgatggaggagatcagaaacctgaccgtgaaggacttcagagtgcaggagctgcccctggccagaatcaagaagatcatgaagctggacgaggacgtgaagatgatcagcgccgaggcccccgtgctgttcgccaaggccgcccagatcttcatcaccgagctgaccctgagagcctggatccacaccgaggacaacaagagaagaaccctgcagagaaacgacatcgccatggccatcaccaagttcgaccagttcgacttcctgatcgacatcgtgcccagagacgagctgaagccccccaagagacaggaggaggtgagacagagcgtgacccccgccgagcccgtgcagtactacttcaccctggcccagcagcccaccgccgtgcaggtgcagggccagcagcagggccagcagaccaccagcagcaccaccaccatccagcccggccagatcatcatcgcccagccccagcagggccagaccacccccgtgaccatgcaggtgggcgagggccagcaggtgcagatcgtgcaggcccagccccagggccaggcccagcaggcccagagcggcaccggccagaccatgcaggtgatgcagcagatcatcaccaacaccggcgagatccagcagatccccgtgcagctgaacgccggccagctgcagtacatcagactggcccagcccgtgagcggcacccaggtggtgcagggccagatccagaccctggccaccaacgcccagcagggccagagaaacgccagccagggcaagcccagaagatgcctgaaggagaccctgcagatcacccagaccgaggtgcagcagggccagcagcagttcagccagttcaccgacggccagagaaacagcgtgcagcaggccagagtgagcgagctgaccggcgaggccgagcccagagaggtgaaggccaccggcaacagcaccccctgcaccagcagcctgcccaccacccacccccccagccacagagccggcgccagctgcgtgtgctgcagccagccccagcagagcagcaccagccccccccccagcgacgccctgcagtgggtggtggtggaggtgagcggcacccccaaccagctggagacccacagagagctgcacgcccccctgcccggcatgaccagcctgagccccctgcaccccagccagcagctgtaccagatccagcaggtgaccatgcccgccggccaggacctggcccagcccatgttcatccagagcgccaaccagcccagcgacggccaggccccccaggtgaccggcgactag

SEQ ID NO: 91625 - DNA, 1008 bp, synthetic construct
  misc_feature 1..1008: note = Description of Artificial Sequence: Synthetic coding sequence
  source 1..1008: mol_type = other DNA
atgagcaccgagggcggcttcggcggcaccagcagcagcgacgcccagcagagcctgcagagcttctggcccagagtgatggaggagatcagaaacctgaccgtgaaggacttcagagtgcaggagctgcccctggccagaatcaagaagatcatgaagctggacgaggacgtgaagatgatcagcgccgaggcccccgtgctgttcgccaaggccgcccagatcttcatcaccgagctgaccctgagagcctggatccacaccgaggacaacaagagaagaaccctgcagagaaacgacatcgccatggccatcaccaagttcgaccagttcgacttcctgatcgacatcgtgcccagagacgagctgaagccccccaagagacaggaggaggtgagacagagcgtgacccccgccgagcccgtgcagtactacttcaccctggcccagcagcccaccgccgtgcaggtgcagggccagcagcagggccagcagaccaccagcagcaccaccaccatccagcccggccagatcatcatcgcccagccccagcagggccagaccacccccgtgaccatgcaggtgggcgagggccagcaggtgcagatcgtgcaggcccagccccagggccaggcccagcaggcccagagcggcaccggccagaccatgcaggtgatgcagcagatcatcaccaacaccggcgagatccagcagatccccgtgcagctgaacgccggccagctgcagtacatcagactggcccagcccgtgagcggcacccaggtggtgcagggccagatccagaccctggccaccaacgcccagcagatcacccagaccgaggtgcagcagggccagcagcagttcagccagttcaccgacggccagcagctgtaccagatccagcaggtgaccatgcccgccggccaggacctggcccagcccatgttcatccagagcgccaaccagcccagcgacggccaggccccccaggtgaccggcgactag

SEQ ID NO: 91626 - DNA, 1320 bp, synthetic construct
  misc_feature 1..1320: note = Description of Artificial Sequence: Synthetic coding sequence
  source 1..1320: mol_type = other DNA
atgagcaccgagggcggcttcggcggcaccagcagcagcgacgcccagcagagcctgcagagcttctggcccagagtgatggaggagatcagaaacctgaccgtgaaggacttcagagtgcaggagctgcccctggccagaatcaagaagatcatgaagctggacgaggacgtgaagatgatcagcgccgaggcccccgtgctgttcgccaaggccgcccagatcttcatcaccgagctgaccctgagagcctggatccacaccgaggacaacaagagaagaaccctgcagagaaacgacatcgccatggccatcaccaagttcgaccagttcgacttcctgatcgacatcgtgcccagagacgagctgaagccccccaagagacaggaggaggtgagacagagcgtgacccccgccgagcccgtgcagtactacttcaccctggcccagcagcccaccgccgtgcaggtgcagggccagcagcagggccagcagaccaccagcagcaccaccaccatccagcccggccagatcatcatcgcccagccccagcagggccagaccacccccgtgaccatgcaggtgggcgagggccagcaggtgcagatcgtgcaggcccagccccagggccaggcccagcaggcccagagcggcaccggccagaccatgcaggtgatgcagcagatcatcaccaacaccggcgagatccagcagatccccgtgcagctgaacgccggccagctgcagtacatcagactggcccagcccgtgagcggcacccaggtggtgcagggccagatccagaccctggccaccaacgcccagcagatcacccagaccgaggtgcagcagggccagcagcagttcagccagttcaccgacggccagagaaacagcgtgcagcaggccagagtgagcgagctgaccggcgaggccgagcccagagaggtgaaggccaccggcaacagcaccccctgcaccagcagcctgcccaccacccacccccccagccacagagccggcgccagctgcgtgtgctgcagccagccccagcagagcagcaccagccccccccccagcgacgccctgcagtgggtggtggtggaggtgagcggcacccccaaccagctggagacccacagagagctgcacgcccccctgcccggcatgaccagcctgagccccctgcaccccagccagcagctgtaccagatccagcaggtgaccatgcccgccggccaggacctggcccagcccatgttcatccagagcgccaaccagcccagcgacggccaggccccccaggtgaccggcgactag

SEQ ID NO: 91627 - DNA, 906 bp, synthetic construct
  misc_feature 1..906: note = Description of Artificial Sequence: Synthetic coding sequence
  source 1..906: mol_type = other DNA
atgagcaccgagggcggcttcggcggcaccagcagcagcgacgcccagcagagcctgcagagcttctggcccagagtgatggaggagatcagaaacctgaccgtgaaggacttcagagtgcaggagctgcccctggccagaatcaagaagatcatgaagctggacgaggacgtgaagatgatcagcgccgaggcccccgtgctgttcgccaaggccgcccagatcttcatcaccgagctgaccctgagagcctggatccacaccgaggacaacaagagaagaaccctgcagagaaacgacatcgccatggccatcaccaagttcgaccagttcgacttcctgatcgacatcgtgcccagagacgagctgaagccccccaagagacaggaggaggtgagacagagcgtgacccccgccgagcccgtgcagtactacttcaccctggcccagcagcccaccgccgtgcaggtgcagggccagcagcagggccagcagaccaccagcagcaccaccaccatccagcccggccagatcatcatcgcccagccccagcagggccagaccatgcaggtgatgcagcagatcatcaccaacaccggcgagatccagcagatccccgtgcagctgaacgccggccagctgcagtacatcagactggcccagcccgtgagcggcacccaggtggtgcagggccagatccagaccctggccaccaacgcccagcagatcacccagaccgaggtgcagcagggccagcagcagttcagccagttcaccgacggccagcagctgtaccagatccagcaggtgaccatgcccgccggccaggacctggcccagcccatgttcatccagagcgccaaccagcccagcgacggccaggccccccaggtgaccggcgactag

SEQ ID NO: 91628 - DNA, 1008 bp, synthetic construct; identical to SEQ ID NO: 91625
  misc_feature 1..1008: note = Description of Artificial Sequence: Synthetic coding sequence
  source 1..1008: mol_type = other DNA

SEQ ID NO: 91629 - DNA, 702 bp, synthetic construct
  misc_feature 1..702: note = Description of Artificial Sequence: Synthetic coding sequence
  source 1..702: mol_type = other DNA
atggccatcaccaagttcgaccagttcgacttcctgatcgacatcgtgcccagagacgagctgaagccccccaagagacaggaggaggtgagacagagcgtgacccccgccgagcccgtgcagtactacttcaccctggcccagcagcccaccgccgtgcaggtgcagggccagcagcagggccagcagaccaccagcagcaccaccaccatccagcccggccagatcatcatcgcccagccccagcagggccagaccacccccgtgaccatgcaggtgggcgagggccagcaggtgcagatcgtgcaggcccagccccagggccaggcccagcaggcccagagcggcaccggccagaccatgcaggtgatgcagcagatcatcaccaacaccggcgagatccagcagatccccgtgcagctgaacgccggccagctgcagtacatcagactggcccagcccgtgagcggcacccaggtggtgcagggccagatccagaccctggccaccaacgcccagcagatcacccagaccgaggtgcagcagggccagcagcagttcagccagttcaccgacggccagcagctgtaccagatccagcaggtgaccatgagagccagaaccagccccagcccctgcagcagcagccagcccaccagcccccccaccggcccccccggcgacagaagactgagagcctag

SEQ ID NO: 91630 - DNA, 606 bp, synthetic construct
  misc_feature 1..606: note = Description of Artificial Sequence: Synthetic coding sequence
  source 1..606: mol_type = other DNA
atggccatcaccaagttcgaccagttcgacttcctgatcgacatcgtgcccagagacgagctgaagccccccaagagacaggaggaggtgagacagagcgtgacccccgccgagcccgtgcagtactacttcaccctggcccagcagcccaccgccgtgcaggtgcagggccagcagcagggccagcagaccaccagcagcaccaccaccatccagcccggccagatcatcatcgcccagccccagcagggccagaccacccccgtgaccatgcaggtgggcgagggccagcaggtgcagatcgtgcaggcccagccccagggccaggcccagcaggcccagagcggcaccggccagaccatgcaggtgatgcagcagatcatcaccaacaccggcgagatccagcagatccccgtgcagctgaacgccggccagctgcagtacatcagactggcccagcccgtgagcggcacccaggtggtgcagggccagatccagacccaggccatggagaccttcttcgccttcaagagacagatctacagcctgtggagagtgggcggcttcatcgccaccctgttcagccccagagaccccggcaactag

SEQ ID NO: 91631 - DNA, 942 bp, synthetic construct
  misc_feature 1..942: note = Description of Artificial Sequence: Synthetic coding sequence
  source 1..942: mol_type = other DNA
atgagcaccgagggcggcttcggcggcaccagcagcagcgacgcccagcagagcctgcagagcttctggcccagagtgatggaggagatcagaaacctgaccgtgaaggacttcagagtgcaggagctgcccctggccagaatcaagaagatcatgaagctggacgaggacgtgaagatgatcagcgccgaggcccccgtgctgttcgccaaggccgcccagatcttcatcaccgagctgaccctgagagcctggatccacaccgaggacaacaagagaagaaccctgcagagaaacgacatcgccatggccatcaccaagttcgaccagttcgacttcctgatcgacatcgtgcccagagacgagctgaagccccccaagagacaggaggaggtgagacagagcgtgacccccgccgagcccgtgcagtactacttcaccctggcccagcagcccaccgccgtgcaggtgcagggccagcagcagggccagcagaccaccagcagcaccaccaccatccagcccggccagatcatcatcgcccagccccagcagggccagaccacccccgtgaccatgcaggtgggcgagggccagcaggtgcagatcgtgcaggcccagccccagggccaggcccagcaggcccagagcggcaccggccagaccatgcaggtgatgcagcagatcatcaccaacaccggcgagatccagcagatccccgagaccggcctggccgtgagcctgagactgatgaagtgcagcggcctgatcagcgcccactgcagcttcagactgcccggcagcagcgacagccccgccagcgccagcagagtggccggcatcatcggcgccgccgagtgcagacccgccgccgtgtaccccctgagccccgcctgcatcagacacagcagctgcgccggcaccgaccccgacacctgctag

SEQ ID NO: 91632 - DNA, 543 bp, synthetic construct
  misc_feature 1..543: note = Description of Artificial Sequence: Synthetic coding sequence
  source 1..543: mol_type = other DNA
atgagcaccgagggcggcttcggcggcaccagcagcagcgacgcccagcagagcctgcagagcttctggcccagagtgatggaggagatcagaaacctgaccgtgaaggacttcagagtgcaggagctgcccctggccagaatcaagaagatcatgaagctggacgaggacgtgaagatgatcagcgccgaggcccccgtgctgttcgccaaggccgcccagatcttcatcaccgagctgaccctgagagcctggatccacaccgaggacaacaagagaagaaccctgcaggaggaggtgagacagagcgtgacccccgccgagcccgtgcagtactacttcaccctggcccagcagcccaccgccgtgcaggtgcagggccagcagcagggccagcagaccaccagcagcaccaccaccatccagcccggccagatcatcatcgcccagccccagcagggccagaccacccccgtgaccatgcaggtgggcgagggccagcaggtgcagatcgtgcaggcccagccccagggccaggcctag

SEQ ID NO: 91633 - DNA, 1065 bp, synthetic construct
  misc_feature 1..1065: note = Description of Artificial Sequence: Synthetic coding sequence
  source 1..1065: mol_type = other DNA
atgagcaccgagggcggcttcggcggcaccagcagcagcgacgcccagcagagcctgcagagcttctggcccagagtgatggaggagatcagaaacctgaccgtgaaggacttcagagtgcaggagctgcccctggccagaatcaagaagatcatgaagctggacgaggacgtgaagatgatcagcgccgaggcccccgtgctgttcgccaaggccgcccagatcttcatcaccgagctgaccctgagagcctggatccacaccgaggacaacaagagaagaaccctgcagagaaacgacatcgccatggccatcaccaagttcgaccagttcgacttcctgatcgacatcgtgcccagagacgagctgaagccccccaagagacaggaggaggtgagacagagcgtgacccccgccgagcccgtgcagtactacttcaccctggcccagcagcccaccgccgtgcaggtgcagggccagcagcagggccagcagaccaccagcagcaccaccaccatccagcccggccagatcatcatcgcccagccccagcagggccagaccacccccgtgaccatgcaggtgggcgagggccagcaggtgcagatcgtgcaggcccagccccagggccaggcccagcaggcccagagcggcaccggccagaccatgcaggtgatgcagcagatcatcaccaacaccggcgagatccagcagatccccgtgcagctgaacgccggccagctgcagtacatcagactggcccagcccgtgagcggcacccaggtggtgcagggccagatccagaccctggccaccaacgcccagcagggccagagaaacgccagccagggcaagcccagaagatgcctgaaggagaccctgcagatcacccagaccgaggtgcagcagggccagcagcagttcagccagttcaccgacggccagcagctgtaccagatccagcaggtgaccatgcccgccggccaggacctggcccagcccatgttcatccagagcgccaaccagcccagcgacggccaggccccccaggtgaccggcgactag

SEQ ID NO: 91634 - DNA, 894 bp, synthetic construct
  misc_feature 1..894: note = Description of Artificial Sequence: Synthetic coding sequence
  source 1..894: mol_type = other DNA
atgagcaccgagggcggcttcggcggcaccagcagcagcgacgcccagcagagcctgcagagcttctggcccagagtgatggaggagatcagaaacctgaccgtgaaggacttcagagtgcaggagctgcccctggccagaatcaagaagatcatgaagctggacgaggacgtgaagagaaacgacatcgccatggccatcaccaagttcgaccagttcgacttcctgatcgacatcgtgcccagagacgagctgaagccccccaagagacaggaggaggtgagacagagcgtgacccccgccgagcccgtgcagtactacttcaccctggcccagcagcccaccgccgtgcaggtgcagggccagcagcagggccagcagaccaccagcagcaccaccaccatccagcccggccagatcatcatcgcccagccccagcagggccagaccacccccgtgaccatgcaggtgggcgagggccagcaggtgcagatcgtgcaggcccagccccagggccaggcccagcaggcccagagcggcaccggccagaccatgcaggtgatgcagcagatcatcaccaacaccggcgagatccagcagatccccgtgcagctgaacgccggccagctgcagtacatcagactggcccagcccgtgagcggcacccaggtggtgcagggccagatccagaccctggccaccaacgcccagcagatcacccagaccgaggtgcagcagggccagcagcagttcagccagttcaccgacggccagcagctgtaccagatccagcaggtgaccatgcccgccggccaggacctggcccagcccatgttcatccagagcgccaaccagcccagcgacggccaggccccccaggtgaccggcgactag

SEQ ID NO: 91635 - DNA, 1008 bp, synthetic construct; identical to SEQ ID NO: 91625
  misc_feature 1..1008: note = Description of Artificial Sequence: Synthetic coding sequence
  source 1..1008: mol_type = other DNA

SEQ ID NO: 91636 - DNA, 1008 bp, synthetic construct; identical to SEQ ID NO: 91625
  misc_feature 1..1008: note = Description of Artificial Sequence: Synthetic coding sequence
  source 1..1008: mol_type = other DNA

SEQ ID NO: 91637 - DNA, 390 bp, synthetic construct
  misc_feature 1..390: note = Description of Artificial Sequence: Synthetic coding sequence
  source 1..390: mol_type = other DNA
atgagcaccgagggcggcttcggcggcaccagcagcagcgacgcccagcagagcctgcagagcttctggcccagagtgatggaggagatcagaaacctgaccgtgaaggacttcagagtgcaggagctgcccctggccagaatcaagaagatcatgaagctggacgaggacgtgaagatgatcagcgccgaggcccccgtgctgttcgccaaggccgcccagatcttcatcaccgagctgaccctgagagcctggatccacaccgaggacaacaagagaagaaccctgcagagaaacgacatcgccatggccatcaccaagttcgaccagttcgacttcctgatcgacatcgtgcccagagacgagctgaagccccccaagagacagtag

SEQ ID NO: 91638 - DNA, 1005 bp, synthetic construct
  misc_feature 1..1005: note = Description of Artificial Sequence: Synthetic coding sequence
  source 1..1005: mol_type = other DNA
atgagcaccgagggcggcttcggcggcaccagcagcagcgacgcccagcagagcctgcagagcttctggcccagagtgatggaggagatcagaaacctgaccgtgaaggacttcagagtgcaggagctgcccctggccagaatcaagaagatcatgaagctggacgaggacgtgaagatgatcagcgccgaggcccccgtgctgttcgccaaggccgcccagatcttcatcaccgagctgaccctgagagcctggatccacaccgaggacaacaagagaagaaccctgcagagaaacgacatcgccatggccatcaccaagttcgaccagttcgacttcctgatcgacatcgtgcccagagacgagctgaagccccccaagagacaggaggaggtgagacagagcgtgacccccgccgagcccgtgcagtactacttcaccctggcccagcagcccaccgccgtgcaggtgcagggccagcagcagggccagcagaccaccagcagcaccaccaccatccagcccggccagatcatcatcgcccagccccagcagggccagaccacccccgtgaccatgcaggtgggcgagggccagcaggtgcagatcgtgcaggcccagccccagggccaggcccagcaggcccagagcggcaccggccagaccatgcaggtgatgcagcagatcatcaccaacaccggcgagatccagcagatccccgtgcagctgaacgccggccagctgcagtacatcagactggcccagcccgtgagcggcacccaggtggtgcagggccagatccagaccctggccaccaacgcccagcagatcacccagaccgaggtgcagcagggccagcagcagttcagccagttcaccgacggccagctgtaccagatccagcaggtgaccatgcccgccggccaggacctggcccagcccatgttcatccagagcgccaaccagcccagcgacggccaggccccccaggtgaccggcgactag

SEQ ID NO: 91639 - DNA, 426 bp, synthetic construct
  misc_feature 1..426: note = Description of Artificial Sequence: Synthetic coding sequence
  source 1..426: mol_type = other DNA
atgagcaccgagggcggcttcggcggcaccagcagcagcgacgcccagcagagcctgcagagcttctggcccagagtgatggaggagatcagaaacctgaccgtgaaggacttcagagtgcaggagctgcccctggccagaatcaagaagatcatgaagctggacgaggacgtgaagatgatcagcgccgaggcccccgtgctgttcgccaaggccgcccagatcttcatcaccgagctgaccctgagagcctggatccacaccgaggacaacaagagaagaaccctgcagagaaacgacatcgccatggccatcaccaagttcgaccagttcgacttcctgatcgacatcgtgcccagagacgagctgaagccccccaagagacaggaggtgagacagagcgtgacccccgccgagcccgtgtag

SEQ ID NO: 91640 - DNA, 288 bp, synthetic construct
  misc_feature 1..288: note = Description of Artificial Sequence: Synthetic coding sequence
  source 1..288: mol_type = other DNA
atgagcaccgagggcggcttcggcggcaccagcagcagcgacgcccagcagagcctgcagagcttctggcccagagtgatggaggagatcagaaacctgaccgtgatgatcagcgccgaggcccccgtgctgttcgccaaggccgcccagatcttcatcaccgagctgaccctgagagcctggatccacaccgaggacaacaagagaagaaccctgcagagaaacgacatcgccatggccatcaccaagttcgaccagttcgacttcctgatcgacatcgtgccctag

SEQ ID NO: 91641 - DNA, 183 bp, synthetic construct
  misc_feature 1..183: note = Description of Artificial Sequence: Synthetic coding sequence
  source 1..183: mol_type = other DNA
atgagcaccgagggcggcttcggcggcaccagcagcagcgacgcccagcagagcctgcagagcttctggcccagagtgatggaggagatcagaaacctgaccgtgaaggacttcagagtgcaggagctgcccctggccagaatcaagaagatcatgaagctggacgaggacgtgaagatgtag

SEQ ID NO: 91642 - DNA, 159 bp, synthetic construct
  misc_feature 1..159: note = Description of Artificial Sequence: Synthetic coding sequence
  source 1..159: mol_type = other DNA
atgagcaccgagggcggcttcggcggcaccagcagcagcgacgcccagcagagcctgcagagcttctggcccagagtgatggaggagatcagaaacctgaccgtgaaggacttcagagtgcaggagctgcccctggccagaatcaagaagatcatgtag

SEQ ID NO: 91643 - DNA, 555 bp, synthetic construct
  misc_feature 1..555: note = Description of Artificial Sequence: Synthetic coding sequence
  source 1..555: mol_type = other DNA
atggccagaagcctggtgcacgacaccgtgttctactgcctgagcgtgtaccaggtgaagatcagccccaccccccagctgggcgccgccagcagcgccgagggccacgtgggccagggcgcccccggcctgatgggcaacatgaaccccgagggcggcgtgaaccacgagaacggcatgaacagagacggcggcatgatccccgagggcggcggcggcaaccaggagcccagacagcagccccagcccccccccgaggagcccgcccaggccgccatggagggcccccagcccgagaacatgcagcccagaaccagaagaaccaagttcaccctgctgcaggtggaggagctggagagcgtgttcagacacacccagtaccccgacgtgcccaccagaagagagctggccgagaacctgggcgtgaccgaggacaaggtgagagtgtggttcaagaacaagagagccagatgcagaagacaccagagagagctgatgctggccaacgagctgagagccgaccccgacgactgcgtgtacatcgtggtggactag

SEQ ID NO: 91644 - DNA, 345 bp, synthetic construct
  misc_feature 1..345: note = Description of Artificial Sequence: Synthetic coding sequence
  source 1..345: mol_type = other DNA
atggacaagagaagaagagccctgaccagactgtacctggacaaggccaccctgatctggaacggcaacgccgtgagcggcctggacgccctgaacaacttcttcgacaccctgcccagcagcgagttccaggtgaacatgctggactgccagcccgtgcacgagcaggccacccagagccagaccaccgtgctggtggtgaccagcggcaccgtgaagttcgacggcaacaagcagcacttcttcaaccagaacttcctgctgaccgcccagagcacccccaacaacaccgtgtggaagatcgccagcgactgcttcagattccaggactggagcagcagctag

SEQ ID NO: 91645 - DNA, 429 bp, synthetic construct
  misc_feature 1..429: note = Description of Artificial Sequence: Synthetic coding sequence
  source 1..429: mol_type = other DNA
atggccaccagcctggacttcaagacctacgtggaccaggcctgcagagccgccgaggagttcgtgaacatctactacgagaccatggacaagagaagaagagccctgaccagactgtacctggacaaggccaccctgatctggaacggcaacgccgtgagcggcctggacgccctgaacaacttcttcgacaccctgcccagcagcgagttccaggtgaacatgctggactgccagcccgtgcacgagcaggccacccagagccagaccaccgtgctggtggtgaccagcggcaccgtgaagttcgacggcaacaagcagcacttcttcaaccagaacttcctgctgaccgcccagagcacccccaacaacaccgtgtggaagatcgccagcgactgcttcagattccaggactggagcagcagctag

SEQ ID NO: 91646 - DNA, 345 bp, synthetic construct; identical to SEQ ID NO: 91644
  misc_feature 1..345: note = Description of Artificial Sequence: Synthetic coding sequence
  source 1..345: mol_type = other DNA

SEQ ID NO: 91647 - DNA, 882 bp, synthetic construct
  misc_feature 1..882: note = Description of Artificial Sequence: Synthetic coding sequence
  source 1..882: mol_type = other DNA
atgaccggcctgtacgagctggtgtggagagtgctgcacgccctgctgtgcctgcacagaaccctgaccagctggctgagagtgagattcggcacctggaactggatctggagaagatgctgcagagccgccagcgccgccgtgctggcccccctgggcttcaccctgagaaagccccccgccgtgggcagaaacagaagacaccacagacaccccagaggcggcagctgcctggccgccgcccaccacagaatgagatggagagccgacggcagaagcctggagaagctgcccgtgcacatgggcctggtgatcaccgaggtggagcaggagcccagcttcagcgacatcgccagcctggtggtgtggtgcatggccgtgggcatcagctacatcagcgtgtacgaccaccagggcatcttcaagagaaacaacagcagactgatggacgagatcctgaagcagcagcaggagctgctgggcctggactgcagcaagtacagccccgagttcgccaacagcaacgacaaggacgaccaggtgctgaactgccacctggccgtgaaggtgctgagccccgaggacggcaaggccgacatcgtgagagccgcccaggacttctgccagctggtggcccagaagcagaagagacccaccgacctggacgtggacaccctggccagcctgctgagcagcaacggctgccccgaccccgacctggtgctgaagttcggccccgtggacagcaccctgggcttcctgccctggcacatcagactgaccgagatcgtgagcctgcccagccacctgaacatcagctacgaggacttcttcagcgccctgagacagtacgccgcctgcgagcagagactgggcaagtag

SEQ ID NO: 91648 - DNA, 2571 bp, synthetic construct
  misc_feature 1..2571: note = Description of Artificial Sequence: Synthetic coding sequence
  source 1..2571: mol_type = other DNA
atgaagcccagacccgccggcttcgtggacaacaagctgaagcagagagtgatccagtacctgaccagcaacaagtgcggcaagtacgtggacatcggcgtgctggccagcgacctgcagagagtgtacagcatcgactacggcagaagaaagagaaacgccttcagaatccaggtggagaaggtgttcagcatcatcagcagcgagaaggagctgaagaacctgaccgagctggaggacgagcacctggccaagagagccagacagggcgaggaggacaacgagtacaccgagagctacagcgacgacgacagcagcatggaggactaccccgacccccagagcgccaaccacatgaacagcagcctgctgagcctgtacagaaagggcaaccccgacagcgtgagcaacacccccgagatggagcagagagagaccaccagcagcacccccagaatcagcagcaagaccggcagcatccccctgaagacccccgccaaggacagcgagggcggctggttcatcgacaagacccccagcgtgaagaaggacagcttcttcctggacctgagctgcgagaagagcaaccccaagaagcccatcaccgagatccaggacagcaaggacagcagcctgctggagagcgacatgaagagaaagggcaagctgaagaacaagggcagcaagagaaagaaggaggacctgcaggaggtggacggcgagatcgaggccgtgctgcagaagaaggccaaggccagaggcctggagttccagatcagcaacgtgaagttcgaggacgtgggcggcaacgacatgaccctgaaggaggtgtgcaagatgctgatccacatgagacaccccgaggtgtaccaccacctgggcgtggtgccccccagaggcgtgctgctgcacggcccccccggctgcggcaagaccctgctggcccacgccatcgccggcgagctggacctgcccatcctgaaggtggccgcccccgagatcgtgagcggcgtgagcggcgagagcgagcagaagctgagagagctgttcgagcaggccgtgagcaacgccccctgcatcatcttcatcgacgagatcgacgccatcacccccaagagagaggtggccagcaaggacatggagagaagaatcgtggcccagctgctgacctgcatggacgacctgaacaacgtggccgccaccgccagagtgctggtgatcggcgccaccaacagacccgacagcctggaccccgccctgagaagagccggcagattcgacagagagatctgcctgggcatccccgacgaggccagcagagagagaatcctgcagaccctgtgcagaaagctgagactgccccaggccttcgacttctgccacctggcccacctgacccccggcttcgtgggcgccgacctgatggccctgtgcagagaggccgccatgtgcgccgtgaacagagtgctgatgaagctgcaggagcagcagaagaagaaccccgagatggaggacctgcccagcaagggcgtgcaggaggagagactgggcaccgagcccaccagcgagacccaggacgagctgcagagactgctgggcctgctgagagaccaggaccccctgagcgaggagcagatgcagggcctgtgcatcgagctgaacgacttcatcgtggccctgagcagcgtgcagcccagcgccaagagagagggcttcgtgaccgtgcccaacgtgacctgggccgacatcggcgccctggaggacatcagagaggagctgaccatggccatcctggcccccgtgagaaaccccgaccagttcaaggccctgggcctggtgacccccgccggcgtgctgctggccggcccccccggctgcggcaagaccctgctggccaaggccgtggccaacgagagcggcctgaacttcatcagcgtgaagggccccgagctgctgaacatgtacgtgggcgagagcgagagagccgtgagacaggtgttccagagagccaagaacagcgccccctgcgtgatcttcttcgacgaggtggacgccctgtgccccagaagaagcgacagagagaccggcgccagcgtgagagtggtgaaccagctgctgaccgagatggacggcctggaggccagacagcaggtgttcatcatggccgccaccaacagacccgacatcatcgaccccgccatcctgagacccggcagactggacaagaccctgttcgtgggcctgcccccccccgccgacagactggccatcctgaagaccatcaccaagaacggcaccaagccccccctggacgccgacgtgaacctggaggccatcgccggcgacctgagatgcgactgctacaccggcgccgacctgagcgccctggtgagagaggccagcatctgcgccctgagacaggagatggccagacagaagagcggcaacgagaagggcgagctgaaggtgagccacaagcacttcgaggaggccttcaagaaggtgagaagcagcatcagcaagaaggaccagatcatgtacgagagactgcaggagagcctgagcagatag

SEQ ID NO: 91649 - DNA, 2004 bp, synthetic construct
  misc_feature 1..2004: note = Description of Artificial Sequence: Synthetic coding sequence
  source 1..2004: mol_type = other DNA
atgaagagaaagggcaagctgaagaacaagggcagcaagagaaagaaggaggacctgcaggaggtggacggcgagatcgaggccgtgctgcagaagaaggccaaggccagaggcctggagttccagatcagcaacgtgaagttcgaggacgtgggcggcaacgacatgaccctgaaggaggtgtgcaagatgctgatccacatgagacaccccgaggtgtaccaccacctgggcgtggtgccccccagaggcgtgctgctgcacggcccccccggctgcggcaagaccctgctggcccacgccatcgccggcgccgagtgcagcggcatgatcaccgcccactgcagcttcgacttcagcggcagcaacgacccccccgccagcgccagccaggagctggacctgcccatcctgaaggtggccgcccccgagatcgtgagcggcgtgagcggcgagagcgagcagaagctgagagagctgttcgagcaggccgtgagcaacgccccctgcatcatcttcatcgacgagatcgacgccatcacccccaagagagaggtggccagcaaggacatggagagaagaatcgtggcccagctgctgacctgcatggacgacctgaacaacgtggccgccaccgccagagtgctggtgatcggcgccaccaacagacccgacagcctggaccccgccctgagaagagccggcagattcgacagagagatctgcctgggcatccccgacgaggccagcagagagagaatcctgcagaccctgtgcagaaagctgagactgccccaggccttcgacttctgccacctggcccacctgacccccggcttcgtgggcgccgacctgatggccctgtgcagagaggccgccatgtgcgccgtgaacagagtgctgatgaagctgcaggagcagcagaagaagaaccccgagatggaggacctgcccagcaagggcgtgcaggaggagagactgggcaccgagcccaccagcgagacccaggacgagctgcagagactgctgggcctgctgagagaccaggaccccctgagcgaggagcagatgcagggcctgtgcatcgagctgaacgacttcatcgtggccctgagcagcgtgcagcccagcgccaagagagagggcttcgtgaccgtgcccaacgtgacctgggccgacatcggcgccctggaggacatcagagaggagctgaccatggccatcctggcccccgtgagaaaccccgaccagttcaaggccctgggcctggtgacccccgccggcgtgctgctggccggcccccccggctgcggcaagaccctgctggccaaggccgtggccaacgagagcggcctgaacttcatcagcgtgaagggccccgagctgctgaacatgtacgtgggcgagagcgagagagccgtgagacaggtgttccagagagccaagaacagcgccccctgcgtgatcttcttcgacgaggtggacgccctgtgccccagaagaagcgacagagagaccggcgccagcgtgagagtggtgaaccagctgctgaccgagatggacggcctggaggccagacagcaggtgttcatcatggccgccaccaacagacccgacatcatcgaccccgccatcctgagacccggcagactggacaagaccctgttcgtgggcctgcccccccccgccgacagactggccatcctgaagaccatcaccaagaacggcaccaagccccccctggacgccgacgtgaacctggaggccatcgccggcgacctgagatgcgactgctacaccggcgccgacctgagcgccctggtgagagaggccagcatctgcgccctgagacaggagatggccagacagaagagcggcaacgagaagggcgagctgaaggtgagccacaagcacttcgaggaggccttcaagaaggtgagaagcagcatcagcaagaaggaccagatcatgtacgagagactgcaggagagcctgagcagatag

SEQ ID NO: 91650 - DNA, 1770 bp, synthetic construct
  misc_feature 1..1770: note = Description of Artificial Sequence: Synthetic coding sequence
  source 1..1770: mol_type = other DNA
atggaggactaccccgacccccagagcgccaaccacatgaacagcagcctgctgagcctgtacagaaagggcaaccccgacagcgtgagcaacacccccgagatggagcagagagagaccaccagcagcacccccagaatcagcagcaagaccggcagcatccccctgaagacccccgccaaggacagcgagggcggctggttcatcgacaagacccccagcgtgaagaaggacagcttcttcctggacctgagctgcgagaagagcaaccccaagaagcccatcaccgagatccaggacagcaaggacagcagcctgctggagagcgacatgaagagaaagggcaagctgaagaacaagggcagcaagagaaagaaggaggacctgcaggaggtggacggcgagatcgaggccgtgctgcagaagaaggccaaggccagaggcctggagttccagatcagcaacgtgaagttcgaggacgtgggcggcaacgacatgaccctgaaggaggtgtgcaagatgctgatccacatgagacaccccgaggtgtaccaccacctgggcgtggtgccccccagaggcgtgctgctgcacggcccccccggctgcggcaagaccctgctggcccacgccatcgccggcgagctggacctgcccatcctgaaggtggccgcccccgagatcgtgagcggcgtgagcggcgagagcgagcagaagctgagagagctgttcgagcaggccgtgagcaacgccccctgcatcatcttcatcgacgagatcgacgccatcacccccaagagagaggtggccagcaaggacatggagagaagaatcgtggcccagctgctgacctgcatggacgacctgaacaacgtggccgccaccgccagagtgctggtgatcggcgccaccaacagacccgacagcctggaccccgccctgagaagagccggcagattcgacagagagatctgcctgggcatccccgacgaggccagcagagagagaatcctgcagaccctgtgcagaaagctgagactgccccaggccttcgacttctgccacctggcccacctgacccccggcttcgtgggcgccgacctgatggccctgtgcagagaggccgccatgtgcgccgtgaacagagtgctgatgaagctgcaggagcagcagaagaagaaccccgagatggaggacctgcccagcaagggcgtgcaggaggagagactgggcaccgagcccaccagcgagacccaggacgagctgcagagactgctgggcctgctgagagaccaggaccccctgagcgaggagcagatgcagggcctgtgcatcgagctgaacgacttcatcgtggccctgagcagcgtgcagcccagcgccaagagagagggcttcgtgaccgtgcccaacgtgacctgggccgacatcggcgccctggaggacatcagagaggagctgaccatggccatcctggcccccgtgagaaaccccgaccagttcaaggccctgggcctggtgacccccgccggcgtgctgctggccggcccccccggctgcggcaagaccctgctggccaaggccgtggccaacgagagcggcctgaacttcatcagcgtgaagggccccgagctgctgaacatgtacgtgggcgagagcgagagagccgtgagacaggtgttccagagagccaagaacagcgccccctgcgtgatcttcttcgacgaggtggacgccctgtgccccagaagaagcgacagagagatctag

SEQ ID NO: 91651 - DNA, 2253 bp, synthetic construct
  misc_feature 1..2253: note = Description of Artificial Sequence: Synthetic coding sequence
  source 1..2253: mol_type = other DNA
atggaggactaccccgacccccagagcgccaaccacatgaacagcagcctgctgagcctgtacagaaagggcaaccccgacagcgtgagcaacacccccgagatggagcagagagagaccaccagcagcacccccagaatcagcagcaagaccggcagcatccccctgaagacccccgccaaggacagcgagggcggctggttcatcgacaagacccccagcgtgaagaaggacagcttcttcctggacctgagctgcgagaagagcaaccccaagaagcccatcaccgagatccaggacagcaaggacagcagcctgctggagagcgacatgaagagaaagggcaagctgaagaacaagggcagcaagagaaagaaggaggacctgcaggaggtggacggcgagatcgaggccgtgctgcagaagaaggccaaggccagaggcctggagttccagatcagcaacgtgaagttcgaggacgtgggcggcaacgacatgaccctgaaggaggtgtgcaagatgctgatccacatgagacaccccgaggtgtaccaccacctgggcgtggtgccccccagaggcgtgctgctgcacggcccccccggctgcggcaagaccctgctggcccacgccatcgccggcgagctggacctgcccatcctgaaggtggccgcccccgagatcgtgagcggcgtgagcggcgagagcgagcagaagctgagagagctgttcgagcaggccgtgagcaacgccccctgcatcatcttcatcgacgagatcgacgccatcacccccaagagagaggtggccagcaaggacatggagagaagaatcgtggcccagctgctgacctgcatggacgacctgaacaacgtggccgccaccgccagagtgctggtgatcggcgccaccaacagacccgacagcctggaccccgccctgagaagagccggcagattcgacagagagatctgcctgggcatccccgacgaggccagcagagagagaatcctgcagaccctgtgcagaaagctgagactgccccaggccttcgacttctgccacctggcccacctgacccccggcttcgtgggcgccgacctgatggccctgtgcagagaggccgccatgtgcgccgtgaacagagtgctgatgaagctgcaggagcagcagaagaagaaccccgagatggaggacctgcccagcaagggcgtgcaggaggagagactgggcaccgagcccaccagcgagacccaggacgagctgcagagactgctgggcctgctgagagaccaggaccccctgagcgaggagcagatgcagggcctgtgcatcgagctgaacgacttcatcgtggccctgagcagcgtgcagcccagcgccaagagagagggcttcgtgaccgtgcccaacgtgacctgggccgacatcggcgccctggaggacatcagagaggagctgaccatggccatcctggcccccgtgagaaaccccgaccagttcaaggccctgggcctggtgacccccgccggcgtgctgctggccggcccccccggctgcggcaagaccctgctggccaaggccgtggccaacgagagcggcctgaacttcatcagcgtgaagggccccgagctgctgaacatgtacgtgggcgagagcgagagagccgtgagacaggtgttccagagagccaagaacagcgccccctgcgtgatcttcttcgacgaggtggacgccctgtgccccagaagaagcgacagagagaccggcgccagcgtgagagtggtgaaccagctgctgaccgagatggacggcctggaggccagacagcaggtgttcatcatggccgccaccaacagacccgacatcatcgaccccgccatcctgagacccggcagactggacaagaccctgttcgtgggcctgcccccccccgccgacagactggccatcctgaagaccatcaccaagaacggcaccaagccccccctggacgccgacgtgaacctggaggccatcgccggcgacctgagatgcgactgctacaccggcgccgacctgagcgccctggtgagagaggccagcatctgcgccctgagacaggagatggccagacagaagagcggcaacgagaagggcgagctgaaggtgagccacaagcacttcgaggaggccttcaagaaggtgagaagcagcatcagcaagaaggaccagatcatgtacgagagactgcaggagagcctgagcagatag

SEQ ID NO: 91652 - DNA, 2298 bp, synthetic construct
  misc_feature 1..2298: note = Description of Artificial Sequence: Synthetic coding sequence
  source 1..2298: mol_type = other DNA
atgaagcccagacccgccggcttcgtggacaacaagctgaagcagagagtgatccagtacctgaccagcaacaagtgcggcaagtacgtggacatcggcgtgctggccagcgacctgcagagagtgtacagcatcgactacggcagaagaaagagaaacgccttcagaatccaggtggagaaggtgttcagcatcatcagcagcgagaaggagctgaagaacctgaccgagctggaggacgagcacctggccaagagagccagacagggcgaggaggacaacgagtacaccgagagctacagcgacgacgacagcagcatggaggactaccccgacccccaggacagcaaggacagcagcctgctggagagcgacatgaagagaaagggcaagctgaagaacaagggcagcaagagaaagaaggaggacctgcaggaggtggacggcgagatcgaggccgtgctgcagaagaaggccaaggccagaggcctggagttccagatcagcaacgtgaagttcgaggacgtgggcggcaacgacatgaccctgaaggaggtgtgcaagatgctgatccacatgagacaccccgaggtgtaccaccacctgggcgtggtgccccccagaggcgtgctgctgcacggcccccccggctgcggcaagaccctgctggcccacgccatcgccggcgagctggacctgcccatcctgaaggtggccgcccccgagatcgtgagcggcgtgagcggcgagagcgagcagaagctgagagagctgttcgagcaggccgtgagcaacgccccctgcatcatcttcatcgacgagatcgacgccatcacccccaagagagaggtggccagcaaggacatggagagaagaatcgtggcccagctgctgacctgcatggacgacctgaacaacgtggccgccaccgccagagtgctggtgatcggcgccaccaacagacccgacagcctggaccccgccctgagaagagccggcagattcgacagagagatctgcctgggcatccccgacgaggccagcagagagagaatcctgcagaccctgtgcagaaagctgagactgccccaggccttcgacttctgccacctggcccacctgacccccggcttcgtgggcgccgacctgatggccctgtgcagagaggccgccatgtgcgccgtgaacagagtgctgatgaagctgcaggagcagcagaagaagaaccccgagatggaggacctgcccagcaagggcgtgcaggaggagagactgggcaccgagcccaccagcgagacccaggacgagctgcagagactgctgggcctgctgagagaccaggaccccctgagcgaggagcagatgcagggcctgtgcatcgagctgaacgacttcatcgtggccctgagcagcgtgcagcccagcgccaagagagagggcttcgtgaccgtgcccaacgtgacctgggccgacatcggcgccctggaggacatcagagaggagctgaccatggccatcctggcccccgtgagaaaccccgaccagttcaaggccctgggcctggtgacccccgccggcgtgctgctggccggcccccccggctgcggcaagaccctgctggccaaggccgtggccaacgagagcggcctgaacttcatcagcgtgaagggccccgagctgctgaacatgtacgtgggcgagagcgagagagccgtgagacaggtgttccagagagccaagaacagcgccccctgcgtgatcttcttcgacgaggtggacgccctgtgccccagaagaagcgacagagagaccggcgccagcgtgagagtggtgaaccagctgctgaccgagatggacggcctggaggccagacagcaggtgttcatcatggccgccaccaacagacccgacatcatcgaccccgccatcctgagacccggcagactggacaagaccctgttcgtgggcctgcccccccccgccgacagactggccatcctgaagaccatcaccaagaacggcaccaagccccccctggacgccgacgtgaacctggaggccatcgccggcgacctgagatgcgactgctacaccggcgccgacctgagcgccctggtgagagaggccagcatctgcgccctgagacaggagatggccagacagaagagcggcaacgagaagggcgagctgaaggtgagccacaagcacttcgaggaggccttcaagaaggtgagaagcagcatcagcaagaaggaccagatcatgtacgagagactgcaggagagcctgagcagatag

SEQ ID NO: 91653 - DNA, 1386 bp, synthetic construct
  misc_feature 1..1386: note = Description of Artificial Sequence: Synthetic coding sequence
  source 1..1386: mol_type = other DNA
atgccccccagcggccccagaggcaccctgctgctgctgcccctgctgctgctgctgctgctgagagccgtgctggccgtgcccctggagagaggcgcccccaacaaggaggagacccccgccaccgagagccccgacaccggcctgtactaccacagatacctgcaggaggtgatcgacgtgctggagaccgacggccacttcagagagaagctgcaggccgccaacgccgaggacatcaagagcggcaagctgagcagagagctggacttcgtgagccaccacgtgagaaccaagctggacgagctgaagagacaggaggtgagcagactgagaatgctgctgaaggccaagatggacgccgagcaggaccccaacgtgcaggtggaccacctgaacctgctgaagcagttcgagcacctggacccccagaaccagcacaccttcgaggccagagacctggagctgctgatccagaccgccaccagagacctggcccagtacgacgccgcccaccacgaggagttcaagagatacgagatgctgaaggagcacgagagaagaagatacctggagagcctgggcgaggagcagagaaaggaggccgagagaaagctggaggagcagcagagaagacacagagagcaccccaaggtgaacgtgcccggcagccaggcccagctgaaggaggtgtgggaggagctggacggcctggaccccaacagattcaaccccaagaccttcttcatcctgcacgacatcaacagcgacggcgtgctggacgagcaggagctggaggccctgttcaccaaggagctggagaaggtgtacgaccccaagaacgaggaggacgacatgagagagatggaggaggagagactgagaatgagagagcacgtgatgaagaacgtggacaccaaccaggacagactggtgaccctggaggagttcctggccagcacccagagaaaggagttcggcgacaccggcgagggctgggagaccgtggagatgcaccccgcctacaccgaggaggagctgagaagattcgaggaggagctggccgccagagaggccgagctgaacgccaaggcccagagactgagccaggagaccgaggccctgggcagaagccagggcagactggaggcccagaagagagagctgcagcaggccgtgctgcacatggagcagagaaagcagcagcagcagcagcagcagggccacaaggcccccgccgcccaccccgagggccagctgaagttccaccccgacaccgacgacgtgcccgtgcccgcccccgccggcgaccagaaggaggtggacaccagcgagaagaagctgctggagagactgcccgaggtggaggtgccccagcacctgtag

SEQ ID NO: 91654 - DNA, 1386 bp, synthetic construct; identical to SEQ ID NO: 91653
  misc_feature 1..1386: note = Description of Artificial Sequence: Synthetic coding sequence
  source 1..1386: mol_type = other DNA

SEQ ID NO: 91655 - DNA, 1386 bp, synthetic construct; identical to SEQ ID NO: 91653
  misc_feature 1..1386: note = Description of Artificial Sequence: Synthetic coding sequence
  source 1..1386: mol_type = other DNA

SEQ ID NO: 91656 - DNA, 375 bp, synthetic construct
  misc_feature 1..375: note = Description of Artificial Sequence: Synthetic coding sequence
  source 1..375: mol_type = other DNA
atgccccccagcggccccagaggcaccctgctgctgctgcccctgctgctgctgctgctgctgagagccgtgctggccgtgcccctggagagaggcgcccccaacaaggaggagacccccgccaccgagagccccgacaccggcctgtactaccacagatacctgcaggaggtgatcgacgtgctggagaccgacggccacttcagagagaagctgcaggccgccaacgccgaggacatcaagagcggcaagctgagcagagagctggacttcgtgagccaccacgtgagaaccaagctggacgagctgaagagacaggaggtgagcagactgagaatgctgctgaaggccaagatggacgccgagcaggactag

SEQ ID NO: 91657 - DNA, 336 bp, synthetic construct
  misc_feature 1..336: note = Description of Artificial Sequence: Synthetic coding sequence
  source 1..336: mol_type = other DNA
atgccccccagcggccccagaggcaccctgctgctgctgcccctgctgctgctgctgctgctgagagccgtgctggccgtgcccctggagagaggcgcccccaacaaggaggagacccccgccaccgagagccccgacaccggcctgtactaccacagatacctgcaggaggtgatcgacgtgctggagaccgacggccacttcagagagaagctgcaggccgccaacgccgaggacatcaagagcggcaagctgagcagagagctggacttcgtgagccaccacgtgagaaccaagctggacgagctgaagagacaggaggtgagcagactgtag

SEQ ID NO: 91658 - DNA, 1263 bp, synthetic construct
  misc_feature 1..1263: note = Description of Artificial Sequence: Synthetic coding sequence
  source 1..1263: mol_type = other DNA
atgagatggagaaccatcctgctgcagtactgcttcctgctgatcacctgcctgctgaccgccctggaggccgtgcccatcgacatcgacaagaccaaggtgcagaacatccaccccgtggagagcgccaagatcgagccccccgacaccggcctgtactacgacgagtacctgaagcaggtgatcgacgtgctggagaccgacaagcacttcagagagaagctgcagaaggccgacatcgaggagatcaagagcggcagactgagcaaggagctggacctggtgagccaccacgtgagaaccaagctggacgagctgaagagacaggaggtgggcagactgagaatgctgatcaaggccaagctggacagcctgcaggacatcggcatggaccaccaggccctgctgaagcagttcgaccacctgaaccacctgaaccccgacaagttcgagagcaccgacctggacatgctgatcaaggccgccaccagcgacctggagcactacgacaagaccagacacgaggagttcaagaagtacgagatgatgaaggagcacgagagaagagagtacctgaagaccctgaacgaggagaagagaaaggaggaggagagcaagttcgaggagatgaagaagaagcacgagaaccaccccaaggtgaaccaccccggcagcaaggaccagctgaaggaggtgtgggaggagaccgacggcctggaccccaacgacttcgaccccaagaccttcttcaagctgcacgacgtgaacagcgacggcttcctggacgagcaggagctggaggccctgttcaccaaggagctggagaaggtgtacgaccccaagaacgaggaggacgacatggtggagatggaggaggagagactgagaatgagagagcacgtgatgagcgaggtggacaccaacaaggacagactggtgaccctggaggagttcctgaaggccaccgagaagaaggagttcctggagcccgacagctgggagaccctggaccagcagcagttcttcaccgaggaggagctgaaggagtacgagaacatcatcgccctgcaggagaacgagctgaagaagaaggccgacgagctgcagaagcagaaggaggagctgcagagacagcacgaccagctggaggcccagaagctggagtaccaccaggtgatccagcagatggagcagaagaagctgcagcagggcatcccccccagcggccccgccggcgagctgaagttcgagcccagagtgtag

SEQ ID NO: 91659 - DNA, 1173 bp, synthetic construct
  misc_feature 1..1173: note = Description of Artificial Sequence: Synthetic coding sequence
  source 1..1173: mol_type = other DNA
atgagatggagaaccatcctgctgcagtactgcttcctgctgatcacctgcctgctgaccgccctggaggccgtgcccatcgacatcgacaagaccaaggtgcagaacatccaccccgtggagagcgccaagatcgagccccccgacaccggcctgtactacgacgagtacctgaagcaggtgatcgacgtgctggagaccgacaagcacttcagagagaagctgcagaaggccgacatcgaggagatcaagagcggcagactgagcaaggagctggacctggtgagccaccacgtgagaaccaagctggacgagctgaagagacaggaggtgggcagactgagaatgctgatcaaggccaagctggacagcctgcaggacatcggcatggaccaccaggccctgctgaagcagttcgaccacctgaaccacctgaaccccgacaagttcgagagcaccgacctggacatgctgatcaaggccgccaccagcgacctggagcactacgacaagaccagacacgaggagttcaagaagtacgagatgatgaaggagcacgagagaagagagtacctgaagaccctgaacgaggagaagagaaaggaggaggagagcaagttcgaggagatgaagaagaagcacgagaaccaccccaaggtgaaccaccccggcagcaaggaccagctgaaggaggtgtgggaggagaccgacggcctggaccccaacgacttcgaccccaagaccttcttcaagctgcacgacgtgaacagcgacggcttcctggacgagcaggagctggaggccctgttcaccaaggagctggagaaggtgtacgaccccaagaacgaggaggacgacatggtggagatggaggaggagagactgagaatgagagagcacgtgatgagcgagaccctggaccagcagcagttcttcaccgaggaggagctgaaggagtacgagaacatcatcgccctgcaggagaacgagctgaagaagaaggccgacgagctgcagaagcagaaggaggagctgcagagacagcacgaccagctggaggcccagaagctggagtaccaccaggtgatccagcagatggagcagaagaagctgcagcagggcatcccccccagcggccccgccggcgagctgaagttcgagccccacatctag

SEQ ID NO: 91660 - DNA, 210 bp, synthetic construct
  misc_feature 1..210: note = Description of Artificial Sequence: Synthetic coding sequence
  source 1..210: mol_type = other DNA
atgagatggagaaccatcctgctgcagtactgcttcctgctgatcacctgcctgctgaccgccctggaggccgtgcccatcgacatcgacaagaccaaggtgcagaacatccaccccgtggagagcgccaagatcgagccccccgacaccggcctgtactacgacgagtacctgaagcaggtgatcgacgtgctggagaccgacaagtag

SEQ ID NO: 91661 - DNA, 105 bp, synthetic construct
  misc_feature 1..105: note = Description of Artificial Sequence: Synthetic coding sequence
  source 1..105: mol_type = other DNA
atgagatggagaaccatcctgctgcagtactgcttcctgctgatcacctgcctgctgaccgccctggaggccgtgcccatcgacatcgacaagaccaaggtgtag

SEQ ID NO: 91662 - DNA, 1263 bp, synthetic construct
  misc_feature 1..1263: note = Description of Artificial Sequence: Synthetic coding sequence
  source 1..1263: mol_type = other DNA
atgagatggagaaccatcctgctgcagtactgcttcctgctgatcacctgcctgctgaccgccctggaggccgtgcccatcgacatcgacaagaccaaggtgcagaacatccaccccgtggagagcgccaagatcgagccccccgacaccggcctgtactacgacgagtacctgaagcaggtgatcgacgtgctggagaccgacaagcacttcagagagaagctgcagaaggccgacatcgaggagatcaagagcggcagactgagcaaggagctggacctggtgagccaccacgtgagaaccaagctggacgagctgaagagacaggaggtgggcagactgagaatgctgatcaaggccaagctggacagcctgcaggacatcggcatggaccaccaggccctgctgaagcagttcgaccacctgaaccacctgaaccccgacaagttcgagagcaccgacctggacatgctgatcaaggccgccaccagcgacctggagcactacgacaagaccagacacgaggagttcaagaagtacgagatgatgaaggagcacgagagaagagagtacctgaagaccctgaacgaggagaagagaaaggaggaggagagcaagttcgaggagatgaagaagaagcacgagaaccaccccaaggtgaaccaccccggcagcaaggaccagctgaaggaggtgtgggaggagaccgacggcctggaccccaacgacttcgaccccaagaccttcttcaagctgcacgacgtgaacagcgacggcttcctggacgagcaggagctggaggccctgttcaccaaggagctggagaaggtgtacgaccccaagaacgaggaggacgacatggtggagatggaggaggagagactgagaatgagagagcacgtgatgagcgaggtggacaccaacaaggacagactggtgaccctggaggagttcctgaaggccaccgagaagaaggagttcctggagcccgacagctgggagaccctggaccagcagcagttcttcaccgaggaggagctgaaggagtacgagaacatcatcgccctgcaggagaacgagctgaagaagaaggccgacgagctgcagaagcagaaggaggagctgcagagacagcacgaccagctggaggcccagaagctggagtaccaccaggtgatccagcagatggagcagaagaagctgcagcagggcatcccccccagcggccccgccggcgagctgaagttcgagccccacatctag

SEQ ID NO: 91663 - DNA, 588 bp, synthetic construct
  misc_feature 1..588: note = Description of Artificial Sequence: Synthetic coding sequence
  source 1..588: mol_type = other DNA
atgagatggagaaccatcctgctgcagtactgcttcctgctgatcacctgcctgctgaccgccctggaggccgtgcccatcgacatcgacaagaccaaggtgcagaacatccaccccgtggagagcgccaagatcgagccccccgacaccggcctgtactacgacgagtacctgaagcaggtgatcgacgtgctggagaccgacaagcacttcagagagaagctgcagaaggccgacatcgaggagatcaagagcggcagactgagcaaggagctggacctggtgagccaccacgtgagaaccaagctggacgagctgaagagacaggaggtgggcagactgagaatgctgatcaaggccaagctggacagcctgcaggacatcggcatggaccaccaggccctgctgaagcagttcgaccacctgaaccacctgaaccccgacaagttcgagagcaccgacctggacatgctgatcaaggccgccaccagcgacctggagcactacgacaagaccagacacgaggagttcaagaagtacgagatgatgaaggagcacgagagaagagagtacctgaagaccctgtag

SEQ ID NO: 91664 - DNA, 597 bp, synthetic construct
  misc_feature 1..597: note = Description of Artificial Sequence: Synthetic coding sequence
  source 1..597: mol_type = other DNA
atgagatggagaaccatcctgctgcagtactgcttcctgctgatcacctgcctgctgaccgccctggaggccgtgcccatcgacatcgacaagaccaaggtgcagaacatccaccccgtggagagcgccaagatcgagccccccgacaccggcctgtactacgacgagtacctgaagcaggtgatcgacgtgctggagaccgacaagcacttcagagagaagctgcagaaggccgacatcgaggagatcaagagcggcagactgagcaaggagctggacctggtgagccaccacgtgagaaccaagctggacgagctgaagagacaggaggtgggcagactgagaatgctgatcaaggccaagctggacagcctgcaggacatcggcatggaccaccaggccctgctgaagcagttcgaccacctgaaccacctgaaccccgacaagttcgagagcaccgacctggacatgctgatcaaggccgccaccagcgacctggagcactacgacaagaccagacacgaggagttcaagaagtacgagatgatgaaggagcacgagagaagagagtacctgaagaccctgaacgaggagtag

SEQ ID NO: 91665 - DNA, 105 bp, synthetic construct; identical to SEQ ID NO: 91661
  misc_feature 1..105: note = Description of Artificial Sequence: Synthetic coding sequence
  source 1..105: mol_type = other DNA

SEQ ID NO: 91666 - DNA, 120 bp, synthetic construct
  misc_feature 1..120: note = Description of Artificial Sequence: Synthetic coding sequence
  source 1..120: mol_type = other DNA
atgagatggagaaccatcctgctgcagtactgcttcctgctgatcacctgcctgctgaccgccctggaggccgtgcccatcgacatcgacaagaccaaggtgcagaacatccacccctag

SEQ ID NO: 91667 - DNA, 210 bp, synthetic construct; identical to SEQ ID NO: 91660
  misc_feature 1..210: note = Description of Artificial Sequence: Synthetic coding sequence
  source 1..210: mol_type = other DNA

SEQ ID NO: 91668 - DNA, 273 bp, synthetic construct
  misc_feature 1..273: note = Description of Artificial Sequence: Synthetic coding sequence
  source 1..273: mol_type = other DNA
atgagatggagaaccatcctgctgcagtactgcttcctgctgatcacctgcctgctgaccgccctggaggccgtgcccatcgacatcgacaagaccaaggtgcagaacatccaccccgtggagagcgccaagatcgagccccccgacaccggcctgtactacgacgagtacctgaagcaggtgatcgacgtgctggagaccgacaagcacttcagagagaagctgcagaaggccgacatcgaggagatcaagagcggcagactgagcaagtag

SEQ ID NO: 91669 - DNA, 1323 bp, synthetic construct
  misc_feature 1..1323: note = Description of Artificial Sequence: Synthetic coding sequence
  source 1..1323: mol_type = other DNA
atgatcatccccagcctggaggagctggacagcctgaagtacagcgacctgcagaacctggccaagagcctgggcctgagagccaacctgagagccaccaagctgctgaaggccctgaagggctacatcaagcacgaggccagaaagggcaacgagaaccaggacgagagccagaccagcgccagcagctgcgacgagaccgagatccagatcagcaaccaggaggaggccgagagacagcccctgggccacgtgaccaagaccagaagaagatgcaagaccgtgagagtggaccccgacagccagcagaaccacagcgagatcaagatcagcaaccccaccgagttccagaaccacgagaagcaggagagccaggacctgagagccaccgccaaggtgcccagcccccccgacgagcaccaggaggccgagaacgccgtgagcagcggcaacagagacagcaaggtgcccagcgagggcaagaagagcctgtacaccgacgagagcagcaagcccggcaagaacaagagaaccgccatcaccacccccaacttcaagaagctgcacgaggcccacttcaaggagatggagagcatcgaccagtacatcgagagaaagaagaagcacttcgaggagcacaacagcatgaacgagctgaagcagcccatcaacaagggcggcgtgagaacccccgtgccccccagaggcagactgagcgtggccagcacccccatcagccagagaagaagccagggcagaagctgcggccccgccagccagagcaccctgggcctgaagggcagcctgaagagaagcgccatcagcgccgccaagaccggcgtgagattcagcgccgccaccaaggacaacgagcacaagagaagcctgaccaagacccccgccagaaagagcgcccacgtgaccgtgagcggcggcacccccaagggcgaggccgtgctgggcacccacaagctgaagaccatcaccggcaacagcgccgccgtgatcacccccttcaagctgaccaccgaggccacccagacccccgtgagcaacaagaagcccgtgttcgacctgaaggccagcctgagcagacccctgaactacgagccccacaagggcaagctgaagccctggggccagagcaaggagaacaactacctgaaccagcacgtgaacagaatcaacttctacaagaagacctacaagcagccccacctgcagaccaaggaggagcagagaaagaagagagagcaggagagaaaggagaagaaggccaaggtgctgggcatgagaagaggcctgatcctggccgaggactag

SEQ ID NO: 91670 - DNA, 1209 bp, synthetic construct
  misc_feature 1..1209: note = Description of Artificial Sequence: Synthetic coding sequence
  source 1..1209: mol_type = other DNA
atgatcatccccagcctggaggagctggacagcctgaagtacagcgacctgcagaacctggccaagagcctgggcctgagagccaacctgagagccaccaagctgctgaaggccctgaagggctacatcaagcacgaggccagaaagggcaacgagaaccaggacgagagccagaccagcgccagcagctgcgacgagaccgagatccagatcagcaaccaggaggaggccgagagacagcccctgggccacgtgaccaagaccagaagaagatgcaagaccgtgagagtggaccccgacagccagcagaaccacagcgagatcaagatcagcaaccccaccgagttccagaaccacgagaagcaggagagccaggacctgagagccaccgccaaggtgcccagcccccccgacgagcaccaggaggccgagaacgccgtgagcagcggcaacagagacagcaaggtgcccagcgagggcaagaagagcctgtacaccgacgagagcagcaagcccggcaagaacaagagaaccgccatcaccacccccaacttcaagaagctgcacgaggcccacttcaaggagatggagagcatcgaccagtacatcgagagaaagaagaagcacttcgaggagcacaacagcatgaacgagctgaagcagcagcccatcaacaagggcggcgtgagaacccccgtgccccccagaggcagactgagcgtggccagcacccccatcagccagagaagaagccagggcagaagctgcggccccgccagccagagcaccctgggcctgaagggcagcctgaagagaagcgccatcagcgccgccaagaccggcgtgagattcagcgccgccaccaaggacaacgagcacaagagaagcctgaccaagacccccgccagaaagagcgcccacgtgaccgtgagcggcggcacccccaagggcgaggccgtgctgggcacccacaagctgaagaccatcaccggcaacagcgccgccggcaagctgaagccctggggccagagcaaggagaacaactacctgaaccagcacgtgaacagaatcaacttctacaagaagacctacaagcagccccacctgcagaccaaggaggagcagagaaagaagagagagcaggagagaaaggagaagaaggccaaggtgctgggcatgagaagaggcctgatcctggccgaggactag

SEQ ID NO: 91671 - DNA, 1326 bp, synthetic construct
  misc_feature 1..1326: note = Description of Artificial Sequence: Synthetic coding sequence
  source 1..1326: mol_type = other DNA
atgatcatccccagcctggaggagctggacagcctgaagtacagcgacctgcagaacctggccaagagcctgggcctgagagccaacctgagagccaccaagctgctgaaggccctgaagggctacatcaagcacgaggccagaaagggcaacgagaaccaggacgagagccagaccagcgccagcagctgcgacgagaccgagatccagatcagcaaccaggaggaggccgagagacagcccctgggccacgtgaccaagaccagaagaagatgcaagaccgtgagagtggaccccgacagccagcagaaccacagcgagatcaagatcagcaaccccaccgagttccagaaccacgagaagcaggagagccaggacctgagagccaccgccaaggtgcccagcccccccgacgagcaccaggaggccgagaacgccgtgagcagcggcaacagagacagcaaggtgcccagcgagggcaagaagagcctgtacaccgacgagagcagcaagcccggcaagaacaagagaaccgccatcaccacccccaacttcaagaagctgcacgaggcccacttcaaggagatggagagcatcgaccagtacatcgagagaaagaagaagcacttcgaggagcacaacagcatgaacgagctgaagcagcagcccatcaacaagggcggcgtgagaacccccgtgccccccagaggcagactgagcgtggccagcacccccatcagccagagaagaagccagggcagaagctgcggccccgccagccagagcaccctgggcctgaagggcagcctgaagagaagcgccatcagcgccgccaagaccggcgtgagattcagcgccgccaccaaggacaacgagcacaagagaagcctgaccaagacccccgccagaaagagcgcccacgtgaccgtgagcggcggcacccccaagggcgaggccgtgctgggcacccacaagctgaagaccatcaccggcaacagcgccgccgtgatcacccccttcaagctgaccaccgaggccacccagacccccgtgagcaacaagaagcccgtgttcgacctgaaggccagcctgagcagacccctgaactacgagccccacaagggcaagctgaagccctggggccagagcaaggagaacaactacctgaaccagcacgtgaacagaatcaacttctacaagaagacctacaagcagccccacctgcagaccaaggaggagcagagaaagaagagagagcaggagagaaaggagaagaaggccaaggtgctgggcatgagaagaggcctgatcctggccgaggactag

SEQ ID NO: 91672 - DNA, 1323 bp, synthetic construct
  misc_feature 1..1323: note = Description of Artificial Sequence: Synthetic coding sequence
  source 1..1323: mol_type = other DNA
atgatcatccccagcctggaggagctggacagcctgaagtacagcgacctgcagaacctggccaagagcctgggcctgagagccaacctgagagccaccaagctgctgaaggccctgaagggctacatcaagcacgaggccagaaagggcaacgagaaccaggacgagagccagaccagcgccagcagctgcgacgagaccgagatccagatcagcaaccaggaggaggccgagagacagcccctgggccacgtgaccaagaccagaagaagatgcaagaccgtgagagtggaccccgacagccagaaccacagcgagatcaagatcagcaaccccaccgagttccagaaccacgagaagcaggagagccaggacctgagagccaccgccaaggtgcccagcccccccgacgagcaccaggaggccgagaacgccgtgagcagcggcaacagagacagcaaggtgcccagcgagggcaagaagagcctgtacaccgacgagagcagcaagcccggcaagaacaagagaaccgccatcaccacccccaacttcaagaagctgcacgaggcccacttcaaggagatggagagcatcgaccagtacatcgagagaaagaagaagcacttcgaggagcacaacagcatgaacgagctgaagcagcagcccatcaacaagggcggcgtgagaacccccgtgccccccagaggcagactgagcgtggccagcacccccatcagccagagaagaagccagggcagaagctgcggccccgccagccagagcaccctgggcctgaagggcagcctgaagagaagcgccatcagcgccgccaagaccggcgtgagattcagcgccgccaccaaggacaacgagcacaagagaagcctgaccaagacccccgccagaaagagcgcccacgtgaccgtgagcggcggcacccccaagggcgaggccgtgctgggcacccacaagctgaagaccatcaccggcaacagcgccgccgtgatcacccccttcaagctgaccaccgaggccacccagacccccgtgagcaacaagaagcccgtgttcgacctgaaggccagcctgagcagacccctgaactacgagccccacaagggcaagctgaagccctggggccagagcaaggagaacaactacctgaaccagcacgtgaacagaatcaacttctacaagaagacctacaagcagccccacctgcagaccaaggaggagcagagaaagaagagagagcaggagagaaaggagaagaaggccaaggtgctgggcatgagaagaggcctgatcctggccgaggactag

SEQ ID NO: 91673 - DNA, 1320 bp, synthetic construct
  misc_feature 1..1320: note = Description of Artificial Sequence: Synthetic coding sequence
  source 1..1320: mol_type = other DNA
atgatcatccccagcctggaggagctggacagcctgaagtacagcgacctgcagaacctggccaagagcctgggcctgagagccaacctgagagccaccaagctgctgaaggccctgaagggctacatcaagcacgaggccagaaagggcaacgagaaccaggacgagagccagaccagcgccagcagctgcgacgagaccgagatccagatcagcaaccaggaggaggccgagagacagcccctgggccacgtgaccaagaccagaagaagatgcaagaccgtgagagtggaccccgacagccagaaccacagcgagatcaagatcagcaaccccaccgagttccagaaccacgagaagcaggagagccaggacctgagagccaccgccaaggtgcccagcccccccgacgagcaccaggaggccgagaacgccgtgagcagcggcaacagagacagcaaggtgcccagcgagggcaagaagagcctgtacaccgacgagagcagcaagcccggcaagaacaagagaaccgccatcaccacccccaacttcaagaagctgcacgaggcccacttcaaggagatggagagcatcgaccagtacatcgagagaaagaagaagcacttcgaggagcacaacagcatgaacgagctgaagcagcccatcaacaagggcggcgtgagaacccccgtgccccccagaggcagactgagcgtggccagcacccccatcagccagagaagaagccagggcagaagctgcggccccgccagccagagcaccctgggcctgaagggcagcctgaagagaagcgccatcagcgccgccaagaccggcgtgagattcagcgccgccaccaaggacaacgagcacaagagaagcctgaccaagacccccgccagaaagagcgcccacgtgaccgtgagcggcggcacccccaagggcgaggccgtgctgggcacccacaagctgaagaccatcaccggcaacagcgccgccgtgatcacccccttcaagctgaccaccgaggccacccagacccccgtgagcaacaagaagcccgtgttcgacctgaaggccagcctgagcagacccctgaactacgagccccacaagggcaagctgaagccctggggccagagcaaggagaacaactacctgaaccagcacgtgaacagaatcaacttctacaagaagacctacaagcagccccacctgcagaccaaggaggagcagagaaagaagagagagcaggagagaaaggagaagaaggccaaggtgctgggcatgagaagaggcctgatcctggccgaggactag

SEQ ID NO: 91674 - DNA, 1281 bp, synthetic construct
  misc_feature 1..1281: note = Description of Artificial Sequence: Synthetic coding sequence
  source 1..1281: mol_type = other DNA
atgatcatccccagcctggaggagctggacagcctgaagtacagcgacctgcagaacctggccaagagcctgggcctgagagccaacctgagagccaccaagctgctgaaggccctgaagggctacatcaagcacgaggccagaaagggcaacgagaaccaggacgagagccagaccagcgccagcagctgcgacgagaccgagatccagatcagcaaccaggaggaggccgagagacagcccctgggccacgtgaccaagaccagaagaagatgcaagaccgtgagagtggaccccgacagccagaaccacgagaagcaggagagccaggacctgagagccaccgccaaggtgcccagcccccccgacgagcaccaggaggccgagaacgccgtgagcagcggcaacagagacagcaaggtgcccagcgagggcaagaagagcctgtacaccgacgagagcagcaagcccggcaagaacaagagaaccgccatcaccacccccaacttcaagaagctgcacgaggcccacttcaaggagatggagagcatcgaccagtacatcgagagaaagaagaagcacttcgaggagcacaacagcatgaacgagctgaagcagcagcccatcaacaagggcggcgtgagaacccccgtgccccccagaggcagactgagcgtggccagcacccccatcagccagagaagaagccagggcagaagctgcggccccgccagccagagcaccctgggcctgaagggcagcctgaagagaagcgccatcagcgccgccaagaccggcgtgagattcagcgccgccaccaaggacaacgagcacaagagaagcctgaccaagacccccgccagaaagagcgcccacgtgaccgtgagcggcggcacccccaagggcgaggccgtgctgggcacccacaagctgaagaccatcaccggcaacagcgccgccgtgatcacccccttcaagctgaccaccgaggccacccagacccccgtgagcaacaagaagcccgtgttcgacctgaaggccagcctgagcagacccctgaactacgagccccacaagggcaagctgaagccctggggccagagcaaggagaacaactacctgaaccagcacgtgaacagaatcaacttctacaagaagacctacaagcagccccacctgcagaccaaggaggagcagagaaagaagagagagcaggagagaaaggagaagaaggccaaggtgctgggcatgagaagaggcctgatcctggccgaggactag

SEQ ID NO: 91675 - DNA, 2250 bp, synthetic construct
  misc_feature 1..2250: note = Description of Artificial Sequence: Synthetic coding sequence
  source 1..2250: mol_type = other DNA
atggccgccgccggcagcagaaagagaagactggccgagctgaccgtggacgagttcctggccagcggcttcgacagcgagagcgagagcgagagcgagaacagcccccaggccgagaccagagaggccagagaggccgccagaagccccgacaagcccggcggcagccccagcgccagcagaagaaagggcagagccagcgagcacaaggaccagctgagcagactgaaggacagagaccccgagttctacaagttcctgcaggagaacgaccagagcctgctgaacttcagcgacagcgacagcagcgaggaggaggagggccccttccacagcctgcccgacgtgctggaggaggccagcgaggaggaggacggcgccgaggagggcgaggacggcgacagagtgcccagaggcctgaagggcaagaagaacagcgtgcccgtgaccgtggccatggtggagagatggaagcaggccgccaagcagagactgacccccaagctgttccacgaggtggtgcaggccttcagagccgccgtggccaccaccagaggcgaccaggagagcgccgaggccaacaagttccaggtgaccgacagcgccgccttcaacgccctggtgaccttctgcatcagagacctgatcggctgcctgcagaagctgctgttcggcaaggtggccaaggacagcagcagaatgctgcagcccagcagcagccccctgtggggcaagctgagagtggacatcaaggcctacctgggcagcgccatccagctggtgagctgcctgagcgagaccaccgtgctggccgccgtgctgagacacatcagcgtgctggtgccctgcttcctgaccttccccaagcagtgcagaatgctgctgaagagaatggtgatcgtgtggagcaccggcgaggagagcctgagagtgctggccttcctggtgctgagcagagtgtgcagacacaagaaggacaccttcctgggccccgtgctgaagcagatgtacatcacctacgtgagaaactgcaagttcaccagccccggcgccctgcccttcatcagcttcatgcagtggaccctgaccgagctgctggccctggagcccggcgtggcctaccagcacgccttcctgtacatcagacagctggccatccacctgagaaacgccatgaccaccagaaagaaggagacctaccagagcgtgtacaactggcagtacgtgcactgcctgttcctgtggtgcagagtgctgagcaccgccggccccagcgaggccctgcagcccctggtgtaccccctggcccaggtgatcatcggctgcatcaagctgatccccaccgccagattctaccccctgagaatgcactgcatcagagccctgaccctgctgagcggcagcagcggcgccttcatccccgtgctgcccttcatcctggagatgttccagcaggtggacttcaacagaaagcccggcagaatgagcagcaagcccatcaacttcagcgtgatcctgaagctgagcaacgtgaacctgcaggagaaggcctacagagacggcctggtggagcagctgtacgacctgaccctggagtacctgcacagccaggcccactgcatcggcttccccgagctggtgctgcccgtggtgctgcagctgaagagcttcctgagagagtgcaaggtggccaactactgcagacaggtgcagcagctgctgggcaaggtgcaggagaacagcgcctacatctgcagcagaagacagagagtgagcttcggcgtgagcgagcagcaggccgtggaggcctgggagaagctgaccagagaggagggcacccccctgaccctgtactacagccactggagaaagctgagagacagagagatccagctggagatcagcggcaaggagagactggaggacctgaacttccccgagatcaagagaagaaagatggccgacagaaaggacgaggacagaaagcagttcaaggacctgttcgacctgaacagcagcgaggaggacgacaccgagggcttcagcgagagaggcatcctgagacccctgagcaccagacacggcgtggaggacgacgaggaggacgaggaggagggcgaggaggacagcagcaacagcgaggacggcgaccccgacgccgaggccggcctggcccccggcgagctgcagcagctggcccagggccccgaggacgagctggaggacctgcagctgagcgaggacgactag

SEQ ID NO: 91676 - DNA, 2403 bp, synthetic construct
  misc_feature 1..2403: note = Description of Artificial Sequence: Synthetic coding sequence
  source 1..2403: mol_type = other DNA
atgaagttcagaagaaacaagaagcagatccccagcttcagaaagctgatcaagaccagcaaggtgaagctggagaacaagctgaagaacaagcagttcaagcagcagagcaccctgaagaagtacagaaaggagcagagaaagctgagacaggccgtgaaggacgccgtgagcaagaagcccatccccctggagaaccccaaggagaagagacccggcaagagaatcgagagagaggaggaggaggaggaggaggccctgcccctggacatgatggacgaggacgacctgcagctgatgaaggacctgggccagagagtgagcttcctgaccagagacctgagcagcagcgagcccgtgcacgccaagaagagaaagcacgagagaatcatcgacaagtacgagaagatccccagaaccctgcagaccgcccccgagaaggagctgatccacctgctgcccatcaaggacaagagcggcatcatcccccagaccagagagaagcccgtgaccgacagcaacaaggacgaggaggaccaggaggaggagagagagctggaggaggagatcatcgaggaccccatccaggagctgaccatcgaggagcacctgatcgagagaaagaagaagctgcaggagaagaagatgcacatcgccgccctggccagcgccatcctgagcgaccccgagaacaacatcaagaagctgaaggagctgagaagcatgctgatggagcaggaccccgacgtggccgtgaccgtgagaaagctggtgatcgtgagcctgatggagctgttcaaggacatcacccccagctacaagatcagacccctgaccgaggccgagaagagcaccaagaccagaaaggagacccagaagctgagagagttcgaggagggcctggtgagccagtacaagttctacctggagaacctggagcagatggtgaaggactggaagcagagaaagctgaagaagagcaacgtggtgagcctgaaggcctacaagggcctggccgaggtggccgtgaagagcctgtgcgagctgctggtggccctgccccacttcaacttccacaacaacatcatcgtgctgatcgtgcccctgatgaacgacatgagcaagctgatcagcgagatgtgctgcgaggccgtgaagaagctgttcaagcaggacaagctgggccaggccagcctgggcgtgatcaaggtgatcagcggcttcgtgaagggcagaaactacgaggtgagacccgagatgctgaagaccttcctgtgcctgagaatcaaggaggtggaggtgaagaaggacaccgaggacatcaacaagcccaagaagttcatgaccttcaaggagaagagaaagagcctgagcagaatgcagagaaagtggaagaaggccgaggagaagctggagagagagctgagagaggccgaggccagcgagagcaccgagaagaagctgaagctgcacaccgagaccctgaacatcgtgttcgtgacctacttcagaatcctgaagaaggcccagagaagccccctgctgcccgccgtgctggagggcctggccaagttcgcccacctgatcaacgtggagttcttcgacgacctgctggtggtgctgcacaccctgatcgagagcggcgacctgagctaccaggagagcctgcactgcgtgcagaccgccttccacatcctgagcggccagggcgacgtgctgaacatcgaccccctgaagttctacacccacctgtacaagaccctgttcaagctgcacgccggcgccaccaacgagggcgtggagatcgtgctgcagtgcctggacgtgatgctgaccaagagaagaaagcaggtgagccagcagagagccctggccttcatcaagagactgtgcaccctggccctgcacgtgctgcccaacagcagcatcggcatcctggccaccaccagaatcctgatgcacaccttccccaagaccgacctgctgctggacagcgagagccagggcagcggcgtgttcctgcccgagctggacgagcccgagtactgcaacgcccagaacaccgccctgtgggagctgcacgccctgagaagacactaccaccccatcgtgcagagattcgccgcccacctgatcgccggcgcccccagcgagggcagcggcgccctgaagcccgagctgagcagaagaagcgccaccgagctgttcgaggcctacagcatggccgagatgaccttcaacccccccgtggagagcagcaaccccaagatcaagggcaagttcctgcagggcgacagcttcctgaacgaggacctgaaccagctgatcaagagatacagcagcgaggtggccaccgagagccccctggacttcaccaagtacctgaagaccagcctgcactag

SEQ ID NO: 91677 - DNA, 2403 bp, synthetic construct
  misc_feature 1..2403: note = Description of Artificial Sequence: Synthetic coding sequence
  source 1..2403: mol_type = other DNA
atgaaggccagaagaaacaagaagcagatccccagcttcagaaagctgatcaagaccagcaaggtgaagctggagaacaagctgaagaacaagcagttcaagcagcagagcaccctgaagaagtacagaaaggagcagagaaagctgagacaggccgtgaaggacgccgtgagcaagaagcccatccccctggagaaccccaaggagaagagacccggcaagagaatcgagagagaggaggaggaggaggaggaggccctgcccctggacatgatggacgaggacgacctgcagctgatgaaggacctgggccagagagtgagcttcctgaccagagacctgagcagcagcgagcccgtgcacgccaagaagagaaagcacgagagaatcatcgacaagtacgagaagatccccagaaccctgcagaccgcccccgagaaggagctgatccacctgctgcccatcaaggacaagagcggcatcatcccccagaccagagagaagcccgtgaccgacagcaacaaggacgaggaggaccaggaggaggagagagagctggaggaggagatcatcgaggaccccatccaggagctgaccatcgaggagcacctgatcgagagaaagaagaagctgcaggagaagaagatgcacatcgccgccctggccagcgccatcctgagcgaccccgagaacaacatcaagaagctgaaggagctgagaagcatgctgatggagcaggaccccgacgtggccgtgaccgtgagaaagctggtgatcgtgagcctgatggagctgttcaaggacatcacccccagctacaagatcagacccctgaccgaggccgagaagagcaccaagaccagaaaggagacccagaagctgagagagttcgaggagggcctggtgagccagtacaagttctacctggagaacctggagcagatggtgaaggactggaagcagagaaagctgaagaagagcaacgtggtgagcctgaaggcctacaagggcctggccgaggtggccgtgaagagcctgtgcgagctgctggtggccctgccccacttcaacttccacaacaacatcatcgtgctgatcgtgcccctgatgaacgacatgagcaagctgatcagcgagatgtgctgcgaggccgtgaagaagctgttcaagcaggacaagctgggccaggccagcctgggcgtgatcaaggtgatcagcggcttcgtgaagggcagaaactacgaggtgagacccgagatgctgaagaccttcctgtgcctgagaatcaaggaggtggaggtgaagaaggacaccgaggacatcaacaagcccaagaagttcatgaccttcaaggagaagagaaagagcctgagcagaatgcagagaaagtggaagaaggccgaggagaagctggagagagagctgagagaggccgaggccagcgagagcaccgagaagaagctgaagctgcacaccgagaccctgaacatcgtgttcgtgacctacttcagaatcctgaagaaggcccagagaagccccctgctgcccgccgtgctggagggcctggccaagttcgcccacctgatcaacgtggagttcttcgacgacctgctggtggtgctgcacaccctgatcgagagcggcgacctgagctaccaggagagcctgcactgcgtgcagaccgccttccacatcctgagcggccagggcgacgtgctgaacatcgaccccctgaagttctacacccacctgtacaagaccctgttcaagctgcacgccggcgccaccaacgagggcgtggagatcgtgctgcagtgcctggacgtgatgctgaccaagagaagaaagcaggtgagccagcagagagccctggccttcatcaagagactgtgcaccctggccctgcacgtgctgcccaacagcagcatcggcatcctggccaccaccagaatcctgatgcacaccttccccaagaccgacctgctgctggacagcgagagccagggcagcggcgtgttcctgcccgagctggacgagcccgagtactgcaacgcccagaacaccgccctgtgggagctgcacgccctgagaagacactaccaccccatcgtgcagagattcgccgcccacctgatcgccggcgcccccagcgagggcagcggcgccctgaagcccgagctgagcagaagaagcgccaccgagctgttcgaggcctacagcatggccgagatgaccttcaacccccccgtggagagcagcaaccccaagatcaagggcaagttcctgcagggcgacagcttcctgaacgaggacctgaaccagctgatcaagagatacagcagcgaggtggccaccgagagccccctggacttcaccaagtacctgaagaccagcctgcactag

SEQ ID NO: 91678 - DNA, 1506 bp, synthetic construct
  misc_feature 1..1506: note = Description of Artificial Sequence: Synthetic coding sequence
  source 1..1506: mol_type = other DNA
atggagctgttcaaggacatcacccccagctacaagatcagacccctgaccgaggccgagaagagcaccaagaccagaaaggagacccagaagctgagagagttcgaggagggcctggtgagccagtacaagttctacctggagaacctggagcagatggtgaaggactggaagcagagaaagctgaagaagagcaacgtggtgagcctgaaggcctacaagggcctggccgaggtggccgtgaagagcctgtgcgagctgctggtggccctgccccacttcaacttccacaacaacatcatcgtgctgatcgtgcccctgatgaacgacatgagcaagctgatcagcgagatgtgctgcgaggccgtgaagaagctgttcaagcaggacaagctgggccaggccagcctgggcgtgatcaaggtgatcagcggcttcgtgaagggcagaaactacgaggtgagacccgagatgctgaagaccttcctgtgcctgagaatcaaggaggtggaggtgaagaaggacaccgaggacatcaacaagcccaagaagttcatgaccttcaaggagaagagaaagagcctgagcagaatgcagagaaagtggaagaaggccgaggagaagctggagagagagctgagagaggccgaggccagcgagagcaccgagaagaagctgaagctgcacaccgagaccctgaacatcgtgttcgtgacctacttcagaatcctgaagaaggcccagagaagccccctgctgcccgccgtgctggagggcctggccaagttcgcccacctgatcaacgtggagttcttcgacgacctgctggtggtgctgcacaccctgatcgagagcggcgacctgagctaccaggagagcctgcactgcgtgcagaccgccttccacatcctgagcggccagggcgacgtgctgaacatcgaccccctgaagttctacacccacctgtacaagaccctgttcaagctgcacgccggcgccaccaacgagggcgtggagatcgtgctgcagtgcctggacgtgatgctgaccaagagaagaaagcaggtgagccagcagagagccctggccttcatcaagagactgtgcaccctggccctgcacgtgctgcccaacagcagcatcggcatcctggccaccaccagaatcctgatgcacaccttccccaagaccgacctgctgctggacagcgagagccagggcagcggcgtgttcctgcccgagctggacgagcccgagtactgcaacgcccagaacaccgccctgtgggagctgcacgccctgagaagacactaccaccccatcgtgcagagattcgccgcccacctgatcgccggcgcccccagcgagggcagcggcgccctgaagcccgagctgagcagaagaagcgccaccgagctgttcgaggcctacagcatggccgagatgaccttcaacccccccgtggagagcagcaaccccaagatcaaggtgaccaccaagggctag

SEQ ID NO: 91679 - DNA, 1551 bp, synthetic construct
  misc_feature 1..1551: note = Description of Artificial Sequence: Synthetic coding sequence
  source 1..1551: mol_type = other DNA
atggagagagagcccggcgccgccggcgtgagaagagccctgggcagaagactggaggccgtgctggccagcagaagcgaggccaacgccgtgttcgacatcctggccgtgctgcagagcgaggaccaggaggagatccaggaggccgtgagaacctgcagcagactgttcggcgccctgctggagagaggcgagctgttcgtgggccagctgcccagcgaggagatggtgatgaccggcagccagggcgccaccagaaagtacaaggtgtggatgagacacagataccacagctgctgcaacagactgggcgagctgctgggccaccccagcttccaggtgaaggagctggccctgagcgccctgctgaagttcgtgcagctggagggcgcccaccccctggagaagagcaagtgggagggcaactacctgttccccagagagctgttcaagctggtggtgggcggcctgctgagccccgaggaggaccagagcctgctgctgagccagttcagagagtacctggactacgacgacaccagataccacaccatgcaggccgccgtggacgccgtggccagagtgaccggccagcaccccgaggtgccccccgccttctggaacaacgccttcaccctgctgagcgccgtgagcctgcccagaagagagcccaccgtgagcagcttctacgtgaagagagccgagctgtgggacacctggaaggtggcccacctgaaggagcacagaagagtgttccaggccatgtggctgagcttcctgaagcacaagctgcccctgagcctgtacaagaaggtgctgctgatcgtgcacgacgccatcctgccccagctggcccagcccaccctgatgatcgacttcctgaccagagcctgcgacctgggcggcgccctgagcctgctggccctgaacggcctgttcatcctgatccacaagcacaacctggagtaccccgacttctacagaaagctgtacggcctgctggaccccagcgtgttccacgtgaagtacagagccagattcttccacctggccgacctgttcctgagcagcagccacctgcccgcctacctggtggccgccttcgccaagagactggccagactggccctgaccgccccccccgaggccctgctgatggtgctgcccttcatctgcaacctgctgagaagacaccccgcctgcagagtgctggtgcacagaccccacggccccgagctggacgccgacccctacgaccccggcgaggaggaccccgcccagagcagagccctggagagcagcctgtgggagctgcaggccctgcagagacactaccaccccgaggtgagcaaggccgccagcgtgatcaaccaggccctgagcatgcccgaggtgagcatcgcccccctgctggagctgaccgcctacgagatcttcgagagagacctgaagaagaagggccccgagcccgtgcccctggagttcatccccgcccagggcctgctgggcagacccggcgagctgtgcgcccagcacttcaccctgagctag

SEQ ID NO: 91680 - DNA, 252 bp, synthetic construct
  misc_feature 1..252: note = Description of Artificial Sequence: Synthetic coding sequence
  source 1..252: mol_type = other DNA
tgacccgaggagctgaccttcgccagcgcccaggccgaggccagagaggaggagagaagagtgagagagaccgtgagaagagacaagaccctgctgaaggagaagagaaagagaagagaggagctgttcatcgagcagaagaagagaaagctgctgcccgacaccatcctggagaagctgaccaccgccagccagaccaacatcaagaagagccccggcaaggtgaaggagggcatgaccatcctgatctag

SEQ ID NO: 91681 - DNA, 774 bp, synthetic construct
  misc_feature 1..774: note = Description of Artificial Sequence: Synthetic coding sequence
  source 1..774: mol_type = other DNA
atggtgcagctgagacccagagccagcagagcccccgccagcgccgaggccatggtggacgagggccagctggccagcgaggaggaggaggccgagcacggcctgctgctgggccagcccagcagcggcgccgccgccgagcccctggaggaggacgaggagggcgacgacgagttcgacgacgaggcccccgaggagctgaccttcgccagcgcccaggccgaggccagagaggaggagagaagagtgagagagaccgtgagaagagacaagaccctgctgaaggagaagagaaagagaagagaggagctgttcatcgagcagaagaagagaaagctgctgcccgacaccatcctggagaagctgaccaccgccagccagaccaacatcaagaagagccccggcaaggtgaaggaggtgaacctgcagaagaagaacgaggactgcgagaagggcaacgacagcaagaaggtgaaggtgcagaaggtgcagagcgtgagccagaacaagagctacctggccgtgagactgaaggaccaggacctgagagacagcagacagcaggccgcccaggccttcatccacaacagcctgtacggccccggcaccaacagaaccaccgtgaacaagttcctgagcctggccaacaagagactgcccgtgaagagagccgccgtgcagttcctgaacaacgcctggggcatccagaagaagcagaacgccaagagattcaagagaagatggatggtgagaaagatgaagaccaagaagtag

SEQ ID NO: 91682 - DNA, 3300 bp, synthetic construct
  misc_feature 1..3300: note = Description of Artificial Sequence: Synthetic coding sequence
  source 1..3300: mol_type = other DNA
atgagcgtgctgaacaagaccaagtggaagggcggcaccctgcagatccagctggccaaggagagcttcctgcacagactggcccaggagagagaggccgccaaggccaagaaggaggagagcaccaccggcaacgccaacctgctggagaagaccggcggcgtggacttccacatgaaggccgtgcccggcaccgaggtgcccggccacaagaactgggtggtgagcaagttcggcagagtgctgcccgtgctgcacctgaagaaccagcacaagagaaagatcatcaagtacgaccccagcaagtactgccacaacctgaagaagatcggcgaggacttcagcaacaccatccccatcagcagcctgacctgggagctggagggcggcaacgaccccatgagcaagaagagaagaggcgagttcagcgacttccacggcccccccaagaagatcatcaaggtgcagaaggacgagagcagcaccggcagcctggccatgagcaccagacccagaagagtgatcgagagaccccccctgacccagcagcaggccgcccagaagagaacctgcgacagcatcacccccagcaagagcagccccgtgcccgtgagcgacacccagaagctgaagaacctgcccttcaagaccagcggcctggagaccgccaagaagagaaacagcatcagcgacgacgacaccgacagcgaggacgagctgagaatgatgatcgccaaggaggagaacctgcagagaaccacccagcccagcatcaacgagagcgagagcgaccccttcgaggtggtgagagacgacttcaagagcggcgtgcacaagctgcacagcctgatcggcctgggcatcaagaacagagtgagctgccacgacagcgacgacgacatcatgagaaacgacagagagtacgacagcggcgacaccgacgagatcatcgccatgaagaagaacgtggccaaggtgaagaacagcaccgagttcagccagatggagaagagcaccaagaagaccagcttcaagaacagagagaactgcgagctgagcgaccactgcatcaagctgcagaagagaaagagcaacgtggagagcgccctgagccacggcctgaagagcctgaacagaaagagccccagccacagcagcagcagcgaggacgccgacagcgccagcgagctggccgacagcgagggcggcgaggagtacaacgccatgatgaagaactgcctgagagtgaacctgaccctggccgacctggagcagctggccggcagcgacctgaaggtgcccaacgaggacaccaagagcgacggccccgagaccaccacccagtgcaagttcgacagaggcagcaagagccccaagacccccaccggcctgagaagaggcagacagtgcatcagacccgccgagatcgtggccagcctgctggagggcgaggagaacacctgcggcaagcagaagcccaaggagaacaacctgaagcccaagttccaggccttcaagggcgtgggctgcctgtacgagaaggagagcatgaagaagagcctgaaggacagcgtggccagcaacaacaaggaccagaacagcatgaagcacgaggaccccagcatcatcagcatggaggacggcagcccctacgtgaacggcagcctgggcgaggtgaccccctgccagcacgccaagaaggccaacggccccaactacatccagccccagaagagacagaccaccttcgagagccaggacagaaaggccgtgagccccagcagcagcgagaagagaagcaagaaccccatcagcagacccctggagggcaagaagagcctgagcctgagcgccaagacccacaacatcggcttcgacaaggacagctgccacagcaccaccaagaccgaggccagccaggaggagagaagcgacagcagcggcctgaccagcctgaagaagagccccaaggtgagcagcaaggacaccagagagatcaagaccgacttcagcctgagcatcagcaacagcagcgacgtgagcgccaaggacaagcacgccgaggacaacgagaagagactggccgccctggaggccagacagaaggccaaggaggtgcagaagaagctggtgcacaacgccctggccaacctggacggccaccccgaggacaagcccacccacatcatcttcggcagcgacagcgagtgcgagaccgaggagaccagcacccaggagcagagccaccccggcgaggagtgggtgaaggagagcatgggcaagaccagcggcaagctgttcgacagcagcgacgacgacgagagcgacagcgaggacgacagcaacagattcaagatcaagccccagttcgagggcagagccggccagaagctgatggacctgcagagccacttcggcaccgacgacagattcagaatggacagcagattcctggagaccgacagcgaggaggagcaggaggaggtgaacgagaagaagaccgccgaggaggaggagctggccgaggagaagaagaaggccctgaacgtggtgcagagcgtgctgcagatcaacctgagcaacagcaccaacagaggcagcgtggccgccaagaagttcaaggacatcatccactacgaccccaccaagcaggaccacgccacctacgagagaaagagagacgacaagcccaaggagagcaaggccaagagaaagaagaagagagaggaggccgagaagctgcccgaggtgagcaaggagatgtactacaacatcgccatggacctgaaggagatcttccagaccaccaagtacaccagcgagaaggaggagggcaccccctggaacgaggactgcggcaaggagaagcccgaggagatccaggaccccgccgccctgaccagcgacgccgagcagcccagcggcttcaccttcagcttcttcgacagcgacaccaaggacatcaaggaggagacctacagagtggagaccgtgaagcccggcaagatcgtgtggcaggaggaccccagactgcaggacagcagcagcgaggaggaggacgtgaccgaggagaccgaccacagaaacagcagccccggcgaggccagcctgctggagaaggagaccaccagattcttcttcttcagcaagaacgacgagagactgcagggcagcgacctgttctggagaggcgtgggcagcaacatgagcagaaacagctgggaggccagaaccaccaacctgagaatggactgcagaaagaagcacaaggacgccaagagaaagatgaagcccaagtag

SEQ ID NO: 91683 - DNA, 3396 bp, synthetic construct
  misc_feature 1..3396: note = Description of Artificial Sequence: Synthetic coding sequence
  source 1..3396: mol_type = other DNA
atgaaggtgaacagagagaccaagagactgtacgtgggcggcctgagccaggacatcagcgaggccgacctgcagaaccagttcagcagattcggcgaggtgagcgacgtggagatcatcaccagaaaggacgaccagggcaacccccagaaggtgttcgcctacatcaacatcagcgtggccgaggccgacctgaagaagtgcatgagcgtgctgaacaagaccaagtggaagggcggcaccctgcagatccagctggccaaggagagcttcctgcacagactggcccaggagagagaggccgccaaggccaagaaggaggagagcaccaccggcaacgccaacctgctggagaagaccggcggcgtggacttccacatgaaggccgtgcccggcaccgaggtgcccggccacaagaactgggtggtgagcaagttcggcagagtgctgcccgtgctgcacctgaagaaccagcacaagcacctgagaaacatcatcaagtacgaccccagcaagtactgccacaacctgaagaagatcggcgaggacttcagcaacaccatccccatcagcagcctgacctgggagctggagggcggcaacgaccccatgagcaagaagagaagaggcgagttcagcgacttccacggcccccccaagaagatcatcaaggtgcagaaggacgagagcagcaccggcagcctggccatgagcaccagacccagaagagtgatcgagagaccccccctgacccagcagcaggccgcccagaagagaacctgcgacagcatcacccccagcaagagcagccccgtgcccgtgagcgacacccagaagctgaagaacctgcccttcaagaccagcggcctggagaccgccaagaagagaaacagcatcagcgacgacgacaccgacagcgaggacgagctgagaatgatgatcgccaaggaggagaacctgcagagaaccacccagcccagcatcaacgagagcgagagcgaccccttcgaggtggtgagagacgacttcaagagcggcgtgcacaagctgcacagcctgatcggcctgggcatcaagaacagagtgagctgccacgacagcgacgacgacatcatgagaaacgacagagagtacgacagcggcgacaccgacgagatcatcgccatgaagaagaacgtggccaaggtgaagaacagcaccgagttcagccagatggagaagagcaccaagaagaccagcttcaagaacagagagaactgcgagctgagcgaccactgcatcaagctgcagaagagaaagagcaacgtggagagcgccctgagccacggcctgaagagcctgaacagaaagagccccagccacagcagcagcagcgaggacgccgacagcgccagcgagctggccgacagcgagggcggcgaggagtacaacgccatgatgaagaactgcctgagagtgaacctgaccctggccgacctggagcagctggccggcagcgacctgaaggtgcccaacgaggacaccaagagcgacggccccgagaccaccacccagtgcaagttcgacagaggcagcaagagccccaagacccccaccggcctgagaagaggcagacagtgcatcagacccgccgagatcgtggccagcctgctggagggcgaggagaacacctgcggcaagcagaagcccaaggagaacaacctgaagcccaagttccaggccttcaagggcgtgggctgcctgtacgagaaggagagcatgaagaagagcctgaaggacagcgtggccagcaacaacaaggaccagaacagcatgaagcacgaggaccccagcatcatcagcatggaggacggcagcccctacgtgaacggcagcctgggcgaggtgaccccctgccagcacgccaagaaggccaacggccccaactacatccagccccagaagagacagaccaccttcgagagccaggacagaaaggccgtgagccccagcagcagcgagaagagaagcaagaaccccatcagcagacccctggagggcaagaagagcctgagcctgagcgccaagacccacaacatcggcttcgacaaggacagctgccacagcaccaccaagaccgaggccagccaggaggagagaagcgacagcagcggcctgaccagcctgaagaagagccccaaggtgagcagcaaggacaccagagagatcaagaccgacttcagcctgagcatcagcaacagcagcgacgtgagcgccaaggacaagcacgccgaggacaacgagaagagactggccgccctggaggccagacagaaggccaaggaggtgcagaagaagctggtgcacaacgccctggccaacctggagagcatgggcaagaccagcggcaagctgttcgacagcagcgacgacgacgagagcgacagcgaggacgacagcaacagattcaagatcaagccccagttcgagggcagagccggccagaagctgatggacctgcagagccacttcggcaccgacgacagattcagaatggacagcagattcctggagaccgacagcgaggaggagcaggaggaggtgaacgagaagaagaccgccgaggaggaggagctggccgaggagaagaagaaggccctgaacgtggtgcagagcgtgctgcagatcaacctgagcaacagcaccaacagaggcagcgtggccgccaagaagttcaaggacatcatccactacgaccccaccaagcaggaccacgccacctacgagagaaagagagacgacaagcccaaggagagcaaggccaagagaaagaagaagagagaggaggccgagaagctgcccgaggtgagcaaggagatgtactacaacatcgccatggacctgaaggagatcttccagaccaccaagtacaccagcgagaaggaggagggcaccccctggaacgaggactgcggcaaggagaagcccgaggagatccaggaccccgccgccctgaccagcgacgccgagcagcccagcggcttcaccttcagcttcttcgacagcgacaccaaggacatcaaggaggagacctacagagtggagaccgtgaagcccggcaagatcgtgtggcaggaggaccccagactgcaggacagcagcagcgaggaggaggacgtgaccgaggagaccgaccacagaaacagcagccccggcgaggccagcctgctggagaaggagaccaccagattcttcttcttcagcaagaacgacgagagactgcagggcagcgacctgttctggagaggcgtgggcagcaacatgagcagaaacagctgggaggccagaaccaccaacctgagaatggactgcagaaagaagcacaaggacgccaagagaaagatgaagcccaagtag

SEQ ID NO: 91684 - DNA, 777 bp, synthetic construct
  misc_feature 1..777: note = Description of Artificial Sequence: Synthetic coding sequence
  source 1..777: mol_type = other DNA
atgaaggtgaacagagagaccaagagactgtacgtgggcggcctgagccaggacatcagcgaggccgacctgcagaaccagttcagcagattcggcgaggtgagcgacgtggagatcatcaccagaaaggacgaccagggcaacccccagaaggtgttcgcctacatcaacatcagcgtggccgaggccgacctgaagaagtgcatgagcgtgctgaacaagaccaagtggaagggcggcaccctgcagatccagctggccaaggagagcttcctgcacagactggcccaggagagagaggccgccaaggccaagaaggaggagagcaccaccggcaacgccaacctgctggagaagaccggcggcgtggacttccacatgaaggccgtgcccggcaccgaggtgcccggccacaagaactgggtggtgagcaagttcggcagagtgctgcccgtgctgcacctgaagaaccagcacaagagaaagatcatcaagtacgaccccagcaagtactgccacaacctgaagaagatcggcgaggacttcagcaacaccatccccatcagcagcctgacctgggagctggagggcggcaacgaccccatgagcaagaagagaagaggcgagttcagcgacttccacggcccccccaagaagatcatcaaggtgcagaaggacgagagcagcaccggcagcctggccatgagcaccagacccagaagagtgatcgagagaccccccctgacccagcagcaggccgcccagaagagaacctag

SEQ ID NO: 91685 - DNA, 2913 bp, synthetic construct
  misc_feature 1..2913: note = Description of Artificial Sequence: Synthetic coding sequence
  source 1..2913: mol_type = other DNA
atgaaggtgaacagagagaccaagagactgtacgtgggcggcctgagccaggacatcagcgaggccgacctgcagaaccagttcagcagattcggcgaggtgagcgacgtggagatcatcaccagaaaggacgaccagggcaacccccagaaggtgttcgcctacatcaacatcagcgtggccgaggccgacctgaagaagtgcatgagcgtgctgaacaagaccaagtggaagggcggcaccctgcagatccagctggccaaggagagcttcctgcacagactggcccaggagagagaggccgccaaggccaagaaggaggagagcaccaccggcaacgccaacctgctggagaagaccggcggcgtggacttccacatgaaggccgtgcccggcaccgaggtgcccggccacaagaactgggtggtgagcaagttcggcagagtgctgcccgtgctgcacctgaagaaccagcacaagagaaagatcatcaagtacgaccccagcaagtactgccacaacctgaagaagatcggcgaggacttcagcaacaccatccccatcagcagcctgacctgggagctggagggcggcaacgaccccatgagcaagaagagaagaggcgagttcagcgacttccacggcccccccaagaagatcatcaaggtgcagaaggacgagagcagcaccggcagcctggccatgagcaccagacccagaagagtgatcgagagaccccccctgacccagcagcaggccgcccagaagagaacctgcgacagcatcacccccagcaagagcagccccgtgcccgtgagcgacacccagaagctgaagaacctgcccttcaagaccagcggcctggagaccgccaagaagagaaacagcatcagcgacgacgacaccgacagcgaggacgagctgagaatgatgatcgccaaggaggagaacctgcagagaaccacccagcccagcatcaacgagagcgagagcgaccccttcgaggtggtgagagacgacttcaagagcggcgtgcacaagctgcacagcctgatcggcctgggcatcaagaacagagtgagctgccacgacagcgacgacgacatcatgagaaacgacagagagtacgacagcggcgacaccgacgagatcatcgccatgaagaagaacgtggccaaggtgaagaacagcaccgagttcagccagatggagaagagcaccaagaagaccagcttcaagaacagagagaactgcgagctgagcgaccactgcatcaagctgcagaagagaaagagcaacgtggagagcgccctgagccacggcctgaagagcctgaacagaaagagccccagccacagcagcagcagcgaggacgccgacagcgccagcgagctggccgacagcgagggcggcgaggagtacaacgccatgatgaagaactgcctgagagtgaacctgaccctggccgacctggagcagctggccggcagcgacctgaaggtgcccaacgaggacaccaagagcgacggccccgagaccaccacccagtgcaagttcgacagaggcagcaagagccccaagacccccaccggcctgagaagaggcagacagtgcatcagacccgccgagatcgtggccagcctgctggagggcgaggagaacacctgcggcaagcagaagcccaaggagaacaacctgaagcccaagttccaggccttcaagggcgtgggctgcctgtacgagaaggagagcatgaagaagagcctgaaggacagcgtggccagcaacaacaaggaccagaacagcatgaagcacgaggaccccagcatcatcagcatggaggacggcagcccctacgtgaacggcagcctgggcgaggtgaccccctgccagcacgccaagaaggccaacggccccaactacatccagccccagaagagacagaccaccttcgagagccaggacagaaaggccgtgagccccagcagcagcgagaagagaagcaagaaccccatcagcagacccctggagggcaagaagagcctgagcctgagcgccaagacccacaacatcggcttcgacaaggacagctgccacagcaccaccaagaccgaggccagccaggaggagagaagcgacagcagcggcctgaccagcctgaagaagagccccaaggtgagcagcaaggacaccagagagatcaagaccgacttcagcctgagcatcagcaacagcagcgacgtgagcgccaaggacaagcacgccgaggacaacgagaagagactggccgccctggaggccagacagaaggccaaggaggtgcagaagaagctggtgcacaacgccctggccaacctggacggccaccccgaggacaagcccacccacatcatcttcggcagcgacagcgagtgcgagaccgaggagaccagcacccaggagcagagccaccccggcgaggagtgggtgaaggagagcatgggcaagaccagcggcaagctgttcgacagcagcgacgacgacgagagcgacagcgaggacgacagcaacagattcaagatcaagccccagttcgagggcagagccggccagaagctgatggacctgcagagccacttcggcaccgacgacagattcagaatggacagcagattcctggagaccgacagcgaggaggagcaggaggaggtgaacgagaagaagaccgccgaggaggaggagctggccgaggagaagaagaaggccctgaacgtggtgcagagcgtgctgcagatcaacctgagcaacagcaccaacagaggcagcgtggccgccaagaagttcaaggacatcatccactacgaccccaccaagcaggaccacgccacctacgagagaaagagagacgacaagcccaaggagagcaaggcctag

SEQ ID NO: 91686 - DNA, 1242 bp, synthetic construct
  misc_feature 1..1242: note = Description of Artificial Sequence: Synthetic coding sequence
  source 1..1242: mol_type = other DNA
atgaaggtgaacagagagaccaagagactgtacgtgggcggcctgagccaggacatcagcgaggccgacctgcagaaccagttcagcagattcggcgaggtgagcgacgtggagatcatcaccagaaaggacgaccagggcaacccccagaaggtgttcgcctacatcaacatcagcgtggccgaggccgacctgaagaagtgcatgagcgtgctgaacaagaccaagtggaagggcggcaccctgcagatccagctggccaaggagagcttcctgcacagactggcccaggagagagaggccgccaaggccaagaaggaggagagcaccaccggcaacgccaacctgctggagaagaccggcggcgtggacttccacatgaaggccgtgcccggcaccgaggtgcccggccacaagaactgggtggtgagcaagttcggcagagtgctgcccgtgctgcacctgaagaaccagcacaagagaaagatcatcaagtacgaccccagcaagtactgccacaacctgaagaagatcggcgaggacttcagcaacaccatccccatcagcagcctgacctgggagctggagggcggcaacgaccccatgagcaagaagagaagaggcgagttcagcgacttccacggcccccccaagaagatcatcaaggtgcagaaggacgagagcagcaccggcagcctggccatgagcaccagacccagaagagtgatcgagagaccccccctgacccagcagcaggccgcccagaagagaacctgcgacagcatcacccccagcaagagcagccccgtgcccgtgagcgacacccagaagctgaagaacctgcccttcaagaccagcggcctggagaccgccaagaagagaaacagcatcagcgacgacgacaccgacagcgaggacgagctgagaatgatgatcgccaaggaggagaacctgcagagaaccacccagcccagcatcaacgagagcgagagcgaccccttcgaggtggtgagagacgacttcaagagcggcgtgcacaagctgcacagcctgatcggcctgggcatcaagaacagagtgagctgccacgacagcgacgacgacatcatgagaaacgacagagagtacgacagcggcgacaccgacgagatcatcgccatgaagaagaacgtggccaaggtgaagaacagcaccgagttcagccagatggagaagagcaccaagaagaccagcttcaagtag

SEQ ID NO: 91687 - DNA, 3504 bp, synthetic construct
  misc_feature 1..3504: note = Description of Artificial Sequence: Synthetic coding sequence
  source 1..3504: mol_type = other DNA
atgaaggtgaacagagagaccaagagactgtacgtgggcggcctgagccaggacatcagcgaggccgacctgcagaaccagttcagcagattcggcgaggtgagcgacgtggagatcatcaccagaaaggacgaccagggcaacccccagaaggtgttcgcctacatcaacatcagcgtggccgaggccgacctgaagaagtgcatgagcgtgctgaacaagaccaagtggaagggcggcaccctgcagatccagctggccaaggagagcttcctgcacagactggcccaggagagagaggccgccaaggccaagaaggaggagagcaccaccggcaacgccaacctgctggagaagaccggcggcgtggacttccacatgaaggccgtgcccggcaccgaggtgcccggccacaagaactgggtggtgagcaagttcggcagagtgctgcccgtgctgcacctgaagaaccagcacaagagaaagatcatcaagtacgaccccagcaagtactgccacaacctgaagaagatcggcgaggacttcagcaacaccatccccatcagcagcctgacctgggagctggagggcggcaacgaccccatgagcaagaagagaagaggcgagttcagcgacttccacggcccccccaagaagatcatcaaggtgcagaaggacgagagcagcaccggcagcctggccatgagcaccagacccagaagagtgatcgagagaccccccctgacccagcagcaggccgcccagaagagaacctgcgacagcatcacccccagcaagagcagccccgtgcccgtgagcgacacccagaagctgaagaacctgcccttcaagaccagcggcctggagaccgccaagaagagaaacagcatcagcgacgacgacaccgacagcgaggacgagctgagaatgatgatcgccaaggaggagaacctgcagagaaccacccagcccagcatcaacgagagcgagagcgaccccttcgaggtggtgagagacgacttcaagagcggcgtgcacaagctgcacagcctgatcggcctgggcatcaagaacagagtgagctgccacgacagcgacgacgacatcatgagaaacgacagagagtacgacagcggcgacaccgacgagatcatcgccatgaagaagaacgtggccaaggtgaagaacagcaccgagttcagccagatggagaagagcaccaagaagaccagcttcaagaacagagagaactgcgagctgagcgaccactgcatcaagctgcagaagagaaagagcaacgtggagagcgccctgagccacggcctgaagagcctgaacagaaagagccccagccacagcagcagcagcgaggacgccgacagcgccagcgagctggccgacagcgagggcggcgaggagtacaacgccatgatgaagaactgcctgagagtgaacctgaccctggccgacctggagcagctggccggcagcgacctgaaggtgcccaacgaggacaccaagagcgacggccccgagaccaccacccagtgcaagttcgacagaggcagcaagagccccaagacccccaccggcctgagaagaggcagacagtgcatcagacccgccgagatcgtggccagcctgctggagggcgaggagaacacctgcggcaagcagaagcccaaggagaacaacctgaagcccaagttccaggccttcaagggcgtgggctgcctgtacgagaaggagagcatgaagaagagcctgaaggacagcgtggccagcaacaacaaggaccagaacagcatgaagcacgaggaccccagcatcatcagcatggaggacggcagcccctacgtgaacggcagcctgggcgaggtgaccccctgccagcacgccaagaaggccaacggccccaactacatccagccccagaagagacagaccaccttcgagagccaggacagaaaggccgtgagccccagcagcagcgagaagagaagcaagaaccccatcagcagacccctggagggcaagaagagcctgagcctgagcgccaagacccacaacatcggcttcgacaaggacagctgccacagcaccaccaagaccgaggccagccaggaggagagaagcgacagcagcggcctgaccagcctgaagaagagccccaaggtgagcagcaaggacaccagagagatcaagaccgacttcagcctgagcatcagcaacagcagcgacgtgagcgccaaggacaagcacgccgaggacaacgagaagagactggccgccctggaggccagacagaaggccaaggaggtgcagaagaagctggtgcacaacgccctggccaacctggacggccaccccgaggacaagcccacccacatcatcttcggcagcgacagcgagtgcgagaccgaggagaccagcacccaggagcagagccaccccggcgaggagtgggtgaaggagagcatgggcaagaccagcggcaagctgttcgacagcagcgacgacgacgagagcgacagcgaggacgacagcaacagattcaagatcaagccccagttcgagggcagagccggccagaagctgatggacctgcagagccacttcggcaccgacgacagattcagaatggacagcagattcctggagaccgacagcgaggaggagcaggaggaggtgaacgagaagaagaccgccgaggaggaggagctggccgaggagaagaagaaggccctgaacgtggtgcagagcgtgctgcagatcaacctgagcaacagcaccaacagaggcagcgtggccgccaagaagttcaaggacatcatccactacgaccccaccaagcaggaccacgccacctacgagagaaagagagacgacaagcccaaggagagcaaggccaagagaaagaagaagagagaggaggccgagaagctgcccgaggtgagcaaggagatgtactacaacatcgccatggacctgaaggagatcttccagaccaccaagtacaccagcgagaaggaggagggcaccccctggaacgaggactgcggcaaggagaagcccgaggagatccaggaccccgccgccctgaccagcgacgccgagcagcccagcggcttcaccttcagcttcttcgacagcgacaccaaggacatcaaggaggagacctacagagtggagaccgtgaagcccggcaagatcgtgtggcaggaggaccccagactgcaggacagcagcagcgaggaggaggacgtgaccgaggagaccgaccacagaaacagcagccccggcgaggccagcctgctggagaaggagaccaccagattcttcttcttcagcaagaacgacgagagactgcagggcagcgacctgttctggagaggcgtgggcagcaacatgagcagaaacagctgggaggccagaaccaccaacctgagaatggactgcagaaagaagcacaaggacgccaagagaaagatgaagcccaagtag

SEQ ID NO: 91688 - DNA, 438 bp, synthetic construct
  misc_feature 1..438: note = Description of Artificial Sequence: Synthetic coding sequence
  source 1..438: mol_type = other DNA
atgaaggtgaacagagagaccaagagactgtacgtgggcggcctgagccaggacatcagcgaggccgacctgcagaaccagttcagcagattcggcgaggtgagcgacgtggagatcatcaccagaaaggacgaccagggcaacccccagaaggtgttcgcctacatcaacatcagcgtggccgaggccgacctgaagaagtgcatgagcgtgctgaacaagaccaagtggaagggcggcaccctgcagatccagctggccaaggagagcttcctgcacagactggcccaggagagagaggccgccaaggccaagaaggaggagagcaccaccggcaacgccaacctgctggagaagaccggcggcgtggacttccacatgaaggccgtgcccggcaccgaggtgcccggccacaagaactgggtggtgagcaagtag

SEQ ID NO: 91689 - DNA, 3504 bp, synthetic construct; identical to SEQ ID NO: 91687
  misc_feature 1..3504: note = Description of Artificial Sequence: Synthetic coding sequence
  source 1..3504: mol_type = other DNA

SEQ ID NO: 91690 - DNA, 261 bp, synthetic construct
  misc_feature 1..261: note = Description of Artificial Sequence: Synthetic coding sequence
  source 1..261: mol_type = other DNA
atgaaggtgaacagagagaccaagagactgtacgtgggcggcctgagccaggacatcagcgaggccgacctgcagaaccagttcagcagattcggcgaggtgagcgacgtggagatcatcaccagaaaggacgaccagggcaacccccagaaggtgttcgcctacatcaacatcagcgtggccgaggccgacctgaagaagagcatcttccacgtgatccagagagacagcagcgacgaggagaacagcagcatcgtgtag

SEQ ID NO: 91691 - DNA, 3441 bp, synthetic construct
  misc_feature 1..3441: note = Description of Artificial Sequence: Synthetic coding sequence
  source 1..3441: mol_type = other DNA
atgggccccgcccccgccggcgagcagctgagaggcgccaccggcgagcccgaggtgatggagcccgccctggagggcaccggcaaggagggcaagaaggccagcagcagaaagagaaccctggccgagccccccgccaagggcctgctgcagcccgtgaagctgagcagagccgagctgtacaaggagcccaccaacgaggagctgaacagactgagagagaccgagatcctgttccacagcagcctgctgagactgcaggtggaggagctgctgaaggaggtgagactgagcgagaagaagaaggacagaatcgacgccttcctgagagaggtgaaccagagagtggtgagagtgcccagcgtgcccgagaccgagctgaccgaccaggcctggctgcccgccggcgtgagagtgcccctgcaccaggtgccctacgccgtgaagggctgcttcagattcctgccccccgcccaggtgaccgtggtgggcagctacctgctgggcacctgcatcagacccgacatcaacgtggacgtggccctgaccatgcccagagagatcctgcaggacaaggacggcctgaaccagagatacttcagaaagagagccctgtacctggcccacctggcccaccacctggcccaggaccccctgttcggcagcgtgtgcttcagctacaccaacggctgccacctgaagcccagcctgctgctgagacccagaggcaaggacgagagactggtgaccgtgagactgcacccctgccccccccccgacttcttcagaccctgcagactgctgcccaccaagaacaacgtgagaagcgcctggtacagaggccagagccccgccggcgacggcagccccgagccccccacccccagatacaacacctgggtgctgcaggacaccgtgctggagagccacctgcagctgctgagcaccatcctgagcagcgcccagggcctgaaggacggcgtggccctgctgaaggtgtggctgagacagagagagctggacaagggccagggcggcttcaccggcttcctggtgagcatgctggtggtgttcctggtgagcaccagaaagatccacaccaccatgagcggctaccaggtgctgagaagcgtgctgcagttcctggccaccaccgacctgaccgtgaacggcatcagcctgtgcctgagcagcgaccccagcctgcccgccctggccgacttccaccaggccttcagcgtggtgttcctggacagcagcggccacctgaacctgtgcgccgacgtgaccgccagcacctaccaccaggtgcagcacgaggccagactgagcatgatgctgctggacagcagagccgacgacggcttccacctgctgctgatgacccccaagcccatgatcagagccttcgaccacgtgctgcacctgagacccctgagcagactgcaggccgcctgccacagactgaagctgtggcccgagctgcaggacaacggcggcgactacgtgagcgccgccctgggccccctgaccaccctgctggagcagggcctgggcgccagactgaacctgctggcccacagcagaccccccgtgcccgagtgggacatcagccaggacccccccaagcacaaggacagcggcaccctgaccctgggcctgctgctgagacccgagggcctgaccagcgtgctggagctgggccccgaggccgaccagcccgaggccgccaagttcagacagttctggggcagcagaagcgagctgagaagattccaggacggcgccatcagagaggccgtggtgtgggaggccgccagcatgagccagaagagactgatcccccaccaggtggtgacccacctgctggccctgcacgccgacatccccgagacctgcgtgcactacgtgggcggccccctggacgccctgatccagggcctgaaggagaccagcagcaccggcgaggaggccctggtggccgccgtgagatgctacgacgacctgagcagactgctgtggggcctggagggcctgcccctgaccgtgagcgccgtgcagggcgcccaccccgtgctgagatacaccgaggtgttcccccccacccccgtgagacccgccttcagcttctacgagaccctgagagagagaagcagcctgctgcccagactggacaagccctgccccgcctacgtggagcccatgaccgtggtgtgccacctggagggcagcggccagtggccccaggacgccgaggccgtgcagagagtgagagccgccttccagctgagactggccgagctgctgacccagcagcacggcctgcagtgcagagccaccgccacccacaccgacgtgctgaaggacggcttcgtgttcagaatcagagtggcctaccagagagagccccagatcctgaaggaggtgcagagccccgagggcatgatcagcctgagagacaccgccgccagcctgagactggagagagacaccagacagctgcccctgctgaccagcgccctgcacggcctgcagcagcagcaccccgccttcagcggcgtggccagactggccaagagatgggtgagagcccagctgctgggcgagggcttcgccgacgagagcctggacctggtggccgccgccctgttcctgcaccccgagcccttcaccccccccagcagcccccaggtgggcttcctgagattcctgttcctggtgagcaccttcgactggaagaacaaccccctgttcgtgaacctgaacaacgagctgaccgtggaggagcaggtggagatcagaagcggcttcctggccgccagagcccagctgcccgtgatggtgatcgtgaccccccaggacagaaagaacagcgtgtggacccaggacggccccagcgcccagatcctgcagcagctggtggtgctggccgccgaggccctgcccatgctggagaagcagctgatggaccccagaggccccggcgacatcagaaccgtgttcagaccccccctggacatctacgacgtgctgatcagactgagccccagacacatccccagacacagacaggccgtggacagccccgccgccagcttctgcagaggcctgctgagccagcccggccccagcagcctgatgcccgtgctgggctacgaccccccccagctgtacctgacccagctgagagaggccttcggcgacctggccctgttcttctacgaccagcacggcggcgaggtgatcggcgtgctgtggaagcccaccagcttccagccccagcccttcaaggccagcagcaccaagggcagaatggtgatgagcagaggcggcgagctggtgatggtgcccaacgtggaggccatcctggaggacttcgccgtgctgggcgagggcctggtgcagaccgtggaggccagaagcgagagatggaccgtgtag

SEQ ID NO: 91692 - DNA, 3024 bp, synthetic construct
  misc_feature 1..3024: note = Description of Artificial Sequence: Synthetic coding sequence
  source 1..3024: mol_type = other DNA
atgggccccgcccccgccggcgagcagctgagaggcgccaccggcgagcccgaggtgatggagcccgccctggagggcaccggcaaggagggcaagaaggccagcagcagaaagagaaccctggccgagccccccgccaagggcctgctgcagcccgtgaagctgagcagagccgagctgtacaaggagcccaccaacgaggagctgaacagactgagagagaccgagatcctgttccacagcagcctgctgagactgcaggtggaggagctgctgaaggaggtgagactgagcgagaagaagaaggacagaatcgacgccttcctgagagaggtgaaccagagagtggtgagagtgcccagcgtgcccgagaccgagctgaccgaccaggcctggctgcccgccggcgtgagagtgcccctgcaccaggtgccctacgccgtgaagggctgcttcagattcctgccccccgcccaggtgaccgtggtgggcagctacctgctgggcacctgcatcagacccgacatcaacgtggacgtggccctgaccatgcccagagagatcctgcaggacaaggacggcctgaaccagagatacttcagaaagagagccctgtacctggcccacctggcccaccacctggcccaggaccccctgttcggcagcgtgtgcttcagctacaccaacggctgccacctgaagcccagcctgctgctgagacccagaggcaaggacgagagactggtgaccgtgagactgcacccctgccccccccccgacttcttcagaccctgcagactgctgcccaccaagaacaacgtgagaagcgcctggtacagaggccagagccccgccggcgacggcagccccgagccccccacccccagatacaacacctgggtgctgcaggacaccgtgctggagagccacctgcagctgctgagcaccatcctgagcagcgcccagggcctgaaggacggcgtggccctgctgaaggtgtggctgagacagagagagctggacaagggccagggcggcttcaccggcttcctggtgagcatgctggtggtgttcctggtgagcaccagaaagatccacaccaccatgagcggctaccaggtgctgagaagcgtgctgcagttcctggccaccaccgacctgaccgtgaacggcatcagcctgtgcctgagcagcgaccccagcctgcccgccctggccgacttccaccaggccttcagcgtggtgttcctggacagcagcggccacctgaacctgtgcgccgacgtgaccgccagcacctaccaccaggtgcagcacgaggccagactgagcatgatgctgctggacagcagagccgacgacggcttccacctgctgctgatgacccccaagcccatgatcagagccttcgaccacgtgctgcacctgagacccctgagcagactgcaggccgcctgccacagactgaagctgtggcccgagctgcaggacaacggcggcgactacgtgagcgccgccctgggccccctgaccaccctgctggagcagggcctgggcgccagactgaacctgctggcccacagcagaccccccgtgcccgagtgggacatcagccaggacccccccaagcacaaggacagcggcaccctgaccctgggcctgctgctgagacccgagggcctgaccagcgtgctggagctgggccccgaggccgaccagcccgaggccgccaagttcagacagttctggggcagcagaagcgagctgagaagattccaggacggcgccatcagagaggccgtggtgtgggaggccgccagcatgagccagaagagactgatcccccaccaggtggtgacccacctgctggccctgcacgccgacatccccgagacctgcgtgcactacgtgggcggccccctggacgccctgatccagggcctgaaggagaccagcagcaccggcgaggaggccctggtggccgccgtgagatgctacgacgacctgagcagactgctgtggggcctggagggcctgcccctgaccgtgagcgccgtgcagggcgcccaccccgtgctgagatacaccgaggtgttcccccccacccccgtgagacccgccttcagcttctacgagaccctgagagagagaagcagcctgctgcccagactggacaagccctgccccgcctacgtggagcccatgaccgtggtgtgccacctggagggcagcggccagtggccccaggacgccgaggccgtgcagagagtgagagccgccttccagctgagactggccgagctgctgacccagcagcacggcctgcagtgcagagccaccgccacccacaccgacgtgctgaaggacggcttcgtgttcagaatcagagtggcctaccagagagagccccagatcctgaaggaggtgcagagccccgagggcatgatcagcctgagagacaccgccgccagcctgagactggagagagacaccagacagctgcccctgctgaccagcgccctgcacggcctgcagcagcagcaccccgccttcagcggcgtggccagactggccaagagatgggtgagagcccagctgctgggcgagggcttcgccgacgagagcctggacctggtggccgccgccctgttcctgcaccccgagcccttcaccccccccagcagcccccaggtgggcttcctgagattcctgttcctggtgagcaccttcgactggaagaacaaccccctgttcgtgaacctgaacaacgagctgaccgtggaggagcaggtggagatcagaagcggcttcctggccgccagagcccagctgcccgtgatggtgatcgtgaccccccaggacagaaagaacagcgtgtggacccaggacggccccagcgcccagatcctgcagcagctggtggtgctggccgccgaggccctgcccatgctggagaagcagctgatggaccccagaggccccggcgacatcagatgggaccccgccaagatgtggcccttctag

SEQ ID NO: 91693 - DNA, 2100 bp, synthetic construct
  misc_feature 1..2100: note = Description of Artificial Sequence: Synthetic coding sequence
  source 1..2100: mol_type = other DNA
atgggccccgcccccgccggcgagcagctgagaggcgccaccggcgagcccgaggtgatggagcccgccctggagggcaccggcaaggagggcaagaaggccagcagcagaaagagaaccctggccgagccccccgccaagggcctgctgcagcccgtgaagctgagcagagccgagctgtacaaggagcccaccaacgaggagctgaacagactgagagagaccgagatcctgttccacagcagcctgctgagactgcaggtggaggagctgctgaaggaggtgagactgagcgagaagaagaaggacagaatcgacgccttcctgagagaggtgaaccagagagtggtgagagtgcccagcgtgcccgagaccgagctgaccgaccaggcctggctgcccgccggcgtgagagtgcccctgcaccaggtgccctacgccgtgaagggctgcttcagattcctgccccccgcccaggtgaccgtggtgggcagctacctgctgggcacctgcatcagacccgacatcaacgtggacgtggccctgaccatgcccagagagatcctgcaggacaaggacggcctgaaccagagatacttcagaaagagagccctgtacctggcccacctggcccaccacctggcccaggaccccctgttcggcagcgtgtgcttcagctacaccaacggctgccacctgaagcccagcctgctgctgagacccagaggcaaggacgagagactggtgaccgtgagactgcacccctgccccccccccgacttcttcagaccctgcagactgctgcccaccaagaacaacgtgagaagcgcctggtacagaggccagagccccgccggcgacggcagccccgagccccccacccccagatacaacacctgggtgctgcaggacaccgtgctggagagccacctgcagctgctgagcaccatcctgagcagcgcccagggcctgaaggacggcgtggccctgctgaaggtgtggctgagacagagagagctggacaagggccagggcggcttcaccggcttcctggtgagcatgctggtggtgttcctggtgagcaccagaaagatccacaccaccatgagcggctaccaggtgctgagaagcgtgctgcagttcctggccaccaccgacctgaccgtgaacggcatcagcctgtgcctgagcagcgaccccagcctgcccgccctggccgacttccaccaggccttcagcgtggtgttcctggacagcagcggccacctgaacctgtgcgccgacgtgaccgccagcacctaccaccaggtgcagcacgaggccagactgagcatgatgctgctggacagcagagccgacgacggcttccacctgctgctgatgacccccaagcccatgatcagagccttcgaccacgtgctgcacctgagacccctgagcagactgcaggccgcctgccacagactgaagctgtggcccgagctgcaggacaacggcggcgactacgtgagcgccgccctgggccccctgaccaccctgctggagcagggcctgggcgccagactgaacctgctggcccacagcagaccccccgtgcccgagtgggacatcagccaggacccccccaagcacaaggacagcggcaccctgaccctgggcctgctgctgagacccgagggcctgaccagcgtgctggagctgggccccgaggccgaccagcccgaggccgccaagttcagacagttctggggcagcagaagcgagctgagaagattccaggacggcgccatcagagaggccgtggtgtgggaggccgccagcatgagccagaagagactgatcccccaccaggtggtgacccacctgctggccctgcacgccgacatccccgagacctgcgtgcactacgtgggcggccccctggacgccctgatccagggcctgaaggaggccagcagcaccaagggcagaatggtgatgagcagaggcggcgagctggtgatggtgcccaacgtggaggccatcctggaggacttcgccgtgctgggcgagggcctggtgcagaccgtggaggccagaagcgagagatggaccgtgtag

SEQ ID NO: 91694 - DNA, 603 bp, synthetic construct
  misc_feature 1..603: note = Description of Artificial Sequence: Synthetic coding sequence
  source 1..603: mol_type = other DNA
atggtgatcgtgaccccccaggacagaaagaacagcgtgtggacccaggacggccccagcgcccagatcctgcagcagctggtggtgctggccgccgaggccctgcccatgctggagaagcagctgatggaccccagaggccccggcgacatcagaaccgtgttcagaccccccctggacatctacgacgtgctgatcagactgagccccagacacatccccagacacagacaggccgtggacagccccgccgccagcttctgcagaggcctgctgagccagcccggccccagcagcctgatgcccgtgctgggctacgaccccccccagctgtacctgacccagctgagagaggccttcggcgacctggccctgttcttctacgaccagcacggcggcgaggtgatcggcgtgctgtggaagcccaccagcttccagccccagcccttcaaggccagcagcaccaagggcagaatggtgatgagcagaggcggcgagctggtgatggtgcccaacgtggaggccatcctggaggacttcgccgtgctgggcgagggcctggtgcagaccgtggaggccagaagcgagagatggaccgtgtag

SEQ ID NO: 91695 - DNA, 3072 bp, synthetic construct
  misc_feature 1..3072: note = Description of Artificial Sequence: Synthetic coding sequence
  source 1..3072: mol_type = other DNA
atgggccccgcccccgccggcgagcagctgagaggcgccaccggcgagcccgaggtgatggagcccgccctggagggcaccggcaaggagggcaagaaggccagcagcagaaagagaaccctggccgagccccccgccaagggcctgctgcagcccgtgaagctgagcagagccgagctgtacaaggagcccaccaacgaggagctgaacagactgagagagaccgagatcctgttccacagcagcctgctgagactgcaggtggaggagctgctgaaggaggtgagactgagcgagaagaagaaggacagaatcgacgccttcctgagagaggtgaaccagagagtggtgagagtgcccagcgtgcccgagaccgagctgaccgaccaggcctggctgcccgccggcgtgagagtgcccctgcaccaggtgccctacgccgtgaagggctgcttcagattcctgccccccgcccaggtgaccgtggtgggcagctacctgctgggcacctgcatcagacccgacatcaacgtggacgtggccctgaccatgcccagagagatcctgcaggacaaggacggcctgaaccagagatacttcagaaagagagccctgtacctggcccacctggcccaccacctggcccaggaccccctgttcggcagcgtgtgcttcagctacaccaacggctgccacctgaagcccagcctgctgctgagacccagaggcaaggacgagagactggtgaccgtgagactgcacccctgccccccccccgacttcttcagaccctgcagactgctgcccaccaagaacaacgtgagaagcgcctggtacagaggccagagccccgccggcgacggcagccccgagccccccacccccagatacaacacctgggtgctgcaggacaccgtgctggagagccacctgcagctgctgagcaccatcctgagcagcgcccagggcctgaaggacggcgtggccctgctgaaggtgtggctgagacagagagagctggacaagggccagggcggcttcaccggcttcctggtgagcatgctggtggtgttcctggtgagcaccagaaagatccacaccaccatgagcggctaccaggtgctgagaagcgtgctgcagttcctggccaccaccgacctgaccgtgaacggcatcagcctgtgcctgagcagcgaccccagcctgcccgccctggccgacttccaccaggccttcagcgtggtgttcctggacagcagcggccacctgaacctgtgcgccgacgtgaccgccagcacctaccaccaggtgcagcacgaggccagactgagcatgatgctgctggacagcagagccgacgacggcttccacctgctgctgatgacccccaagcccatgatcagagccttcgaccacgtgctgcacctgagacccctgagcagactgcaggccgcctgccacagactgaagctgtggcccgagctgcaggacaacggcggcgactacgtgagcgccgccctgggccccctgaccaccctgctggagcagggcctgggcgccagactgaacctgctggcccacagcagaccccccgtgcccgagtgggacatcagccaggacccccccaagcacaaggacagcggcaccctgaccctgggcctgctgctgagacccgagggcctgaccagcgtgctggagctgggccccgaggccgaccagcccgaggccgccaagttcagacagttctggggcagcagaagcgagctgagaagattccaggacggcgccatcagagaggccgtggtgtgggaggccgccagcatgagccagaagagactgatcccccaccaggtggtgacccacctgctggccctgcacgccgacatccccgagacctgcgtgcactacgtgggcggccccctggacgccctgatccagggcctgaaggagaccagcagcaccggcgaggaggccctggtggccgccgtgagatgctacgacgacctgagcagactgctgtggggcctggagggcctgcccctgaccgtgagcgccgtgcagggcgcccaccccgtgctgagatacaccgaggtgttcccccccacccccgtgagacccgccttcagcttctacgagaccctgagagagagaagcagcctgctgcccagactggacaagccctgccccgcctacgtggagcccatgaccgtggtgtgccacctggagggcagcggccagtggccccaggacgccgaggccgtgcagagagtgagagccgccttccagctgagactggccgagctgctgacccagcagcacggcctgcagtgcagagccaccgccacccacaccgacgtgctgaaggacggcttcgtgttcagaatcagagtggcctaccagagagagccccagatcctgaaggaggtgcagagccccgagggcatgatcagcctgagagacaccgccgccagcctgagactggagagagacaccagacagctgcccctgctgaccagcgccctgcacggcctgcagcagcagcaccccgccttcagcggcgtggccagactggccaagagatgggtgagagcccagctgctgggcgagggcttcgccgacgagagcctggacctggtggccgccgccctgttcctgcaccccgagcccttcaccccccccagcagcccccaggtgggcttcctgagattcctgttcctggtgagcaccttcgactggaagaacaaccccctgttcgtgaacctgaacaacgagctgaccgtggaggagcaggtggagatcagaagcggcttcctggccgccagagcccagctgcccgtgatggtgatcgtgaccccccaggacagaaagaacagcgtgtggacccaggacggccccagcgcccagatcctgcagcagctggtggtgctggccgccgaggccctgcccatgctggagaagcagctgatggaccccagaggccccggcgacatcagaatgggccccagcgagaacgtggccctgctgagccacatcaccgacaccgagcagtggaagggcgccatctgcgtgtag

SEQ ID NO: 91696 - DNA, 3285 bp, synthetic construct
  misc_feature 1..3285: note = Description of Artificial Sequence: Synthetic coding sequence
  source 1..3285: mol_type = other DNA
atgggccccgcccccgccggcgagcagctgagaggcgccaccggcgagcccgaggtgatggagcccgccctggagggcaccggcaaggagggcaagaaggccagcagcagaaagagaaccctggccgagccccccgccaagggcctgctgcagcccgtgaagctgagcagagccgagctgtacaaggagcccaccaacgaggagctgaacagactgagagagaccgagatcctgttccacagcagcctgctgagactgcaggtggaggagctgctgaaggaggtgagactgagcgagaagaagaaggacagaatcgacgccttcctgagagaggtgaaccagagagtggtgagagtgcccagcgtgcccgagaccgaggagatcctgcaggacaaggacggcctgaaccagagatacttcagaaagagagccctgtacctggcccacctggcccaccacctggcccaggaccccctgttcggcagcgtgtgcttcagctacaccaacggctgccacctgaagcccagcctgctgctgagacccagaggcaaggacgagagactggtgaccgtgagactgcacccctgccccccccccgacttcttcagaccctgcagactgctgcccaccaagaacaacgtgagaagcgcctggtacagaggccagagccccgccggcgacggcagccccgagccccccacccccagatacaacacctgggtgctgcaggacaccgtgctggagagccacctgcagctgctgagcaccatcctgagcagcgcccagggcctgaaggacggcgtggccctgctgaaggtgtggctgagacagagagagctggacaagggccagggcggcttcaccggcttcctggtgagcatgctggtggtgttcctggtgagcaccagaaagatccacaccaccatgagcggctaccaggtgctgagaagcgtgctgcagttcctggccaccaccgacctgaccgtgaacggcatcagcctgtgcctgagcagcgaccccagcctgcccgccctggccgacttccaccaggccttcagcgtggtgttcctggacagcagcggccacctgaacctgtgcgccgacgtgaccgccagcacctaccaccagggctggagcctgctgtggctgcaggtgcagcacgaggccagactgagcatgatgctgctggacagcagagccgacgacggcttccacctgctgctgatgacccccaagcccatgatcagagccttcgaccacgtgctgcacctgagacccctgagcagactgcaggccgcctgccacagactgaagctgtggcccgagctgcaggacaacggcggcgactacgtgagcgccgccctgggccccctgaccaccctgctggagcagggcctgggcgccagactgaacctgctggcccacagcagaccccccgtgcccgagtgggacatcagccaggacccccccaagcacaaggacagcggcaccctgaccctgggcctgctgctgagacccgagggcctgaccagcgtgctggagctgggccccgaggccgaccagcccgaggccgccaagttcagacagttctggggcagcagaagcgagctgagaagattccaggacggcgccatcagagaggccgtggtgtgggaggccgccagcatgagccagaagagactgatcccccaccaggtggtgacccacctgctggccctgcacgccgacatccccgagacctgcgtgcactacgtgggcggccccctggacgccctgatccagggcctgaaggagaccagcagcaccggcgaggaggccctggtggccgccgtgagatgctacgacgacctgagcagactgctgtggggcctggagggcctgcccctgaccgtgagcgccgtgcagggcgcccaccccgtgctgagatacaccgaggtgttcccccccacccccgtgagacccgccttcagcttctacgagaccctgagagagagaagcagcctgctgcccagactggacaagccctgccccgcctacgtggagcccatgaccgtggtgtgccacctggagggcagcggccagtggccccaggacgccgaggccgtgcagagagtgagagccgccttccagctgagactggccgagctgctgacccagcagcacggcctgcagtgcagagccaccgccacccacaccgacgtgctgaaggacggcttcgtgttcagaatcagagtggcctaccagagagagccccagatcctgaaggaggtgcagagccccgagggcatgatcagcctgagagacaccgccgccagcctgagactggagagagacaccagacagctgcccctgctgaccagcgccctgcacggcctgcagcagcagcaccccgccttcagcggcgtggccagactggccaagagatgggtgagagcccagctgctgggcgagggcttcgccgacgagagcctggacctggtggccgccgccctgttcctgcaccccgagcccttcaccccccccagcagcccccaggtgggcttcctgagattcctgttcctggtgagcaccttcgactggaagaacaaccccctgttcgtgaacctgaacaacgagctgaccgtggaggagcaggtggagatcagaagcggcttcctggccgccagagcccagctgcccgtgatggtgatcgtgaccccccaggacagaaagaacagcgtgtggacccaggacggccccagcgcccagatcctgcagcagctggtggtgctggccgccgaggccctgcccatgctggagaagcagctgatggaccccagaggccccggcgacatcagaaccgtgttcagaccccccctggacatctacgacgtgctgatcagactgagccccagacacatccccagacacagacaggccgtggacagccccgccgccagcttctgcagaggcctgctgagccagcccggccccagcagcctgatgcccgtgctgggctacgaccccccccagctgtacctgacccagctgagagaggccttcggcgacctggccctgttcttctacgaccagcacggcggcgaggtgatcggcgtgctgtggaagcccaccagcttccagccccagcccttcaaggccagcagcaccaagggcagaatggtgatgagcagaggcggcgagctggtgatggtgcccaacgtggaggccatcctggaggacttcgccgtgctgggcgagggcctggtgcagaccgtggaggccagaagcgagagatggaccgtgtag

SEQ ID NO: 91697 - DNA, 2109 bp, synthetic construct
  misc_feature 1..2109: note = Description of Artificial Sequence: Synthetic coding sequence
  source 1..2109: mol_type = other DNA
atgatgctgctggacagcagagccgacgacggcttccacctgctgctgatgacccccaagcccatgatcagagccttcgaccacgtgctgcacctgagacccctgagcagactgcaggccgcctgccacagactgaagctgtggcccgagctgcaggacaacggcggcgactacgtgagcgccgccctgggccccctgaccaccctgctggagcagggcctgggcgccagactgaacctgctggcccacagcagaccccccgtgcccgagtgggacatcagccaggacccccccaagcacaaggacagcggcaccctgaccctgggcctgctgctgagacccgagggcctgaccagcgtgctggagctgggccccgaggccgaccagcccgaggccgccaagttcagacagttctggggcagcagaagcgagctgagaagattccaggacggcgccatcagagaggccgtggtgtgggaggccgccagcatgagccagaagagactgatcccccaccaggtggtgacccacctgctggccctgcacgccgacatccccgagacctgcgtgcactacgtgggcggccccctggacgccctgatccagggcctgaaggagaccagcagcaccggcgaggaggccctggtggccgccgtgagatgctacgacgacctgagcagactgctgtggggcctggagggcctgcccctgaccgtgagcgccgtgcagggcgcccaccccgtgctgagatacaccgaggtgttcccccccacccccgtgagacccgccttcagcttctacgagaccctgagagagagaagcagcctgctgcccagactggacaagccctgccccgcctacgtggagcccatgaccgtggtgtgccacctggagggcagcggccagtggccccaggacgccgaggccgtgcagagagtgagagccgccttccagctgagactggccgagctgctgacccagcagcacggcctgcagtgcagagccaccgccacccacaccgacgtgctgaaggacggcttcgtgttcagaatcagagtggcctaccagagagagccccagatcctgaaggaggtgcagagccccgagggcatgatcagcctgagagacaccgccgccagcctgagactggagagagacaccagacagctgcccctgctgaccagcgccctgcacggcctgcagcagcagcaccccgccttcagcggcgtggccagactggccaagagatgggtgagagcccagctgctgggcgagggcttcgccgacgagagcctggacctggtggccgccgccctgttcctgcaccccgagcccttcaccccccccagcagcccccaggtgggcttcctgagattcctgttcctggtgagcaccttcgactggaagaacaaccccctgttcgtgaacctgaacaacgagctgaccgtggaggagcaggtggagatcagaagcggcttcctggccgccagagcccagctgcccgtgatggtgatcgtgaccccccaggacagaaagaacagcgtgtggacccaggacggccccagcgcccagatcctgcagcagctggtggtgctggccgccgaggccctgcccatgctggagaagcagctgatggaccccagaggccccggcgacatcagaaccgtgttcagaccccccctggacatctacgacgtgctgatcagactgagccccagacacatccccagacacagacaggccgtggacagccccgccgccagcttctgcagaggcctgctgagccagcccggccccagcagcctgatgcccgtgctgggctacgaccccccccagctgtacctgacccagctgagagaggccttcggcgacctggccctgttcttctacgaccagcacggcggcgaggtgatcggcgtgctgtggaagcccaccagcttccagccccagcccttcaaggccagcagcaccaagggcagaatggtgatgagcagaggcggcgagctggtgatggtgcccaacgtggaggccatcctggaggacttcgccgtgctgggcgagggcctggtgcagaccgtggaggccagaagcgagagatggaccgtgtag

SEQ ID NO: 91698 - DNA, 645 bp, synthetic construct
  misc_feature 1..645: note = Description of Artificial Sequence: Synthetic coding sequence
  source 1..645: mol_type = other DNA
atgaacctgagcagcgccagcagcaccgaggagaaggccgtgaccaccgtgctgtggggctgcgagctgagccaggagagaagaacctggaccttcagaccccagctggagggcaagcagagctgcagactgctgctgcacaccatctgcctgggcgagaaggccaaggaggagatgcacagagtggagatcctgccccccgccaaccaggaggacaagaagatgcagcccgtgaccatcgccagcctgcaggccagcgtgctgcccatggtgagcatggtgggcgtgcagctgagcccccccgtgaccttccagctgagagccggcagcggccccgtgttcctgagcggccaggagagatacgaggccagcgacctgacctgggaggaggaggaggaggaggagggcgaggaggaggaggaggaggaggaggacgacgaggacgaggacgccgacatcagcctggaggagcagagccccgtgaagcaggtgaagagactggtgccccagaagcaggccagcgtggccaagaagaagaagctggagaaggaggaggaggagatcagagccagcgtgagagacaagagccccgtgaagaaggccaaggccaccgccagagccaagaagcccggcttcaagaagtag

SEQ ID NO: 91699 - DNA, 411 bp, synthetic construct
  misc_feature 1..411: note = Description of Artificial Sequence: Synthetic coding sequence
  source 1..411: mol_type = other DNA
atgaacctgagcagcgccagcagcaccgaggagaaggccgtgaccaccgtgctgtggggctgcgagctgagccaggagagaagaacctggaccttcagaccccagctggagggcaagcagagctgcagactgctgctgcacaccatctgcctgggcgagaaggccaaggaggagatgcacagagtggagatcctgccccccgccaaccaggaggacaagaagatgcagcccgtgaccatcgccagcctgcaggccagcgtgctgcccatggtgagcatggtgggcgtgcagctgagcccccccgtgaccttccagctgagagccggcagcggccccgtgttcctgagcggccaggagagatacgagaagaaggccggcaagagaagaagaggcaacaagagccagagatag

SEQ ID NO: 91700 - DNA, 645 bp, synthetic construct; identical to SEQ ID NO: 91698
  misc_feature 1..645: note = Description of Artificial Sequence: Synthetic coding sequence
  source 1..645: mol_type = other DNA

SEQ ID NO: 91701 - DNA, 645 bp, synthetic construct; identical to SEQ ID NO: 91698
  misc_feature 1..645: note = Description of Artificial Sequence: Synthetic coding sequence
  source 1..645: mol_type = other DNA

SEQ ID NO: 91702 - DNA, 645 bp, synthetic construct; identical to SEQ ID NO: 91698
  misc_feature 1..645: note = Description of Artificial Sequence: Synthetic coding sequence
  source 1..645: mol_type = other DNA

SEQ ID NO: 91703 - DNA, 537 bp, synthetic construct
  misc_feature 1..537: note = Description of Artificial Sequence: Synthetic coding sequence
  source 1..537: mol_type = other DNA
atggccgccggcaccgccgccgccctggccttcctgagccaggagagcagaaccagagccggcggcgtgggcggcctgagagtgcccgcccccgtgaccatggacagcttcttcttcggctgcgagctgagcggccacaccagaagcttcaccttcaaggtggaggaggaggacgacgccgagcacgtgctggccctgaccatgctgtgcctgaccgagggcgccaaggacgagtgcaacgtggtggaggtggtggccagaaaccacgaccaccaggagatcgccgtgcccgtggccaacctgaagctgagctgccagcccatgctgagcctggacgacttccagctgcagccccccgtgaccttcagactgaagagcggcagcggccccgtgagaatcaccggcagacaccagatcgtgaccatgagcaacgacgtgagcgaggaggagagcgaggaggaggaggaggacagcgacgaggaggaggtggagctgtgccccatcctgcccgccaagaagcagggcggcagaccctag

SEQ ID NO: 91704 - DNA, 501 bp, synthetic construct
  misc_feature 1..501: note = Description of Artificial Sequence: Synthetic coding sequence
  source 1..501: mol_type = other DNA
atgaagtacaccagctacatcctggccttccagctgtgcatcgtgctgggcagcctgggctgctactgccaggacccctacgtgaaggaggccgagaacctgaagaagtacttcaacgccggccacagcgacgtggccgacaacggcaccctgttcctgggcatcctgaagaactggaaggaggagagcgacagaaagatcatgcagagccagatcgtgagcttctacttcaagctgttcaagaacttcaaggacgaccagagcatccagaagagcgtggagaccatcaaggaggacatgaacgtgaagttcttcaacagcaacaagaagaagagagacgacttcgagaagctgaccaactacagcgtgaccgacctgaacgtgcagagaaaggccatccacgagctgatccaggtgatggccgagctgagccccgccgccaagaccggcaagagaaagagaagccagatgctgttcagaggcagaagagccagccagtag

SEQ ID NO: 91705 - DNA, 2061 bp, synthetic construct
  misc_feature 1..2061: note = Description of Artificial Sequence: Synthetic coding sequence
  source 1..2061: mol_type = other DNA
atgagcatgttcagcgacttcctgcagagcttcctgaagcacagcagcagcaccgtgttcgacctggtggaggagtacgagaacatctgcggcagccaggtgaacatcctgagcaagatcgtgagcagagccacccccggcctgcagaagttcagcaagaccgccagcatgctgtggctgctgcagcaggagatggtgacctggagactgctggccagcctgtacagagacagaatccagagcgccctggaggaggagagcgtgttcgccgtgaccgccgtgaacgccagcgagaagaccgtggtggaggccctgttccagagagacagcctggtgagacagagccagctggtggtggactggctggagagcatcgccaaggacgagatcggcgagttcagcgacaacatcgagttctacgccaagagcgtgtactgggagaacaccctgcacaccctgaagcagagacagctgaccagctacgtgggcagcgtgagacccctggtgaccgagctggaccccgacgcccccatcagacagaagatgcccctggacgacctggacagagaggacgaggtgagactgctgaagtacctgttcaccctgatcagagccggcatgaccgaggaggcccagagactgtgcaagagatgcggccaggcctggagagccgccaccctggagggctggaagctgtaccacgaccccaacgtgaacggcggcaccgagctggagcccgtggagggcaacccctacagaagaatctggaagatcagctgctggagaatggccgaggacgagctgttcaacagatacgagagagccatctacgccgccctgagcggcaacctgaagcagctgctgcccgtgtgcgacacctgggaggacaccgtgtgggcctacttcagagtgatggtggacagcctggtggagcaggagatccagaccagcgtggccaccctggacgagaccgaggagctgcccagagagtacctgggcgccaactggaccctggagaaggtgttcgaggagctgcaggccaccgacaagaagagagtgctggaggagaaccaggagcactaccacatcgtgcagaagttcctgatcctgggcgacatcgacggcctgatggacgagttcagcaagtggctgagcaagagcagaaacaacctgcccggccacctgctgagattcatgacccacctgatcctgttcttcagaaccctgggcctgcagaccaaggaggaggtgagcatcgaggtgctgaagacctacatccaggaggacagactgaagatcgacgtgatcgactggctggtgttcgaccccgcccagagagccgaggccctgaagcagggcaacgccatcatgagaaagttcctggccagcaagaagcacgaggccgccaaggaggtgttcgtgaagatcccccaggacagcatcgccgagatctacaaccagtgcgaggagcagggcatggagagccccctgcccgccgaggacgacaacgccatcagagagcacctgtgcatcagagcctacctggaggcccacgagaccttcaacgagtggttcaagcacatgaacagcgtgccccagaagcccgccctgatcccccagcccaccttcaccgagaaggtggcccacgagcacaaggagaagaagtacgagatggacttcggcatctggaagggccacctggacgccctgaccgccgacgtgaaggagaagatgtacaacgtgctgctgttcgtggacggcggctggatggtggacgtgagagaggacgccaaggaggaccacgagagaacccaccagatggtgctgctgagaaagctgtgcctgcccatgctgtgcttcctgctgcacaccatcctgcacagcaccggccagtaccaggagtgcctgcagctggccgacatggtgagcagcgagagacacaagctgtacctggtgttcagcaaggaggagctgagaaagctgctgcagaagctgagagagagcagcctgatgctgctggaccagggcctggaccccctgggctacgagatccagctgtag

SEQ ID NO: 91706 - DNA, 2691 bp, synthetic construct
  misc_feature 1..2691: note = Description of Artificial Sequence: Synthetic coding sequence
  source 1..2691: mol_type = other DNA
atgaagatcctggtgatcctgcaccaggagaccagactgagcctggagctgctggcccacttcgacagcctggtgctgagcaccaacctgctgttcatcgtgacccccaccagcagaagcctgctgagacagcccgacatcagctgcatcctgggcaccggcggcaagagccccagactgacccagagcagcggcttcttcggcaacctgagcatggtgaccaacctggacgacagcaactgggccgccgccttcagcagccagagaagcggcctgttcaccaacaccgagccccacagcatcaccgaggacgtgaccatcagcgccgtgatgctgagagaggacgaccccggcgaggccgccagcatgagcatgttcagcgacttcctgcagagcttcctgaagcacagcagcagcaccgtgttcgacctggtggaggagtacgagaacatctgcggcagccaggtgaacatcctgagcaagatcgtgagcagagccacccccggcctgcagaagttcagcaagaccgccagcatgctgtggctgctgcagcaggagatggtgacctggagactgctggccagcctgtacagagacagaatccagagcgccctggaggaggagagcgtgttcgccgtgaccgccgtgaacgccagcgagaagaccgtggtggaggccctgttccagagagacagcctggtgagacagagccagctggtggtggactggctggagagcatcgccaaggacgagatcggcgagttcagcgacaacatcgagttctacgccaagagcgtgtactgggagaacaccctgcacaccctgaagcagagacagctgaccagctacgtgggcagcgtgagacccctggtgaccgagctggaccccgacgcccccatcagacagaagatgcccctggacgacctggacagagaggacgaggtgagactgctgaagtacctgttcaccctgatcagagccggcatgaccgaggaggcccagagactgtgcaagagatgcggccaggcctggagagccgccaccctggagggctggaagctgtaccacgaccccaacgtgaacggcggcaccgagctggagcccgtggagggcaacccctacagaagaatctggaagatcagctgctggagaatggccgaggacgagctgttcaacagatacgagagagccatctacgccgccctgagcggcaacctgaagcagctgctgcccgtgtgcgacacctgggaggacaccgtgtgggcctacttcagagtgatggtggacagcctggtggagcaggagatccagaccagcgtggccaccctggacgagaccgaggagctgcccagagagtacctgggcgccaactggaccctggagaaggtgttcgaggagctgcaggccaccgacaagaagagagtgctggaggagaaccaggagcactaccacatcgtgcagaagttcctgatcctgggcgacatcgacggcctgatggacgagttcagcaagtggctgagcaagagcagaaacaacctgcccggccacctgctgagattcatgacccacctgatcctgttcttcagaaccctgggcctgcagaccaaggaggaggtgagcatcgaggtgctgaagacctacatccagctgctgatcagagagaagcacaccaacctgatcgccttctacacctgccacctgccccaggacctggccgtggcccagtacgccctgttcctggagagcgtgaccgagttcgagcagagacaccactgcctggagctggccaaggaggccgacctggacgtggccaccatcaccaagaccgtggtggagaacatcagaaagaaggacaacggcgagttcagccaccacgacctggcccccgccctggacaccggcaccaccgaggaggacagactgaagatcgacgtgatcgactggctggtgttcgaccccgcccagagagccgaggccctgaagcagggcaacgccatcatgagaaagttcctggccagcaagaagcacgaggccgccaaggaggtgttcgtgaagatcccccaggacagcatcgccgagatctacaaccagtgcgaggagcagggcatggagagccccctgcccgccgaggacgacaacgccatcagagagcacctgtgcatcagagcctacctggaggcccacgagaccttcaacgagtggttcaagcacatgaacagcgtgccccagaagcccgccctgatcccccagcccaccttcaccgagaaggtggcccacgagcacaaggagaagaagtacgagatggacttcggcatctggaagggccacctggacgccctgaccgccgacgtgaaggagaagatgtacaacgtgctgctgttcgtggacggcggctggatggtggacgtgagagaggacgccaaggaggaccacgagagaacccaccagatggtgctgctgagaaagctgtgcctgcccatgctgtgcttcctgctgcacaccatcctgcacagcaccggccagtaccaggagtgcctgcagctggccgacatggtgagcagcgagagacacaagctgtacctggtgttcagcaaggaggagctgagaaagctgctgcagaagctgagagagagcagcctgatgctgctggaccagggcctggaccccctgggctacgagatccagctgtag

SEQ ID NO: 91707 - DNA, 3471 bp, synthetic construct
  misc_feature 1..3471: note = Description of Artificial Sequence: Synthetic coding sequence
  source 1..3471: mol_type = other DNA
atgttccccgccgcccccagccccagaacccccggcaccggcagcagaagaggccccctggccggcctgggccccggcagcacccccagaaccgccagcagaaagggcctgcccctgggcagcgccgtgagcagccccgtgctgttcagccccgtgggcagaagaagcagcctgagcagcagaggcacccccaccagaatgttcccccaccacagcatcaccgagagcgtgaactacgacgtgaagaccttcggcagcagcctgcccgtgaaggtgatggaggccctgaccctggccgaggtggacgaccagctgaccatcaacatcgacgagggcggctgggcctgcctggtgtgcaaggagaagctgatcatctggaagatcgccctgagccccatcaccaagctgagcgtgtgcaaggagctgcagctgccccccagcgacttccactggagcgccgacctggtggccctgagctacagcagccccagcggcgaggcccacagcacccaggccgtggccgtgatggtggccaccagagagggcagcatcagatactggcccagcctggccggcgaggacacctacaccgaggccttcgtggacagcggcggcgacaagacctacagcttcctgaccgccgtgcagggcggcagcttcatcctgagcagcagcggcagccagctgatcagactgatccccgagagcagcggcaagatccaccagcacatcctgccccagggccagggcatgctgagcggcatcggcagaaaggtgagcagcctgttcggcatcctgagccccagcagcgacctgaccctgagcagcgtgctgtgggacagagagagaagcagcttctacagcctgaccagcagcaacatcagcaagtgggagctggacgacagcagcgagaagcacgcctacagctgggacatcaacagagccctgaaggagaacatcaccgacgccatctggggcagcgagagcaactacgaggccatcaaggagggcgtgaacatcagatacctggacctgaagcagaactgcgacggcctggtgatcctggccgccgcctggcacagcgccgacaacccctgcctgatctactacagcctgatcaccatcgaggacaacggctgccagatgagcgacgccgtgaccgtggaggtgacccagtacaacccccccttccagagcgaggacctgatcctgtgccagctgaccgtgcccaacttcagcaaccagaccgcctacctgtacaacgagagcgccgtgtacgtgtgcagcaccggcaccggcaagttcagcctgccccaggagaagatcgtgttcaacgcccagggcgacagcgtgctgggcgccggcgcctgcggcggcgtgcccatcatcttcagcagaaacagcggcctggtgagcatcaccagcagagagaacgtgagcatcctggccgaggacctggagggcagcctggccagcagcgtggccggccccaacagcgagagcatgatcttcgagaccaccaccaagaacgagaccatcgcccaggaggacaagatcaagctgctgaaggccgccttcctgcagtactgcagaaaggacctgggccacgcccagatggtggtggacgagctgttcagcagccacagcgacctggacagcgacagcgagctggacagagccgtgacccagatcagcgtggacctgatggacgactaccccgccagcgaccccagatgggccgagagcgtgcccgaggaggcccccggcttcagcaacaccagcctgatcatcctgcaccagctggaggacaagatgaaggcccacagcttcctgatggacttcatccaccaggtgggcctgttcggcagactgggcagcttccccgtgagaggcacccccatggccaccagactgctgctgtgcgagcacgccgagaagctgagcgccgccatcgtgctgaagaaccaccacagcagactgagcgacctggtgaacaccgccatcctgatcgccctgaacaagagagagtacgagatccccagcaacctgacccccgccgacgtgttcttcagagaggtgagccaggtggacaccatctgcgagtgcctgctggagcacgaggagcaggtgctgagagacgcccccatggacagcatcgagtgggccgaggtggtgatcaacgtgaacaacatcctgaaggacatgctgcaggccgccagccactacagacagaacagaaacagcctgtacagaagagaggagagcctggagaaggagcccgagtacgtgccctggaccgccaccagcggccccggcggcatcagaaccgtgatcatcagacagcacgagatcgtgctgaaggtggcctacccccaggccgacagcaacctgagaaacatcgtgaccgagcagctggtggccctgatcgactgcttcctggacggctacgtgagccagctgaagagcgtggacaagagcagcaacagagagagatacgacaacctggagatggagtacctgcagaagagaagcgacctgctgagccccctgctgagcctgggccagtacctgtgggccgccagcctggccgagaagtactgcgacttcgacatcctggtgcagatgtgcgagcagaccgacaaccagagcagactgcagagatacatgacccagttcgccgaccagaacttcagcgacttcctgttcagatggtacctggagaagggcaagagaggcaagctgctgagccagcccatcagccagcacggccagctggccaacttcctgcaggcccacgagcacctgagctggctgcacgagatcaacagccaggagctggagaaggcccacgccaccctgctgggcctggccaacatggagaccagatacttcgccaagaagaagaccctgctgggcctgagcaagctggccgccctggccagcgacttcagcgaggacatgctgcaggagaagatcgaggagatggccgagcaggagagattcctgctgcaccaggagaccctgcccgagcagctgctggccgagaagcagctgaacctgagcgccatgcccgtgctgaccgccccccagctgatcggcctgtacatctgcgaggagaacagaagagccaacgagtacgacttcaagaaggccctggacctgctggagtacatcgacgaggaggaggacatcaacatcaacgacctgaagctggagatcctgtgcaaggccctgcagagagacaactggagcagcagcgacggcaaggacgaccccatcgaggtgagcaaggacagcatcttcgtgaagatcctgcagaagctgctgaaggacggcatccagctgagcgagtacctgcccgaggtgaaggacctgctgcaggccgaccagctgggcagcctgaagagcaacccctacttcgagttcgtgctgaaggccaactacgagtactacgtgcagggccagatctag

SEQ ID NO: 91708 - DNA, 675 bp, synthetic construct
  misc_feature 1..675: note = Description of Artificial Sequence: Synthetic coding sequence
  source 1..675: mol_type = other DNA
atgttccccgccgcccccagccccagaacccccggcaccggcagcagaagaggccccctggccggcctgggccccggcagcacccccagaaccgccagcagaaagggcctgcccctgggcagcgccgtgagcagccccgtgctgttcagccccgtgggcagaagaagcagcctgagcagcagaggcacccccaccagaatgttcccccaccacagcatcaccgagagcgtgaactacgacgtgaagaccttcggcagcagcctgcccgtgaaggtgatggaggccctgaccctggccgaggtggacgaccagctgaccatcaacatcgacgagggcggctgggcctgcctggtgtgcaaggagaagctgatcatctggaagatcgccctgagccccatcaccaagctgagcgtgtgcaaggagctgcagctgccccccagcgacttccactggagcgccgacctggtggccctgagctacagcagccccagcggcgaggcccacagcacccaggccgtggccgtgatggtggccaccagagagggcagcatcagatactggcccagcctggccggcgaggacacctacaccgaggccttcgtggacagcggcggcgacaagacctacagcttcctgaccgccgtgcaggtgcacaaggagaccaagagcggctag

SEQ ID NO: 91709 - DNA, 3207 bp, synthetic construct
  misc_feature 1..3207: note = Description of Artificial Sequence: Synthetic coding sequence
  source 1..3207: mol_type = other DNA
atgttccccgccgcccccagccccagaacccccggcaccggcagcagaagaggccccctggccggcctgggccccggcagcacccccagaaccgccagcagaaagggcctgcccctgggcagcgccgtgagcagccccgtgctgttcagccccgtgggcagaagaagcagcctgagcagcagaggcacccccaccagaatgttcccccaccacagcatcaccgagagcgtgaactacgacgtgaagaccttcggcagcagcctgcccgtgaaggtgatggaggccctgaccctggccgaggtggacgaccagctgaccatcaacatcgacgagggcggctgggcctgcctggtgtgcaaggagaagctgatcatctggaagatcgccctgagccccatcaccaagctgagcgtgtgcaaggagctgcagctgccccccagcgacttccactggagcgccgacctggtggccctgagctacagcagccccagcggcgaggcccacagcacccaggccgtggccgtgatggtggccaccagagagggcagcatcagatactggcccagcctggccggcgaggacacctacaccgaggccttcgtggacagcggcggcgacaagacctacagcttcctgaccgccgtgcagggcggcagcttcatcctgagcagcagcggcagccagctgatcagactgatccccgagagcagcggcaagatccaccagcacatcctgccccagggccagggcatgctgagcggcatcggcagaaaggtgagcagcctgttcggcatcctgagccccagcagcgacctgaccctgagcagcgtgctgtgggacagagagagaagcagcttctacagcctgaccagcagcaacatcagcaagtgggagctggacgacagcagcgagaagcacgcctacagctgggacatcaacagagccctgaaggagaacatcaccgacgccatctggggcagcgagagcaactacgaggccatcaaggagggcgtgaacatcagatacctggacctgaagcagaactgcgacggcctggtgatcctggccgccgcctggcacagcgccgacaacccctgcctgatctactacagcctgatcaccatcgaggacaacggctgccagatgagcgacgccgtgaccgtggaggtgacccagtacaacccccccttccagagcgaggacctgatcctgtgccagctgaccgtgcccaacttcagcaaccagaccgcctacctgtacaacgagagcgccgtgtacgtgtgcagcaccggcaccggcaagttcagcctgccccaggagaagatcgtgttcaacgcccagggcgacagcgtgctgggcgccggcgcctgcggcggcgtgcccatcatcttcagcagaaacagcggcctggtgagcatcaccagcagagagaacgtgagcatcctggccgaggacctggagggcagcctggccagcagcgtggccggccccaacagcgagagcatgatcttcgagaccaccaccaagaacgagaccatcgcccaggaggacaagatcaagctgctgaaggccgccttcctgcagtactgcagaaaggacctgggccacgcccagatggtggtggacgagctgttcagcagccacagcgacctggacagcgacagcgagctggacagagccgtgacccagatcagcgtggacctgatggacgactaccccgccagcgaccccagatgggccgagagcgtgcccgaggaggcccccggcttcagcaacaccagcctgatcatcctgcaccagctggaggacaagatgaaggcccacagcttcctgatggacttcatccaccaggtgggcctgttcggcagactgggcagcttccccgtgagaggcacccccatggccaccagactgctgctgtgcgagcacgccgagaagctgagcgccgccatcgtgctgaagaaccaccacagcagactgagcgacctggtgaacaccgccatcctgatcgccctgaacaagagagagtacgagatccccagcaacctgacccccgccgacgtgttcttcagagaggtgagccaggtggacaccatctgcgagtgcctgctggagcacgaggagcaggtgctgagagacgcccccatggacagcatcgagtgggccgaggtggtgatcaacgtgaacaacatcctgaaggacatgctgcaggccgccagccactacagacagaacagaaacagcctgtacagaagagaggagagcctggagaaggagcccgagtacgtgccctggaccgccaccagcggccccggcggcatcagaaccgtgatcatcagacagcacgagatcgtgctgaaggtggcctacccccaggccgacagcaacctgagaaacatcgtgaccgagcagctggtggccctgatcgactgcttcctggacggctacgtgagccagctgaagagcgtggacaagagcagcaacagagagagatacgacaacctggagaagggcaagagaggcaagctgctgagccagcccatcagccagcacggccagctggccaacttcctgcaggcccacgagcacctgagctggctgcacgagatcaacagccaggagctggagaaggcccacgccaccctgctgggcctggccaacatggagaccagatacttcgccaagaagaagaccctgctgggcctgagcaagctggccgccctggccagcgacttcagcgaggacatgctgcaggagaagatcgaggagatggccgagcaggagagattcctgctgcaccaggagaccctgcccgagcagctgctggccgagaagcagctgaacctgagcgccatgcccgtgctgaccgccccccagctgatcggcctgtacatctgcgaggagaacagaagagccaacgagtacgacttcaagaaggccctggacctgctggagtacatcgacgaggaggaggacatcaacatcaacgacctgaagctggagatcctgtgcaaggccctgcagagagacaactggagcagcagcgacggcaaggacgaccccatcgaggtgagcaaggacagcatcttcgtgaagatcctgcagaagctgctgaaggacggcatccagctgagcgagtacctgcccgaggtgaaggacctgctgcaggccgaccagctgggcagcatcaacgtgaacttctgctag

SEQ ID NO: 91710 - DNA, 3258 bp, synthetic construct
  misc_feature 1..3258: note = Description of Artificial Sequence: Synthetic coding sequence
  source 1..3258: mol_type = other DNA
atgttccccgccgcccccagccccagaacccccggcaccggcagcagaagaggccccctggccggcctgggccccggcagcacccccagaaccgccagcagaaagggcctgcccctgggcagcgccgtgagcagccccgtgctgttcagccccgtgggcagaagaagcagcctgagcagcagaggcacccccaccagaatgttcccccaccacagcatcaccgagagcgtgaactacgacgtgaagaccttcggcagcagcctgcccgtgaaggtgatggaggccctgaccctggccgaggtggacgaccagctgaccatcaacatcgacgagggcggctgggcctgcctggtgtgcaaggagaagctgatcatctggaagatcgccctgagccccatcaccaagctgagcgtgtgcaaggagctgcagctgccccccagcgacttccactggagcgccgacctggtggccctgagctacagcagccccagcggcgaggcccacagcacccaggccgtggccgtgatggtggccaccagagagggcagcatcagatactggcccagcctggccggcgaggacacctacaccgaggccttcgtggacagcggcggcgacaagacctacagcttcctgaccgccgtgcagggcggcagcttcatcctgagcagcagcggcagccagctgatcagactgatccccgagagcagcggcaagatccaccagcacatcctgccccagggccagggcatgctgagcggcatcggcagaaaggtgagcagcctgttcggcatcctgagccccagcagcgacctgaccctgagcagcgtgctgtgggacagagagagaagcagcttctacagcctgaccagcagcaacatcagcaagtgggagctggacgacagcagcgagaagcacgcctacagctgggacatcaacagagccctgaaggagaacatcaccgacgccatctggggcagcgagagcaactacgaggccatcaaggagggcgtgaacatcagatacctggacctgaagcagaactgcgacggcctggtgatcctggccgccgcctggcacagcgccgacaacccctgcctgatctactacagcctgatcaccatcgaggacaacggctgccagatgagcgacgccgtgaccgtggaggtgacccagtacaacccccccttccagagcgaggacctgatcctgtgccagctgaccgtgcccaacttcagcaaccagaccgcctacctgtacaacgagagcgccgtgtacgtgtgcagcaccggcaccggcaagttcagcctgccccaggagaagatcgtgttcaacgcccagggcgacagcgtgctgggcgccggcgcctgcggcggcgtgcccatcatcttcagcagaaacagcggcctggtgagcatcaccagcagagagaacgtgagcatcctggccgaggacctggagggcagcctggccagcagcgtggccggccccaacagcgagagcatgatcttcgagaccaccaccaagaacgagaccatcgcccaggaggacaagatcaagctgctgaaggccgccttcctgcagtactgcagaaaggacctgggccacgcccagatggtggtggacgagctgttcagcagccacagcgacctggacagcgacagcgagctggacagagccgtgacccagatcagcgtggacctgatggacgactaccccgccagcgaccccagatgggccgagagcgtgcccgaggaggcccccggcttcagcaacaccagcctgatcatcctgcaccagctggaggacaagatgaaggcccacagcttcctgatggacttcatccaccaggtgggcctgttcggcagactgggcagcttccccgtgagaggcacccccatggccaccagactgctgctgtgcgagcacgccgagaagctgagcgccgccatcgtgctgaagaaccaccacagcagactgagcgacctggtgaacaccgccatcctgatcgccctgaacaagagagagtacgagatccccagcaacctgacccccgccgacgtgttcttcagagaggtgagccaggtggacaccatctgcgagtgcctgctggagcacgaggagcaggtgctgagagacgcccccatggacagcatcgagtgggccgaggtggtgatcaacgtgaacaacatcctgaaggacatgctgcaggccgccagccactacagacagaacagaaacagcctgtacagaagagaggagagcctggagaaggagcccgagtacgtgccctggaccgccaccagcggccccggcggcatcagaaccgtgatcatcagacagcacgagatcgtgctgaaggtggcctacccccaggccgacagcaacctgagaaacatcgtgaccgagcagctggtggccctgatcgactgcttcctggacggctacgtgagccagctgaagagcgtggacaagagcagcaacagagagagatacgacaacctggagaagggcaagagaggcaagctgctgagccagcccatcagccagcacggccagctggccaacttcctgcaggcccacgagcacctgagctggctgcacgagatcaacagccaggagctggagaaggcccacgccaccctgctgggcctggccaacatggagaccagatacttcgccaagaagaagaccctgctgggcctgagcaagctggccgccctggccagcgacttcagcgaggacatgctgcaggagaagatcgaggagatggccgagcaggagagattcctgctgcaccaggagaccctgcccgagcagctgctggccgagaagcagctgaacctgagcgccatgcccgtgctgaccgccccccagctgatcggcctgtacatctgcgaggagaacagaagagccaacgagtacgacttcaagaaggccctggacctgctggagtacatcgacgaggaggaggacatcaacatcaacgacctgaagctggagatcctgtgcaaggccctgcagagagacaactggagcagcagcgacggcaaggacgaccccatcgaggtgagcaaggacagcatcttcgtgaagatcctgcagaagctgctgaaggacggcatccagctgagcgagtacctgcccgaggtgaaggacctgctgcaggccgaccagctgggcagcctgaagagcaacccctacttcgagttcgtgctgaaggccaactacgagtactacgtgcagggccagatctag
